United States Patent Application Publication US 2018/0305689 A1 - sequence listing, part 45

SEQ ID NO: 588522 - DNA, 4001 bp, Homo sapiens
atctcaaaaaaaaaaaaaaaatacagatatgactacagggaaacacaggctcaggggaagaggtgtgtcctactctgccactcaaggccactgaccgttcctgtcccaggcttcagagcagagtccaacaaagaaatagcaccacccaggtgcacacacgggcatacacacagccagccagttggttgcccaactgctccagctcgggggaagaagagaaggagactagcaaacagtaattagcctcctcccagatgccagtgtctgtctctaagtccccagggacttccaaggagatgccggaaatactcaggtttttcacctcccccatgcaagaatgcaaggtgtggagcagaatttgatcctaaatgtcaatacacagctcctcccataggcacttcccacacggtgctagctcagggcctcattctcagtgccctctgcccccagctgcctaagcttgtcagccctagctggtctggaacagactcttattccctttctctcagtctacaatgacttagctttcctccccattcctatatagatacagcttagaaaacacctcctggaaaatgcagccagtggcctttaggtgatgccctcaagctgagcagaacccaaagaaggctttaggtggctcagatcacacctgtgagtttatattcattcattcaagataaccaaagccctattctgggcaccaaggaaataaggagagagagggtcagtatctgaagaggagagagacttcctcatcctcaaaactttcatatgaagtcagcctatctcatgagccctggaggcaggaagaggccaccaaggtggattcaaaagccctttccgacagttatgttttgagaatcttaattttctgggatctgaagttctttgatgaaagacagaagcccacaggcctgggcacccacccaccccaggcaccatgatagtgtcccaaatgtcaccacagcatccagttctatcaacaatgtggaacagcagacatagctgcagtgtccattttacaggtgaggaaacgtggcccaaacagaaaaaggaacttgtctgaagttagccaggtatcaaggctgcctggatctaaaatcccagcccagctctccacagtgtaagttttaggagatgggagataatgatctgacctggctgcctgaatgcagtagcagaaaggagccctggggctgagctggtgggaccagcttccatcagatggacatggcatggtgaggcctgtctttccaagggctggtgctgctgcttgctccacgcggaccacgaagaccacgagggcagcaaagagggcaattttaatggcatctggtaccggggctttgggggaggaagtctgtggttccggtgttaacagtggtgccagagacctctgtaatctgccgcctccgccaggtggagtctgggctctgcccctgctgagcctctccccaccggacactcaacctcagccttggctgccacagctagtctggtctgagggggagggccccgcccgactcaactgaggggaggccattccaagtagaatcgttagttggacacagttcccggggggatggaaatgtcaaaggcaactcgatccggcccatctccctctcctgccaggcgacggtatccgcggggatcgagtgactgcctacatagcctggaatactccacagccgccctccctaccccgccctgaaggctatactgtccgaaggggccgaccgaggtcaagggacctgtcgccccgcgggaatcgcggccgtgggatgggcccaggtgttcaggctcgctccacccattcatcggtgggagcgaaagttcaggaatcgtgctccttcagcagccccccgccccccacagccctcccgctgggctcacccattgcagttacagcccggcagaagcgggggtgaaagagcttcccgccgatcccctgcgcttgaaccagagtgaagctgccgccgcgccgcgcggggctctgtctggcagggcacagcccctcctcgggtcccgccctggggttcctcggccacgccccagtcatccagtctcgtctcgggcctcagagtccagccctgcccttgacgttcgacccctcctcccaggttatcaggcggatctgtggccccgcccctcagccccaccttcctcccaccgctctgtgctctgcccctggcatttcaggcttgctcagtcctgcgccccgcggctccgactcccgccggcgggcccgcccctcctgggccactgctaacccgcaagcgggcggggctcggccccaggcctgctgggacatgtagttctgcagaaaggagcagctgcggaaggttggggttcttgcacctctaggctaggtttggaatgaggatgagagggagagagctgcagggtaaaggagcagagctggccattggaattccttccttcccggtttggacaggtggaggccatatcggtataacgctctcacaagccctcagctttccatacggaaaagtggtggcggaattccgcgagtatctcagctcccaatgcaggtgcttccaatcgagggccccacggagggagctgtagttccaacccgccgcgagtccaagctgtcggttcccaccggaccaaaccagcggtgtccgaggtcagggactgagaagaccggtttctgctcggtgttttgcaacgtcacccgcctcccagaccgctacccccagactagttatttatagggtccagcccctcctcctaagttacagcctttagttagaaatgcccaagctgcgggaaagtgggtgtgccccgccatgcccctctccccgggggctgggcaagactctgaggtttcatttcttttttattttattttatttttatatttatttatttttgagtttcgttcttgttgcccaggctggagtacaatggcacgatctcagctcactgcaaactccgcctcccgggttcaagcaattctcctgcctcagcctcccaagtagctgggattacaggcacgcaccaccgcgcctggctaattttgtatttttagtagagacagagtttcaccatgttggtcaggctggtctcaaactcctgacctcaggtgatctacctgcctcggcctcccaaagtgctgggattacaagtgtgggccaccgcgtccggtctttatttttttgagagagggtctcgctctgtcgcccaggctggagtgcagtggcgttaacatagctcactgcagcctcaatgtccttggttcaagctatcccctcccgcctcaggctcctgagtaacttggaccacatgtgtgtgccaccataccctgctaatttttaaatttttttgtagagaaggggtctctttatgttgccccagctggtatcgaattcctgggctcaagtgatcctcctgcctctgcctcccaaagtggtgagattacaggtgtgagcctctgcacccagctggtttcatatctatttgatgcagaaataaaaatactgaagatcacagagattttagaatggccccttctcgctccctgaggggcagagaaacagggctttgttttgcaacttgaaatttctttgtcatgagaccctccaaaattatgttttgaccagttggacttggaatgggggacacaccttgtgcagcaagggtgtctgagcacagagaggcttttgggaggctgtgatggggactcctggaagcagagatcaagagctttgggtgtagggataggtctttgactgtggaaggaaggattctgggtcctctgatgagtgggagggcatctaagtttgggagcatactgaagaaatgttagctggagggtcttcgtggggtggaaagtagatggctcctgcctgcattgcagggtggacccatccgtttgggctctgggattcaggggaggaggatagcagctggatataaggctactgttctgtgtcaggagggcactcagggatgtactgagatgatggggttgg

SEQ ID NO: 588523 - DNA, 4001 bp, Homo sapiens
ttggcttgatcactgctaggttttaagtaatgtgtgtacaaatctacgctccaggcatttacaaaattaggcatgcaataatattaatctgtttaactgggacaagaatctagataaatttttctcctagaaaaaagcactattttaagcatactaaactttttataatgacaaaaatcagtttgtctttaaaaaagtgcattaaattgtacactgtttactaattttcaaaccttaatgaaaatttaaatacataattttccacgtttttccttcaagtttagatgataatgctttttgtttttttaggaaaacctctattttttacatatgactgtccatataattgtatgcatggcccccaaaactgcttcttcgtttttttaatctcctgggtaactgtcagacttaactttgtcaatataaattctcacagggtgggcaaaaaagagtttccagaacggagcagtagattgagattgatacaggcataaatccatacctgcgtattaaaaatctgaatctgtaaaattaattttctgggtgcttattcaacctcatttattatttgagtatctacaatacacagcaaccgttcatgaagaaacttagctagctaatcaaataagacaattcagaaacatcaccctacagtatttttcaaaacactgtatccatatccatgcacaacccaatcgttgggttatatacgtggaataaaatagtaaaggcacaatcctagaggggaaactcaattctgacattcatggtctcatgggtagggaaagatctcatatcttaaatcagcagaaataaaggcttcagcctgaagggaaagctagatcattgtttattgcactccaatttaacctccaccatggaagctgtcactacctgactggcttgttagctgtttatttcgtcgggagaggattccgtcttgcgaatcctaacgagttcgggaaaaaacaaaactttactcctaaacttcaaaacacacacacacacacacacacacacacgcacacacactaaatacatataattgtaaaaatcacagccacgttcattttttttaaagtcccaatctaaaaccttaaagaaaaaaaaagacttgaaggaaccaaaaacattctttgattttggtttgacgttgttcagtccaacctcctcctacccaggggaatacatttctcgatatatttgataacaaacacaaatcactgtgcgcagcctcagatgggggtgggggggcggaagagccttttggagaaagccctcctccgttagaaacaataaataagggagcgaagccatgcacgttccttcacacacgccccaaacgcacctcggcgagccacccgaggaggaaaactagtggggcagagccctgaaccacctctctttctccataagcatctcaagacttggaaactaagaggacagaccttttcctcctccttcccgccctccttcccacctccgacagacccaagagcaggagcgggggcgccagccccacgcactgcgcctgcagccgccgctgagacccgagctgccgggcggcggggcggcccggggcaggcggaccggagccgccaccgggggtctctgcgcctcgcacccccaagcccggcgctgccgacgagcggccgcccgggtccctgccctcgctccggcctcgctcccccgagaggagacaaaaggaaggttcagccgggtcaccgcgcggccgctgacggggaagcagagtcgaccccggcgcggccgccccccacacaaaggggctccccgcctgggtcgcggcgtcggcgcactcgtccccgccccgcgcgcgggctctcacccacctgcaggtgtctgtgcgtctgtccataggaacgcggtcggcgcgggggggcctgcgagagccgggcagcccgggctggacgggacgggccgaaggggcgcgagggcgggaggagagcggccagagggccgggcaccaaaggtaagtggagcggggaaggcgcccggcgggcggcggaccgaggagcggggcggggggcgggggcgccagcctggctcggccgaccgccgcgcgccgctccgtgcgccccgagctccgcgcgcccggctcggagcgcggcgggcgggcagggggcggggcgcgggcgggccggggcggggccggcgagcggggcgggggctcggaccccgggctccagccggcaccggaaacgcgccgtggtcggcgagacccacaggaagtgtgtaacgacacctcctacggcacgcaccgagctcgcagtcgttgctgccccgaggaggtgtagatcgagcctcctgccgcacacacgttcgcacgcggcggccggcgcgctggaccgagaggttggagcaatccatcctccgcgcgcacgagctcagtccctactgccccgacaggtgtggaacccgccgtccccgctatggtccgaggaagtgtacagcactgctccctactacacgtcctgggcccgcggtccccgatgccccccggagctctgtgcacctccactgaaacgcaaggagcagacagaacctacaccatccgtgaggtgtgtgatttcccttataacgcattgagtagagttacctctccgcccagggatgtgcattaacactttctaccgagatactacgtacagcccatagtcaccgctgccccgtgaaggtgcccaacaaccacctgtaacacacacacccctatcccatcgagggagcggggatgcttaatgatacctaaaatacactaaaactaggtcctccagcaaaccagagacacaagaacaccacctacacgactcagcacagcaaagatgaagctggacttgctaggtgctaccaggcttggtccacctttattttacctaacactttcgtagtacttgctgtgtgcccacagtttgcactgagtacttagcgaatattaatttatttaatcctaagaactctacatagtgggtgctattaacattgccattttatgataaggaaactgaggcacagagaaattaagaaattttttcaacatcacatagatagtagctagaggagcctggattcattccggacagtctggcttcagagtctgctcttaactccctttctatttacagcactgaccatctccaaaacagtaatcatggtaataaataacatttacaccatatctgtcaggccttacgtagtgcccacatcttggcctcacctcatctgtgacaggcataccccagtcacttgtacccttggagtaggtaagggaagagaagaatatttttgagggagagaaagaagctaacttcttagcaaaggagaaaatatccagggtcgtccagaatccaagcaggtaacttcattaccacatcaagcatgttctcttttaggtagcttctgccaacccctctccatctctagagctgattccggttgatgttcttaacaccttcctctatcaacactcttccaggtctaggctgaaatttaaaatctgtgtaaatgttgacacaataatgtttgtacaaacaaaaaagaccaaaaatgaaaaccccctagttaattgctgcatattctaaagatgggatcttgtggagaaattggaactcttatgcaatgctgataggaatgtagatggtaccaccactatgcaaaacagtggggaagttcctcaaaaaactaaaactagagctaccatatgatccagcaatcccacttctgggtaaatatccaaaagaattgaaagcaggatatcgaagagatatttgcacattcatgttcattgcagcactattcacaatagccaagaggttgaagcagcccaaatgttcatcaacagatgaagagatgaatgaaaatgtgatatatacatataatggaatattattcagccttaaaaaggaaggaaatcttatcacaggctacaacatagatgaaccttgaggatgttgtgccaagtgcaataaaccagtcacaaaaggaca

SEQ ID NO: 588524 - DNA, 4001 bp, Homo sapiens
tgacaaaggttacttttaaattacagtgacaaatcaagaaccaaaaaattaacacaatttctaggagctattctgtaagagcacaagtataatgccgtttcagatatgaagtatacactcatattattcaacgactgctactacttacattaaaatggctaacacttatacttggctaactatgggagcagcactgttgatttcacatttattaactcattaaatcctcaaagcaactctatgagagaagtactattattatccccgcttgatagatgaggaaactgaggccaaaaaggttaagtgacttgctcaacttaaattcactctaatagtaaacagtcaaactactattccacttcaactaccaataccaaaaacattgaatttttccactcccgaaaaatttaaactttagaaattaacttggctgacacagactatacaattattataaaacaatacattcattttagtatcctcctcttgtgttaaataattggatatatgggtggcggataccaagagcacagtatcatctgacttgcctatgatttctggtagaataaacataaatgtataaactttaaaaaatgtgtgttgatgcattccctattattgcaaaaattgggtgtcctcagatgaaacggagagaaaagatcagtagtatgcaaaagtaaccattaaccatttagtaacactccataaatcttcgatgaccgacatgggtagtaaatgataaaattattttttaatggtttaagacacctttttacataagccaaaattatttttctagagatatttcatcctaaacgctgttttaaatgtcatgctaaaactgtctaaaagttgcaggtccaacttccatcccacaaaaactgttcctctgcctacacgtgcaattcttcctacgggacccattccattttacatctgcaaactatacccagctcttcagcgctgcagactcgggtttccttctcagtctacgcgcaagccgggttcggcccacacccaccacacccctccggtccccgcccagcgccgctcctcctcccgggcttctccagcaccgactcagcacctatcagcgccgcccccaggcccctggcccagcccatcctcgggcacgtgtgagtgtgtgtttgtgtcagtctgtcagtcccaccggggaccgggctcgcttaccgagagagaagcgctaacttctgctccagcatcatctccagcttctggccctgtttggagatccagtggtccactccgtgcaggcggtagcacgtctccagcatcaacctgaagtccgccacgaactcggtgatgcccccgtactggccgctggcgaacttctcttccatctgcagcagacacatgccctgtccgggctgctgcgggaaggcgcgaccgccccggcccccgctgcgcggcccttccgccacctcctcctccgcggtggcaacgccccccaagggctgcagaaagggggcggtgaggccccggtgcttctcctgcaggaactcgcccaggatgcggtagccctgctgtagctcgtaggtcagctcctgctccttgcagcaaccgcctccgatcaccatcgcctccatctcttcctcctgatcgtccgcgtcctccagcgaggaggcactccttccgtgggccggccctgaggtctgggccgccgctgccacctcctcctcgtcgtcctctccttcggccgccggtggcggccgctcttcctccccagccggctccatcgctcccggcgtcccgggcacactcatgccccggcaggcctaggctgggcggtgtggaacagccgctcgaggtgctgggggacgcgtgagcgcgagccgcttcctcacggctcggccgcggcgcgtagcccccgccacatcgggcctggctctcctcagccgccggctcggctcggtgcgcgcgggggtcttgagctcaccgccggcggggcggggttacatggcgcgcgaggaggggggagagaagaggagagcctaggtgccctcctctcccctcccccccggcggcggcgcgcgcacggccctcgccggcctcacccctccgcaccccgcccgcctgctcttcaccggccaggccctgccgggtcgccgcggcctcggcgccccaccccctcccgggccagcggggggctgggagggggcgaggaggaagggggttctcctctcccctccccggagggggccgcagcggcggctccggctcctcctctccctcacaccccctcccgcccccctctacctgcgggggacacgggcagaaggaggcggtgcacggacggggcccggcgacaactgtcagttagaagccccgctgggcggtgaggggggagaaaggggaggggcagggagagaagggggagggcactcagccccccggctgggaagagctgtggagagaagcaaagaaagaggccctgtcgccatccccggtgcgcatgcgtagtagaacaattcccccctccccccccgccaccatcgtgccccgccccgctacgcaaaaggaagagcttcggctcagctacaggcccagaagcctgctagggttgcgcggaccaatgatgtaatcaatcgtaggccaatcgaacatgttgatggagggggaagcaaggcgcctgcgcagcttaattcgctaccgcctgggaaggtggccaaaaggctttttttaaagcaagtgcttcaagaggaaacttcttttgcaagacccgtgttagccccccaaactaaaattaaagttgctagataacctttgttaatggcaaatgaatagtgagaaagcgcaaaatgtaaatcttctctactataaaatttacattctgttcccaccctttctcccttgtgactgcgggtcttctatatataaccagaattttgagaagtttagaaagaaagtttaaggactcgaccatacgttcacatgcagaagaaaaggaagtgatttttagaaccccagctcttaacatcaattcatattttggaactaattccatgttttcagttacaaatttccaccctcccgattcttgagatctgttaagaataaagagaatggaacctcatttaaacaaattcttgggactgaaaacagtcaaaatagttcatgtctgagttgtacagcattaaacagttgtttgcatgggctgataatctcactacattttacaattactgtttaatgactaaaaagtggactcatcattcacattggtttacatgttacttaaaattagttgggaggtaggaattcatggttccataaagcaaatactactatttcctcatgttctatttgaaagacgcacatattattttttctaggtacacagaaccctcgttaaaacctagaattacctaaacacaaaaacaaaattacagaaatcatgcattttaaaagtaaaatgtgtataactaaatgattaggatactctgactcttgcaattgtttacttctcattaatgtgaactttaaagcagtgataaaatttttttttaacctcaaagctgtttttgtccagtaagttaagtatcactcttaagtaaaatagtgaagcgggaacgctctgttagggtattcacactgtcctccacacataccttttatctagtattcgaggtctcctctcatcagacatttgtaatatataacgcatttacagggttctctcccctcagagaagagtctgtggactctgaagagtccacagaacctcagctcacagaaagaaaaatgcagggatcagtcttacttcagcacctggcaaccaaaacgtgtgtctgactagacattcctcctttctttcgacaaagcccaggaatctgaagcccaacgtacccaagcaaacatcctctactcctctttagtcatcagctctatttcatgactcttggacaatattagcttacattattgaaccctgtgccactaagcactttatattcattgtctcctttaatctcacaacaagc

SEQ ID NO: 588525 - DNA, 4001 bp, Homo sapiens
aggccctgggctagagaggagagggtgtgaaaggagtttggaaggcagaattagcaggccttgttggcagtgcggggaggcccttgggccatgcctttgaattgtggtttactggtccttccccacctcccccaggaatcatttctgaagctgcagctgcagtctgggccccaagtccacactcagtgaacaactgaggaatgggcacccctacccgcaaaactccccgctgtcagcacacacccgtttgcaaaagttccatcagggcctccagactcccaaattccaccacccgcagctgctccacatagaagccccgagtcttgttccagcgaacagggaggggccggggagaccccaggctcagcaagtcccgaacctgggaggggagggaggagggtgagggaaggggatctttctgagtccacccatccccagatcttactgacaacagtccccaccgcctcttctgtcctttgatccaggctccctggaaagaagcgctccgtttcctcatgggctgtctttctattcctctcattcccttacctgctcattgtagatctccagataagaggcgcgaagggtgacaggggcacccaggtgctgcacgcggtccaacagccaggcgaaggtcctctgcatgatgccagccaggctggggggtacaggcaccccctccccctaggggcaaaaccagctgagccatcgtcatctccacagtaataactaccctctgtagcgcatgtatgataccgtgcgccgggaaacgtgccaagttcccaaacaatggctcatttaattcatagtcggtactgtcacttccattttacagatgagaaaactgagagctaggaaggggccaaagttgaagcccaaatgctccaaattgggcaagtcccttctctttggtcctcagcgtcctcgtctgcaaacaagcgggtcaggcggcgtcgtcccagccccttccctctgggagtctgcgccgcctgcggctccccagggcttccagcccacccagccccgccccgcgggggcgccgccggcgctcgctcacctggggagggggtccagtcagggtgtaggtcttcccagagcccgtctggccaaaggtgaaaacagtgcaggagaaactgcgggcggcaagggcgtggctggactccggcggctacccggggtgggggctgggggtgcttcggggccccgccaggcccggcgcggagcggaggcgaagcttcactcacccgcgcagcgccagctcccccaggcgccgcacgccgcacgcccggaacacgtcctcctgcgtgcgcgccgcgtctagcaccgcaccgaagcggaacgccacttctggacccccgcctggaggactcacctggcgcgggtggggcggaggagcggggcactctggaggagggcggggcaccctggaggggcggggcaccgtggaggagggcggggcacgcgggaggagggcggggcactctggaggagggcggggcaccctggagaagggtagggcgctcggtgaggcactcggtgggcgagcaccctgggttgggggtggggtgggggacactcactagggccggggcattctggggagggtaggacaccctggaggggcggggcattctggggggggcgggcaccttgggtgggcgggcactcagaaggggcggggcactcgcaggggttggcgcggcgcaccctggcggagggctgggcatcctggaagggaggggcactctggggagggcggggcacctgggagaggaccactccgggggagcgcggggcctagggcaaagttgcctgggggaagggatctggcgtccccgggattttttattggggagatagagagaggggttcctcacctgcagagtccgggtccctgagcagtgcagcacgctctgctgccctcgacgcagctcggccgcgctcatgggacgtaccctggggtccgacagaagggcagatggtacatcctgatgtcttcctcgatccttgtctcgcccaggtgcctcctagccaatttatacccacctgagcaccacctggatgggcgtttccggcccctctggcccttgctccaggctccgcgcgagatccctgtgggcagcaatgcgacttatcatacctgcacctagcggctgttcaggactcctcgaacctgtctgaagatctgcttacccgtcgggtgacccgcgttcttccatgtcctgctctgcacacggagttagctccgcccgcgtctcctttatttaccccccaccaataccctcccttctccacaacactgggactgtctacacacatcttgcattcccaccccatcccccatcccaggcagccatccatccggaaagactccagctgcccagggctagctcgttaaagatttacccttcctcacccctgcggtggagaaagtctctcccaagctaggggacccctagctagggggttctggagtctgaggatcccttgctcttggccagtcctcacaagaggaacccgtgggaccacccagaccggcctcctttgtgcccagttggggatacctaagcagataggaaggactcaaccaaggccacagagctagcctgcacaggaccaagcttttcccaccctctccacataccccccactcccacccccagcagctcagctcagggcccaaggagtggcacaggtctcagtcagctctagggacgacctggctggattgaatctctgagctgacctgagaacaggtttccaagcatctggtaaaacactggggcacctgcctctctaatgccaaagttaatcctaggccagcatgattgtttaaccctctcctggtctggcttatgagaacagcagagatgtctgtgaatgtgcagggatggggcaatcacttattctgtaccagtctccatgctgggcaccagggcagaggaaccccatgcagcccctgacccttcccagctcacagtgtgtctggggagatggataagtacaacccagcagcgtgtagggcctttagggggagtacagaggcctgtaggagccagtgggggtggggaggaggtgagggtattccaggcaaagcaaacaggagtcaggatggccagggtggggtggggagatgagtgtggcatggagaggtagtttgaggctggatctagcttatggtgggcacatcaaggagtctggactcactcttcagggaaccaggaagccattgaagggttataaacagggatgtgacaccatcaggttggcattgttattattattgtcattctggctgtctttgtatgttctctgaatatttctgcaaactctccggcccccaaacacacattagggtgaaagccctaaaaatcactttttctcaatgtgacacattctataccaccacaaattacagccaactatcaaagccaccctgctggagaatgggctgtcttggatggcagtgagctccccaggcaatggagatgtataagaaagagccatttgaccttttggttataggaccctctagcaggggccacagggaaagttctgtagaactaataaccactgcccccagctctgccactaacttgccacagtcttggcttctcttgtttccttcctgtaaaaagagattaatgacttctctcctatttgacatagttgttctgagatttcaatgagatgtgtcattgaaagtgaaagttgtaaataattacctaaaaacaaaaataaaaattcctagatgatctctaagttccctttcaactctgaagttccttaatctattttttgagtccttgaggtggataagacaaaaattactatccctgtttttcagaggaaaaaaaactgaactaaacagcgaaaggcagggaaagttatctaaggagaaaacaacaaatggcagaactgagagtttaaacccagaactatgagctgtacatcctgatgctgcttgctatggcaagttgcttttgtcaggagtaaaccca

SEQ ID NO: 588526 - DNA, 4001 bp, Homo sapiens
taacaaaatgtgttgaggatctacactgtgcaaattataaactggtttgctgagccagcatagggaaactggattaatatatcaggcatcatagaatactagatctggaagggatctagaagagttcagcccctcactttacgacaaaagagcagcccagagaaagaaactgtggttctccctaaactaaaaactgagaggctcataccttaggttgccccaaggacacactctgaataactaaagattttcattaacaatataaaaccacaaattttaaataaaatgctatcttagcagtaatgtgctacactaagaaaaatgtaatatgcatataaagccctggatacagtgctttgtacggggtgaacactcaataaatggtaactactactttcagcagctaaaaaaaaagtctgtatggtctttggaaggctgagagtgtgtggtctacctgacatcaactacttgacttgagagtagagccacaggaattttaatctaattcaattctttgattttccagatggaaaaaatgaggtctaaaggggctagattcaggcgttcaaggctgcggtgagctattatcatgctagtgcactacagcctgggtgacagagcaagacattttctctaataaaaaaaaaataataataataataaagggactaaatgacttgcaaagccacccacagtgaattagagacagagacagagccaaagccaaacccacatgtagtgggtttccactacatgtcacagctataaggtagtgtttcaaacttttataaaagggtaacaagaacatagctgctgtactgaactttttcactccttttattaaggccaccagtgagctatgaatttgatataaggagcaatcacaccaacaatcaggctgtgaatatataatccatgagttaacaacgaaacagtcttaggaacgcaattctatcatagacacctgatgaatagatggagttcacctgagcagctgttatatgcacttcaatagagagactacaaagcctctctacttgtagaatacaagtacaaagaagatgctttaaaacattttccaaagcacacttaaaatgtgacaatagctgccggtcactaagaagctaaagggagataaattatcttggcatacagcaacagaatggtttattttaagcaaagactaaaaggagtctaataaaattattgggagaccaaggctaaaagccacagatgcaggaagagttgcagcaaccaatccaaaaaagtttagcctttcacaaagagtagaaaggccagctgtggactgtgtgtggacttttaggtccttttgcattgaagattagggtggcctccccctagcctcgaaataaaaaatcgtctctgaagcagagagacaacaaggcagggcatgaagaggaatccaatctatttcttgtaaattaaattcaactcaacaaatatttcctgaaaatctactatgtgcaagacattgtgaacgatgcttgccttacctcaaaggcttcaaaattttatgggaaaagggaagcgaacgggcttcccggaagtaaacaacccaagggcgaatagaaatgccctaaaagaggtgccggtcaggcttatcggttcaaaagcaagaaggctttgggactcaagagtttagtctcccaaagtgagagaagtggcgttcaagataattgctgaagaaaaggcagagatatggggatgaaagataggaaagtaggtgaactttaggaagagccaagaggggccaactctcggttccctcacaactgccagtttcctcccgcgctcagccgacgtcacgcgcacccgtgtccgcgggcaggcgccacggttccggaccagacctacccctcctctattctccccgccctttctcacctcggtccaaactcctcggtctgccctgtctgagaagaggagaagacaatgccgtcgggagtgagccccaaagcccgcaacctaacagtcccgtcaacccgggagccaccggcggcggccaggccgcatctccatggcaacgccgccaagcgccagttcgaacgcccgcgctgtggcccgcgcgtcgccagtcccgcaccgcccaccaatgggcatccaaggaatcggttgacgttcgttgacttctcctctggaagaccaatcagaggtctgaagaaaccgtgggcgtaactctcaatttccgaccttcagccaatcgttccgcttgagggaagatctcgcgacgtttcagtgtgagacgcgcacctttgaggcgggtcgaagatccttctgccgaattctattgatgggcccaagcgtaaccaggctcttctgattggccggtgtacttcagtttccgtccaaggtccgcctcctacctccttctgcttcgggtgagtacccttaagggcccacttgattttagttctcagtggaggaaatgagccttggagcgatgggaatctgcctctggcaaacctctggtcgctgcagggcccgagagggatgcgccctcctctaagttggcagtgaggtgtgggcaggccaggtcccatccgctctcaggacctcagttttcctgtctgcaccgggagaagggaggttccctgactctgagccttgcttgtccccgtcggagtggggatagggtgggtcgtccaaatcccagaggcgggagaggtccaggtttagggcccagaggcccaggcgccgaaccttcccctccctgggcctcagtttcacttgttgctacccattaaaccccgcctgctttccaaaagagattttatgttttctaattgcttcagttattgaatggataatatcgtggcagttatagcagaagtaaagaaagtcgaacaagagccccaccgccttaaacaaacaaacaaaaaagggacagcgtaaacaatgcaggccgggtgcggtggctcacgcctgtaatcccagcattttgggaggccaaggcgggcggatcacgaggtcaggagatcgagaccatcctggctaacacggtgaaaccccgtctctactaaacaaaatacaaaagttagccaggcgtcgtggcgggcacgtatagtccctgctactcgggaggctgaggcaggagaatggcatgaacccaggaggcggagcttgcagtgagcggaggtcgcgccactgcactccagcctgggcgacagagcgagactccgtctcaaaaacaaaacaaaacaaaaaaaaactgaatgcaatcaaattgtcaaatgtaaaacgctattatagagttaaggttaagatcattgatgttaggagtcaggcagacctacatttgagtcacttacccagacatctctgagctatagttccctttctactcttctgaaaaatggcagtaatgcctcagcgggttgttgtgaagattaagtgaaataatgaaggtaaagcacttgacacaacgcctggcgagtagtaacttcttaaaaaatggtagcggccgggcgcggtggctcacgcctgtaatcctagccctttgggaggccgaggcgggcggatcacgaggtcaggagatcgagaccatcctggctgacacggtgaaaccccgtctctactaaaaacacaaaaaattagccgggcgtggtggcgggcgcctgtggtcccagctactcgggaggctgaggcaggagaatggcacgaacccgggaggcggagtttgcagagagcagagatcgcaccactgcactccagcctgggcgacagagggagactccgtctcaaaaaaaaaaaggtagctattattcttataataagaacaggcaaatacactagtcagtgcgttggtgtactttttgtaactgagtacccaattttgcccaaaattagtcagttaagggaaaaaaggtaattcttactaataaggaaacaaatccattcttcaaaagataaattatttttctagtttctatattaaaaggaatttatgctgtgggaccttataaggaatatatatactgtgg

SEQ ID NO: 588527 - DNA, 4001 bp, Homo sapiens
ggtgaggttaggttctttggaaaagctgctgagtcttgaagattaccattaagtaacacagacaactagactgaaataatattttattaataacactaacaacaatgaattgataatattcactacccttgaaaaaaaaaaaaccatggcccagcacggtggttcacatctgtaatcccagcactttgggaggccagggcgggtggatcacttgagcccaggagttcgagaccagcctgggcaacatggagaaaccctgtctctactaaaaatacaaaaattaggcaggcatggtggcgtgcgcctgtaatcccagctactcagaaggctgaagcgagaggatccctcctgaaaacaaaacaaaacaaatgtgagccacgatgcccagcctcatttcttggggtttttaatggtaatatctataaagaatttggttataaaggcaactgaaacttattctaagcattaaaaaaaataataatggggccgggcacagtggttcacacctgtaatcccagcactttgggaggccaaggcaggtggatcgcttcagcccacgagttccagaccagcctgggcaacatggtgaaaccctgtctctactaaaaatacaagaatgtgccaggctgtggtgacgcacctgtagtcccagctacttgggaggctgagattggaggatcgcttgagcccgggaggttgaggctgcagtgtgccactgcactccagcctgagtaacagagcgagaccctgtctcaaaacaaaacaaacaaacaatagtaatggtccacaaacatagggcttgtaaaacatcaatatacaagaaataaagtttttacacaatccatagcacttatacttcagattctgatcaattatagtcatcagaaacatacgtattatgttgccaataaatgatttaaaaaaaagcaaaatctgattggtcgtatttaagtatactcaacgggtttttgaaatctgagcaaaggcaagagaaatattgaatccctcatgtcatgtcactggtcaggaatgagtgtctccaaaaaccgttgccatcccgtacccttgatttcccagaaagcagtggttgtcttaaatgtgtggtttgttaattattttcataaaaaacttgccagtagatggacagtaaatcgcatacggagctcagaaaaggccccaaatgcgtaaagacgacaaaagagtaaagaagggcaaacaacaaggattttcaacactggagacttaaaaggtgttacttaaaaggtgtttcaaagaaagaatctgggcgctttgctctttatagtcacctgcctccgagggagggagctctcgggcttgaatgtgcccaaggttcaacctctacggtaggaaatgcgcccaagtttcaacctctacggtgggaaatgcgcccaagtttcaacctctacggtgggaaatgcgcccaagtttcaacctctacggtgggaaaaagacgcctgcgataaaacaaagcgctcggtggtggtggccctcgcgtcgcacctcacgccgtgcagcgacacgagacgaacacagggtgcgctctgaaaggccgggtcccgcgttccggtcgatcggtgttccccgggacccgctcctcagggctgacccaacttcctccggaaggggcgctctgcctctagtcgctcgccggctcccagccccgaccccagacccctcggacgcccccataggcctagctggcgccccaaccgcccaccctccgctacccacccgcggcggccccgaccccaagccggagcctactagtcccaacggccggctgggggcgcgggagcggcgggcgcggcgggctggagggcgggcaccgcgaagggagggcgccccacttccccgcaccgcccgccaggcccgccgagcactgaccggctcgggacagcccaggcccctgtcggcgagcgctggactcctcagcttcgctctgccacaccgcgcagccgccgtccgcgtcttttgttgtcgcgagttctcctggcaaccggcgaagcccgcctcccgccgcgtcctctcctggatgccgcgtcctggccccgcccccatcctggccacgcctccaagcccgccgcgcaggagtcctgcgtccccaggaagtccgcaaagggccggcccctgggcttgcctgcaaatccgagttgtgtcccaccaacgcgctgggaccggtctgtgaggcctgagcgcaagcatctttctacgggttcgtgaaatgagtgagaacgattccacaccgtgtttcaatatcttagctaccaattcagtttatttttatttttattgagtaaaacttgcctaacataaaccatcttaaaactcacaattcagtggcgtttaatgcattcacagtgttgtgcaaccatcacctctgtatatagttcagaaacattttcataaccccaaaagaaaatccccaaaccagttagcagtcattccttctggttcccctctccccacaaccccagccagccactaatctactttctgactctgtgatagctttacctattctgggcatttctttattgatggaatcattcagtatatgaccttttgtgtctagcttcttttgcttaatgttttcaagatgcagtcatgttgtaacatctatcaggacttcttttcttttttttcttttcttttttttgagaccgagtcgcgctctgtcgcccaagctggagtgcagtggcgtgatctcggctctctgcaacctccacctcccgggttcaagcgattctcctgccttagcctcccgagtagctgggattacaggcgcgtgccaccacgcccggctaattttttgtatttttagtagagacggggtttgtttcactgtgttagccaggatggtcttgatctcctgacctcgtgatctgcccgcctcggccttccaaagtgctgggattacaggcgtgagccaccacgcccggccctttagatggagtttcgctcttattgcccaggctggaatgcaatggcgccatctaggctcaacgcaacctccacctcatgggttcaagcgattctcctgcctcagcctccggagtagctgggattacaggcatgagccaccctgcccggccctatcaggactttttagggctgaaaaaattccattgtatggatatagacataccacattttgtttatccattcttcagctggtggtggacatttgggctgtttccatgctgctatggacattcacatacaatatttggatgtctgttttcagttccttttttttttttgagatggagtctcgctctgttgcccaggctggagtgcagtggcgctatctcaactcactgcaagctccgcctcatgggttcaagcaattctcctgcctcagcctctggagtagctgggattacaggcatgtgccaccaccacgcctggctaagttttctgtatttttagtagagacggggtttcaccatgttggtcaggctgggctcgaactcccgacctcaggtgatccgcccaccttggcctcccaaagtgctgggattataggcgtgagccaccgcgccgagcctgttttcaggtcttttaggtatggacgtaagagtggaattgctgggtcgtatggtaatatttaactttaccaatttagttttaaatgctttaatgcctcctgtttttagtagcacaatctaagcatcttcaaaaacccttccttctctcatgaaatataggaatgaaggtgggggaaaaaagctgactattttatttatagtttttatttttttttcttttaactgaattatttaaaattttaaaaattcagtctgggcacagtggctcacacctgtaatctcagcactttgggaggctgaactgggagggtcacttgagcccaggagtttgagaccagcctgggcaacataatgagaccccccatccctacaaaaaatcaaaacttagccaggtgtggctgagtatgcctgcagttccagttactctggagg

SEQ ID NO: 588528 - DNA, 4001 bp, Homo sapiens
gtccaattctggccgcaggagctcggccacgaagccgcccgaggggctcacgtcgttgatgtccgccaggttgaagggagccgtcggagggggagcggactccctgccatagaggaggcctccgcccgtgccgcccggcgccacgcccgggtcgttcccggcccggatcggataggtgaagctgcaggtggagggcgcgctggcagggccgctgctcgacggcgacgacgaagaggaggctgacgctgacgaggacacggtggcggccactgactccggaggatgggtcagcgaattggagagaataaagtccaggtccaggagatcgttgaactcctcggtctctctccgaggtaggggcgccaggttgctaccgccgcaagccgcaccggctccgccgctctccaggtctgtggccacggtcgccgccgccaggtcataggggcggccgggaagcactgggggaagtcgcttcatgtgggagagctcctcccgccagcgctgcggggacagggcgggagagacctgtcagtggtggtcccctgttgccacccgacatactgacgtgctggcgggccacgcgcgactgcaccgcccagacatggggactggtcaggcaggaagcacccgggaacccagggcgccagcgctgcaatctcggcccactcccgggtcgaagaagaggtgatgcgtctgtattgcgggtgttatgtcctgtctgcccaattgcgtgtgagcgagcgccgcggctggtccctccccctccaggtcccgtggacgtccccggaattggcacaccgaggctctctcggtgcgctctcgccacggggccgcctacgcgctaaactcactctggcccagccagtgtctggggacgcggccacctcccgcccggtggcccgagagcgcccgccctaccgacagcgcgcccggggactggtgaagacccggcttgcgccccaggcggctccgcagtgctcgcaccacgggcatacacagctgagccaaggacacggaagctatcccgggaaggttgcggagtccgcgcggtggccgctccttaccctcgttcagtggctcttggtgaccccaaggctccgcccgcccccaccacacccacgaaaacccaccgggcgttcccggcggcccggagcgatactcacgttattcggggcacctgcttgacgcagtgtcttctcccttcccgccgggccagacgcgaacgtggagaaagatgggagcagcgcgtcgctgacagccatgtcagactcgccaggtggctgcctgcgagcaaggcagggagcggagacaggagagtcaggggcggctttcggccgtcgttccggcgcgtcccaccggtcctcacccctccctgctcccagcgccgcgcgcctcacctacctcattaatgtgggggcccagaaggtcctcggcagcccgaagcagctggggcacctgaaccccaaagtcaacgaagagaagaaacgaagccaaaacccaaaaccccaaattggccgagatccttcttctttggattaaatataacttggaagcgtcttttttaaaaagttcctttgtatacaaaagttcttagaaaagttgtaaacgcaaaaatagacaatcagcaaggcgagtaagtaggtccggtggccgggctgcgctctcttccactcagcagcgtcccccaccactgtcgcggtcgcctcgagtgctgccgtgggcgcaggggctgtggccggggcggtgggcgggcggtgccgccaggtgagactggctgccgtggcgcggagctgcgaactggtcggcggcgcaaggcgcggactccggtgagttgtgtggagcgcgcgcggccatgggcgcgggccacgggcgggtgggagggtggggggccagaggggcgggggagggtcactcggcggctcccggtgccgccgccgcccgccaccgcctctgctccccgcgcgcccgcagacacgttcgttctctctggtcgggaaactgccggccgccggcgcgcgttccttacttataacttccttcgctacagccttttcctccgccttctcccatgccccgcccctccctttcttctctccgccccccccgaggctcccttccatcgttgctatggcagctaaatcaacaaactcggcgcacgtgggggcgggggaggggaaggaggggcgcgggcggggctgggccgggccgtgacgccagccaggcagctggcgggctggagccgagctgacgccggcggcagtggtgtcggcggcggcggcggcgtccgccccagcgcggggcgcgaggaaccgggcgcaggttcggtcgctgcgcgaccagggccgtactcaccgccattgtcggctccctgggttcgaagcccgcgaagactggtggggtcagcgggcggcacggtcacgcgtccgcacccctgctagcatacgcgcttgccgcgctgtctgcgcgctggagaagagcgcgattatccgcgtgactcatccagccctccatctccccctccctctctgcgctcgcaggagtccgctctcgtcgctcagcgccagtgccggtggcggtgccggcgctcggcctgacctcgcacggttcctcgcgggcccttctgctgaggggtggggggcgctaggggtgtggagaggaggcagtgcccagcactgtgcagcgtgaactgggagcctcaagagaaggccagaggagtgttccgccgggaacaggcggaaagaggcacgaatggggagttatggttttgatactttaaatagcgagaaagggagtgaaagggctcaagatttactcagaggcataagggagagaagagggactgtgaggcgcggagacagttttcaaccagccatctcgaagccctttcctttttttttctttcttttttttttttttgtgagacagagtctcgctgtgtcgcccaagctggaatgcagtggcacgatctcagctcagtgcaacctccgcctcctgcgtccaagcgattctcctgcgtcagcctcccgagtagcggggattacaggcgtgcgccacgacgccggctaatttttgtatttttcgtggagacggggtttcaccatgttggccaggcaggtctcgaacacctgacctcaagtgatcagcctgcctcggcctcccgaagtgctgggattacaggcgtgagccactgcctgtaatatttgatgactaaattgcactgtagaataataataataatagaagacacccattaaagaagaattaaacactcactgatgacttttcaagccacgcactctcctttccactttatggatgagaaattgagtcataaagaggtgaaatggccagtaaaggtcaaaggacaactcgttccttcggctcaggctccgggtaggtcaggcccccctaaagggacttccctgggaagtgaccatgtgccaggaagtggagcgatgcggtgggatcctagctctcaaaaagtgcacaccgagcccgccgcaggcgtccttgcccaccgggaagggaataggaaacggcgatctttacttcaatcttataacgctgcctcccccacccccactctccccttggtttgtgatcagtaattttccagctgggaaatgttttgctctcatcttcttagcaaacagtatttttttttaaaacgtgaatgtggtgttcggtatcactttctaaacgtaggtttggcgaggtgtttactttggattccggcgttcggcgcgggactccgcccccctctccacggagccccctcaccggcgaacgctggcgcttaggctggtgtcaacctaggaaagagaagagaggggacactggggaaagtggtggaagctcgggcaccgggcagagagtgcgctcacccctttttgagttctagttgccaatgtcctttgtcgttgtcacctgtttgaaccctgcgattctggtacctattaggtttcctcagaatatttgtgatacctgatttttccactcct

SEQ ID NO: 588529 - DNA, 4001 bp, Homo sapiens
gctcccggaggccggggacaattaaggagagagtgagctttccgccaatgcacatttaaattatttaaagagttaaaccgcatcttatccaacatgtttgcaccctttcggccgagtgcagtgtcccgaacgcccaggaacgctgcctggccaaaggttaactaaccccagagctccgggggagagggcgacgccgctaacctgtatgcactctgtaatgggctttgagatgggaggattttccatagactttcccacagccactgtaggggcacttgtgcctcttttcggaggcgtgtttccccttcgcagccactccaggatggaggagggagagcgggctgggcgcgctgccaggatcctgtctctcctccgggctgtgggaaggactcgacccagattcggtggtcacgtcgctgtcggatcccatatcctcatctggactttccagactgtcgctgcacacggagggggtctggatgggtcggtacttgttcaggtccaacaagctcttggcgatggtgaccagtgtgcagtaatccttccaggtgtcccccgggtcaccgtgctccttggtcacctcgcgctcaggtagtcgcagccgctcggcgtccggagcgaccccatgctccggcaccgcagcgcggttcgaaatggaaaccagacactgggcagccacgaagtccatgtaggcggccgcggacatggtgcgggcgacggcagcccaggcggcgcggacaaacttggcggtggctgcggaggttcggctcgccctgccctggcctcggacgacgagcgcggcgcggcgcggcacggcgcggcggccaagggggcgggggcgcggggcgcttccgactcgcaggagcgccgaggcgacctcagcccctcatctttacgtaaccggcagcgcctccgcacgcagcatccacggccccgggctccgccgcgccgccgcctctagccgccgcccctgccccgcgccggccgcgatcccccgacgggcgcgccggcccctctgagccggctcccttggaaagatgccacacgtggcggtcgcaagtttattcgactgaaaacgcccccgaggcgctgggagaggaaactgcaagagaggtgcacgccctcggccgcctcgccgtcgagccaaagccccaggacattcacccgatcaccccgacgcgggtggcgagggtcccgccgagcgccaggtctaagagacactttttcccgagtccactgacggcttctgaacccctgctccggccggtccgcaccgttccggcattctcttgctcagtaacaatttcgcagaatcccatcacgtcacaaaccaaaccccctccaattggccagtggggagggtgattcaactctgtttactttctccccctgccagtcagaacggccttcggtggagaggtgcgtctagaactgaggcgtgcggccaatccgactgttccgtttcgctgcctcgtgctacccctacagcctcgaacactgacatttaaaagggtaacagctgggaggcagggaaggggcagccgcacactttcggagtgcctcgcggtcccgtggccggtccgggcctcctggctcacgttccagcttgcggagctttgggacacatctttcctagtcagttgcgctcgttcctatggcaaaagagaacttcagcttcggttttccagctcccaaacagttaagtgacttcctgcaaacgctacagtcccagcaaccagccttccaatcaaaagtaagttggttgatgtcactggcattggctcggccaatcacaagggcgttccgaaagcaagcgctcgacacttgtaaacgcgaagagctgtagtgaaactggacacatctttgtattttgtgttgctggtagtaaatttgagttatggatgagaggacaggggtgatgaataaatgcagtgtgaatctataattaaaaaaaccccattatgtcaggataagtccaagaataaacacaaatgagtaagaattcgttttgttatatattttttggatgcagcatactttggggcagatgtttaaaaattcttccatccaatacattaactatgaccaattcatcttaaaaatgcagtgctaacaaaagttctggttttacagcatagcctttttactgcctgagattcttccattgaaacatcccatctttgcttgtcatatctcttaattcctctacttctctggtgcaatttagtctaaataaattcttttagctttatttggaggctatttttaacccactttcagaaaaacggagacaaaaaccattcatttgtgtaacttttataaaaaacccaccattcttagctctttttctttccagagcccctgcatggtttttaggacatgtttctcttccctcacttcacaaatgtggaaactgagttacagagaagtgacttatttatcttattagacagataatgatagaactcaatagaaaccacaagtctcctgatttctagctctttgtgcttgcaactaagcccttttggttttgtgaaatattaactgtgcagaacagatttttagggactggaacaagctggaaatccttagccatggaatactgtggcattacttggtcaacaattagtatgggtcttggagtctgattaacttggtttacccctccgtctgaattaacgatgtggttgttttccatcttgatagctagaaaagaatctagggctagttctttttgcaagaggcatactgtcagcacaattcattaaaaataattcactttcgtgaatgtgagaggtacctgattctatgtgatgcagattcggtgagttccaaccctgaccccccactggctattaacctttgttaagagaaagttacaccaggttctggtctccgaggcaagggtctcaaattgactctaccaatgtgagatctacagtagtttcttttgactttgtttttaaagtggtacatcaaaaataataataataaaaaaaaagttagccaggcgtggtggctcgcacctgtagtcccagctactcaggaggctgaggctgaaggactgcgtcagcctaggtcaaggctgcagtgagccctgattacaccactgtactactccagcctgggcaacagagcaaggccctgttttttttgtttttttttaaatcataactaagggtggctcaggtaagtaagagtataatagattttaattaaaaaataacaaacctgacaagaccagttcaataaaagtgtacagcttaaaaaaataaagaaaacaacaacaaaaatattaaagtggtacagggaagatattgcagtaggtgactgcaggtggaagaaaggtgtagataggggatactgggcaaccaagaatatcatcaccatcagcatcattatcaccgacccctttcatggagggcttactctgtgtcaggccctgtaccaagcaccctgcatgcatccctgtaaggtaggtatacagtgtataaaaaactccaagccatcttggagttcttgcatttttagaacttaatctcttaattttagaaaagaattcactgaagcccaggggagtttgcctacttcatgatttttctgggacaaattttgtcccctaggatacacgatcacttagaaattgcacctttgcctgcctcaaggcccagtgcatataccagcgggatctctccaggatctctatgatcatggcctgtacaacccctcagacttgcattttaactgggattgtactggtgaaacagactgctcgggcctggacatctatagacagccctaggaccaccatcatcattattccagaatagaggaaaagtctgtatctttccttgaagattatataatccaggaatttgaatacatcagtcactttaggttttttaaaaatataaacttttcccttccttactccttgccagcttttctttaattccctttaatttcactttgtttgaactggacataaacactgaattctc

SEQ ID NO: 588530 - DNA, 4001 bp, Homo sapiens
ccttttgcatccatttatctgtatctgggtcaaaacacatgagctcattttggaaagtgtcatgggtaattcctcctgaaatatacattaagcctccatatactgttccagcatgaccatagtggggttcactcatttttgcaacatagctccactcattcattcttgggttgtaacattctactgtggccagttcaccagctgcactgcgcccaccaactgcatacaaatgtcctttgagggcactcaagtgaaagaatgtgcgcttttcatttaatgatgcaacctgcatccatttattataccgaggatcaaatctgaaaactgtatcaacagcagtttttccttttgtatcataattactctgaccaccaactacataaagaaagtttccaatgacagcaataccatgctggtaacggggagcatccattggggctaaagatctccattcttgtgccctttcatcatacatccgtaattctttactgacaaccagctgctgcctcaaaactcctcctaatgtaaccaagtgagtggagtcagatcgaatggcagttctatctgactgcatcactggctgcatatatggcatcatttggtaattgctagcttccaaaagcaaattcacgcaggtattgtctgttctcatgaaatctactgtctgcacgtaattgatgagatcctgtggtgtcatcagtggaaatcgaatattcttcattaactttgcagcataatccatccgagggtcttccaaccttagccagcgacaggctgccttaaagagttcaagttcggtacagtgcttaagactattactggaaagcacaaatgcaagtcgttcaaaagggagttttagaaactccccagtactcaataaagcaggaaagttcttcaggatgaaattattaacatatttatccacttctataagattgtaggtgttagcaattcgtccaacctcaacacagttatccaaagagactcctgatataagaaatactttacagaaatccaaaacgggtaatatttgtaaaaagctagcagcttcaagtgtgtcctgaagattgtccatattaagagaaagttttgcagtataaataaaatcaatgattttcttcagaccaaccttgttcaccccatgaagcttaatgcacatcaaatcttgttctttcattccacctgtgaacatggctttgaaataatcactagcagacgccatcatagctctgtgaacagggaagatttcatctccatcacctggtaccagggtcacatcacaaagcaatccttctattctaagctgatcaaagccttgcaataccaccgaactgtgagtattgctggtaaaaaagcgtgtggttcctgccttacaaggctgcaaatgggcagagacgcccatttcgccgttaccaagggacactttcatgtgaaagctttcctcttgcacagagatgcaagccggataaagaagttataaccggaatgttttacaggtaacgaggtgtccagaaagaacagaaagctcgtttccttatcaagggaaggcagtcactgcggcacccctcgggccacgccagtcagtcatccactgaaaatcaccctgtagcaggaccacaaagggctgtggacctcaaatctgattattagacagatgattcatcacctgaaggcggttaaatgacctggttcacctcgtccggcctgcgctgccgctccttcagcagttccgcttcgggcaaggaagaggcgccgccacgtactgtggctccacggcccgctcggcggcgggtccggacacctcagcgaacggcccgctgcgccctccgctgtacctagagtgtcgcagcggccaccggcctgtctttgagcaagggccgggaacacaggcctgggcctgggcttgggcctagaataccggcctagccccaacaccgagccgctccttccggaaaagcctagtcccaggataccacggggtgggagcggccttagcggctactgcggctgcgcggcctccagacctcgtcagtcagcgggagggtgggggtggggaagggggaggaagtacccgggaggcgggagggcgagggttggggaagcggagctgtgtggggtgggcgccagcccggcctcttagagctgccttgtatgtgggaccaaataggacagaatgtgtgcaagcaagtgtgttatgctgcacgtttgatataagtttttcgcatatctgagctcttacgttccccaaatgcataatttttcaaagctttacgcttcctagcttctgtttttttgaataacagtgaaatgcggcatttgtataaattgagaggaaacctggatgcttaattttttttttcctctacaaaacaataattgttatcccacattatgtagtagatacttcagttacaattttggttcatattttcaaatttgttacaatttcaaacgcaaaatatttgtctttactagattgttactttattatgtaaatgatatattctaaatttttggcttgaaatgcctttgttttccacaattttaaaaatggctacataattttccaataactatacatactatagtttcctttgcccattggtttgttcctgaatgtgtaccttcttatcctccattgttttatagactcggtagtaaacttatacaatctggtagcaaaattttagccctgttatggataatatttagtaaaatactgatccaagacaatatttccaaaatattatcaccaacaatgtttgtgtctttcccttcttctgacttttccctttgtgagtattttattaacttgcatttctttaattagtggtaaatttaaattttgacatacaaataaatgtatactttgacacaatttcttccattttccaaattttgaagtttctgtcttttaaatccttctagttctttatgcatatgcaaagtaagaatgtagtcatgtttttcttacactcgcctcgtttttatgtaaaagatagcataccatgtacactgttctgcatctttttttttcacttcaagatcttcctgaattagtgtagagggcttatttatatttttaaacaattctgttgttgccttctgagttgttacatcataagttatttaaccagtgccctgttgatgggcagttcatctgttttgaatgttttctattgtttccaagggatggcagcaaaattcagaaggcttagactaccactgtcctccacaaggtgctccagcagattgtcaccttattcaacacaagaggttggttggaatgaaactggcctggagaaattattcactgaatttttatcagcattgggaagtcctggagccctgcttgttgaatgagttaggggtggaagggctctctcaggccatgacaactccctaatgctgtgaagagctacttccaaggaatcagtctctatctggaaaagaaagaagagagcctctgtacatgggaagttggagcaagaaatcatgagatccttctttttttcatcaaacttgcaagtaagattaatagcttaggaacagacttgtgtcttcatgaaatgattactatagacactcttcattatattcccatatgtttagttattttaaaagactatcttttctgcctgcataatgaaatgattgaatcaaatttgtcacaatacttgttggtaatgtcaagcaactgtatgataaagcatccagttcttaggggcattagctcaccatggatgatattattaatttacccatgtacttaattattgattctactacatttattgtattcagtatttttgcttgtatgaaatgttcacttttaacactgtgctaattacattaaaaagtgttcactttatgtatattttgtttgtttgttttgttttgttttgttttgacggagtctcgctctgtcacccaggctggagtacagtggtgcgatctcggctcactgcaacctccgcctcccagggtcaagcaattctcct

SEQ ID NO: 588531 - DNA, 4001 bp, Homo sapiens
tgaatattcattctcactagcataaacatagcttataaatagcctcaggtcaggtttagcagcaaaaatgagttataaaaataatttgagttttcaaagctttgggaggctgacctcgaagataagggagtctaaccagtgataccagcccctcctgaaagggcagtggaggctgcaacaggaaagacacttggcgcttacccggccacagaggacatgggaatcgggctgaacacggagggaggagagagcattccagctccctgcagtgggggcaggggctgagaaccggggctgggtccagactccagattctgattcctggagatctaagggcttctgcacctcggcaagtcatgagcagggcagagaggccatgccaccgggcgcagctgcccagcagcacgaagaaacttagtcctcctccccagagggttaaactttgcctgtgcagtgatgaacatcacagcttctatcttccagaacccacccgaggactgcaggcagcttcaggggtccactgaatacctgaagttgaccagaagacccaagatcaggagcccctgccctagagggtgaccaattcagtccttggtgtgtcacctccccaacagttctggtctaggatggaaaaccattacaggggattataattgcaacctagaaccaaagctcagcaagtgactccctgcctctcccgccccacggggcacccctcagtctatccttctggctatctaggggtacaggtcctgtttttttttcttctttttttcattctttctttttattaagagataaggtctcactctgtagcccaggctgtagcacagtggcactatcatatttcatgcagcctcaacctctcagtcttaagtgatcctcctgcctcagcctcttgagtagctgggaccataggtgtgcaccaccacgcccagcttttttttttttttttttttttttttgagacggagttagctctgttgcccaggctggagaacggtggtgcgacctcggctcacggcaacctccacctcccgggttcaagcgattctcctgccccagcctcctgagtagctggaactacaggcacctaccaccacgcccggccaaattttctatttttagtagagacgggttttcaccatgttggccaggctggtctcgaactcctgacctcaggtgatccgcccgcctcggcctcccaaagtgctgggattacagacgtcagccaccgcgcccggcctatttttctttattttttgtaaagatgggatctcactacgttgcccaggctgatcttgaactcctgggctcaagcgaccctcccatctcggcctcccaaagtgctgggatttcaggagtgagccaccgcacccagcctaattcctatttctgagcccctccatccaacaccatatctgggtcctgcagcccaacctgggcgcacagcagctcaggcctcagcctcagacccccagtggagtggggacacggggtgcggtggcggtgcccccagcccgcgcttacctaggcggagggtgatgttgaccgaggtggggtactgcacgccgaaggccatggacgggctctgccaccaggtgctctcgtcctggctgtggaagtcggtgaggtaggaggcgttgtggtggcgctgggggtcggcggcgtcgcagcgctggcaatgagcccccgcgcccgcggcgcccacgtggggacagaagtcctcgggcgggctgccgcacgtgtgcgaggcctgggcgagccgcccaaacgccgcgttctcgaacaccggcaggcagcgctgcgggcgccctgcgccgtcatagcacgcgcccatgcccgcgccggccgcccgcggtgccagcagcgccagccccagcagaagcgcagccgccgccatggtcaagggcaccgacgccgcgcgctctgccggccccgctcggctagggtgggcgcggaccgcgcgctggccgccaggacccgccttcccctgcggggcggggaggctggagggaggggcgggcggcggcggccccaccccactaaaaataccagggaccgcgccgtccccgggcgcccactcccacctgctggacgtgcccggcagtgcgcggctcgggagtctgccccagaggcgacccgggcctctttgagcctcagtttcctcgtctgtggagtggggtcggtaaagatgcaggctcattctcgccattgggaggcttcaatggctgctcattaaacagaaactgttcagcagtgccttggagtcctgagataaaaggggacaagaggatctatctctaactgatcgctaccgtttgcgcatctcctcctagcaataaagtgtgccctggacagggttgtgagatggctccgcatagctcctgtcgcccttaaccctgaaaagcactcctgctgccggctgcgctctgtccccacagcaaagagattctaacctgacatttgtgacaagggtacctggtcttatcacaaatgtcacctcagagagggcttccttgtcttctgccccaacccccataaatgccccctttactccccatttattaacattagcaaatcgagggagagaagtcattcgataaaatttagcagccaggtcgtgcgcggtggctcacgcctgtaatcctagcactttgggaggtggaggcggaaggataacttgaggccaggagttcgagaccaacctgggcaaaatagtgagaccctatctctacaaaaaaatacaaaaattagcccggcgtcatggcacaagcctgtagtcccagctacctgggaggctgaggtggaaggatcccttgagcccgggaggttaggctgcagtgggctgtgatcatgccattgcactccagcctggccaacagagtcagaccctgtctcgaaaaaaaaaaaaaaaaaaaggcagccattcccagacgaactctaaggaaaatagaaataaatttcctggcctggcgcggtggctctcgcctataatcccagcattttgggaagttgaggaaggcagatcacctgaggtcaggagttcgagaccagcctggccaacatagtgaaaccccgtctctactaaaaacacaaaaattagctgggtgtggcggtgcgtgcctgtaatcccagctactcaggaggctgaggcaggagaattgtttgaacccggggggcagaagttgcagtgaactgagatcatgccattgcactccagcctgggcaacaagagagaaactccatcaaaaaaaaaaaaaagaaagaaaagaaagaaagaaaatttttggaagcaagatgaactgtagtgggctgattcactaccagttatttacacatgattaaaacaatacggttgtggaaaggactacagaatagacccatggaataagttagagatttcagaactatatctaagtagagttagtatatgatatcaccactggtacctaaggttattttggaagttctagctaatacaataagacaaaaaacttaaaagatataaatatttatatcttctacttacctgaacatacatctagaaaatctaaaagattctactaagactattaaaattaataagagctccgtaagatggctgactacaggatagagtacgaaaaccaatgccagcaataggcattttctggctgggtgcggtggctcacgcctgtaatcccagcactttgggaggctgaggcaggcagatcacctgaggtcatgagttcgagaccagcctgggcaatatggtgaaaccccatctccactaaaaatacaaaaattagccaggcattgtggcacacctgtaatcccagctacttggaaggctgaggcacaagaatcgcttgaattcaggagacagaggttgcagtgagccgaggtcacgcaaatgcactccagcctatgcaatagagcaagaccctgttttttaaaaaacaaaacaaaaacaaaacaaaacaaacaaaaaactgatgccagcaatgatgtaggaaatg

SEQ ID NO: 588532 - DNA, 4001 bp, Homo sapiens
agagtgggcttttagtggagtcagaaggcagcaaaaggcttcccaggccaaaaggccaccccaaaaaggcactggctgcccccgcacatccagcgtgtgttcaagctcaggctctggctcaggccccgggactcaccggccgtgtattttcccggctcgtcagttttctccaggacggccttcacctcctggcaccggccacttatcctggaaaacagaagccccctggcaaagcggccctggcctgtgcctcccccggccctggagcaaccatgctgcaatgccctgcaaatgtggccccgagtctgccacaggcccatggaggagggtgcttctctgcatctcagacccaggcaccagcggcccctccgggtcccatgcggcagttcccggggtctcccgagatggccaggagctctgcaccgctcctcctggtggctgccttcccaaaccccccgcccccaacacatttcctgccagaggcacccaggctgcctggtttgcaggcagcgtctgtggcgtgggcctgagcctcatcccgccagctgcattcttccttttagagacattcaggcacaagccccatatccatcatcatctggcccagagagggaaaggttcagtgaggggctttgggggaaaaaaaaatcggggtcattgccagggtcagtgacttcctgagattcagcccccaggaccggagcacaggcactgcatgccactcaggagggagccatgcgggtgaaatcacacaggtgggaagtcacagatgtgagccacgcgggtggaagcagcccaggtgagagccgcacaggtgagcgctacacagggatttcaagggggtcttctccatggtgtcttctcctatgccccctcttggtcattctgcaagccccatccctgcacttctccaaagcagaaatttactgccaggactggctctgactctggtcgggggtaaacaccttttcccaaaggggcctgcacgtcaccagacattccctagtcggaggaggaagtgggcggtacccagggctgccactggtagcccacagggtctgatccggggcctctgccccctcagggcccctccagccgaggcacctcagtggcacagtttgccctcaagcattgcaggaggggccgagagaggcctcccagcaggtctgcccacctccccagcaccagagctctcctgggtggggaaagggaaggccctagaccaggttgcaggctgcccggccggctggcagacactcacagcatggtgaccttggcttccaggttgcccccttccagggtcgtgagggtcatgggtgtcaccgattccagattcatctcagggaactccctgtccaccgtcatggccttcagataccacgtccctgacacctggagaaggcccctctctatcaggctcaggccgactgctccagagcctcccccttccctggcctgcagcccctagactctaccgcaccccgagggctggaaacggggaacgttccccaatctaacccacccagaaaacacccagcaccctcgccaggcccacttgaaggtggctccagcccccacaagccagccaggaccacaggagccctcatccccagggaagaagtgaagtcagccagacccccaccctcccagccctgcccactctgcacccctgcgccacctaccctgccagcccagacccctgctgccccatcccaccattccctcagggcagggcttgaatgcccaacccaaaaacgagggtctccttggatggaggaggcatggggtctccatccagtctcagcctcgccccttgccccctccagcccagccttcccatccgggcctcacatcctgaatctcctcgtctgaggccaggaggtggtgggcctgcagggcagcaatgaggccaaggctgacggccaggagcaggggcttcatctccggagtctgagtccacggccgcctgacaggtcgcttgctggggctgggagaggctgtaccagtcctcccacagccgccctttataccgctgggctcagggtcccccagggacctggcacaggagactgaccaatcccttcctggatgtaaaccactgccagttctgcaatggagcagataacctgccattattgttggaggctggtgaataacagcttgttaatcccagaggatcacttggacaggaccaggtccagaggagcagatttgcagatttcacctgaagggaaactgaagggagtgaagggtgtgcaggcctcctggggacgtgtgcagccgtaacagatgccccccagccatcccacacttgctgacgtgcacactgtcaagggggtttggggttggagtccgagggccgtgggcttggggctcagctgagcttcctgcatctctgggcaggttacttggcctcagattcatcatggaaaaaaagggaccctcctgtgtgaacacgatcccgtgtgcatttaaagacggtgtccactgtcctgagcaaggtgtgcagtaacgaccctctctgctccacacacagagcagcaataggtcagacagacagaagaccaagacaggtgtgtgtgtgtgtatgcatgtgtgtacatatatacatgcacaaacgcacacacactcacataaaacaaggaatggaggagaagcacaggctggtgatggggcagaggcaggggcctgtcagctccaagtcccaaggcaggcagagagggcctaggtccggctcctgggagtgatgggaggggcttccctgactccagaaagaaggctgagaaaccctccttgacacatcccagggctgtaacttcgtataacttagtggagcactgtgggcataggaaggcaagaggacatcaacacagcctcaagggcagaagctgagacaagccgtccttggaaaggatgactttatctgtgacatgctctgcatcactgcagagcagaagcctgggacccgggatgggagcagaggctacaaaacactgctagacagaggacagtgacaacaagatggcagagaaaggcagaaatgcagagacacaatatcctcaccttgaaataagctagaaaggccaggttccaaattacccaaggaaacaccacactaagaaaggcaggctaaaaatgagcaattggtacaggaacttacaccagccaaggaaagtctgacacacactttaaaactgcaggagtatgatcaagatgcctagtgatttaaaaatatataaagtataaaattagaactggccagaatataagaaataaggagagacgaaatagaaataattacaaatcttgaagatgaataataaagtgaataaaaaactcaatagacaggttaaattccagacttgacatagtagaaaagagacttagtgtcatggaagatagtactaacaaaatcaatgaaagcagaaaaattcaaaagagaaattgaggtgttacagatagattcagtctccagcctggagctagtaataaaatgagtggaggaaaccaactagagtgcagcagctctgaaaacacaacacacagagatatacacacacacatgcacacacacgcacacacacatgcacacacacacatgtgcacacatacaaatgcacacaaacccatacacatgcacacccacatacacacgcagacatacacgcgtgcacacaccattcattcatacatacatgcacatacatgcacacatacacacacacatgcacactcacacacatacacacatgcacacacatgcacaaagttaacacacatggagaatagatcaggaggttccaatataaacagaataggagttctgaaagaaaaacattttctaaaatggcaacaaagcaacagaatagctcagaattcttcagaattgaaaagacatgaagatgacaccccagatctaaattaccaaggaatgatcaaaattgagaaatccactcctagaatattacagtgaaatgcagatcatccaggaaaggagaaaa

SEQ ID NO: 588533 - DNA, 4001 bp, Homo sapiens
gagatgcccgctggttcccggatggcgtggctgtgcccgcccacagccctgacccctggtgcccgaggcctcagagcccccacccaggtgcaggtgtccagagggactgagtgccctcccggggcctcccctcccgggccaggccgcccagcacatgacgtgtgggctctgggaacacagccagcctgacgcctgcctgccacgtgctctcggggacaaggggcctgctcaaggcacaggggggtcagaggcatatcacgcagctcctccagggcccagagcccaagcacacctccctcctgtccttccctcgggcccgccgcgtatgcacaggcgttcccaaacaccggcttcttcccgtctttcctcaggatcacctcctgggactggcaccccttcaacctggggccaaggcgggggctcaggctgcagaccagggaacccctcctcccgcctgccagccaccgagccccacccacacgtctcggtcccgcccctgctcccgtgggacccgggaaggttggggccccaggtccccagttttttgcttcactatccaactcgtgtcaatctgaggctctgtggtttgaggattttccaattcggactggggcctgtcccacggcacgagagaaactcccaacacccacccgtgtggggcccaggagctgcaagcggcttcctcccaacacctacccatgtggggtcccaaggtctgcaggcagcttcctcccaacacccacccatgtggggtcccaggggctgcaggtggcttcctctgagtttagggggaggaagtggggggacggttcttgtggaacttccagacagacaggctcctcccagactcctttccagccccgaggcagctccctcctcctggaaggggagacccttgcctggggggcgctgcccactcaccgtctgaaggcgaggagcacgcggagctggcccactttgttcacctttaccacggacgcccccagcttcctcttgtccctggccggcaagaatccctgggcatcagtggcagtggccagaatgtaccagaaccctgaaaactgcgcagcggatgtgtgggcggggacaggagctgccaccgggggctgtccccacccccgaggttcccagctagagaacccaggagacaaatgacccttctgtgagccggagtcccagctccgcccaggtgccgcctcggtcccggccactcaagccctggccactggagcagggctgcagagaagcaggtgcccggctggtcagggaccccaggcagcaaagggctgggctgtgggcgccagcaggtgggaggccccctacctcagaggccccggctccttcccacatggcctcctgggggctgggtactgctcggccacttcccttcctgccggcccccggcccccaactctgcctgctgccaaccctagcgccctgggcaccgccgtgccaatgagtgctgctcccacggctcactcagcaggtgcccgggccctcccgctacagaatatgccccgcttgctccacacccactctgcactctgggcgtctcccgacctcctcggccacagctctctgggcccctccaccctggccctccctgacccccctgggcccccgaaccccctcgaggctccctgcctttgccctgcaacttgcggggcccctgtgctggaggctgcagtgggagaggccaggtgggcagcgcccgtgcctggaactgctggtagccctgctcctgggcggctgccgggagactgtgcaggagcctgctccagctccagagccggcgcccggctcagggaccagtggcacatggctcaccttgttccagttgagggcgtgggactccctggggtaccactcctgcacctgggaccctgcagccagcactagcaccagcaccagcaccagcgccagcaccagcagcccctgcctcatcttcaccctcctccctcagccgccaaggccagtgtttaaacctctctggagccgccagcctgtgtcgggagaggagggaggggagggagcggagggaggcaacaggtgtggccttgggctctgctaccctctccccgcccagggaccacccccagacactccagggaagccggcactgccccacctggtggtcactgctggcctgggctgccctggcagacagaggcccctctgaggccccaggaccctcctgccctcagtgcccggcctggggtcactgtgtgtgcccctgagactcattaagccctggccctcatcctagacctcccaggtgacaggcaaagggctggtcgtggcccttctggggcagatgtggacatggtgagctctgcgcggcagccacacacacagcccccaccaccttcttgagggcctggcaccaagcacctgagcaggtgccgaagggcgggccggggctgtgtgcccgtgcccatgaatgtgtgtgtgtgcatgtgtgggtgtgtgctcacatgtgcatgcgtgtgcatgcccagccttgcaggtcaaggcatctgtgtgcacctcgcctcactccagcatgagcctcacacagtccccagccccccatccagccccgagacccccatggcctgtgcttctcccaggacggcaggcagcgcagccccccacacccatcagaacacaggaggacctgcaggctcaggtgtctggggtccctgcccctgcccaggcaagagacacaaccccagcccagagaagcctgagcctggggagtcaggggctgctctgagccccaccagccacctctctcttgtcctgggcagtccttggagcctctggcaccccagctgcggtcctggtggagctcactgctggcttcctcccaggctgtgtcctctgaccagcccccgcctctgagcccgggcctgagtttgggtgtctgaagacccagaggggctctggcaagggactgggttgggcacgcgtcttctttgcagctggctctatggttctgtggcttggcccttggtgacgacccccgccatcctccccgcaattccccggctggcccccagtcaaaagcatccttggtttgctgtggaatcgctttattctgagctggtgctgggccccgggagccgctgagcgaggtgggtggacactggccgaggtcacaggaccctgtgggcgccatccctactggggacgcagcactcactgaaaaccaagaggagtgtgagggggcccagcccaccatggaggctcctccacaccctcagctgccttagagacagtggagccatgaaccccgtgggcttgggcagagggtcctcccacccactgtgcgtagggtggcctcccccacccccttcccccaagagagcccagggtgaggctcaggatggcggcttaccagaaggatcttgtgagcacaggtgactagaaggggaggcaagactggctgtgaaaaaggactgagccccccagcaccccagggccccacccacaagactcgcctgccgtggggacaagacccccaggcctgactttgggcaggggcaggtgaagaccccctcagcctgcctgactccttcagggcgactgagtcaggcagaagccagaatcaaccccagggtctctgtcaccccatcacgccctgtgggctccagaacttgccccaagcctcccccgaggctgctccggtggacactcacggtccttctgcagctgggcctgctactgtgacaggaagcccaggctcctgctccacttggtgaagagccccatggcctcctggctggctgtctccgtcagacctgggggcaccagggcagtgcagggggaagcaacctctgagagctggggaggggccggggaggggctgggaagggtcaggaaggaggccacctgccctgggatgctggccccggtccttccaaagccacctccagtgcagcgagcctcaaggtgggggaacttggcctgcatgtggtcctgtgcggcccacccaccacacagctccccacatggccccc

SEQ ID NO: 588534 - DNA, 4001 bp, Homo sapiens
aaactcattcctgcgggccccgtgcctactgcccagcatgcctgcaggtgaaccatgttaccagtcacatctgggaagacgatgttgtcatccgagaggccctgagctctgcccaggcagatgaactggtccagcgtcccgggaggcagcaaccagctcctgcctgcagcccagggagcccagcatgggtctgtgcacttggcagggggttgggggctgggtaggtgggagattgaactatctgtacccccaagtcactccaggcggggtggggaggcagggtctgacccaaagcctggaaggaggtgcctccagggccacacacgggcccaggacggggtgggaggctcacccagcaggctgatcctgaggacggccagcctgctcgtgtgtctgcgggacagcatcagggcgaactgggtgtagtcgctgtccaccacccgggtctcctctctgtccgccccgggctctgaggcggcacagacgtcacatccctgtgggccagcaccccgtccctccctcctgtgactggcttacccacaccgtggtccacagtgaactgcccaggctgggctgccggtatcagcacataagaccatgtgtcacagtgctggcctctgtaggaggggacaggtggaggcggaaggctccggaagctggcaggtccatgctgaggtgggcccctcaggagatttcagccacttattcagagggacccacggcgggagtggccaagcgtcatgagtggagatggtgtctaactatgttgctcaggctggtctcaaactcctgagttcaagtgatccttctgcctctgcctcctgaagtactgggattacaggtgtgcgccactgcgcccggcccctaaagtgctgggattacaggtgtgcgccaccgcgcccggcccccaaagtgctaggattacaggtgtgcgcgaccgcgcccggcccccaaagtgctaggattacaggtgtgagccagcgcgcccggcccctgaagtcctgggattacaggtgtgagccagcgcgcccagccccggaagtgctgggattacaggtgtgagccagcgcacccggcccccgaagtgctaggattacaggtgtgagccagcgcgcccagctgcccacacttttttgtatactccccagctgggtttggtcattggcaggcagagtcatgaagctgcctgtgctgggacagggcccatggcgcacctgagccactggcggctgggacccaggcccgggatcctcctcacccgcttggaacggcagggacagccactcaccgagtcatcgcattccacacctcaaagcggccatcatcacttagctcaaaagttgcggtgaaagcgttcagcagcgccctgtgctccggcctgaagctgttgcccgccaggcccaggacgaaccattccccctggaactacagaggcggtggtgggcaggggcggcggtgggcaggggtggcagtgggcagggtcaggagccccctcccgccctccctggcagcttctggacccctcacagagcagtgctcctggctgggccggcgccagggacactggcaagaaccagagcctactctgggtctggcagggacatggtgaccctggccagtggctgtgcggccttcccgagcctgtttcccctcacgcacagagggagcgatgggctgggctgacggcagggaatgggtgccaggaaggtctgcgctgggccctcctctgctggaggtcaggggcccgcctgggggctcctggaagcacggctggtcctggctctctgggcagcatccccaggcctgctcagccaccagcctctccctgcactcagacccagccggctgcttctccttccgtcaaaacccctgtacctggtttccttggaagctctgcatcgggggcgggagtggcaggggggttggggtctgggcctgcaggactttcagcaaggagagccacagccacaggccacacagcagcctcatcctggcagctgctgggcccacagggacagagagaaggaagtggccatgggcaggtgacccagagacccacctcttcatgcacatacccagcaggtgcccctcccaagggggtgtgcccctctgcctccctcctcaggactggcaggagaggtggtgcccagggcaggcttggtgtgggctctcctcaggtcccacccacccacctgcggtctcttgggttccagccaggtggggtaggaggggcccccaggtccaccttccacctcttcttctcatttctgaggccctgcccccttcagcccccttccaagtgccccatgctgggggttcagaggccccacgcagcctgccccagccttcctccctgtcacagaatgttgcgtcccaggcagacagcgtgacctgccgcagccataagggacagggcccagctgtggccaaacccgggcattccccctgcagggcctgggcctgccagccgcccccctacccccaccctgcctggctccacacatgcctgaaccgcagcgtgggccgtggccctggagcaagaacaggaccagggaggggccctgtggccatgaggccggggtggaggtggcccgagcaggcgaggagggaggctggggcctgcagagcacccaggcaacctggtgaggacagctggggcattttaaacgcagtctctgcccagagggaggggcagggctgggaagccccactaatgggagtgggcaccccatgctggtcctgcctaaaagaaaggattagtaggccaggcacagaggctcatgcctataatcccagcactttggggggccaaggtgggaggatctctcaagcccaggagtttgacatcaccctggacaacatagcgagactccatctctacaaaaaaatttaaaagttagctgggggtggtggtgcacacctgtggtcccagctacttgagaggctgaggtgggaggattgctttagcccaggagtttgagcctgcagtaagctatgattgtgccactggactccagcctgggcaagactgagatctcatctctaaaaatataaaaataaaatgtaaacagagggctggcagggagggcaatggcaggcttggggcttctagctgccctggcaccccttggacgatggggctagggagtggagtccccttcctgacctctcctcccatcctcacaggtagctgaagcctctgggtgctggactccatgttaggggtcaccaagggtgagccaggtgcctcccactcaccgtgtgcctggcctgtgagcctctgtccaggccccccaggtccctgtcctggctgccccctcccaccccagattccctgtcctggccacctcctcccctcatccagccctgcttacaagggacttaggctcatcccaggaggtgccctgggcctcggcagcctgccctgggtggcagccccagcctggccactcgaagagcccagcccccaggacttcagggctccagggctgggctctgtcccaggcctcactgcccacgtagaagggcagcttgctgtgccttgtctcaccagcacaacgctagcgtttcaggaggctggcccagggaaggaaaagttggaaataatctgttcattcccctgaactccccaaggcgccttcgactctccaccatccccctggccccagccagcctaggagcgcctgtccgcagccccagggtcccgctctcagcgcagcaggcacccctcccggagcccgtcttatcgcagggcactggggagatttgggatcacagcacacagcccatgtacaggacagtccccgctacggaccccgcccatgcagggccctgcgggaggaaaaccgggccttccctggccagcccgagacccacagagactgagcagcagaggtcgggtgggccgagtcctcgacacagaggagggtccctcggctccaagcagcgcctcaggccccatgctccctcccccagacccactcctgccgccctggggggtc

SEQ ID NO: 588535 - DNA, 4001 bp, Homo sapiens
tgggccccactaccccttgagcctctttccctgcagcccggaagcctccagcctcactctgtcggctccaatcggggagtccccaggagttaaagaacctgagccccagccggcgcggtggctcacgcctggaatcccagcactttgggaggccgaggcggacggatcacgaggtcaggagatcgagaccatcctggctaacacggtgaaaccccgtctctactaaaaatacaaaaaattatttatatttttacaaatacaaatacgggcatggtgatgggcgcctgtagtcccagcttatcggggggctgaggcaggagaattgcttgaactggggagtcggaggttgcagtgagccgagatcgcgccactgcactccagcctgggcgacagagtgagactccatattaaaaaaaaaaaaaaaaaagaacctcagccccagccccagaactcaggcagcgaggccaggcagggaagggcggggcaccactctcaggaggccagagaggagcatgcaccgcgggaccctcccccaagccaacctcctccacatccaaagcacggcgggcccagctcccaccccacccggtcctggccaggccaggagtgtgtgcgaagggtcacagcaggagagggcatggggcagcaccagaaggggcgggcccggggatgaggaggcggagcctaaactcggcctaaaaggcggggggcggaggggtgagggcggggcctgtgaggaggcgcggggcggcaggcgggcggggcgggggtaggcagaacggggggcggggcctgtgggaagttggggaggggccagtgcggggaggtgggacaggcactcactgtagagctgcaccatggtgctgagggccccctccagctccttgtagatgtaaaggacggcgaaggagctgtagtctgtgtccacgatgcgcacgtccaggtagcccaaggctgcggagaggcaggcggccttttcaggctggagaagtggatgggcccgggcaccgaccccacccatgcctgcccctgctgctgggctgtgagcctgttccccgaagacagaggaggggcggggagggcgggcagggggctggagactgggatggacagcttgggcccgggtggaaagtcagccccacgtcacccccagagaagcggcatccagcacccctgaaggcagaggaggcaggacctacccgggactctgaagtgtccctcggagcccaccttcaggtactcggcatccacctggttacagccgtccgccctgggggtgcacagccggctcactcatggcacccagctacctcagctccccagcccagcccaggcagcccagcccaagtaactcaccccgggaactccatgtggacgtggaggccgccctcctctgtgggcctgatggccctggtggacatggacaggtggtccttcttgcccaggaagaccctgcagtcagatgccatggagaccacgtaccagaggcctgagaactgccgggggcttagtcacccgcaggccaggacagccagcagcagggccctccttgcccagggacccaggggacaactcagaagtcacacagcaaggggtctcggagtggccatgtcttgggtgtgagctgagcccaggtggacaggaactcatcttgggtaggtcacagtgcaactgtgagcctcagttcccagctgtgaagtgggtgcagtaatgatccattcacaggttggtttaggattaagcgcagagtgggtctatagcacgtgcctggccgggcacagagcaagcgccccaggaaaggcagttgtcacaattatcacgttgtctctggcaggggcccagctcccacccaccacaggacagcagaggcccctggtaccttttcagcattgaagtcaggctgcagcagaacctcagcctgagccgtgggcgcccagagcagggtcaggattgcgccgagcaggaatgacatcatcccctcccctgccctccagcccctggtgctgagtccccaagccccagggggccagctttatagcccaggccaccacctgggtgcacctgctcctgggcggagcagatggaagcggaaggcacttcggctctgagactccggcccccttgtccattgtttggcacaatcactcggatgtcccccagcccagggggtcatttcctggagggctccagacagccaggctctggcctgatgcacccgggctgaggatttgtcccctaggcctgccagactatgtcaccagtcacggggccactgccaagccacagcagagacttgtcctgccttgcctggactcgcacccaagcccctctgtccacactctgtctggctgggctgggccagggcctttggggtacagctgcagagagctgggctggggttggtctggctaggccccctctcctgggatctggccacccagaaagcccccttctctcacccccaacatggggggtagggtcacactggcagagtgtccagggcagagcttgtgcccccacactgtgagagaggcctgggcacccctcactccagacccccaccacccccgatgcagcccccagctgggcttccagcaagcaggccagggaccggacgggaccggacagggctgggctggccctggggaggattacggcattggataccgccttatcactggttgtataagcgtgcagggggcaatgacgccaggaaggcgccgcagtctggcagaggcaggaacctcccaagtgacctctctgtgtccccacagagcacccagggacactgggcaaggagcagcaggtggcctcggagcacgcccagacccctctggtcaggggcgggagtcctgccagggaggccagcactgccagtcctctggagtgagagtgaggcaggagaagagggcctggacgcagggagcccaagggcgtcctagaaccaaatcaactggaaacactaacgatgacgggaatgtgaatggctttgtaccttcactccatcctctccgtttacgtagggctcataccgagtacatgacttcgttttgtttgtttgttttttgagatggagttttgctcttgttgcccaggctggagtgcagtggtgcactccttggctctctgcagcctctgcctcccgggtttaagcgattttcctgcctcagcctcctgactatctgggattacaggcacccgccaccacacccagctaattttgtatttttagtagagacggggtttctccatgttcatcaggctggtcttgaactcccgacctcaggtgatacacccacctcagcctcccaaagtactgggattacaggcgtgacagtatgctcagccgagaaaatgactttgacttcatcctcttcatttacatagggcatacaccaagtaaccaatggtaaaccgctagaggatattgaaacactagaaaattctgtaaccggggcccttgagctgcttgctcagcccgctcccaccctgtaaagagtgctttcattttcaataaatttctgcttttgttgcttcattctttccttgctttgtttgtgtgttttgtccaattctttgttcaaaatgccaagaacctggacaccctccactggtaacgtgagagggggacagggtcagagaaagacccttggcccccagcatcggggaagggaaggagccgagggcttctgcttgtggcctccactggtcttcaggaggttccagttcccagccacgcccctgacaggttcacctaagccagcagttagatacagcaggaaaactgtggtcagcaagccacccagatgccgaagcaagagaccgagggcacgagctgttccagtttaataaaatatataaaataacaagagttatactagatctagatcatagacatgattatatatgaatattattaatcattagcttgtagcaattactctttattccaatattataataatccttgctctacaattataacctaggaaaaaccaggc

SEQ ID NO: 588536 - DNA, 4001 bp, Homo sapiens
tctccctgagctgacaccaggctgtccctcctggcctgcctggggcccctggaccccactcagaccctccagcacccgatgtccttctttcctttggctgcctccctgggtggctttcaccccccccgccacccaacacacagaaaccctgcatttctcccctgcactcagcttgctgcttcccttcctataccctctcccggggatccacctcggtacttccagtctgctccatgccagccgttcccctagctctcgggtcaaacctgaccccatccttgagtcctcccacttcccatcccctggcaccccagggctgagctccccaacctgtctgtattctgctccttgctccacaaatgccccaatcccaatccactcagctgccagagtcagaaacccactgggggcggctgatccctggctccctgcctcttcaccctgcgcctgttctctcacacctgtgacggccccgcttcactttcgctggtctcccgaccccctaggctgcaccccaccaagtctccccaccctgcggcccaagagccctgctctaagccactccgcagcagatccgctggggcggggcctgaggaccgtgctaggtgctagcgtggccacctgcccctccaggctgctcagcagctctgctcagggtgaccctgcgatggcttgctccttcctgaagggggggctctctctgactccagcccctgccgggaacaccccacatttccttttgaagcaggttggctcttttaaggccacctccctggaagccttccatgaaggcactgggtggggttccaggctggatccagtgtcccctcctcccgctcccaggcacccctcctctctccgtcttgttttctaacgactgtgcatgtccatccccaccactgtctgtgtgtctgcatggaaatgtgctataaacgttgctctaaggaacagaggaaggatgaacacagatgaattccgggcagaacagcgaggtgaacgacaggatccctcagctttggccatcccttgcctgtgacgtcagtctgactctcacacccccaggagatgtcggccctcacctaaacaggacggaggtgacattgtagctcttgtcttctttcagctcatagatggtggcatacatcttttgcgggtctttgtcttctctgagaattgcattccctgccaggcctaccacataccacttcccctggaactgcaagggactgataagaggcacaacccaggaatggccctaggagccacccctccagctctgtccctgtggcacctctgggccgcccagcttggaaccatgagcccctctagctgggcagcagggcccaggctgggcctgcactggtgaaggggcaggagcaggaggccatcagtccagaagggagtcctgggggaagaggcggttctgagtctggcagggaggagggtgacctcctcactggaggaggcatgtggctggtgggccttcctgagcctcagtttcctcatctgtgcagggggactaaaagtgctcccaccttctttggacaatgggggttatgggagaggggatgtggacctgggggagtctgttcaggctgagagggggtggggatggggggaaggggcatggtttccaccaggggaccctggtggcacagagtgagctgaaacctggaccctggactcctagagtcctgcccaacgctcttcctgagtctcttcacctctcctcccctctgctcccactcttccccaggccctgcctgcaggtgcccctcttggccccttacttggttgtcctggaagttctgctgcagagggaccttgctcagaggtggggctgggatcaggtctgaggtggagtcctgggcctgggcatgcagagcccccaacagggctaggcccagccacaggagacctaggggcatgatttcagggccgaggaagcaggcgctgtggtggctgctgggcctggcaggggtggaagaggaggtggcgagtgagaggctcacctgggtggccctatttatgggatctagggtgggttgattcattctttgccaaggccaggaatgtgaggcaattgccagcaactcctgcggaaacacttggcaagatttctgcacctggtcaggattgggcaagacagagggacggggagagtgagggacattcccggagtgctgcacctctggcagggacaacgactccctctgtgccttccttgtgctgtttctttcttctgattgccctgtatgtgggccggtggcctgtgagccggaagagctgtcatctctgacccccctgctcagctggatcccagggtggggtatgtgccctgtggtcccctccccacacccacagaaaggaaagaatgaatgcctccttccaacagatcatgtgctgtttcctggttcttttaagggtcagggaagggtggggtggctgacagtggacaaggaaaaacaaggcgtctgctctgaactcatggagcccagaatcatggccctcccaggagccccagtccaggacctgcatgtgctccaggggccttgagacagccccttgcccctctccttgccccatttgcaggaggggaccccagtggacccctgagggacccttcctctcctgtgagtgcagtgggaagagaccccacacagggcacatgggttgagtgctgaggctacagtccctgtcctgggtgagttgggctgatgtgtgggggcgtgaaggcgccacactgctgctctggacacctgttgctttgggtcactgacagtgcaaggatctggccttatccttgaggtcactgagaccatccccctgactctagtcacagcctttttccattgaacccagcagcccaggccaggggttctggaactgtcaccgagatggctggtcccagccttgtccagcagggaagcagttatctcaacgggggcctggctggcatcctcgggaggcagcgatggatcgtaggccctgtgcagtgtccgcagagatggctcacccatgagggctgaggccgtcctggatgcctgacctgaggctggactgagggttcgctggttttagagctttcaatgggactaacggggacctcactggctctgcctacgtgctgcttgggatccccaatctgggcttgggggcagcagggcctcagggaaggggctctgggagtcctgagctggggttagtctagagaggcacccactggatccctgccccctcaggccctgtcctgcctgcccgattggatgatgaaagggcaggaagcaaagatgagtaaaactgcaggggaacgatgttgcaccaaagccttccctttctagaggtagccagtggctactcgctccctccgaaccccctcttcccctcatgaccctgttcccaggaactccacctctgctactgtctttgaccttaaaaagtatcctctgccaggccgggtgcggtggctcacatctgtaatcccagcatttgggaggctgaggcgggtggatcacgaggtcaggagttcgagaccagtctggccaacacggtgaaaccccatctctactaaaaatacaaaaattagcagggcatggtggcaggcgcctgtaatcccagctactcgggaggctgaggcagaagaacagcttgaacctgggaggcggaggttgcagtgagccgagatcacgcctttgcactttagcctggaacagagcgatattctgtcttaaaaaaaaaaaaaaaaaggtatcctcggctgggcgcagtggctctcgcctgtaactccagcactttgggagactgaggcgggtggataacctgaggtcaggtgttcaagaccagcctgaccaacatggtgaaaccctgtctctagtaaaaatacaaagattagttgggcatggtggcgcatgcctgtaatcccaactactcgggaagctgaggcagaagaattgcttgaacctgggaggcggaggttgcagtgagccaaggttgcgccattg

SEQ ID NO: 588537 - DNA, 4001 bp, Homo sapiens
gaacagcaagaagaactaggaaagccacgtgggagctgccacctcagcctggagccccttggtcccagctcgccctgaggccaggcctggcccggggggtgcagtggggcccctgcccataccctgcaggcgcaggtgcagggggaaggcacgctggtgaggagggcaggttcttctctctgggccccgtacctggctcagtggttcaggcctgggctctgtcgccagcctgccagggggtagacacccaccacgccacccagcaggccactcttctgtgaagggaggcgggcaccgactcctgccccagcacggctacccccacagcccggctgccctgtaggtgtcccctgtgtagcacggccgccccacagcctggcccacccgacccctgcacgccgccaccagccatgcatgtggtcgggtgcgcctgcctgaggccacaaggccagtctggccaacagcgtccatgaccatattgtttggggatttatgttatgaaagaaccagtggttcttaggtccgaatgcattatcctcctttaaacagaattcccgaaaaaggcctgctgagaggacaggcttccccagctctgaccacagcctgcagcccagatgacccaggacagggatgcatgaaggagcatagtcagagcagtgcccgccgcggtattgaaggtgggagtgccacctggaggccccagggacacagatgtgagtagctgggcagagggctggtggctctgcacagagcccagtgggaaaagtgacgggggtgcagaggggccgtgggaagcccccaggccgcggtgcccgggagcagatgtgcaaagtacatgatgtggctgagccacagtcctgcctgcgggaaggcctggcaggacccgcccactcacccgtgctgagaggacagcgtccgcaggttgttttctggagtgagggtcaccaccacccccacgacgttcttcatgtccttctccatggcaaagcccttttcccgggaggccaccgcaagcacgtaccagggcccaagaagctgcattgaggcggctcccgttagggccgccagccctccagcctccagcctccagcctccaaccctccagcctcagcctccagcctccaaacctccagcctcagcctccaccctccaaccatccagccctccagcctccagcctccaaccctccagcctccagccttccagccctgcagcctccagcctccaccctccaaccatccagccctccagcctccagtctccaaccctcccgccctccagcctccaaccttccagccttgcagcctctagccttcagttctccagccctccagcctccagcttccaaccccccagacctccaaccctccagcctccagccttccagccctacagcctctaggctccagccctccagccttccaacctccagcctgcagccctgcagcctctagtctccagctctccagccctccagcctccagttctgcagccctccagcctccagccctccagcctccagttctacagccctccagcctccagcccagcagcctccagcctccagttctccagccctacagcctccagccctccagcctccagttctccaaccctacaccctccagccctgcaacctccagtctccagcctccaattctccagccctccagcctccaaccctccagcatccacccctcctgccctgaggctcctgcctgtgggactccccaagggctggcccaactaattccccactgctcatgctggtctgggctagccctggggggcccagaagctgtgtggccttaaaggaggggctggcccccgaggaccagctctccccacccccaggaggactgtacctgctcagggtccagtcttcccaaccacacggcctgggccctgggcaccgagaccaaagccagaaaagcagccagcagcaggccgcccatcctcccaggtctacactgcgccgcaggcccaggatgtgcagtccctccaggccctggagacccgtttatatggctctgaatttctccgtgtgggtggcactaactgccaggaaccctcctggcctcctgcaaaattacccaggggagcactgagcagtggcagcctctgagcccagatcagaccagctgcacagccaggagagggtctggagtgtgtggatcaaccatactatactgatcccctgctttcttccaccagaaggttccagaatgggcatcctaaagccagccgcaccacctcccccgttcctggggacccacgctctccctcgcccagcctgggaagcagggagactgctgtccgctgccaggcccggcaggaggccaaggtcaagcccaaggagaggaaccagggcgagaacaagtggttctcaggaactgcggttttggatatcttttgtttcaatcattaaatataaaaagtccctgaaagccttttgaaaaaggctcccacctcctcctggcccacccaccattctgctttgtggcctggcctctgtcccccacagccagcacccccagaacagactgtcctgttccttccacctctgcagcccaccatccggccctgctgcctcctgcctcccctccctgggaccctggcctgcttgtgcctcccaaggccccttgagagctctctgcagccccagtccgggagcagaggacagaggtgctcggcagggtctatctgagcccctgaagcccactgggaggcagccgggagggtcctcccccagtgccgtggcctgcaccctctgggattcactcccacacaccttcgctcattcatcaacaagggtgcaaggagcacgtccatgcaacaaggctccagtgcccagggccgcctgcactcacagagcttatgctgcagccctggccacctgccctgtacccacgcagcagggcctgtgaccaccagagtgcaggaggaaggcagaaaccacacagctactgggggctgggcctgcgaagactgaccgggcagtggggccacggaggtgccagccacagccatggcaagcaggagttgcccaggggctgagccacagaacaagggagcgggacacttaggcctggagccttcaggagggagccgtggctgctcgcggtaatcccagcacttcaggaggctgaggcgggaggatcacttgagtccaggagtttgagaccagcctgggcgacatagcaagacttcgtctctacaagcaagtttaaaaattagctggacatggtggcgtgctcctgtagtcccagctactcaggaagctgaggtaggaggattgcttgagcccaggaggttgaggctgcagtgagctgtgatcgtgccactcctctccagcctgggtgatggagcaagaccccatctctaaaataaaataaaaatacaaaaaggaggaagccgagcagctgggccaggcctctgagaaggaaacacctgccagccccactagtgtccctaagggctgcggggagcctggttctcgaggcagccacaaaacagcacgctacatcagccgggtgtggtggctcatgcctataatcccagcactttgggaggccgaggcgggcagatcacctgaggtcaggagttcgagaccagcctggccaacttagtgaaaccccatctctagtaaaagtacaaaaattagccgggcgtggtggtggcgcaagcctgtaatcccagctactcgggaggcggaggcaggagaatcgcttgaacccgggaggcagaggttgcagtgagccgagattgcgccactgcactccagcctgggtgacagagtgagtaagactccgtctcaaaaaacaaacaaacacacaaacaaacaaacaaacaaaaacaaaggataaacctcagagtctaatgagactagttccctgctggggtggggagctggaacagggtggggggatgaagttagacttttttgagtaaacgtttttgtatagttttgactttggaatcaaagtaatttggtatgttat

SEQ ID NO: 588538 - DNA, 4001 bp, Homo sapiens
agcatggggaatagtgcaggaaacagcatgtggaacagtgcagggagcagtgcagggaacaacatggggaacagcacagggaatagttcagggaacagcatggggaacagtgcagggaacagcacagagaacagtgcagggaacagcatggggaacagtgcagggaacagcatggggaacaataaggcctagctgtgtgcacagccgggttccacctgccatcacagggcaactgcacttaccaggaaaagcgaattttcccgtactgtctatttctgagcccacgatcttctctatctcacagcttcctgagctgaaaggcagcaaagtgcccatcggtaaaatgctagcctgtgtcccgcctgctgggctccttcccggagtggggctgtgtctttaggaagggcacaggcagcactgtggagtatcccaggcctggagcaggatgaggcggggaatgtgccaggtggggccttcccctggggattctgttccctccagccagtcacctgtcccacaccccttttccttccttctaagttcacggggcttcattaaaacactatgcttatatttgggataaaatgcagatccaggagcctgggggtcgagggctcaggcagacgggcaccgggagtgctggcccaccagcgggacggcactcagcccagaccccacgctgcagcgggtgcagcaacccacgcccagtccccggccatgcatgcctcttcctctccagcagcccccaggcctcttacctgttatatgcaaccttcacggtcaggttactcccgctcaaggtgaggaacaagccctccacccgcttcggggccgtcagcaccaggctttgatcggaggccacaccgacttccctccagaatcctccaatctagagagatacggagcctggccaagagctgagcagtgggtctgagacccccaggggcattccacgaacccccgggcaggggcctgctgggctctgagaggtcagcagatggctgtgaggctcggtggcaaagcagcaagacatctgtgagcccactgtccccaggcatgtgtccctccaagcggtgccttcaggccatcagacagcaatgcccacagggcagcccctccccactgggccatctagagctgcggaacagtccctagggcttctgcgacatgtcgggaggaaccacaggccctgcctgacctcggaggcaggacccaggagcagaggcctggaaaagaaagcccgcagggcgcggcggagtgagaaacgccagagaacaggtggctcgggtagcgcagctcgccagcctgccaaccacgccagaggatgggcctcctgccctcagcaacccgcccagagccgggacttccgctgagacttttaaaaaccctaccattttcgggaggaaagaatcttcgtctccggcatctaccttctctgggcctgctaatgtgcctctggcccagcagccggcacagactcagcggagaagaaaatgccgctaacaggaagtgtctagccgggcaccagcgtccccacgagctccccacaccgggagaggcctccttccctgagcctgaggggttgggggtgtaggaggagccccaccaactaagaaggagaagccaccttctgccggtccagctcctccatggctgctgccacctgcgcccggagcaccacgaggacacccaggatggtgcacggcagcctggcctccgtggcggggtccgggctccgggttcccctgctgcacagcctgggccgattctatacggacagtgcaggcttgtgcgcccacccgggaatgtcatcaggacagcttggctgctggcagctcagagacgtgggtttctgcacaagcgccatcggccctggtgacacccacgcccaccgcaggggttagcctggcctagacagcagcctgcccagccaccctcctggcatatggacagcggtggacgctgctggggccgtctcggagcctgagaggaagaggagctccacccacaccacctggggctcggtgacccccaccccacatgacacttgtttttttgggctcgttctggcctgcgctgcgagggctgtgggcactgatgggcaacggaccagagcctccagcactttcctgtgccaccccacgcctggccctttgaaatgtgtgccagacgcagtgggcagtcagagctccggaggccggaggcacagcgccagcgaccagagtgacagtgacagtggggagggcctctgctgcaccaggcatcaccacccgggggcagtgtggagcccggccctggagcctgatcacccaggcttgcagcccgcctggcctcttcctggctgtgcagccttggataagttacccaacccttctgtgcctcggtttcttgattttttttttctttttttttttttcctgagacagagtcttgctccatcgcccaggctggagtgcagtggcacaatctcagctcactgcagcctctgcctcctgggttcaagcgattctcctgcctcagcctcctgagtagctgggactacaggtgtgcgccaccacgcccggttaagtcttgtatttttagtagggacggggttttgccatgttggccaggctggtctcaaactcctggcctcaagtgatccacccgcctcggcctcccaaagtgctgggattacaggcatgagccaccgcgccaggccagtttcctgatctttgaaatgaggagtacgctgggtagctacctatgtctgtgggtctgctgtggagcgctcaggctggctggcagtcccctggccacaacggtgacccatttccaggggtgtaaaccaggtgcccacgatcatatcagtggtgaggggcaaaacccaagtgggcctaactccccggcctcctgcagctcccccagctccccccccggcaccggggcctgtgtgcccagcacagccccagtggccgggccgtcttcacagggtgcccagttccccacagcactgcagacccatagggactgggccaggatgctccattcttcctgtgggtgcagcccccacacaggccaagagtggctgctgcctcctgcccctccccagggcccctcacccctgtcccctgccccctcacccagggcccttcacccctgccccctgccccttcccagggcccctcacccctgccccctgcccctccccagggcctctcacccctgcctcctgccctctcacccctgcgtcctgctccctcggccagggccttctcacacttgcctccctgcctcagtctccccagcagtgctggggtcagtcaggggcccgcattgccctcccccagggcatgtccaaagaggtgagggccatgaggctgcagcatctgtttattgaatagaaagagacgtcccacaaggcatcccacaggcggggggtggaggatggagagactccaggtggtccccgagggctgtgggtcttgactccaggggcaaaggcgcctgctgctttggctccacctgcgtagaaaacgcatgcctactccatcacccactcccgcgacaaacgcccttcctgctccccacaagctgggcatcactcttccaaagccaccactgacaggccagggagagctcattctgctcccaaaactcctgcaaacctggaaacacacaccagctaccactgctgccccaggcgagaggctgccccagaggccatccctggctccagcacttccccaccttccccggcgcgggaggacccagtgccatgccccagtccctggctgagtggcagtgagccatggcctctgcctggtcctcggtgaagggggctgcatggcaagaaaagccccggaatgtccatgaagccaccacagaacccacagcctccacggtcacgcgtggtggcccaggcggggcactctaccccgaaagctgcttcttcaagatcatggcgggatggggctacatgttctgcccacagaaccttctggacaagggcgatttggtgt

SEQ ID NO: 588539 - DNA, 4001 bp, Homo sapiens
tcctgaagttctggaggtggaaggtgatgaacagcctgtagtcagtctccgagacggccactgtgttctggccctcatctgcgtggagacatggctcagcgtggcctggccccgccaccctcagggtcctgtgacacgtgctgtgtggccgcaagtgaggatggggggtcaagtggccttttgaggcgggaggggaggagcccacggtgctcacccagcggagacccctgcacagggggcgggcagcagcggcacagccccctccctccttgtcattggcttgcagaccctggtggcccctcagtgggctcaccccccagagctcagcatgacacacctgcctccctgcttcccctgggccaggagcccccctgggtaggtgccaggatgggtccctccagttcagggtcaagctgtcaggggcttaactaaaatccccagagtcagtgctcaccagaatatggcccaggccctggagaaaggagacccccgactgtgagaccaggaggagcctggcttccacttacagttgatggagtattccccattcttctctgtcttctcgcagaccacgaccacagccacacactccccctgcaccctggaagccagccaggaagatgccgggagtggagctccagccccctggacgtgcgatggcagagagcacccctcctccagggcacaggctcaccctcccaatgcccaggcctcattccacagccccaagttcttgggctgggccctgctgcagcccaccggacaccctcatctcctcgaacctcaccccagccttggaagggggcgatttcatctctatgtttcagggaagagcacagtgccaggcagaccaagtccctgctcccacctcaccctgcccccaagggtcacacgcacaggctcaggctctcaccagagtgcaagtcagtgagtgtgcgagcgtgtgtgtgcaagagtgagagtatgcgttggggtggcaggggcatgggtcttcctgatgccagctgagatgggcaacacgcacatgtattcgaaatcaaatattaggctgccgttcttcaagtgttcaatattccggacgaagaccctcaggtctccattttctttaatccgattcaggtcatctgaggccatgaaaatagaataccagacccctgaaacctgaagacaaagagctccagtgggtggggggccgcgggacagccctggggatgcttagcgcccacagtcttccctcccagggcccggccccttagcatctggctcccaaccagaacccctccgcccttccagtgcccccaggtctcccctcgtcaccagatcccccctttacccccaaggtcgcccctctgctcacagaatgccctccgcccttccagggcccccgctgccccccaggtctcccctatgtccccagatcccccctttgatcccaaggtcccccctctgctcacagaatgccctctgcccttccagggccccctctgccccacaggtctctcctctgcccctccaggtccccctctgtcctctcaaggtcccccgctccaccctttcccactgagtccccctcttttccctaggtctcccctatacttctaggaacccctctgtcctcttagggcccccatctccctgctggccgccactccactctccagctttcccctctgccctcccagggccccctctaacctctcagggccccagtcactctcccaggcctctcccacccgaccctcccggagtaacccctgctctcccaggctgctgtcacagcttggggaggagaggtgggctccccttggaccagttgccctggtcacaggtcagagaccccaggctgggggaagacaggtgccttgaagcctggccccttccccacagaccccaacgcagacacaccctggccacgttgtagttcctctgcataacggtgtggggatcgaactcctgggctgcgatgaggctcagccccaggctcagcagaagcagagccatctttgccgtggacgcctcagccctcggcccaccccctttataccctgctgccctgcggcttccagccctgcagggcggcccactctgtggcccgtccacacacatcctgtgcccactgggcatgcagccaaaggccccgaggctgctgccctctctaccttggggaagatcaccccactcccttgtgggagcttcctggatccatgggcaaaggaacctgctgtcccctcactggaggcaggcaccttgtcccaaatgcaggggacagcctctctctcagcctgcaagaggacccatggtggctgtgtctgtggagtacagggtgtccctgttcccctcccatcccctcccgctccttccccagcacagcgtctggggccggagccaatggtgagtcacagcgtccccagactcaaccgacggccgggcgcttattcgctccttattctctcagcccagtaacgagatgcagacgagctgggaaataagagagtttgcttctgtcaccgggtacaggcagaagcccgggaaaatagcactagaccagctcaaaattgcagttttccagagcttatatatcttcgaagctgtaggtctacgtgtaagtgtgcattcagctaaagacacagtgatgaacttcttctaatctataattaaggcctgagtcctgaagaacttcctctggagcctcagtaaatttacttaatctggaggggtccaggtgctggggtgattccccttatcttttctcctgctaaatcatggaggtttggggcgttcctttagaccccagtaaaacttgtttaatcctaaacgggtcctgttaagaattcctttgttatcttgtcatgcttcaaggcccaggagaggcctgggcaaaactcttggtgggcttttgttacattccagcctctgttgaagggcgctggccctctcagcttttaatatttgacttcaccacccggtcagtgctgaaacagttgtcgtggaggccggcctattcagccgttagtgagacctggcctgccacaatccccactgtcaaattatgcatgattgctatcatgcttgtatatttatttcttatgagaatcatggggggatggggcattataatctttctggctacttcctgctgataggaggtcattgttacggggcaccaaacgcagtgttggagtgaaagatgttgatttgttcccagtagtactctctgttttgggggcctagagaaagcgcctgttgaaatagtatgagctggagggatgttttggaacaatgtgcaacagcaatacattccacaatgtaacatgatgccggtgcctgcaaggacggcctggactgcgaggacgttcagccccgagggagaccctctgctaagccatgatgtggttcggtcattaaccgataacctagggctggagatgacctgcatctgtggacgatagccctttttttttttttttttgagtcttgctctgtcgcccaggctggagtacagtggtgccatctcggctcaccgcaagctccgcctcccgggttcatgccattctcctgcctcagcccctcaagtagctgggactacaggagcccgccaccatgcccggctaattttttgtatttttagtagagacggggtttcaccgtgttagccaggatggtctctatctgctgacctcgtgatccgcctgcctcggcctcccaaagtgctgggattacaggcgtgagccaccgcgcccggtggatgatagcttttaatgccagagaaatattcccggaattgtcaggtacatacatgcaatattcggttctgatgagggtgcagggtccctgctaggccgctgttagaatgtctagggccatttgattttgcaggatagctttccacctatggtatgtttcagcattcacacgggaaacactttggagactgtcgtttaagcctcactgcgtaaaactagcgagtgcctctgtgtgccatatgaccatttctaagccca

SEQ ID NO: 588540 - DNA, 4001 bp, Homo sapiens
aggggcgaagagagggagagaggggcagggaggggccgggacccgcggccacagacaccaggagccagcggttccaccttccgcgtgcagaaagggctggtgcaggcacaggggtgacatcccagacccgaagcgggggtgtctgggtctccgccccgcagcccgcccaccgtagagctgcagccactggttccgcaggccccctttccgcatctccaagtacagcaaggcaaagtgctggtagtcggagaaggccactcggatgtcactcagggccatggctggaggagcgagagccgctgaccccaggcccagggcacctcccccccgagcgtggcacccctcacgccccggccccaggtgccaatccagcagtccatgcagcctccagggcccccacgccacagccctgcctgctgccccacctcacctgggttgctgaactgccccggtacagcaccctcggtgaaggtcgtgtccattttctggcacccgccatggggcctggggagaaagagccccaatcccctgagtggccacccctgcccagcgcccaggcctagagcctaccttgctgtctctgagcccagggtcccctgttcaccctcacaatccttagaggacatgggactttaggatgaccttagaggtggggacactcctgctgggggtggggtgggtattaagtacctgttcacaggcacacagcctagaatgcagggcctccaggtcccccttccagacacagacacacagaagacacacacatacacacatgcacacacacggagatagacacagacacagacacactgacagacacacacatagacacgcacacaagacacacacagagatagacacacacagccagacacagatacacagacacacagacacacagacgcatacagtgatacacacatacacactcagaggtacacatctacaaagacacacatgcatacacacgcacacacagacacacacacatgcagaaatagacacacatacacagagacacagccacatacagtgatacacacacagacacagacatgcagacacttttctcaacaccaggcctcaggcagtgcttcctccagggcctgggtccctctggactccgtgtggctgccatctggggctctgccgcacagagccgtcgaggacccgtggtctgacctcaatgtgctggggacaccatggtccctctggaccttcatgtggcctcatgctggccatcctctgaggctgagtctgatgggctcgtgtggtcacttacgtggggtatccaaacttgagggccaggtcaccattccccaagggggtcactaagaccacagccatcttcatggtgtccttggagtccaggaagtcctggtcatctgacaccaccccgaccatgtaccaggtgccctggaactgcagggcaagtgcagggaaggctgggaggccgcccctgtgccctgggcctgagcccaccacattctgccccgacacagctgcttcctggccacggcaggggctgctgtacacatctcgaccccgatgcagaactgagggaggggggcctcagtacatgagcaactggcccccaccagcccagcaccggcctgtctgcagctggcacccagggggtacggctggatgggtggggctgtggcaaggtcacaggtctttgtggggtgggtgggggacagtgaggcacaggcaaccaacttgtccctattttgggccctggggattgttgggggatgcaactgaaaaggtaggatggaggctgcagtcttccccagccaacccctactccagtcagacggagcgggtgaggtgggggtttcccctgcccctagccctgctgagcctggatcaaagagggtgtggacagggacccggggtgcagcaccaaagccgggaggactcattggagatgaggaggaaacagggctgggcacacctggctggcatcaaagttggcctggatggggacctgggcctggcctggggatgcccagagcagggcaaggagggaactgatcagcagagcccgaagcatcatgcagcaagatggcatctcctccggacacgggagcagggcagagctgaggtggctcctctgtaggctttacgcccctgaggtgccctggggcggctggcctgggactgcacccactgtgacaggcttctgatcaagttgcaccctgcagcgctctggcctggctccctccacccaaccccagccatccgttgcctttcctccggggtggggccggatgcctggcagctgagggtagttctgacgggcctctgggctagggggcctgcagctcacccatcctgcctcttcggccttctgcagcccctctgggatgttggaatcccccctaccttgagctcaggcacagccctaagcccccttctccgggaaggccacccagaagctcaccctcacctccgagcctcaaaatgcttggtgcctctgcagggtctgcctcgggggggcctggtgggcaggtcacagtgagtcctgcacattgtgtacctgagaatggctgcctgggtgggaatctggaagggagcagggttgggcagggcactggccgggcatggtgtggccgtggtgccagggctctggtgagtggacaaggctgtgatctggaggcccaggtcagagggcagggggcgcacagggagccagaagggatatggggtagcctgtccccagcccactctgtcagtctgtcctgatgcggggtggagacactctggcatgtttcaaacaaatgtttctttttgtcccctgaaacccttatctctgcccaatctcagtgcgttaatcccacacctcaagatacccaacaggtccaaagctcctctggggcctcgagcctcaggcctttactgctgagggggtgacagggtggcgttgggggtgcagggcacctgcctaagggattagctgagtcactgacccccagctcagcaccggcctggtggcagtggcagctgagggggtatggctcgacgtgtggggctgtggggcaggggcacacgactgtgtggggtgggtgggagacagtgagggacaccccctcctagctgtcctgactcaagaccccactgggagcaaacactagagggcctgttcctttgttgacgtcaggctgagattttagagggggaggtccgggtggccagggccaggcccaggacgggtgatgacagcgcagacagccaggagccagctctactgacttgcttccggagtttattgtgcaggatgaagcctgagtgggcagggttgctttggcggggagccggggcaggggctcggggaaggaacagagcagagacatccagagcgtgggggtcacctggctggccgggatcccagcttcagccctggggagtcctgaggggtgtgaccgaaaggctaggatggaggactgcagtctaccccagcccacctccactccagtcgatggagcaggtgcgggctacggggacttttctctgcccccagccccactgagccccgctgagagagcaagatccatccctggggcttggatccccgctgccccagggtctacagactccacccttcccagccccagggtccacagactccagctccagcctaggcctccctcctgggggtggtgggtgaatccgccctgagcctgctctccgagctgtcccacggcatccatgtagcgtccttggccctccccttccatcccctgttccctcccatcctgtctcccccaccctggtttcctcctagcccaggagccagacacccttgctgccaggtggtccctgtggtatagccccttggccttgtctgcctggggcctcgcacctgcaccccccaaccatgagccttcaggagtcagccctgttccagccactgggacaggttttccttctgagcctcacacctgtgcacccatcaatgtgggcagccccagtgtctcccgcccggccctggactg

SEQ ID NO: 588541 - DNA, 4001 bp, Homo sapiens
tccaagagctttccctaaactgcttcttaaatgagccacccgggggataaggtgaccattaagtcaccctccacacagaatcctctttggagagacagcggagttcctgggccccagctccagtgatccctggatccttagaccagaggttaaggccaggacaagtcagccaacttctggctcctctgccacacgggctggggccctcttgggtccggggatgaggtaagtggggtgcagggacaccctcaaagtccgtgggtgaaggacaggttcaacccaaatacttccctatccaaactgaccagcagagaaggtctaaccgaagaagcgctcagaggccgggaggacactggcgccgctgctcctgctcccggagcagagaagcttctcccgtgctccccacctccgcggcctcctaaaggtcacttctgggcccgctggtcgggcagtgtctgctcgtctggcccccagggaggcctgaggcgaggaactggctatttggggctgggcccgcggagccaggtgtagagatccaaatggagtctccttcggcgagggccaggccggagcctgaactcccagccctggcctggctaagtctgaccagtcaagggtctggggacgcgatcaacgacaaatgttggccccgaagacttcggcctctgaaactgcgctgggggttgaggaggatccccgattgccggaaagctgggagcggcccaagccggctggagccccaatgctcccagctggttcgcccttccctggcgccgctcgcggcgccgccagcaaccggagccgagaggtggaggagagcgcggggctgtcgaccccggcaccgggcaaggtgagaagggagccgccccgggccgcggatgggacttcgcttccagttcggaagaaacgctctcctctacccccagggccgagatttcggtttcaaccttgtttcccttctgcgtcccagcagccgggtttcccccgaaccgggagccaccggccttgcattctgaccgaggatccccagcacccagtcccgtgcggcacgaaggacgctccccaaacttcggggagcagaggcgctgactggcccggccccatcccagctctcagccccgaccccacagccgcgcgcctaccgtctcggtgtcgccgcggtcgatggcggagctgatggcgggagcctcgctcttggccctgcggtccatctcgtcgatgaccccgtgcacctcggggcccgacagactgtggaacagcatcgcggcgggaccggcggggccgggggcgcggctcctccgagggagggcttgccccccgcctcagctgcctggcgctcctggcgctaacgggcccggtgcatcgccaccgcggccccggccccgcccgagctcggctgagcccccaggccgggctccgggccccgggcgctcgcggggcaggacgcctcccgccgaggcgcaggggcagctacattgcggggcgcctgggcgacggcgccaaagccagggtcacaagggcacgggacaagcggggcggggggagcaggagactaggacagaggtcggcgcccgccgcgggcgctttcacgccgcgggcatcgcccgcccggcttcagcgcccggggcgcaaagcaagggcgcaaactctgcccgaggcggcgacggctgcggtcggggttcaccctgaagccgctaggtgtccgcggcggcccagctgcctggacccctcccctccctggggtgcgcccccagcccaaggcgaccctcttgggcgctgagtcggcgactggagtaggggtttctccgaagcctgcgagccgagtcgagccaccgggagaattgaagaggaggaggaagaggaggaggaggaggcggaggaggaggtggaggaggagaaaaaagaggaggagcagagtgggaggaggagccgccggccgcgggcccagccgcgcgcaatgctctccaagcgcgcgcctagcccagccccggctctgcagtccgcgccagcgcaagcctccgcgccttttctacagccgcgcctgacatcacgtcctgccgccgtgccattggccgctcggcgccccaggccctggcagcgcgtgctccgggaaggcgggagacccaagagggaggggagaggcaagaggagcagaggagagtcgagatggtgggagctggtgggcgaggctggagggcgggggtgggggggaggcagggaggagggagagcgcggggtttggagtttttaagatacgaacagcttcctgcgatatcttcagaaaggaaaattaaaccctctatcctaagaaggcgcagcaaggggatgctcgtctcactgcggtctcccctcggcctggagccgcggcctcaggcacccgcctgggaggcccgggaaggcaggcctgtggcagagttgcaagagccttcggccggccgtttcccatcgagctccgccttcggcccgggctctgcacagcgggctgcaggcggccgtgcaagcctcctgggtacccggcagagcctgagtggcgagaccggcgagagctgtgactcccggggaggggggccagccagcatatccacgctccaagcccgctagggcccaatctgcagcccagcgtgtagcttctcgctcttcccggtctctccccagcctggaagagtgggggcgagcatggctttaggaactcagaaaggccagggttcgaatcctagctctgccatttacatgcactgtaaccttaggcagtgacttatcctcccttagcctgtttctgacctttataatgggcgacaagaagctctcctccgcatggacgtgttgattgaaagagactgtggatgtaaaatgcctggaacatagtaggcacttagcaaattatttcattactctctcttgctccttttccattaaaaactttctcactccaagacacattcgatatcagtgaggttcttaaaaaccacaggcctattctctgcccactgggcacaccatgtctcagaccccgctgatggcgcgagtcctccttacccgcctggctgcaccacctccccaggggccaacaaagtagcgtgctgggtaaatcccaactgctacccccagcctccaggtttcaggctcaccctagagtctcctggggactggagggaaatacccaggtgtctggtgggggagggatttaggaaataaaatgattgtagacaaaaactgaataagcacttcggttacagagtcccatctgggtctgcttcggaggcaggtttggctccgtctaatagggacaaggcgggtgtcagtctgaaatgacttgtttgccaggacaggtaaggggatagtcaggacctgcggtttacctcacagggtacagagttgaggcatgaaatcatgtttttcacgtgtgtaagtaactttcacacacaaatatatgtgtgcacaaatatatgtatgcgtgtaatgcccaagcacatgaacttgtgttcatgtgtgcaaatacacatgttcatctctgttggcaataacacagccagcacgaattttatctctgttggcaaaatcacagccagcaccactgaagagctagggtcttacacatgcgcatcaggtgtaagtgtctagagctgggaagaaggatgcaactgcaaaatggtaaattgcacgttatacctgcacttgcgtgctcaggcgattctacttaaatcactgcaagtgctcctacgaggtcgttttgcataattgaaaaaacttgaagttacaatcatatgtgtatattctgcatgtgtacagatgccccaacgcgagggaaggaccactaaacccaaagacgcgcgtgcccgtgtgttcacacagacgtgtgcttcggcgcctgcacacggccggcgcgcaggcatgcggacgcctacacgaatacataggcatgttttattgacgcatctggggcactttctttcaaagaaagtaaggaatgaaaatccaatctgagagtcaccagggttcat

SEQ ID NO: 588542 - DNA, 4001 bp, Homo sapiens
catcacctggagctggggcaccccatcgggtctccttcatgttaagcgtcatggccactctttctagggactcctcgcaaatgtggctgccctgcctggtggccctgtctgcaggcctccggggtaaatatcaatgccttccccatcattgggcagccgcaaaattacttatgagtggactggacaagccgatccactgcctttgtgtcaggcgtgggtgcccccaacaccgtcagagttactcaaacgtctggcttcccgctgcttctgccccccacaccccacttcggtactgcaggccccctggaggaaccacactggggaggtccaagggtgccctgtgggagcctcgagtctgtgagcgggttttccaggtgtcaagggctgaggactccctcttcacttagaaaaagtctctggaagagaggagtgcccgctgaagggaccgggatttactgacatattgcacccgcctccctggctgtggaccccgccggctccagcccatctcccagtgggtgagagacaccaggaaggggctccctcgacctccggcggaaaaaactgggctgcgcctccccacgcagtggcgggaaaccggcgatgaatgcgccccgcatccggcaaaaccgcagctccgggtgcggagcgtcgaggacccgctgcgcgcccggggtccccatcgtgggcagcgatcgcaggcgaggacccggctcggagcggggcggcccgacaggccgacacagcgcggattcagcaccgcggaccggacagcgcctcggccgcagctcgccgccggcgcccgcgtcgggcaaaagccgccccagcccaccccgcgccgcgcccgcgaccccagccttacgctgcatggcgactccagccctggcgggggctcctgtgtcagggatggcggggtcggcggagcctggacgccagcccgcccgctccggccagctctcccgagcgcgggcgcgcagtcctccttcctccctccctctctccgccccccagcccccgcggccaacccctcccaggaaccgtcgaaaaataaataaataagtagggaaccgcgagcccccacagcctggatgtaacccccttcccgccggccggtccctctcactccccactggctccggggcctccttccccatcctgcggctccagctggcccgggagtcgaggagaactgcccaggttccctaagaaccaaagtgctgggagctagagtggtgccaccaggaagctggggggcctggagaagagaggctttttcctacagacgggccctgagcggggataaaccgagcgggtgtctgtgggcgcagacgctgaaacctgacttcggggagaccgacggtcggagttcagctcgaccttggcccctgcatctgactctgttccgctggaacgtggaaagagtccggctggggcggccttcttggggaccctcctgtcccgtggtcactgccccgccactgctccctgcgcctcctccagcccagggagctggctccgggctgcagaggtctcctaagcccaccctggacccccgagagctccctggccggagcagcgcagtgccacaacctcactcactccctgacaacccaggccaggggccctgcaacaaatacaggctgaggcgcccaggcgcggacgttccggggtcctcgcgcccactcccgcccagatcctctagctcctgccagcctccgcggccaggcccggaaaggcctgaggatctcctggtctccccggtgcagccactcggcccgggcacccacctcggcgcaggtccgccctccgcgccagcagtgctagcagcaggtcgcctcccgccgactcccgggccgggcccagctccccgcgcgcctccatgggtcccgccgcccggcgtcgccactctccagtcccgaactttcccgggcccagcgacgccaccccgcaatagccccgaaccggcgtccaagcgactccgggtgctgctgggcgctgcgcccgcgggccgccctggggcccggagcctctggccgagcggagggcggagcggccggggggcggggccgcggggcggggcggggccgggggtcgcggagaccagcccgggccactgcggactctgagcgcctttgcgccgggacctgcggtgcccagaggccgccccgcgtgcccggcccgagggcgggcaccggtaagggagggcccaggtcagggcttcccgccagcgttcgtcccggccccgcagcttcctgcgccggagcggcccagaggcagaggcctgagctggagcacacgccaggagggctaaggttcccgggagaggggtcgagaaggcagcagggtcctcccgccgctgaggtttggcctcgggagcagcagatggtcggcgggagctcaacccgaaacgcagaaggggtgagtgtggcgccgagggctgcgtaccggaaccgcaaggtgccggaccgatcccagatgctaacaggcttctgggctccacccctggaactgcggccccggacggctcagggaggaagggcaatccttgagagagaacaggctctgtgtcctggacacgcagccaagacctcgggtcgtgaggggccgagctggggaagccccagggcacaccttccatttccagcccccagcactccggctccattggaacacggtcccttacctgatatttcagcctcttgccccagtccacacaggtgagctctccagaacccacctgtccttgcaggcagagggacgcacccacccctgcccagagggccctgggccagcaccagccctgggcagccacccggggaagaacacagcagtgggtggccctcggcagcacaggacttggcaaaggcaggggtgccctggcagtgcgcagaaacacacaggaagggttgggggaccaggggctgatgccatcctgcaggtccctctccctgtgggtctcacagcaatactctgtccactctgcctatggcttctggactgtgagctttaagggcccaggcccagaaggatgggcacaagaaaccacagtccctccctcctagctcccagcaggtccgatgtgtccgttttgagcagtggcccatgcagccagctttctgccccttcactttgcacagcacttgttacccaagaagggccagggcaaggacacgcgggtgcaaagccgagtgtgtgcgggctgtgctgggtgcaggtggctgagtgtcagctgctgccgaagcgatcaggggtcgtgtgtggcaggactggggaaggggcggcggcaggttaaggaggcggcccaccctgctggcatctggccagccctccaacaatgcctccattatttcccagcgtccgtggtgatggaatggcccttggggagggtggttcaggcgggagacacaggcttgggtcccctgctgtggggtccagagacctgggccgggctgtgtgcaagagctgacgggcactggtcaccgggggaacctagcaccccttggtcggccccatcgccccccagctgtgcctgcgatgccccctttttttctaggggcctccactccaaccgctgtcccgcactcttgcaggccagcgtcaggccctccccgccaccctgggatctggaaactcactctctgcagtttccatctctgtgtcccgcctgcagagcggcgggactttctttgcctggccgctggccctgcacgcacccccttcctcgcgcctctgccgcccttgccgtttctgtcctcagtgtcctgctggggcttaccccgagtcccgcccaaggtgcagacggcggcggccccgggcctcgctcggtcgcgctcgagccccgtttccagcagcatcgcggccaccaggccgagtggcgcgagacgcgctcctcctaggtcagcgtcccctggagggttcggggctcccaagtcccgccgcgtcgtgcggggcagggagcccgggagccactgggcctggcgctgtccgcggtgctgaaggag

SEQ ID NO: 588543 - DNA, 4001 bp, Homo sapiens
tagccccgaaccggcgtccaagcgactccgggtgctgctgggcgctgcgcccgcgggccgccctggggcccggagcctctggccgagcggagggcggagcggccggggggcggggccgcggggcggggcggggccgggggtcgcggagaccagcccgggccactgcggactctgagcgcctttgcgccgggacctgcggtgcccagaggccgccccgcgtgcccggcccgagggcgggcaccggtaagggagggcccaggtcagggcttcccgccagcgttcgtcccggccccgcagcttcctgcgccggagcggcccagaggcagaggcctgagctggagcacacgccaggagggctaaggttcccgggagaggggtcgagaaggcagcagggtcctcccgccgctgaggtttggcctcgggagcagcagatggtcggcgggagctcaacccgaaacgcagaaggggtgagtgtggcgccgagggctgcgtaccggaaccgcaaggtgccggaccgatcccagatgctaacaggcttctgggctccacccctggaactgcggccccggacggctcagggaggaagggcaatccttgagagagaacaggctctgtgtcctggacacgcagccaagacctcgggtcgtgaggggccgagctggggaagccccagggcacaccttccatttccagcccccagcactccggctccattggaacacggtcccttacctgatatttcagcctcttgccccagtccacacaggtgagctctccagaacccacctgtccttgcaggcagagggacgcacccacccctgcccagagggccctgggccagcaccagccctgggcagccacccggggaagaacacagcagtgggtggccctcggcagcacaggacttggcaaaggcaggggtgccctggcagtgcgcagaaacacacaggaagggttgggggaccaggggctgatgccatcctgcaggtccctctccctgtgggtctcacagcaatactctgtccactctgcctatggcttctggactgtgagctttaagggcccaggcccagaaggatgggcacaagaaaccacagtccctccctcctagctcccagcaggtccgatgtgtccgttttgagcagtggcccatgcagccagctttctgccccttcactttgcacagcacttgttacccaagaagggccagggcaaggacacgcgggtgcaaagccgagtgtgtgcgggctgtgctgggtgcaggtggctgagtgtcagctgctgccgaagcgatcaggggtcgtgtgtggcaggactggggaaggggcggcggcaggttaaggaggcggcccaccctgctggcatctggccagccctccaacaatgcctccattatttcccagcgtccgtggtgatggaatggcccttggggagggtggttcaggcgggagacacaggcttgggtcccctgctgtggggtccagagacctgggccgggctgtgtgcaagagctgacgggcactggtcaccgggggaacctagcaccccttggtcggccccatcgccccccagctgtgcctgcgatgccccctttttttctaggggcctccactccaaccgctgtcccgcactcttgcaggccagcgtcaggccctccccgccaccctgggatctggaaactcactctctgcagtttccatctctgtgtcccgcctgcagagcggcgggactttctttgcctggccgctggccctgcacgcacccccttcctcgcgcctctgccgcccttgccgtttctgtcctcagtgtcctgctggggcttaccccgagtcccgcccaaggtgcagacggcggcggccccgggcctcgctcggtcgcgctcgagccccgtttccagcagcatcgcggccaccaggccgagtggcgcgagacgcgctcctcctaggtcagcgtcccctggagggttcggggctcccaagtcccgccgcgtcgtgcggggcagggagcccgggagccactgggcctggcgctgtccgcggtgctgaaggaggcgcccgctgcccgccccgcccgcgcgcccgcccacctcccggggcccctctcgtcgccccggtccccacccccgcctctgccccgtgtcgggcgcgcctccctccctggctgggttgggccgcactcaaggcagcccccgccctcacccctctgagacccagggtggccgtgcccgctcctccctaagctccaggccctgctgaggcgctgggattcgccgagtttcgcagcaagcgggtcgtccagccgcagggcaggaggacactgaccctacccttctggcgtgcagcctctggaaggcagtgcccaggccgtgccccggggcagccccatgcgtgatcaactccagcccagggctcactggggcactctcctgcaggtgttttgctggtcagggaactttccactcttaacctccttgaactcaacccccaacttctgggaggagctcagcccgcacccctccgggctgccaggaggagaggcacctgcagtcccctgtaacaaaagcactgctgaggactcaagaccttgggcataggcagggcctgaaggaatcgcccagtacacacccaggctggtgtctgctcggtgcctgacgagtgactgagttactgccagcctctgcacagcctggccagggaggtgccaaccggcttcctccacagccacaggcaagactgttgaccactgccctgcccccactggcacagcaaaagtaggggaggggcagaagacaacacggggtcaagggcaccccacagaacaccacaaacagccttagcaggacactcacacccaggaagcagagggatggccactcaagcaagctgggggtcctctgaggtgccctcaggctgggctgccgcgcgtgctctttgaagtgtgtagctgacatgcatctcagctgccctttaacctgtgtaaaatcaagggtcttgtcctgtgagtctcgtccagatcagctccagggagatgatctatcactgctttccatcttctactttccatccgacccttgggctgtgtcccaaaagccaatgattcgataggagaaactctaggatttcagatgtccagtacgtgaacaaaagaggggtccattctgcacccaccgcctctaccacaactcccactggtagagctggttcacatttcaaaagaatcaccattttttcaaatgtcagatttctttattaaaatgtgcacattatagtttacttaaatacaaaatgttcactttccttgcaggtaagaaatttcactgacatttccatgtcaattagcttctttttaataaaaatccttccactgaaaataaataagcatttaaattactgaactattatattcattagtctcaatacctcttaaaatacttaaaactttagaaaatagactctaaacattgcctaaaggtggcatccagctctgagcaggccacacaaggtgtgtctgagtatggccatatgactcctggggccacctccacgacggcccagccccaccgacgctctgctgaaaatcctgcccctcagcaggacgcaagcttgttccccaaatagtggtgacctcaaactgcaatatgatgaaacctgcagccaacactgccctccacaagggtttctggaaaggctgaagctggagacggtaaaccacaacaccgtcccaggtcactccaggtcaccccagctaaagacattcaacaccagccaaaaggctaaagtttagtttgaagggttcaaaggcaaatacactgaaacccacgtgtaaacctgcctggttttcaaactggaagagaaacactttggtgtcttcaataacccaggcctgcactggatgaagcaatgaaggcaaggtcacggctgctaaagcacagaggggttaaaaagtgtgaaaccagaagcaactctcgagtgagacacgaagcagcaggctgacgcaccaga

SEQ ID NO: 588544 - DNA, 4001 bp, Homo sapiens
ctgctgcctcagcgacgtgcgacacacggagcactcgaggcaccgcacgtgccagatgaggttgttgacctggggacggggcggggacggaggtcggctcagcgcgggcctctttcactccgggccccagccttcccggtctcatttacagtcagaggcgctgaagctcagaaggtgcatgcgattcccctatttttctcccgtaatactgagactcagggaaatggaaataaactcttcttatttttcagacggaacccgggggctcaggcagaccctaagtcttgcccaaagcttcgcagtcgggcagcagtggagccaggatttggaagtaagaggacctgcggtgcttccctgcagtctcctgcgctgcgtcccacgccccgacaacacgcacgcaacacctacccctgtctcaccttgagcagatatcggtccaggatctcgaggccgcagctggagcagatgttcttgcctgcagacggcacggaggaggcggcagagggcggtgagcagacagatggcgtgctgggcgtacatggggaggcctgaccctcgtccttgtccagagctcctgccagggcctcggcgtcagactgagcctgcggcgggggagagaaggagaggagcgctgatccgggcacccagagttggggctgccttggagacaaatctggggcccccgagcaccaattgacaacgaaatctccccaggacaatgcgccgtagactgaaggacagggatggaagggcctattggagaggaagggacggccccaacttttaacacgcgcattctgggtgctgggagcggttaaagccaacattccctgccggaaaaccgaggctcagagaggggcggcgcccgccgggagtcccccagagcgtgagcagcagttcgtggccggaaaacctggccaggtccccagggccgggccgctggaggactgggcaccgcaggcagggccaaacggactcaccatggcgggcggcgcggtcccttcaagacagcgggtggtcgctttgcagccggaccctggctgggccatcacctgggggagggggggagggaacgcaggcggcggcggctgctgaactggctccgcacagcctgagcccagcgcctccccgcgcctgttatataaaccggcgccgaacaatgagtcctaactttgtagtgggcatttaaagcccttccccacaaaagcggtgtctctctaatgaagcaatttgaatttggattggattttttccctctctctccccctctccctgcacttaacccgtggctcttgaagtaatcgcttagttcccttgcaatccaagcctctgaggggggaagaaaaacacgcgcacacacacacaaactacctgcaattagaaattgtcgtgaatgcccaagataagaggtagccagagtgtcaattccaactgtcaatcagtgagatccatcaggccgcccaaagaattgcaaatttgattttttaatggtagtaattaaaaatcgaattttttctctctccacccgcccccccaccccactccccttcctcgctcccttctcctctcggcacaaaatgcaaaaaggagaaaagagagaaagaaagaaaataaaaaagagatgggtgaggggcggagggtggttgaagaaaagaaaaccccgagcgcggtgagcacccgcccgcccgcccgcctgacacgcgcggcgaaattgaagcagctatattgacacggattcaggcgcctttcgagggccagtcggagggaaacccggagcaaaaagagagcgagatcggggcgaaacgggaccaaaaagagaaaagagaggcgctcaaggggaggaaaaagcaccctccagcccctcggcgcgccgggtaccggccccgcgtcgggattctcagcgctgcgccggcacaacccccggcgcatcggcgctatcagcgcctattcagacggacaataccggcctcgcctcctcttgattcgcctgtgtctttactaaatcgctttttgagaaattcctccaacatttgcataatgtgttcccgctttccgcgaccccccccccccgctcgcgcgcgcgctcccacactcacaagcacacactcacaggcgcaccctcgtacccctccttcctgcaaccgcccgccaccctgctcggcccggctgggtcccggaccctgcccgaccccggcccgggccgctcacccagtcgttcgccggctcacctggtcggtggcggggccgccctcggccggcagccggcagccctcgggcaacgccggggcggcgttctcatgcttccagtacatgggccggggaacctcgggctcagcgggcgcgcagcgcggagagctgcgccgagggggaccacagccgcagtgggagcagaggctgctgcaggagcaggaggagagccgaggcgccggccccgccgccccgggcccggcctcagcccccgcccccggcccgcgcgcagccccggcctccctggctgctgccgccgctgcctcggaagaaggtcccgacaaacttggagaggcccccgccccctccttcttctcctcctccccctcttggtagtcctcctcctcctctccctcctccttgtcctcctccccctccagctgcaacggcggccgccctgccgctggagccccgctcggttcaagatgagtcatgcgtgaccaatcccctccccgccaagggagagcaagacacacacgacgaggcagagacccagagagagagacacacacacagacacagagacacacagaaactcagagctgccgacagagagactcggagacacgccagtacacaaaggcaccggcgggcacacatccacccagctctcactaccgctcctccctcaaggggcacccatcttcctcagacactgccccactcacaggtacaggagggacccatggccataccatctgcggagatagattccgtaggaggtcacacgttattacactgtgttgatgcaatcccatgcctggtacatttgtgtacacactaatgtaagtgattacctgttcacatcatttacacgggcacgaggcaccacacttactctcacacacctgcacagatacctctgctctataagaaccagacagtgcaccagctcccagggactgaggtgaaacgggagggtagtttccctgaattctcttggaagggattgcttggcacattccccttcccttcaggatttgcttaaccacacagtccaatgcccatcccttcttctctagggttctactgacaatgagaatggtagggaaggcaggaaggcccaggcatttagacagaagacactgcccccagacacacagacacagaaccttcaaacccaaagatggagccttacacacactaacgccctgcagcatacacaagtggacacttagagtctcagcccccttctccacacacaaactgagcctaaagagacacatgtaaacatacatcatctaaaaacaaataagcacactcagacatagatccagccctacagacaccatgacagcctaccctcaccacatcacacatgtcatcacctccataattgccctcatttacagatgtaaacacccccccacacacaattgttcttccatttgtacacacagccatactcaagagggcacagattttcacagagctccaaacccatgtataaccttatgtcctctactcaggcaccctcaaatatgtacttacatccttacagatggtgagacaactattgataggcatttataggcagacacatcacacacacttctgcagccatagattcccaatagttatagtctcagtttgcacacacacaggcaggttctgacaggcgcaggtagtagaggatgcctgcacaccaacacgatactaaagatccacacccatattccccaaagatacaaatatctgttcctttactggcatcaaggtacacaaaaatagccccagcctcagctaatggcatt

SEQ ID NO: 588545 - DNA, 4001 bp, Homo sapiens
ggtgcccagttctcccacttcccatcctggcggcctaaaggcaaggcctagaccctggagaggccaaagtcgggccaaaacaacagcgaagctgggactggaacaggcgctgggggcctgcgcatgaccccaggctcagaatgcgacactccagtgacgccggggaatgagttgagatggagccggagacagaggttggggttcaggacgaggcgcttgggtatgggatcggatctgagacggttgcggcgctggtgctttgggctggaccagactcgaacccagagcggagcgagggtcagagccagggcaagagtccgaagcccagctcagcgtccagcccgcgagagaccccaccatgaatgacgtccgagtagggttggaactcgaagcccgaacgcactggaaatgcagccggacgacggctgggatccgagtgggtccgggccagaaatggggacctcagagctccaccgaggcgctcgaggtcagaactgaagcctgagacttaggcaggacccgagacagagccagagacgataccgaaacccaatggaccgcgaggaccgaaggcagatccggggcgcaaacctgtgcaggcactggcgcgctgcctggagctctgggttcgcgccgctgagcgccggcaggttggaccagcgctgcgcgccggaagtgcactcgggacgccggggttctggaggagagaccacacgccgcaaaagtggcctccgaatgcgcccggggcctgccctcggcgacactgctggctcggcggccgcagcctacctgaagtagtccatcttgcagaagatctccttgttcttgatgtagcagctgttctgctgcctcagcgacgtgcgacacacggagcactcgaggcaccgcacgtgccagatgaggttgttgacctggggacggggcggggacggaggtcggctcagcgcgggcctctttcactccgggccccagccttcccggtctcatttacagtcagaggcgctgaagctcagaaggtgcatgcgattcccctatttttctcccgtaatactgagactcagggaaatggaaataaactcttcttatttttcagacggaacccgggggctcaggcagaccctaagtcttgcccaaagcttcgcagtcgggcagcagtggagccaggatttggaagtaagaggacctgcggtgcttccctgcagtctcctgcgctgcgtcccacgccccgacaacacgcacgcaacacctacccctgtctcaccttgagcagatatcggtccaggatctcgaggccgcagctggagcagatgttcttgcctgcagacggcacggaggaggcggcagagggcggtgagcagacagatggcgtgctgggcgtacatggggaggcctgaccctcgtccttgtccagagctcctgccagggcctcggcgtcagactgagcctgcggcgggggagagaaggagaggagcgctgatccgggcacccagagttggggctgccttggagacaaatctggggcccccgagcaccaattgacaacgaaatctccccaggacaatgcgccgtagactgaaggacagggatggaagggcctattggagaggaagggacggccccaacttttaacacgcgcattctgggtgctgggagcggttaaagccaacattccctgccggaaaaccgaggctcagagaggggcggcgcccgccgggagtcccccagagcgtgagcagcagttcgtggccggaaaacctggccaggtccccagggccgggccgctggaggactgggcaccgcaggcagggccaaacggactcaccatggcgggcggcgcggtcccttcaagacagcgggtggtcgctttgcagccggaccctggctgggccatcacctgggggagggggggagggaacgcaggcggcggcggctgctgaactggctccgcacagcctgagcccagcgcctccccgcgcctgttatataaaccggcgccgaacaatgagtcctaactttgtagtgggcatttaaagcccttccccacaaaagcggtgtctctctaatgaagcaatttgaatttggattggattttttccctctctctccccctctccctgcacttaacccgtggctcttgaagtaatcgcttagttcccttgcaatccaagcctctgaggggggaagaaaaacacgcgcacacacacacaaactacctgcaattagaaattgtcgtgaatgcccaagataagaggtagccagagtgtcaattccaactgtcaatcagtgagatccatcaggccgcccaaagaattgcaaatttgattttttaatggtagtaattaaaaatcgaattttttctctctccacccgcccccccaccccactccccttcctcgctcccttctcctctcggcacaaaatgcaaaaaggagaaaagagagaaagaaagaaaataaaaaagagatgggtgaggggcggagggtggttgaagaaaagaaaaccccgagcgcggtgagcacccgcccgcccgcccgcctgacacgcgcggcgaaattgaagcagctatattgacacggattcaggcgcctttcgagggccagtcggagggaaacccggagcaaaaagagagcgagatcggggcgaaacgggaccaaaaagagaaaagagaggcgctcaaggggaggaaaaagcaccctccagcccctcggcgcgccgggtaccggccccgcgtcgggattctcagcgctgcgccggcacaacccccggcgcatcggcgctatcagcgcctattcagacggacaataccggcctcgcctcctcttgattcgcctgtgtctttactaaatcgctttttgagaaattcctccaacatttgcataatgtgttcccgctttccgcgaccccccccccccgctcgcgcgcgcgctcccacactcacaagcacacactcacaggcgcaccctcgtacccctccttcctgcaaccgcccgccaccctgctcggcccggctgggtcccggaccctgcccgaccccggcccgggccgctcacccagtcgttcgccggctcacctggtcggtggcggggccgccctcggccggcagccggcagccctcgggcaacgccggggcggcgttctcatgcttccagtacatgggccggggaacctcgggctcagcgggcgcgcagcgcggagagctgcgccgagggggaccacagccgcagtgggagcagaggctgctgcaggagcaggaggagagccgaggcgccggccccgccgccccgggcccggcctcagcccccgcccccggcccgcgcgcagccccggcctccctggctgctgccgccgctgcctcggaagaaggtcccgacaaacttggagaggcccccgccccctccttcttctcctcctccccctcttggtagtcctcctcctcctctccctcctccttgtcctcctccccctccagctgcaacggcggccgccctgccgctggagccccgctcggttcaagatgagtcatgcgtgaccaatcccctccccgccaagggagagcaagacacacacgacgaggcagagacccagagagagagacacacacacagacacagagacacacagaaactcagagctgccgacagagagactcggagacacgccagtacacaaaggcaccggcgggcacacatccacccagctctcactaccgctcctccctcaaggggcacccatcttcctcagacactgccccactcacaggtacaggagggacccatggccataccatctgcggagatagattccgtaggaggtcacacgttattacactgtgttgatgcaatcccatgcctggtacatttgtgtacacactaatgtaagtgattacctgttcacatcatttacacgggcacgaggcaccacacttactctcacacacctgcacagatacctctgctctataagaaccagacagtgcaccagctcccagggactgaggtgaa

SEQ ID NO: 588546 - DNA, 4001 bp, Homo sapiens
gaaactccacagggtatgaggctggggttgagaccccctccaaggtgcaaaaagtacctagaacctgcggagcaactggactggcgacgaggaaagctggaatcccgcatggatgaacaggaagcggggctggtctggcagcgccgcgtcctctctccgggccgctgattctggaatctccagcgcggggccaagggcccacgctcctggagaaggcggtgagtgcgtcctcagggagcggacagagccggagcaggaaaggtcatggccatcagaagccgggcaagagcggctgagccttctgtgcgcttggctcgtgggattctttcccccttggccagggacacgtcaaagactctccgcgcaccgcgatcttcctgtcccgcgagtccccgacgcccgagtccgttctgcgcctacacaggtaggtcagtcacagtgtcctcatacccttggtccgaggtaggcgccgctagtgaactctcagcaactttctcatgctccgcgtgtctcccgaaatgctggaagctgtcccagctctaggatcctcctgtgctcctcgtggctcagctcagtttacgaaatcgtcctcgcgccagatccttgaggtggggttaggggggattatgtaggtttggttgcattgcagactgccctgcagcgtgtccctcacccaggacaggagtcagcagcacgaagggcgcgaggaggcttatcgatccaggctccgacagaacgacagactccttcccaggcgggctgcgaggccggagccactggattccagacacagcgaaatcggcggcggagacaacgaaacttcaagaaacagatgtgcaggaactgccaccagagcaccaaagggattagggggtgtgtccactgccaccccagccttgctgtgaggtccgggccttgcgtccctggatcccggcgtgtgaaggacctaggtgcaaaggatgcgcggcgctttggggagaggtgttactgctcatcctggcaactgctaaaaagagtaaggtgggcgtcgcgcaccgcagtgccctctaccccctgaaaggagagcagagatatctgggtactcgtggttatatgaagggagccctgcgcccttgaccaagtcagactcactttcccagcctactatgctggatacctagtaagcgcttggtaattatttgttggatgaatgagcctcaacgaaagagcccatctgagtttcacctcgaccccttctcccactattaagctaccccttttctgtacaaggaaaccaaacctcagagtggaaacgccaatgttagttaccaagctattgagccgagaggccgaaactcaaacggaggttcacttattttaggttcaagaccttcttgaaggctttagatcctgtgaggcgaacaaggtgggttggaggtggggccctacctattctctctgctccttcccttctaggtaaacccgtaggggaagaagccagagggggaaaaaaaacccagaaccagcaattaagaggttaaaacgaccgcttctcggaggtcccggccccgaggctcctcccccagctcccctctcggctcccccaacatctgtcccccaacagctggccgccgctgggccgctctctgccgcggtggggggccgcttcccgctctgcgcttcccctgggaccctcgctttgcgggagggggtaggcttctcccgctggagcccgcgacagagcttgggctcaaggcggagggccagagaaggctaggggcttgcatgaagtcgtttgggcctagctgggaagaggaactttagcctccagggcactcactgaacccccacccccataaacacgaggggaagcagttaaccctttactccccactcccattgtcagaaggcaggagggccagggaccgcagtgacctgatattgacaaaggtgctccattcacaggcctctgaggtcactcctgcctaagtgttgcaagatcacccagggagccacacatcagaaaacacagcgggcgtgccaaccaaactgggcagggactctttggatcagcagagaggggccccacgatgcacagacgggtggctgatatatctcacctatagaagagtatgggggtgtttaggggcagggatggcggagccaggcagctatagggcttatctagtctctaccacttagccctgtgacctcatctctcagggcctcagttcctcgatcccacccccacgccaccatactgtgggattatgagagtatcatacacacaaggtggacctgagaattaaatgagataaagcaggtaaagggttagcccaattcctggcttagacaagaactccatacgttatgatgactggtgtcctgtgtcactgtaagcaatggcactttcccaggacattagtctccccaactatacagcaggcatgatgttccagcaggctgggggagccaggtgggcactgcagatcgggccatgccctattgtagggcagcagctgcaggtatgtctggggctatggttgtcggtagcaggggaaatgtgaatgtcccggaaaggagcactattcttcctccagaattttcttccatttttggaagaaaacagaaagaaaaatggtcttcaccaaaaggtgaagaaattaagagtcctgtcacatttttctggtggtatttttttttcctgctgggaatctcagggagtaaggggaggtagagatctggataaacgcacaagggttggtaaggaccctgtttagagtgtgaattggagaaactgaggcagagtccagtggcctggccaaggacacgcagccaatgagaaccaacctctcccaacaatgcaaatgagccaggagcagcactggacctccatgtcttctctaagctttgcagaccctctccctggtgaacttggagttccttcctaacctttaattccctgagccaccagtgctagctctgccaatggagactgaaggagggtctataagatgatgtcaaggagggacaaggtgggggatagaacctaggtgaccctcttccctggggaaaatgccagaggttagaggaccatgggatctccatgctccccctccatggggccttggccactcccttcctcccccttgccccgttgggagctcttggcctctctttgggcagagtgctccagtccacatcctaccagacccttgaccccgggcttcaggaaacagaagcctagagaacctcagcatgtgacccctccctgggccccagctccttagaggaaaattctgcctcccacgccaccattcacactctctccaggaagaacttcctcatagcagccacccagagcttgggctgcagtgcagtgcagacaatagtccttgcctggcactcgatcggctttttctttccctttttgtgggttttattatttttgttacaggtggggctgccagggatgggttatgcctgcagggggagaaatgatcagaagagccacaattctaccctcaacccagggaatgtgagcttttactgcctccattttcttaaccagaaatctggtttagttttgctttcagggctcttgtcattggaaaaagattagtgctcagaacctgcagcccagaaatggcccagtcccatccctccaggcaggctctgctcctcaagctgcgtggggaaatgccatcatgggcttgtgcccagcatccaccctgccaatgatgacaacagtgataatcgaggcattcataccaaccaccatttagggagcctttatagagacttccccccaacagtggcctctttggcagctctgggagacagccttggaaagggcgaactaagggccgagagaagcagcaacttgcgaaggtcactactggccagactgggcccagtctcctgcctcttcccacagtggctgcacaccctactctctaccccattgcagtaggaagagaactccagaataaggggaggctctgaacagtggagtcaggatc

SEQ ID NO: 588547 - DNA, 4001 bp, Homo sapiens
cgacaacacgcacgcaacacctacccctgtctcaccttgagcagatatcggtccaggatctcgaggccgcagctggagcagatgttcttgcctgcagacggcacggaggaggcggcagagggcggtgagcagacagatggcgtgctgggcgtacatggggaggcctgaccctcgtccttgtccagagctcctgccagggcctcggcgtcagactgagcctgcggcgggggagagaaggagaggagcgctgatccgggcacccagagttggggctgccttggagacaaatctggggcccccgagcaccaattgacaacgaaatctccccaggacaatgcgccgtagactgaaggacagggatggaagggcctattggagaggaagggacggccccaacttttaacacgcgcattctgggtgctgggagcggttaaagccaacattccctgccggaaaaccgaggctcagagaggggcggcgcccgccgggagtcccccagagcgtgagcagcagttcgtggccggaaaacctggccaggtccccagggccgggccgctggaggactgggcaccgcaggcagggccaaacggactcaccatggcgggcggcgcggtcccttcaagacagcgggtggtcgctttgcagccggaccctggctgggccatcacctgggggagggggggagggaacgcaggcggcggcggctgctgaactggctccgcacagcctgagcccagcgcctccccgcgcctgttatataaaccggcgccgaacaatgagtcctaactttgtagtgggcatttaaagcccttccccacaaaagcggtgtctctctaatgaagcaatttgaatttggattggattttttccctctctctccccctctccctgcacttaacccgtggctcttgaagtaatcgcttagttcccttgcaatccaagcctctgaggggggaagaaaaacacgcgcacacacacacaaactacctgcaattagaaattgtcgtgaatgcccaagataagaggtagccagagtgtcaattccaactgtcaatcagtgagatccatcaggccgcccaaagaattgcaaatttgattttttaatggtagtaattaaaaatcgaattttttctctctccacccgcccccccaccccactccccttcctcgctcccttctcctctcggcacaaaatgcaaaaaggagaaaagagagaaagaaagaaaataaaaaagagatgggtgaggggcggagggtggttgaagaaaagaaaaccccgagcgcggtgagcacccgcccgcccgcccgcctgacacgcgcggcgaaattgaagcagctatattgacacggattcaggcgcctttcgagggccagtcggagggaaacccggagcaaaaagagagcgagatcggggcgaaacgggaccaaaaagagaaaagagaggcgctcaaggggaggaaaaagcaccctccagcccctcggcgcgccgggtaccggccccgcgtcgggattctcagcgctgcgccggcacaacccccggcgcatcggcgctatcagcgcctattcagacggacaataccggcctcgcctcctcttgattcgcctgtgtctttactaaatcgctttttgagaaattcctccaacatttgcataatgtgttcccgctttccgcgaccccccccccccgctcgcgcgcgcgctcccacactcacaagcacacactcacaggcgcaccctcgtacccctccttcctgcaaccgcccgccaccctgctcggcccggctgggtcccggaccctgcccgaccccggcccgggccgctcacccagtcgttcgccggctcacctggtcggtggcggggccgccctcggccggcagccggcagccctcgggcaacgccggggcggcgttctcatgcttccagtacatgggccggggaacctcgggctcagcgggcgcgcagcgcggagagctgcgccgagggggaccacagccgcagtgggagcagaggctgctgcaggagcaggaggagagccgaggcgccggccccgccgccccgggcccggcctcagcccccgcccccggcccgcgcgcagccccggcctccctggctgctgccgccgctgcctcggaagaaggtcccgacaaacttggagaggcccccgccccctccttcttctcctcctccccctcttggtagtcctcctcctcctctccctcctccttgtcctcctccccctccagctgcaacggcggccgccctgccgctggagccccgctcggttcaagatgagtcatgcgtgaccaatcccctccccgccaagggagagcaagacacacacgacgaggcagagacccagagagagagacacacacacagacacagagacacacagaaactcagagctgccgacagagagactcggagacacgccagtacacaaaggcaccggcgggcacacatccacccagctctcactaccgctcctccctcaaggggcacccatcttcctcagacactgccccactcacaggtacaggagggacccatggccataccatctgcggagatagattccgtaggaggtcacacgttattacactgtgttgatgcaatcccatgcctggtacatttgtgtacacactaatgtaagtgattacctgttcacatcatttacacgggcacgaggcaccacacttactctcacacacctgcacagatacctctgctctataagaaccagacagtgcaccagctcccagggactgaggtgaaacgggagggtagtttccctgaattctcttggaagggattgcttggcacattccccttcccttcaggatttgcttaaccacacagtccaatgcccatcccttcttctctagggttctactgacaatgagaatggtagggaaggcaggaaggcccaggcatttagacagaagacactgcccccagacacacagacacagaaccttcaaacccaaagatggagccttacacacactaacgccctgcagcatacacaagtggacacttagagtctcagcccccttctccacacacaaactgagcctaaagagacacatgtaaacatacatcatctaaaaacaaataagcacactcagacatagatccagccctacagacaccatgacagcctaccctcaccacatcacacatgtcatcacctccataattgccctcatttacagatgtaaacacccccccacacacaattgttcttccatttgtacacacagccatactcaagagggcacagattttcacagagctccaaacccatgtataaccttatgtcctctactcaggcaccctcaaatatgtacttacatccttacagatggtgagacaactattgataggcatttataggcagacacatcacacacacttctgcagccatagattcccaatagttatagtctcagtttgcacacacacaggcaggttctgacaggcgcaggtagtagaggatgcctgcacaccaacacgatactaaagatccacacccatattccccaaagatacaaatatctgttcctttactggcatcaaggtacacaaaaatagccccagcctcagctaatggcatttcccgccctctgcatcccagtcattcattgctctcagacacagaaattcagagtgaaaagagtttctctttgaaccctaatcttttatacgaagagaacaagttgcaatgtgaaagcgggtgaggtgtatgcataggtacacatgtgtacacacatacacatgcattctcaaacatgaatacagaagaacaacccctccctctcaaatatctcctttgcacataataatttcagctactactgggattattcccagttattacagctactaatctgtgccaggcatgatacgaggcattttacaatcgtgatctcattttcttttcacaataatcccgtgaggtagcatctctcagcgtgcttgttttactgatcaagagactg

SEQ ID NO: 588548 - DNA, 4001 bp, Homo sapiens
tttcagtatgtggcccaatattttcaccaatgatggatctcagcttctattcagtattcctggaatattccacacccgatggtaatttttggtcttcctttagtattattctaaatattcgtctttgttaagagccacctttccaagaccctgaaactgcattactgagtgtaaaatgaccacatatggtatgcacaaacacagcacagcacgctgaaaaatacatacattaccggctgacagacacgggggtaatcacaccaagcaaacacaataagcactctttcatttatttatttatctattgcttagacacactcatcaaacatattcagtgcccactgagcccaaggcagtacacagcacagataatatctgttaggtggcttcagcaaactggattatgtcaaagtgtgaaatgtgaagtgaatctgacttcatcaaataaactgaactccaaggccatttcccagcactcactcccccacctcaaacacacaagcttaacttcgccctccttcctcttctgatgctcagaccatgacttccttctcatccttctcttctcttctcttctcttctctctctctctctccctccctccctccaagtatttcagcagctttcctcagttctctgagccaatccctcggaaaaggaaatcagcaaaatgctgaatggggagacttcaccagcaggtgaagaggaaaagaagagggtgtggtactcgttttctccaccacaccccatccctggagtcttgcactccagtctactgcggctcaaagcgggcacagcaggtcccctagctcacctcggagcagcctggcccagaccaaccacccagcgttctccgcaaaaaacttcccttaaagcagccaaatattcaagggaggcgggggaaattgggcattagttcgaatacacatacaacagagcaccacggagcaacactgaaaggcaccttttttagatacagaccctatagactctctctcacccttcactccctcccaccctgagtatctgactgagaatttacagagaaccaagaggcgaaaggagagtggaggagaaagagggcattacctcccggggctgccctcagggtgcgggtcaggatctcatccccgaagtggctccagttcaaggcacagctttccagagctcagccgggttcggacctgcgtccccgcggcgcggtgcggagctcggaagcgcgccgggactgccgctcacgtcccccgcccctgccgcgcgggctccgccaccccgcgagcacgctggctctccgcgctcaccccgccgcctcctggcgcccccacacccacccgctccgcggcgcccgctgggagcctctagcggaggcgaagggaacagcaggcgacctgcggcgcccaggttccgacgccggttgcagggagccggccaagcggcagcgtgggcttcgcgcgcccccgagtccgcaggccgggtgccgccgccgcccccacctgcccacctgcgccaggctcacctgccaccgcgtcctagttgcgttcaccggtgcccacagctctctatggcaattgggggtgggtctgcggtgctaataaaaatttaaaaaaaaaacctctctggtaaaaaaacgaaaacccaaaacccaaatccacgctgtatatcaacctccacagagaacccagtccgaaatcgttttccaataggtttcagaaagtgtgaggacaggacactcctctggcttcctgcctcgcagctgggcagcgccgcaccggctactccctgacttgccaggcgggtcgtgcgatcgcgtagcgacgcccggagagatcctcctaacttgacttaacccccaccccatccccaacatctattttaagttattgtctctggcaattcaagcagcagctttgctgcctcttaccttgaggcgctgttaattctccttcgtgtccttaaaatcccaagccaaggatgcgacgcacacaagtccaggggcttttcctggacttccccctcctcagctctgaaggctcctcctttccaagggatcaggaggggatggcggttcaaaagccctcaccatagaggcgcctccaagccttcgtaccagtggaaatggagaccgggaccaccttcccggcacccggaagcctcccagcccctcctgggccaacttggctgcctattcagttttcttccgtaaccccacagacacgtcagtcaattccctggcatcaggcaggatattctcagttgcggccgctcctcttgctttctctcgataatgcccctcccccctttctccccttaatttggaaaaatttctactccctgcccgaattaggtggggatgaggcggaaaggtgtaagaagagccactccaaggcacagcttcggaacaccgtctccctgggctgctgcagcgcgaaggtgtctacgctggggaaactttcaggggaggcagcgccggtgcggggctgggcgggcggcgggcggcggcgccaggtgaggaggctttgaggaggcggctgcaaggcgggacgcaggatagccggctggggcttggcagccgggctcagagctcgggctgcgcacacacacaggcgcgcacacccgcgcgcgcgcagctacacacgcacgcccagccctgcgcccgcggcccccggccagtggcgagcgaaaagtcgggagtcctgaggaggggtaggggttccaaggatgctgatgacagaaagagtcaatcaatcctcactagttagcggattgccggcaggcagttcctcgccgcacgccgttaagtccgttgggccacctctccgttctctgccctgtctggcatttcaactccctagctcttttcttgaagccagttacaccccctcgacacccagcgagaggccaccagactaaagatgagccccgttcccatcgccaccctccaggggccacctccgccccttctgtagtggagaattgaagtggctgcagcagctctcctgggagctgaggggctccccgaggtccttcgaatagaggagcctacacatcgcttcgtgaacataatcccctcgcatcccgtctttacctgcccactcccttcgtaacatttcccccaaggagctcccgaaagtcgcttagatgttttgaaaatgaatttcttagggaattgtagtgcctagcttttggaactgggttaatttaggtgctacgcttatattgtaaactggacggtagcaggtgaacggctcagctggagaaaggggagggattaggagtctggagacccaacccctttagcagccatttccaaggttttgcaccaggagtagctgtccgggtctctggctagctcctgtcccaacttctttttcttccctcgacggtcgggagggatcactgggtgctacaccgctggggcgtcccaggcaggagagacttcgctctcagaagcgcccccgtgtcatccacaactcccacgaaaggagcttcccaagaggagtttgttttacccggaatgggctgcaggaattaattgcttacagagagtaaacttttgcccgttgtttttttgttttttgtgctttttttaaccaaagcttgcatttgtgctccgcgtagtttctattgcaacagagcgctactctgccttttcaactgtgagacagaggattgctgaggatttctgccctctggggcttcgcgaatatctatggcttcggacctgctagcggaaaacgcaaagttgcccagcttggagatggcaccaggttcctttgctctggcgctggatgctccgctccgccacccaccgccgccgtctccatcgagaatctcctcaaaatcaagggagttcttgactgtccctctccaaattggaaggcggttgactttgccgggaaccgagttcctgagcggcaaacgtggagtcgcagagcgcagaagtgaagatttaatacaaaagatgaaacttgtaggatgacctctagcagcgctactcacag

SEQ ID NO: 588549 - DNA, 4001 bp, Homo sapiens
tcccatggccacaacttgattaaagagaccctaatctaaaaaaaaaaaaaaaaagatgaaggggggatttttaaaaaataaatgttattaaggtctagggacaggcttacaatcaatagctgaaatttggtaggggtgaggtaagtggagatagggatggaaaattacaataaacatgagattttggaaagcaatcaacagtaaacaataaagactaaaactctaaggagatttccctctcttttctctcccacacactcaagagcaaatgtacacagagtcataatttcttctctctaaacaatgccaatgaattcatagacacatatagaaactaatggtagacagagtgtttttccccactcaaaattataaagtaggcaaatattttcaacattcatccctcctgtctcttcttactagtccagttacccagtcctcagtgtttttatatgactcctcgcttctcagatctagtgggaaatttttcaggtgctggaccactcgttcccaactactgtcacacaaacctacacctcagtaactctcagaccttactatgatagtcaatatatcctattacctaattcagaatgaggggataatgacaacttaaattcacagagcatttactgaatatccagatttgaaagacaagaagccagcgatacagttaatgaaataaggcagtgtccccaagcaacatagattccttataaatcaacagaatacaggaagaatataggcaatgttataacagagatggcagggacagaaaaaatttaaaagattaatttcaacaaagaacattaagaaaagcttcatgggggagatgaaagttaagaagatgcttatatggcttaagtataaaggaaaaaaaaaaacaaaccatgtgagactttaggtttaataccagttaagatgataaatagcctgaataatatgcccagtattttctcagtttgtgaacagagttcagatacttgatgggccagctcaaagctggatacctcactgccctaggacaatggaagaaatagcttgagtctcctggcagccctctaatcatgaaatatatgtataatacataaactacacaacctcttgcttttatctttctcttcaaccaaacattgctatcataccagacaatttcgaaattatacccttgggcctatcatggcctgattacttacttcataattgcttgatttctttccttctccccttcatcacaacatagctttatctctctgaaatccctgctctgactaaaacctcttaaaattctctcatccagtattttccactaaagagtcttacttttctcagaaactccatttgttcctaggctaaaagcctaccaattttttatttcttttaaaatctcaactactcggctatcttggtgacacttactggcatacttaactcatttttcctttattctttgctctagctttgctgacaatgtgtgaacaaatgagcccaaacacttggttttttctgtacttcccctcctgaactttctggtcatcctgaaaaaattaaatagtagtctgttaatttgtattataaatctatgatctgcccccttcttctaggtctgtaacactgttcagtatccatttactttctctgaaacagctgttacaagccatcatcactcttctcagtgcttctactcagactctgcaactcccacctttagcaaacctgccttcttcacagcaaacaacttgaaaccatcggatggaaactcccaaactctcatccttcccacttttcaacttacctgcatttgtatctattgttaattatcctcctactgtcatgaaggagtagagtctccgagcatttcaaggttaatgtcactcctgttcctctcatttgagagcacactccttgattctacccgtttgtgtctttaagctcctctctcttagctctttctcttccacaacgaacatgttgaacactccctacatcttctctaaattaacctccttccctgaaggaactaattgttttatctttcctgtgctgactgctttgaacatttgttaccagcagaaaccactttcttcccattcactcctcacactaattcacattgtctccctgtaatctattgcagcactgcagcagctcctcccaaactcatcagtgtacaaaaagtctggtgggcatcatcaatcctcatcctatttgacttctataaggcatttggccagtccctctttgttcagacactcctaacctacttctcatttgaccctatcttactgactttgttttccttctctttttatgttttccccctttttatgctttcctcttattgaaaattcattcttcttctcattatacacttcctgaaaaatctgctctgctctgaaatctgcatgtaaaatccaatttctacatctaataaagattactcctctaagatgcaggtccatagcttttattgcttattaaatattagaaatcagcattttaaactcaacttgttataaaatgaactgccatttcctctcatttatctctttctccagtccaactaacttgcttaattatgtaaattgcatgaactcaaattaatttttaaatttttctacttccttttctttccaaacctcatcagtaacaaatcttagtgtttcaacatcatcagaacatataatatcttctctgaactaccgaagcatctaatttgagttggtttttcccattccaaatcatctttcacattgtagctgaagttattttcttcaaaaatacaaattgcattgtgtcatccccctactaaagtactactaatgccaaaccaatcactgcacaattaagtccacacttaatttgacatatataaagtcttgtttcatgtatccaagcacttcatttttttatatagtccttttcaagctttgccatagattcactctacgttttagccacaaaaatgtctaatgttctggtacatgcagacattcagagatgtttctgaactgtttgtgcataatttgcttagtttgctcttctcttcctttcaaggttcatgccaaaggccctttctgtaaagcttttctaacctcctttgcacaacactgtattacaatcatctgtttactggactgtgccaccaatctgaattccttgattaaaattcatatttagatatctctaccatgtctctttcccccagttctcccacacggaattcatatgtgtaaaaaatttctgtcactgatgaggagatgttttttaacactaaatatattcagtgccatagttagaattcaagggaaaaaaggaagtaagaatattatttgacctaattgatgctaaatatattccacagcaacctaactcttaaagaataaattgatatatatttgtatcattccaaatatattggcttcaatgttagaagattggaggaagaggaatatgtgtggtcccttcaatataacgcagtgtaccttgtcttgtattgcttttcatgcaaaataaaataataagcacaggtttttgcaatataatctgtcttcattttatgaagaatgtggcttagaggtattcagagtgacacatcactctaaatagtgaatcactggagtgttgtctctcaggaggagggctgtccattgtcctcaactcacatctgaatgctcacaagatagactatttcctgttaagatggatgaagagacacttatcaaaagaagacatttatgtggccaacaaacatatataaaaaaagctcatcatcactggatattagagaaatgcaaatcaaaaccacaatgagatatcttctcatgccagttagaatggcgatcattaactcaatagatgctggtgaggctgtggagaaaagcaatgcttttacactgttggtaggagtgtaaattagttcagccattgtggaagacagtgtggcaattcctcaaggatctagaaccagaaatatcatttgacccagcaatcccattact

SEQ ID NO: 588550 - DNA, 4001 bp, Homo sapiens
gaaaaagcctgcatgtcctgttgtctgtccccaaccccggccatacaaatccagtctcagctaaaaactagttagcaagaagggctcaacccacatctctggcctcagccctgaggtttgggttataccagggcagagcgggccatctccctcctcaatacacactaccagaaaggaggccttgtgggaagggctgactcagtcagctcctcactcccattgggagccccaaattgtaacttgccaccttttgagatcctcttcctagagtgcttctccaaccaaagaaaactgcaagtgcaaaattcccgcatggaacggtttggggaatatggacattcttttctctccatcagggactaaaagtgcagcagtgagcctggcagaaagggggcctcccttgccgctcaggccgttcagtgtcccagcactccacctcctggctcctggctccaggctccaggaatcccaaacccccacacaccaggcccttgaagcagtccgccaggcctggctccctaaaacattattttcctttggaaatcaattttgggttcccaattcaggcctccgtagcgccagaccctatatcccaggacccaggcaccaaatccctcggccggcccagcgcaggattccgggacaacggatggcaactgggggccgtccggaggctcccaggaccccatcagtgcccgctgggctgggctggtccgccccagccccaagacgcgcagctctcggaacccttggagctgcccggcccagccgcgcacagagccggcggcagagcgggcgcgggccgggcccggcagggggctgaccgggctcgagtgccgggcggtggcggggaaggaggacgagaagcgcttactgttggtagtcttgtttgcagtacagtttccgatcccggaagtagcagctggtggtgagggcttgctgacacgccgcgcactgcaaacactcctcgtgccaggacgactcgttgactcgcatcaggaagcggtcggagatgggccgctggcagccctcgcagacggcgggatgcgggcagtcggagcctgtagcgcacagggcgaaagcccggccgtcagcgccgcccggcccagccccggcgtcccggtcgcaccgggcccacagccctcggccccgagggctcgggccgcccgggatcaccgcctgccgcctgcgctccccggaccgccgcgccaggggccgggcggccccggctagtccgtcccagtcctcgggctccggcgtggagaggccgcgggcctcgagccttggctcggcgctgtgctctccccttctccggagaatccgcgctccgtgttaagacaaatgacaacgagcacggcgcagggtggccggctgggaccaagacaggcgaggtgaggctggggcgctcgctggctgacacgccccacggtggcgttcgtggtcttctatccccgatctccccaaaatctgtggtttgagtgaccagggagacgtttttctcttagaatctcccccaccccaggtgaccttgcgcctctcccaagctcgccaaggtgattgctaggtcctccatcacccctgccacccgccacctaccacatcggagtggcagctctagaacctaagcctggaaaggatggtgggtggcgactggagctgtcctgtcccctcaggacgcctgccggaggcgtacttgcggccctctggcgatcactccaggagtcctgtctctgcctcctccccatgtcctgcaaacccatttcctttatccgttggccccaacgcccgtgtccacagccggacgacgccccatcccacgcccgagaccactcgggcgttccgaccccgcactcacccagcagcacccccagagtggcgggcccggggcgcagggcgtgctcctccatcttgatgccgtccaacatcttggcgcagtccgtctgcccgcgagggaagcacctctccagcgactcgggacctgttgctatatccatgggacgcggggcgcgctgcggaccccgccggccgggctgctcgcccgccggcccgtccacccgctctccgccgccgcggccctggaaccggggaggcgcggcccccgcagggcaggggttgcgccggcccccggcgatcgtggagcggcgacgcgctggccccgggccccggcgtcgtgcgggcgggccggggcggctgcagcccgcgccgcgctctcccggacacttgcagccacgcgcgccggctcctctgtcacctgcttgtcagtcccggaacccggcggcggcggctgctgcagacggagccgcggggaggaggcggcggcggcggtggcggtggcggcggcggcaggcgggggagggggtgggggtgcaggggcggccccgcgggccgcggggggggcgcgcggcgcagcggggtcccgggcggggcgcagcgggccgcggggctccgggcgcgctccccgcgctactccagtgccatggtgcgcccgctgagccgccgggtttagagctggggctggcggcggagggatacgggccgcctcacctcccgaaacttcctgacatttgaaccccgcggccggtatccctgcgccgggatgcgccgccggctccacgtcaaatagtgccgtcccgcccccccgcgcgccccggggctccgcgcccctggcccgcgccccgcgccgcgcctggccccgagctcaggccccggctccccggcccggccgccccgcgggcccctcgcagaagttttgatcgtcttcgaaacaaatccctctgctccacccccttgaaaaattgatttgggagttggggagcgaaggctttcttttttctcctctgccttctttattattaatattttgtaaagctccagcgctacgaggagtggccccgagcgaggccagactgcgcggacggcagggagcgcggcggctccgccaggggacggcgccggccgggagtggccgcttgggaacccccgactgtcggccgaggtaggtcgcgggggctgagtcggagtcccccgggcggcggcgcctgctcggggccgcttggtccgcggagagggccggctcccaggaacgaaggacgggggcgggcagaaggcgaggacggctggccctggactcgtgcaaggggggcccaggcccaggaacggggagtgagcctggagtgtgggtgaggggtctgggaaagctccgggcctggcagagattgggcgggggactgagccgatgggaggttggggccccgggatcgagaatgggggacactgggacgacaaggaaggtcaggcctgggttcaggcgaccgagagtttagaggacaactaaggctggaaaaggggtccccgggcaggggcaggagcagtgggcaagacccgggcctcctagggtttgcagtgaggggcgctaggagggagtggtggccccagggtagcggctctgaagaaattaggttggctgccaagatcggggtcctttggcgggtcgggtgcccggccaggggtcgctgggacgcgcggatcaaggacagtgctctagccagcctgggcaaagtggacctcggcaacgggacgcgaaagctggcgagatggagctgccgacttccgcgccagccgggcctggcacccgcgtccggtgcgagaggccacagcgtcggaccggctgtctgcggcccgtggtccccaccgacgcgcggctcaccggggagcaggggggcggttgcggcccggggtagcggcgggctgaccccccgcgatccgctgcggggcggccccggcccctcccggagcgaggcagcggcgcggagccgggcgggggcggagggcatggggggcgggtcccctgacctcgctggaggcgaaagggcggatcggatttggaacctgcgggaggcttggtcagaagtggccccctgcgccgcggggccccgcggaggggcccggctttgtggaggattagaggctcccgccctaccctacctgcgtgtgtgtcggtg

SEQ ID NO: 588551 - DNA, 4001 bp, Homo sapiens
tttttgaaaatacttttaattgtcattgtccctttttttttttttttttttttttgagatggagttttgctcttgttgccagggttggagtgcaatggtgcgatctcgggtcactgcaacctccgcctcctgggttcaagcgattctcctgcctcagcctcccgagtagctgggattacaggcatgcaccaccacgcatggctaattttagtttttagtagagatggggtttccccatgttgggtcaggctggtctcgaactcctgacctcaggtgatctgccagccttggcctcccaacgtgctgggattacaggcgtgagccactgtgcctggccttaattatcattgtcttgcatcattcaggttctgttgtccagagagctgaatgcttttatgtagcctctggtttgacaaatggtgaaacaaatgattcaaagaaaaaatgagaagaaatgaggcagactgatactcaaaatgaaaaccagatctctgtacatggaaaaatggaactgtgttttcaagaaaagccaatgacagtggtgaagatctggacaatcttggagggtctttcctgcacctttagttgagggagaccagaaggcagataatgagaattaaaaagagaagctcccacattcctaggtgacgatggattgccctgtaaccacggtaacaacgaatccccagaacctgtgtgacactcatttaatctattaatgaaactcccttggtaaccattctaacagacacatgccagtaggtacatttcatagctaaaggtctaccattcctaaacactgctgcctctgaaacaccaccagtccacgaactcaacacctcccaaagccccttatgcatcagccatgagctttgttcagagactttgccatacaagcacagttctcccttgtttaaccagaaataaattcagtttttgtttcatgtagtgaatgcaggcatcttccaccaaagcagcttatggatatacaagaaaatgtagttattcaaattctctttttctctctttttaatgcaaatgatagcttactatacaccacgttttgcaccttgatttttttcaattaaaaataaaccgtggagatcgtccgtattatcagcagcgatctgaagcgcaggtttgttgacaccccgtgctgatgctctctccacatctttactagaaaattttgcaagaaagagggtagtagaaccactttctcctctaagtgttgacagcagagagctttgagtttttgaaccctcttcaagaaatgaaaaggctcttagggagagcagtgtatcagttacaagcacattctctgggggtataattcttggagatctactgttagctaggaaatttagaatttatgacctctttgaatctctgttttctgacctgtaaaatggggatgagaataatagtatctacaatagaaggtagttctgaggattaaataatgatggaaagtgcttagcacagctttctggtgtgtcgtaaaggcttaataaatacagatgaaggttctgatgctgatgaatatgtagggagatgcctaggggatgtgtggcacttcttgcactaccagtgaccccctctagagggaagcagaaaccaaagaagagggcccttgggttgtccccagtgggtatgaacttcaggtctctagtgaccccattgcactttgatcagaagaaagatgaatgaggtcaaacaggaaggcttctggcgctgcgggcgggggtgggggaggtcattcagcacaggtggagactgggacccagagagagagagaaacagtgaggttagagcaaatgaaggatggggattgcttcttggagcaaaatgaataggtgtccaggagtggtggggacattgtgccttttagtacagaaaaattatcacctcccgccctttggtttaaactgtgagccccactcacctgcagctggcagagtagacagaaggctgtctgtgatgtcacagagctggggaaccagggaatgttggggctgggatgtttggactggaccacaacagcgaggaggagggagaagttctgctgagcacgatgccatgctggccaccagactgtatactggggcacaagtcctggggcctcaggaagcacctagaggatggccagaagggggcagtacaacactggatgctgtagatctgggtgccattctgtctctgtccgcccactgggtagtaaccttaggcaaagtgacttcacgctcaggttctccctctgcaatatgggaataataataatttttttttcttttttgagacagaatctcactctgtcacccaggctggagcacagtggtgcaatcttggctcactgcagcctccgcttcccaggttcaagcgattctcatgcctcagcctcccaaatagctggggctacaggcatgcaccatcacgtccggctaatttttgtatttttagtagagacagggtttcaccatgttggccatgctggtctcgaactcctgacttcaagtgacccccccccccccaccccaccaccttgacctcccaaagtgctgggattataggtgtggccttcgcctggccaggaataataataattatatgtcctgtttgcatttttaagtattaaatgaaatcaggtaaacatttaacatggtatctagatgtagtaagcactttaagaaagggtagttattaataacatatgcaaaaatgaagtgacattttcttccctatttatttttcagaaaagaaggaatcactttgtattggagtcctgacaaaatctctcagcttatggggcactctttccattcctttatttaggacaaccaagtactattcatatatggggaagccacattggattaacatgttctcaatcagtgctatcatttgatgcacagagaggtcactggatacaatagaaacagaagaaagcaaaggaattcagcacagctgtggggtcattcatgtggttggggcgggtgatgtgactccacagctgtgctgaattcctttaataaatatttgatggtgagttaaacagcctttgaaagctcacaggtaaagccacattctttttttttttaaattatactttaagttctagggtacatgtgcacaatgtgcgggtttgttacatacgtatatatgtgccatgtaggtgtgctgcacccattaactcatcatttacatttgttatatctcctaatgctatccctcccctcttccccccaccccacgacaggccccggtgtgtgatgttccccgccctgtgtccgatgttgcccgccctgtgtccaagtgttctcattgttcaattctcacctatgagtgagaacatgcggtgtttggttttctgtccctgcgatagtttgctcagaatgattaaagccacactcttaaatggtaattgaaggttctccattttggctgcaagtgagattcacttgaagtgtttttaaaacaaagaatacctggggcctaaccccagataaattataattttggtagggtgtggaaactgggtagcagtatgtttacaaaaatttccaggtgattcttgagtataatcaagaactgctgaattccattgtgcaggtcattatatacaggtaagcggtggttctcagatcaggctgtatattagaatcatgggaggagctttagaaaatgccactcctagcacctgctcccagtcagtaaaatcactattttgggggcaagggcccaggtgtcgatagattttacagctccccagttgattttaattcgcagccagcattaagaactactgatttatagaggtttttttttaatcataaatttcattgatgtgatacaaatggatcctttttagcttgggatgagcttttcaggaacagcattatttatatacagattcaaaagcattatttaaaaaataacttagaaatgaagataatatattctgaaaacctgtgctagatgaggttaaagatgtgtatgaagca

SEQ ID NO: 588552 - DNA, 4001 bp, Homo sapiens
actgtgttcctttattcacaaaatggggataattaccgctggctcttagacacttcacaagaatacttttgggtttaattagaaaatgagcaatagttttagaaagctcagtgcatccttggttattaatggacagaactatttttagtcagttaataagacagtctttttctattcccattcaaatcttcaatcatatctttaattgtatacctcacaccactcccttttacgtaaccctatacagactctcctctacttttcatctacacttcgtttttggaaaagaagttgactcaatcatttctacctttatttgaatttctcagtgagctatatcctctaggatagtatctatttcatgtaaaatcaagactgttgagtttacccactaaagggaatttagatgttattgaggaaacatttgaagaagtaaaatggttttctttatgtccttgaaattaaggcatgtttctacaaatggctatctatagtaatttttcccatttaccatatcaaaaaggaaaaataatattcaataacaaacacaaacactttatatccattctctcccccaattataatttccaaatcataaggagatagtaggatataggatattttataagcaattctgtttggtatatgtttagttttattctcctagaggtccacagctaggattgcaattagtcacttcacaaagctccaagaacacctgacagtgttgtttattttgcacattttacctcacctcttgctgaaacagactctatctccacttgctacagggggtgtgtagcttaagttgagccatttataagatcacagttctgacttctgtgattggtccaggcagtaaacatatgatcaaagtagaccaatcagaataatttgcattttttgttaaatactgaagctaggaaagagaagttctattttttttcctgttaactagttataagactatgacaagaattgccagcaggcttattcgctgtaatgtggataatcctgaagataagaaataactgctagtggaggggagagagaaagagaaagattttaaaaccataggtttttgagttatttagtacctattgattttcctttgtcaggccactgcaatgtcatttcaataaacaccttaaccccttttattcttaggtaattcaagttgattatctgtcatttggagctaagaatgatgagcttaacattatggcataacattatagaataaagtaatgctgtaaattgcaatcagggggtagataaggaagtgagaaaatgcagcttgcaatggaaaaaacccaggagccactagaaatgagttaaatacataataaaaatgtgtttattgtaattttttatatatattttagatgcttgaaaatacaagctgttaaggggattgtgttaaagaaagaatgaacatctcttgaaaaattagttatctccaggaacttatcatctagttttgtctttaaccttatggaattatttttgtttccattttacagtaaaaaaaaaaaatctgaaaatttaggagaataagtgttttggtcaagatcacaccgctgggaagtgctatggtacaagaaaacctagattgcaggtatatatgacaagccgaagttttgtccaataaatataccacaaaatttacatggaattaatgaaggaggtgatcaataatgttcctgagtgaaattattctcagtgtaatcttggccagaatcatgacatcagaaaatgttaaatacagaaagaatatgtaaaatgatttagcctggttctctcctttcatagttcaagaaacacaactcagaagggctagtgaacttacctcaggtccaatacccctttatttggagtgtgttcatgcatgagtggtctctcaaattctctgccaatctggagagtctctgtgttcttctgatttcacagcatgagaatgccttatgtcttccacatagagcaatgccagtgaaactgcaagaagggatacttttaaaatgaaccttttaaatttaattctttagtatttgtatgagcagaatgcaaatggtgtcaactctattattttctgcacaaaatgttccttgctcagggccaaatcaggggtaggaaatatggaactgtgccccaagcacctcaagggcagctggccacttctatttctagatcccaaacacctgcatttctcaaaagctggtgctgtttcagaagagacgtttggaagtcatcaacatactgcttacttactgtggatttgaaaaccttgaaatgtcaagttttagcttgaggccaagctgaatttttgagccctcatactgatgggtgatgagatcatttacattggattatacctctggtgtgtgagcaattcagtaaatgatgaatacagtgggaattactgcagtacatctgctggacacttttatagaatagctctctcatctcacctcctaggtgtgcaatcttcaatcaggaaacgtatttgaagcaggaaatcagttctctagggctatatcatctgctttcgtctcttttttttgtggagtgtaattttgtccactgctatgtcgcaaagtagacaaccataggacaatgattcatggctagaaaataatgcaattttaaaaatgccaccaaagttacagcagatcattttctgactgttgttgggaaataatgaataacattttgtgaaagaaaaataaaagagacagaggaattaattttttaaaaaataaagaagttaggcactgactgagctaaatgctgggaattcagtcagttgtaacacgaatgtgtccctggttcttaccaagctttcaacccagctgtaatgttagttgattttaataggcaattttaatgtgataattgctgctgaaagttaaataaacagtattaaagcaataaatagtaaaataatttaacttagttaagatgaccttgcaatttgtccctgaataagctatatttaagctgattcctgcattaggtgaatattgaggatggtaatattgaatgttttcaaagagaaatgcaaatgtgtgggattagtattgaaataaaaccaagacagtaggggcaatccaaacaggacagtaaaagtggaagcatttattcaggcaaccattatattgagtcctgtgcttctacctttgctggctgtgtaatgtgggttattttgggtggcttctatttgctttttatgaacacattaatttctccatgcattcagtaatcctgtattgattgtttcatatgtttctagcgctgtgatagtcactagtcctttgagctggaagctagattttatctaaatttttgttactttaaagtcaaacattttatgaacttggagttatattttcatgctaataaaagatatgtgattacaatggcttaaacattttctggtagatgtctagatgtagcctgttgtggagaaataaaagctctctgtattcctcagtactcttatataatgtcctagcttcctgactcatagacattttacagtatatacaatgttttccctttccctaggaatattttactcttcacttatgagaattagatctgtggccatttatctgcttgattgctctgatctgagagtgccaaatggttatagtttggactaggtttttacattaagactcaaggtgtcagggagactagaacaatatctccttaaagtatttccattttaggaaagatgaagcccagacctcgaagacatctttgtgtcttagaagtttaaaagatacccagtgatttgtctagcacccagaaggatgtatttacatttcaaaaggttagagtgagaagtcaggatcttttctatctaatctcaaagggatcattattccatccacaaaatttttttctcttctttcaggaggaatgtgatggctgccttttttctgaacataaatggagaaaaaaatgtctgtttctcacctatggaatatccagctgct

SEQ ID NO: 588553 - DNA, 4001 bp, Homo sapiens
agagtctcactctgtcacccagcctggaatgcggtggcacaatcacagctcattgtagcctccaactcctgggctcgagcaatcctcctgcctcagcctcctgagtagctgggactacaggcatccaccaccatgcctggctaatttcttttattgtggacatggggtctcactgtgttgcccaggctggtcttgaacccctggcctcaagcaatcctctcacctctcaaagtgcagggatgacagatgtgagccatcacaccaggactttaacgcaggaatcaggagcagctggaggacaattcatcccgaaacggaagggacaccagtcagggaattatttctgacaggagatgatagggagagcagtgatgaggcccaaacagataagccctgcgcccccacttcccaggtctgatgaatgatgccccacctgccttcaccttcatccagactactgctggtttagtctttattttcagcctcgttaaccccaaggcaagggtgtcatttttcgattctcaatgtaacttctctgctccgggttaaattatccttcaatcaatggtgtttttgcccattttgcatagcaagattccgtgtagttctggcctctaaactgccagacctatgctgggacacccatgcatgaaggcctgctatcaactgaattgcatcctccctaaactcatatgttgacaccctaacccccaaagtgatggtgtttgggagataatcaggtttagatttgaagctcgtggtggaagagaagctagagagctttcctttgccttctgttctcctacgaggacacagccagaaggcagccgtttaccagtcagaaagagagccctcaccagaaactgaccatgctggcaccctcatctttcacttccagcctccagaactctgagaaaattaatttctgttgtttaagccaccagtccaggatattttgttatgaagcgactatgacagggaggggagctgttccacccctgctgcctcagcctgcatggctgtccctgtccccacctcctcatctttctatcttcttgcctcttcccttccccatctctcctgtgaattagctccttagggctgccataacaaaagtaccacaaatgtggcagcttaaaacaagagaactaacatggtgaaaccacgtctctactaaaaatacaaaaaaaaaaaaaaaaaaaaaaaaagccgagtgtgttggcgggcacctgtagtcccagctccatggaaggctgaggcaggagaatggtgaacccgggaggcggagcttgcggtgagccgagatcgcaccactgcactccagcctgggcgacagagcgagactccatctaaaacaaaaaacaaaaaaccaccaccaccaacaacaaaaaacaaacaagagaaacttcctctctcacagttttggagaccaaaagtccaaaatcaatgtgttggcagggccacgatctctctgaaggttctgggggggatccctcccttgcctcttccaacttgtggtgcttcctggcatttcttagctgtgacagcatcactcccatctctgagtccaagttcacacggctttcttccctctgtgtctctctgtgtctcaaatcttctcctttctcttgcaaaaatatctactagtcaatggacttaggtcccaccctaaatccaggatgatctcatcttgagacctttaactagatcatatctgcaaaaatctcatttccaaataaggtcacatttgcaaggaccggggtaaggacttggagctatcttttcggggacacttttctaccctccacacccacttaccctttccccaccacacctcatcttccttcctccacatcctggagctcactctgctgtcctgtccttcgcctgcaggctttgacccagggctggatgggagctggagcaggaggcccaggcattgcatctggtctccacaacaagacgctcagtacctacgagtccaactttcagtctccaagtgtgagcatacagagcaatctcacaaagaaccttctcactgggaaggaaatggcttacacattaacatgagtgcacttagacaaagaatagctggcaatgttgcaatgctggagacaagtcccagcagccagttgtgccttgttagagactcattgattttgggtggcctggattccattgtcaccaatgatatgatcatatgggccatgttccaaatgcctctggctgtgttcagaggatgagaagggggagagttaaacaaacccccatgcagaatctgaaggctttattcatccaccctggcactgctttgcccactgaataaaacattctgtacccaggggcaagcccaggccccagctggtaccgttcccaatgtcccacaggcttccaggctgcccttcagcacagactcctccagaacactgtgctcaggggccgccaaggttccagctccaagatgcaaactctgccccaattgccaagggagtggctgtctttgcagggcattgtctgtgagtccttgatccctgtcttcactaatggcaatcccaggaaactgcctgtgaataaaagccttctcagccctggggaagaaacaggcacagctggctcaaattgtccagctgaagacagagctcagcctggaagggacacagctcagttaccaccgtgccaggcagctcttccttttatataaacatttgagggcagggttctcaagccccgctgccccctagtcctaccttttctccattgtgaccacagagggttttgttgttgttgttgtcattgtttcttggggggtttttttgtttgttttttgttgtgtcttgttttctttttgaggcaaagggataactctttcagaggggcacctggaactgtctggtgtggaagcttttcctcattcggcacaatttcaaacttgcgagctttcacaaaggcgtgggtgactgttttactccttgataaaagtctggcatattcagagttactgagacccaggagcggtatctaatactttggaaactagcaagggttgctttatttcccattcttgattctacattgaaagtgggggatcttgttatgcagatcctaacactctgcccctccccaaatccaaatgaaaggcaaggtcatttcactggaaatgtggtaagcagttagcagacaatgggattgtccccagtgcggggtgagggtggataagaaacacacaggtgggacggttaacaacatcaggagctgtggctttatggaaatttatgtaagcatgatgaattgcacacagccatttgtctctattccctcctaaccctccatgaaagtgacaggaaagggacaaaaagacattggcgcacaaaagcgaagagaacatgaaaggagtcacagcagagagaggtcaactgaatgactgcaagaggaagtcagatctagcagtgagtaagtgaacagaccacaggatgcagaaagctagcacttcaagggctggggcaggagctgctgggcagattcacaacgcagaacccagggagtcttgggaagtggaagcatagggcattgctcatggggaatatcccagtgggctaaaaatgagaggattaattgaaaatctataaaagaagaagtcagagattcccttgcttacctcactcaggactgggaccacccctccctcatccagaagaagacaagtggatggggggagttgttgtcactttctagagaagacaaaggaaagggagtccaggctcaggacccaggtctaggtgaaaacagtggagtgtaataaaaatcaagccctgtggcatcccctttcctcacttggctgtgaactaggccaggctcaggaaattagagaattcttctctggggaaactcatcaatcccagagataggatttgcagataataatgtttaagagttcctcaacaaaatagccagtttccttctgggaagtcctactgaaagagaaacctttgcatgcagagttt

SEQ ID NO: 588554 - DNA, 4001 bp, Homo sapiens
ttttttaaaatcttttttaagagacagggtctcactgtgtccctcaggctggagtacagtggagctatcatagctcattgcagcctcaaactcctgggctaaagcgatcctcttgtcttggcctcccaaagttctgggattgcaagtgtgagccaccacatcccatcaatttgggtgttttttaaaaaatatctttcatgtgtctagttaagtttttgaacttctggaatacagttataacaatgttttaatgtccttgtgtgctaattctgacatctgtgcccattctgggactgtttcaatttgttgatttttctcttcattgcggggcttttttttttttttctttttttttttttctttttttttttttgagacagagtctctctctgtcgcccaggctggagtgcggcagcatcatctcggctcactgcaagctctgcctcccaggttcacgccattctcctgcctcagcctcccgagtagctgcgactacaggtgcccgccaccactcccggccaattttttgtatttttagttgagatggggtttcaccatgttagccaggatggtgttgatctcctgacctcgtgatccacccgccttggcctcccaaagtgctgggattacaggcgtgagacactgcacccggcccattacggggctttttttccttcctttcatgcctgataatatttgatgggatgccaaacactgtaagctctctggtgaaaacataaaggttttcttgaagtgaggtttgaactgaattttgaagggtatatatggcttaaacagtgaaatgaggggaaaaacatttaaagaagagggacaaacgtgaaagtagctgaggcataaaaggctatgtgtttttaagaaaataaaagattgctggggtgactaggagcaagcagtgaaatggagaattgcattctatgtctcttggggtaaagggatgggcagaccatgtcccactgactcaggggctttgttaggcattttgttctgtatcctgtgaacaatagtaattctttaagggctttacttaagctcagatttgcagaaaaatcactctggcttcaatgtgaagaacagcttgaatgagcttcagaatagaaggggtgtcgagttaggaagccactgtagatttctgagtgagagatgagcatagttggggccaggatgggagcagagatggaaagaagtgggctgacctgagatacaagatgtggggtgactcttgacccctcccgactgcaccctatgagatcaatcaccaagttcatgtgaacgcttttctaaggggaatattattttcacagagtgaatacattttttattgatatgttcataaatatactttcttacagttctgactattgcatgtagtacctcagaaaggaaacctatttattaacttgtacccagaaatgactcctagtgaatctcttctgatatttgcccaagaattcccctaaaacactcagtaatgaaaaacctcattccaaaggcctagttcaatattcctcaaactgtagtgtgcatgagaatcacctgacaagcttgttcaaacaaatatttctgggccacattccccagagtttctgattcagtaagtcttattcagtgacttttcacctctatcaagttcctgggtgattttgatgctgctggcccagggaccactgtatgggaatcactggttaatcagaagcactatagccaagagtgcttctcttggagaaggaaacacagaaactctgttcctttccagtgctgtgacttggtcaagtgactcacccctctgtgcctttgtttcctcatctgggtcttggtgaggcttagagtgaggactgttggaaagcattaggacagatgtataaggagcatatacacgcttttatacgtaagaaaataagttccatgtgccttgcatattctacagttctcagtgtatggtgagacagatcctgctttcagttcatccttggtgaatgctagtcaaaattctatgtgatgtcacaacagaaatcttcagttaacagtcgtggaaaggactcaagctctactccatctccacctccttgggtttgggtaaattctcagcaggattgtgcattaggtgagtgtctgcttctcccctgggtccccataactttgcttgctcctaaacagggagtcacatctgggaagagacagtagataatggagccagagagctgactcaccacgtgggatggctgtgggcaagtttcccaggttgcacaagccaccgggttttctgaaacagatggaaagaccgcctctgcaggccgctggctgacttcaagatagtcgtgctgtatcaagtggtgtgagaaggaaagacccataagagactttgtcatccaagtttcagattcccctggattccttagcgataagacatgcatggctcattacatattctatttatgaaatttctacgggcaaagactcgaatgccctttaactgggtgcgcacatgggcatcgcatagttttccagagtaacccaagatactggggtggagagaaaaatggaaccagaagacaagccagcttctaccaaagccacccagcagtcagccagcccagactctcaaatctggacctgggggtcagccctaggtagacaggcaagccatctttcaaaggctcccatgtcctcttaataaagtgagagccagacattagcaatcattctcacaatttttaaaaaccatattatcagctgttattttaaatatccctaacctagtatagttaataacagaaacagaaaacatttaagatttttaagatataagaattgaagatcttgagtcaagctttaaaatgaaagtaactttgaaatgaggtcaaagttagaacattcagcaaggaatcttaattagaaaagtatgactgggcaatactagaacaattctgagcaaatgattttgccaccaggaatggtaaattcaaagaaggcaaattagcagtaagttgcagagatggccacttgaatgaaacacaaacagggttaatttttttcactcggtcaattgcatttctcatacaaagctgaaaaatgctctcttgtaattctcattttataatagcaattcttttgttttgcattgcctggccattgcaatctggacaaagcaacttttccatcctattttagttctcaaagtatattgatttttaatttcctggagccagttttctacacaacaatattttattcactatgagaagtagtgccagttttaaacatttatagacttgtttctccagggaaaaacataagctagaaagaaaaactaaaatttcatttgatgagattcaaatggcaattgggggtttgaatgtagaagtgttgttttcttatccagaacagtcactggaactgcattaagggaatgctatctggtcaatttttgtttactttctggagatacgatattttctgaggattcaaaacaagtgggaaattgccaaagtcttgcaagcctgatttaagagacagaaaagaagagacaacatataaagttttctcttcgtgcatatgaacacacatatatctttaagttaatacattaatggatcatattataacatttcttttcaaaaattttctttttgttctttgctcttcttcttctctttcctttcccaaactttctctctgccttctgcacaggtaactcatgataacagtatgtggcctataattttcagctcactcgcgcttacctgcatgtatgtgcacagatgttagagagtgcttttcttcatttttgttagaaatgggataataaaacagactttttttttctgcatttggtttcatttactctgtaattgctcatggaaatctcccagagtcatcaatgtggctctaattcattcttttcagtggctgtgtaataggttgtggtgtgtatgagccagaatttctttcatcattcctctgtcattaggcgtttatttgag

SEQ ID NO: 588555 - DNA, 4001 bp, Homo sapiens
tagaagtttcgaaagggctgccacttacattcttacctctgttagttctttcccatcactcacagggagactgaaatccatgctgagtgcccacagacctgggcaggagctgttcccttgagagacaatgatgcaaatgagtcaagtgatgcctagtagaagtcagactgcaaggatcaccttgacctcaccctagtgcattagctaagcaaactcacaagctttaaataataaaggtaacaagagattgatctgaggtgggggaagtattattgagtcccttgaggaaaggaaaaaaaaaaaaaaaagaggaaatgagctcccagctcaagaatttttctcctccaagcatcctctgttgcttgttttcttccatcttcctggccctctggacctctcacttccccctcctaccttttcctactgctctaacacaataagataacctcccaccggtttctcgctatttgggaagctggaaggaacagcaacgatcaccaaccccttccattttccggatggggagacggagaccaggatctgagctgacccgactggctgaggtcgcgccgctaggggacgtggtgtaccttgcgggctcggatgatgacaacccagccttccctcctcgctcctcgcccgtgccttcctgcctcaagctacctccttctcttgccacttggtgtttttatcctcaaatcagacaagtatcaagaaaaaaatgcaaccttaatatacttacaatgctgattattattcataattttgcatttggggcaattatactcgctcctactgggatatggaaatcaagggcagaaagaactaggtgacattctacctccctgtgtattttaatgatgtttagtttggttcaaataaccatacctctaaaatacaccctttttccttgggacccactcttctatccggcaagggaataacttcttaaaaaacttcgcattttccaagtgtacagtctccccttaaccagaactgcagactctgaatcacagacctctggcttaccaattatgcttagctgagcaaacacacttatgcaaatacgtgaaaaacaaactgttagagcctgaaggaatagaggatttcgctgtgatcatcaatatgtgatcatcacattttcaatatttatgtttaccaatatctatctaaccccataggaaacgacgcgtccatagtgaaacaagccagcacccacatttatgaaaaaatccacggatttcaacaaaaatgaagagaggagagcagaagcggagagccacaacctcaggccccagacagcaggcagcagcaagtcctgaatgccttcactcttaacattgcaaagaccaaatggcagcaaagaaaaacaagaataaactttaaatccattcaccacaaaggagtcctacgcaagtcaaaggagccgtcgatttcaaaaccatcaactttcaaagccaggtccctcccttgccttacaacctcctgttacttgttaagcacgtttgttaggcggctggacagaaacttagttaaaagtcctcagcccggtggtgggggacaaccgagtcgtcagtgggaagcgagaggtgcggagccccaggggcgcagggacccctcggaggtgcaagtccagcgggacgaggttttgggagaatttcgagggcccctcgcaagccctcccgcgcacccaccccgacccaggtaaccggaggccacctacgtgtcactgggcgggccccggggcgcactgacctggcgcgggacaggagggccggcggcccgggcggctgcggcaacttccctccaggggctcggtccgccgctgggtgcgggaggccaggggagcctcgcctcctgcaggccggctcgcaagaacgcacggccacccacccgcgccgcggcccacagcgcgcacccacactctcactggcactcgcacgcgcgcccccaaccacaaagcccgtccgcggcgggacagtgtgagcccagcgcgccgtgtggcgggccgagcagtcgccgcggcctctggcttcgcgcccagggggcgccgtccccacacgccgcgccggcccccttacctgcgctcgctgccgccgcgcgtccctctcctgccgcccccgggctggcttcaggccgcgcgcccagtcccggcggcccccgccccaccgccagccgagcccggccctccgcccgcccctcggcagtcgcccagagcggggccgccccctgcgcccaccccgccggggtcccgtgctcggccgggcggcggggagggctccgcggctccgggccctggccgccccagatccggcccgcgctccgcagcggggctggagacggagtcgccactcagggagcgtcagccgccagtcggcccctactgcccggctttggcgcgctggcaggaggagggggcgcagagggagggccagaggagcagcgccgacgccagcctcctctcttcctccgccttccttcttttctgcttgttccacgtagcacaagtcagcaacacccgaacccccagagtccgccctccccgctcccaagctggaccccttacctggtgtggcgcccccagcgcccctgacctctgcgccccctcctccattcattggctcgacagcccacggtggtggcagggccggggctggggggtggccttagcctcccattcattatctcagcagcctcccccgccccgcccccgagtcgacacacccgcagcgggagacccgtggccgccagctcgggtcccacccccgcccctcctgcgcttaccccagcgccggacagctggcaggactccggtggacgccccggcacggggcattttcacgttgtcgctctcctcttcccactcgaaaagctctggaaaacatcgcggggcccgcaaaaccccggaaatgtggcctctctttcgtggctcactttctaaactttccagaaggcgcaaagtttctcccagcgccgccctgcactggaggctgcgaagaacgcagaagcggctttgctgctaggaaggtgcatacgtttctagttctgatttttcacttcactggatctgtaaacgaaagcaagtgtgtctgctcccctagttctccatatccacgattataaatttctcttccgctttcccagtgtagctttgcaagtgtaaactatcaattttagtgagagtaattaagggcggggactgcacacctggaggtgtgggtgggagcggcgcgggactaaggcctagggaacattctcaggagagtggcagccacagggattcgcccaggtcttataacacacccactcgatggggtctccctagccacgccacctcacaacacccatctcccacttctggcttcccaggatttccggagtgatcacaattatcggcctctcgctccacagctaaggccaccgcatatcaaaaatagcagcgtgtgagtaaaagtttcatgagccctcgccttgaaatggcacagaggacacagcacaccagcagtaaggcatggggactcggcaggactgatctgattgagagaaacgcaggacagcgaggcggggctatgttggtggtggccaccaggtaaccgtgggctttgcagaagagaaaggtcactgcaaaccgtagctggacggaaacttttcaagcctcaagtgagttatgctgtgacgggaccatgaccatctcccaccggtgactgcttagaaccttgaccaagctcgtgtggttttcacaggatgctcagggctgagtcctggctgtaaataatttactatctaaagctgtttccttttaaaaacaatggttctaatcttttttttaaaaaaaatcattcaaatcttttttaaaaatccactttaaataactttgctttctatacctttcctacgaatatatgatttattttataacctactatgtgaaaaaattgaaattttagtacatgcacagtgctaatatgttcatgcacaatgctacttatgtttgtgtacgg

SEQ ID NO: 588556 - DNA, 4001 bp, Homo sapiens
gaacccacaatatgtataattatcactattgtctgaatggagttattttggcatcgtatagcaagttaaatgcaaaatattaagaatatgtgtttcttgttgaatgatgagttctttgtttacccattcagatatttagcttaaattgagtctatatgtaacttcgcttatattaacatctctgttccaaccttctctcctatctttacctggttctgcaatatgaacagattatcaaatatcaccagaaaataagttatgaaatatttgttcatctaaaagtaccaagcaatgtctataaggtgaaactcaatgatcagccaaacacccatatatctgatcaaaaatcagaatgctcaaaattatctgactatataggcaggtaaagttatttcaagttggagaacataaaagttcttgtctaagtgtttcacaggatttgtataaacaacagatgtactgaaagtacatttttgctaatatgagtagtagtttaacccaactttgtttttatatggataataaagtagatcaacacacatttctcccacagtcagcctaaaagatgccgtaagaaagaatatgctacagctcacccctgggatgtggagactatccttcagttacccagacagaagttcaggatacttacttttcagctctttacactgtcatattttaggtctgatctttaggctaaaaaaaaaccgatccactagacgccctattttcttgataaggcagatacaataacatctctggcaaatcaacatcttattttgagataacctagaaagcagtttttttccgaatttcctaaaaaattcatgtctttgtctcctctatagcaaacatagaaacagaggtagagtacaaaaggagttcaggaaatttaaccaaaaaggtgctggaaaaactgctagtacaaagttggagcaactgaacaaagtaattcaggacaaaagaaatcatacattgcacaagctcccaatactctactaaaatgtccagaggagatagtaaactctaagattatttttctttatttgggttccaaggcaaaagaccatgaactaatatcatctgtaaaatgcatggattattgacttcctgaaacaggatattgattttttaataaaaaaattaattaaaatgcttcattctctttcatagttaacattcacatcattgtcgaaaatagaagaaatataataaaacacaatattcattttattatatttcttggatatattaatttggatatattatatatccaaaggtgaagtttaaaaaattcttactctatgacttcctatttaagaaacactttgcatagtttattaatctttaccaatatttgtgctatcaaaattgacttaccaatcataaaattaattttataaaataatctaagttatcagaataaaaactgttacttttatttcaatttgtccataaaggttaaaaaatacacatacctcaacaaatataaaacacgggatgatggaataacttcgttgagtgttgtttcctacagccatttctcacaccatatagcaagactgcaccgtcaaaaactgtccaggctgaaatagaaataggttgcatagtataagaaccatatattgagaagtcccttaggtacttacataaaaatatcagctactagatatcagctttctagataagcaggctgtgtgcaaaagcaatacagtgatctacaacacagtcaagtcagactaataatcattccaataaaaagcaaataatatatacttgccatgaatagttttacagccaaaatgaccaggtcaggagccgcttgtgcacatagctagtgaatagaattctaattgcctagtactgcatagtgccttaccccagtagactgccctaatgccatgaaatacaatttttggtataaaacttttttttcttgtccatcctgcatggatctctcttacttgttcctaatcctcccaatttgcaacctagagaattgtctgtttatgctctggtctctccctttgaagctgacacttagtacagagccaccaatccctgacttccttccttgaccattatttgtccttgctctcttgaatacacagccatgaacaacttcaggttaatatgtcaccgatctgtttcactggttcccctcagccctgtgtgtgacccaaacataaaacagtaaaggcataacacatttcatttaacttataagacattcacttagcttacaagaatggagtagctgggcaatagcagattgtcattaaatattttattagaacacatcttccctgccttgaactgaaaatataattgtattaggagattagttagttttgattcttcttaatacaatgaagtaaagattttaagctttaatgaaatttccagtccagagttttaaaaatccagtacattttttattctctagccaaagcaatactacacatttcagatatctgctcttaaagtcattatttttcatttgttctgtttctctgtcatccctaccaacagttcttgtagattttgattacagtatgaaaggtaacataggaagtaccagtctatttgaatggccagctgtactttttaaaaggtcagacattaattttaatgtcttcatttctatccttcctaagtttctttctgcccttttccagaatgaaactttaaaatacatatccttcccttttgagatatcaactcctcacttgtcaattaaaagtttctctgatcaaatttaatattatgtgctttataaatccataccaaccacagtatttaagttttaggcaacttaatttttttcaattaaaattggatattttctgttataaaatcatacccatactacatgtgttatttcaccattatattttaggatgttattttctacaataagaaaggaatctatatgtagaaaacacattgaattgattggataaccatcattttaaaatggacaaccattttaattttgcccttacttaacccaaatatcttagaatttacttagtatttatgatataaatgaactttcctgttagcatcagccaaatacagtgttgtatatctgaaaagaaaattaaatattaatcatgttcaagaaggcagaggcacgagaaaaagcaaaggcatcaaacacctagtgttttagatggcttctccatgtaattaataaagaataacaataaagtggagaatataagacaagctttaggatacaaaattcccctctattttcatttttctggtccaaaatgcaaccaagctttttatatgtatatggctacacacacacacacacacacacacacacacacacaaagagacgggagtaactacagtgaggtatattttatatataccaattcactcattttaagtgtacaattcaatattttaaataaatttaccaaattgtgcaactttcccataagatagttttagaactttttaatcacccctaaaagaattatcatgtctatttactgttaattcccaccatcaactccttcaccatatcccaaagccaggtaatctgctttctgactctacagatttgccttttctggatattttaaatgaatagaataatataatacacgacctcttatttctgcatttcttcacgtagcatatttttgagattcattcatgttgttgcacattcagtaatttttttccttttaactgccgaataatattccattgtatggctattgcacttttaccagttggtagacatttagattgttttgaatttttggctatatccagtatttggttgtattcaatattatggaaaaccatgctaataacatctgtgtgcaattctttgtgtggatttatattttcatttctcatggatattagacacctaagagagttgctgggtcatacgttaaattatgtttaattttttaacagcactactaaaacgttttccaaagtagctatatcattttacattcccaccagca

SEQ ID NO: 588557 - DNA, 4001 bp, Homo sapiens
agaagccctcacccccacccgtgaggagcagcaggcataagtactggatctgagcttccggagtttacttctttcagcatcagcttggcttccagattccccatacacttttcctaaaaatacaaggctcctgacgtgcacaagagccaaaaatgtacctgtctgcccaacccgcctttcaggtacaaccaacacgtcaagatggagaaactttcacacgaggcactttctagacctaaacaactaatttgtaagtatgctaaatgttatcccagaaatagtgaagtcttttacgctccagatgtgacattctagacacctcaaaactagcgtcccaccagaagaataggagctgccaaccatacaagcagaaggggcatagaaattcagtgaaggctgtagtgtacgtcccctccagtcaacctcttcctgccttcattaacctctagtcacacctctcctaagtgaccattatttgtccctcttctatctccctttgtcccagtcctggactcctcacaggctgacccagtctctgctgtttcaaaaggccattcgatttgacgcttttcccgggtgcagcgggtgcactgcactctgagatcccgccccagtagtagaaaggattttaggaaatccttttctcaggaccttttccgtcgggccgaagagatattcagaaccgtgcctgtccaccaactagatagcagacaccacagaatctctcccaggaaagaggttgaaaggaaaaaaacccgacatccccacaaagaaaaataataatccagaatcctccacatattccacacgtgcgtgtcataaaacccttgggaaatgggttgggagaggataaagccccgtcttcccactgccgccgccgcagcagcagcccctgttcagctcccagcgctgccgcgatggtgtgcgtgaagacagcaccttccctgaggaggagagatcctagcgtcctccgttctaggaggtgattatggcaagcctgtcagtaactcatcatttatccccgcactgacccgagcctcaccccggcgcctttggcaccggagctcgatgagaaagccgaaggccgcccctccaattttccaggtgacacacacaccccactatgcgcctaggacgcagaggggtggaagggaaggatgacaggtgcccatgcctgagggaaaatcaatggcaacccttacagcttggggtgagaaatctcaacccccgcccgggtgggaggacttggcatcagctacctgcagggcgcctccgcctgcacacccacccaacgcgtgcaggctcgcgttgcagcccggaatgcagtcaggagggtggaacgggacggagggagcctccacgccccctttgtctccacgtttcccagatgacatggaaggaaagtttatgagcagggaggtggtagctttctgctgggtcaatctgacacctcgcaggaggcgaccctccctgggttcgtcctctcctctgcacagccccagcgccgccttcatctgcacctcgacacccacaagcaaggcatgggacacctgcgccgccgggtccggccaggagcttgccccgcgctgccctactgccccggtgcagagacttccccagcggcccggctgcgggcgccgcactcacctcccgcagcggagcgtcctccagtgcgccctactgggccgtccggctcccgggagcgaggtacattcaggcggcggtccgagacacgctctccaggcgctgctgcattccgcttgcgtgggagagcaagccggcgagcgagcggcgcgggcgtgtacgagtgtgtgtttgtgcgagtgtgtgcgcgagtgtgtgtatgtgtgtgtccgtgtttgtgcgcgcgcccgtggggcggaggtgcgcgggatcacagatgccgctgggcgcccatcccgcgctctgcttcctccgctgcctcctcctggcgctgcagcttgcacagggtccaggtttcaggatctcctgtttgtttaatgaaaggaaagagcaaaaggctggcgcggagggggcggaggaggggagaggcggggagggtgccgggctgcgcatgctcaagagagactcagctctggctccagagcccagacagagcagagagagtgagctcggggtagaggcaagccagccagattgcgtccagcggcagtcgctccgcggggttcccagaaggcagcggggaaaccccgccgcaaaggtgcgccctgcgcggggactccgcggcgcatgcagagctggaagccagtggtgggatccccacccatccttggagaccgcttctgcctcgagtcctcggtaacgtggggctgtcctctcccggtgtggttttagcgctggcgcgggcgttcctgtgggccattctcttgctttctaccctgcgggcaaccgagatgcgtctccccagaggtccaggaggaaccacaggctgcaggtcgccccgaactaaaatgagtttcctggtgtgtgcttctttcttcccctcccaacttccactcctttaagagcaagaaaaggcaacgtccagtcgggtcccacaacagctttaatggggcgagggcgagaagggggctagcgataactcttccaaacaacaaaggaggagtggaaggaaggtgagtctctgaggaccccatactaagcctcctttgatgataggggtaaatggaagagatatttgccctatttaagaaggcaaaaaaaaaaaaaaaaaagaacaatgggttcattgtccccttgcctagaatgccaacgcaattctaggtctttgtgaggcctctggctatttggtaaagtgggagaactgtcaactcgaagagagtccagtaagagaacctgagcctgctatggcacagtaacctgaggccaggggagatggcaggtgagagtcgttgcaagtagagtggaaacttcttggatcagattgttctgtgagcaaaacagaatggttaggatccattcaagagcttctattttcaatctcttccctgtttaatcgttctgtctccccacacaccacaccccattttctttcctacagaagaaaagacatcccaagcaggaaactccctgtaaagagatttctacctcctttttattcattttctgtccctccagaaaaggataacctttggtcccctctgctttggaggaatagaggacagcctgccttgtgcaaatcttttccaagctttcattaaagatcacctctaagcatttccactttacagtggaagcgagcagatgccttcttgctgaactctgacccacataccattcatcttcccaataataatgccaagtgacactcgaacagcaggacaattagatcaaatcctagagcacacccagaggagaaaaaaacagcatgtctaaataccaccaacaaaagtttaggagaacagacttagaggaaggagagaaaaaaaggaaagttcttaaaaagagaaagtgccctgggtgtagtggcaggtttattttctcagtagatccttgaaagaagtagaattgcagcatctctttgcttaaaggacaagtgagagtaagtctccatccaccaggtaggggagatcaggttctcctgaagagcagcaaagcctctatagtgaaccatgtagggtatttggagctcctccttccatgcctgtttatatcaggacttccctttggtgctcggcttcttggaaggcatccaagatagatctgccttgttgtcacgttcccctcagaacagtaaacagtgttcactagaattgcaaggtgttagtattggtagggccaattgcttccttgaggcaagatagccattctctttgccctggtgcgtaagcacaaggtgagtgacggctttgaattcatgaactaagaggggctggggtttacagttcactcaataggagacaattctaaggcacttcctcctacaatgataagtatccagggttgcctggccaagaagcccactctatctgagcctggcc

SEQ ID NO: 588558 - DNA, 4001 bp, Homo sapiens
cttttctctttccatagttaaatgaaatttgttaggaaaagctactctgcctcctatattttataaaatttggatgtagatcataatagaatcccttttagagccagaagtgcatttaaactatcacttattcaagatgattgcccatagaagagggatgcctaaatcatttacaaaaggtagtttacctatgtttaatgatttataggaataggtgttcagctccttcaatggcttgtttcagtatttctcaatgatgtggtgaaattcttactgatgtctctagtaggctgcagaggtgactgaggagaggtgggtaagggaagtgctgttttttttccagaaacaaataggatggggatagtgaaagaaagcaaataggctacaaagaaaatgaactagatttaagttaaaagttgatatgaaatagaagcaggtgaaaaaagtaatggaggcaagacaggactgtgagcttatgtggaaatggagacggagtatggttttatatttattatctgtatctgctatttaatgctaataattgttttctcaagtgcgctaaaagaaaaaaatcataaggattagaaaaggattttttttcctttccattggatagatcttggaagcagtgtatactcagctcaaggtagattctgtacaagaaagcattcaacaaatctaaagcatcgttaggtctgaagctgtgaaatacattgattgatccatactatctgtgagagttttcacatatttgtgtgccttttcagaggagaaagattgaaagagggggtgatgtcgattatcatgacactgagtaagtccccagacaaagcatttgctagcattattgggtgtctttaaaaaaagaaaatcagatacgcagaatagctggccaagtagattatgcagaaattatccatcagtcagtttagcctgtttcaacagttggtttaaaaggaagtcagtcattgttgctttctttctccttttggaatattttctaatttggattttttttgaaatgatagttgagtttcatatagtgattacttaggagctaatataaaatagaaaactggaatagaagatggaatatcagtttcttttgttatttcacaaaattacgtgcatttttacctagcatatgatctacgttactgaaaaaaaaagagctttactcaaaggaaatggtagatactgaaaaagaagcattgttcttaataaagtttcaagtacatgtttcttaagttatttactttatatgattattatatgctatgaaataaagagatgctgtaattattttggttttgttaaaatctaaatgtagtttttccattaagtattttagatatttatgccagaattcaatgtatttagagaatgatgttaataatacacaattaactttgtttccttatttaactattgtgtagatttttttcagatttaaaacctttttgtaatggaaaatttcaaggaaaaaacctaagtaagaagaatagttatcagcctgcttcaataatcatcaactcatggccagtcttttttttatcttgccaattggcttttagattagtgtcacttcagaatgctctgtgattaacatattttaaaataaaaattcttataaatttgattggctagatgaaaccatttccccccccgccccccgcaaaacaattacttagtattgtattctaactttatttaggaaagaccctttggccatgtctcaggtatatagtatttttgaggtagaccatgtgaaaatataatcatattttcttatttttcatcacttcttaaaggcaaagatggttgtacagacttaacaaacttaaatatgattaaaaaaaatacaacaataaccaaagctataaatatacatatcttacctttttttcttttgtctctaagacttgtgtgctaaaggaaattaactctgtttcaacggcattaaaaaaagtacatcgtatgattacatttcactttgttttaacctttgtacccagtgaacaggtgatttaaaaaaaaaaactagacttccttagcaaaagattgactagaagaataatttcttaaagtcatcttttccttttttagtataacaagtaaggctgtttgcctaacctttgtgtttctttcttttttttctttttttgagatgaagtctcgctctgtcattcaggctggagtgcagtggcatgatctcggctcaatgcaacctccacctcctgggttcaagcagttctcctccctgcctcagcctcctgagtagctgggattacaggctcccggcactgcacctggctaatttttgtatttttagtagagatgcggtttcaccatgttggccaggctggtctcaaactcctgacctcaggtgatacccctgcctcagcctcccaaagtgctgggattacaagtgtgagccactgcacccagcctacctttgtgtttcttaattactctttgaaaattttattaaagtattaacaattttacttactgatttagagtttacaatattgaaaatgcatacttttgaaagatatactgttgctaaattaatttatgtttgtcctgatggtattttgtgcttagaagcattcaaactgaggtcaggtgcagagtctgacacctgtaatcccagcactttgagaagctaagatgagagaataatttgaactcaggaatttgagaccagcccggccaacttagcaagaccttgtctctactcaaaataaaaagtaaaaacattagcagggcatggtgttgtgtgcctttagtcccagttacctgggtggctgaggtggggggatggcttgagtttgagcatgcagtgagccatgattgtgctaccacagtctagtctgggtgacaagtggtacctgtcaagaaagaaagacagaaagagggagagggaaagagagagagagagagaagagaagagagaggagggggaggggaaggaggaggaggaggaagggaaggaggcagggagggaggaaaaggaaggaaggaaaggagagagagagaaaagaaaggaggtagggagggattcaaattgtaaagataccaccaagttttgtattctattgagtttcaacgtttttgtttacttattattgtgtgtttttttttttttttttttttttgagatggagtctcgctctgtcacccaggctggagtgtagtggcgcagtctcggctcactgcaagctctgcctcccgggttgacgccattctcctgcctcagcctcccaagtagctgggactacaggcgcccaccatcacgcccagctaatttttttgtatttttagtagagacggggtttcaccatgttagcaaggatggtctcgatctcctgacctcgtgatctgcccgcctcggcctcctaaagtgctgggattacaggcatgagccaccatgcccagcctgtttacttacttttatgacaccatcatcagtggttttactgccaagttataacaggagcaaagtactcaaagcatcaaaaagaccttacacctggacatcatatggcctttagaaagtcagttacttttcttatgctgtaatttctcctctgtaaaatggaatactttataacattagttctcatcttcctacattgaaagaagaaacactgttggtagtcagtaatcaaatttagaatgaattccttccaaaagattaattccactgggcttcagtatccttaatttatgaaaatagatactttcctttcaatttctttgagctcatatacctatacaaattgtagcagcaggaaacacatttgttttactgttgtaattgaagctccaagtgaagataccacttcttctccaacagtgaaacaaaaataaattgaaattccaggttgctttactatgttcatcttttatttggttattttgagattttttttggtagggaaatttctgagtttaggttgtttattctagtagtaggatatgaatgtgtagaaggt

SEQ ID NO: 588559 - DNA, 4001 bp, Homo sapiens
gggcagagctgagtcggctgggcagggccgcagggcgctccggcagaggcagggccctggggtctctgagcagtggggagcgggggctaactggccccaggcggaggggcttggagcagagacggcagccccatccttcccgcagcaccagcctgagccacagtggggcccatggccccagctggctgggtcgcccctcctcgggcgcctgcgctcctctgcagcctgagctccaccctcccctcttcttgcggcaccgcccacccacaccccgtctgccccttgaccccacacgccggggctggccctgccctcccccacggccgtccctgacttcccagctggcagcgcctcccgccgcctcgggccgcctcctccagactcgagagggctgagcccctcctctcctcgtccggcctgcagcccagaacgggcctccccgggggtccccggacgctggctcgggactgtcttcaaccctgccctgcaccttgggcacgggagagcgccacccgcccgcccccgccctcgctccgggtgcgtgaccggcccgccaccttgtacagaaccagcactcccagggcccgagcgcgtgccttccccgtgcggcccgtgcgcagccgcgctctgcccctccgtccccagggtgcaggcgcgcaccgcccaacccccacctcccggtgtatgcagtggtgatgcctaaaggaatgtcacgcagttttcggtctgtgtcgcttgttgacgccggcagacagtgtaaagggagggcaaaggcatgggggaagcttcgagcgctccaggcggccgcggccgctcaggcttgggcggcagcggcggggctccccgggtccgcgggcgaggcacagccgtgggggtcgggatcggggttcgggtctggcggtctcggcgggcggagggcggcggtgcggaggcggcggcggcgcgcacggcaggcggtgagcccagagcccagcgccaggcaggaagccaggctgacgaggaaggaggccggcccgagcgtgtaaaccacggccaggtcccgcagggcgagcggctgcgcgcaatggctaaaggcggcgtcggaaaaggcagtcagggggctgagcgtcaggcgtcccggccacacgcagagcaccgtctcggcctctgtgggacacagacaaaggcgcggcgtcaggtggcggctgccgcaccgccctgcagaccccgacccgcgtccccagcagctcacctgacgcgggcagcgggtgccggcgcagccaggcgcagagcgggcgcagcgcgcacccgcagccccaagggttgccgcgcaggtgcagcgcgtctagagcgggcaggcggcccagcagccccggcgcgagtgccgccagctcgttgtcctgcaggctgagtgagcgcagcagcgggagcgcgcctagcgccgcgggctccaggcgcgccagccggttgccggccaatgagaggttgcgcagcgcgcgcagcggcgcgaaagtccctggtgccagtgcttccagctggttggcgctcaggtccagcagctgcagcgcgcccaggccccagaaggctcgcacatgcaccgagtgcagcccgttctcgcgcaggtccaggcgctgtagcgcgcccgctcccgcgaaggcacctggcggcagcgcacggacgcggttgtggtccagcagcagcgcgcgcaggcgcaggctcaggcccgggggcacggcgggcagcgagagtgccgagcagctggccaggcctcccggcacgcacgtgcacacctcggggcagtccggggcgcccagggaccccgagggcgaggccgtggccgacacctgggcccagacaggccaaggcgacagcagcagcaacagcagcagcagcggccgaggccgcgaccaggaagggccccgcatgggggcagcccccccgcccccggcacccgcggtgggaggcccgctgcctgtgcgtccctggagcccgtcgtccgcggagcccgttcctgcggcgcctgcacaaatattaactctctggcccgagctcaggcagttcctgtcccacggctggatccacgcttggggcgggggcagggcaaacagccaacgcccggcaccgccagccacctgtccgggagctccaaactactcttggctcagcgccggccacagcgctatcaagaccacctcaccccgccttgtccaccaccgggcgcccgccgagccctgacctgagcagcaggacaccgcccacctgcacccgcccagctcacggctgcaacaggcgcccacacgcaatgcaacccagaggtcctgctcctcacccgtctcgaccccacccaggctccgcaaagtgatcccaacgtgcacatgcggagtggcccccacgcagggatggtcccattcccatgctggatagggcctgggttggagacaggccttggggtggagggagacagcacacccgaggcaggagaggcgtgcctgccccacccctcccccccaggactctcctgggatagaggtacagaccagtgcagtggggcaggggtatcagcccaagtcctgctgttaaacccagcgcccttcacagttgccagttgcaggtcctgttctaggggctttccaaagctgggtgcaggaaggagccgggctgaccagctgtggcagagaaggtggaaacattaggggtatggcttactgccagggggcagaggaacaggggaacttgctgtggggcctgggcactctgctttgatgagacccatatgcgcgtgcaccccccatgatgcagccgtgaggggtgtgagggcctgcagggaggacggtgcacaaccactaaacaagctttaattcccctcccccagctgccctcaggagggcctgcagggaggacagtgcacagccactaaatacgctttaattcccctcccccagctgccctcagccctctactcaggtggtaggggcgggggtggtggcggctcctctgaagaagcctccatggggatggccacaaggctctgatcctctagtggtggcaccagggagacctccaggtcagcgtccattagctgggactccacgtaaaccgggtgcaggtccatgagatcttcctggaccccaaaattctccaccaacctgcatgacgggccgggtcatcacgagctggtagagtccttgttcccccaggacaggctggcgtctgggacagtgcacccccacaaagggcctcccttgggacagcacacctcctcttccagggacagcacccctcctcctccagggacagcacccctcctcctccagggactcccctgggatagctccccccgccaagggcctcccctgagacagcgtgcctccctcgagggcctccctggtgctcacctgttgtccacttgtctcgggcatgtttcactgaggggacgaaggccaacatgagtcctggaacagtgctgggcccccggagctcccccagcacacgcctaggaaacgccattcctaccccaggtgacagcccacccagggggtaaagcccttcttgcaagaccaagggcccagggcagccagcctggcctcactcccatcctctcccggccccagggttcacgcaccccttggcccgcaagacaccaattgccacgatgacgagggcacagaagcagctggcactgatgcccgccagcaccacaaggagggcgatgagggcctcgcggctgaggccaaggctgcattcacagtaggttccagctgcagagacagggccacatggccatgggccggtcacctgcctgcagagggcccccaagtctgcccctgccctggtagccaccagaaggacaccagagctcccaccttgcctggggaaggggagccatggctgggagtggagtgcgggggcaggaggaggcacctgcagcagggatgagcagaagggacaaatatgtgaggcccaaggggccaccacgcaggcaggacacaggccagggaccgggggccatgtccagccctggc

SEQ ID NO: 588560 - DNA, 4001 bp, Homo sapiens
tcccagactgcagctctcaggaggccagggatgttttcccagccatcccaggcccaagacaggcactttctaaagaatggctgaatgaatgaatgaatgaatgaatgagtcaaggcatggagagacactgtgctgggctctaagagccccacatccatcccacctgaatctccaagaggtcttggcccatcagtgtgtgcctcagtttctccatgtgaaaacctggaatcagctctactctaagacgaggcagtcaggaaccaggctgatttccctccaactcctacaggcaaggtccaggccaagccaggcagcaacccagggtccggccacttccctgagttctgacccacggcagtgatccccaggattccctacagtccagaaaggtcattcaagagtttgcaaaggaaacggcttcctggtgggtgtgcctaagggatggagaaccaccacatctagtcaagttctggggggaagtcatgaacatttcctgtgcccccgctctgtttttttttttgtttttttgagatggaattttgctcttcttgcccaagctggagtgcaatggcgcgatcttggctcactgcaacctctgcctgctgggttcaagcaattctcctgcctcagcctcccgaatagctgggattacgggtgcgcagccccatgcctggctaattttttgtatttttagtagagacaaggtttcactatgttggccaggctggtctcgaactcctgacctcgtgatctgcccgcttcagcctcccaacgtgctgggattacaggcgtgagccaccacgcccggccctgcaccccctgctctgtaccctatggtccctagaacgcagagggcatcagaccccatgccaaagccctgagaccaggaaaacaaggaagcagagaccagccacccagtcactcatccctggcatgtccacaacagcctcctccagcacaggtcatctgtccttgcctcacttcatgagccagaggaagacttgaccttcatggaagcaacaccagtgagactgagcaatcagcactgcccagtctctctgaacaaactcccactcccacatcccctccacaggaagtatcagcaacagccgatctcctcccgcttcttacagcctgtctgtctgccaggttgtctgctccaaagggcagaatacagtttggcaggggttaagagtactactaacagaagaggtggaagaggtccttgggaacttcgggctcccccagttcccttcctcttaccaggtgctctccctccacacctcattctcaaaaggcttcctgaggtagggcaggggaagaggagtcagtggaagtgtggctcacccaggaaccgcccacccttccagccaagtctccatcaggaggcggctaccagacaacccccgacccatccctccttcccaaaaaaggcaacaatcgcaacagctgagaaccggcagacctcggttcaccccggtccagatcaaggggaagaagcagtcagcgaaagcagcagaatcatcatgaactccatgaccccagctatgccccttcagcctgggagctcagtttgctgggtatccagctcacctagggctgcaccaggcctggacctcactggatctcgcctcgccctcgggcccacctgaatgcacaggactgggacagggtctgggttcttagattccggaccggtcttcccaaatatcccatcccagaaaggccccaagagcctagccggggatcctgcccccaagtcagggcactgcccccatcggaacgataggaaggaggggtgcaagggaagagaaggggaccaggaactcaggagaagacagctaaggaaatctttgaaaaagaaatggcaaggagagagcccagaggtggaacctctaggaacgggagagtgtgtgtggaggggtgaggatctggggggacccaggggatgacaaggggacatgggggagccgaggcggaaactcctggtttctgaagcacaaggaggcacaggggtgcctgggagggggctcgcgcgccgcggagccggcgagaaggtggtgccccggagactccgggcactggggagcccagaggtaggccgaacaccgcgggaggtccccagggggccggcccggagacagagccccagatgccccgggcgccccgggccgggcagctggccgagggcgtgtgtaagtgggtttcgagaggtgacagctcgcgcccctttccccaccccgtccactcacctgggctcgccgcgcccggccgcccggcaggcagccccaggccccggccgctccgtcccgccgccggccgcagcgctgctccggcgcctccttttgtttgtccctcactgcaccactcagcctcctccgccccggaagtgacgtcaccgccgggcgcgaacgcggcggccagggcgtcgccatctttatgaggagaattctagcggcgctttctcccgctctcgcctccgcgctagcgccctgctgcttcggggcggaagtagcggagccgggctcggcccccttaaagggacagggactgctgcaacctacggggtgtacttgggaacgaggggtgaagcggcccaggtgagggtgagtagctgtgtcggagcgccacttccccaaggtcaggtgccgaggctgggagggtcggctaacggttccgagcttggttgtgctagagtgcttaatgagtttgatgctactaagtataacggagtggctgcacagaatgattgagccgcccgcgggaatcaactgcgcgtgctgctcgctgattctcgctcggacactggggctggtcctgtctgcacccaaatccccctcccacgaccgcgccggtggagatgatacccgagacaacagaattctggacagatctggggttggaattgggtccccagactccaactctgcagctccataaatcccgctgggtcctcgcaaattccctggctgataacagtaccggcaaccaaattaaaaaataatccatacagtggaatactgtgcagccattaagacgaacaatgtttaatatgcactaatgtagggtgacttctaagataccttaggttaaaaaaggaaacaacagtaaaaacagcgttgggccggttgcggtggctcacgtctgtaatcccagcactttgggaggccgaggcgggcggatcacgaggtcaggagatcgagaccatcctggctaacttggtgaaacctcatctctactaaaaatacaaaaaaatcagccgggcgtggtggtgggcgcctgtagtcccagctactctggaggctgaggcaggagaatggcatgaactcgggaggtggagcttgcagtgagccgagatcgcgccgctgcactccagcctgggcgacagagcgagactccgtctaaaaaaagaaaaaacagcgttgatgggtgctatccatctttgcgtagaaggacgcctgagggtgggcgtatctgcgggtgtgcgcgccagctgtctgataagatgcacaagaagttgttaattgcggttgtctccgacagaattggggtcttgggtacctgggccagggcgagaaatttactaccatgtgcacagatagataattaaaaataagatgatgaagatagtcgtggctcccatccatcacgtgttaagccaatgcctagtttcacttctgttgggaggtcttatttttcccttttaatagaagagaaaagaaccttagagaggttaggaaacttagcaatatcatagccagggccgggcgcggtggttcacacctgtaatcccagcactttgggaggctgaggcgggcggatcacgaggtcagtagatcgagaccatcctggctaacacggtgaaaccccgtctctactaaaaatacaaaaaaattagccgggtgtggtggcgagcgcctgtggtcccagctactcgggaggctgaggcaggagaatggcatgaacctgggaggcagagcttgcagtgagctgagattggg

SEQ ID NO: 588561 - DNA, 4001 bp, Homo sapiens
tcattcaagagtttgcaaaggaaacggcttcctggtgggtgtgcctaagggatggagaaccaccacatctagtcaagttctggggggaagtcatgaacatttcctgtgcccccgctctgtttttttttttgtttttttgagatggaattttgctcttcttgcccaagctggagtgcaatggcgcgatcttggctcactgcaacctctgcctgctgggttcaagcaattctcctgcctcagcctcccgaatagctgggattacgggtgcgcagccccatgcctggctaattttttgtatttttagtagagacaaggtttcactatgttggccaggctggtctcgaactcctgacctcgtgatctgcccgcttcagcctcccaacgtgctgggattacaggcgtgagccaccacgcccggccctgcaccccctgctctgtaccctatggtccctagaacgcagagggcatcagaccccatgccaaagccctgagaccaggaaaacaaggaagcagagaccagccacccagtcactcatccctggcatgtccacaacagcctcctccagcacaggtcatctgtccttgcctcacttcatgagccagaggaagacttgaccttcatggaagcaacaccagtgagactgagcaatcagcactgcccagtctctctgaacaaactcccactcccacatcccctccacaggaagtatcagcaacagccgatctcctcccgcttcttacagcctgtctgtctgccaggttgtctgctccaaagggcagaatacagtttggcaggggttaagagtactactaacagaagaggtggaagaggtccttgggaacttcgggctcccccagttcccttcctcttaccaggtgctctccctccacacctcattctcaaaaggcttcctgaggtagggcaggggaagaggagtcagtggaagtgtggctcacccaggaaccgcccacccttccagccaagtctccatcaggaggcggctaccagacaacccccgacccatccctccttcccaaaaaaggcaacaatcgcaacagctgagaaccggcagacctcggttcaccccggtccagatcaaggggaagaagcagtcagcgaaagcagcagaatcatcatgaactccatgaccccagctatgccccttcagcctgggagctcagtttgctgggtatccagctcacctagggctgcaccaggcctggacctcactggatctcgcctcgccctcgggcccacctgaatgcacaggactgggacagggtctgggttcttagattccggaccggtcttcccaaatatcccatcccagaaaggccccaagagcctagccggggatcctgcccccaagtcagggcactgcccccatcggaacgataggaaggaggggtgcaagggaagagaaggggaccaggaactcaggagaagacagctaaggaaatctttgaaaaagaaatggcaaggagagagcccagaggtggaacctctaggaacgggagagtgtgtgtggaggggtgaggatctggggggacccaggggatgacaaggggacatgggggagccgaggcggaaactcctggtttctgaagcacaaggaggcacaggggtgcctgggagggggctcgcgcgccgcggagccggcgagaaggtggtgccccggagactccgggcactggggagcccagaggtaggccgaacaccgcgggaggtccccagggggccggcccggagacagagccccagatgccccgggcgccccgggccgggcagctggccgagggcgtgtgtaagtgggtttcgagaggtgacagctcgcgcccctttccccaccccgtccactcacctgggctcgccgcgcccggccgcccggcaggcagccccaggccccggccgctccgtcccgccgccggccgcagcgctgctccggcgcctccttttgtttgtccctcactgcaccactcagcctcctccgccccggaagtgacgtcaccgccgggcgcgaacgcggcggccagggcgtcgccatctttatgaggagaattctagcggcgctttctcccgctctcgcctccgcgctagcgccctgctgcttcggggcggaagtagcggagccgggctcggcccccttaaagggacagggactgctgcaacctacggggtgtacttgggaacgaggggtgaagcggcccaggtgagggtgagtagctgtgtcggagcgccacttccccaaggtcaggtgccgaggctgggagggtcggctaacggttccgagcttggttgtgctagagtgcttaatgagtttgatgctactaagtataacggagtggctgcacagaatgattgagccgcccgcgggaatcaactgcgcgtgctgctcgctgattctcgctcggacactggggctggtcctgtctgcacccaaatccccctcccacgaccgcgccggtggagatgatacccgagacaacagaattctggacagatctggggttggaattgggtccccagactccaactctgcagctccataaatcccgctgggtcctcgcaaattccctggctgataacagtaccggcaaccaaattaaaaaataatccatacagtggaatactgtgcagccattaagacgaacaatgtttaatatgcactaatgtagggtgacttctaagataccttaggttaaaaaaggaaacaacagtaaaaacagcgttgggccggttgcggtggctcacgtctgtaatcccagcactttgggaggccgaggcgggcggatcacgaggtcaggagatcgagaccatcctggctaacttggtgaaacctcatctctactaaaaatacaaaaaaatcagccgggcgtggtggtgggcgcctgtagtcccagctactctggaggctgaggcaggagaatggcatgaactcgggaggtggagcttgcagtgagccgagatcgcgccgctgcactccagcctgggcgacagagcgagactccgtctaaaaaaagaaaaaacagcgttgatgggtgctatccatctttgcgtagaaggacgcctgagggtgggcgtatctgcgggtgtgcgcgccagctgtctgataagatgcacaagaagttgttaattgcggttgtctccgacagaattggggtcttgggtacctgggccagggcgagaaatttactaccatgtgcacagatagataattaaaaataagatgatgaagatagtcgtggctcccatccatcacgtgttaagccaatgcctagtttcacttctgttgggaggtcttatttttcccttttaatagaagagaaaagaaccttagagaggttaggaaacttagcaatatcatagccagggccgggcgcggtggttcacacctgtaatcccagcactttgggaggctgaggcgggcggatcacgaggtcagtagatcgagaccatcctggctaacacggtgaaaccccgtctctactaaaaatacaaaaaaattagccgggtgtggtggcgagcgcctgtggtcccagctactcgggaggctgaggcaggagaatggcatgaacctgggaggcagagcttgcagtgagctgagattgggccactgcacttcagcctgggcaacagagcaagactccgtctaaaaaaaaaaaaaaatcatagccaggaagtggagaagctggaatttgaaccctgggagatttacactaatgcccatgatctagcttatccctcgccactgagatgctttttctgttgtcagtcacgcaacacccgtcttggggcctggcacacaacaggcatccagtaactatttattgacatgatgtgtggtgtgaaaagcaaacgttgaaggtcagagcccaggcttaaagtccagggcttgggcacctctttccaacctgtggactgtgggcctgccaggtactccgtgggcctccatgtccccgcctgtaaaatgaacaaccagaaccacagttgtagacagtga

SEQ ID NO: 588562 - DNA, 4001 bp, Homo sapiens
agagacctctgcggtgaatacaaattaaaaagcaattctcagcttaccaccctcgttattattccattttgttctcaccataaccctttttaaagtgaagaaacacgccgggtgtggtggctcatgcctgtaatcccagcactttgggaggccaagacaggtgggtcacttgagcccaggagttcgagaccagcctgggtaacatggtcaaaccccgtctctactaaaaatacacaaagaagctgggcgtggtgatatgcgcctgtagtcccagccacttggaaggctgaggaacgagaattgcttgaacccaggaggcagaggttgcagtgagccaagatcatgccactgcactccagcctgggtgacagagggagtctctgtctcagaaaataataataaataaataaataaagtgaagaagtagatgcttattaagttcagtggcctggctgtacagcctggattgcagcctggaaccgtggtctctcaagtcctgacctatgggatttgcccgactgcttggtgctcacataacttggcacacacgaagtacactgtcctgaactcagagccaggtgctcactgcctgcccagggcctgcacagtgtctgtaaataccagagctggataagggatggcaatgagccaggaggcaatcacccagggaagtgcatggtgagcagcacaggctttgggatgaaaagagaactgggtttgaatccgaaatctgccacccacaactgcagaggtcaccttggttcacctctcagagcctcagtttcctcatctgtaaagtgtgagtaaccatgctaccaacactggcttctatgaggatccagcgacttcatgtatgtcaagcccctagtacagtacctggcacatgagcgctcaataaatgttagccacaaagcaacccacatgcaagcaacattgattcagggcccgctagaggagctagggagaagatagtcatgggaggagatgcagttgaagaagacatacacccagtcctcagagggatgggcaaagatggcagctctgcacccacgggggcggggctgtctggggaggcagccaggcctgcagagccagttcaggccctcttgtcaccccacctgcctgcaaggatggggaatggtttgaaaacagccctcccccatccgtccctgatgaccagcacttacccttctgctccccaatcactaaccctcttgcacccccttcctgatgtgcagccctccccacttcctcccaaccaccatcgctctcccacccctccccgaagatcagttctttccaggctgccccacatgcctgtccctccctctccgacgtccagcctagatgcggggggagggccacacccatatttcctggggtggggtgggcagtggctgacctggctttgcggatggagggatcccccacgttgggacccgcgggtgcacccgagggcaggccgatcactcggagggcttggtcacggactcggggccgcagaccacccggcacgggccgggcggagccggagtctggtctccttcaaaggcaggtgctgggaacagaaactcagaatctcataaagtcacgcagaccgggatgacgaagtctgaggctctaggaatcgcggactctccgaatgaagagcgggactggatttccacatagactgttttgataactaaagtgcacacaacaagtgctcgagggagcaggggtcgccgcggtactggggtctcggaatgggactacggacccctcaggggaggggcggggctctgggattgggtgacggggaccggggtgacactcacgataaaggaatatgggaaacagctagggctgggatcaccggagccacccttctcagacttctccggagcgaactacccgaaccccctttcggaatctctagcttcagcgcaccgcggtgccctgcttgccagccgtcagcctcaggcgcctgcccacaacaaacatggcgacaagggcgtctctggaaggccgggcagtgacgacagttctcgcgatagccgcgttttcctgcctatatctggcttgtccgcgcgatttccggcctctcggctttcggctcggaggaggccaaggtgcaacttccttcggtcgtcccgaatccgggttcatccgacaccagccgcctccaccatgccgccgaagttcgaccccaacgagatcaaagtcggtgcgtgctctggttgtggccggggctgcgggatggagcatccctcggccctgccgcgcgtgcaaagctttccccgtatggggctcttaaagccgctgcctcccagagaccttcccggtgttgcgccgccccggccaagcctcagcctttctgggccttagcttcttcacgtgtaggtggggagggaggactggaccacctgtggcggcttgggagcccgcacgccctagggtaaggcttgtctccgggcgtttcgccccattggcctgggttagcgggcgacggggctctctccacgcctccccggtgtgagtttcggagctgcccacacccgagggaggagcgggtggcccgcctcgcgctctgtgctgtttcgagaagaggcagagggtggcgtgtccaaccccggaaagacgctgagagggctgtggctcggggctccctctgcacagacactaactcttcttttcccccagtatacctgaggtgcaccggaggtgaagtcggtgccacttctgccctggcccccaagatcggccccctgggtctggtacgttatcccctccaaggggcatttttttcacatttgtttcactttaagcgccggctcgtggagtcacgcctgtgccagaggtgccctcgtggcttggactgtcaccctcagtaggcctgagccactgaacaagtactaggtaccttaggaaggtcgtgtgtgaaaaatcgaacctggtgcctttaaattgtaattagctccatgtgtctccactgctgctttagtgtacctgaggggtgggcccaagggggagttttgaagttaggactggcttagagacattgggcagccaacatctgtatttcctcgtcaggaagtgggcatggcgttgttgggagattaaacggggtgtgggtgaagatccagtgagcgtttccagctgtgttgtagatgtaaacctagcagttaatgtggcaggctgtgtctcatgcctgctgagcaactgctggcttccccgtcattctgtcctcttggatttctctgaatttcattaggcctttatttaatccttgcacagtgctcccctgccccaaatgctcttccccattggtcttttttaacctgtatcttaactattcttccttggccgttagctggcacttaagggacacttagcctcctgttgaggctaaggattactagaggaggagaacttcagagtagcaaataatcagacctccatccaggaagatggacgtgggtggtctgacatgggagcctagtattttgaaagctccttaggtgattctaatgtcagcagggctgaaaatccccctccttaagcacatgggcacttaggagggggtctaggttacattgtggccaagtctgcagtttacagttctggacaagaaccccaacccccaatttatgctatggtgatagctgtgctctgattgagaaggtgcccttaggtacttgagatagcttcctttgttgccaagtgagaagtggtgggcaggtttcaaggctgtggttcacctctggacaccatgttgattacatgcctttatttctagtctccaaaaaaagttggtgatgacattgccaaggcaacgggtgactggaagggcctgaggattacagtgaaactgaccattcagaacagacaggcccaggtatttgcttgtgcttggtttcgggagaggagggtggggggacaggtagcaaccctctgggattcctgaagagtatttctgccaccagtggtgagccgagagtgatttcaccttgttggggagg

SEQ ID NO: 588563 - DNA, 4001 bp, Homo sapiens
gagttccacgggggcagaggctgcgactttccagtgagttccacggggtcagggacagcgtctttctagtgagtttcacggaggcaggggctgcgtctttctagtgagttccacgggggcaggggctgcgtctttctagtgagttccacgggggcaggggctgcgtctttctagtgagttccacgggggcaggggctgcgtctttctattgagttccatggaggcaggggctgtgtctttctagtgagttccatggggtaagggtcagtgtctttctagcgagttccatggagccagggactgcgtcttcctagtttcatggagttccatgggggcaggggccacatctttctagtgagttccatggggtcaggggccacatctttctagtgaattccatgaggtgaggggctgcgtctttctagttcttccatctgtgtcctgagcccacagcaggcactcagtactccttgttctttgttgactaaacattgagcagcaggatgaggtggagacagacaagccagatgacctgggttggggcccatatttgccaccgacccatagtgaggccttggcattatccttttcctgttctagggaaacttagagacgtttcctcaggtgctttccaaggctgttctttgaggactctaacagactctgccaatgaatcacttctagccccccaaacgctgtcagagcaggatcagcaggagcaatccagagccagccaggacctcagggagctcaactacatcatgaccaaagagacctctgcggtgaatacaaattaaaaagcaattctcagcttaccaccctcgttattattccattttgttctcaccataaccctttttaaagtgaagaaacacgccgggtgtggtggctcatgcctgtaatcccagcactttgggaggccaagacaggtgggtcacttgagcccaggagttcgagaccagcctgggtaacatggtcaaaccccgtctctactaaaaatacacaaagaagctgggcgtggtgatatgcgcctgtagtcccagccacttggaaggctgaggaacgagaattgcttgaacccaggaggcagaggttgcagtgagccaagatcatgccactgcactccagcctgggtgacagagggagtctctgtctcagaaaataataataaataaataaataaagtgaagaagtagatgcttattaagttcagtggcctggctgtacagcctggattgcagcctggaaccgtggtctctcaagtcctgacctatgggatttgcccgactgcttggtgctcacataacttggcacacacgaagtacactgtcctgaactcagagccaggtgctcactgcctgcccagggcctgcacagtgtctgtaaataccagagctggataagggatggcaatgagccaggaggcaatcacccagggaagtgcatggtgagcagcacaggctttgggatgaaaagagaactgggtttgaatccgaaatctgccacccacaactgcagaggtcaccttggttcacctctcagagcctcagtttcctcatctgtaaagtgtgagtaaccatgctaccaacactggcttctatgaggatccagcgacttcatgtatgtcaagcccctagtacagtacctggcacatgagcgctcaataaatgttagccacaaagcaacccacatgcaagcaacattgattcagggcccgctagaggagctagggagaagatagtcatgggaggagatgcagttgaagaagacatacacccagtcctcagagggatgggcaaagatggcagctctgcacccacgggggcggggctgtctggggaggcagccaggcctgcagagccagttcaggccctcttgtcaccccacctgcctgcaaggatggggaatggtttgaaaacagccctcccccatccgtccctgatgaccagcacttacccttctgctccccaatcactaaccctcttgcacccccttcctgatgtgcagccctccccacttcctcccaaccaccatcgctctcccacccctccccgaagatcagttctttccaggctgccccacatgcctgtccctccctctccgacgtccagcctagatgcggggggagggccacacccatatttcctggggtggggtgggcagtggctgacctggctttgcggatggagggatcccccacgttgggacccgcgggtgcacccgagggcaggccgatcactcggagggcttggtcacggactcggggccgcagaccacccggcacgggccgggcggagccggagtctggtctccttcaaaggcaggtgctgggaacagaaactcagaatctcataaagtcacgcagaccgggatgacgaagtctgaggctctaggaatcgcggactctccgaatgaagagcgggactggatttccacatagactgttttgataactaaagtgcacacaacaagtgctcgagggagcaggggtcgccgcggtactggggtctcggaatgggactacggacccctcaggggaggggcggggctctgggattgggtgacggggaccggggtgacactcacgataaaggaatatgggaaacagctagggctgggatcaccggagccacccttctcagacttctccggagcgaactacccgaaccccctttcggaatctctagcttcagcgcaccgcggtgccctgcttgccagccgtcagcctcaggcgcctgcccacaacaaacatggcgacaagggcgtctctggaaggccgggcagtgacgacagttctcgcgatagccgcgttttcctgcctatatctggcttgtccgcgcgatttccggcctctcggctttcggctcggaggaggccaaggtgcaacttccttcggtcgtcccgaatccgggttcatccgacaccagccgcctccaccatgccgccgaagttcgaccccaacgagatcaaagtcggtgcgtgctctggttgtggccggggctgcgggatggagcatccctcggccctgccgcgcgtgcaaagctttccccgtatggggctcttaaagccgctgcctcccagagaccttcccggtgttgcgccgccccggccaagcctcagcctttctgggccttagcttcttcacgtgtaggtggggagggaggactggaccacctgtggcggcttgggagcccgcacgccctagggtaaggcttgtctccgggcgtttcgccccattggcctgggttagcgggcgacggggctctctccacgcctccccggtgtgagtttcggagctgcccacacccgagggaggagcgggtggcccgcctcgcgctctgtgctgtttcgagaagaggcagagggtggcgtgtccaaccccggaaagacgctgagagggctgtggctcggggctccctctgcacagacactaactcttcttttcccccagtatacctgaggtgcaccggaggtgaagtcggtgccacttctgccctggcccccaagatcggccccctgggtctggtacgttatcccctccaaggggcatttttttcacatttgtttcactttaagcgccggctcgtggagtcacgcctgtgccagaggtgccctcgtggcttggactgtcaccctcagtaggcctgagccactgaacaagtactaggtaccttaggaaggtcgtgtgtgaaaaatcgaacctggtgcctttaaattgtaattagctccatgtgtctccactgctgctttagtgtacctgaggggtgggcccaagggggagttttgaagttaggactggcttagagacattgggcagccaacatctgtatttcctcgtcaggaagtgggcatggcgttgttgggagattaaacggggtgtgggtgaagatccagtgagcgtttccagctgtgttgtagatgtaaacctagcagttaatgtggcaggctgtgtctcatgcctgctgagcaactgctggcttccccgtcattctgtcctcttg

SEQ ID NO: 588564 - DNA, 4001 bp, Homo sapiens
ttccttatctccaagctagtagaaaatgctgttgctttgtggtcgtttttttcaaaggacttagggagggatcattttctctaaccagctcatcaaattcacagaggtctacagaagtgaagtgacgtgcccaagagctcatggcaagtaaatagtgtcttagtctaaatacttccagaatgagtattcctagaccttgtacttatctcattgtcctatgctcaggcaaacgtttgcaaacagcagggaaaacaactgcagattgagacttgagggagaagggtgggagatggtccttagcagatccctgggcctggggatcacctgctccctgggatcaaaatagtgaaacaagctattcataagtacatcaaggacgagtaggccattgttttcagaaccagctgtggagaatctgctcgacagtggccttggaacagctgcggctgctgcaccaagaagggagggcaggagggcggagcggtactggtggaagggtgagctaggaggaaaggctgcaaggaccctgccacgccacctcccggcaaaccaggaagtatttttgcagtaagtgcattggactgagccaccttttgaacctacccgaagtgttaacagcgcacagcaggccttagatgggtgcaataactgcaaactctcaacgggctggtgcctaagaggctacgggctggcagctaaatagagcccggcgcagtgagtcgcgttgtccgaaagtacacagagtggagccagccgactgtgctgtctttgcaaaccgtgaccgagcaaagtccgcggtaaacaagcctcgcagcagctgcctccggatgagcgccccctgctcattcctccacccagcatttcccacgcgcccagcgctccgctctgcagcccctgccgtcctctctcccagccccattctcagatcgccccatcttttggcccagcccaggtcccagcccccgcggctggcgcaccacactcaccatctcttgcctgaggaggtgaagcttggtttctagcctctccagggcgctagagtggctacctcgtggggagccagaggttggggaggacgaagaggaggacgacaaggagggagggaagctgcagtagctgctgctgctactgcagccgccgccgccgccgccaccaccaccgctccccccgcaggggtccctgtccctttccctgggaaccggctcctccccacggagagagcgcactagactctcgggtactttgcgccccagcttcagctcgatgtctctgaggtctggcagcgggctgtcttccatgacttttccggaacggcgataatagtaataaaacgcagcagatgaaaggcagccacggcttcgaaggctgctgcgaaatcagcagacctctccgggggccagggtctctatcctccgccgctccggtgtaccgtcctttccataaccgcctatgcggtatcagccctgaaatccgcacaggacgcggggggtcgcagctgcagttcccagtccgctgcgactcctccgacactaagatgatcaagatctcctcattctctctctttttggccacctcactgcaaagttgagttcactgatattgcagacagagggggaataaagagggggaagtagtgaaagaaaagagagggaaattaaatctgttttagctttaccaagggaaaattttcacattataaaaccgtccgttcacatccctgcgccgctcactgactgcccatctggtactacgcgacacaaaataatgatgcagccagaaacgatgtcctgggtcgtttcattttccagccatatgcctccaagctttcgggatatcctgggttgtcagaaataatctctggtcagtgaaagaggagttcggtcgtgtgcatggacccataaaaaagagctagttagcttagcaggagtttaacggcttccttgatgcagcaaaaatgtccttcttcccatttaggctgtttgatccaagtcattgtgttcctctgagcctcggaaactttaaactccgctggcaggtggaccaaaccaggaccaacccttctaccgtatatcacagacaagaagagcaaccggaattttcccaaccctgtcgctagtagcagagtttcaaagccctgctttagttaggaataccagttgatttttcagttttcctgactagctacaacctttaaaacaggttttaaaatgagagatagaggaatgactttatatttggtgtcttcgtttcccatctctctaccttcctcaaaggaaaaacaaacagaaaacctctctttagaagactttcctaataattttattctaataaaaagagtgaaacaatttcatcaaaagttcaatggaaatgtacaatcaaaattaattatcctaccaactgttacagtatgcaaacaaaagtgaaaaattaaatagccagaataacttacatgactgctgagatagcagtgaaattttaagaacaagcaattgctgagatacttacttttattttaattatggaagaaaaaatattgggaataactatttaaaatgttgtcttctttgataatttatctataaattaatttatagattttttcaactatacaaattgtacaattaattgtatagttgaacaattgtacaatttattaatttgtacaattgtacaattcattaatctgaaatacttctaccaagtaagttattatgagctacatggattacagatctgaatcagcattgagtttgtgtcaaaaatgtttaagtagaggatactaatttcaatccagtaaactacaatttttgatttccattgaaatatttcaaagtatgtgcccctctatttctgtgacatataagtatttgtgttcctggtcactccgaggctccatttccagagacatcattcaggttttacacttgtaggaacataggtatatacatctcagagtttgtttttatcatatctgactctaggaaaccttatacgtagaggaaacatacgcattctaaatgaaatatttcatgtcagggaaaaaatgctgaactttctatcaacatgccagaaatttgcatgctatttctcccttttaaaaagaaatgaagaaaatagttataagttagatgacccatttcaaagttagaactaccacttacagaatcaagggaaaacaagaccaaatcccagctaactgataaaactacatgcttggtcctaaatttggaaaaacacaagctcgttgcataagaattgcactgtggcatgtaattatgaaaggcttgtgtttcagtcaagaacagtttattattacaaaacccttacaaagttcagcataaggctggctaagtgcagtttatagatgaaatatctagctagaaattggtcagtaaaaaacaaatgtcaaattatcgtgtgtcaatatagaaaaatgggacacctcttctgctatgaatcacagactgcaaaatcagtatttgaggctgaggataatttaatatatacgtatatgtatgtatatatgtatatagttttttaaagaagtctgcaggagaaactcctctgagagtaaaagtgtgatgtatatgcaaagtaactttgttccagtgaaatataaaaaaatgtaaacttttgaaggaaagcttagtatgtcaagctttaaattttttttcggttaaatgcctattgacattttagtttaaaatgaagacattttgaatgatgctttagctagttttcagaatatattaaaatcattgaatgtttatggatctataatagattgttgttaatgctaccataactgctttatgtggtttaatctgaggacatttcttactcaaactatttgaaaactttttttttttactttggttcttgagcatgtgttttgtttgtttgttttcaagattctcaagaaactgagtcagcctgggcaatatagcgagaccccacctcttcaaaaaatttaaaaattagccaagcatggtggcatgcac

SEQ ID NO: 588565 - DNA, 4001 bp, Homo sapiens
aattgagtggggaaggaggtgagctggtttcatctagggtaccatgttttttaaagaaggctattttccaatccaaatagtctgtgggcatcaggcttcactggtggtgacaaaagagagagaaaggaaagaagggacacccagtgccgcctgccattgggtactgagaaccacactttaaaacaaaaaacaaaaaaaactatataaaggcaagatgacacttcagaagaccccacatttaaactttgtccttgggacccaaacagtatagagtagtaagacaatgaccaccagtgagacagggaccccaggcatttggcagtgtacatggtttcttttgtccagggcaggattacaaacaggagtgtgaggatgaaatcatgcagcaaaaaacactgtcagggtcaaggcagacgtgatgtcttagcactgacgtcccatcacagaattgtggaaccatttctgcaaagctgaaggagaactagtcccatgcaacttttcccaactcacagacatgtctcctgaggaccagaaaggttgctggcctgcagaggcacacagctggtgtgcctgcagaggcccacagcggagaacaatcattagctgtgctccgtttctcccttccattaaggagtgctggggtgagacgcaaattttaagcttctacccataggccaggtaaacaaagggcggcctcccgcccgccccgttcctgcctcggccatcccttgcagcacagctgagggcttgaaggaggatccatgactcacacttttcttgccgcggagaattaactccaagataacattacccatgtgggaaaaaaaagcaagccatcaaggaagaaagttcacttcgcgcccctctccaccgagcctccttaccttcctcatttaaaatccacggcagagaggccaacacggagtcaaagccgcaagtgctctcttcaaaggcacaggacccagcgggcaggtcgagggcaccggcgagctgcagggctgcgggcacaaagcgagtttcagttcgagctccacccaggagcctttgcaccaactcggggagccccagggggactacctggtgaaagtgggggaaagacgagcgggagggggcgggagagggatgcagtacctgtcccccagcatccccgggcgcctccactgagcgaccccacgcccacccccacccccaccccaggcttggccaggggagggagttagcggctgcggaggatcaggaggcgccctcggatggcccagcccagcacggtgagccggacccccgggggcagcaggagcgggggcgagtcgtcagagcgcccccggggttgtcccggggtccaggccttaccttgcaacgccaggaggacgccccttaacagcatggtcgcgtttcagggaggatgactaggaaggggtgcaagttgccagcccgctgggactggctgctcctagtgaaagggatcgtgggaggcgggggcgccggggacccaaggagggagaagtcgagaggcaaagcttgcgctctgagctgcccaactttgcagagcggctcccggagccgagcggtatgctggaaggtgctcgaatggagagcgccagcgccccggcgctgagcagcagcctcaggtcagaccgcggcccagctggtcctgggcgacgatggggctggacagggaggagacaactgcacactttgaaaggccagccacgactggctgggagaggagaggtcggcccgcagtgccttcgctcaggattttaaagcttgggaccagagcccttgcagacacttggaaggggcaggccttccaggagtccctccgctgggttgggacccgaggctcccgccccgcccagccgcggtgggaactcgcttatttctggggacagcttccctgcatctggcatgtcagtcccgcagggctggccctaattttaacttcttctccccagaatgaaagagggtggaattctccaaggacagcctggaggaaaatttggaaacggttgggtggaataagctttatatctaaggagtttcagcgtttacggtccagcaatgctaaccctggaataccacccccactttttttagccggtggaatgtctggcatgcctggtgctcagcattccctccgtccggtgaaatgggggcattccttctctccaaagagccatgatagattgattaatgggaggctttacactgggagggggttgttggggagggagttacttctgaggaagctgtttgctttgggcactaagtgggtctccaacaatattcttttcttgtaaagagttcttcttcctcccctcctcttcctcctcctcctcctcctttctcccatttataattttgtgcaggcaattttgtgaggagggcagtggttttaaaacctgagggtgcatcagaatctgctgaagggcctcaccctccgtttccgatccagtagctctggagtgggcctgagaggctgcacgtccctaataagtttccagaggctgctgctgccgcagcgggtttggaacaatactttgaggaccactggcctaacaaactccagttgagccatcagttcaacctgctcccatgccttcacctggcttccagaccgctgggtttcctggtctttcattggccgccgcttctcggcctctttgcgttacctctgtaaccccttaacatgagagtgcctccaagttcttccctgtcactcctgtttctttctctatccagcccctcaatgctgtcctcaagtctcatagttttagataccaatgatagcctgataactcccacatttatatttctaacccagactactcactaacgccagactcttcgatctcattgccacctcaacatttccaatcggatgcttcagagctatttcatacttaacaggtcccaacatgaaggctgcatatttcttgccaaacctgcccgtcccctgtgtcttcctcatctcagtaaaagaactattttcctccagttgttcaggagagaaaacttggaggcatcttcagctcatccgttcctgtcagacattgccaatttctatcagctcaggattcaaaacacagcagatgctgaccatgctctgtgcccatggtggtgatgccttggttggtccaagctgcccttgccatcaacctgggataccgcagtggcctcctgaccacggtctcccttcattttctgccctgcccaccctactctattctgaacacactagtcagggttatccttttaatacagaaattgggccatgtcactccttagctcaagacccaacaagttcccaagtcatttagtaaagtccaaagtcttcacgatgaccaaccaggccctataggacctgctccacccttttctttcttttcttgctttccttctttttctttttttgagacagaatcccaccctgtcaccaggctggagtgcgatctctgttcactgcaaagtccacctcccaggttcaagcaattctcctgcctcagcctcccaagtagctgggattacaggcgtgtgacaccacgcccagctaatttttgtatttttagtagagacagggtttcaccatgttggccaggatggtttcaatctcttgacatcatgatccacctgcctcggactcccgaagtgctgcgattacaggcgtgagccactgcacccagccccaccctcttatttctctgacttcaatcaccctgcttactcttctctagccacacagacctcttggctgatcctcaaacacagtccagctatcctttcagaattttgcactggctgttctttctgctcaaaatgctcttccacaaagagccacacaactcaccgcctaatgaggtcttcactcagatgtcactttcagtattagaaaattagtaaccttctccctaataaggaaaatatatctggaatccttttttaaaggtaggaacaaattttcatgtgttttctgtaaacaatgattcaaatggtcaaaaatt

SEQ ID NO: 588566 - DNA, 4001 bp, Homo sapiens
gcctcactctgggcccccactccggcctcaccacaggtgagtgggttctcatcagacaggtccccgcagttgtcttccccgtcgcacagctgctggggctccacgcagaccttgttctggcagtggtggtgtcccgggggacagttggcctggggggctgggtggggcagggttaacccttcaccgaggccccaggagtgggagagcactcgggggcagacagggtctgagcaggggagtgggcaggtgggggccctcccgggggtggaacaggaagaggcggtgccttactgggcagaccacagtcccagaactctaggtcatctagagccacagcgcccctgtgggtggcatttcgggtggcagagaaggtcacctgaagagaacaggctcttaggacctaagtcagggcccagacccctcctcaaggcccccactcgtccagaccctcccagctcactcggaagtcaccccggatgcggcctgtggtcactgccaactcctgccagccagggccccagggccctgtgctctgccacagggtcagggtctctgcgccatgggtcagctccacccgcagttcagccacatctgcaatgtcaggggtcccagggcagctgcggccctgcttgtccccagctgcccacccgccctccccttgggcaccccccacgagccttgggggtccagggtgcacctccagaggccgcgtggtaccagagcctcagcttgcaagaggaggctgcctctcgcagggttggcgagcgcagggctgcggtggatgcctctttccctcggtgggttccaacggccatgtaccagcctggcgcaggtgagaggtcaggagacggggcagggagcaaggagggtattgggacaggggcgcacagagacttgccctggcctcacccaagtcggtgcccagtgtgtggtctgagtgaggcccaggaccctccagtgcggcccctgccctgtctcggagccagctgtagcctgaggtactaatgtcccgccagccgcaggggtcctgctcgaagtcacaggcgaagggggcgcccagggtgggcgaggccccgtggtaacctgggagagtgggtggtcaggtgtgtgccagacctgctcgcactggccctgcccgcccatctggtcttggctcaccacactgggcctcatctgagcagtccctgcagtcacacacgaagttgcacacggcctggccagggctcctgcagtggttggggacccaggcccagcctgaggaccctgctgctgggaggttgacagccaggtggcctgggggcagggtgaccagccatcccagcctgcctaggactattcagttttagcactggacatcttttgtccggggatgcccctcagaccaggagatggagcagggaggggctgggacccacagagaactcccacccggctcaggaccaagcacagcacgttcctgtttccagccctgaagaggctggggagggggacccggccatggggcaccccaagaaaggtagcaggaacccagagtgcccagcagggaactgggcactgggagggcgacccccaatgggaggcatcgacgggcggcccagggcctccacaagctccacccagtccaagggtggcagatgaaggctggcagagctgggggcacctcctgagccctcttgtcccagactgggaggggagtcgtgcctcttcctttgcttggcaggcccgaggaccccatgggctgattccaggtcaccccccttgcaggccggccaaggtagtaccttgcaaccctccttccctttggggctcaggcatcagccctggtgtccgtcactgccacacagatggtaggctcagaagccagggcccctggtcctgcctcaggagtgggaccagactacttacccaggaacaggaccaaggcgggcagcaggtggctggacagaggcatggttgggccagagggagcagtgcggccacacagggtgcctgggaagttccgtgcggttatcagcctgcgctggccccgcacgctgactctgctgttaagtggagggcccctcggcccggccccacccagtgctgacggtgccaagcatgggccgtgaaagtggccccaggagggggcctctgacccagggtcagctcccacctgcccggctccctcagacacaaggtcaggctcttccaccctgccctgccctgcctggtgaaggggaggctcccactggaatggggagggacccaggcaccccaccaggactctgctcggcagtgtggggcgggcagaggccgccgtggcctctcactgtgcctctggcaatagcgtggtgctggccaaggtcaggactcaaccagtccagcagctgcaggagtccagcacgtgcaccagagctggtccctgcgttctcagccgtggggaacctgcctttaagtcaggctgtggaggatcacgccgtcattcattcgtcctgagcagccaggtgctgtccggtgccagatacagggtccctaggagcccagaaacttcggtttctcatggagcagactcatgcttggggcagggtctttggggctggggaaggagtgtggcatttggggccaggccctgtttgtgatttcccatggtgtgacctcggagcttgtgtcactgagcctcagtgtcccggtctgtaaaatgtggttatgacagtgcccgtctggagaggctggccggaggaccagtgagctgacaaaggtgggggtgccctgtgtacaaccagccctggcccccagggtgcccctgcaccaccccatggagtcccactgtgtatggggcttcccagggcaaggcctgaacccgtgtcctgcccacagccctgccgggtgcaagagggacctgggaggggcctccagagtcaacgtgagcctgtggggtagatgcagctgtgcgacctgaccctggatactggtaggccccatggggctggtcatggaaggagcctgcaggtcacggaaggagcctcagggcagacaggacactggggagccctgggatgggctcataggagggagcactggtgggcgccccaggtcttggccagcccgagggaccaggccctgactcctctcgcaagggcttgccagacctcctccaagatgccctggaggacgatggccgtgggaagagcagtcaggccatcagcgggcccctttatcagaccccaaagggctgagtgtgcaccgccactccctggggccactcctgtgttcccccacccacctgctttagttagggtctgggggcccccggaggtggtgacgcagggtgcaggaagccaaggacagagttcagaagccggcaggtgtggcaacacgtttaattctgtggccaggctagcctgtctccaaggcctggtggacagcacgtcaccagaggctgccgcaggagcaggcagggccagccctgcaagaggagtgcaggcaaaggcgggggctctgaagtggctgctggaggcagcaggccccgggctgggagtgctcagtagccgtcgttagcccaggtgacctcgtagtcggggtacttggctttgattttctcagttgaaatggcgtgctgggcaggaccataggcctggagaagagaagacgcctgctggcactacctggacccttcaacccgatacccggctctgggcatccagccaccagccacaccagaagcgagtgtgggaaagggataggcagtgcctggggatgccaaacccaccatcccgaccgcccttgggggctcccctggggagaggcgacctccacaggcaagcaaaccttgatggtggatcctggggcctgaggcgcccagagggacgcacgtgggtctcatctgctggtggtttttgtgaagagcacaggtggggactctgagctccacccaggtactgactgcctctgggggcccagggcccaaagtgctggaggacagctagagcccagcaaggcctcccaaggcagggagaggagac

SEQ ID NO: 588567 - DNA, 4001 bp, Homo sapiens
ttttaacccagcaatttctggcctcatcttctgctcttcctctagcctgaaagccagagctgaataacagaagctattttatttcaaatatgccacaaggcctacaagagatttaaactgctttataaaaacacttggcaggcactatccattacaaatcaacattatgatacctgatagtcactgaaatgaattcaacaatgtcccaagggaatgaaatctttttcaaaacacttggcagtttgtgtccttgtccataacacagaaccccacatcttttgccttcctattttccattcagggacgttcagcatgtggcaggtgggcaggagccctttagctttgctccaaagagaagcatcttagaccaagtgagaagagattctccacatcctcaccagaactctgcctggtcttttccaaacacacgctaatgagtgctacgaaatttgtgtggttatttaggctgagtgttcaagcccaccagctgacttactctataagggaggctggacatatcagtacttacaccagagacctagaaagtagtcagacagcatcaaattaacatctgtgttctagccaggtggttacatacagctctacctttctctttatcttgatttcttgccaattcgttgccatatatgcctcctggagctgtttaaggtagaatgcaagattgcttctgcccaatcaaccctcaacacagatatcgttttcaagtacacgtgtttctgatacctttccaatggtcagccaagttgatgtagaagaggagtccacagaaaagcagaaaggcaaggaggaagagaatcatattccgctgcaatctcgacagttgcttccatttctaagggaggtacagagaatgacatttcttactgaatatatcacacggaacgtctcaactgtcacaaactgtgaggacaataaggaattcttctggaagatccagtgttcagctctatttctttttttttttggaaacagggtctcattctgttacacctaggctggagtgtagtgggtggaacgcgggatgagccaccgtgcccggccagctctatttattttgaatggggagaagttccctctcagcagggagtaggaacattgctgggacaatactacagatgtcgttaatacagtggtgcagatgagacgaggataagaaaaaagcagaaacatttctgtcacatttcatcaacagtggagaaagactcctgcgactcccacagatgtagcccaggcaccgcccaggcgatgcacagtccgcatgtggttatcaatgcccttcggcctgagaccaccacgaacagaccaggagccaatcaagaggggctcatttctcactgtaccgaggggagcatacaccacggggaacctccggtttccgctccaagaggggcaggcgcctgggccaggaccttgcagaaaagcgaacgaagcccagaaaacctgctggggctctgagccctcttcccaccaccgccccgcagaatttgggccgctgagaccgctgcaggcgagccgcccacggctgccccaaccaggaacgcacatttgcccctttttgcggggaaggggtggagagggcggcgcctggggagtcgagtccgcccgcccaggtcccgctcggagccgcagtctgggagggcggcgggcacggcagccccgggccccagtcagcccggcgcgaccctcaccctccagcacgagcgccgccgccaactcttgctgttgtcatagttctcgccaaagctcagcgtcaccgagatgaagtcccgatgaggcggcggcggcggcggtgggtacatgactacagtggtggcgacggcccaaggggccccgcccactggcggcgtcaggaagtccgactgagaggaaccgagagctccgcttctcctgccctcgcaggcagccatcgcagcgccgtcaacagcccgcccatcacacggatacgcgactgcgcgtgcgctgcgtctctatgcggccagtgcgcccgcgcctgtctccgctgcgctccagcgtacggggctgcgtcctacggcgactgcgtcagacaactgctgcgactccgccctgccctcaggttcattgcgcatgcgtccggcagcgcctgcccaggtgtgctacgagcgtagctgtagcaacggggcgggccttggttcgcctggggcgtggtcgctgtctggggctcccacgtggttcgcctcatgggcctggagctgggcttctctcgcctcctgtcgtctggctgcaccgactttgcccacgccctcacgggagacgcagacactagggacccggggaggcgcccgggcggggccgccatgttggcagagagtcccagcgtcccgcgcctcggttccggaacccgcggcgcggggatggagctgggctgcccttgggcgccgtcctgggctggtgcccaccctggccgcgtggtcaccggcaagaagcccagggcctcacccaggcgtgggggccgggggaaggaccggaccctcccgaagtcgcggaccaggccgggcggcacccgggctggggtggctgctaccccgagctaagctggctgcgccgcatctcacggtccccggggcccgagcgctgcgcctggaccggcgccgagcgaggcggccaatcggccggctggacccacagtccccgcgccataggcgggtcggggctttcagacccggctcccagccctcgaactcggtaaccttggaggtcagcttgagatgactgcgcttcctgcacgcgttgtcctccccagaaacgcccaaaatggcaaagcggcgtccgtggccgcccgaggccctccctgcctgggttctccccagccgaacctcacgcccggcccctccttcattctctcctggccaggctgctcctgcccttgggcgaatccgctgcgtcccacggtcctgactgtggcatttctgcgtgtctggagagctcccccggcagcgacgtcctgcttagcacgtggctcgtctaactctgttcccctggcctcctgctcttctaggggtcatctttaggtttctgctggtctctgccccctgtgacacttgctggtacccaaatgaagtcgtttatgtcacactctaacaagaggccctgaagaagccctcacaaaaacattagcaacggagcgcctgcggcaaacccttctaacctttggtctttatggtttcaaagcagtttatgggaacttctcttttttaaaagattccccttggggccaggcgcggtggcttctgtaatcccaggactttgggaggccgaggcaggtggatcacttgaggtcaggagttcaagactagcctggccaacatggtgagacacccgtctctacaaaaaacacaaaaaaattagcagggcatggttggtggcaggcacctgtagtcccagctacacgggaggcttaggcaggagaattccttgaacccaggaggtggaggttgcagtgagccgagatggcaccactgcactccagcctgggcaacagagcaagactctgtctcaaaaaaaaaaaaaaaaaaaaaaaagaaatttcccgtgggcggggcacagtgactcatgcctgtagtaatcccagcacttttggaggccaaggtgggcagatcccctgagctcaggagtccaacctgggcaacatggtgaaacccctgtctctacaaaaaataaaaaaatgagtccagtgtggtggtgtgcacctgtggtcccagctactctggaggctgaggtgggaagaccacctaagccccaggaggtcgaggctgcagtgagccatgattgcaccactgcactccagcctgggcaacagagtgagatccagtctcaaaaaaaaaaaattccccctttcctcaatccccaccccacccccccaccacatgcctgtgacccactgaggcttgcatactctgcattgcaattatgtgttattcttgattaaattcatttattctggagagcctgagtttctcttt

SEQ ID NO: 588568 - DNA, 4001 bp, Homo sapiens
cacagatttaggcatcagacagacctgggtttgaatcctggctctgtctcctaccagctgtgtaatttattatgggtcttcctaatctgtaaattgaggttaaaatgattaaacaatagaaacccctatataatacccaaatactcaaagtttagtttacctcaaattatgaagcattacctggccacatcccatccctcaaaggtgaataacccattcccctcccgcacctaccactgtcacaagaactctcacacaatgtacttatcacggtgttagaattattcatttcccttatctctctttcactaaattgagctccctggcagcaaagactgaatcttatatttatctctaattgcctagcatggtacctggcatatatatacatatccatattcagtaaacatttgctaagttaaataattgtagataaaaatgagcgcttatagaattctagaggaaaaatcatttccaggtggggttgtcctgaattggttgggtgaggccaactcagctgagccgtgggaagcgtctcaatagactgaaagagaaaaggggaaacctaggcaaggtagggagaatgttctacaaaaatcaatggaataggaaagaacaaaaatgattagagatcctacttattcagagtaatggatcaggatggggtaattaaagaaggagaccttttcaagcataactggaaaggtaaccaggagccagattaggagatgtaagggggtgtaagtgcagtctgggacacacagtagttgaaggtaggcatgagcacacagatgaatgggaaagggctaccagcatgccccaaatcccgcaggtgtgtaaactgaaaaacatgaaaacaattattgcttcatcaagaactctttccgtgtttactaggtaccttgtgtgggctcataaaatataaggaataaaacccatatctaggcttctgctcaagtgggttttaacattacggatccacctctcctgcttgtcagagaatgagaacgctgctttttttaaaccaatgggtctccatttgactcttcacacctgggaaagttttgaactttgccgatttgggtttataacaacatggtgctttgtacagtgccaggtactgtggtgggcttccaaagtgactttcattcattcaaaaggaagttttaaccaatttctgagtcaatttgggggtctctggttaaagtcataatcttgtttacgctacaatctctttttcccagccttaaacaaatctaaatgactccttgccactcccataaacaaagaatgaatcaaagttccagcagcactgtagctagaaaaaagtctgtaaggctgttaacctctttaagggggagggggagaagggacgcaaggaaacaaggaccacacagtcaatgcttgaaaaccttgattttcacattatgaagaccagggcacctagatattgccaagtgcaggcccagaaactgccggagtcaactacaccccccacccccacactaccaggtcagctggcttcttttcccctaaaccacacacccgcctcagactcctgacagcctccagttctggaaatggccaggaaacgaacgcgcccgggccacctgaacaagggcccggcaggcggcccgccgggcagcgctgaaactggaggggtgagagggccgccaggtgggcaagctggtgggctgacggacgggcggggagctggcggctggggcaacctttacctgaagctgcttccacactacgggccgggtcggccccgggacacgttcctgaggggagggcccggctcccccacgcctcccggcccctgccccgagctctgcactctcgggatccacggggaccggcgctcctcccggcccgctcagctgccgcttcccgggttagccctcatgcccctgctgctcgccgccgccggccggccgagcagcagccctattaccccgagccgcacacgacccggaaccacaccccggcgttccggaagtccccgaccgggaaggagcctctggctggggacgtagtgcgcaagccccagagctgaaagcaaggagcggtagcttcccgcggggcggggccgggagggaggccgggcgcatgcgcgccgcttctccagtgcagggaaaggcctgggtcggagactgagttctggcaagatgcgccagtgcctggacttgccttgagcaggaatcagtgttaggcttctccatcgaatcttctttctccccatttccacggagaaaagcccttagttcgtccagaaatgagtgatgaggcagctcagcctctctgagaaagacctgggttcaaatgccagctcttataacttgctgtgtgtcctaggatgtgacacttctctctgagcctcgggttttcccatccagggcaatagtttcaactttagagtatattgctgtgggaatcgaatgggatgatgcttgaaaaacacccagcatagtgcctgacacatagtaaacatgcagtcaatgttagttatttctcttattataatatctgtaatatggaggtgacaataatcttcctcaagccctgctgggaggtttccaggagatgtaggaggactggcacagggcagaagttcagtgtgtctcatgctgctcccttcctctctcacggaggaaatcagtagagaaagccacgatgaagggggaaaaaggattcagggagtgcagtgagagtggttctcccacctgaaagatgcttggggaagtctctcaaaaacgcaccttagcaaaagaaaaaactcaaggttgaatttcagccctgagggacccctgcccaattttaaacttattaataaatatgccatggggccaggcacggtggctcacacctgtaatcccagcactttgggaggccgaggagggcagatcacttgagatcaggagttcgagaccagcctggccaacatggtgaaaccctgtctctactaaaaatacaaaaattagtctggcgtggtggtgtgcacctgtagtcccagctactcaggagactgaggcaggagaatggcttgaacccgggaggcagaggttgcagtgacccaagatcaggccactgcactccagcctgggtgacagagactctgtctcaaaacaaaaaaacaaaaaacacggtgggtctacccatgtatttcaaatatggtcatccatcacttaatgatgaggacacaagaaatgcatcgttagctgattttgtggttgtgtaaacatcatagactgtacttacacaatgtcagagcctactacacacctaggctgtttggtattagcctattgcttctaggctgcacacctgtacagcatgttactgtaccatatactgtaggcaattctaacacaatggtatttgtgtatctaaacatctctaaatgcagaaaaggtacaattaaaagaccatgttataatcttaggggaccaccatcatatgcactctgtcattgaccaaaacatcctcattccacgcatgaccatatgtgattgatctcttactacatcccattactttatgtaattggtatcttaccacatatctatactgggggaatagtgcacctcagcacccagacacactcttgcacacacaccaccacagttccatcagggacctgtcagaggcactctaacaaagcagcaggtgtgaacaagtttggatatttgattttctgaggtcaccaggttatctgttccttcctaaatcttactctccattttcctctctctctctctcgagttccaatctgaagcacagctgcctgactgtctcctagacacataaaactcgacctatctaaaactgctaagcagttatagattctaaagagtaaatatttcctagcactttgagagaccaaggcaggaagatcatctgagcccaggagttcaagaccagcctaggcaacatggtgagaccccatcactaccttaaaaaatttatctctatataggccgggcacggtggctcatgcc

SEQ ID NO: 588569 - DNA, 4001 bp, Homo sapiens
ggcttgcaggccccagtgctgaccgctccacctgcctggaggcccccccccacttctcccctcagtctgcttttctcctgctcattggctgtgtgccaggccccgaggtaactgttttacacagataaactcaccagtcatcacaaggaccccaccatgcaggagaaactgaggcactaaaaagtgaaatctccatccaaatccatactgttagtaagggctggacgtgccattatttggtttgcttatctactgaccagctccctgtgcactgggtgcttcctgcctagaacactattcactcgcgctgctcagcccctggcctctcctgtctccaccccttctcagactctgctccccttggtgggccaccccacccccaccttggcggtcttgatgatctcggtgaagttgtccatgatggacttaatgtcgtccttcagccgcttgttgtaggactgcagcagcgtctccttgctctggggcagggctctctgctgggccatggccgagcctcaagcagcgcagcggggagacctgggacctagagtgcagcacagacctctgagtgcaggcagagtctaccccagccaccctctatgccccaaccttagcagaacacgcagatttctggggattccctttctgccaaataaagtcaatcactgaaacacagatgaactcattccatcagcagacaccgcagggggtgccaggactggccccgcctttgccagagcaagctcatcctggaactcctggccagccctccaagccctgtccagggctccagtccagacttcacgtccaggcccacagcgtgtcccagggagccctgcaaactcaacaccagctccccgtccccagcccttggcttaacttcttagcccgccgccaccttcgccacgccctcccatccgaagagtccttccaattcgacccctctgcaccgcctacatccacgctttccttccactcccactcaggctgccccgctccagacctcatccctgcactgcgggccccgctccctccagtctctgcgcggcagggaagaggtcctaaaaagtggtcattccaaccgggcgcggtggctcacgcctgtaatcccagcactttgggaggccgaggcagggatcacctgaggtcaggagtttgagactagcctgaccaacatggtgaaaccccaactctactaaaaatacaaaaattagccgggcgtgatggcaggcgcctgtaatcccagctactcgggaggctgaggcaggagaatcgcttgaacccgggaagcacaggtcgcagtgagccgagatcgcgccactgcactccagcctgggcgacagggggagactacgtctccaaaagaaaaaaaaaaggggggtaattccactccctcgcttaacatccctcatggttccccggtgcgccgggacaaggggctcaagttccgcgccgcgcctctcggcctctgccctccagccgcactggacggcctcggcgctggagttgcctggccctggggccgggcctttgcgcgcggtgctcagggagggcccggggccccctaggttcggagtctggcgcacgaccgagcggactcctggacgcactcgcattgtttgtgcccatttttggcggggtgtgggaaataagtcacacgcaggaaaggggatctccgaccccagcgcctacgcacccacccacccccactcccgcccacacacccaccccccctccatccccaccccccaccacaccctcatacccgccccagcgcccgcacaccagacgccgcgtccgccgggtcggcctagggcggggtggtcaagtgcctctgcgacccgcactttcccgcgtctctcccacggcctggccctcccgccgcagtctctcttccccgccgcgccgcggtccgaaaacctagtcagccgccgcagcctctcggccccgcctcgatttttagctttataggaatgctgttgctttaaatccgaaatcccgtgccggtatcaactctcgcgatctccgaggccgcatacatattacccacaattccctttcctttctctctcctcccgccgcccaagatggtgagtgagctgtagttccgtggcactatagccaggttccggctgtatccgctgccatcctcctccaggcgcggcctcggagggcctcctgctcctcctggcgctaggagagccccactcggtgtggcacggagacaccgaggtggattagagccccacttggtgtggcacggagacattgagatggactagagccccgggcggccgagagcggaatgcgttgttcccggtgtcgcagggctgggtgtcgcaggcctggagcaccgcagtgcggggctcggagccctagcgtctctcgggcttgctgggggccgctccagaggccttgtgagcgacgagttctgagcccgcccctgttgcttctagagcctgtggggccgcgactcagaggagtcatgagtccggggtgtctcctgggtgggcgacgcgaagagagcgtggtctcgggcttagccttgctctggccactcggggttcccggggctgcatgcttgtgcggctgaatgtgagatgctcctgtcgaggggtggtgctggggggttgcagaaagctgctcgccagcttagttcaggcaggtgctgtcagcgtcccttgttttggaggagccagcctgagccctacccccgacgaagcgagtggaggcggcggtttaactgacgttttctttctgcccagccgaaaggaaagaaggccaagggaaagaaggtggctccggccccagctgtcgtgaagaagcaggaggctaagaaagtggtgaatcccctgtttgagaaaaggcctaagaattttggcattggtaagtaacaaacggcagaatgaaaacggtctatgtttttctcaagggaaggtggtaattgggttgtgttgtatcttgtaggttttagtgggtgtaaagtggtcgcagtccttaatttgtgtctcttagagacgggggcaatgatacatgcttcttgctttcattgggagttgctgagcgagcattcagctcaatatggtagtggccttgaattcagcttagccatctggaaacaagtacagtagcagtgtcgcagcgaggtactaggactgcaattctgctgtacttcgtggcaccttggcttcttgttagatgaggaaaagcatcgtgctctttgttctcaggtgtttgtgtgcagatgatgtaaaagaatatttgctatctgagagatggtgatgacattttaaaccaccaagatcgctgatgcaccaacacccttcctagtggccccagacatgaacttgacatggaatttgagcctcactcggtgtcaccctttacttctcaggacaggacatccagcccaaaagagacctcacccgctttgtgaaatggccccgctatatcaggttgcagcggcagagagccatcctctataagcggctgaaagtgcctcctgcgattaaccagttcacccaggccctggaccgccaaacaggtgaggttctgtggcgtggaaaggagtttctcaggcaaggattccttatttcatccagaacatgagggggatggtcttaggcttcttgaactgcagttgtcattaaattatagtcatatagcaggaccgcagtccagcatttgttattaagtgttaagtgacaaggattagaaccttgactccaagcctaaactgaagagtgtttttccagctactcagctgcttaagctggcccacaagtacagaccagagacaaagcaagagaagaagcagagactgttggcccgggccgagaagaaggctgctggcaaaggggacgtcccaacgaagagaccacctgtccttcgagcaggtgagtaggccccaccttagggtgaacactgggggcgggctgttgcagtgatgtaaaatttcttggcctgaaattactgtgaagagtaaaaccgagctttttaac

SEQ ID NO: 588570 - DNA, 4001 bp, Homo sapiens
ggggaggagactttctggaattttgaaatgtggtataacactgcctctcactaagagttttcagacccacgtgcagatcattacacttggcagaacagcaagtacctgattaaatgatgattatttatcattcacatagggatagatttgtacatgatgcttcacagatggtaaaacttaacaaaacaaagaagagataaaataaacaaatggaatgggaagacaccactgaggtggctgtgtcaaacaaacacacttcagtctagcaggaaaaccctagagaagcttgggaaagcgagccaacaagagcacattccaggagtacgttctgaggggccagtcccaaactgccaacaaaagactctctaggaacagcttcttatgccacattcattttggaatcatcagccaccttcttcttggcactactgtacaaagatttaagaaggcaaaaggataatgtcagcactcttaaagtttctatttaaaatggtgaagggttataatatcctgaacattacaaagggaagtaactcggagagaaaatggaaagaaaacagaagatagggaagaatagccagtgcatcccctgaagcagagaaagtattaactggtgctcggcgcggtgccagagaacagcaagcggatgtgggcgttgaggagggctgtgtgatttacggcaactacttagggggaaaacaaaaaggcacccatcatttggccacctcctcctcctcctcctccatcctacctcctctttccatctggttactaaggagaccaagttgaaaaaacaaaaatccaaccagtccagaaatcaaaggatgactagctcaccaaatgctttcccctactcaggtcagttctgagaagtaaaaggcaaaaatcctgaaattctaaccttcctgggaaggactgactctcttataaaacagaaggcaagttcaggacctaagcaatcaagaagtgcctactatgtgccaggccctttacaaacatcctctcatttaattcttacaacacttaaaaagtgtaagtgaagaaggtactttgtaaggaagaggaggaaaagtggaatccttaaccctaaaagactacaaattaagaagcaggggcgttaagcataagtaattaaactggttaagagattagagagtaggtctctactgcggaaggaactcccacaggagtgggagtgaggaaactgatcaggtggtttgggagcggttaggggaaaaggtgaagacagctcaaggcctggccggtccgtcgtggttgcgggtgggtggtggtggaactgatgaagtccaagttcagggccggggaattggggctaatcagatcgggtgcacttgggtttggagccgactgaccaggtcctgtctgtactattactacattcggatcagacgtgatggggcacagagggcctacaggtgagaaacctgccaagctcagagaagtggaagttcatgggaaaagcatgcctccttgttaggaatggaaccgccacagaagaggtcgaggatggcggaagacaaacaggaccaggaggccaggagaagcaagacgagaaagcggggatggtgttaagatgtccctgagggacaggcagaggcttggagaacaagaagagaaagaacagggatcaagggaaacggagaacagcccctgcctgggaagactcgagcgacgtaggggcagggtcggagcggggccggtccccgaccccggccccttcagccggtacctacttgaggtcccggttgaccgaatgtaagttgtcctggaagtgcgcaataaaggccttctcccggccctccagcgtctccttgttccgcatcccatccttcaggcagtcgaacaccctgctcacgctggagcgcagcgcctggatggcactaatggcctgggaaaaggcctccaggttcacactgacatttatcacgtccgccatgttgccgccgccacagcagctctccaaagccggcttcgcaagcaaaaaagccgcgctcgctgatgacgtatctccgaagacctctgggaaatgcagttcgcgcggggctacccagaaagcactttcgaaaaagggtttccccttgagctaaactaatgcatgggcaggaaagtgatttttctcaacttggggaagtcaggttgcactcccggtttgcttaatggtgacaaagaaatacagaaagttcccgcatttccccaaacttgcactctggggaatcatagggaaaagaattgctcagagcaatagtgtaaaaaggaaaggaacatagcccattcaataaaatgagtccatattcataaataaagcggggagaaggaaagtttcttctttccaatagaatgccagctcataaatgcagaaagagtgatggaattagaaaattgccatttgacagccattagaataattgattcagatagaaatcgatggatgctaaaactagtgggtgaaagtgtcagaaaaataacaggctttttaggtaatctcaaagtatcgtcccccaagatgcttattaattaagaagaggaaaataatgatccagagattccacttctgggcatatacccaaaagaagcgaaagcagggactcaatacctgtacacatgttcataacagcattattcaccaaatagccaaaaggcaggggaaacccaagtgtccataaactgatgaataaacaaagtgtgatactggcatacaatgaaaaattcttcaggcttaagcaagaaaattctgacatatgctacctggaggaaacttgaagacattatgctaagtgaaataagccagtcacaaaaaaacaaaattctgtgtgactccacttatatgaggtgtttagggtagtcaaaatgttagagacagaaagtagaatggtggctggtttacagtgaacacacacctctgaaaataacatacatagcatagaggttgtggaagaaagagaaggtttgggatttaaataaaaccaacaaaatgttggccaaatctggctttatggaaaaattcaatgtctctttgtcctgttggctatagacaggtttctgaaaatttattatctttttactaaagggaacctgcccaagtcctcatgttctttccttagaggagctggggttgcatagcttggagcagagaagaggagagcaggaggcagatcatgattgtgaccttcaactcaccttcatgtcaacccaagacaagagtcctccttggttaactagtggcaataacaataaccagttgtaggaaggctgtagagaggaagatttcagcataatattgcaaagggccatatttaagtctgtacttaaagagtacagacttggaaaagttttacagctggatggtggtgatggccatacaacaatgtgattgtacttaatgccacagaactggacacttagaaacagtgaaaatggttgattttatattatgtatattttaccaaaaaattttaaacaattcattaatgtaaacataaggggggatggatagtgacttaatagtgacttcacagtggagaaacatggcagacaccagcttaaccaaaaggccaaggtcaacatcaccagtgacgggacatgttgtgcacctcctgatacaatgcactggaaagagcacaacatgacctccatgatattcttgccagcagtgcataacctgaatctaatcaggacatcaatagaactcaaactgaaaaacgtgacaaaataactgactgacctatactttttcaagaaatatctgtgtcaggccatacactgtggctcacacctgtaatcccagcactttgggaggccaaggtgggtgaatcatttgaagtcaggagttcgagaccagcctggccaacgtggtgaaaccccatctctactaaaaagacaaaaaattaactgggcgtggtggtgggcacctgtaatcccagctacttgggaggctgaggcaggaaaattgcttgaacctgggaggtggaggttgcagtgag

SEQ ID NO: 588571 - DNA, 4001 bp, Homo sapiens
ctctctatatgaaagccaaaaggggttacaggtaaaacccagctagctaatgcattccttgaagctggaagagatgcacacttggctttttatgggtgaataatcctacttatgtcattgccaagctccaacccaaggatcaagactgtattaaggttcataaccatgtgggaaaattctctacacactcaattatagtccaaagtccatacctgactccacagtaaatcactaagcctaagatttaggtcagagacccagctagacaaaggatttggacaaacctccaccccaactcaaagcaagacaattcagaaacttttgtccaaacgttctgacaaagtaggcttttgttttgttttgttttagtcctaggcccacttaagatttaaacggggaaagaatacgagttgtctttaactttgcttgaagacttcagcaagaaaagccttttctacgtgggctcaaacagaaattggcatatatcagcatcagcaaagttgaacatcctggcttaaggagacaaaaataggcatccttgcttaaatggtgtatttggccaaacatgttgaccttataattgtggaagaaaaaaatggtgcgaggaagagatttaacctaatttgtaaatgtgctcagcctagatacacacctgtcccaaatgacctactgaatccacttatttgcagggacaacatggattacaatgccttttttgtttttattttttgccctcaagtggtccatactactgtttgtaaacaaaatcctctcactacctctcttccacctgtcatacacacacatctgatatttacataaacaagaagaaatgaacagggaaactggagctttgggaggaattccttaccctcagcttttgacccagtggttgaaggaggtactatgcgggctttcaaacttccccaaataacccaggcagagaggctgggtgcgcgaacccaacccaaaagtttgcgcccattctggtctctgaaaaaggccagaaagccctgttgggaagaagatgagatgccttccacccagcagccaccccctcccgagggagcacagcccacgggggacaaaagactttccagattgatcgggggcgggagggagactagctggacctgggatcccccctcgggagccggaacctggggtgtctttggggtaacaaacgataaattataggcaagagcccaaccctagattgccggggctgaggtgaggacgggtcctgcccgagagggagcgccggactcacctggaggaggcgaagagggggcctcggtggcaggtggggtggggaggacgctgctgttgctgctgctggggagatcgggggtcggggtccggggagtcgtgggcgccggtacggtggtcgctacaggggtggtcggcgccgggccagtggtcgtcgaaagggtggtcggcgcgggtctggtcggcgcctgagaggtggtcgaagtgcgttccgccgccggaggggtggtcggcgaggggccgagcggcgcctgaaaggtggtggaagagggtccagcagtcgcccaaagaggggtggtctccggggactgggctggagaagtcgcagccaggggtcggtggacggtggcgcgcgggggcccggtcctcggggcctgggccgtgggagccgtcgccctagggaaggggtggctgggctcgccccgcaacccggggcccggcgacgcgtccacctgccccgcggccccgccgccaccggtgacattccccgccgaggcggctgaggcgacggcggcggcggcggcggcggcggcgcagcacaacagggcgaggccgcccaggctcggcaggctcctcatggcgcgctcggctccgccattcattcattcagccagtcggttggtcagtcatcttctcctcgttgcaatccgaccaaggaagcctccgcaaccgccgccgccaccgccaccgggcgcaccatcgccacctccctctgacaggcggccggccccgcgggcgggccccagcgcggagggagcgaccggaccgagcgcggaccgcccgccctcctcgattggcagccgcgcctaaccaatgggaagccacagtcgcccacgtgatccgcccgcttcccggcctctttgtagccccgtaggccaatcagaggacgtccaggagagggggcggtccgtgaggcgggagaagggtggtgcgagcccagctctagcccgccgggctcgcggcggccccggctttgtctgcccaaagagtggggcgcgggcctcgggcaccgggcgccgcggagcagacaaaggatgcgccccgcgcggcagacgccgggcctagtcatctgctccaccgggctgcgagcacgagcggggggtggaatcagcactcgggagcatccccgccctcctgaacaatggggcgccagcgccgcaccccagctcgggcggggaccgcgcgggaaccccgcgatgggagagggcagcggcagcgacgatgtagagcttggcatgccctctgctgctccagagagcctggtcgcagccttgcgaggtctctgccgccattcccatttcagagatggggaagctgaggcccttgctgagggcctccctgaaccgagacccacgccctcaccagaaacctgctgtgggccaggtgttgtgccagactggacaagggggcgggaccgggcggtggagacccctgagggcagaaggtgcaagcttcctgcgtggaggagacaggctcgcaagcacacttacctaaaccccgggaagaataggatcagacagggttgaacctcaacttgatgtcttttgctgaatggttttgtggcctgagcgcggttttttcaccactaaaatggagatgataggacacccctcaccccccacccccctcacagagctgttgtgagaattaagtcatggacgtaaagggcttagcccagagcctggcccactgttgtaaccctcattaatgctaactattctcagcatttgcgccagggcaagcccaggattagaaagcagccccaggccacagcccttcagtgcccccagagcctccggctggttgcaggggttggggtggggctaatagccgagcttgaccctggatgacactaaaccctgaatcaagctggaattcgggcacgcagcctcgcatcatccgcccaggatccagagctaggtcaggcgctgctgcttcggctcagcagcttccagaggaagccaggcagggcgggtttgtcatctgatggggcttaattcaagccccactgctaacccaatcccggcctcccctacgtgatgtttggctttgtgcatggtttcccattagtcattggtcttcaaccagaccagcaggatgagatttatgtgtgaacccgtgtatgttaattaaagcatgcatttattttcctgcatgagtagtgggtgggggaggctgtgtatgaatgcataaacatgtttgtgagtctgtgtgtatgagtgttgtatgtatctgtgtgagtttatgagtatgggagctagtatctattttcatatattgtgtcttaataatctgtgcatgtgtactggtgtgtgtttttgtgtattttctgtgtttttgcatttgtggttatctatgggtgtgtcttgataggtctatgtatataagacagcgggaatgagggagaatgtgagtgttctgtcttcaggaccaatatttagcaagcactaaccaaggttctatttttactttgctttgggagggtggacaggtcatgccagtcccccatattcccttgctgaccctccctggcccttcaaaccccaaccaaaatgtcacattctctaaaagacattcctggatttgagtgggaattaatctctcccttctcatttccccaccaccccttgtttatgcattgattacagccctgatctaccaatctacctctccgttgcctcttcctaaaaggattaaggatggctttcagaaatatatacaacaggataaat

SEQ ID NO: 588572 - DNA, 4001 bp, Homo sapiens
gcccggcctataattggggtctttaacttctcagaagagcaaggaattgggataatgagaagacgtttatggttaaattttaaaggatagcaacaaattgggggcattttttaacaatattatttgggctattctattacttgccgcataaatacatttaccttatctacagagcttggaaagacactgatgctgaggataatttcaaacaggaagtagaatacagaatggttttttgggttttgtctgtttatttgcttgagacagggtctcgttctgtcacctaggctggagtgcagtagctagatctcggctcaccgcaacctccgcctcctgggttccagagatgctcgtgcctcagcctccccagttgctgggattacaggcatgcgccaccatgcccggttaatttttttttttttttttttttttgtatttttagtagagacggggtttcgccatgttggccaggctggtctagaactcctggcctcaagtgatccgcccacctcggcctccccaagtgctgggattacaagcgtgagccaccacgccgggctcagaatggtttataatgtggcctgtaacacatttaattagcatcctgccctgctcccttgcaaaggcttctgggagcaccaacaatgaggcactcattgggattgatctgcccatctagttggtccacagtagttacacagaaaggacagacccttgggagaaacaagcccacgaaggcccagtaagggcttttctgatttttctgattttctagccagactccatgggaaacagaaaccaaaatttaaaccaaagttaggaacactggcctctaaacaacaatccaggctcctgatactcacctcattccactaacaaaggagaaataccaaaggtaattacccgtcctaagtgctagggacctgattcctctcttgggcagccttccctgagtctaccctttccagctcccacaaccctacaccaggtttcttggtgggagcaatcctgctgctcctattactgatacagcattcggtgaaaattccccttttaggccgggcgtggtggctcacgcctgtaatcccagcactctgggaggccaaggcgggcggatcacctgaggacacgagctggagaccagcctggccaacgtggtgaaaccccgtctctactaaaaatacaaaaaatgagccgggcgtggtggcggatgtctgtaagctcagctactcgggaggctgaggcagaagaatcgcttgaacttgggaggcggaggttgcggtgagccgagatcgcgccattgcactccagcctgggcaacaagagcgaaactccgtcttgaagaaaaagaaaaaaaattccccttttagtgtgagcctctgaagccactactctggggagatgataggagaggatggatttggactctgaaaaggtagtgataacacatctccttttttattgcactgccccagtaaactgagttgtacaaacagaaaaaactcgaaacccttctgtcaacttttttcgcggggaagagtcacggaaactggaaacgggaaatgggaattcacgtctatcgcagcctcctaggtggcaaacgcttagcctgaacacctcttcaataaccctgttaagtagacacggtcattatccccacttacggagaagaaaaccgcgggtcggaaaggtcaaatatcttatccagggaacagggctggtaaagcgcggggctccgatgaaatcctccagtctcccgagagccaggagcaaactgggtttgggccgctgcgccccgcacagcccagaccccagccatcaactgcgactgcggcgggcaggcgggagaactgacctgaggggcggagggcacggctgagcggcgcccgacagaaggacaggggcctgctgtcctgagagacgcggctggtacggcgttcctaagaatcttttcgatcgccgggttgtggccgcttccgcccgccaagggaatcaaatctcccgggccggaaggggcggggacgcggcgggggcgcgcgcggcgccggatcccagggaagcggacgcgcacggcaggcgggggcgcgcacagtgccggggggttctcaccggggcaacggctcgcggtcgctgtggagccgtgaaagggatggccgggaggtccactgggctgcgaggggtgacttgaggccttggtcttgccccggagggcacgtgatgattttccaggtggcgtggatatgccaagtctccacagaacccaactttcttacgttctcttcctaaaattgacgtgccctctggcagtcacagttctcattttcgtcctcccttgcccactggccgttctcccacccagcaaagacaggaatacctccccctctccaaaatgtgttgccacgaggaataagaaccccagtagctgagactacaggcacgcgccaccacgcctggctaaattatttgtgggtagagacgggatctcgctatgttggccaggctggtctcgaactcctgggctcaagcgatcctcccgcctcagcctcccaaagtgctgggattacaggcgtgagccactgtatccggcccagaaaatctttagacaaattaaactttacagagttgaattgaccaaagaatgagtccaaaatccagtaatccctggaaccaaaataggttcagagtgattcgggctgccatatgttcaaataacatttatggacagaaaaaggaaaatgacttacagaaattgcagtcaagtatggaaacagctggattggttgcaactcaacctctgactattttgagcactgtttaaacagttggccacctgtgattggccaaaactccgctgctgtgattgactgagactcgctacttgttacaaggttacagtctctttacacatttacaattgtagttgtctacaattcactatgtatggagaaactgttaggccaggtgcaaaggctcacatctataatcccagcactttggtgggggggcgggggcagatcatttggggtcaggagttcgagaccagcctgaccaacatgatgaaaccctgtctctactaaaaatacaaaaaattagccgggcttggtggcgcgagcctataatcccagctactcaggaggtagaggcaggagaatctcttgattctctctgctgggaggcagaggttgcagtgagtagagatcgtgccactgcactccaggctgggcaacagagcaagactccgtctcaaaaaaagagaaagagagaaagagagagagaaaagaaagaaaggaagagaaggggaagggaaggggaagggaggggaagggaggggaagggaagggaagggaaaggaaaggaagggagagaaagggagagagagaaagaaataaattgttagtctgaacttaaaatgcataaggaggcagctttatgctaaacttaatttaacatggtcatctgaatcttcagcaaatcataatctttttgctggtggagggtcttgcctccatgctgctgattgatcagggtggtggttgctaaacgttgggatggctgtggcaatttcctaaaataaaacaacaatgctgcatcgatggacacttcctttcatgaaagatttctctgtagcatgtgatgctgtgtgataccatttcatccacagcaggacttccttcaaagttagttctctgaaatcttgccactgccttatcaacaaagtttatggaatattctaaatcttttgttgttatttcagcaatgatcacagcatcttcaccaagaggagcttccatctcaagaaagcactctctctttgctcatccgtaagaagaaactccccatctattcaagttggatcatgagattgcagcagttcagtcacatattcaggcttcacttccaattctagttctcttgctgtttccaccaaatctgcagttacttccacgagtgaagtcttgaacccctcaaagtcatccatgagggttggaattaatttcttc

SEQ ID NO: 588573 - DNA, 4001 bp, Homo sapiens
ggaaggcacgaaggatggagggccctcctccaggctcacgctatagaacctgtcctctggaaccgccaggcaaacgcctggagacaccgcccaagcccagccccacataggcacggggcccaggggagattccaagccaaacggggccctggctgccggcaggcacagccacgggcatccagggcacagaggctgagccaccagcagcctcggaggggagggagagaggagccatccaaagacaggcaggccctgcgtataatgtgaggtgcggccacctccagccccacctggcctgtctgcaccctcctagcgccagggcatgagccctttcctgtgatgaggcagggacaaggatgagcctcgggctgttacaccctggggaacatgtctgggatgttacagggagcttcagggaaccagcggtgtgaccacagggtccccccaccctcggagcctgaacggctctcaggcacccagaaggcagctccacttccagcccccttccattcctacagagcctcgccctgcccagggacccctctgcagcctctgcttcccagggccatccgagtggtgcacaggcctggcccccctgctgacgggttgccacctccctgccaggccttcaggctcccaaatcagctgtggtcctgggctctcagccctgctcccatgaagggacaggggcagggtcctcctgagcagaagaggccaagtctggtggctccctttctcccatgagcaggaaaaccacccagccactcagcagctgcctggaggctctggaagaaggtgcatcataaatgcgtggaaatgcgtcgctgtgactgggaacaaaatcatgacagcaaatgcctgggaacggaaaagcaaacccagcgagcagagcatcgcgaggtcctgcgagttgcccccaccaccggcttccttccttctcctccccacctgccctgggggacagcggagcgtctgcctccctggcctggtcaccagctgaggcttccagacgcagctctgaatcaggagacacacgtcagctcccgaaggcgggtccacctgtccaggaccctctgccgatgttgtccgtgccacggggaccgctcacagcctgcaccggctggcgcccctgccctgcccccaggagactcacgcctgctggggtacgaggctcggggctactctgcatggggtggacaggagcagcaaggctccaagaaggccactgggcagaggctgcagcctgagtcaaggggtatcccctgggcaggccaggcccccctgtccccagcagcacgggagccctgcagccaggcccagccagccacatccccaccctactccgggcctagctgggtccgtacccattcagaccctgcacctcagctcctggcctctccgcagccacactgctctctccactccacccaccatgctccagtccagctcagtgaggcacatgcagttcccctcctgggacctctgtcacccctcctgagcctccctccctggggggacggtcccctgggggcaggaagtagccttgcccatggcacacactggcgtgcagatgcttatcgctggaagagcgttccagggcccccagtgcaccacgcgccgtggcaaatgcttgatgacttatcttacgtcgtctcagggcaatcccaccagagaaaaacaggtgctacttccacttaaccagcggatgaggctcagcctaagtcatgtgtccagggtcccagcagggtcagaaggccgggcgtgccaagctgtcctacaccttccatgtccccaaggccaggagagagcagcagccacctggggtcccagcaccacgcagagccactgcatggggatggctcctcggctgggaggggctgggatgaaaaccccacagaacagccacacacctccccttcccagcaacggtggggcccagaggccaagagccgtgactggcccagacatgcggctgtctctgaggccggtgatggcgggccagtcgttcaacccgctggacacgggtcttcccctctgtaaagtgggcggagagtcagccctggctgctggggctcctgggagtcagaagacacatggagtacacagtgctcaccctggggctggggcggggggagaaaggaggccagggagggaccaagacggcacctctgtcctcaaagggcagctccgcgcccaggaaaggaaaagggcaggtttccagggcccaggagaagccctcccagcagcaccagctcccaggggtgacccaggtggagggaaatgacgcgcaggggacgaggatgcccgggcactgtgggctccgcacacccaaaagcacatgcctccccgtgatacacaacacacagcacacacacacacaacacataaaagtacacacacaccacacatactacatgcaccacacacaatacacatgcacacacacaccacacacaataaagcacacacacaacactcacaccacacacaaagcacacacacactgcatgcaccacacacaacacacaccatacacacagcacacacaatacagacatacaacacacaccacaccacacaacacacacaaacacacatcacacacagacacgcaacacacacaccatatgccatacacaatgcataacacacacatctcacacacactacacagacatacaccacacacaacacacagacacaccacacagatcacacaacacacacagaccaacacacagaaacacacaccatacacatcacacaacacacacagacacacaacacaaggacaatccacatcacacacacgatacacagacaacacacttcacatagacacacaccacacacaacacacagaaacacacaccacacacatcacacaatgcacacacaatatacacttcacacacaacacagacaacacatatcacacacaatacacagaaacacacaccacacacatcacacaacagacacacaacacacacttcatacacacaacacagacaacacatatcacacacacaatacacagaaacgcacaccacacacatcacacaacagacacacaacacacacttcatacacacaacacagacaacacatatcacacacacaatacatagaaacgcacaccacacacatcacacaacagacacacaatacacactcatacacacaacacagacaacacatatctcacacacaatacacagaaacgcacaccacacacatcacacaacacagacacacaacacacagacaatacatgtcacacatacacgatacacagacaacacacagaaacacacaccacactcatcacataacacacagacacacaacacacacacttcacacagacaactcacataacacacagacacacaacacacacacttcacacagacaacacacattacacacaatacacagaaacacaccacatacatcacacaacacagacacacaacacacagacaatacacatcacacacaacacacagaaacacaccacacacaacacacagacaactcacaaacacaacacacagacaatacacatcacacacacaatacacagacaacacacacaacacacagaaaccacatacatcacacaatacacacacttcatacaaacacaatacacagacaatacacatcacacataacacacagacaacacacacaccacacacaaacgcacaacacagacacacattacacacataacacacagataacacacacaccacacaacacaaacacatatcacacatacacacaacacaatcacacagacacacacaccacatgcagacacacaaactcacagacacaacacacattgcacacagacatcatgcacacacacaaacaacacatcacatccatattatacacacatcacacacacacaacacacattacacacagaacacacagcacagacaacacacatctcacacactgacaacatccattatacacac

SEQ ID NO: 588574 - DNA, 4001 bp, Homo sapiens
cttcaggaatttgagtggaggagacagaacaaggattgaggagagaggcattgtgatcctgaacagatgtttttccacttgggaacctacagataagacccaatagtcaaaagtgcacccaaaaatggcaagatccaaccttataccattcccatcttcctgcctgtttggcctcagagaagcttgactgagccccttatagaagcacagaatctcctccccttgttgccagggatgttactgtctggggagataaacactagggagatttacgagcaggcatgtactggtggaagtcagcaggctgtgtcagcaaacggcaaactggaagccctgctgggtctggttttgaacttactcttcagccgtggtgtaagagtggccgtgccccttcttggggtaaccatagatgaagtgagcatcttctcttggcatcttgtagggtcagggcacaggacacctaacagaaggagcatgtgggcatcattaatgcatccaaagccaccctattcatcatctcataaagacccacaacagcatcctcactaggtgaccaatatccatagccaggaccctttggtttctctctgtgaggggatttgcacctgcttctttcattcatatcaagggctttagcaatagctcaggtttctaacccctcctactaactgaaaattaagttcaaagaagaaactacaaacaaaagcaaaaaagacttgcaagttgagttattatttggtgaaaaaatattcctcatttgccttcaatttgactctgcaccataaacttctagagaaacaaacaaaatgcattttcactgattctccaccttccctggcccagggctgtggctaacaaaattagaggagttatttttctccaaagttattgttggatatcaatcccacagacaaacagaggctatgatacataacgtgtgtttcccagagcacccgttgcctgtgcctcgcgagggtgcatgaggttgagcactgagcacaacatcttccagcccagcttttcagcaaaggaaaccaccccacacaggggcttcagcctgtccccaggcactccacccaaaacaagccgaggaagcccaggacctgactttatctaacaatgtgtttcccttcctacttaagtcaatttctgcttctctctggttcaagtcccttggctaggattctttttttttctaactataacacatacaaatgaacaacaaaaaatatccataaactgcagtggccgtaattcaagtacgctcattaaaaaccaataatggaagctcctttccttattattgtgtatttttctgctctcttactgtcctcatgaatttcaaaggtgtgatccccatagaattatattaatgagccccagtttaaaacaacagggagaggtgagacagaagagtggggatttcgacacatgacccctttccactgggacattttatgtgtaatttgcccttcccagttgtaaaaaagaaatgaaagtcaaactcaccagtcctctcaagtgaataatataggactgaaccctgtgttcaaaatgacagaatggaatcttaattcttcattaaattgttttaatacatcccatacctcaaactcagagccttggcaaatggtgcagcaacagcaaatgcgcctcttactactcagaccaggagaagtggttctttaagtgacaggagaacacatctacctcagggaggctgcttctccccagcaagatgccatcctgaataattgcttttcttcttggtagtgttggaggactgagagaggattcaggaggaggctttgtgagccctctgaggttggagactgacaaacgttgcggagaaattctgttgatgtcacacatcagcggggcaatgagggtaggcagaggacttagccagaatttcccaaatcctattctgggagaagaggactatgattatggcgagaaggcaacgctcttaccttccttaatgagagtcctctgtctgctggctggccgcgtgtatgaagactgcttctctggctcttaatcgttttgacttattttttttcctggttttgagtcccatgatagtcacgggtttagatttctgacggggtcgtctgtaattgctaaattggcatgaaagaaaccaactttattccttccttcaaaaagtcacagctgactgtggcctctgttttccccagtcccagtgctctatcctagggaagccatttattttaaatgttggtccctcctccataggattgccatgtcacataaaatatgacatgagcctagttataatgatttaaaattcatggtccgacaccacaattacttttgcaccaacctaattgatgtctaagtaggtcatattctacctgcaaaaagaaaatttcatctatccctttcacatagatggaaacccactatctccagtggacagttaacaccaaaggcatcacagagaactcatggagctcagctgaggaggatgcccagttaaatttgaacttcagataaacaatgaacagtttcttaatacaactatgtcccatacaatatttttaggataaatatgtccacatattctatgggacatatacactaaaagagttattttttgtttatctgaaatccacatttgtttttctcatgtcagataggtaaggtgcccatgtcattgtaacaaggtttgagggaggcatatctcacacgtgaacatggaaacccaatcatcacgcttatgacccacaaaaggatctgaaatccaaactaaactgggttccctattccctccctcatctccatctcaaagggttgaagagtctttaggcacaggtctggagagcatctagtcccagactctcataatcaagaaaaggaaatagaaaaatccctgaaacctcctcagctgagctccatgagttctctgtgatgcctttggtgttaactgtccactggagatagtgggtttccatctatgtgaaagggatagatgaaattttctttttgcaggtagaatatgacctacttagacatcaattaggttggtgcaaaagtaattgcggtgtcggaccatgaattttaaatcattataactaggctcaaacacattttttttttctgagatggagactcactctgtcgcccaggctggagtgcagtggcaggatctcagctcactacaacctctgcctcccaggttcaagcaattctcctgcctcagcctcctgagtagctgggactacaggtgcacgccaccacacctggcaaatttttgtatttttagtagagacagggtttcaccatgttggccaggatggtctcgatctcctgacctcatgatccacctgcctcagcctcccaaagtgctgggattacaggcatgagccaccgcgcccagcctcaaacacatctttattaatcaaaataggaaccattgcaatgaagacatttttgccaatgaaaaataagtttgtttattcctgtagcatacacattcatgcttcaagattcgatgaactcttggaaagcattttctgcatcctgctggttgtggaaggattttccctgcaaaaagttgttaagatgattgaagaagtggtagtcggttgatgagaggtcaggtgaatatggcagatgaggcaaaagttcgtagcccaatttattccaacttttgaagcattggttgtgtgacatgtggttaggtgctgtcatggacaattgggctttttctgttgattaatgccagctgcaggtgttgtactattcggtgcaactcattgatttgctgagcatacttctcagatataatggtttcaccgggattcagaaagatgtagtggatcagaccagcagagaccaccaaacagtgaccatgaccttttttcggtgcaagtttggctttgggaagtgctttggagcttcttctcagaccagccactgagctggtcattgccagttatcatataaaatccacttttcattgtacatcacaactc

SEQ ID NO: 588575 - DNA, 4001 bp, Homo sapiens
tcaaaggagcagtcaagtggcacgcgggggtgggagggaggaacgagtaagccccccaagtaaacataaaatccagactggagtgggtgtggcggtggctaagccacaaaaagaaaagtctatggcaactggcacctggtgcctcatacacagacaggaaagcacagaagaccctaaagagaaccgacttgccaagaccgaacaataactacatccaatacattctttgctaataacacaggtaaatcttaatttctctaggaaaacacacacacacacacacacacacacacacacacacacacacgcgcaaagtgtttattccctccagcccgattccccacatctccaaactcaacaactaattgcaccttccccacagaacccgcggctaaccccagaggactggtgagggctggcttgggatgaataaacactcgacacctgacggtcctttctctgcggtgactttcaccaagccgaagtggcgcgcgcgcgggcaggcgggagccgggacctggcccgcgcggcgccgcgcacccggatcccgaggctacgccggcgagcgcggcgcggggggcggggagcgggacagcgggaccgcccgggccaagcgattgtttcaaagacattttttatcaagacccttttgtattcgagccctacctctttttggcctaggaaagctttcgtgcaagtggaagacgactttctccacaaagtgctgtatgttactgtgctccggaccgcgtacgaacaccatccagtcgtgggtgaagccctccacggtgggttttttcctcacctgggcgcggtgccccagctccagcttcacctgcacggcacactgcgggcagggggaggagagacagccgtgaataacaggaaggcgaggtttcggcagtgaacgttgcgcctgacatttttttcctccttcttgaaacgcacataaaaggaaacggcggtgccctctgcatccacgtttcacgcgcgtgggcgcgcacactccacacccccaaatatacccgcccgcccggcccggcttggccccaggcgccccgggccccgcatctacatcggacaggattgtaacggaatgttatccccagtcgggaagggggtcggggaaaagagggagaacacactcagccacgacaagcacgacaacaaatgcatcggaaacaaatcagaaggcgatgccggggcggtttcccggcgtgggaggggaggtggctgggacccagggggaccgaagggctcctggcgagccccctccccgaaagtaccgcggcgacaggcacacgccgaggaagtctttgtgtacgtgtgtgtgcgtgcgtgtggagcgctgtgccaggcgaaatggaaactacaggcagcctctgctgatgggcacaaactcccgtgctcttgccacggggttcgtgcacaacaaaaatgagacgtcgtcatacacactgaaacacacacacacgcccgcaggaaaacacgccgaggcatccataacttagagcaccccgcaccccccagcgaaaagccccacgcgatcggcgaggccagtcgaaccgagcccccgcaacacactttcaagagcccaagtggctccaaagtatctcccacctccccccaaaaaatgaaattcagaaaggcagggcggcgggcggacagccgccgagcctcggctcgcgctcagcacctcccggcgctggggcaaagttgcgtgcggccccgccgctgtcagccccgcacacttcggctcacacacgcgcgccgcggagaacgcaccatcgtagcggccgcggcgctttgcggaggtgcggccgccgaggctgctcgccgcgtccccggactgtgcccgcagctcccggcggcggcggctgaaatatggctgagttattattcgcctccttccaccgtgtgtgtgtgtgtgtgtgagtgcgcgcgtgtgagcgagagggagtgtgtgagtgcgcttcttgtgactgcaaagaggcgaggagggagggaggcgcggggggtggaggggcgagtgtgagcgtgtgtgagtgtgtgtgtgtctgtgtgtctgtgtgcgcgccgggggggggtgggggaggaggggagcggaggctgagggagaggcggcagctccctgcaagccgtaccaacctttctctaattggaaccgcggagcgctggcgctgtctgggctgcggcggcgcagggcgaggaaggaaagtgggggagggcttttattattatttttgcgcgtacttaccgagctagccatgcctgggggcccggaggtttgctggggtgttgtgtggtacccccccctcctccgccccccctcagctgtaattcatgaagaggctgctatgaatgagagcgcgcccaggagcggagggtagatggcggacattctctgcctttttccccccgcgctcgcttgctcgctcgctcgcttattaaactcagccccaaaagcaaaagcagcagcagcagcagcagctccagggtaaagaagatgattgcggagcatgcgccgtggcgcctgacacccgggctccgagcctcacagggcggagggagggcttgcgggcggggcggagcgcgcggggaggcagagcgagcgagccagggggagctcgaaagagccaatcacctgccacctcccgaaaccccggcggcccgcagcgccacactggaaagcctcgcttaaagtaacaggttcctgctgggggggtggcagggaggggacgcaggagtggggagagcggccagctggggagccatcccagcccctgtgtaaactctgctcgccctacaataaaaaacggattaaaactgctggaatgtagccactgcttagagccctcagcagccggagagggggtgttaaatcaagtccttagctagtacgcacggggaggagggagtgggctttcttttactttccaccacgtatttctgtggttttgtgctgaaaagacaagaactcacacccaaacaaacttacttaaagagagcgagagaaatgccatcctgcaaaaaacgagcatgaaaatagcaatgactgaggctgttctaacccgcaacgatcccctggccccctgccccatccactcacaggcacccgcccgccaccctcactccccgcccttctgccaccgccaccgaaaatttgaaaatgaaatgaacaagggagaaacaaggatgctatttccttgcaagggaacgccttccgctttggtaatccccggctgggaagcttcataaagcggtgcccaggtgaaagcaagacacctgggagtgccgggtacagaccctcggggaccaggcttggagttgttttcttcggggggcttcccctcctgacagcctactgagttgcatcagaacgtggaggattgtcctctgaggacgcgcggggcaaccgggagtcttaaaatagcagataaagttaatactgactgtaatgtgcgtaaattggattataatctttaggcgtattggtgacaaccagcgtaatccatctctgagtattaatccggttagactcccgggtgacagccagtcgcaggagtgttcccagagtcgcgcctctgcaaatgttctcactcgcgttgtatttgatctcagtggccggagatagaacagcgcggccacgcgtggggcgcggagaggagtatcaactactggcttcctttacagacgcagataacctttaaaaaggaaacggataagatctagacgattgatttgaaagtgaaagatggatgtgactttggttcgttaaaaaaagatccttgcatcttcctagcccttagacctcttttgccttctctttactcccctttttccctcgccttccaacttcttgctgaaccttgatttttccttctcttctccttgcctttcctctttgtccctctttctttcctctttgtccctttctttcctctttgtccctttctttcctctttgtccctcttcctctttctgactgaacttccttgctt

SEQ ID NO: 588576 - DNA, 4001 bp, Homo sapiens
cgccggcgagcgcggcgcggggggcggggagcgggacagcgggaccgcccgggccaagcgattgtttcaaagacattttttatcaagacccttttgtattcgagccctacctctttttggcctaggaaagctttcgtgcaagtggaagacgactttctccacaaagtgctgtatgttactgtgctccggaccgcgtacgaacaccatccagtcgtgggtgaagccctccacggtgggttttttcctcacctgggcgcggtgccccagctccagcttcacctgcacggcacactgcgggcagggggaggagagacagccgtgaataacaggaaggcgaggtttcggcagtgaacgttgcgcctgacatttttttcctccttcttgaaacgcacataaaaggaaacggcggtgccctctgcatccacgtttcacgcgcgtgggcgcgcacactccacacccccaaatatacccgcccgcccggcccggcttggccccaggcgccccgggccccgcatctacatcggacaggattgtaacggaatgttatccccagtcgggaagggggtcggggaaaagagggagaacacactcagccacgacaagcacgacaacaaatgcatcggaaacaaatcagaaggcgatgccggggcggtttcccggcgtgggaggggaggtggctgggacccagggggaccgaagggctcctggcgagccccctccccgaaagtaccgcggcgacaggcacacgccgaggaagtctttgtgtacgtgtgtgtgcgtgcgtgtggagcgctgtgccaggcgaaatggaaactacaggcagcctctgctgatgggcacaaactcccgtgctcttgccacggggttcgtgcacaacaaaaatgagacgtcgtcatacacactgaaacacacacacacgcccgcaggaaaacacgccgaggcatccataacttagagcaccccgcaccccccagcgaaaagccccacgcgatcggcgaggccagtcgaaccgagcccccgcaacacactttcaagagcccaagtggctccaaagtatctcccacctccccccaaaaaatgaaattcagaaaggcagggcggcgggcggacagccgccgagcctcggctcgcgctcagcacctcccggcgctggggcaaagttgcgtgcggccccgccgctgtcagccccgcacacttcggctcacacacgcgcgccgcggagaacgcaccatcgtagcggccgcggcgctttgcggaggtgcggccgccgaggctgctcgccgcgtccccggactgtgcccgcagctcccggcggcggcggctgaaatatggctgagttattattcgcctccttccaccgtgtgtgtgtgtgtgtgtgagtgcgcgcgtgtgagcgagagggagtgtgtgagtgcgcttcttgtgactgcaaagaggcgaggagggagggaggcgcggggggtggaggggcgagtgtgagcgtgtgtgagtgtgtgtgtgtctgtgtgtctgtgtgcgcgccgggggggggtgggggaggaggggagcggaggctgagggagaggcggcagctccctgcaagccgtaccaacctttctctaattggaaccgcggagcgctggcgctgtctgggctgcggcggcgcagggcgaggaaggaaagtgggggagggcttttattattatttttgcgcgtacttaccgagctagccatgcctgggggcccggaggtttgctggggtgttgtgtggtacccccccctcctccgccccccctcagctgtaattcatgaagaggctgctatgaatgagagcgcgcccaggagcggagggtagatggcggacattctctgcctttttccccccgcgctcgcttgctcgctcgctcgcttattaaactcagccccaaaagcaaaagcagcagcagcagcagcagctccagggtaaagaagatgattgcggagcatgcgccgtggcgcctgacacccgggctccgagcctcacagggcggagggagggcttgcgggcggggcggagcgcgcggggaggcagagcgagcgagccagggggagctcgaaagagccaatcacctgccacctcccgaaaccccggcggcccgcagcgccacactggaaagcctcgcttaaagtaacaggttcctgctgggggggtggcagggaggggacgcaggagtggggagagcggccagctggggagccatcccagcccctgtgtaaactctgctcgccctacaataaaaaacggattaaaactgctggaatgtagccactgcttagagccctcagcagccggagagggggtgttaaatcaagtccttagctagtacgcacggggaggagggagtgggctttcttttactttccaccacgtatttctgtggttttgtgctgaaaagacaagaactcacacccaaacaaacttacttaaagagagcgagagaaatgccatcctgcaaaaaacgagcatgaaaatagcaatgactgaggctgttctaacccgcaacgatcccctggccccctgccccatccactcacaggcacccgcccgccaccctcactccccgcccttctgccaccgccaccgaaaatttgaaaatgaaatgaacaagggagaaacaaggatgctatttccttgcaagggaacgccttccgctttggtaatccccggctgggaagcttcataaagcggtgcccaggtgaaagcaagacacctgggagtgccgggtacagaccctcggggaccaggcttggagttgttttcttcggggggcttcccctcctgacagcctactgagttgcatcagaacgtggaggattgtcctctgaggacgcgcggggcaaccgggagtcttaaaatagcagataaagttaatactgactgtaatgtgcgtaaattggattataatctttaggcgtattggtgacaaccagcgtaatccatctctgagtattaatccggttagactcccgggtgacagccagtcgcaggagtgttcccagagtcgcgcctctgcaaatgttctcactcgcgttgtatttgatctcagtggccggagatagaacagcgcggccacgcgtggggcgcggagaggagtatcaactactggcttcctttacagacgcagataacctttaaaaaggaaacggataagatctagacgattgatttgaaagtgaaagatggatgtgactttggttcgttaaaaaaagatccttgcatcttcctagcccttagacctcttttgccttctctttactcccctttttccctcgccttccaacttcttgctgaaccttgatttttccttctcttctccttgcctttcctctttgtccctctttctttcctctttgtccctttctttcctctttgtccctttctttcctctttgtccctcttcctctttctgactgaacttccttgctttcctcttttccctttacttcccttttccacaaaagcaagttgtctcggcccttgaattgagaagagcagaatagcggggaggacgttacctagggcgtcctgtgtcctcgctgttaattttcagttctcccagcagctctcacaaagatcctgggaatcaggtcggaccacttggaaccaaccttagtttccaaaccagcagccttccaactcaacttttgattccctaaaactgatattccgctgcctgtcagttataatcaagaaacttctttggcttgaggtccccagttcttcccagccttctacaggatttagcatagaatggagcaaacgactgaaggtagaaacattttaatctaaatccaagggcttagatttgtcaactgacacacatatacataactgcatatcatcctgtaggtatatgcgtcgctgtgtctgtatgtatgtacaaggactacgtttatattcgcagagacaagctgtgtgggtagtatctacgtgaaggggggacctatttattgtgcattattaaacttttcataaaataatc

SEQ ID NO: 588577 - DNA, 4001 bp, Homo sapiens
ttctttaatcaataatccacactaagaatgaacacaatgtgtaagcatctgacttgtgcagggaaacagggccgcctgcaacccaacaagcgcacccacaggggaactcgggaccatcctaagccacttgttctctgggacgtggaagcaggaactgtgctctagccgtatctgtgttgcgtcgtctgagtcctctttttctacaatgaagaaaggggacttgggatttaaacttggagcggtactcaaagccagaactccacgttcattccggagtgaaccaccacactactatttccaggcaacgtcataaggcttcctcgttatttgcatcttcgttctctttttggcgactagcctgccctcccgcccttggaaacttgtggaccccagaatctcagctttccgcctaccaaaggtgccccgatcccctcccactgccctagcagcggcccagccccaacgcctttggctagagattgaaatcctctggaaccaaccactggacgctctggattggggcggaacgcgcttccactgtctcgaaagcagcaccttctcggatttgagcctttgcggcgcgcctgggctgagatctgagaaatgcgccctgggccacaggcagcagcggaggcggggaaggaacaactttccctccgccctctaaccacaagggcggggtggggcggcctcgctggggtcgggctcctccactttcccagctgggatcccctgccggagctggcgtgggggccggggagggggaccagaggggcttccttctctccccaagccccgccagatgttggaaaggcaaacaataggggaaacgcggagaaacaaaaggccattcgccacgatctcagtcggctgcgtagagagatctctgtggggagggttaggggagagggtcaggaaagagcgcgaggggggggatcccgagagatttagagtctctggtacttgccaggcaccaggggtcggcgctttaccctcccagcaggggtctgaaggtgggaaggggcaatcaaagaaaacttgaagggttttcaccttcttccccagttcagggaaagggaggggctgggattccagatgtttgacagttgttggccccaaagttaagcgcgatttgtacggcctttacacgctccccacctccgtgaggcatcgtcagccccgggggcgacctggctgacggtgcggacttcccctacgctgccccaagccgagactcctccctcaggatcaggacgcccaagcgttgtcccccagcccaggcgcacttttgtaaaagtttgtcttcccgccacccacagcccaacacgcaccctgcaggcgtccgcggctggggatgggctcggagtcttgcaccccgaaagaaggacgatcttattgatttatatcttttcaaatcaaggacaaatcaagatcccggggtggaaagtgggcgacccttgttcctgccgggaagtgcacacgaggagccggccagaaacccaggcgccggcaggggtctgaagaggactccagccccggaagcccgtggccggcgggcagaagaccggtccgccgcctcccgcaccttcttgcacccgcgcccaggtgcgccccaaacctcgccgcccgcccgggcgagatcgggagcgagcagccaccgggctgcgccgcctcccctagcttggagcgggttcttactcaccgtggggttttacctccagcccagggcccggtcggctcccttcgccgggtcagctgcagccagcgcgaaagaaaatggtgagctcggggcaggtggggcgtcgcttgccaatccacgcaagggactctgccgccggtgcgcgaggtcccggcgagccaaccggcggacgggcgagcgcctggctccagctgcagccgccgtcgctccggagcagccccctcatgcacccagcgcgccgcgcagccggccggggctcgactgtctcgcggggacgccgagcggggacccctggcggccgcctgcggtatggcagcaccgtggagagaaaagtcgtctttgggatcatcttccctccggaaagagatgggacatgaccagtctaagggggcttccagccttgcagaaaagacactgggccagggcagtgaagaaggtgtcagatcagaaaggatgatctctgggtccacaacggccacttccaaggcacctagagagggggaaacagtttgccttccccaggattttctgattgttgaaaaataccatgaactgcctgacacagagcggagcataaatcattggaaaatactcagattctagtggatttactagaacacactgggagtcatggatgaacctggattttaaagctcaacccacagcccgccactctctacttgtgtggtcttggtctatctacaaccttaaagcctcagtattctcctccgtaaattggcggggagcaatatcacccttgcagggtgatggttacgggtaaactacatttgaaacgtttttatagtttatagtaacagaaatcaaatatgagcttcctgccttctggagaaaaagaattggatctttcacatttttctattacccatatgatcacatcttaatgcatattgattgaactgtaccaaatgacgaagtactgcattttaccattcttactacacacttcaaagaggtgtggaaatatattaagtagaaattaggatatatagagaaaacatccctcctccaaaagaggtttctgcaactaactacgaagtgagaacttctaaaatcacttacatcttttgcaatatcatctcagatattgtaagaaacatttaataaatagtcatgacttaatgatatcaaccctggattaaatgactctaattctgtgtcacttttgtgtaatgtaaagataccgattgtgaatataagactcaaatatgggaaaactgccagatacaaaaatacagccgctaagcaatatttctgttcatcaccgaggaatctcatttccaaagtgccccagtttttaagaggaagaacaccagagtcagacagacccatagcagctgagtctaacctttctgaagctctgttacctcatcttataaaatgaggataatataggtagctgtcattcaatgaaggaatgcatacaacatgcttagcataacacctgtcacatggtaagtgctccagggtcaccacctatcattgtttccagcatacagttatcaccccaccgacatgtagcccctccctcatgagctcaagagcccccagcacgtgttctactcacacacgcacaagcttcagtgtcccttaagatgttatctcctggaaagtaggaacagaaagagaatattttcaggtagtttggaacagaatgaataacattcacattccttgcccaagtcagtacagattaatttccatcatttccaactcatactttatacatttcccataagaggaaaatcatgctggttttcagtagcatatgaaaaaaaaaaaattccaagaggattcttttgccaagccacttcattacagcttccccttagaggataccaaagaagcacagggatattggaaaggtgtcaccatagcaacattgtaatagacagatgacaatagagtaaaagcgaagaaagcacatttgcatagtcattgacaaacttggacctacagtcatattgctctgggcagcagtgctcagagtccaagggctactcaaagtaaatttggtaagaggctatttctattcattttggctgagtctgactacccagttcattgtgctcatgtgtgtgctaattgtaattgttacaggcagttcactaacaaacagcagacatcctcaagagtccctttcatcctaagcaatgtgagttcacaaatctaaatgtgtacctaataaatcttcaatagtaaagcgtacttcctccttacctgcttctgttttgttttcaaaaccttaaatagtcacaggtatagagaaattgtctcaatgctt

SEQ ID NO: 588578 - DNA, 4001 bp, Homo sapiens
atccctatcgtggttacagaggtaccagacaacctcaagcaaagcccaaattcctagggccaaagcatggaaatggctgattcagcacacaaacccaatgaaaatacacagaaggccaaaggcaaatggttgaaagccttccgtcttttaccttgtctgtgtgtttctctctcacccatatacagcccatcgaaaattaatgtagtttctcaactttttgtgcctaaaatgcccaataccccatctctatctgccaaaattctaccaccttcactgtagcagagccttgtgaaaagtaagaatgtggtttggacagaggattgggttcaaatcctgactctgttacttcctagctgtgtatccataatggtgggccagtcattttgcttctcctaacttctgttcctttatttgcaaggtcagcctgaactatctcactgagtagtgagagggagtacacaccaagcacctctgccacttacctgctgagtaggataagtgtctcaagccctgtaagggtcacctttcttacctggaaagataataacatcttccttgcaaaattgatgtaatgattagagagatagcatcccatagcattcctaccaccctctctaggaatctatctcctatccctgtccagaccacagatccctctttcctattaactcagaatgccctggaattccaccaacttgtgaatacagagccccaaggtgggagtgcttcacagtcccgacaactagcactggttcagcaaaccacttcatatcgtccagccttggtttcctcagctataaaaacagagattccactttcttcatccagggtggttggcaaaaaagagtggccacctctgtgtttcctctgcttctctctactacagctcttaccacactgaatcgcagttatctgttatgtctacttgtcgcatcatgtttgaatgaactttctgaagacagggattgtgcccagagtcaattacagggcctggtactcggtagccactcaacattgttgaattgctgggcacggtggctcatgcaagaggatcacttgagcccaggagtatgagaccagcttggacaacatagcaagatgccgtctctacaaaaggcgttgaaaaatttgctgggggtagtggtgcacaccggtagtctcagctacttgggaggctgaggtgggaagattgtttgagcctagggggttgaggctgcagtaagcagtgaacaggccactgcactccagccagggcaacagagcgagatcttgtctgaaaataaaacaaaaacgagagagaaagaaagaaagagaggaaggtaggaaggaaggaaggaaggaaaaaaggaaggaaggaaggaaggaaaagaaaagaaaaaaaaactgttgaattgttttttactactagtccactacagtgatttgtgtatataatcctctataataatccctagatcgtgaactcctcctggaaggaagcgaccgtgtagattcagattagccagtctctcttccctaatcttcgtgtttgtttttatagcatttaccattatctgtaattattttatcacttatttgtttattggcaatacatctccaactggattataaactccataagagcaaggatcttgacattttaaatattcttattcctatgtttaaaactggcagatagcacacacacacagtcaatgcacacacacatataagtatatatggaatgaatgcatcttagctttgctgcttattagatatggtccttgaaaaaattactcgggcaagtttgtgaaagtgcctggcacaaggtgtttcgcagaagcaaaaagccgtctttttccagtcacagctattcaaggtatagtaagtgaatcaaatgagccccttacctcccatctacatattccccgatatatttgctccctgtgtactccatggcgcctgtttttagcttccagctgttaggatccggagtctcagtggatacggcatcactatgacaacctggaggggtgggcggagccgaatcgaagccccaccccgctggaggctgaaaagttcttggtattgcgcacgctccctcgctcgtggttgggcagggcaatacgcctgcgtgttgccggatgcgcatgcgcaggcgccgtgtggcactcggcggtcgaaaggggagttcaaggagacgggggcgacgcggctgagggcttctcgtcggggtcggggctgcagccgtcatgccggggatagtggagctgcccactctagaggagctgaaagtagatgaggtgaggctatccggaggacaggcaagggagacatggggctgcggcttctcgggcctgggcctagccccccttgggctccgcggatcctgggacccgggcccccctccccagtcctccaacgcatatacaggtcgacccccggaggtcccctccgcagctttgggagtcgcctcccctctctaccccaccctgtcgcatcttgcagtggctctagaatcctccccctttcgccctccacagcgacctatttctccttccgtgaataatagtgatacattttattaagcaccaaccagtcattttacttagcttatgtcgcttaatcctcaaacttgcatgcgaggtgagtatacaaccctaggggctcacagtcgagggagacggtcatctaccttaaagtggtatcaccggtgcagagtgcatagagtggggtgacgaagccgcgggaaaatgagacaatattggagcgtgcatctactcacagccttgggaaggtgtttggtaacaggacccatttaaagcattcgtttattcaagagatatcatttcagtaattaacgtgtacacataacgctggaagagatatacttcgtgctttcatggactttacaatccagtagggagacagacacataaagaggcagtcacagtacaatgtagttagtgctgtgaggagtgaagtagaaacataccctactaattatagctaacatgatcaagtcctttctagataccaggcaggatgctaattactttccatgcattaattcattgaatcctcccagcaacactataaggtaggatatatatatatatacacacacatacacatatatatacacacacacaattggtgtgtatatatatataccatatatatatatacacaattggtgtatatatatatatgtatataccatatatatatacacacacacaattggtcatatatatatatatacacacacacacacaattggtcgtagcgttataaataaggaattagtccccgagagtagaaatgatttgcccaaggtcacggagctcgtaagtaatagagctggaagtgaacccaagtctgattttaaaaccaatgcttttccactatattatgggtgaaaactcacaagaatgagacggcctagcagaacttgtgtgtttagggagccaagtacagtttgatgtgaccctagtggtggtggtgggaagcagcaggtgctgagcctggagaggcaacttgggctgagataggacttggaagcagcttctacaaggccagaccaaacagtttggacttgatccagtaagggaggtggtgggaagagtggaaggttttaaggcagaggagtgtcatggcagggctggatagtagaacaggctatattaaaggagaggaaggccaagactagaaatgatgtaccagcaatgatatacccggcactatgttaagtgttttgtttgtttgttttgttgtttttgagagtctcgctctgttgcccaggctggagtgcagtggcgcgatattggcccactgcaacctccgcctcccgggttcaagcgattctgctgcctcagcctcccgagtaactgcgactacaggcgctcatcaccacacccggctaatattgtgtatttttagtagagacggggtttcaccgtgttagccaggatggtttcgatctcctgacctcgtaatctgcctgcctcggcctcccaaag

SEQ ID NO: 588579 - DNA, 4001 bp, Homo sapiens
tttatttacttatttattgagtcagagtctcgctctgtcacccaggccggagtgcagtggcgcgatctcggctcaatgcaaccgctgcctcccgggttcaagcgattctcctgccccagcctccctagtatctgagactacaggtgcgagccatcacgctccgctaatgtttgtatttttagtagagacagggtttcaccatgttggccagcctggtcttgaactcctgaccttaagtgatccacccacctcggtctcccaaagtgctgggattacaagcgtgagccattgcgcctggccaagttttgctaggtttttaaaacactattgtttgccaaaattccatcaggtgctaaggcatacattatacaaatttagatagttccaacattacaagatgttcattgtaatcactcatacccaaattcaacatgtaaaactcccaagcccgaaaccatcacctcctcctcgttagttttcagataaggtgttatttattctataaagggtaacctaaaccaggaatttctagggaaacacgaaggggatgtttacatcaaactgtctacaaggcaggacgaggcagtctgatcacttatcagattccttctctatgacatcaaggaacatggagaagttttccttctacgctggtgaagtcatggtcctcttatctatctgatgatacctaggaaacactagcctccaaccgcagcccctactgcaaaaaggcagtcagtgcccattgccggggtcttcccaagcggagcacctcaaaagccgcaccgcgcagtagaggtctccaggggcccccactcgcccccagtgactacggagcggcctctacctcccgccggcgcctggccacttctcctcccccgcagtctccgcttgatttccatgtgactgcaggcaagaatagcccagcctttgtgcctctgcaaagaacgcaaacaaaaatgtacaccatcaccacccaacaaacgcgcaactccgcaagacacaaagcgtctcccaaacatcgcttccctggtaacatccggcatcctggggctgccaaatcgcagacaaagacgcccatcagcgcggggggtgaggagactaagggagagacaagaccaacgtgctcccaccaacgggagcggcggttaaaagggcgccggtgccaggggtgagggacggggcaccggtaccaattagcggctcgcctcggggtccccgcggctaaggcgagaacgcaggaccaggagcattgctgcccactctctaccgcaacccgcacatcccgggaccacgtaacggcggatggggcgtccgggagcggcccctgcaggggagagcaacaggctcccgcgccctggaggcctggtctgcgctccgggcccccaggctaacaccccacccccagccccccgacaccaagactgtgcccctctgggtcaaggaaaaggaaaaacttttaaacctcttagtcagcgagagcaaaagaaaggggtggcgggggtgctgaaaggtctaggattatccaccgcggggctggggggagtggagacttgcgagtagcaaaggaaacttctagaccccatccttttaaaaaagccacagcagcggcttccgcgaagcgccgggccgcgcggggtggggcaagcgcaccgccccaccgccccacggcccgccgccacccctacccccacccccacccccacccccatccccgcccccacccccacccccaagcgccgagcccagggcgcccgcgcaccttccccgccggcgcgcgcgcagggcgcgggggcgcgcctcggcctctgggccggggctcaagcgccgcttacccggctcgcggcgcccgcccagggccgcgacgcgagggggcggaggactggggagcaggggtcgccggggcctctggatgcctcgcctcgcccacgctcactgtcttctcttctgaagtaacgacccggcgaggagcttcggatcaaaacgcacagacactcacgcgtgactgagaaacttaatcccgcggtggcccgacgccagcctagcgctccgccgcgccccctcccccagcgcgcgccgcacttgcgccgaccggggctgccgcggaggcggtggcggggcccaggctgctggggctgccgtgacgcctgcgaccggcggggcggcgggcgcgccttggccaatcaggggacgcggccgagcaggcctgtgcggggttttaaactcgctcctgggccgctcgacctggggtgtgggtagtggacttgtgaggtggtcagataaaatataggctgctctgttaaatgggaatttcaaataaaaaaaaaaaggaataattttagtacaagtatatcccatgcaatatttgggacgtacttatgctaaaaagttcttcgttgtttatcggaaattcaaatttaatggcagtcttgtatttttatctgccgattttgtcaacctgcggaaactgatagcctgtttctagctcctcagattttccttatgtgcactgccctgtggatgctttctgcatgggtagcttactgaatggcataggatgcttatgagaagcgctttaatcagaagggtgggggcagtcctctcactttctaagtaacttttcgcacatcagggtgcattcttagtctgatgatccaattaaaaagcaaaaacagtaaacatggaaaagttattagagttgcatggccccaggaagaacagatattcatttctattttgtgccacttaagattttctttctgttatcctcaatttggaagtcccacgaatttttttctgcataagaaactctttttcaaaatatccctctgatattagattataggaccaaaggatactcagaagtccaatttagaacatttaaaagaatttcttttaatattctgaataaaaatacttttttctcatattccttggactttcaaacacattcacagctgttgacctctctcttcctagagtcctccccaccccacccctcttgtaattccatgcaatcacactcttggttttgcttcttccgcttagtcaagggcggatgtatgggctctgaagcttgtacaattgggagctctgctttaaccaaaaaaaaaaaaaaaatctttctttagaaaaattcaaaaaataaatgcccatgtaaacacattgctagggttgctcccaggcaagagaaggacccggaacgttaagctacatcaatttccaggtagatctgcccctgtccccaggccactcttcagtcttctttgcctcctctcccccaatctttagatgctggaattccttaaaaatcagttacgggccctcttttccttttaactcttacctctaaatacattttcacttctagcttatgatctcgtacctacagaatcttacatttataccttcagatttatccatatattcaagtgtttatttggcttccctgtttgcttgtctcaaacctagattgcaaaaaaaaatgcagccgtgatacttctgctcaagcctggtcatcttgttcagtgtcccagtgaatggaactgccatagatgctacatgattcccacaaactacgataaacccattgtgatgcattcttatggtaccctatgcttttgcttcataatatttttcctactttgtaaatatgcatttgattttgtaattatgcaatgtctcttccctcttcaaccataaactccatgagaacaggggctaagtcaccattttatcctcagagcctagtaaaaacttcacacttggttggcactcatatgaaataggatgaatatacgactgcaagaatgaataatttctccatataacttttgtgttcttgtcatagagtcacctcaaggcatcccatttggaaaggattttcttattgcttagaaattccaaagggatcctcctgtttgaatagcacttctacttgtcagttttcaaatctggtcattctcaaatacaaaggaagtacgtgcatgaaatgttagctg

SEQ ID NO: 588580 - DNA, 4001 bp, Homo sapiens
tctcgactcactgccctccacctcccaggttcaagtgattctcctgcctcagcctccggagtagctgggattacaggtgtgtgccaccatgcctggctaatttttgtatttttagtacaaatggggtttcaccatgttggccaggctcctgacctcagatgacccgcctgtctcggcttcccaaagtgctgggattacaggcatgagccagggcgcccagccccaagcattttggataacgacgctcaacctgtattggatccctatgcaggtaagtaaaagggagtgtgtgttccaagttgccttgggggtcatcagcttgaaatatgtgaagtctgtagggaacactcatcactgcagcacccacacgggttagctcccaaatactggacagatggtgactttaggtgtgtgaacaaactgggtgtgttacatccaactcctgctgtgagggcttttgtctctctgggaggaactgtggttgaggtacaggccactatttgtcaaatcctcagcatttactaatgatacataggtgactacaagcaaaaaaacatgcagttttatcccttttttgagacggagtctcactctgttacccaggctggagtgcagtggtgcgatctcgactcactgcaagctctgcctcctgggtttaagcgattctcttgcctttggagtagctgggactacagtcgcacgccaccacgcctggctaatttttgtatttttagtagagatggggtttcatcatgctggccaggctggtcttgaactcctaatcttgtgatcctcccgcctcagcctcccaatgtgctgggattacaggcgtgagccaccgcacctggccttatccctttcttcttttctgatgatacaacacaacatgtcactatatgtcagattgcaacaggaaattttcctaggctgggcgcagtggctcacacctgtaatcccagcattttgggaggctgaggcgggcggatcatttcagcccatgagttctcagcctgggcagcatagtgagacccccatctctgtatctttgttccctgggtgaataatttgggggatgaactgaccagtgctgtcatccggcacaatctgccttgtaaattctttctcctgcaagctgagtgatgtttgcccttggcaggttcccagaaccttcggactcggaagatgacctccaaagaggttcacagcgccgagtctgcatgagaactcggcttaggtgcctgcactgaaatctgtcatgctgcacactttgccatgacctgaggccaaaaaacaaacaccgtatagctggcaaaggcgtttaatagaaatgagatgagggcaggccgcccctcccccgcccagctagcgcaggaagttcctggggtagagctggaagagctttccctcctgtgtgggctcgaagccgtacttttccaggttgtcagggtcgaaggtaccgtccttgaagtccttttcgatggcaggcgccacggcttcgctgaagagctgcgcggccgtcaggggcgtctcctcgctctcaggggcgaggtagctcacgtagggcttgagcttgaagccggtcagatccgggacgacgaactccgggaccatctccttgatctgcacgaacctccagcccgaggtgaggaagccgatgcccttggcgccccggcccttgcggcccctgaagctgcgcgggccccgcttgctcgtccacttgctcattcggtccgcaccccggaccaggcagcgcgccgctgcggccaggacgcccatgccgcgccctgcgggaggagagagcgggtagtcgcggccccgggaacccggccagccccgcccctggccgcgcgcggcgcccgccccaatccgacagactcacctggaccggagaccccacacgagctccaagcggccccggctccggcgccaacccggcctcgaccttgctccgcttccgaccgctgcgtcgcagcaagagcggctccgattggccgcggccgccgcgtccaatagcggccccaatctggtagggggtgtggccgcggggactcggccaatgcgaggagcgcgcggggcggggcggggctcgcggggctggcggtgcggggccggcggtgcggggctcgcggggcggggctcgcggggcggggctcgcggggcggggctcgcggggcggggctcgcggggcggggctcgcggggcggggctggcggatgagtgatcgctctcagcgcggtggtccctggcgtctccactgcccgccactgcctgtgttcgtccgccaggtggccggcggtttcccgggagcccagtccccctgaggccgtgaggtggcgtcgggaggtcggggaggacgcgggccctggactcgagacggccgccgcgttgacgccgcgaccctgcctttcttacccctccgccgggcgcggctcctctgggcggagccggcaaccgcgcggggaaagcccgggacctgcagccgggagggcccgggctgtctgtgctcccccgcaggccgggcagtggtgtggggggactcgagccctcgcggtgcccaaattaatcaataatcttggacccagcacgtccggcttgcgcactgagccctcctgcccggtcaccctcgcaggcgacctctcaccccacgcggaagtcgccccccagccgcaccctcacaatccggatccaccccctccccagctgcaccccgtccccagcggcacccccacagcccagatccatcccctctccagctgcacgcccttccccagcggtacccccacaccccagatccatcccctccccagctgcaccccctccccagcggcacccccacgccccagatccaccccctccccagctgcaccccctccccagcggcacccccacgccccagatccaccccctccccagctgcaccccctccccagcggcacccccacaccccagatccaccccctccccagctgcaccccctccctagcggtacccccactcgccggatccacgcgctccccagctgcaccctctccccagcagtacccccacaccccagatccaccccctccccagctgcacccactccccagcggtacccctacacgccggatccaccccctccccagctgcacccactccccagcggcacccccacaccccagatccaccccctccccagctgcacccactccccagcggtacccctacacgccggatccaccccctccccagctgcaccctcctccccagctgcatccccacaccccggatccacgccccgccagcgtcacctcccctccagccgtgcttctccagaaggcagcgctgcccccatccccgccgcgctgggcctggctcctcttgacctgcttggatacgccccatctggctgctgttctgggttccgggacagccacgtgagggctgtttacagagggaaggaggtggctcctagcagatgacagacacttctcaaaagacagcttttcttcctggagaacagactttttcagcaggattttcctttcagtgaaacataatttgacttgaaaggaacccagggaaaagtgtccaggtgtgagcatgagcgggtagaggtgtgcccttgtttgcttcaggctgtctgcttttcgcccctgactgttttttctgtttctggccatggaggaagagaaagatgacagcccacaggtatgtaactcgggggaccagatgcctggatttcccagttggggggcatttctggacccagagaagggtcctcttggcgtctgctctgccgcgctctttggccccgtggcttcttggcgcctgaggactgtgggagtggtggatctggcccctctctgctgcctgtcacagctgccagcacttgttagacgcgcctgtcacagcagacagccagtggtggcccatgggcattgttcacagcgagggcagccagcggtggcccatgggcattgcctgaggccttgtcttttcttcccctaaggtcacagttg

SEQ ID NO: 588581 - DNA, 4001 bp, Homo sapiens
tgtagtatctaaaaagtcaaattaggccgggtttagtggctcacgcctgtaatcccagcactttgggaggctgaggtaggtggatcatgaggtcaagagatcgagaccattctggccaacatggagaaaccctgtctctactaaaaataaaaaaattagccgggcgtggtggcgggcacctgtagtcccagctactcgggaggctgaggcaggagaatcgcttgaacctgggaggcggaggttgcagtgagccaagatagcgccactgcactccagcctggagacagagtgagactccatctccaacacaaacaaaaaaaaagtcaaattcatagaaacagagagtaggatggtggctaccaggggtggcggaaatgaagagacgttggacaaaggtaaaatttaaattatgtagaatgaataagttccagagatctaatgtacaccatggtgacgatcattaataatactgtactgtatacttgaaatcttctgagagtaaatcttaagtgttttcaccacacacacaaaaattctaactggccaggtgtggtggctcacccctggaatcccagcaatttgggaggccaaggtgggaaaattacttgagtccaggagttcaagaccagcctgtgcaacatagtgagaactcctttctctaaaacaaaacaaaacagaaagtatgtgaagagatgaatatgataattatcttgactaataatcaacatcaagttgtatatcttaaatatataaaatttttaaaatagtaaagaaaatataatcatcattctcagtaatctatttcctctagttttcttcataatttaccactttctgaaattacattacacatttgttcatttcttcctccattagaacatatgccctacgagaacaaaaatttggtctgttttagtaaccactgtattcttacaacacctaagatatagcctggcatatagtaaacagcctaaaaaatatttgttgagtgaatgaataaaacaaacttggaagagatttgagagataataacaaatattgaccaaagaagagggaaagctaatatctgaactgatgaaaaagatctttcctaattgtagtggtttttgttttaaacctaagagagcatacattgctccctagggttcctaccatacgttttgatttcctaaacactatctaagtcaaattagatttaccttcaaacaattacacatggtgcagccgtgcagcagaaaaagcagtagatggggagttaggagacatatgttctagatccagctttgcaattaacttgctttgtgactttgggaaaatcacttccctcctgtgggcctgtttcctcatatgttggagtacctcgaggatgagaatggattttgtttttcctgctgtatcctaggcgcttagagtaatgctggccctaagaaatctgttgaatgactgaatgaatgaacaaacaaaaggaggaggcagtacttcattactgaaccttgcttgtgaagaaacacagccggcaaatgagtttagtttaccaagcgctttcatgtgtttgcagacaacacactcggtgtctcgcacacgaggttaatcctgcttgcttaataaataaatgaatgagtgaagtgaaaaggaaagggggtggtatttccgttataaaatgagaaaactaaggccgagagtggaagagactgggtcccaccactcaatgagtgcttctcaactcgggaccctaaccggacctccttgtccttgctctgatcaggcgcgggaccacgatggcgtaacactctattttgaattcgtccctaatcctccttaactttccttgaacatgacccaccgtccaccataaagctttacctgaatcgagaccaaaattctctacatggtgtccctgagactgtccacatgaagactcttctggtaatgcccgacacagatcgcgccgccatcttcgatgagatccacgggcctgagcgcagccttcagccagcagtgacgcgcccagaccagccaatcggatacaatcccagtggcaagagctttctttttcctgtaggctccctcgccctttgcacgctgggaaatgtagtccagtagctgttgctggcggcgtctggaccgcggcgctctttccgagcatgacgggagttgtagttgagggggcctcgggaagaatctgggtgacgccttctggtccgggggcgggcggtcatagcgttacttggctgcaaggaggaggaactggcagcggggaggaggctctagcgaggcctgaaaggctgcgtaaccaggcaggagtaggggttggggttcggggttgggggacagccagggatcgcgtctgatatgctgttggggtcgtgaccgtctgggggccgaggcaggcactggccagacccagccagggatcctcgtattcgtcgagcctaatttccagcagccgggtaggcctcaccagaggctcctttccgtgaggccgcccccaattcctgcccctattctctgcctgggagatggcttccccgagccccccgccggagtcgaaggtaagtaagcacccccccggggatcccggttgtctcgccgctaccccagctaggccgcaccactgctttctcccccaggccccccaccaacctcctgaccgcctctttagggccagcgccttgcaaggaactccccactagtgcattggggtgcggttcgcgaacaaactgcccactggctccctttttttttttctttttctagagagacttgataaatcggcctgagaaaataagtaatgctccagactagctctctcatttgtgagttctccaggtgaagcaccatttttgaccttcccttgtgtcttctgttcctggcacagtgcctggaccccaaggtacacgcttagagaacctcaaggaattgaattgaatagagtcacaagccagtgcaaatggaaaattgaagtaggcaatgaggtgagggaagcttggagaggccttggggcagtttactaaaattaaactctcagggcataataaatcagaaaagccttatccgtaggtcctttctagtctgagatgtctgtcagttacagttcgttcccagaattgggcaacatatggaactttcagttatcatgttcctcctagcctacttggccacaataagtgattgcctctgtcacttttagtggtagaattgtccttgagacaacaggaactgactacagaaatcatactatttcaggggttgctgacatttgaggatgtggctgtgttttttacccaggaggagtgggattatctggacccagctcagagaagcctgtataaagatgtcatgatggagaattatggaaacctggtctcactgggtaagaatctgctgtttctctaattaaaatatctaagaaggtagagagaaatcagactaacagaacatttggacggaaaccagtaccaaaactgctttgttccaaagttctgattcaaaccttttagccattaattgtttccataactctcatccctagcttccttgaggtgaccaaactgcaagcctttcgggcatcctgtcttcataatctcattcccatattgttctgtactttccgtcctggctcatcctcccacagctttcctcccaccccttttcactctgcgttctggaacccctgttcgtcttcacataatgttccttccctcctggccttaactgaaacctggcactatcccaaggacaacgtttctctggcagtttttcaagtgggggctgcttattctcccacatcctcctccttccccatcctttgtctcaatgttggaagggggaagttattgttcactcagcttttaaatgctgtccccaaagcattagttttccaccttcaaacaaaatctctccttctttgaggtctcagcagtcttgctttttccactcaattccttttcactatctgtcaacttttagtttggtccttcacacataactttgtcacatgt

SEQ ID NO: 588582 - DNA, 4001 bp, Homo sapiens
ggaaccaagcttgtgatgtcccccaggtctcccctggttttcaccatctcagtaaccagtaccaggctccacccgaagagcaggtgtttgatcccttcggccccagccacctcccaccccagcccaaggcccactggctctgccctgctgcctcatgtccacctgctgctccagctcttccgctactgcgatttaagccccgccaccttcaccctgaacgcccacaccaacctcctccctggcctcccacctgcccctcccatcccctccccccacagcagtcaaaatgaccatgtgagaatacaggaccagtcattcctcctccccgcagcccagaaggcccagcccgatccggggggaccaaccttacaggttctgccctcagcctttccatttctgaacccgtggagtcctgcaacccccagcaggcctgccctatcaagggctgtgagcgccacaccaaggcacacaagagcgtccgccaagctgaggaataaactcctgcttctctgtggggctctgtattcccatgtggaggaggatggggctgtaatcacctaaaactgacataggccagttcaaaagtggccctagaaccagagcaggtcccaggttcctcctgggaaccgccccgggctcagatgggggtgtcacctacctgtgccgacagccagctttgtgtcccagatggactcgggcatcgaagaggcttctcacggaaaacagttccttgacattgaagaagtcagagtgcttgaggggctcattcaaaatcttgtcgttgaaatctacggcagggaggaggagcgacgctgcgtctcccaccggtggcagcagagacaggcagagcgcagttcccgcccacccctgctcccaagtgccttctgtgacaccgaggtggggagccgggagcccagcagccccaggaaagacctggaagcacagggaccttttcaggaaacagagggctggagccaggttctgatcccgaccttgctcctgggtaagcctggtcgaacctggtcaaccccgtcccttggtcttacttggaagacagaggagaaaaagagaggggcccagcgggttgctcaggtctttctggcacctccccgccttgtggtctcaggtggccagccagaaagtccccatcaggagtccagcaaggtgggcagactccaagcccagtgcccccaggtcacttgggcccgcctgggcgagctcggggctccgggcctcggtggtccagtgacacccccctagggagcgaagcctgtgctaaccactggcccgcccgctccctctcaccctatccatggtgaggcggtggcctcagcccgctgtgctacgtcaggcaggaccgagcggcggcgagcacgggagtgggaggagcccagcggagcgcgcagtttcgaccgcgtgcagcgcccaggcccctctagggttcgcatcccccgcggctgccggcctctcctcgttcccacccaactcggctgggcgcccagtgttaccggtgctgtcctccgactcgcggatcataagggccgtcgcgcttccaagcgtcctgcggctcggccgagcaggccggggggtcgccttcccgagaaagcccaaccagcgcgacggggcccgggcacctggggggaagtagatagaggtcctggcgccgagtcccgaatgcaccacgcccgctccccaccgcatccccaacgggcccctccgcgtccctaacgggtcccctccgcgtccccgcgccctccccgagtcccctccgcgctcgccccgggtcccctccacgtccccgccgctccatcgggtccccgcgcccctccgcatcctcctcgcatgctcctccccagggtcccgcaagcgcgcgctcacccgcgccgagtattcggggcagcgcggccgaggatgtcgccatggctgggacgcggggcagagcgaggtctccctccaggccaggccgagcggcctccccttccgtcgccatccgcgcggggccgcagtgccgcctacaggcccggaggagccacagcgctgtccccaggcggctgggacctccctgcgggggcggggcacgcgaggggtcagggcccggggtcctgggcttgagagtctcgggcggggagtggagccacggtcctcgccctgcagctcgccccgccctgctaatgggaccggccagcccgggaggcccctgacccttggggaagcccgctgggcgatggggaccctcgcctcccgccaagtgagctgtgaaccacgtcctgcgcaacctctcgctctccaaaactgtttgtaatatttaaacgatatttggcttaggagaatttcataaagttagccagatctcgggtctcaatttagactcggggtgctggggggcatagcatccctggagtacattggacagcaaaagtccaatcgttgcctgccgagtggacctgcagtgcttaaaccccgtcacccggctggcggggtcccaggccctggggtttctttcgcccgggagtccacgccctgatgctggggtggcccggtccccccgcgggtggctgggggcctggggctgcctcacacgacggtcccagcagggaatctctcgccgtcccgaccttcccggcccttggggagtcgcccggcaggttccggacccacccgcagaggaacccggcccacgcgcggcgcctttaaggcccctccgctcgctccccagtcacgtgacctggccgtcgcttggcaacaggacgccgccgagtcccgcttctcctccaggcacaatggctgaggaatgccccagagcgtgcgcggagcctgtggcgcccaaggccacggccccgccggagaggaccagcgactactaccgcgtgagcgcggacctgccgggcaggttcaacaacccggggtggttccggggctacaggtgaggaagctggggcccgcctggtcctggcgtccactgctcgatagccccgtgtgtgagagaccccgcaagacccccaaggtcctagctacagaaatcaagaagatcgagtggtcatccggggcccgcgctgtcatcgcccgccagtgagcggcgaccgtgctccctagagcctcatacaaggaagtggggataagggcagtggggggcagggccgtggggggagaaagcccagttgtggtctcagctccactgatttgtgtcgggtgagtctcctctcctctctaccctgaaactccgctgcggggcgtgagcacagcagcacctccactgtcttgctgtagactcagccagctctgagctgccacagggcattgcaggctaagaagtagtaagaaactcaattcctgtaggcaggtgcaaacatcttgccgtgctcatcacacatttggtccctcaacagtcctctagggcagggtctgttagtatcctcattctcgcattgagatgactgggatgtagaaggaacaacttggccaagatctaggagtataaagtaaagctatgtcgtgggcctgcagcctctcagtagcctgtcctactgacaggtaggggcagtggtaccagtagaagcatagcctcagtgagggtgggggctcagaggcagagggaccctctgggtggcagggtctggaggccaagcctccgctcctgacaagctaggttacccagaaattgcagcatgtgccgaggccctgccagggctggggatcagcacttgctggctgcctgctctttagggctttggcctgccttggaagagcagggacagtggcaagcagagggggccggggaggccgggccattcagaacggtcatcagccaggtactcccagaggctgccttcgaggccacatcaccagcccgggcatattgctctttccatgggggcatttccaggggagtgccgtcaaccaaatacaaggctgtggcttgtgcagaattagagtaaatgaatgaaaatagagtgtttctcatctaccaggacccagaaggctgtctccgtgtacaggaccag

SEQ ID NO: 588583 - DNA, 4001 bp, Homo sapiens
cgcaggctcttgcatataaaatactttcacatgtaccatcttaactggttctcataactaaagagtgataatcaccacccgtattttgcaaaataagaaaagtgatctttcacttctccagggctccccctgctccagggtcttcaaacatgccattgaatctccttgatgatcttccctcacctctttaactgtttgtctccgtttttatttcagatttcagcttaaccatcacttcctcagaggacggcttccttggccatctcctacagcccaactaggtcaagtgtcctgtagtctgctttcatagcaccctttacttcatcatagcacttaattcttaacaatacaagctaacatttgtgtaattatttgattgtctaattccctccatatgactctaagtactacaaggactaatctatgattttcttgttcactgctgtatccccagtacctggtacattgccagaacacagaagacactgtgaatgtgatgaatacatcagtgaaagtccagaaagataaattccttatccagggtaaaccagaatcggatgggaatctacccttactattatggtaggttctgggcttcccagcgttgcctccactgtctctggtttgccagatttttgcttagagatagtagatgatgttcttctctaaatgcagtaccaggtaaagaaaggtacttgtagtatctgactatacacagaatcattatgcacctggcacggccaaagaaggaatgagacactttaacaggtagagaaagggcttttgcctaagagttaagagatctggattccagtatgcctaccttatcactccctgccatctgccatttagattcataatcacacgtattcaaaaagcatttgcggcagctctaccactgacttgtgacttgtaccaagtgatttctcctacgtagattttgtttcaaccataaaatgaaggggtcagatcaggttttcattctttccaactataaagctttccaaaatggggggaaatgcaacagtgtggtttaaaacaaaataaaggcactaaacttagagaaaactccgagtcttggttccagcacttcctaggcacgtgaccttaaatcggtcaaactctcaggacttccgtctcatctgtaaaacgtaaatgacaatactatttgtcagggttaagtaaatggagaagggctactgaaatgacaactgttttgccactgggtggcacagagtggtggttaaaagtccaggcttaggagtcggatagccctaggtctgaatttaagcgccctcactttctgaccgcgtgaccctggtaaaattacctatgtgagcttccgtttcttcattatgggagataataatatctactcctatgggattgttctgaaactcaaacgttcccgtcaagtgtgcggctactctttagtaagttcctccagcatcccctaaattcctagctggtaaaaggagccccgcccccaccccatgagactcgctccaatgccacaggtcccgccctcagccttaaaggtcaagctggactcgaacgggtcggggacggtagtctggtcccctgaggtcccccagaggtccctgagtaagggtctctggcacccagaccacacgcgcccctcgaggccctgtcaaggacactcaccagctatcgcccaggttactaaggaaagactcgtgcgacggcggcgaccgcagctgcgcggacgtcgtgacgtcacgaagccaggaggcggcgcaggcttaacgcgtcacgggcggcctggcagctggcggcattgaggcggacgcgtctagaggtccgtctgaccgcggcgtcgggacctggtttccgggcatgagctgagagcaccacgccgaggccacgaggtgagttcggccgcgacatgtccctgcacctcagcgatgggcccgctaagaggtcttacaggaggccgccctcgcaggactgcatctcaggccccgccccggattgtcctgtcgctggcccggaaataacaatccgagtaatgacccttcgcctgtaggaattcgcagccagaaatcgggaagccagggttccaggcatgaccccaccgcttgctgttaggatcaggtgtctcttcttctctggattgcactttccccagatgactatttctggcttccagagttattgcagctcagctggaaagacaaatgtaaccgcgttttgtgaactctggtagtctaaaggattgttgctattgcaaacgcaaagcattttgatagtcccgtgccgtcttgatcttttattaccctttacctttcctcaaaaagccatattctgagctgtcaccaaaattgtcttatttaagactcacaacgacctcgtgagacgacaaattgtacccattctaggaaggaaaaagaaactaagtcttcgagtggagaagcggcttgcttcatttagtaaatattaagcaccaaccgtgagacaggcagtgtacttaagtgctagaaatagaaccgtgatcaagattggcaaggtcctgtgctgtgggagcttacgttctagtgaaggaaatagaagaggaaacattaagtaatacattgaattagcatttagtaggaggaaaaagatggaaaagtggctatgatatagaataacaaggaactctgtttaggaaagcttttctatcgagaggatgcttaaagaaaggtcatgtgacttgctaaaggtgcagttactaggtgcaaaagtcaggatttgaacccagacccgcatagcctgcactcttaccagtaaaacatggtaccttttcgtggtaataaatattaatagctattggtattattcctgattttagacatgagaaaatcagaatgtcctatcattcaagtcccaaatgtcatctcctttagagaggccttccctccactcaatctatagtcgtcgagtccctgtcacatcaccctgcttaattgtgtttgtggcatgtatcactaattatatcttctttatttattttgcttttgttttgtcctgctccccttccaaatacaagcatccagaggatagggaccttgcttgttcactgctctgactccagtaactggataagtcctagataatagaagcagtgaatttattttttgaatgaatgatttgtttaaaaagtagggggaaaggaaagcagagggaagacaaaaatgtgtctcccctgggattaaatttatgtctgtttcacctttctcccaggaggtaagaacaagagctgtggctttttcatttgtctatttcagtacatagcccagagtttaacagttcctagttgcttgacttacattgctgaacagattaaagatgtgaatgggaaaggaagaaaaataccctcatgtgcagggtattcaataaacaattacctagggactgctgtgctagactttacagggtgtgctgagatgattaagaggtaatggcagttgttgtgactgcctccatggttcctgtagtgctgacctctgaggtacttctgggtataggatatgtgttctctagcagggacttctgaactctgacacagcctgctgtcctcccagcccctaaagctttatttcacatctgtcgtctcatttttggtcctcgaagccttaagttataaacagggcaaaatttattaaagatgggtaaactgaagctcagaaagaaataacttccagtggaaatgccacagtttgtgctgggcatggtggctcacacctgtaatcccagcactttgagaggccgacgtggatggatcacttggggtcaggagttggagaccagcctggccaacatagtgaaaccctgcctctacaagaaaatacaaaaattagacaggcttagtggcatgcacctgtaatcccagctactcgggaggctgaggcatgagaattgcttgaacccgggaagtggaagttgtagtgagccgagatcgtgccaccgcccatgagtctgggcaacagagcgagagtctgtct

SEQ ID NO: 588584 - DNA, 4001 bp, Homo sapiens
cttatccatctggaaaggaaactttaaaaattacctcacattatattcagaaataaattaccttgcaatagacgggtatttcttaaagaagacacaattaataaaggactaaaaaatatgacattaaaacccatgttcaacaaaaacatcataaagtaaaaagcaaagaagacacttggaacatatggacaaagaatgagcatccctaatatgaaagaatcgaataaatctaaaagaaaaagtcaaacaaccaacttctgcagcctcaaactcctcacctcaagccatccttccacttcagcctcctgagtagctgggattacaggtacaggccaccaggcccagcaatttttttttttttttaagaggcaaggtctcattatattgcccaggctaatctcaaactcctggcctcaagcaatcccctcacctcagcctcctgagtagctgggattacaggtgtgagccacagcactcggctaaaccaacttttaaagaggcaatcaaagaagacaaaactgaatagcccacaaaatatgaaaaaatgctgcttatgcactgtaactgtctattacactagaagactgcagtactgtaggcatcaggaactcaagtttctggttctgccattaactatataggaacatgggcaaatttctcacaaactatctcagtttcttcgtttataaaatggtgagatctggattaactagataattataaggatttcttcaatggaaaattataattccttcaatggataattataagaataaaattagtaaatgtatagaaactttaaaaaatataatgctacatacagatcaaaggttattactattaacactattaacagaatataactcttctaagcattactgttcttccagtaatttgttaattttcctattacagaaaggggaaggtctgcatgaaattagaaaaggaaagtcagtgggaaaatattcagcagcatatatctagcgccattcttgggggaggactccctgatccaccactgcaaattgctggtgtgactgacaattttctatcactcattctttcattcaacaaaatttgtcaatacatactaaatccaggccctgttaggtgctaaataagaacaatatagaacctaccttcatcaggtccagcatagaagacagataaacgataatcaatcttacatttaattaattaatcactgctgttctaagtgcatcaaaggcaaaataacagaatgcacgagtgcaggcaacaggggacttgacctagtctaagaggtcaggaaaggcttcccagaggaagtagcatttaagctgagacctgcagtacatcagagtctcattcctggatgacacaagccattaagatcatccatctaaatccatggctctaatacccacttcacccaaccaccttctggtcttaattatacttccaacatgcatcttcctataaggagacaatatattgatccctgctacaagcattctggcttgcttggcacttaaacctttaattctaaatctaaaagaaagaaattaggcattttctgagctaccaagaaaacaaatgaggcagcatggtaatgagaaaacaggcactgggttataacaccatctctgccactgtaaccttttaagctaatccaatgaaatagctgaggcaccatttcctcatgttagcaaggggagaaattcagtacatctgagatacctgccagctataattcaagggccaactataagaaaggggtgaagtaggagagaacgtcacatgtctctacctttggctttcttggtagcaaaatggcggactggtacagctgaataggccatgtattgcctatggccatgttgtctttcatgcactgtcttcagtgtaacttctgaaacgggtctgatagaggctgcaagataattgcgaaaggtagggtggaccatgcggaagcactttaatcccaaggccatgactgaagacaatccttggaaacatccactaaaaagaataagacaaaaagcagatctaagtaaaagatctaagtacaaagcttgcaacttcaggtaattcgtaccaattatcaagcaactcctataaactgagctaagtactagacaatttaaatacattatctctaatccttttcccaacagccctagaagaaaatattatttgcctcattttacagaatgaagaaactaaggctcacagagatttaaggaacttccccactttggactccaaaccccaagctctttccactgcaccaaaatgcccattaagcaaatatgcagcagactaaaactttaatgatgctaattaaacccttacatgagaaaaagcacaaaatcttgataaagtttaaagagggaaggcagagcactagaagaggactttaaataagaaaaccgtctcaacaggcataaaatgactggaaaattcacacgacagcatttaattaaaattttatttggttccttatgcactgattaccaattaggatgccctttaatgtgagtctaaagcatgattgaggtttgaggtcttccatggtatagaactagagctctggaacatgccaccctctcctgtgttaacacaagttacgcattctacatctgaggtctttgaccatggaaagatgccatcgcctacaactacctcaggatagaacacagccctagctaactgacaaatatatcattgatagcttctgccagtaatgttgctatggctcaggtaaaaattaagaacaattagtatcaaatacctggaagctgtttcctttgagtaacagtcccacaccttatttttttttttaaatcccatcctaaaattttgatccaacacaatggaatgaataacatgggctttgccgtcaggaagacctggaagccaatcctagctccattactgactaaatattcctgaatatttctgctccttgatttcttcaactataaaatgggaataattgtactcatttcttagggttaggaataattaatgaggttatgcaagtaaagcccttgacacagtacttagcaaacagcaggagccccccaaaataatacctgttgatagctatcaccttttttttcaaacttttaaaaaaatattatctttattatcttttgagactgagtcacactctgttgcccaggatggagtacagtggcacgatcttggctcacagcaacctccactcccaggttcaagcaattctcatgcctcagcctcccaagtagctgggattacaggcacatgccaccatgcccagcgaatttttttgtatttttagtagagacagggtttcaccatgttgcccaggctggtcttgaactcctgggctcaggcaatccacctgccttggcctcccaaagtgctaggattacaggtgtgagccaccatgcccggcctctaaaacttttatgccagggtcagacacaataaagaaaccttgtatgttattaatgatgtacaaaatagcctacaatcagtcagacctggatgtaaatttcaactttaggcaatttactcttcttttctgagcatcactttcctcatcaatgataaaaataaccttgaacttaaaataaaatttaataatgaatacatgtaaacaactaacatagtgccaggaatatagcagcttaatgaatgatggctattattattattattttttttttttttgagacagagtctcactctgtcgcccaggctggagtgcagtggcacgatctcggctcactgcaagctccgcctcccgggtacacgccattctactgcctcagcctcccaagtagctgggactacaggcgcctgccaccacgcccggctaattttttgtattttttagtagagacggggtttcaccttgttagccaggttggtctcgatctcctgacctcgtgatccacccacctcggcctcccaaagtgctaggattacaggcgtgagccaccgcacccggcctaatgatggatattattttt

SEQ ID NO: 588585 - DNA, 4001 bp, Homo sapiens
cagcagacatttgttgaatgaatgttatcacggacagggaatacggtactagtgcttgttgaactgcacgccagatatgtgaaaaaacattattttatcctcacaaaaaatgtacaaagctaagaaatggcagagctaggattcaaaccccaaactgtctatctctccaaagcaattgctcttccaagtatgcatgatgttccctaccttcaccatcgctacgtacccacctactctctgcttcaatgcctggttaaaaacaaaataaaccacccttctcccagacgtctttcctactcactcaggacaggagtgcctgagtccagcccttgatcttccacaatacgttaacaaatcatcaccaactgggagaggaaagggtgcccccttggtagctgagaactgaacagcctgttgggtattctgcagatggtggggtgaagtcctcagctccttcttctcctgcctttccccacaggtgcagtgcctgggcccttcctgcctctcttccttcttcaggatccaaagcctttttagttctccccattctaaacccaaaataatctcctcaggcccattacttctctaacccagtgaatggtgttgaaaatgcactcttccattatatcagtgagacctttgtattttaagcatctcatcaaccattagggctggcaagcatccccatgccctgaaacacaagaattttgtgagaagggataatggcattttaggaggcccaatcacctgaccctccatcaatctgaatatttttggcggcctgggagtaaaaagagacaacctataacatccctccccaccccctgccccagcagcctttgtcccctagcccgggtctctacgggagggatgaaatctggcccagcaatgctgcaggggagggatggtgaaccctggtgccttcctctacatcttcctccaggacttcagaatccttcttctcccccttgtccatcccatgtctctctctggccctggactcccacagccatcctcaatcctaactcagaaactatgttttttaattaatattcagcaatttccttggaatacaatcatctgctctgacatgctgaaaggcacactctctggccctgatattatcctacctccagttttaaatgtatgacaaatatatccctgcatcctataactactctcctcgatactgcaggaacgtctgtaatgttaaatgttatcacgcctaagaaatacccaacctcctgaatcggaatagggagactaaattcttcactgtttcgtactcctaaataaagattattcatgcaatttacagtaactacctcacagcgccagggtgatgattcaatgataattcatgccaactgtttagtacctagggcctggtacatacagagtgctcaaaatttagctgttatcatttacatacattatctttcacaatagtacctgagggtagatattataccacgcccccccgacccccgcctctaatttacagaaacagtagccccggctcggagtaaaggagctttcccaaggtcagtcaagcaaggatgtgatgctcggccttcatcctgcaagtgagggatccctcccgttacactctggacgggcggggcactggaggtcttaaaggagacaagtatggaaaagcgccgagcacagtgatcagcacacagtggggacgccgggatgggaagaccgcggtactgcaggtcacctggattccccccgagcagctccccgagcccgggagtccaaagcccaccccgctcccagccgtgggcgcgccactgagtaccccagaggcccgcgccccggggctttgtaggcagcaggccggccctactcaccgagtcccatcgcggcgcgcagaggcggccgcccggcgcccagcctgcaaggccggggtcgcagcggctcggcccgaaaaccctccatgccggcccccggccccctctacgcccggcccgcgccccccacccccgcccccgcccggctgcggcccgcccggaaggggagcctcctacctgcagcggcggcgcggcagccgcggcgaccgggggaggggccggcgaggcgcgagggcgggcggcctgggctcctctcgcaagcagggcggccgggagggccgcgggctcccgaacgccgggcggcggcggcggcggcggcgcgcccccggccggccaggccccgccgcgcgcgccgcggccacaaagcccggacgccgccgccccctcgcggaccgcccgccgcctgccggtccgtcggcgccgccgaggagggcgggagcgcggccccgcgccagtccccacttccccgagctgcggccgccggcctccaggggactggggcggggcgcggggtgcccccccgcccacctgcccgtccgcaccgaccccgctcctgacatcctcgggctgacgtcctcgtgctgatttagttgccttttttccccacctttgcagaggagctcctgaagcggcccgaaaaactgttttatttctatgaacaacaaaagaatacatttgtcacacgggatttggcggccatgaacacgagttagttcagtccaggtcccccgactgaaataggcccttttcttttaggactccttgatacttgggacagcgaatccccctatgctgagtttatcagaacttctgttaatttgtggaacgtgcctcccccaggagagcgactgtgctcactggagcccaggacctgtctcggacactgtgctgactcatttggaattaatgcgtgtgtaaatgcatgcacaacagctcaaactgtcgggacaagccaccctttgctcctcccgcaaacagagtggctggatgtttcttttgccctggatccattgggaagactccaaccccagagaaaggcagagaaggctttttaactttttttttttttgaggtgaaattcgcataacataaaccacttaaaagcgaacgatttggtggcatttattacattcataatgttgagcaaccacttctatctagttctgaaacatccatactccattaagcagtaattccccagtccctccttcctccagaccctggcaacgactcagctattttctatctctgtgagtttacttttttctgggtatttcatataaatgcaaccatacaatatgcggccttttgtgtcgtttctttgacttagcctgtatttaagattcatccatgttgaggcgtggatcagtacttcattcctttttatggctgattaatatcccattgtatgtgtatattataatttgtttattcattcatcccttgatagatatttgggttacttccaccttttggctattgtgaatagtgctgctctgaacatgcctgtacacatatttgagtacctgttcccagttcttttggatacatacctaggagtggactttctgggtcatagggtaattctatgtttaacttttccaggaactgccaaaaagttttccacagcagctgaatgaatcattttacattcccatcaccaatgtttgagggttccaagtttccacaaccttgtcaacacttgcaattttccgtttttgtgttttaattccttgaacatttttgagactattgcttgccctcccaactcccactatccatagccctaaagtaaaaactgatctaggttttcactatgtacaaagaatcacgcaaccctttctttcttccctcaaaaaacaatccagggcagaagcaccaataaaaataaagaccctaaactaagagctatactggtcctcattctttttcttttctttttttttttttttttttgagacagagtctgctggagtgcaatggtgcaatcttggctcactgcaacctccgcttcccgggttcaagcaattctcctgcctcagcctcccaagtagctgggactataggcatgtgccaccactcctggataatttttgtaattttagtagagacaggatttcgccatgttggccaggctggtct

SEQ ID NO: 588586 - DNA, 4001 bp, Homo sapiens
cctgggcaacacagtgatactccatctctaaaaataaaaattaaaaaattagccaggcatgagcatctgtaatcccagctacttgggaggctgaagtgggaggaccacctgagcccaggaatctgaggttgcagtgaacaatgattgcaccactgcactccaacctaggtgaaagagtaaaacgctgtctctttaaaaaaaaaaaaaaaaaaaggctaggcatggtggctcacgcctgtaatcccagcactttgggaggccgaggtgggaggagcacctgaggtcgggagttcgagaccagcctgaccaacatggaaaaaccccgtctctactaaaaatacaaaattagccaggtatcatggtgcatgcctgtaatcccagctattcaggaggctgaggcaggagaattgcttgaacccgggaggtggaagttgcggtgagccgagattgcgccgttgcactccagcctgggcaacaagagcaaaactccatctcaaaaacaaaaaaaaaaagaaaaaaagaaaaagaataaagtggcagtgatggaagaacctctcttccaagcctcaacctctctccttagcatcaaacacatttccaattatctatcagccacctctgtgccccactatgggtacctcagaaaactccaactctccatagccaaaaccaaactaattattccccatacaccaaaatctcctgatttctgatgatgtcagccacatcaacttggcttcccaaagcagaaatgtaatcttcaatcacatgcaactaattaacaagacctatggtacattttacccaaacatctgttccctcctctcccattctcactgcccatgtctgtggacagagctaatctctaaaatggtctcccaaacttccataccctcttccacacaactacagggatcttcctaaaacacagtgatcaagccacaggcctccttgtaaacctcagacgtctctcccactgcctaaacgataaaagtcccaactcttcacatggcattcatggcctttccggatctggtcctgattatagcacccccaccagcccctcattctctccatgtattttcaacctaaccagaccaaactcaacacgcggcttcctttggctggaatcctttaccccaaggccaccaagggcccattttcaatctctcttttttttttttttttttgacacagagtctcactcccaaagtgctggcattacaagcgtgagccaccgcgcccggcccattttcaatcttcaaagcccaactctcatgcaatttttgttaagccttcctcaattaatacccagtctgttatgtttattttctttataacggcttccttctaaaatgggtttgaagcagcttacaaattacacacacactgcaactagatttttttttttttttttttgagagagagaggagagactagcagggcaaagataagacaaaggtaaaagagatcaaagttaggtggtaaaggagcattcaaaacctgtgtcatagctgggcacggtggctcacgcctataatcccaataccttgggaggccaaggtgggcagatcacctgaggtcaggagtttgagaccagcctggccaacatggtgaaaccccacctctactaaaactacaaaaattagctgggcgtggtggtaggtgcctgtaatctcagctacttgggaggctgagacaagagaatcgcttgaacccaagaggtggagactgcagtgagccgagatcatgccactgcactccagcctgggcaacagagcgagactgtccccccccaaaaaaaaaacaaaaacaaaaaacaaaaacctgtgtcataaggtctcatactcaccttgttagatatagattggccctgagttcccactggctcagaatgagttactcttctatgagctcactgacagttgtacatgactgtactgtagcacttcccatattttttgcaatttgctctttgcgtccatctcccacactggactgggaaattcctaggggaatacataatttctgactcatcgctgtatccccaggatgtaacatatgactcagcacatgactggtgctcagcagacatttgttgaatgaatgttatcacggacagggaatacggtactagtgcttgttgaactgcacgccagatatgtgaaaaaacattattttatcctcacaaaaaatgtacaaagctaagaaatggcagagctaggattcaaaccccaaactgtctatctctccaaagcaattgctcttccaagtatgcatgatgttccctaccttcaccatcgctacgtacccacctactctctgcttcaatgcctggttaaaaacaaaataaaccacccttctcccagacgtctttcctactcactcaggacaggagtgcctgagtccagcccttgatcttccacaatacgttaacaaatcatcaccaactgggagaggaaagggtgcccccttggtagctgagaactgaacagcctgttgggtattctgcagatggtggggtgaagtcctcagctccttcttctcctgcctttccccacaggtgcagtgcctgggcccttcctgcctctcttccttcttcaggatccaaagcctttttagttctccccattctaaacccaaaataatctcctcaggcccattacttctctaacccagtgaatggtgttgaaaatgcactcttccattatatcagtgagacctttgtattttaagcatctcatcaaccattagggctggcaagcatccccatgccctgaaacacaagaattttgtgagaagggataatggcattttaggaggcccaatcacctgaccctccatcaatctgaatatttttggcggcctgggagtaaaaagagacaacctataacatccctccccaccccctgccccagcagcctttgtcccctagcccgggtctctacgggagggatgaaatctggcccagcaatgctgcaggggagggatggtgaaccctggtgccttcctctacatcttcctccaggacttcagaatccttcttctcccccttgtccatcccatgtctctctctggccctggactcccacagccatcctcaatcctaactcagaaactatgttttttaattaatattcagcaatttccttggaatacaatcatctgctctgacatgctgaaaggcacactctctggccctgatattatcctacctccagttttaaatgtatgacaaatatatccctgcatcctataactactctcctcgatactgcaggaacgtctgtaatgttaaatgttatcacgcctaagaaatacccaacctcctgaatcggaatagggagactaaattcttcactgtttcgtactcctaaataaagattattcatgcaatttacagtaactacctcacagcgccagggtgatgattcaatgataattcatgccaactgtttagtacctagggcctggtacatacagagtgctcaaaatttagctgttatcatttacatacattatctttcacaatagtacctgagggtagatattataccacgcccccccgacccccgcctctaatttacagaaacagtagccccggctcggagtaaaggagctttcccaaggtcagtcaagcaaggatgtgatgctcggccttcatcctgcaagtgagggatccctcccgttacactctggacgggcggggcactggaggtcttaaaggagacaagtatggaaaagcgccgagcacagtgatcagcacacagtggggacgccgggatgggaagaccgcggtactgcaggtcacctggattccccccgagcagctccccgagcccgggagtccaaagcccaccccgctcccagccgtgggcgcgccactgagtaccccagaggcccgcgccccggggctttgtaggcagcaggccggccctactcaccgagtcccatcgcggcgcgcagaggcggccgcccggcgcccagcctgcaaggccggg

SEQ ID NO: 588587 - DNA, 4001 bp, Homo sapiens
cgctacgtacccacctactctctgcttcaatgcctggttaaaaacaaaataaaccacccttctcccagacgtctttcctactcactcaggacaggagtgcctgagtccagcccttgatcttccacaatacgttaacaaatcatcaccaactgggagaggaaagggtgcccccttggtagctgagaactgaacagcctgttgggtattctgcagatggtggggtgaagtcctcagctccttcttctcctgcctttccccacaggtgcagtgcctgggcccttcctgcctctcttccttcttcaggatccaaagcctttttagttctccccattctaaacccaaaataatctcctcaggcccattacttctctaacccagtgaatggtgttgaaaatgcactcttccattatatcagtgagacctttgtattttaagcatctcatcaaccattagggctggcaagcatccccatgccctgaaacacaagaattttgtgagaagggataatggcattttaggaggcccaatcacctgaccctccatcaatctgaatatttttggcggcctgggagtaaaaagagacaacctataacatccctccccaccccctgccccagcagcctttgtcccctagcccgggtctctacgggagggatgaaatctggcccagcaatgctgcaggggagggatggtgaaccctggtgccttcctctacatcttcctccaggacttcagaatccttcttctcccccttgtccatcccatgtctctctctggccctggactcccacagccatcctcaatcctaactcagaaactatgttttttaattaatattcagcaatttccttggaatacaatcatctgctctgacatgctgaaaggcacactctctggccctgatattatcctacctccagttttaaatgtatgacaaatatatccctgcatcctataactactctcctcgatactgcaggaacgtctgtaatgttaaatgttatcacgcctaagaaatacccaacctcctgaatcggaatagggagactaaattcttcactgtttcgtactcctaaataaagattattcatgcaatttacagtaactacctcacagcgccagggtgatgattcaatgataattcatgccaactgtttagtacctagggcctggtacatacagagtgctcaaaatttagctgttatcatttacatacattatctttcacaatagtacctgagggtagatattataccacgcccccccgacccccgcctctaatttacagaaacagtagccccggctcggagtaaaggagctttcccaaggtcagtcaagcaaggatgtgatgctcggccttcatcctgcaagtgagggatccctcccgttacactctggacgggcggggcactggaggtcttaaaggagacaagtatggaaaagcgccgagcacagtgatcagcacacagtggggacgccgggatgggaagaccgcggtactgcaggtcacctggattccccccgagcagctccccgagcccgggagtccaaagcccaccccgctcccagccgtgggcgcgccactgagtaccccagaggcccgcgccccggggctttgtaggcagcaggccggccctactcaccgagtcccatcgcggcgcgcagaggcggccgcccggcgcccagcctgcaaggccggggtcgcagcggctcggcccgaaaaccctccatgccggcccccggccccctctacgcccggcccgcgccccccacccccgcccccgcccggctgcggcccgcccggaaggggagcctcctacctgcagcggcggcgcggcagccgcggcgaccgggggaggggccggcgaggcgcgagggcgggcggcctgggctcctctcgcaagcagggcggccgggagggccgcgggctcccgaacgccgggcggcggcggcggcggcggcgcgcccccggccggccaggccccgccgcgcgcgccgcggccacaaagcccggacgccgccgccccctcgcggaccgcccgccgcctgccggtccgtcggcgccgccgaggagggcgggagcgcggccccgcgccagtccccacttccccgagctgcggccgccggcctccaggggactggggcggggcgcggggtgcccccccgcccacctgcccgtccgcaccgaccccgctcctgacatcctcgggctgacgtcctcgtgctgatttagttgccttttttccccacctttgcagaggagctcctgaagcggcccgaaaaactgttttatttctatgaacaacaaaagaatacatttgtcacacgggatttggcggccatgaacacgagttagttcagtccaggtcccccgactgaaataggcccttttcttttaggactccttgatacttgggacagcgaatccccctatgctgagtttatcagaacttctgttaatttgtggaacgtgcctcccccaggagagcgactgtgctcactggagcccaggacctgtctcggacactgtgctgactcatttggaattaatgcgtgtgtaaatgcatgcacaacagctcaaactgtcgggacaagccaccctttgctcctcccgcaaacagagtggctggatgtttcttttgccctggatccattgggaagactccaaccccagagaaaggcagagaaggctttttaactttttttttttttgaggtgaaattcgcataacataaaccacttaaaagcgaacgatttggtggcatttattacattcataatgttgagcaaccacttctatctagttctgaaacatccatactccattaagcagtaattccccagtccctccttcctccagaccctggcaacgactcagctattttctatctctgtgagtttacttttttctgggtatttcatataaatgcaaccatacaatatgcggccttttgtgtcgtttctttgacttagcctgtatttaagattcatccatgttgaggcgtggatcagtacttcattcctttttatggctgattaatatcccattgtatgtgtatattataatttgtttattcattcatcccttgatagatatttgggttacttccaccttttggctattgtgaatagtgctgctctgaacatgcctgtacacatatttgagtacctgttcccagttcttttggatacatacctaggagtggactttctgggtcatagggtaattctatgtttaacttttccaggaactgccaaaaagttttccacagcagctgaatgaatcattttacattcccatcaccaatgtttgagggttccaagtttccacaaccttgtcaacacttgcaattttccgtttttgtgttttaattccttgaacatttttgagactattgcttgccctcccaactcccactatccatagccctaaagtaaaaactgatctaggttttcactatgtacaaagaatcacgcaaccctttctttcttccctcaaaaaacaatccagggcagaagcaccaataaaaataaagaccctaaactaagagctatactggtcctcattctttttcttttctttttttttttttttttttgagacagagtctgctggagtgcaatggtgcaatcttggctcactgcaacctccgcttcccgggttcaagcaattctcctgcctcagcctcccaagtagctgggactataggcatgtgccaccactcctggataatttttgtaattttagtagagacaggatttcgccatgttggccaggctggtctcgaactcctgacctcaagtgatctgcccacctcagtctcccaaagtgctgggattacaggcatctcattcattattttaacaataatttgtctgatgtccaggaggccttgaaattgtccagagagcctggaaactaaaattataccaggggagttgctacaatgtgctagcaaacaagctatgataccacaccgaaagccaaggctgtacatcat

SEQ ID NO: 588588 - DNA, 4001 bp, Homo sapiens
gctgggtccttgaagcaccttatgaacaaccctctgtcccccaccaggaaacatcctctgcttcaatgtctgtcttctgcaaactgcaattaatttttatataaactggccacttcctgtctgaaaagaagcaggaatttctggaaatttatctatgtgcatttccaccctccccttgcctagagacatttcaatagcccctaaattccaaccttttgaagctatgacacactatcattgcatccttcattatatgacagtgtttttttccccaagaattatgtatgacatatttttctctttttaatggaagtatattaaacttaaagttaatttcttttggagcttttcaagatccctggggtgccacaaaccaaaactgtggatcacaatagtataatggcaaaaaatgctggtttttaatctgggtgaatgctaaaacaggcgtttatcatattattctttgcactttttttaaagtttgaaatagttcttttttttttttttgagatggagttttgctcttgttgcctacgctggcgtgcagtggtgctatcttggctcaccacaacctctgcctcccgaattcaagcgattctcctgcctcagcctcccaagtagctgggattacaggcatgcaccaccacgcccggctaattttgtatttttagtagagacggggtttctccatgttggtcaggctggtctcaaactcccaacctcgggtgatccgcccacctcagcctcccaaagtgctgggattacaggcatgagccacagaacccagccggttgactcttttaatatggccttttgagtggcctactgcaatgctttgcaaataataaggacctccaaaaatattttttgaaaaaagtgaaattgagtggatgaatacaaatcttcatacaattctctttaacatatttgagacaggctgataggcaactgcagcacctcactaataagaactccattaatccagtcccttatttttctttatgtttaagtaataataaagtctccaagagagctagcacaatgatgtaaacaagtacttttgtttttatatattactttttttttttttttttttttgagacagggtctcactccgtcacccaggctggagtgcagtggcgcaataacagctcactgcagcttccacctcctgggctcaagttatcctccagcctcagcctcccgagtagctggaactacaggtgcatgctaccatgcccagctaattttttctattttttgtagaaacaggggtctcactttgttgcccagggtggtctcaaattcctgagctcaagccatcctcccgcctcagcatcccaaagtgctgggattacaggcacgagccaccacgcccacttctataagactttgaatgtcctatataatcctgagatcttgaattaggaaaattggatttgatacaaaagtttcatttttagaagttccctcaaagtggagggttttaaaattaaaatgtcaaacagatacccagtgagagcgtgcacactggcatcaggaacggataccttgggctgaggcgtcggggtggtattcgggctcctcctccggggggctctgcaggaagtagagctgctccggcagcatgctggcgatcttctccttccctaggacgtgggtactcaggagagggctgacgctccgtttcactttctctctcctttcatgggccataatttttttggtccgagccttgatgttctcccagcacttcttcagctgtttgaaatcccgcagggacacgctgggctgagagttgtattcgtgggccagcgcctgccaggtacgctgcttaagggcaatagttcgcgcatcacttttcttacattccagcacatatttatacttttctactaaagccagcaggatgctcttttccaattctgagaagtatttggcaggctttataatttcgttgttttgcattttccactgtatttctcctggccgctagctatcctgtaaaaggaagtttgaagcaatgattaccaactccagcaaaaacaatgcctataaatcactgaagcttaattcctgacttgattcccttgtctgaaatacagtactttcttttccattaaggttgaattatgatattcaggactctggagaatatttagaaatgtactaggaatggggttttatttcaaagtggattgttgtggctatactgtgactatctggtatataacagcaaaaaaagaaaagttgaacattttttttttgaaacggagtctcgctcttgtcacccaggctggagtgcagtggcacgacctgagctcactgcaacctccacctcccgggttcaggcaattctcctgcctcagcctcctgagtagctgggattacaggtgcctgtcaccacgcccggctaattttttttttgtagttttggtagagacagggtttcaccatgttgggcaggctggtctcgaactactgacctcaagtgatctgcctgcctcggcctcccaaagtgctgggattacaggcgtgagccaccacgcccggcctagactctgatttgttaattgatttttctttaatattagggaactgattattcccccaaatcatgttagccagttttagaactaaacagctttccaaaacttttgtcacagctgaggacaaaagaagccaccgtgtactcaaatataaaatatgatgtgggaggctgaggcaggcggaccacgaggtcaggagttccagaccagcctgaccagcatggtgaaaccccatctctactaaaaatacaaaaattagctgggcgtggtggcgtgcgcctgtaatcccagctagtcaggaggctgaggcaggagaactacttgaacccgggaggtggaggttgcagtgagccaagatcgtgccactgcaatccagcctgggtgacagagtgagactccatctcaaaaaaaaaaaaaaaaaaaaaagatgtacagccgggcacagtggctcacacctgtaatcccagcactttgggaggctgaggtaggtaaattgcttgagcccaggagttcgagactagcatgggcaacaaggcaaaaccctgtctctaaaaaaaaaaaaaaaaaaaaaaaaaaagggaagaaaaagaagaaaaaaaaatagccaggtgtggtggcatgcacctgtaatcccagctacttgggaggctgaggtaggaggactgcttgagcccaggaggtcgaggctacagtgagccatgtttgcaccaccgcactccagcctggatgacaaaggagacactgtctcaaaaaaaaaaaaaaaaaaatttgacgttttcatcactctgtggcatgtacctggagcaatggcaacctcagttttttcatctttaaaatgaggggttggagtctgtgatccttcaggtatgcgggctgttttttaaaatcctaagtaaacaatgtatgtaatttcagatgtgaaagggcctaggcacttaagagactgagtccagtgtccctctttacattcctcaagtctctttccagctgagagaagaaagggtcagaaaggtgaagtggattgcacaagatcacaaagatggtgacatagaaagtccagagcttggactgccctaggagtctggtattcttagaatcattccacagctgtttctcggcctcttgccttgggtcactccaaatgattcaaccatgattcccataagtcactttgtcatcctctacagtgccgggtcagcatgtttcacacaacaggtgcttagtgaatgtcttcttccagtgaagtgtatgaaacctatgtgtgttttaggactgcacgctattcccatatctttcaatcacagaaagcttcctataaaattaacctctcaaatatgttacggcaaaaatgtagctaagcaacactgactgcggcaataaagtaagcattatcgttcccctagttgggaagggcctacgtattcccagtccttcttacattctccaagcctc

SEQ ID NO: 588589 - DNA, 4001 bp, Homo sapiens
tttctcagaccttcaacctcttcctgtttcttagatgcactgacccctaaactcctaacagcttgatagaactccttccccacacctacctactaggaccctgtgatacactgatttttgattacttcatgctacctagacttgactgcctcactcttaggttattaggtacttaatactgctatcttcagctcacatctgtggtagtacccattgcttcagaaaaacccttaatcacagctccctgccctgtgacttttccctgtcttcctgaacacagattgttttcttctcattcactaactatatcctgtcattggcttttactcctgctagcttctgatgcttctaccttaatctttttcttccatagtgtccttgaagtggagattgcattttgaatttgtaacgtcccgagaaccaggattggtactcctaccccctgtggaacagcccgaacctaccacctggacaggacctgagcaagtacctgtagacaccttcagctgggacctgcccatcaaggtgctgcctactagccccaccctggcctcatatgctgccccaggccccagcaccagcaccataaccatctgaaactggcccaccctggtgctagttccttccggatactgagaactcagcacctggactctaatgggacccactttttccacctggggtccaatgtcgtggacagtgagagtcgggctttcagctatagcattaatttatttgttcagaatacattggcagctgctagtggtttccctggaagtggcagcagcagtgagcagtcagcagatggatgatcagttgagtttagctggagtggggagcaggagccccaggaacaggggtgttggctgagccccattctgggtcaggccctccccctttgcagggcagccgagggtcagatttttgcaccaaggagaactggcaggttcctgcctcctgacgtacctcacacccagccgggaagtcgatgggatgctgggacctggggaaccaaggataggggaaggagtcagcacagtgaaaggctgcctttatccctgcccacatgttccctctctcacagttttccccccacagagcccctttcagtggccccttggtcctcctaactaagctgtcacctaccatatgtgggcctttttgttttataacaggagtattttctctccaggtccaccccaacctcccctgatttatagcctgaagccttatctttcacactagtgttggtcccttcaggtttggcccatcttgtattgctcttctgttcattcttacatcacagcaatctagtcactccctggtcatccctcagtcactcatatcagagtcattctctctggccatctttggtcactcacgtgtcacagcagcccacgccaacaggatgcagacaggtgcaatggaaacagtccttgcggagccaagactcacccagggtaaaatatttcccctcatagtgacagggggctagggaagaacgggaaatgttagtaggtgtaggagtgctgatgagaggcagaggctcttctggtctggggtggagacagtaagtacgcactatccccgtatttagtttgtctttcctgtttcacagctggaggaagcctgggtattttgacacgggatcatctgtaaggccccatcctccctgtgccctctctgctgctcctccattcctaacgcttcaccccactttaccttgagcttggaagtagcacttgctgtagactcctgggtgctggaggagtagagacatcaccaagcagatgatcccccagcctcctaggatccccttggcctgtccagcccagagcatccttagggccattgctgctgcacagccctctcagacccttcttggcctctgctcagctactctggtcttgactccttgactttgctttgcgttgctccttgagtcttagtttctgtctttctcccctgggctcctgtctcacactatctccctgccctctgctctcacaggctggggatgtttataaagtgaggaccctggccccctgctgagtagagctggaaaagttgtaactctgtttcctgaggtgagggcatgaaaacaagaggtctagctttaacaagctgtgagagctgattcatgccccggcacagctagagggagggaggtggccatggagggggcactggactgggcacttccccagcaaggaggcaggaggggcgagggcccccaggtggtccccagatctcttccctgacctggagagaaggaagcattccaccttccccctttctcccccactgccaccaccaggggtgtgtatgctgggatccctgcctggaccggagggaggcatttcctggggatggttaatcctgtgccccagccaaacccaggagctgcaatagggtgcgacggccagaagctccaggagagtgagcaggcacctggagtggagactgtgtttccctcagatcctagggcagggtttccctaatgtatccaagaaatagggctgcccctcagagatggtggggagggtctcttttcctcaggcattccagaggtgaactgtccattgcttatcaccttcaaacatacagcagatgtgggatcaccccacatctggggatggttctttcccctttcaaagaggagcatctctaagtgccctgatgggatgaatcactccaggttcacagaggtgtcctctctttcctcccatatataatggagtgaggtttttaggaatttatcatttggcatcctctgagtttcccacaggttctggaggagcccaggatggattattgagagcatgggctgtagagacagtcttcttggattcagatcctgactccacttagctatgtaacctggtcagattacttcacctctctgagcctgtttcctcatctataaattggggatagtaatgccaactcattgggctgttatgaggattactgagataatgcgtgcagtgctcttatcaccatctctggtgcgtaagcgtcaggaaatagcagttgctgtgattggggctaaagctctgaggcaaaatgggcgacattattttctttgaatgacattaagcagtttgtgcatagctgagggcttctattggggatggctgtctcctggcatagacctctgcacctttcacactcatactccttgtcagcagtccccaacctttttggtaccagggaccggttttgtggaaaacaatttttccaccagtggatggagggggatagcagcggggagatgattttgggatgaaactgtttcatctcagatcatcaggcattagattctcataaggagtgtgcaatctagatcccttgcatgcggagttcacagtggggtttgcactcctgtgagaatctaatgcctctgctgatctgccaggaggaggagctcaggcggtaatgctcactcgcctgccgcccacctcctgctttgtgctcccgcttcctaacaggccacagactggtactggcctgtggcctgggggatggagacccctaatccatgtcacctttcccacctctttcaaaaacaggtacctccaggaacattttggttttggcccttgtattgacttctgaatgtctagtttgagaaactgttcccaataagccttcttcccccagatctgcaccctcgcctctaccctaggacaagatgtccttttctcatcatcctgccaggctaactttaagtctcctgctttttctcacttggatttggatccatttcttcctatttccgctcatgtgaactctccagttctcctttctcaccactctcctgctagccatctctttggcactaaaggccctggtcaaattggatttctttcatttttccacacttcaaagacccatgttctaggtattctccatagggatagtctctttggcatttatttggtttttctacgttttcagtcccatttactccaagactcactccctgccacctagtgcat

SEQ ID NO: 588590 - DNA, 4001 bp, Homo sapiens
aatgttgccttagaagtctggggaatacggtgctggcatcatggaatctctacggcaaagctgtcatctgttctaaattaaaagagaaatcagcaggcagtcctagcaccatatgtacctcttaattttatatccagaagcttgccaagaccaaaaatacacactattcaatatttacatcaggtctctgagaatcccattgcccattctgcacttaaatgcactgcattaatttgaagggaaaccctgtggcagggagaatgctaaccagattaaagtaagactgttttaaacaccatttctccatttttaatggcgcttgaagtgtattcctgcaaggataaggtgaaaagttgtggcctaatgatacctaacacaataacttaataatttttggggaaaagatcattcaaaattaatctcagttcccccacttataagcactaccacttaataagcttctaccatgtgcaacatagacaatataattctagccctcctagcaaattctgcagtaaaattctcagtttatagatgagcacctaagagaagtcacatacttcacacgagtttcatgaaaaccatttctgccttgtttccgccaaacaatgaaggcaggggagaggccttctataaatatttgctggatgcaagattcttttcaaaatgacaaaataagtttcatatataagtctggatgcaacacccttcaccattcctctcattctaagtggctcatttaaacctgcaagggcgtaataaactaatctggctgattacacactgaccgcagaaattcgccttctcccgggaaaactgcagtcgagtgtagggaatcgagatgctttggagaagatcgcagaccttcctatcccataggccaaaaatttctaaaaatcaaacaagaacgcattcttagccagtaataaactgcctagaagaggtcttaagttttatcatcaatttttctttacgtgctgtaattctctctcggaatactaaccaggagagaagtgtttaaaaccccagggaagccagctgctactctcagaactcgtgccctcctcagcacaaagcttcccaccgcacaatgaccccttgtatcaaggcctctcagggcctagggcacaaggaaattgaactctaacttgcaaggctgcaaaacaaagcagtttcaagccagaggcctccaaacagtgcagccctaaaaacggacgcctgtactccttttcgaagaaagtctcagaattcttacagtattacgctgctggggaaaacttcagcgcggagaaggcctacgtttggaggaaaaagaagccggaagcatacaaaagagcaagtaagcagttctcccacgtgggccgcaggcaacaagcagagtcagagagcggaagctggagtcccgcaaggcaccaggagacggtcacagaagctgcaggcgcccggacacctcctgactccagccgggtgtctttcttggaagaagagtggttctcaggaatggtggtggcatgggtgcagcctctcccatccacgacctctctctctaaaggggtgcctacgccctacagggtgcgggtgcagataagccaaaaggtggtgtgtgtgtgtgtgtgtgtgtgtgtgtgtgtgtgtgtgtgtgtgtgtgtgttggcggtgcggcagggggatcatttgcaagcgtaccctctcctcgcgcggcaagtgagtcccgagtgccgcgccccagtccctccccgcggcggcaagggacgcacgggccgggcgcatggcccccggaggcgcggtcccccggcgcgggggcgagaaggcatccggcagggcgaaccgctgcggctgggagggctcatctcaccttcacggcggtggtggtggtgccagaggccatgtctgcacgggaaaggaatctgcagtgggcgagcgctcgggactaagggaaccaagcgagccacagagcggtggctgtgccaacctcactgcgcgggagtgagcagtgcggagaccaggggcgggccttgactcctcctcttcctccccgggacagctggattggctgcttgtgtgggatctcccccgccaccccttccccaaatcgaagttcccgcgttccgccccttttgcagacctttccggttctccaggtttttgtcgttttttttttttttttatccccagttataactaacggataatgataataatggagaccatttatagagcgctgtattgttccagactgtgtgttttgcactttaattggcttacttaactttcgctaaaaccttataaggaagagcagcactccctgcttggcccaatattagtggcgtcggaggcctcagctgcaaaatctggcccggcggcattccagaagttctcgcgggagggagaatcctcaccaaggcgggtactggccggccacggagattctcttaggcagctaacgcggggcggccgccgcggcgggggcaagatttgtccttcctgcggctgcgaacccaccgcgggtttgcgtatttcccttgattcctggaggacagagctgggatggacttgacccaagactcagggatgacgaaagggaaataaacagagtaacgtagtactggataatctttctgatttacgaactatgatttactcatcttcaatttgaggggccgcttttagggggttgagaccttgcacaactcccagtctggctctacctggctgggggcatctttaacccgttctacgccggagcggcatcgaatacacctggattcagaatccaaactcaggtctccgtcattcaacactagcaggacgcacacacacacacaccacgagccctttacagggataatccctcatgcttacagcccccgtcccttccctactggggtaatccaatttaaccttccttgatggattaagcgttctgaaacaaaataatgggtggcaaggatcttaagggtggactctgagatgtagaaatgctgcaaattagcctggacgtgggaggagggccgagaaaggggatgctttcctctttccttacagcagcaaaacacggaaacaaaacacaagtacaatttaattcaaaataccactgtgtgatgttagcctggatgctgctcatagaacctatttacttaaacagtatagactttcgtcctcacattactataagctttaggtctaaattttctcacaatgtaaagttttctttcttctgttacaatcatctatttcttttaagttataaaatgcaatggcaaaagaagaatgaaagtagaatccgggtgctcctttgaggaataggagacagggaatccttcgcggatgaagacaatgtagctttctaggggcctttctgccgattgctctattgaggagcaggaagcccaccactcagaagtgaaccattgagggcacagggatgccctaggctttatggccgctacctaagtaggggatcctagccaacttaagtgacttgatatggttaacaagtccagtttctactcagcactgcctctctgctaaaagttagacgttgtaaccaagttagatcctgtaagcataaaatacccctaggcataggagttggaaacttggcgaggaccaggctggacttctggacttttctactataacttgcaggttagggctcaagcatttgctcttgaagatgtgatgtctgtgaagaggaaattcttctaaagtttgaatttcatgtaaacttacatgtgacaaaatattattctacttttgatattttctcaaccacttaagattgtaaaaaagcattctcagttcaaagctgtacaaaaacaggtggagagctgggtttggtcgaggtcttgggccattgttttccgctcagggtagtgcctgaatcagacgaccccttgctacccagacttggataacccttgggcagtcctgtgggacagtgctttctttagtgcagtatctttgaaaaggtaggcagtaatatttttgccttatttcca

SEQ ID NO: 588591 - DNA, 4001 bp, Homo sapiens
taagcctatagaaggacttccagggacatgaaaggaaagggaaatgataaagaacttcaaatagcatagtctgccctatctacctttgaaataagcaactcttcactctcctattacttttcctaaataacctacaggctcttaaaaacagacctaaaataccactccaccatcccagtgtaaccttatcagtcaacagagggctatggagaattgcctaatgtgtaaagaatgccacggggagttatgggccacatccctcgtgttttacaaattatcctctacataatccaactgtgttcctatttcatttagtttatattcttctagtttttttcctatgtacataagtactcatttttaaaatacaggtgtcatttttaaaaataacactttatatgcatcagtgaacattcctacacacattcctgattttatgcatagaacaaattctttgacataaattttggggccaaaaagtttgtgaatttttaaatttcttaatacatactaccaaatctgcctttcaaaaatgttttatcaattaatatttctaccaacagaatatgaaagtgttttttcccaatccttaaattaacctctgggtataggttttaataactgccaacatttaaataggtgaaattagaattttattcttatttgtgttttgtaaactgcctgataatgacagtttcccacttttctactgtgaaggaatgttcaatttttttccttttaactgtaagagttttgaaaatataccatagatattatgcatttgccataaatatgttcctatttccaaaaatatgagtgccaagcgcagaataatatgggaacttagctcaatacacaatgccacacacaaaatattatattaaatcacttaagtaaaaagactttgtaatcaaacataggaaactacttatgtgactcatatatttgtattactataataataagaaaaataattgcctcattgttcattggaaaatcgctatcattgtgatctatatgtaaaaattccaatacacaaatcacattctgaaaagtttatatctactgtttaggcctttccaggctctccatataagcagaaaaaaccactgctactggttgtcagtttcttcttttagagaacaaagaagtgttttaaactagaggcttctgagtcttcttctagttctaacattttcaaagtctatgagagggcttcatgctaataaggctaatatgctgaaagggccttaccaatattaagtttcaaaggcaagaaatagcctaagctatgagccacagttcatattacatgaaatggttgagaagctcaaaataccgaaatgacagatagtactttggttaacagagaaatggttttatcctgagattgctgctaatacagaactccattgtattaatatatacaatagttaagatgtgacactggaaacctctgatatgacttttggcaattaaaagatgcaagagattagaacaagcaagctgaacacaagtgcaagcttacctggaatattaccacgcggaatttgtttttcttcattatttcctcttgcttgacttcaacttttttaacatgaatttgttgcttctccacccgggctttcacatctttaatgtgagcactaacttttcgggttttctcaaacaatttgttaatgatatgccctgtattgctatgcgactgtgaaagcttcaacaggtcaatctggacggattttatggcattttccatttccctgtgtctctcttctattctcttctggcttgcctgcacactgtccacgatggaggctactttgtccagcacagtcacaatggtaagagcagcgtcttggtcttcatcttctgtaacactcgacaggcgattctggtggattttatcagcatttgaagcagacccattatgttccattttatttatttctcagcgtaagatgtcctaaccacaatcaattctggcacttggagcaaaaagtcagcttgataacaggcaacagggttgtttaaagagttggaaaccccacccctagagaacggtcaagtatttataactacaaatacccatatgtgactgttctgcaatctgaacccttgcaaagcaccggggactgttccaaacatgcttgctgactgactaagggactcaaataagactgtgtgggtagaagagtaaagctttttaaaaaagttcactaaagccaccatgtaactaatattaaacctagaagccaaatgatcaaaaaagcaaactccaaatgttgggtaaagcttttgcctttagataatttcaatcagtatttgtaacagtaaaggggaattctgaaccgaaatctgctttttctactaatttcacatattaaatatactgaaacaccaatatcaaaaaatttggtaaataaacacaccaaaacagaggccatatagtgaaaacattatattataacatgcttttccaaacaaaatattaaaattaataatttttaacatattctttaaattctacatgcatacttttgaatatctaaactacatgttaaacagctgaatacattctactcacacttcagatctttaaacaccaacaatctatgaatattaatctattactacaggacaaatttggatatacgtcttggataaattttaagctcactttaagagcaccaatcattaacaatcatttttgtattttattcacaaacactgatacgatttgtttatttatgttaaaacaaacattttctttaaaaatgaatgtgtattaaagtagtttaactggtagaataggctttattccaatctgtttgttaaacagcctattttcacaatatctatatctacttttcattgatctgttccatcattactaacatatttgttcaaattattaggactattttttcaaagggaggaataatcaaattccccagtccatatatcttataaatattttacacctaatacacacagctttacagttcatgcgataggcagtgtctaaaaaatcagttactaaatctcaaaaacatttaaatatctatttaaacacagtgtcttctagattttttttgtaagaaaagtaatctgtaaacatctttacctttagttcatgcttggtcatttgctgtggtcattgtggaagaagtggatatgactttataaccatttgtgaagtagtccatctttgcaaaaatattacattccatgggtaaagaacaagtcttagaattaccatgtggtacaaatttgtgaaagcaatttctgtatttaaaaacataaaacaaagactactaaacagtccaaaactgtcgtagctgaatattctaaatacgagccaacagtactacactaaaaatgtccaaaaataaggcctctgaaataaatatttccattctttaaaaaaagacataataaatgtacatcacatggtcagtgtacatataaaagtcatcagtttaaaccattctggatgacgtatctgaagtaaaatgacctaggttttgcttctgtcgacgtcctctattgtttttggggcattttctgttgcattaaaaaaagaaagagagaaaaatattgttttgatgattttgttcaggatatttcaaatgtttccaaagtaatacacattttgcacataaagccacattgcaagcaattacatgaaagggaaatgagatggtatctgttgcaagacaagatgaagatgaacacaattcagactgctacctcctctacaaacctggaagttgagaggattagatatgtaatataggtactggcacaagcaaaactcattaccagtgtctatgctactatgtatgcatccctgacagatatcccacccttcctccagcctagaaactccctagtcacagtgactgataacatgaaacccctgacaggagaaaggactctggcctatgtactttccctgtgcattatgagaagacagctctaaaatgacaagaagagcttag

SEQ ID NO: 588592 - DNA, 4001 bp, Homo sapiens
caatagactgagaaaaaattgcttaaattttttgattttaaaacctaattctagtagtaaataaattataagaaatgaaattgggtgaatgatctggttagtttatttaaaagtcagggtgtttggctttgttatctctatgccactatatttcaatattttcaaaatagagatagtgtgcatttgaattaagggctttatttgtaaagtttggaaatgaaaatcaattctttctagaatataaattaagacttattcagatagagagattttgggggttttgtgtgtgtgtacaacaaatccttatttgaatcatcaaaatcaattgtcctgctctttataagactgtattttagtatttaaccctatcatttttatgtaactgcgtggtttagaaatatacaaataatacttaagacaacccatacgttcaaacatccaggtggggccttaccggacatccgttgtttgatcaggaagtattaaaataatctgaagccaatgttaagtctttctgactattattagctgtttgaaaagatctagagtctcttttatctgtagatgccttaaagtattcattagaaattaaatgtttaaatacatttgaagataccattatactcaagtaaaatggaaaaagagaagcaacaaaatgaaacaaaaaaatctgtgaaatcagattgtttgtgaagaaacccgcatcttatttgcatgtgaactttgaccttatggctccagaatttttagtgaaccagaaaatctaaagatacattttgcatctatatacagataccaccttcatttatctacacaatacaaactgtttcagtgctttgattaatataaagggaaaatgattaatttgaacatgtcctgaagcaaaaatctctttttactctatggtataacattaaatttgaaaactcttgtattgataccactcgatctgctttctcatgtctttttaaaaaaagatttcagtgatacccttagtcactttgcaaatcacagactttccagtctttctgatttcaaatacgctagtcccagtttcataatacactggccagaaactatatcactggacattcttgctactgcaacaggtgtttgtcagtttcttaagttgctttcctttcccctgaggtggtgttatttccggtacattccaaaggctctgaaaaaaacttttgcagtctcttgccaagccaaatcatgactccagcctcaaagttatttaaaatccattgtcttccgggtttgttacacaggcaaattgtgtacgtctttctgtatttccaatttttagcaactaaaatatttattaagagtttggcaaagctaaaactgaaaataaaagtgatttttattcagaagcaaatgctctggatgtctgagaatggggttgattctattcctggcaaacctgatgcgaaaaggttgtcatcatccacttagaccaccctgaaatttgacattcgcataaacaaaatagaccttgataacttgcagtgtacatgcttatgttttgccctagaagtcagagctctgcatgcactatgtggctaagccttttattgcagaacttcggagtaaaatattggtagagagaccatcaaccaattgcttatgtatataatttcctccctcatcatacatttcacccttacttcttcaagtaaaacccaagcccaccatactataaatcagtcttggtcatatctcatatacacacactttacaaccatgacaagacaacaagaagacacgattgctcaaaccaaccttttggaagtttctcagttccgctgaaggcaaccagagtaagaatatgtaccagtggaatgttgacgagctctctcatgattaatccaggctcacgcaggacgaagttccttctggacaacgcaaggaaaatggctccacagtttacattttaaagcatactttgttgcaaaagggttgtctgctaatgactgtttgtgtcagcagctccacaggctctaagtataatcaggaattctcagacttggctgcaatgatggacacagccagctggtgagcatccacgtaggccagtaatgcaagtgtagggctggaggaacaagggcaagaaaatccctttagaatcccttttaagacagtggcagaaggacaataccagatgccttttgcaaccatcgctgtattcccagaggtataggtgtcctgaccttcgaattcagcaccccacctctcccggactcaaaccagaaatctgggtctattcagtcttcagtcctccccatctctcaccccacccccactcccacattcagcccattccaattcctacagattttatcaaccaaatagtccttgtaccttctctctgtcttgggtcttaaccattctatatcttttttcagatagtccctcctgctcaaaagcctttaggggctcatcatcacataaaaatatatttaaacctgcctaatctgcctaatatgacaggctttactggaatctgcatgctttgttgtatgttagtattgtcttttacgatcctgtttttgttttttgttttttttttttttcagagtcagggtcttgctctgttgcccaggctggagtgcaatggggtaatcatagctcactgcaacctcagcctcctggactcaagtgatcctttcagagtagctaggactacaggcactgccactacagcaggctaatttatttttattttttggagagatgtggtcaggctatgttacccaggctggtctcaaactgctggcctcaaatgatgattccacctcggcctctcaaagtgctgggaatgcaggcgtgagctactgtgcccagcctcattcagcttcctttattcaacaacctgctgatggttccctgtatacagctttcctacctccatgaattgctcatactgtttgcttctcttggaatactactcccctcctttccactcagttcacacatctctcagcttgatcatcctctcctcctgggagaaaaattccatatcttcccaaagctgtgttacgtttgtcttctctgggtttccataatatactgtgcatatctctaccattgcaatgaccatattgttttgattttttcccctttgtgttggtgtcttcttcattctttggcctcgtgagttcatttatagaactttagagtcaggtagtgtgatgccgccagctttgttctttttgcttaggattgccttggctatatgggctcttttttggttccatatgaaatttaaagtagttttttctaattctgtgaagaaagtcaatggtagcttgatggggatagcattgaatctataaattaccttgggcagtacagccattttcacaatattgattcttcctatcatgagcatggaatgtttttccatttatttgtgtcctcttttattcccttgagcagtggtttgtagttctccttgaagaggtccttcatatcccttgtaagttggattcctaggtattttattctctttgtagcaattgtgaatgggagttcactcatgatttggctctctgtttgtctgttattggtatataggaatcttgtgatctttgcacattgattttgtatcctgggactttgctgaagttgcttatcagcttaaggagatttggggctgagatgatggggttttctaaatatacaatcatgtcatctgcaaacagagacaatttgactttctctcttcctatttgaatacgctttatttctttctcttgcctgattgccctggccagaacttccaatagtaggttgaatacgagtggtgagagagggcatccttgtctcgtgccagttttcaaagggaatacttccagctttttctcattcagtgtgacattggctgtgggtttgtcataaatagctcattttttttcgatgggttccatcaatacctagtttattgagagtttttagcataaaggggtgttaaattttattgaaagccttttctg

SEQ ID NO: 588593 - DNA, 4001 bp, Homo sapiens
taccactgcactccagcctgagtgacagtgagaccctgtctcaaaaacaaacaaaaaccaaaaaaaaagcagacagaaagaaactctaaaaataaataaataagctactcctctcattcatccgttaacaaacctctcataatgacccctaccgtttactgacttcttgccatgtagcaggcactgagctagacttttcttgcaaaatttcatttacatcacgccataatcccatgagatgaatactatcattagtttcactctacagatgaggaaactgaaactcagaaaagttcaataatttgtccaagggcacaaagtaagtaggaaagccaagacttaagctgagggctaattctaaactccctgcacataaccatggcacaacattccagttggaagtggtaaaaggtccctagcaggatggagacagggcaagaaaaatgccttgaacctaaattaggagtgtgacctaaagcctagaaggaaggaatgaaaaatatggattacagaaggtaagtttaggtttaaatgaaccagtaatcgccacgtcaactgcttcccatggggcttggagcccgggtcccaagcagaagcctcatctctctgaggccctatttaaagattctgagcatggtacagtatctccaaggaccccacatgatttctaacaagcaagaaaggtgtcaccatctactgtaactaaacatcctagcacattgagtttttcagttagtcaaggcttcacagagcttattttttaactctctaagctttcctggtgccgctgataagatttcccagccctgttaaaacgagatgagatccagccagctgtcgagaaatgtacaatgagattatactgagaaggaaccacgagagacaaaggcccctaagaggagctggtctgctgtctgcttttgtggcagcaatcggagtgggctctggttcttgggtgggggcaggaagcagggaaggggcaaccaccatttgccttttgccctcctgtggtcttcctcagtgccttgtgcaagaggtgttgaggggcagggaacagaagagtctcatctttcatggtgagaagggctgctgatttagaacagttgtgtgttggtaacaaagaggacaaaagatgctcttgggtctaccccgttccctggtgcctgcctctgaggatgtgatgtcccctggtgccatgcctcagctcttgtcccagcccctgctcctcccgtctcgctggtgttggagtcactgtagggtgctcgacgtgcccaccatgttcctggatgggtgctctgggtctcgggtacccaggctgggcatgtcaccttccagacaggtgcctgagggtttaggtgtcctctctgctgtgcccaggtcacagaggcagtgatgctcctggggcaggtgcacgttggtctgcacccacgtgaccagagagagcaggaccccaggccaggccggtcaaacgattgactgttcccagtctgtgcccaggtgggccgcctccctctcacgcgggcagaggtggctctcggcgcccctcacctgcccgggccttgggggcgctgctggcactcgggtcccccagcttctcccgcctctcgccgccaggccgagcccgggcaccggcagccgcggcgcgctcggggctctgcaaaggccgcccgggcctgtccccgccgcgggccgggcacggagcccgcaggcctcggcgcggcccggctcctcccgtccgcccgcccctcggccgggggcccgcgcccgcccgcccgccctcccggctgcagggccggctccgccgagcctccgcggcgcccgggcctcacttaactgttccccgctggggcggcggcggcggtggctgcggcggcggcgggtcccggctccgtctcacgcagaagcagcttctcatcgcccgggcggcgcgggaggggccgggcccggggcccaggcggcaggagccggcgccgcagctcgagcgcgagcctcaccgagagcggcggcggcggcggcggcggcggaggggcggggcgcggcctggcggcggcggcgacaacggcagtggcggcggcggctccctccgcgggccgcggcggcgggccgggctccgggcctcccggcgctggcgctggttcaggatcgggggaggcgcccggcgcccgaggctggctcgggcgggaggagggagagggagccctggcgtcccgagcccgcgccgccgccccggccggcaccccgcctccccagcctccccctcgacccagcccgtcagccgcaggcagggccccggtgcgcccacccgggcctccccgagcccgccggcgaccccagtccagcctcaggcccccgggagcccacggcctctagagcctggggcatcgatggtccccgcccccaggctggtcttttccagggaccctcagcccacttagctctcgtaggcctcgctgtacgcaagaccggtcttccgctcggctgcagatccctggaagcccccaggccctcaggctagaagttggacccttctaaggactctccgcccacccagccattctaggcttcactgaaccctagaatccttcagctcatcttcccccaccccccagctcacctaaggtgagctcagccagtcgtctcaaactaaccccaattgcctagcaattctcttatattagttagatgatttatccccagaagcctagaatcaggtttatggggccagcctcaggcaagcatctagaagaagtttttagcaggagtcctaccctgcagtacttggggaaggcataagccaaggataaaatggagctggatggttgggggagggtccagagcttgaccctcagctagagtggctggtaggaaaggcggactctgcgccttaaccaaccatgccccccacaccgcccagccaggcaccccaggcagaggccagcgtgtgcaagatttgaaaggtttcctgccaggaggctggagcattcgttaggacttgaggaccatgcaggagtgatcagcattgatttgctaatgcattgagtctcattttcacacattctaggcttttccataatagctgtttgatcctaaagagaagggtgccaagcagaatgggctgtcgggggaaacatcctgtagggaagccatgcacgtgtgcattcccagtgtcttcactactcagaaatgccatgggttcagatggctttacagcaagccttatcctcccatcagggcacagatcatccctatgttacttaaactgttacacaggaaaaaataaacaaaagaaacaaaaatttttatttcatttcccaagtttagcataaccctgataccaaaatccaacagacaataccaaaaagaactgcagatgactaacctagaacacgagtccccagagaatttaatatttattttttgaaaatgggcttctgtgggcaacttgagaaagtgctgcatgccgtttatagtgtaccttttggagaatcacgataagtattcgtatattaaggaaggcctctgtgaagtccaggagtaaagaaacctgtttggtttgtttaacctggcatttcccaaactcatctgagccaggaccaccttctaaagctcactgataaatcctcaatatgtgaatctgcactatatatttaagtatataatagtcgtaaaactattaaatacaattttagccatttgaatccagtttactattaaagcaactgaaaacccaccatgatcaagcaagatttattccagaggcgcaagaaaaatccaacattagggaatttgtaaatgcattgcattgttaaaggaaaacaaattacaggatattatcaatgggatagatgctttaaaagtattttataaacttcaaaactaatgacccataaatttctaaaaactcttagtaaactattataggaagaaagtttaaacttttaacatgacaaagtttatcagaagccatcaacaaacatatttaatggtgaaacactaaaggt

SEQ ID NO: 588594 - DNA, 4001 bp, Homo sapiens
catttactcctatttattgaatttactatgtgccaggaactgttctgtatactagggttacagaaattatctctgcccccacggagcttatattccagtgagtgagactgaaaataaacaagaaataattgacaattatggcttctgaaaaagataagctgtatgaagaaaataaaaagtgattcaactgaggtggaattgcagaggagagaatgagtggttgttttgaggtcctcaccagggaggttaacacttaagaagaattgtgtgaaagcgaggggcaaagcaatttaaaagaaagaaaacaaaaaatgcaaacacctgggagaaccaccttggtgtgtattacgaagagataaaaaagacctgtgactggaatgtaataagcctggcggggacagtggcacataaatgaaacctgagtggcaggcagggaccagattttatagacccatagggaaggagggtggattttattctacctgcaacaggaagccactggacaatcttaaacaaggaatgatgtgatctgatcatactgaaacctcaaacatacaaaaatactattatcttttagattaacaaagtgttttccacagttagaaattactgctctctctaacctgttaaagcaagaaaaattcaattttaaaatactgcctcaacatctgtatttaatgctgtatcaaatatacatttgctttaaagttaaaattagaggatacagaataagtgtggctaacaaactcaacaaaccacatttacctgttgatttcatctaatgaggtaagtttagaaagcacaatcgtcattctaccccttccagatgctgaacttctaatccaaaaatcagactcacctcgacaagcttcttcaaaatcttgggtaatgtccacccagtttgtattgcttttctccattttttctggcatactgagctcccatcctgaatcgtcatcatctacagaagctttcataaccattatgcctgtaaaattaatactgatgtaagagagaggatgtagctttcagggcaagagtatttgcagaaatgggtgtttgtttcagcataggatgaagtcttaactaaactctttaaagcagaactcttctgagtctaaggacagtactgcaaagaataaccttaatgcaatcaaatcgcacgtcaattaacactcctgctgcttactattagcccaccacctaccagggcccataaacattttgccttcctactgtttaagaagaaaaatcacaaaccatctcacctctggcccgaaaagaacaactccagagcttccaactttcaataatagccacaaaagaccaaggcactattcagggtcccctctcgcagcccaggaccccatgcggcagctaccgaagtcaatcaaggtagcccttcatctggccagagctcgctgggacctctcccgggccagagccggcccggacccaggcagaacctcgccgggagcaatgaggagccggcaggcaccgcagggtcccgccggccgggcctagggccgaggcacacctgaggcgggcacacgcttcccttccgccctgcccgggtcagcccagcccagccccggtcccactgggcgcataagcaaggacagagctgtcgccgcgcgggagggcgggcacgtccggcgccgggtcgtcgcctcggcaacaccgggcaagagtggggcctcggccgacagcgggcactggggagcccgccgctcctacctgacgcgcagcgggagggccggggccgcagggtgacctggggtccccaggatctgccacacgcgcggggggctgcggctctcggacacacgagcgagagggtttcaatggctacgcaggggcggtccctacctacttctcccgtggtcacccgcgccgccacgcactgtccggaccacggaaataacgacgccgcctcggccgccgccgccccctcccctctcagcccagcccgaccggcagcgtgcacgcatgcgtatgcccgggacgcgcgaccccgccccctctcccttactcccggggacttcgcgctccccggccacaccccctccctcgccaccgcctccgttcggccgatggcggccgccttctcttctcgcgagattagagacgatcgcgagaccggaagttatcttttttcaccctctgtcggagtcctgggtagtgggcggttcccggaaagaggcggagcccggagtctcagagcccgccccgtctgcgctgccctctgggaatttcttagaaaggtgacgcgaaggcggaaggaaaccgtggaggtttgcgtagaccttagtggttgcgagcacgaacgagcagccaagctccgagagcaacagcgtgctactgctgcctgacaacggatttatgtttcctatacagcgcctgggagtttcgtgaggaaacatagattcaaaatatctgcaaagtcaagccagacatttaatttcagattcttatatgttttagatttttttaatttattaataaaatgatcagtttttaaatggggttacataaatagacgggcgcaggtaagaagcacatctttatcaccacctgttctttaggatggcccaaaattaaaagatggaaaagataataccaaatgttggcaaggatgcagagcaactggacctctgttatgttggtggtggtaatgcaaaatggtacaaccactttggaaaacttaacaatctctccttataatcatatacttatcattcgatccagtaatctacgaatttacttaggaacaaaaacatattcatacaaaggcttgtacgttaatgttcataccagctttgttttgctttgtttttgtttttgtttgagacagagtgtcactcttgtcgcccctgctagagtgcagtgacctgatctcggctcattgcaacctctgcctttcaggttcaagcaattctcgtgcctcagtctcccgagtagctgggattacaggcgcctgcccccacaccaggctgttttttgtatttttagtagagatggggtttcaccatgttggtcaggctgatctcaaactcctgacctcgtgatctgcccacctcagcctcccagagtgctgggattacaggtatgagccaccgtgcctggcccagctttgtttttaatcatcaaaaactacagacaacccaaatgtccatcaactgttgaataaaaacaatttgtggcatatccatacaatgtaatgaatgtaattatcaataaacagggataaactacttgacatacaacatgaatgaatttcaaaaatatattgagtaaaagaaatcaggctgagcttggtagctggtagctcatgcgtgtaatcccaacactttgggaggctggcagtggagaggtcgggttggagactagcctgaccaatatggtgaaatcctgtctctactaaaaatacaaaaaaattagccaggcatggtggcgtgcgcctgtaatcccagccacttgggaggctgagacaggggaatcccttgaactcaggaggcagaggttgctgtgacccgagatggtgccattgcactccaacctgggcgacagagtaagaaatcaaatgcaagagtatgattccccaagtgagaccccaggctcttaaaagacatctatagtgacagaagacagattagtggctgctcagggctcaagaagagactaagttggatagagcttgatttgaagtgatgtaaatattctgttttcgattaaggtagtgcctgtgtgggtgaatacatttgtaaaatttcactgaagtatatacttacaatgtgtacattttattgtttgtaaaccgaacttcacaaaaattggtttaaaaaatttttaaatggccgggcgtggtggctcacgcctgtaatcccagtcctctgggaggctgagacgggtggatcacatgaggtcaggagttcaagaccagcctggtcaacttggcgaaaccccatctctactaaaaatacaaaaattagccgggcgtg

SEQ ID NO: 588595 - DNA, 4001 bp, Homo sapiens
tgcagcctcatgctttaattggaaaacaaagggaggattgaagaattttttaaaagtcaccactagccccctgcccagggcagagcagccctgcgaacccttccagcagccggtggtaaagaacagagcctgttctcgcagcctgtagcagcccagctcccactgctcccagcaggagatctcccgggtggctcctccccgccttcccgccaggccagggccagcaccatcgagccctgggtgtgaccactgcgaaaggatccctggccactaagaagtgacaagtgatatcttgttccactctctgtgcccattccaagtggctttgccgaaaggacagggggccaccaccttgggtggcagctccttttatttcctccccttggactctggcccagctaccacccaacagtgaccccaggggaaaacgccaagaggcctctttaagggaggggctgggaaaggccccacagaggaccagaggggtgctccaacggtggccgggagaagaaggggtgggtggctgagaggtggcgggtggggcgggggctgcctgaaccctgacctaactctaggcgcccctgctggggggtgctacaggctaaaacaccctgcagaatgctgagctgagtgtcccactggagaacaggagggaaggaggtcaggagcctgccagacgaaaagaggggtgggtgagaagaaggggcgacctggagggacacggactctggcaggagagtgcggccgcgctggcgggcgggaacaccaaggtgcacgcgctcccggaggcagctccacgggatgggagtccgggctgccttgggcacccccgggtcagcacccccgccacacacaggaaggaacgcgcagcagagaacacagctcagggcacccagcggcccagggagacgggcccaccagcacgtgggtgaaacacctccaatccggaggccccgcgcgggggttgggggagggagtggaacggcctgggaggccaactccagggacccggcctcgcggccttcagacccacaggtttaagcggctccacgacgagagtccaagaccaaacttcccccagagcctggcagaggggctgggaggtgacctctgacctccgaccccacacgatcccagcaagagaagcaggaaactccgtcggaaggcctcggtccgccctggccgtgcggggtgcgcggcgggccccgggctccgctgagtttcttagagaaggagctggggccccccgacctcagctccgcagaggcacagaagctggcaagaggcagagccccctccccctgcggccggaccccagtttctccccaggctggggcccgagtgggggaggcgcgggaggcggtgacgacccacgaacgggcccacctggaccgggagggcgaggcgcgggcccggctgggccaggcagctgcgcagatgcgccgggaggggtgggtacctccgccctggccccgggccagtcctgccccggcttccccacccggagggctggatcggccagtcgggtccctggggaggccgcgcgggtccccagaaatccagggaaacccagcaggcggcggggagcgccccgggacgcccggagccggggtctccccgaacgcgcggcgcggcgtcccggcccggggtcgcgggcgcctccgccgggaccccccggccccgcccggcccccctccgcgggctcccgaggccggttcccgcgcgcacgcccgggccggcgcggaactcggccgcacccgccccgcgcggccggcactgcggcagggggctcgcgccaagttgggcggccgcggagtttgcgggaagtgcgggcccggcccgtgggacgaccccgcccggcggcgtaacccgggggcggccgcgcgcgccaagttggcggtacctgcgggcgcccggcccggtccggcctgggcagctgcggcgcgccgcccgcggcaggaagtgcttggcgtcccggcgctccggctcccatggactttctccgacctcgcccagcaccggcggccgcaccgcggcgggggcggggcggcggcgggggaggtgcccgcgggccgttaaagggacagcgcgccggccgcgcgcgcgcgcgcactggcagccaggtgggctcccggggtcggggctggggtccgggggccgggagggtccccagtgggggccggcggggcgtggggaaccccgagcgctggggaggggaggcggcagctcctcgcccctcgcgcgtcctccttccggagctgccggcggtcgaccctgcgcgggacacccggcgggagccggacgccgcggcgcagaggacggagctcggcggccgggtcgggaaaggacctggagcgccgccctccgccctccccgggccccggcctcggccggactcgctaagcccgggagagcccccgggcccccctaccccgcccccggcgcgcgccctgcccgcggcagtcgcgtccgcacggtgcagcctccgggatccgggcgggggaagtgcgcgcatccgcagccgccctggacgctcaggcgggccgtgaaagacgaggatacgggagcgcccttgggcgaacgtctgcggggctccggcgcccgtccctgcggcccgggaactgcaagctgcctggactgggcctggcgctgccttcaggcctggtgtgatccgggcgcactggggcgttgacagtcattccggcaccggccacgcagctctccatctgcccaaggccacgctcctgaggacagaggtgcagttttaaaacaagggcacggaaataaaacggccacacacccggaaagacccagagacccctcctcagctgccccctaacctggggcctgaggtcaggacaggctgcagtggtcctcagaggctaagccagcctcactcccacagcacgctcaagggtccttgcaggagaatggagtgataccgcctcagtggtcccgagcgagggcgctgggagaagggttgagaaggagatggccaccagcatcccagagaacgcctttggggctctggggatcagaaacctggggctacagcccttctggcacagtcagccaaggtcattccctggacaaatcatcagaagcttggccaggttcttgtcaccccaacctcaagctaggcccttgatcttggccacagactggcccttgaccccaactttaggttctattcagctctgcgtccagaacacacacacacacacacacacacacttcactccctggcttgccttgtatgggggtgagtatggaaccccgcagggactctgggctctccccacagagtcccatctagacctaaatgcagtcccaggtcccacaccccaacccccctccccccaccactgccacttccaaacccgccccgcagtctactgtgggaaggaggtggggtaggagggttctgagtgcctcctacacccagggcatgagctcagcagcctcagggttctggtgcttcctaggcctgactttacaatctctgcaggatctctcagtgagcatagctaccccaagcccctgagaatcgtgaatcccagagacagatgcctggagctgcttccagccctggggcaggcctcaaggggctacccactaggacccgtggccctccagggatgggaatgattgttttaatcacttttattttctaaatattaaagacattcttccttagtgaaggatatttggaaagcattgaaaagtgtttagaagatagcggataagcagaaatcaattccccaatttctgtgtgcctatacgtatgtacaccaacatatatttgcaccttttaaagcaaaccctgcatccctactgaattccaggcccgtgctactgagtatgtacaccttaccgcatttaacgttcacaacagtaccatgaggtgagctctgtttattcctttttttttttttttttttgagtccgagtctcacactgttgcccaggctggggtgcagtggcgcgatctcagctcactg

SEQ ID NO: 588596 - DNA, 4001 bp, Homo sapiens
tggccaggcttgtctcgaactcctgacctccactgatctgcccacctcagcctcccaaagtgctgggattacaggagtgagccaccatgccagccctttgatgctttcttgacttgacttcctaggcccctatggcgaagcagaaaaggaggtgggaatggggcagcagtagctaaagtacccagtcaatgtctccctgtctgtcatcatctgggtcaatccgatacttaaacatccttcctgttccagaacagcatctgacctagacccgtgtttgtcccccttaccccaccccagtgtattcttgagaaatacgcattgtgaggggatggcactcgcacatccacccaactcccccaacccccactgagaatcactgaatgatccagctcacggtcatcacaaacgagcagaggtaacagggcacaaactcttctttgaactaaaaaatccaaccaaagttagttctgttgtcattcctgagaaccacggaaaggatcctggctgggctgtatgggcctccgcgcatgtgggagaggtcaagctcctccacccttcaacgccaatgtcagctatgtgtccttatgccaccaagaagcccccttcctcttccggggcctgaggttttcccaactgatggcgaagctattcctatatgtgtcatctctgtcctactagaacataactggcctgtattttagacaacttggtaatcccagtgcccagcacagggtttggtacagaataagtgctaatgtttgatgaatgaatgaatgaatgaatggagtagattaacaccaggaaccatgaggctcctgagcagcacctgatgaaagatcccccacactgaaaacagaatccagaatcgttgtctcacttgggcagtattattcccatcaattttttcaacaaatatggcctggctgtctactacaagccgggccctgtgaaaagtcctgtggggatacagacacggtctcttgttttcaaggaccacccagttcggcaagtggaggtaagtcatggacaaacatggtggcaatgctcagtggcgagctatccagcacgtcagaagtccagcccacgtgctgaggaagtcccaaagagagcaagatcacttctgtctgggtgctgctcttggaaggcctcatggtcttccaagacccccatctgacctctgacccttggcagccaaccttccccaggccaccccagagcttgctggcccttcccacttatgcacgccgcctgggcaggagaggtcactcactctgtgtcagggtgaccgtggctgcggctgcggtggccgagggtccgagggccacagggtggatctctgtggtgctgggcaggctgatgatggtggcctcgcccagcaggttgcagatacgttgttgcatgggggtcagcagcactggggctacagctgggccaccgccaccactgccaccgcctgtcccaggccccccagctccgtcctcctcagtgggccccggcgcctcaccaccctccacggcggcccggacctgggcaaccttgcgacggacctcggtcttgaggtcagaccacttcttcttgacctcaggcagctctctgcggcaggtggccacggcgttgacccttctcaggatgccgtgccaggccgcactcttggcggccaggggtaccccggcgttgaagtggttcaccagcaggtgcttcttcagctccagctcctccacgatgatctccacctcccgctctgagaagttcatcttccttttcttggctgggacggccatggcctctcccctcccctctttttaaagaaattataatcccctcaagcgccccaattccccttctcttcttcctcagcctcgcccctcacccaccccctacaggggataggccaggcttgctcgaggccaagcactaggcctttggtaacccccctcgctacgcaaagtgcgtagggcccagccccgaccggcccggccgctgccagccagcagcgtaatggcttcctgaatctgcctcttccgccgaggtgtgcggagatccgcccacttcccctcttcccgcctcccagcgcttctccgggaaaaccggccttcccggttggtagctgctcaaatatcacgtcgatcactggttctttcgatctgtcgctcagctaaagagcacgcctgcttactgtaattcgcctgatcattggtctaaaattgtgtccgtcgcccagagggccccgcccacctaacctttattcacttccattggaaaatcattctgtcgttcaattgtcagtattacgactattaagccgttaaattcagctattttattggtggtttagggagttagattaccaaaaccctgcttcctgaggatacttagtgctttcggccgtgacccatgggtcaattaacttttaattcctcccaccggcacaaactctgcctcgcaactgcagttcacaaatgctctcacacaaatcctgtttcccactggaggctacgatctctccgtacactaccgctcctcccatccttaagatcccgcagtctaaacagagttagttcatcaatggaaactggacacggggccttccgcctgccaatcacattactcatgcctatcgctgcgtgattttctctctcttggcccccggctcagccaatccccgcctccctcagtttgaatcggccccaggcggagccgggtgaccccgcccaccccattgatccgggtagtccgtggcgcgtgggctgtccttagacaggctccgcccctccctcctccccatccgagcctgtgactggccttcggtgcgcccgggcgtggccggcgaagcggggcgcggaggggcggggctcccggaagccgccccttccgccagcttgccggcgtctccgagcccgcgctcccagctgcagagcgcctggcttgcctcccgcgcggtcaccgccggcccgccgcccccgctcccgcccgcgcccggagcccctgcctcgcgcccgatggtgagcagtgtgttgtgccgctgtgtggcctccccgccgccggacgccgccgccaccgccgcctcttcgtctgcctcatcgccggcgtccgtgggggacccctgcggcggcgctatctgcgggggcccggaccaccggctgcgcctgtggagactctttcagacgctcgacgtcaaccgggacggcggcctgtgtgtcaacgacctggcggtggggctgcggcgcctgggactgcaccgcaccgagggcgagctccaggtaggctgcgcgcgtcctcagcactggcggggagggagcccctcgagggccgggtgacaggtctcgggggacggccccttgggctgggcggaacccccactgtccagaggaagggtgccccctgactcactgagggacaccccacttatgccctggtgggagcggggctccttcctgacttctttgggtgcttgagccgggttcttcgtggacacaggtgggcatcctatgggctttctgatgggcgaaaagccctttcttgcccagagtagaaggccaggtctcaggagtgtgcctttgtcacctcctgacctcaaggccaagctggacgctcccttcacccaaggatgggttcatccatcagtccccagcagcaccccctcctttccctctcgtttccatgccagccgtgggccctgatctggttcctctcaggaacatgtgggagttgaaaaaaaaattggtattggggtttcaggctgatccgtgtggacgttggcggcgaagactgacagttctcatggtttaggctcatctccattgccctgtttatccagaaaatgggatcgtgatccccgcggggttggagtgtggacggagtgaaagaatccgggggaaattttttttctaaaagtcaaagcgagattgttactattgtgggctcttggccgaggtgtgggcataggggcgcagagaaatggtcatccctgggcctgccaggaagagaagtgctggcctttc

SEQ ID NO: 588597 - DNA, 4001 bp, Homo sapiens
atgggattacaggaatcagccactgcacctggtcagtacagctttgtttctatggcttcagtatctctagatatttctacaacttcggcattccaagaggaaaaacagactgctccttcaaattaagagtgggaatttccctctagaaaacaatgttgcagaagaaaggctggagtcctgtggcttaggagcaaaaactgaaaaaaccccttactgtatttattatactagctatgtgaccttgcctaagtcacttattttctcttagcctttaaaatgaaatcggcagcatcatggcattgggttgttgtaaaaattaaatgagatggtgcatgtacagcatttagcttagtacctggtagagtaagcactcaaaaaatgttagcaatgttatttttgtaaagtatttttatgattcagtgattaggtttccataaaaccagtcccgaaggaacagcaagggccgagggtggtggctcacacctgtaatcccagcactttcggaggccaaggtgggcagattgcttgagctcaggagttcgagaccagcctgggtaacatggccaaaccccatctctacaaaaaaattagcccagcatggtggttcacgcctgtgggtcccagctactcgggaggctgaggtgggagaatcacttaagcctgggaggcagaggttgcagtgagccgggatcatgccactgcactccagcctgggtgatacagagaccctgtctcaaaaaaaaaaaaaaaaaaaaccaggaaaaaaaaaaaaaaacagtaagagaaaacctccagcctgggtgacagagcaagaccctgtctctaacatagataaataaataaataaacatttaaaaaacctatcacaaatgatacaaaatcagttgagtagcattgatgaagggaaaggaaagatggggtgagctatctctaaaccaaagaatcatagtgcaggccaggccttatgctgggggctggggtcgtaatgaagaatatggcagtcccaacagaagagggagcacgcatttaccgactcatgtgtgccaagtgctgggctcagagctctatctgagaatctcatttgatccccataacaactccatgtggaaagaactgttgttttcaagccccgttttcaaatggggaaaagggttcacggaggctaagtaagcagcccatgttcacacagctagtagtggtggaactgagatttgaactcaaaggcccggcttttaaccacttcatatttcatatacagggaatggcgggtgagagagaccacagcaacttccaggaactgtcattcctgaaagtaactctgtgtcgctgaagaatgtcagagaagaattatgacgggctggaaggggcccagtcattaaaatcttgaaggctatgttaaagggtttcgactctacccgcgggcaggagggagccacagaaggtgccaggcaggggggatggtctgatcaagtctgacttttagaaagattattctggcaccagaacggggaggaaacaggtcgggttaggaggcagctgctgtaatgcagaaaggtcacgagggtggcggacacggtgaggaagagggatccgaaggattccgaaaacggaactggcgggcgggaagaggccggaccagggtacccagccgcggaggccgtgtggccctggctccccgcggccccgccccgcccctcccggcgcccgaatcccgggtcccgggagctgccgcctcaccttggccatgcggatcatgcgcttggctacgtccaggtcgccctggtggttctggccgatctcggcaatgatgaagcacgggtgttgcccgcccacccagcgcccgggacacagctccagctccagcggcattgcagcggctcggggtccaaagcctcactaccagtctgggtccggccgccgccgccgccgcctctactctgttctgtgagcaacgctgcgagacccacacgccagccccgccacgtcagcccgcggtcgccgggcagccaatcccctaggccccgcctctctcccgacagccaatcggggcggggggcgggggcggggcctcccgcgggaagggcggcggggcgggtcgaggaagctccgcggccctctcctgtgcgaggcttgaggcttgctgtcccagagcgtggtctcggaccatcgcggtatccgtgcgtgcacccaggagcaagcattccctgcaggaggcggacggctgcctgcgcagggcatagtctatgtcctgctctcaggagcatggggagagcgcgccctatggtgtaatggaaaaaacagggttgctagagttagaatcacagagctggatcgagtccagcctatgccagtcaccagctcctgctcatatatacgttactcagtcttccggagcgttatttttgtttctctctgaagcaaaaaaataaaatagaactgtgagatgacgtatagaaacccctgatcacaatacttggcttgtagtaagttttcaagaagtggcggaggttcctattatatgagaggcaacaggttcgagaagttgcactggcttgtccaaagccatccagaaagccaaagcagagatgggactagtacccggacctcccagccccaggctcttaaaatacaatcacctgggcgggcgcggtggctcacacctgtaatcccagcactttgggaggccaaggcaggcagatcacctgaggtcaggagttcgagaccagcctgaccaatatggagaaaccccgtctctactaaaaatacaaaaaaattagccgggcgtggtggtgcgtgcctgtaatcccagctactcgagaggctgaggcaggagaatcgcttgaacccgggaggtggaggttgcagtgagcccagatcacaccactgcactccagcctggtgacactgcaagactctgtctcaaaaataaataaattaattaattaatttaaaaaataagataagttatttcccaaaataaacctccttctttcctgggaactagactgcctttgtaggactaacaaattagccacaagattagacacgtaggagtcatgcacctggaggctacaagattctgaccctccccaaattgctcctggggataacatcactattgtaaaacctaagaccagtgcttgagatattttgcagaccctgcacttgatggatcagctggcaccaccagattgataaactggttcatctgatcttgtgtcccccaaccaggaactgacttggcacaagaagacagccttgactttctatgattttatctccaacacaaccaatcagcactcctggcatactggcctctcttaacccaccacattatccttaaaaactctgatctccaaggtggggcatagtggctcacacctgtaatcctagcactttgggaggctgaggcgggtggatcacctgaggtcaggagttcgagaccagccttgccaacatggtgaaaccctgtctctactaaaaatacaaaatgagccaggtatggtggtgcatgcctgtaatcccaactacttgggaggctgaggtaggagaatcgcttaaacctgggaggcggaggttgcagtgagctgagattgtgccattgcactccagcctgggcaacaagagcgaaactccatttcaaaaacaaacaaacaaaaaccccaaaaacctctgatccctgaatgctaggggaaattgatgtgagtaataataaaactcagccagactgcacagctggctctgcatgaattactctctctattgcaattcccctattttgataaatcagctgtgtaggtagtgggcatggtgaaccagttgagcagttaaaaatttgggggctcattcgggattgctcttgtgctacctgccccggttctgtagaccccctctggcgatggatccagaggccagcccaagcggccacctagttttggactgggggctgactctggcgtcatctctatcggcagggcactactagcccaatatgtatggag

SEQ ID NO: 588598 - DNA, 4001 bp, Homo sapiens
aaaaaaaaagggagggaattgtattttctgtgccttgtacagaggttacacaagaaacctcgtgttagaaatcaaagcacgcagcatagttatttaatttatacctgtgtagtgaagagagccccggactggattcgctcttgctggtgtttgggaactgacagctgtccctccatcttagttatgctcagtctctagacccttaggtgtcagatagaaagctggactagaatatcctctcaagccattccttcgtagaaatctggtgtttcactattaaaactaaatgcatgcgattctgcctccacctcaactgccacaacactcaaggagagacaaacgttagtagataaaatttactcaatttaaaatgtctgttatgggtttttttcttacattgacagcatctgctaacgtttaccgcctcttaagcgttggcaaatgataaaacatcattgttgctgatgtgtattacctcatttaaccttcacaaaaaccagaagatataaatatcattacttctgtattacagactaaagtttaaggagatttcataacctggacaagatcaccaagtaaatggtagggtctggctttgaacctaaaccctctggttccaaagtctcatctcttaaccactactatacactctcttcaaaaaacaatacactaaaatgttaacaatagaattactctaagttttacttttttggtgtgtggatttgtgtttttgaccgattgtaaggcttatgtgtaatataagcatcttttttttgttgttgttaaaactagaattattccatctttatgaaggcaacactgatctccacgagcacaatcatccaaacggagatgggaacccctgttctaactctctcagaggcctgaagttagttttctagcactctctctcacacaagggaaatgcgcttacggccagttcaaaatctgcagtaacctgtgtctgtttattagggacctcttgggcgcaggtaagacaatattctttccctgcagcttgaaagaagtgaaatcaacggataaccactaccggaacagagttcagactgcaactcatgagatctctcagtcctttccttcagtgaattcttccgagcccttttcaggtgcagctttgaaggttaaaacgagacactaggaccagtgggtccctaagaggcggcagcacagacacaggtgtgcttccctgctccgtggttttacggacgaaattctgaagcatccttagagaccaagggtctacccatggggttcaccaggccttctttcccgaggatcggcccttgactcaaagaactggggcgggggagaagtcgctttctagaagccgcccgaccacaccgccaccatattctcctctttccctccgcggctccccgcacgttcccggggagaagagcttccagtctcttccgtggacacccaaagacgccgagcctcggctcccaaccgggagcggcctccgtggccgggccgcaggcactcaccgtcgttctcgtcgctgtgccgccgccgcgacatgctgccctccggtgcgccgcggaaccgagaggccaggcggtaagcgctgcaggaactgtctggccgctggccgacgcaaggacagctgcaaggcgcgcggatgggccggcacgcaggcgcactagctcgccacggccccggaagcgcaggagaggccgccgggtggggctaggcgctgcgacagccggcgtgaggaagctcagtgggctacgaacgtctggcacacatgcaaccgccccctcgggctgcctccgcctgccggctacttctttctcccgccttccgctctatgtccttccggggccacgcagaaagtgccgccgctttggccactcagagcccccgggccgcggtcgtcgtacgcctgaaggcgggtcgtgccggcggccgctctagtctccgcctccgctcaggccggtcctccggggcttctcaatggtttcccggtggcctctcaatggttttcccggcggcccttgcgccgacgccaggagacttccggagcttggtgacgtcacgagcgagcttttctacccaaatacgcggcgggggaataggctcgagggcggtgagcagtgacaattgctaggcggagacagtgcagggaagagagaccttagaaaggatcaggactggcgggtatgtgctcatctactcccactttccggcttttgccgccttgggaaaagtgggaggagaggttgggccaagctcggcatgcggggtggggcctgggcgggaggcggtgccgcacgtgccgccccttggtatggaaaggccggccctgacgcgagcgtgcggctccgggcttgccggctggccgtcattttccttaagttgtttgcttaggaaggaacaaatgattgttttagtaatctgttttcaagggttattgggtacctatatgcctgtgtgtgagcgtcccctcccctgatgtctttatgagcaccatactggcttatctgctttgtccatggccatctgaaatttcactctcccggcctaattctccttcggtcttacccatttcagtaaatgacgtcatccgtcggccgcttaatccaaaaatttagagtctttcttagctcttttccctctttttacataacaattatctgtaaaccctgcctgctctgctttcaacacaaatccagaatcagatcgtgttactgctttgtttaaaagtctcctatgacggccgggcggggtagctaacgcttgtaatcctaacacttatgggaggccgacgcgggcggatccgcttgagcctaggagttcaagacccacctgggcaacaaggcgaacaccgtctttacaggaaaaaaaaaaaaattagctgagcctagtgtttggcgcctgtagtcccagttactcgaggggagggttgggggccgaggtgggaggatcccttgagcccaggaggtcgagaatgcagtgagcggtgatcgcacactgcactccagcctgggcaacaaagtgagaccgtgtcaaaaaaaaaaagtctcctacgactttccattgcacactccatgccatggcctgtggggttctacttctcctcactgtactccaaccactctttctgttcttacaataagtcaagcttgttcttattttaggaacttatactatttcctttacctgaaggtctctggttctaaatctgcgtggctggctcttggtcacttaggtctcagctcaaatgtcaggtccttagtgaggccttctttggttacccaatcactgttttatttcattcaacgaatattatatttattagcatttagcacctcctaggtgccaggcagagttctgaatgctgaggatgtagaggtgaacaaaggaaaacccctgctctcttggcgctgatatattctaacgacccattcaggaatacccacaaatagtgccatcataggtagtgagcaacgggagagtggtagatgagatcagagaggtagggggaaggtgctctgtgaggactttggacattatccaagtgaattgagaagtcattggagtatgattttttttttttgagacagggtctcgctctgttgcccaggctggagtgcagtggcacggtcttggctcgttgtaacctctgccttttaggttcaggcaattcttgtgccttagccacccaagtagcggcaattacagacatgcgccaccacaccaggctaatttgtatatttttagtagagatggggtttcgccatgttggccaggctggtcttgaactcctggcctcccaaagtgctgagattacaggcatgagcctctgtgcagggccagtctgacttatttttttaatagttacttctcatgctcccaaaggaggaagatagttcagcttttgcagtaattctagctgcaaatgatagtagcttgaactagggtggtagtaaagatggtggtgcaaagtgatctgattggattgtacttcaaaagcaaag

SEQ ID NO: 588599 - DNA, 4001 bp, Homo sapiens
aaaaaaaaaaaaaacatggatttgaagcaccaaggacgatgcctgttgggggccaagcacccactgtggccaggccctagggacacaacatggacaaggccaagctagccagccctcagagtgccgacaggatgcagagagggacaaaatgcttacctgctgcccagtaagtcatcggctgtcccagggaggcacagggcagtgggaactctgacagaggcctggggggtttcagggggtgggggggaggggcgaggaggtaacagcccagcaggcagagggagcagcctgggcaaacatcaggaagccccggagacaaaggtgagttcaaggaacaaacagcagttcaggctggccagagggtaaagggcaaaggccaacaggcagaggacgccagactgcaggggtcaacagggccagactgaaccaggcctcgtaagcacataaccatgtcaagggtgaggacttcaccctgaggtctggggagggtggcagacgcctggcatggtcaggtttttgttcagcaaagacccctctggctggcgtgtgtgaaggcagggagaacatgtacggatggggaatctagggaggtttcatggtggaggcgacttgggctgagccttgggaggggcagagttcagatggcccaggaaggaaggcgggcattccaggaagcagagccacatgggtgaagatctagaaggagggtgtttctagggcactcacctggggaagtgcagaagtggaaagtgagggcggaaactcaatcccaggatggggcacctcccagcaagggctcagcagagccaggcgggccagcatagccctgccccatctgcagcttggacttgaggcagggaggtgtagggagtggccctggaggctcctggggggtgcccggccctgccagacttgactggaaaatctccaagctcattgcctcatgtccctacgtgccacccctacagctcagccaccttacatggtgagcctcctgtctgctccacattccacaaagacggacaatacaccgccctcctcccccaggcccagccctggcactgctcatccattacaggccccacttatccctcactgccgcttttccatttgctccatgacgtacggcctcggaatccttatcacggccctccaggcagctacgacagattgaatagagctggcatccaagagcaaacccatttgccatccctgatccaatcgaatcgatcattctatagaaggggtgacggagccccagcgaggggaaaggacctctcaaggtcatagaaggactttcttatccaaacccttctctttggtgaacagggcctggaatcaacccttcaggccttggtggtccctaaagatgcaactcaaagcaaggaccaccaacaaacaccccagcgccacccccaacccagttccactgaaaccacgtcagtcccgcaaggacaaaggccactgaacaaaggctgtctggaccccacgctcaggggcccctccacatgcccccatcctgagcagctggactgctgtccccatcagcccacagcccacaaagcccacagccgcagcccctctacggtttgagaaaaagcagctactcaccactgctggacctccttctcggtaactgcaagagaaagcagaaaagtaggcttttagctcagggaaggtgtcccgggagatgggcagacattcgctggggggcctcccctccagccctcccctccccacggccatgtccccgggcaacggcctgctctggatgagaaaatgctcccttggtgagcagtcctagccaggggctctgtacccaccaccccagcaggggacactggccccaccccttcccggtgcccaagtgctacctgccactgccactgccgctgctgggagagcccccaggaacgccctgtggcactcaagggtttgcttctcccacagcccttgctcccaggccaacatctaagacttactcgttgccatctctcaatccctggggacgggatgtcagggaaggccctggcttccccaggcactcggctgccccacctatgtgggggggtggggggagctaggctgaaaaggggcagctctcagcagaagggtggaccaccctccctgtcagcctgtccctgcagcccctctctgtggtcagcccgggctctttcactggcaagacatgaacagagccgtgaagcaaaagctgaaagaggctacagagagcggctgagcctggagccaagcccacatacccattctttactgagccatgaaacaaacaaaaatgctttttctgaaaagtacagaatcgtttcaagttggaaccaaatcaatgttctctctaaagtcaccgaacaagaacaccaaaccaccaccaaggccacccttgctccctgcctgtgtgagcgcgggacggctcctcctgcactccctgccttgggcgcctcatccataaagtgggcatcatattatcagcacctgccacacagacctgttgtggggactcactcataaaggcatggaagctactggatccctggggatgtcagacacctggaaaggccaggcctggcgtcaaagaatggaattttccaagagaaagttttggcaaagggtacggcgtagggccctcaaatgtgctcaatactggtttgtggaatgaatgaatgaatgaatgaatgaatgaacacatgaacagacaggaaaggggtgtcaggtggaggtcagatgagtaaaggaactagaatctattcccagggaagtgggaaggaagcccaaagaggtgtctctgaattgtttgtgcctgaccagacttgaggaagccacttttcaaaaaccactcaaagcaagctcgcaacagctgccaaataccaagagcctgccgcaagcccgaatctgcgcccagggcgggcctctgtgctttagctcaacggctcttatgacagcatggagggaggatggcacaactctgccccagctccaaatgtggaaactgaggcacaaagagatcaggaagtggcaaggcaagggcctgaccttaggtctgtggctcagaaccaggcagccagattcctgggcaggctagatgcctccatccccgtgctggtcagcactctcctcccacaagcccaaatcagagatggaggaagagacctgtctgcaagcaggcctcagataaaaagagaggaggcaggtcaggcacggtggctcacgcctgtaatcccagcactttgggaggccgaggcaggcagatcacaaggtcaggagatcgagaccatcctggttaaagcggtgaaaccccatctctactaaaaatacaaaaaattagccaggcatggtggcacgctcctgtagtcccagctactctagaggctgaggcaggagaatcgcttgaacccgggaggcggaggttgcagtgagccaagatcacaccattgcactccagcctgggtgacagagtgaggctgtgtctcaaaaaaaaaaaaagagaaagagagaaagagaaggcaacagcgggagatgccagttacccagaaacaccgggcctggagtcaaagaaagcaattttctgagataaagttttggcaaagggtatggggcaggaacgggttcaggattcggcatgggggtggagagggaaggtgtccttggtctgatccaggctggctgcctgtgatggcagctgtgatggcagctggggctgtggggcggatgctgaaagcccaaacctggagacacaggcgacccatcacagtaccgccaggagctcagggccacaggtgctaaagccagaccagaccgcctgggttcaaatccggccccacagggcactgtgtgtccttgggcaaattgcttcccctgactgagcctcagttttctcatctgtgaaatgggattgttgggaaaactgaagtgcttgccgctcctcagcttcacaaaaaccccacagggaggtgtgaccccgttttcccaatgaggaattgaagttccaa

SEQ ID NO: 588600 - DNA, 4001 bp, Homo sapiens
acaggcgtgagccactgtgcctggcccagaagagctcttggcacgagctctgaagtctctcactagccttggagcaggacagaccggagttcaagtcctggcactgcctggtcactagctgtgggatcatgggaatgccactttgcccctctgagccttagtttccccatctgtaaatggagatcgtagcagcacccagcctggtagagcagttgtggcagagtcgaggtgctaatgatgccaagagcttggcacgtgacatgctcgatgagcaggaaacctggcttcactcccctgtcccaccatgatggaggcatcccgtgcagcccatgcccaccactcctgatggagcccacggtgtcctcaccctcccccggcacagggacccaggaagtccacctgctggcggctgtgggccacatctggacttagcttgaaggagtccccagcgaatctcacaaaacagcagccagactggaatgggccacccacctgcccaccttggagagagggtgagaacagcccctgtgcccaggggcttcaccccttccaggtagcagctcttgggatgtgagctccatgctgcaggattccacaggagaagggccagcacctcgcagcagactagcacccgctcaggaaagccccctttgttccaagcatgaggggtgaggggcatggagctgaagcgtgggcttggacagacctgcagacgtgcccagaaggccgatggagtggggggaagcggggagcagaggttgtgcaatgcaccaccaggagctgcctccccagcctccatcaacacatggggctggcggtcaagctgctgcctccaggggtggtgcagagggcctgggcccacgcagctgcccggggatgggttctgaattccaacccaagcccagaaccactgtccccttccaagtcaaacacccaggcagaggtccttccagaccccgatgctgaagccttccctctggcaatcccctgggtggtctggacccattaccattaacccctggtatgccagggcacctccggagaggctgcagggaagggggaagcctggtatggagaaactaggactgcaaggggactgcagagttgtgaagttaggcaagtggagggagacacactgaggctgatctggagacgcccagaaaggacaggccatcctcctccgggcagcccgcgacagctaatgatcacacgcggcccagatgacccgggctgtagaaacccacttcccggtgtggcagacagagatggggccagggagaatccagcctgtaagtgctgcaacccacagggtgccggggacccttcaccgccgtcaccgcacgacgagcgctgtgccaagtctcgccacccccccccccacacgaacggggccagggagggggcgacaggccaatctcgcagcagcggcggcggcggcatcgtgatgcatgaatcaccagccccgcgcgctcgtgccagtcggctccgcgcagccgggcgccccctcccgggaccaccgccccaccctggcaacagcccctgcccgttgggacagctctgcggagagggggccgccagggggctggggctgcccctccggacctaggggtggcgccgcgcacgccgaccggcgcgcactccccgggctgggggtgccagaacaatggggccgggcggggggcaggggcgcggcccgggaacctccgaggggtccacattggaggccgggcggggaggacggagcggaggcggcagcgcggagcgggtagcgcgcgggtccggggggcgggggcgggggcggtgggtgtgggggtgaccgcggggcgcgggctgggggctgggagcactcacagtaggtcttcctggtcagctcctccacaacttcgggcttcaacttgctgttggatttccccatcctcggcggccgcggcccccgcccccccgggccggacccggttggggcgcccagcaggagcggctgggccgggcgggccgggccggggccgcgcctttgtctgcggcgcccgcgctgcgctgcgcggctgtcggcgccggggcgcccggggcgtggggcggccgctgggcaggcccgggcggtccgggcgccgcggcgcggggctgcctgggctgggcgccggcgccggcgcggtgtggccgcggtcgtccctggttactgggctccgcggcacatgctcgctgctgcctcccgcctgccgccgcccctgcgctccccgcctcccgcctcccccctcccgcccgcacccgcgcgccaggggtggacccggagccgccactcagcgcccggcgccacctcccgccccgcacccgcctggccgcggcctccgccagctggaccccggcctcgccagccagccggaggggcgtcccctcggctcaacgcggccccagggcggggcagccacccccgccaccccctccccgaatccagccctggcgctccggcccccgccgcggcggggagggcccggaagatcggatgtgaatgaggccaggtcccggcccggagacattcattcattcgacacggattcatggggtgccggggacacggcggcccacgggacaggagtgccccagccctcgcagggcgggcagggggctgtgcgggatgcggcaggtagcggtgggagcacctactctcggcctgggggcaggagacctccaaacccagggtcaggaagggaggtggatggagaagcgttctggcccaggcaacctggagaggcggggaggcctgcatgcccgagggagagttccccggcttgcgggcttgcgcacggctgcaggcacaggggacctgggagaagggcagggcccacggggcaggccaggagaggcccctcgccgaggagctgggcccctgcccaccagcgcccatgaaaggacttcagcagagagtgatgggtcagagctgctggagtgacaggtcagagctgctcagagctgtttctctgagccgaggctggggtgacaggctccacctgaatggacagaggccagtggattcgcgtaggggggtgtggttcaggtggtaggtccagcatggccttcccggtccacctcatccaacatatcatcatatcttgagaactctcctatccttttcggctttagtttctctccttcacatccatcacaaacgtcacctatgttttctgcatcctgtttgtctcttccatgggagaacaccctcccagagggcagaggcatctccataacccagaaggccgcctgaggtgttacccagcaaatctctgtgaatgagcgaaggacggaggaaagaatgacacccggtgctggggccctggggtaggggagagagcggggaggatgaggcagccctccccggggctagcagggatgaggcaggagtggggtctctttctcccttctttccacagtgttctaacctcggagggtccagaaagctcagaggaaccctgagcagggccgagtgccttccagctcccaaatatctctcctgcctctaagcatactccatccactcctgctttcccctgaagcccctgcccaggctgagccccaggccccaggaagtcttcagatggggatggacttgctggcttggggagctcattctgcagaggaggtgggcccagttggagggatctggtgtagacctgggagcagaatgtcccaaccttgaggaccaactcagagtggacagcagtgaggggcccacagtggggggctaacagttgaccagactgtgctgagcatcctgcctgggaggagggagagccagcacgggaaccagggcctggctggatgacagcagtagtagttaaagccctttagaaacccaggtgctcaggctgggtgcagtggctcatgctggtaatcccagcactttgagaggctgaggtggaaggattacttgagcttaggagttcaagaccagcctgacaggggagacctcatctctacaaaaatttttaaaagttagctgggcttggtga

SEQ ID NO: 588601 - DNA, 4001 bp, Homo sapiens
cccttcctggaacactcactcccccagtcctctccttggggtgctgcaccctctcttctagctgcttggtcactctcctgccctcctgggctctaacgttctgggcagcctgtcctgtggggagagaggagcttcctcttctcacacttctgtattgtggctacctcaacacctatctccgccccaggatcttccttggagcgctagtcctactgcacttctccacttcaatgtctccaggttcccttcctgcacagccccctactcccaccgtgttctctgatttctgtggatggaaccaccatccatcttggttccagagcccacatccctgtctcgattctgcttgacctattgggtccgttccatgtcccggggactctctcttcctgacaccactgcaatgtgtccacttctatcttctgccaccacttcagctcagatcggtagcatctgctgcctgtcctgtgcatctcatggcattattcctgctgtcctgcagaccagtgcggttttgctagcttaggaacatgactgtgtcacccctacagttccgacaacccttcatttcaagcccatctgccttgctgtggttactcaggctctttggactgggcctggcttcctgcctctcttctcctcccctcttgccccagtgtactcctcagcttggccaccctgagctgctttccacttttcacacaaaccaaatcatctttttcctctgcgctgactgctccttcttcctcggtgcctgactagccctcacgcatccttccgtgactcagcttacactcttttcttccagaaacctctgcctgggccccaaggttgggtgagataaggctcgatgccccttatcagtgctcctgtgacatatgctactttccccagcagcaggtgtttgctggcactgtcattgcccgttagctgcttctgctacagtgtgaactctgccaggatggaaatatggctgctgggttcacagctggatccccagcaccagactgtgccaagaatagaatatgtgcttaaaagatggtcagagaattcagcaacgttccctgagggtcatacagtctagaaatacacacaagacccagactagatgcacatatagatagccctggaaaaataagaaaggttaaaacggataataaggctatttggtggctacgacgagtttattagagagggcaaccggagcccccagccccactcacggacgttctctcaaatccacctctgaaggtgcatgagataaaggagagctatttactgcacctagacgccaggcaatgaaaacggggtgagggtcgagggcagggatctgaggagccacatcaggccagccttaccttcatgttgtcaggggggtctccttggcctgtagttgcacaaacaaatatcaccaggggctcgttaatcagattcacctcaacaaaaagacacacacacgtaagacctccggctgtaaggaccgggcgtccttcccaaaacttgacccccttctcctttactcaggctgacagggcagagggatttatgtgagcagccagaccgtcttctctttcaggttccaacctcctccaggtgctaaactgaactccccttcccaaacctccttccctaaatccgccataagggaaagacccgctctcagagaaaatgcgacgccttttgggtcgatgaccccgcgaggcgggcacgccaggcctgctcgtcccccacgccgaggccctagcgagccctcaccaccgggtaggagtccagggcctgcacccggcagccaagccgccggcgccgggcctcgcgacccagtctctccgacacatcctgagccgtgcctgtctggctgccgaagagcaccagaagctgcgggctcggcatcggggtgcgcccggtggtctggtctgagactaaaaactagaaggcagttcccgccggccgggttgcagggaccgctccgccttccgccttccgccgtcgaccggaagtgacgcactagggacgcgccctgtgggggcatggcgtccgatcgaggcgggcgttcacgggcggccagggttgagtcccgggtcggggccgggggattgccggcgcatcagggccgagggctggggctggcggggccgctcgctgcctctcgctcgcagcagcggcggcaggcgcgggcgagggccacggggagaggagacgcagccccgcgggtggcacgctcggccgggccccggcccgcgctcaacgggcgcgatgctcttctcgctccgggagctggtgcagtggctaggcttcgccaccttcgagatcttcgtgcacctgctggccctgttggtgttctctgtgctgctggcactgcgtgtggatggcctggtcccgggcctctcctggtggaacgtgttcgtgcctttcttcgccgctgacgggctcagcacctacttcaccaccatcgtgtccgtgcgcctcttccaggatggagagaagcggctggcggtgctccgccttttctgggtacttacggtcctgagtctcaagttcgtcttcgagatgctgttgtgccagaagctggcggagcagactcgggagctctggttcggcctcattacgtccccgctcttcattctcctgcagctgctcatgatccgcgcctgtcgggtcaactagcctcaccgaggtgccggagagggagcgctggacaactagaatgttgacctcgagccgaggccctacttgcagcgcaccggaggagaggctctctagtctgaaggcaccgccggcttgcgccgagctgagtgccgggtttccctattccaatcctgtttgaaatggtttcttcagcagggcttaaaagagcagccttcatcctgaaaatgtatttccttttgtttaatgctttgagtagataatcctgaattgaggtcatgaggaggccccccaggccagacagtcctgaacccctctgacacttggaaactgaatataagtaaaatgtccaggtggactctgagtatttcctgtggatcctgggaaagtactgttgcacaaaggctgcaaagctggactcaggaatgtcctccaaccagcagcgctgacctaagagctccctgtgccgtctatccagaccagacttcggtagatgcctttgttagatctatcacatgtaaacgagcttgtatctccttccctgtgccacgagagagattggctttttattccagtctaggcagagacagaagaatgttgaataagagcacgattagagtcctgtctggttatctgttgcccaagaaaagaactctgctgtccaggcactgcttggcttactatcccagcaaagactgcagttttgtggacttttgaccaccttgggctggcactcttagcacacctgagacagatttaagcctccctaagagactgaagagaggaacaggtgtcagatactcataggcactgagatctacaaatgggaagcttgtgagtggcccatctttgttggcctacgaactttggtttgatgccagtcaggtgccacatgagaacctttgctgagatgcaaataaagtaagagaatgttttcctgaaatgaatagtggttgcctgtaaccctcaagggttaaataggatgaatattgagatactctctgctacgtggtgtagctggttacagagctgcggttttaaatggattgaaacctgtggctagagcttagtggatggtggtggtgggaatcacttgttctggagaatccctccttcctgctctaggaggtgggtaactcaggcacccccccccccaccctgtatgaagacaacaatctgggctcatgttaaagacccattgaatagtttgtgaccccagagcccatgacttcttgccagagtgtggtctttgtgggccttgttggcactctgtagagcagggatcagcaaacaatgtcctaaggcctgtttttgtatgacccttgagctgaggatggtttttacacccctaaatgatt

SEQ ID NO: 588602 - DNA, 4001 bp, Homo sapiens
tcacaggcatctaagattaaatgaagcattgcaggtagaagacttaacatacggccaggcgcggtggctcacgcctgtaatcccagcactttgggaggccgaggcaggcagattacgaggtcaggagatcgaaaccatcctggctaacacggtgaaaccccgtctctactaaaaatacacaatattagccgggtgtggtgatgagcgcctgtagtcgcagttactcgggaggctgaggcagcagaatcgcttgaacccgggaggcggaggttgcagtgggccaatatcgcgccactgcactccagcctgggcaacagagcgagactctcaaaaacaacaaaacaaacaaacaaaacacttaacatagtgccgggtatatcattgctggtacatcatttctagtcttggccttcctctcctttaatatagcctgttctactatccagccctgccatgacactcctctgccttaaaaccttccactcttcccaccacctcccttactggatcaagtccaaactgtttggtctggccttgtagaagctgcttccaagtcctatctcagcccaagttgcctctccaggctcagcacctgctgcttcccaccaccaccactagggtcacatcaaactgtacttggctccctaaacacacaagttctgctaggccgtctcattcttgtgagttttcacccataatatagtggaaaagcattggttttaaaatcagacttgggttcacttccagctctattacttacgagctccgtgaccttgggcaaatcatttctactctcggggactaattccttatttataacgctacgaccaattgtgtgtgtgtgtgtatatatatatatatgaccaattgtgtgtgtgtatatatatatggtatatacatatatatatatacaccaattgtgtatatatatatatggtatatatatatacacaccaattgtgtgtgtgtatatatatgtgtatgtgtgtgtatatatatatatatcctaccttatagtgttgctgggaggattcaatgaattaatgcatggaaagtaattagcatcctgcctggtatctagaaaggacttgatcatgttagctataattagtagggtatgtttctacttcactcctcacagcactaactacattgtactgtgactgcctctttatgtgtctgtctccctactggattgtaaagtccatgaaagcacgaagtatatctcttccagcgttatgtgtacacgttaattactgaaatgatatctcttgaataaacgaatgctttaaatgggtcctgttaccaaacaccttcccaaggctgtgagtagatgcacgctccaatattgtctcattttcccgcggcttcgtcaccccactctatgcactctgcaccggtgataccactttaaggtagatgaccgtctccctcgactgtgagcccctagggttgtatactcacctcgcatgcaagtttgaggattaagcgacataagctaagtaaaatgactggttggtgcttaataaaatgtatcactattattcacggaaggagaaataggtcgctgtggagggcgaaagggggaggattctagagccactgcaagatgcgacagggtggggtagagaggggaggcgactcccaaagctgcggaggggacctccgggggtcgacctgtatatgcgttggaggactggggaggggggcccgggtcccaggatccgcggagcccaaggggggctaggcccaggcccgagaagccgcagccccatgtctcccttgcctgtcctccggatagcctcacctcatctactttcagctcctctagagtgggcagctccactatccccggcatgacggctgcagccccgaccccgacgagaagccctcagccgcgtcgcccccgtctccttgaactcccctttcgaccgccgagtgccacacggcgcctgcgcatgcgcatccggcaacacgcaggcgtattgccctgcccaaccacgagcgagggagcgtgcgcaataccaagaacttttcagcctccagcggggtggggcttcgattcggctccgcccacccctccaggttgtcatagtgatgccgtatccactgagactccggatcctaacagctggaagctaaaaacaggcgccatggagtacacagggagcaaatatatcggggaatatgtagatgggaggtaaggggctcatttgattcacttactataccttgaatagctgtgactggaaaaagacggctttttgcttctgcgaaacaccttgtgccaggcactttcacaaacttgcccgagtaattttttcaaggaccatatctaataagcagcaaagctaagatgcattcattccatatatacttatatgtgtgtgtgcattgactgtgtgtgtgtgctatctgccagttttaaacataggaataagaatatttaaaatgtcaagatccttgctcttatggagtttataatccagttggagatgtattgccaataaacaaataagtgataaaataattacagataatggtaaatgctataaaaacaaacacgaagattagggaagagagactggctaatctgaatctacacggtcgcttccttccaggaggagttcacgatctagggattattatagaggattatatacacaaatcactgtagtggactagtagtaaaaaacaattcaacagtttttttttcttttcttttccttccttccttccttccttttttccttccttccttccttcctaccttcctctctttctttctttctctctcgtttttgttttattttcagacaagatctcgctctgttgccctggctggagtgcagtggcctgttcactgcttactgcagcctcaaccccctaggctcaaacaatcttcccacctcagcctcccaagtagctgagactaccggtgtgcaccactacccccagcaaatttttcaacgccttttgtagagacggcatcttgctatgttgtccaagctggtctcatactcctgggctcaagtgatcctcttgcatgagccaccgtgcccagcaattcaacaatgttgagtggctaccgagtaccaggccctgtaattgactctgggcacaatccctgtcttcagaaagttcattcaaacatgatgcgacaagtagacataacagataactgcgattcagtgtggtaagagctgtagtagagagaagcagaggaaacacagaggtggccactcttttttgccaaccaccctggatgaagaaagtggaatctctgtttttatagctgaggaaaccaaggctggacgatatgaagtggtttgctgaaccagtgctagttgtcgggactgtgaagcactcccaccttggggctctgtattcacaagttggtggaattccagggcattctgagttaataggaaagagggatctgtggtctggacagggataggagatagattcctagagagggtggtaggaatgctatgggatgctatctctctaatcattacatcaattttgcaaggaagatgttattatctttccaggtaagaaaggtgacccttacagggcttgagacacttatcctactcagcaggtaagtggcagaggtgcttggtgtgtactccctctcactactcagtgagatagttcaggctgaccttgcaaataaaggaacagaagttaggagaagcaaaatgactggcccaccattatggatacacagctaggaagtaacagagtcaggatttgaacccaatcctctgtccaaaccacattcttacttttcacaaggctctgctacagtgaaggtggtagaattttggcagatagagatggggtattgggcattttaggcacaaaaagttgagaaactacattaattttcgatgggctgtatatgggtgagagagaaacacacagacaaggtaaaagacggaaggctttcaaccatttgcctttggccttctgtgtattttcattgggtttgt

SEQ ID NO: 588603 - DNA, 4001 bp, Homo sapiens
tctgtaggtaacctcatctactcaaatattcttagtaaatgcagagtctgctagaagatacctacaaagtccagaccaaaatgcttaagcagtattttgcaagactataacaaggcatttatagattttttaaagacttccaaaaatatccttattataagtttgttaaagataaaatatagcaaaataatgaaagaataattttaatgtatttaaccagagtaatcaaacctacagaatttttcaggtatagtcatctcccttatttattgatcaatgacactcacatcattttaggtataaggcagacaaccttgacaacgccaatgctggaaaaaggacgttttacatactaagatggggtgtcccaaactcactccaaaatgccctctgcaacactattttaaaaaagaactaaaaatggaactttcccatgtcttccaacttgattaaaaaacacctatccattcaaggaagggacaatccagaatctaagaattataacagatatgattataaaagaataaattaaagtaaggtaaggtgaacttcgacacattattatttatttacttccttatatcacttgctgatggatgggatgtcaactttaaatcagtgactgccaatattccgataatgtcagggatacaaagggtgggagaagagttgaattttaccaccataaataagtatccaatatcactttctcagaaaaattttcaacaattctattgcactagactttgtagcacagtaagaatcagatacatgttgattacaatatgaactcatattcaattcctagctccctgaccaccagcaaatcactgaagctttgtaggcctcagtttcttcacatttaaaatgaggattaggaatatctaccttacaggaataaagaaatgaagtaacacatgtaaaacccccagtagagtgccaagcacacagcaagcacccgtgtgttacgtagtattgttactactattatcctgtcatcagtaagtgttgcaggtaactgaaagcaattctgagatgtttatcatccataacagtcctcaagaaaatacccagaggccttgaaaataaagttcttgaatgagtgattttcttcaaagcccaaaatgcgatttttttaatgaaacactgtgttaaaagtacagaacggtagtttagaaaggtagctcttgaatgtgactcacaaggcataccaacaggaccctgtcttttacggggatcacatggggctgtactatcagctaggggctggctgtgccctctggtggttggatactgtgttacttggtctctagaacctcacacttaaaagtcagacaagtgtcctcaaatacttaaatcacagaattttaattctagcgagtccttggttattattctgagggaagatttctacagtcaaaagagaaccaaacgtgcagcgtcctggaaaacctaagtattaaaattcgcccccgtccactgtacttgacagtaaaaggcatgattctctcaaagccatacatattcctggactcctgcctcccgagactccaggaggactctcgggactggccagtgtcccagagcactgagcgttatcagtccttggtgtggctgcagggagcggacgttcagtgttcaggctgccggcagcagtgggatgtgttgggggggaccggagaggtctgtcactcaccattttcctccaaggggatttattctccaaaaatttattccagaatttctccataggccccatcttctgtgggggcagcaccggctcccgagggctcagctcctggtccttcagccatcgccttctcagctctcgcagctgctgcagccgcagtttctcatccggagtgtaccccgtcatgtcgccgctggtaccaacgcaaaaggacacggcgcaccctcgaactacggactagttacttaagcgcgctcccgctctgcaaagcgaccttgcgggaacgccgagcgccgcgcgcggttattacgtcacatcctggttccgcctctgcaagggccccagattcctcgcgaggaaagcagtgtgtgggcatgcacaaaggtctccacctccagttctctctacgcccacctccgctatacccgaccaaattaggaccgggtggggacaaggagtactcgtagttgtggggcctgaggaaagtgacagattagacgaaagtatgctaaattagaggactggaggttttgctaaggaagaacttgtatgctgggaggaggaaggataagcataaatgtttcagtgaatatgctggccagattcaaaattatttgcttgcctctcccaccttggaatgacctagagagtgtatgaaaatagttacatcccagttcaaatcccagctatgccagtaactgctgaagtgccctgggcagctgtctcatctgtccctccatctgtacaggaatagtgaaaagagtagcttaatatctagcaaaattgcatagatgaattcatgctttcacccaaaaatacgtgtggtgaaaatatgaaagagcatgcacgactattcagcacgattcataataccaaaatattggaaattacccccaaattcctaaataaaggactgcttgaataaattgtagtacaacagtcaaaagacagcattacaacgaattagtttaaaaatcttaattgactcttattcgtgattctagaatcaaaaaacacctcattctataaagtagaatgagtgttctgatcagctgagcagaggcggttggttttattggcaaataggggctgaagaaagcagaaaccgaacaaaaagtggactcatcgtttcaaagttacttttagggttaaagcagaagaaacttccttgtttcactgactcagacttaagggaatttcctattttttgggaaactggcccatttcaaagttcagtttgattgtgtggtacttagcacaaacgactccattctggtttggtctggtctgctggggcctagtgcgtgaagctagtccaaaacagtggcttcccaaaaactttcacacaacaaagcaatgaaatgctaatacaatcgtcaaaagtaataaggaagaactctatatacatctgtggtgtgatctccagaatacattacaaagtggaaaaaaaatggataggaatttgtacagtatgcttttacccaaaaagagaaagatggtggtaatttcaatatatatacatattttcttaaattttcaaaataatgggaatgaaaacaattgaggtttttaaagatgctacctatggtggaggaaataaataggatagaggagacagggatagaatctagacatctctggaaacatcttacttcataaatttgactttagaaccaagtaaatatttcatattgtgaaattaaatttagcttaaagatgtctccgtattttgagtccttatataatgaactgcaacccaacttagtatgcaatttaactcacagcctaacttaggaatatacttctgtaacaaataactgagtctcagccaatcatcacaggtggtcaactgatcagcccatgttcaaataaggcaaaggccaacctgtagccaatcaagctgtttctgtatctcatttctgttttttttctatgcgtgctgcctggcctctttgtggaacgatactttctgaacctcctctggttctgagggctgcctgattctcaaattggtcattgctcaattaatttctgctaaatttaatttttctaaagttttaattttaacaatatcattacaaaacaaaattaaatttacaaaaagcagtccataaaaatcaagtaaaaaccagtagctcttaattggtccacttggtggcataatctcaaaggtacacatcattctaaatacaatagcccttgtaacaacgctagggttagtagtgccaatcccctccacttggcacaatcaaacatccacatataactttggactctccaaaaacttaatagcctactcttgaccagaagt

SEQ ID NO: 588604 - DNA, 4001 bp, Homo sapiens
aaagccaggcgctccatttctggaaacccaaacagctctaaatccagaccaacctgggtctaaggccttcagtctgagactttattttgtggagatacaaactactttttagtcatttccgaagcagacgggacagcagaggctgacaaaccacagggaccattttaaatcctgggccttttcttctgggaagttaggcaagaaccttcccaaatgtttgcccgtcaggctctctgccagggagtgactcattccacggctccccacaggcatattttatttgggggtgggggacgcagcgagggcttggccttgatgggggaaggagagggggcatttccagcaaacccagaaggtgttttctttttttcattttcaggagaaaaaagaaaaagaatgtgggtcttttttgcttccttccaggttttgtttgctaaaagaagacgtccaaagttcattcggtaagctcaaactcgctgagtccaaactcgctgagtccggggcaggcgcttccagacggctctgcgtccctttcaatgaaattcttcttccattaacgacagggtttttaaacgtgcctccaagacctgcctgcacgtactgtacaccaaactaaggcgacattttcccccaaaaaaggcaagctgaatttggaaaagtcagaccaactagggagctctggaatttctaaagtttgccttaaagcaattaagactttcagctgcaaagattttcaacagttagagagcacgcacacacacaaaagcctgtcagtcaaaactgcaaggacagacctcggaagctggtgtcccaagcccgctgtgatcaatttgttactgtcctgggattcacacttggagcctaggagaggtataaataaatcaaaagatccgtctacttagcagggcaggcagagaggcccccacatacacaggcaagtctagggtcagccccccaggcctggctggagagagacaagaacaaagacaggagagcctggaggatatttaggaaaacacacgtcctcgggtgcccggccgaggggcccaccacagcctccgctcgcccagcctgtgtatgcagagagggtcctgccagtggccctgccgcagcctggctctaagacctttgcctctgtcaggcccagccaggctctgagtctgccctcctggcccctggttcaccggatcaggcccagccccgacccccagcccatgccaggccgcttctctctccacgggctccctggctcgggggccatcactgtgcaaaggcctggtgggcgcaaagggggccggcccctcaacctcagtaataaacacgctcgcacggccctgcacactcgttatactcacacccacacaggcatactttcgcccttctaggctcacgcatgtgcttgcacacaaatcactttggaatgcacacacgtgcacacacacactccctgagacccgcacgtactccctgcggcgcccggcacactcctccgcccgtcgtccccactcgggaagtgggtagcggggagccatgcccgcgtccccgcacgcactcaccccaacaacgccaccagacgctccggggtgcacacgcacacccgccggggacgcgcacaccccgggacacgcggacacgccgcccccgcccgcccggccgccgacacgctcagccccgcgcggccacactcgcgcccgcctcccgctctcccccgcggagccgtgggcgcgcgcccgccctcggcccggctgggggtgacggccccgccgcccggcccccgcccttctccgggccgcggggccccaccggcccggccccagccccaggcgactcaccggcgcgcgggcgggctcggctgccgctgggggaccggtgcgctggcccgcgggcggctggagcggtgcgtcccacacgagtttgcggcgcagcggccgcacgcccgtcagctcggttccgccgccgccgccaccgcctgcgcgggcccgcgcgcccgcgcgcccgcccctccccgccgcggggccgcgccgcccccagcgctcgtgcgcgctgccgccacgcaagcttgaggggcggggggcgccccggcggcgtccttcctgggcctggacccctcgactccgccgagttctgcggccgatccgctcggccgaggaaccccttccccatttcagagatgggaagactgaggcccagactcacagggcgcaggccggcgtctccccatcttctccggctctagacttatgatgagggtctgcagtcagccaacccttggactcctgtgcgtcttcggattccccatcgcctagcattgctcctaccacagccctagtcatactgaaattggcacagtaacaagcacttattgtgcaccagctgaatgcaggcactgaagtaggctccaagagtattccgatgaggggaaggccctgccccctgccctcaaagtgccagcgactcttcatctggagctcccacttcctgtggcccccgggggaccagcaagagccaatgtgcagaggtttctggaagtagtaaaagtccccactaaagaatgttgaacgccccctctagaagtcagagcctccctgagacccaagcagctcagttctcacttcacctcctccccgcaccgagagcggccgctcctggctgggctgtttccacccctgctgcctcccctccacattcaaaactgtgctgcaccccaggagggctggagccagggacactgactgcctgcttgggcgcagcactgtactgggcacagggtgaatgcccgtctggcttctgtttgccaaatgagtggaagtgcttcaactggccgtgatctgtaataatgacaccaacggagcgtccaccacgtgtgccaacgttacccttgtgcccattttacagatgggctttgaggcttagaaatgaaatttcaggctgggtgcggtggctcacacctgtaatcccagtactatgggaggctgaggtgggaggatgccttgaggctgggagtttgaggccagcctgggcaatatagcaaaaccccatgtctacagaaaaatgtaagaattagctgggtgtggtagtgcctgcctgcagtcccagctactcgggacgctgaggcgggagggtctcttgagcataggagttagcagctgcagtgagctatgatcgcaccactgcactccaacctggacaacaacaataaaaagcaaattcttttgttcaaagtcacccagatggtaagtggttgagctggaaagtgcacggcagattgtctaattccagtgcctgtgtggccaatcactaggcagccctgcctcaggaacagcatagccctgggcttctggaacaagagggcagacgaggcagcagctggcccacaggagcgggcctggtcccagctcttgtggatgaaaatgcagacatcacaaaccaatggggaggaaatggattgttctgcaaattgtttagccgtttagctggagatctgtttacagccttgcctcccatgatatacaccacaataaatgtcagacagattgaaaagttaaatagaagaaataaacactgcaacaaataatagaaagaaatcgaagttctgagacagcgtattgcagtgttactagaggatttgtgatactggccatattcatgcagcaaacattagttcagtcattggttcacccgacacatctatgagcaccttccatgggccaggtacttttctaggcactgggataaaggagtgaacaaaatatggccctttcttggggcttcagtcaagggggagggatggggtgggaggaagacactgaatatctgccatttcaaggataagaagtttgggccgggcgcggtggctcacgcctgtaatcccagcactttgggaggccgacgcaggcggatcacaaggtcaggagatcgagaccatcctggataacacggtgaaaccctgtctctactaaaaatacaaaaaaatagccgggcatggtggcaggcgcctgtag

SEQ ID NO: 588605 - DNA, 4001 bp, Homo sapiens
cttgatgggggaaggagagggggcatttccagcaaacccagaaggtgttttctttttttcattttcaggagaaaaaagaaaaagaatgtgggtcttttttgcttccttccaggttttgtttgctaaaagaagacgtccaaagttcattcggtaagctcaaactcgctgagtccaaactcgctgagtccggggcaggcgcttccagacggctctgcgtccctttcaatgaaattcttcttccattaacgacagggtttttaaacgtgcctccaagacctgcctgcacgtactgtacaccaaactaaggcgacattttcccccaaaaaaggcaagctgaatttggaaaagtcagaccaactagggagctctggaatttctaaagtttgccttaaagcaattaagactttcagctgcaaagattttcaacagttagagagcacgcacacacacaaaagcctgtcagtcaaaactgcaaggacagacctcggaagctggtgtcccaagcccgctgtgatcaatttgttactgtcctgggattcacacttggagcctaggagaggtataaataaatcaaaagatccgtctacttagcagggcaggcagagaggcccccacatacacaggcaagtctagggtcagccccccaggcctggctggagagagacaagaacaaagacaggagagcctggaggatatttaggaaaacacacgtcctcgggtgcccggccgaggggcccaccacagcctccgctcgcccagcctgtgtatgcagagagggtcctgccagtggccctgccgcagcctggctctaagacctttgcctctgtcaggcccagccaggctctgagtctgccctcctggcccctggttcaccggatcaggcccagccccgacccccagcccatgccaggccgcttctctctccacgggctccctggctcgggggccatcactgtgcaaaggcctggtgggcgcaaagggggccggcccctcaacctcagtaataaacacgctcgcacggccctgcacactcgttatactcacacccacacaggcatactttcgcccttctaggctcacgcatgtgcttgcacacaaatcactttggaatgcacacacgtgcacacacacactccctgagacccgcacgtactccctgcggcgcccggcacactcctccgcccgtcgtccccactcgggaagtgggtagcggggagccatgcccgcgtccccgcacgcactcaccccaacaacgccaccagacgctccggggtgcacacgcacacccgccggggacgcgcacaccccgggacacgcggacacgccgcccccgcccgcccggccgccgacacgctcagccccgcgcggccacactcgcgcccgcctcccgctctcccccgcggagccgtgggcgcgcgcccgccctcggcccggctgggggtgacggccccgccgcccggcccccgcccttctccgggccgcggggccccaccggcccggccccagccccaggcgactcaccggcgcgcgggcgggctcggctgccgctgggggaccggtgcgctggcccgcgggcggctggagcggtgcgtcccacacgagtttgcggcgcagcggccgcacgcccgtcagctcggttccgccgccgccgccaccgcctgcgcgggcccgcgcgcccgcgcgcccgcccctccccgccgcggggccgcgccgcccccagcgctcgtgcgcgctgccgccacgcaagcttgaggggcggggggcgccccggcggcgtccttcctgggcctggacccctcgactccgccgagttctgcggccgatccgctcggccgaggaaccccttccccatttcagagatgggaagactgaggcccagactcacagggcgcaggccggcgtctccccatcttctccggctctagacttatgatgagggtctgcagtcagccaacccttggactcctgtgcgtcttcggattccccatcgcctagcattgctcctaccacagccctagtcatactgaaattggcacagtaacaagcacttattgtgcaccagctgaatgcaggcactgaagtaggctccaagagtattccgatgaggggaaggccctgccccctgccctcaaagtgccagcgactcttcatctggagctcccacttcctgtggcccccgggggaccagcaagagccaatgtgcagaggtttctggaagtagtaaaagtccccactaaagaatgttgaacgccccctctagaagtcagagcctccctgagacccaagcagctcagttctcacttcacctcctccccgcaccgagagcggccgctcctggctgggctgtttccacccctgctgcctcccctccacattcaaaactgtgctgcaccccaggagggctggagccagggacactgactgcctgcttgggcgcagcactgtactgggcacagggtgaatgcccgtctggcttctgtttgccaaatgagtggaagtgcttcaactggccgtgatctgtaataatgacaccaacggagcgtccaccacgtgtgccaacgttacccttgtgcccattttacagatgggctttgaggcttagaaatgaaatttcaggctgggtgcggtggctcacacctgtaatcccagtactatgggaggctgaggtgggaggatgccttgaggctgggagtttgaggccagcctgggcaatatagcaaaaccccatgtctacagaaaaatgtaagaattagctgggtgtggtagtgcctgcctgcagtcccagctactcgggacgctgaggcgggagggtctcttgagcataggagttagcagctgcagtgagctatgatcgcaccactgcactccaacctggacaacaacaataaaaagcaaattcttttgttcaaagtcacccagatggtaagtggttgagctggaaagtgcacggcagattgtctaattccagtgcctgtgtggccaatcactaggcagccctgcctcaggaacagcatagccctgggcttctggaacaagagggcagacgaggcagcagctggcccacaggagcgggcctggtcccagctcttgtggatgaaaatgcagacatcacaaaccaatggggaggaaatggattgttctgcaaattgtttagccgtttagctggagatctgtttacagccttgcctcccatgatatacaccacaataaatgtcagacagattgaaaagttaaatagaagaaataaacactgcaacaaataatagaaagaaatcgaagttctgagacagcgtattgcagtgttactagaggatttgtgatactggccatattcatgcagcaaacattagttcagtcattggttcacccgacacatctatgagcaccttccatgggccaggtacttttctaggcactgggataaaggagtgaacaaaatatggccctttcttggggcttcagtcaagggggagggatggggtgggaggaagacactgaatatctgccatttcaaggataagaagtttgggccgggcgcggtggctcacgcctgtaatcccagcactttgggaggccgacgcaggcggatcacaaggtcaggagatcgagaccatcctggataacacggtgaaaccctgtctctactaaaaatacaaaaaaatagccgggcatggtggcaggcgcctgtagtcccagctacttgggaggctgaggcaggagaatggcgtgaacccgggaggcgaagtttgcagtgagccgagatcgcgccactacactccagcctcagtgacagagcgagactctgtctccaaaaaaaaaaaaaaaagaagtttggtggagaaataactcggaagggtaggaggacccaggggtgcttttttatagggggtgctggaagaaggcctttctgatgaggtgacatctgagcagaggcctgaatgagggagtgggagaagtcagtaggggcccactgtgtggagggcaggtcccatgttctggca

SEQ ID NO: 588606 - DNA, 4001 bp, Homo sapiens
gctaaagtactcagcactaggtctgtgcaccttagccagtcaaataccatatcccaagtgcaatggaaagaggaaaggctgtgaggctgggcaggtgacttcggattctgcccccacctcctctcagctgccccaggacacaggcttgacccccgtgtgcctcagtttccttgtgcacaaaaccaaaagcattttctgtcacagaagaccaacgggagattcacaccccctagaacggctcccagcacacagccccttctgctccgcaaaagggaacttcctccccatttccctcctctgcccttgttcaaacccaccagaaatgccaccagttaaagccaggcgctccatttctggaaacccaaacagctctaaatccagaccaacctgggtctaaggccttcagtctgagactttattttgtggagatacaaactactttttagtcatttccgaagcagacgggacagcagaggctgacaaaccacagggaccattttaaatcctgggccttttcttctgggaagttaggcaagaaccttcccaaatgtttgcccgtcaggctctctgccagggagtgactcattccacggctccccacaggcatattttatttgggggtgggggacgcagcgagggcttggccttgatgggggaaggagagggggcatttccagcaaacccagaaggtgttttctttttttcattttcaggagaaaaaagaaaaagaatgtgggtcttttttgcttccttccaggttttgtttgctaaaagaagacgtccaaagttcattcggtaagctcaaactcgctgagtccaaactcgctgagtccggggcaggcgcttccagacggctctgcgtccctttcaatgaaattcttcttccattaacgacagggtttttaaacgtgcctccaagacctgcctgcacgtactgtacaccaaactaaggcgacattttcccccaaaaaaggcaagctgaatttggaaaagtcagaccaactagggagctctggaatttctaaagtttgccttaaagcaattaagactttcagctgcaaagattttcaacagttagagagcacgcacacacacaaaagcctgtcagtcaaaactgcaaggacagacctcggaagctggtgtcccaagcccgctgtgatcaatttgttactgtcctgggattcacacttggagcctaggagaggtataaataaatcaaaagatccgtctacttagcagggcaggcagagaggcccccacatacacaggcaagtctagggtcagccccccaggcctggctggagagagacaagaacaaagacaggagagcctggaggatatttaggaaaacacacgtcctcgggtgcccggccgaggggcccaccacagcctccgctcgcccagcctgtgtatgcagagagggtcctgccagtggccctgccgcagcctggctctaagacctttgcctctgtcaggcccagccaggctctgagtctgccctcctggcccctggttcaccggatcaggcccagccccgacccccagcccatgccaggccgcttctctctccacgggctccctggctcgggggccatcactgtgcaaaggcctggtgggcgcaaagggggccggcccctcaacctcagtaataaacacgctcgcacggccctgcacactcgttatactcacacccacacaggcatactttcgcccttctaggctcacgcatgtgcttgcacacaaatcactttggaatgcacacacgtgcacacacacactccctgagacccgcacgtactccctgcggcgcccggcacactcctccgcccgtcgtccccactcgggaagtgggtagcggggagccatgcccgcgtccccgcacgcactcaccccaacaacgccaccagacgctccggggtgcacacgcacacccgccggggacgcgcacaccccgggacacgcggacacgccgcccccgcccgcccggccgccgacacgctcagccccgcgcggccacactcgcgcccgcctcccgctctcccccgcggagccgtgggcgcgcgcccgccctcggcccggctgggggtgacggccccgccgcccggcccccgcccttctccgggccgcggggccccaccggcccggccccagccccaggcgactcaccggcgcgcgggcgggctcggctgccgctgggggaccggtgcgctggcccgcgggcggctggagcggtgcgtcccacacgagtttgcggcgcagcggccgcacgcccgtcagctcggttccgccgccgccgccaccgcctgcgcgggcccgcgcgcccgcgcgcccgcccctccccgccgcggggccgcgccgcccccagcgctcgtgcgcgctgccgccacgcaagcttgaggggcggggggcgccccggcggcgtccttcctgggcctggacccctcgactccgccgagttctgcggccgatccgctcggccgaggaaccccttccccatttcagagatgggaagactgaggcccagactcacagggcgcaggccggcgtctccccatcttctccggctctagacttatgatgagggtctgcagtcagccaacccttggactcctgtgcgtcttcggattccccatcgcctagcattgctcctaccacagccctagtcatactgaaattggcacagtaacaagcacttattgtgcaccagctgaatgcaggcactgaagtaggctccaagagtattccgatgaggggaaggccctgccccctgccctcaaagtgccagcgactcttcatctggagctcccacttcctgtggcccccgggggaccagcaagagccaatgtgcagaggtttctggaagtagtaaaagtccccactaaagaatgttgaacgccccctctagaagtcagagcctccctgagacccaagcagctcagttctcacttcacctcctccccgcaccgagagcggccgctcctggctgggctgtttccacccctgctgcctcccctccacattcaaaactgtgctgcaccccaggagggctggagccagggacactgactgcctgcttgggcgcagcactgtactgggcacagggtgaatgcccgtctggcttctgtttgccaaatgagtggaagtgcttcaactggccgtgatctgtaataatgacaccaacggagcgtccaccacgtgtgccaacgttacccttgtgcccattttacagatgggctttgaggcttagaaatgaaatttcaggctgggtgcggtggctcacacctgtaatcccagtactatgggaggctgaggtgggaggatgccttgaggctgggagtttgaggccagcctgggcaatatagcaaaaccccatgtctacagaaaaatgtaagaattagctgggtgtggtagtgcctgcctgcagtcccagctactcgggacgctgaggcgggagggtctcttgagcataggagttagcagctgcagtgagctatgatcgcaccactgcactccaacctggacaacaacaataaaaagcaaattcttttgttcaaagtcacccagatggtaagtggttgagctggaaagtgcacggcagattgtctaattccagtgcctgtgtggccaatcactaggcagccctgcctcaggaacagcatagccctgggcttctggaacaagagggcagacgaggcagcagctggcccacaggagcgggcctggtcccagctcttgtggatgaaaatgcagacatcacaaaccaatggggaggaaatggattgttctgcaaattgtttagccgtttagctggagatctgtttacagccttgcctcccatgatatacaccacaataaatgtcagacagattgaaaagttaaatagaagaaataaacactgcaacaaataatagaaagaaatcgaagttctgagacagcgtattgcagtgttactagaggatttgtgatactggccatattcatgcagcaaacattagttcagt

SEQ ID NO: 588607 - DNA, 4001 bp, Homo sapiens
tcctgggttcaagtgattctcctgccatttgaacctgcttctcagaccagccagatggagcaattacagaaagaaacttagcacaagcccaggggctggaaggactaccacgcccaggcagactggctggcagggaggaactgacacactactcaggctcccgagtagctgagattataagcacacaccatcacgcccagctaatttttgtagttttagtagagacggggtttcgccatgttggtcaggctggtctcgaactactgacctcaggtgatcctcccaccctggcctctcaaggtgctgggattacaggtgtgagccaccatgcccagccatagtcttggcacttcttgtgggaccttggggaagtcccgtcccctccctgagccttaaacgtccccatccacaaaaaggaacagcccaagcttgcagggaggctgcgaggactctgtgagcacacagtgggcagccagggggcaccaaggccccttcttccctttcccatctggtggcatctacacaggtttctccctgaaggtgggctgttgaggacacaaactgcttcctttgtcagcatgtctgcctcctctgccagcctttaagggcagggactgaccttcgcggtcatctgtaaacctccagtgcctcacccaggcccggtgaaaagagggccacccagggggcgttggcagaatgaatctctgactagtaggtggagggggctcttcccaccctcctgcaaccccaagaaacctctgctgagggctcagcatccctgtggtcacagatcagacaaaagtcactggagattcaaaaccaactgggccgcacactgcagggttcccagggcctttttgaaaatcgaggagcatcccaatcacctttcacttcctcctcaggtaataaaacccaattctggaagaaaaaaaatgcagaagctgtaaacatcttgtctctcagttaaaggagcaacaaagcatttggcttctgcccagaagattcttgactctgggacctggtcaaggctgggtccgctcccagcctccctgaagatgaagctgagatctgctgagtgcttcctctgtgtcgggcactgcaggcagcagctcagcacatccctgctgtgaggtctgcaagcccttcacttttacagatgaagaaactgaggtgcagagaagttaaatgacttgtcgagctcatgcagctgataagcagcatggcctgtttttgaactcagatccaaccctctccaaagtctgcattttaatcatttgcctgaggtgatccttggtgaccacaatgcagctggggagagctgcggtctcactctaggagtcccaggcccgctagcaggcccaccatcccagagacccctgcctgcctgggaaatgatcttgctctcacctcgaggccttggcaggctctgctcctcctgccggaaatgagctgcctcccagcaaacttctctcctgggcatctcctccaggcagccttcctggactcaccccgtcactcccagctccacagcctgctcccccgtgctgtctctaattcatgtgtcttcttctccttgaacatggaaatgtccttgagggtagagactaaaccactctctccatggccccagcagttggcagaggagaggctgggtaactggttgctgactcagtacagaaacacctgaggccaggagggagaagcctggccccccgagaccaactcatgccagggggaccactggggagaggctggggcttaagggaagggatggatttcagagcagaaccgcagctactaccctgctgactgacagtggaagaaggaccaagtggaacagccccgggggctggagggcttcggtgtttgtaaaaaactcaccctgggtcccaggcgagcatctagaatcccatccagtggcctccatgcagggaaagctttcaagcccgtggcctcccctaattttctctccttcccacaggcaggaaggggcagacaaaacccaccctagagaaagaattgctttttctgcttccctggaaactcagaagttctggccaagcccagggattactcaatgtgaaagcagccatcagcagccacccctgtcccaggctagtggcaaaggtcctgtcaggttggtgggactggctgaatgggcagccccaccagcaggtggctgagccagcggtgggtggcagaggtgcagccaggtcaaggtccctggagctccagccctggaggtccctggggcctggttccccatccctcgctggacacacccctaagagcaagcggttcccacagcaggaggcagagaaagtcagggtaccttttgaagtggctcctgagaagctccagggaaggtctgctccactctgggttgagggcagacatgaggtgcctgggcctccagggagctgggtcgcctctctgggctggggtgggtgcaggaagaagggcctctgtctccgcatgggacttccccttcccaagactccggtccccagacaccgccaaaaggaaactcccccaccatgcgctgctctaaaaatagctccggctgccacctccaaagtgaatggaacttgtcacagccgccacggagccccctgcttaccagggactggaatctgatggcagcaccacccgattagaccagtgtaggctcagggagggacaagggtcctttcctttggtccttgtgctcgctccccacctatccacactggggcccagcaaaatgctgaaaagcataactgttcttgctgtttgtttatttatttatttatttgagatggagtttcgctcttgttgcccaggctggagtacagcagcatgatcttggctcaccgcaacctccgcctccgaggttcaagcgattctcctgcctcaggctcccaagcagttgggattacagacacccaccaccatgcccggctaattttgtatttttagtagagatggggtttctccatgttggtcaggctggtctcgaactcctaacctcaggtgatctgctgacctcggcctcccaaagtggtaagattacaggcgtgagccaccgtgaccggcccttgctgttcctttaaaagcttaaccctttctattctctcctttgtaaactgggcccaaatccttggttgcccatgagatgagagccctggcaggcggcagtcctggttcaagttctggcttagccacgtcccagttgtgtgcacctgcattctcacgggtaaaacagggacaagggtagtatctactgcccggggtgctggtgggttacatgacattgcacgagttgaaagagcttagggccaggcggggcacaaggcagataccccatcagtggggttgttatttgattgttattgcatctttattcgggccctgcattctccaaaacgagggtgcggatccaggatcagaggatgaggagtgttcgtcttcccttcgggaccctgcaatgactcagacacagttcctgttcttacaggtccccaggagcaggccctggaactgctacccacaagctaaaaagagcacgaagctgctcaggaaaaggacccatggctgctgcttctggcggggccaggtcacggggagctttggacaacaggtagaaaacctgaggtggcccagaaggaccagcagggtttggactaaaggggagggggattcccagtagaggacaccgtgggatcaagggcacagaggccagacagaccccccgccacccagtctgtgagaggaatctgggctctgcaggccagccccagcccctggtccccaagaggggctctccgtggccagcacctgcttcctttttcagaacgagccacttctgccctgggcaaaccacccctgtgccccatctgcagctcatcgccactgggactgacacaggcatacagcagctgaggccctggaggacgcgtgagtgagatcctggcaccgaggctccgccacctgacacacaccttcccaccagccggccccaa

SEQ ID NO: 588608 - DNA, 4001 bp, Homo sapiens
ctctgtgagcacacagtgggcagccagggggcaccaaggccccttcttccctttcccatctggtggcatctacacaggtttctccctgaaggtgggctgttgaggacacaaactgcttcctttgtcagcatgtctgcctcctctgccagcctttaagggcagggactgaccttcgcggtcatctgtaaacctccagtgcctcacccaggcccggtgaaaagagggccacccagggggcgttggcagaatgaatctctgactagtaggtggagggggctcttcccaccctcctgcaaccccaagaaacctctgctgagggctcagcatccctgtggtcacagatcagacaaaagtcactggagattcaaaaccaactgggccgcacactgcagggttcccagggcctttttgaaaatcgaggagcatcccaatcacctttcacttcctcctcaggtaataaaacccaattctggaagaaaaaaaatgcagaagctgtaaacatcttgtctctcagttaaaggagcaacaaagcatttggcttctgcccagaagattcttgactctgggacctggtcaaggctgggtccgctcccagcctccctgaagatgaagctgagatctgctgagtgcttcctctgtgtcgggcactgcaggcagcagctcagcacatccctgctgtgaggtctgcaagcccttcacttttacagatgaagaaactgaggtgcagagaagttaaatgacttgtcgagctcatgcagctgataagcagcatggcctgtttttgaactcagatccaaccctctccaaagtctgcattttaatcatttgcctgaggtgatccttggtgaccacaatgcagctggggagagctgcggtctcactctaggagtcccaggcccgctagcaggcccaccatcccagagacccctgcctgcctgggaaatgatcttgctctcacctcgaggccttggcaggctctgctcctcctgccggaaatgagctgcctcccagcaaacttctctcctgggcatctcctccaggcagccttcctggactcaccccgtcactcccagctccacagcctgctcccccgtgctgtctctaattcatgtgtcttcttctccttgaacatggaaatgtccttgagggtagagactaaaccactctctccatggccccagcagttggcagaggagaggctgggtaactggttgctgactcagtacagaaacacctgaggccaggagggagaagcctggccccccgagaccaactcatgccagggggaccactggggagaggctggggcttaagggaagggatggatttcagagcagaaccgcagctactaccctgctgactgacagtggaagaaggaccaagtggaacagccccgggggctggagggcttcggtgtttgtaaaaaactcaccctgggtcccaggcgagcatctagaatcccatccagtggcctccatgcagggaaagctttcaagcccgtggcctcccctaattttctctccttcccacaggcaggaaggggcagacaaaacccaccctagagaaagaattgctttttctgcttccctggaaactcagaagttctggccaagcccagggattactcaatgtgaaagcagccatcagcagccacccctgtcccaggctagtggcaaaggtcctgtcaggttggtgggactggctgaatgggcagccccaccagcaggtggctgagccagcggtgggtggcagaggtgcagccaggtcaaggtccctggagctccagccctggaggtccctggggcctggttccccatccctcgctggacacacccctaagagcaagcggttcccacagcaggaggcagagaaagtcagggtaccttttgaagtggctcctgagaagctccagggaaggtctgctccactctgggttgagggcagacatgaggtgcctgggcctccagggagctgggtcgcctctctgggctggggtgggtgcaggaagaagggcctctgtctccgcatgggacttccccttcccaagactccggtccccagacaccgccaaaaggaaactcccccaccatgcgctgctctaaaaatagctccggctgccacctccaaagtgaatggaacttgtcacagccgccacggagccccctgcttaccagggactggaatctgatggcagcaccacccgattagaccagtgtaggctcagggagggacaagggtcctttcctttggtccttgtgctcgctccccacctatccacactggggcccagcaaaatgctgaaaagcataactgttcttgctgtttgtttatttatttatttatttgagatggagtttcgctcttgttgcccaggctggagtacagcagcatgatcttggctcaccgcaacctccgcctccgaggttcaagcgattctcctgcctcaggctcccaagcagttgggattacagacacccaccaccatgcccggctaattttgtatttttagtagagatggggtttctccatgttggtcaggctggtctcgaactcctaacctcaggtgatctgctgacctcggcctcccaaagtggtaagattacaggcgtgagccaccgtgaccggcccttgctgttcctttaaaagcttaaccctttctattctctcctttgtaaactgggcccaaatccttggttgcccatgagatgagagccctggcaggcggcagtcctggttcaagttctggcttagccacgtcccagttgtgtgcacctgcattctcacgggtaaaacagggacaagggtagtatctactgcccggggtgctggtgggttacatgacattgcacgagttgaaagagcttagggccaggcggggcacaaggcagataccccatcagtggggttgttatttgattgttattgcatctttattcgggccctgcattctccaaaacgagggtgcggatccaggatcagaggatgaggagtgttcgtcttcccttcgggaccctgcaatgactcagacacagttcctgttcttacaggtccccaggagcaggccctggaactgctacccacaagctaaaaagagcacgaagctgctcaggaaaaggacccatggctgctgcttctggcggggccaggtcacggggagctttggacaacaggtagaaaacctgaggtggcccagaaggaccagcagggtttggactaaaggggagggggattcccagtagaggacaccgtgggatcaagggcacagaggccagacagaccccccgccacccagtctgtgagaggaatctgggctctgcaggccagccccagcccctggtccccaagaggggctctccgtggccagcacctgcttcctttttcagaacgagccacttctgccctgggcaaaccacccctgtgccccatctgcagctcatcgccactgggactgacacaggcatacagcagctgaggccctggaggacgcgtgagtgagatcctggcaccgaggctccgccacctgacacacaccttcccaccagccggccccaactgtcgggcacatgccaggtgccagcacccttgggggcggaggctgggcccaggccagccatccacaggccctgggggccggactcccagtcaggacctggtgcgtgtggcaccccttgaggaggtggccacagatccatgtcccctacaaccctgctagtgggcgttaccagcctcatttcacagagaaggctccagataggccaggccagggcctcctgagagtcaccgtgagcccccagcatcatctccacgtggctgtgcacacctcagtgcatccaggtggcggcgtcttctttgcccagtcctaccacccgtacggtgtgacggggctggcgcgtaatcacagcatctggggccacaccatggcaacccctgcaccttcctgtgtcgctctccttaccaggatcctcactgaaccctggagttgggcttaggaagtatgtggc

SEQ ID NO: 588609 - DNA, 4001 bp, Homo sapiens
cacatgagcgggctttccgcagattttaaatgttgtccatatatcactttaacgaaaagtaaaatgcaaacagaaaaacaaccaactttctttccagcatgtgtacaagccagccctcccccaccacccagccaagaagcagaaccacccgatcattcacagggcagcagagtgctgatccccaggcagctgaaggcgctagccgtggcatccccaagaggtgccccaccccgcacacggcctgtcccctcacctcgccctggcgcctggtcttgggggaaggactgaaaaagttgtgcaggacagagagctctgtactgaagagagcgctctccttctccaggatgtactgcttcaggagtggggaaacctcgtccccgaagagggcctggttgtcttgccagatctgccgcttcacctccacggcgcaggctcgatacagctccttgtcagccataaccagcttcagttttttctccggaacctacatgacaccacaggctgcctgtgagtggcacctgtgtccctgggtctccttcaagacaagccaagaggcctcagccccgcagagaccacctcgagctaagctccaccccacagggcacctatgactggttccccggccccagcatgtcagacagacatgctaaataccaacagctctttcccaggaggggccccacaccctaactccagtgctaaggttcggtctccacgcggctcatgtgggagaagtcagcacagagctcaccatggacagcacttgggcaggcagcacaggaagctcccggagctaggcggccaccggaacttccactaaccaagggcatgagagtgggcggacggtccacgccatcagggttagggttagggccctaccttgggcaggtgcttcatgacgcacatcaccacgggctgcagggacggcatcttcaccagagaaaagctcttctccagaaggtcttccagcttcttgtacctggaacaactcacaggattgatggtgcagcgatgcgccaaatcgcagcagctacctgcctgtccctacacagataacagctaccaggacaagcctccacgcccaggacacatgggtcaaggggtcactcagacacaggcccaggccacctctgggagcaaggatgtggagccaaaaggacaataaatgcccctgagtcgatccaaggctgagaggccggctgcacatctcacctgcccacccctcccgctgacccacctttcctcagccttcccctccgaagcgatggctgacactcgctccagcagcttgtcccgcagctcatcgaataccgactggtggaactccagccgcggcgtcccgtgcaggtccaagaaggggagggctgactgaagagatggcagcagcacaccattctctgtctgaggaagccaagagaaacctcaaacgcagcccagtgcgcccgggcaccccgaggtcctgagagcacagggaggcacgcacccaggtgttcccagccgtgctggcggtaaccgcagccaccgaaagccacccagccgtccagcaaaggggtgctggctccggactccacccccagaacaggactcagccaccagcagaaagccggaaaacttccggcgcctccgccaggcccgactcccgagcaggcggcccggccctccaactgggctccccccgccccgggggccgccccacctggaactgctcgatggccttgagcggctccgtgcagttggtcagggtctccttcaggtcctcgccgttggccacgcccaggtcctgcagccccgcgaacatggccgaggccccggccaccgcccggctaggcgccccatccccagcccgttcccccggcgccgccgcagacaccccagaagcccgctccgccgggcctcggggaccgcccgagccccgctccccggcgccctccagctcggccaggtcccgcccgccgcgcgactccgcgcgcgtcccgcagccgcccacttccgccccgcaccgcccaggtccgcccgccaaccggcccccgggaaacgccgccggggccgcgcgcaggttcctgggagcagcgccctcacccggcgcgagagaccccgcccagccagcccagcgcgcatgcgcccacccggtcccgcccgcgcccgggctttctggcagaagagggcgggtgagggcgtggggggcggactcagggtccgtctgctccgggaacggacgtcgtcgcagccgagtgaatttcgtgtacataagcgtggaaaacgctcttgcagatctcgcggcagccacgcgcagcggggacgttttgccgggggttgagctccccgcccctctgccccgcaggggccggacacaggcgcagactccctcctgagcgtgggttcctccgcgtgaaacgggcacgaagcccaccccggcgctgtcgccaaaactgagatctgagcgccttcagggggccggggcctggcggagaccgggcccgcagcgggagcgcgagcgacggccgccctcccaggcaccgggaggctgtggcgcccaccgagctccgcggagccgtgaaggagagtccaggttccacagtgtcccttcttatcccaggcgggtgggctccccgggcctccccgcctctccagcccgccgccctcccgcaggctgtgccgcgccaagccccctacacacaccctctctcttttcggtctccgctgctgaaattttctctagaaatttctttcccgctgcccagcaaactcttgctcttccttgaaggcttcttcctccaccacctcctccaggaagccctccctcctcagcccagctggaggagatcgctccatctttcctgccgctcccactcctagctttgggtctcaccaggggtgcctggtggtgcagccgtgagcagagctcctgttcccacaagccgggccgagctcccaaggccatggctaccacagctctcttgccgctggccaagttggtcagccctagggcgagggttccagtgccttgatccaacccccagctggttcggtggcagaggaggacaagggtcacagcacacacacaatcctgagcctgggattcctctctgagaaagggggtggtgctgaggccacagaagcagctgcccagagcctttttgaaggggttgagctctgggcctggtctgggtcctgggtctggggaggacctggggaggtgcgggtgacggcaccgcaggtaaggctcctgcaaggtggcagccttggggcccgaccctgggtaggagggcaggccagtgatgacaagggaggccccagccaggcgaagttgcaggcaggggcagtgcagggtcccagcaggtgaaggccccgggagtggagtctgcagggccctgggccagagtgttcagggcacaggtgactaagcccagccaggtcttcagctcaaggcctaggggaagtggggctgggccctggtgagcagatccctgggcccttcctgaggtctggccaggccgaccccacctggaggtggcggctcagggcatttgacgcctccttcccagttccctggctcggcaagcagctgaccctcaggtggacagcagctagaccaggcccctgagtgacacggctgggtgggggtgtcccacagagcccacctcccatctcgctccaggctagagctcagggtcagtcacaggctgccaccctagagaagagagcacctttcaggggcagctgaatggagacccctcaacagggaaagccggaaatgacccagcggcagccatatctctaggaccgcccccgggtgaaggacagacaactgcacaccacagagctcgggaaaaccaacagcatctcagtgtagcggggagatgggcagatgggggatccaggctgggccagccttgtccacagcccatagaagggttggccagccagaagggtgcatcggggtgcccagagggtcagaaggccaggctggggccccaagtcccaggggaggcctgggaaag

SEQ ID NO: 588610 - DNA, 4001 bp, Homo sapiens
cagttttgttaaattaaagtgcgtgtttacttgctgaaaatagccatatctaagttaatcatactcagatgccaaacaaaatataaacaataaaaaatgtgtcagccaaaaagctacaggactgtatccaatcactgaataagccttatcattgttttcatcttcattcacaatttatgaatgcctcagtccttttgaatcacaatggcttctaattgtcatacaattgaaatcttaattatttgtccattataaaaatgcatcatcgtgatattagatgtttttaaaattttaacacgcccaagactggctgacacttctttatatgactagttttcatggcaatgtcaaagaaaatagttatcaattaccaatggtgacacatcttccgaaaagctgaaataagctgccccatacctttagaggtttaaaatactgcctcaaataacagttctgggctaagatattttagttactttgtcagttgttagttccctgggcagcgatgaaaactgcccccaggtaagtctgttgggtctcgccgcttttctatttgaccgtctggcttaaagtgatacaaatcgtgtttctaaaaagtataaaaccagtgttttatttcataacattattcctaaggtcttaggacaattctcaaagtcgaaaaaaatgaccttacttctaccagcattacttaaaatgccttacgagctacgcccaaatatcgtcaaatgaacaggtttccacaaaaggaacacgttctaaaaactccttaacaatcaccaagaccaactaactcgtgtcaacgtaaatactgcctttgtggtgcggtcactagaaaccccaaagtgcagcaggtcactatggaccagggtttcagatccccaaataaagcaaaggaatgggtccccggaccacaacctccgactcgattcgtcgcccgcccaccgcctgcagcgcagtccagcggcgcccacacagactcgtgctacagtcccctcgcccaagttcactggctgtttttaaaagcttagtcccccgtaaagtcctccaaagcccgagtccacctcaacgcgcgagctgctgagaggggctacgggcaccccgggcggggatgccgcaccacaacgggcacttgaggggccgcacggggcctcgcacttacaggtcccggccctgcccaccccccggcggccttgcccggcccagcgcccgcgctccgtgcccagggcgcggggctgggcgctcgcagtggccgtggcgaggggccgctcccggctcccacgccgccccgcgacgcccgctgcaactccgggccacttctccaagggacggggatgtgcggaggttaactcaagccgctaattgtccgcaacaaaacaaaacaaaggcatttcgggccagagagaaagctcgagaaagcgaccgagacatgtacctgagtgagacagatgggagaatacatcatgacttcgccttaaaacgcactttccgggagatgcccaagaaaatcttcgagaagcaagaatttcatctattcattttacagtcatctgagccccgcgatgcgatcaatcaggacggggctctgcgctggatcaccgcaacttcacaacaaacccagtcctccttaaatagccaaagattcaagttcactcggcgtgctagatttccaggggtgaaatccaatctacacttttaaccctcttgcagtccgagcgcgctggccgtgcttgccgaggccgccgccgccgccggtgttggctgcttttcgcctgggtttggggatttgttttctattttgcagttgttgttgttgttggggtgtagggggtgcgcgaaggttcggtgtgggttggattggggtggtggttggtggtaaaatgctttttcaaaaaaggcggggaggggggcgcgggagggcgcaggagggcgagcgggcgggcgggagggagagcggggagaatgtgtcaccgcgctgggaaagttcaaggttacagccccaagcactgcggcaggatcccggagtggtgatcgcaggcgaaactttgccgcgagccgaccatgtgtgtgcgcgaggggcagcgtgagcgagtgcgcgcgggtggcggggcgcgcgcgggagagggccggggtgggggcggggtgggatgggggagaagggagaggccggggtgagggagggggcgcgagcgctgatctctggggcggaagaggctcgcggcgcgtggtccccggcagcagcagccgccgccgcccgcgccgggtcttcggcgcccggccgcccgcccgcccgcctcgccccgcgtctgacccggccgagcgtggaggctgctgttgccgccgctgcccagagcccaggggtatcaaaacgatctcctgaaaaattccaaacgataaatcccgctctcccgctcggctccaaactcctctcttttctgctctaggctcttttttttccctccctctcttgctttctttcgttgcaaaacttggaagttgaaaaattcaccggttccaccctctggaccccgctcgagctctctccaaatcagacttaaggattgttttattatttaattacacaatcatcgctttactcctcctcctgcaaacgcgcattccttttgcaccagcctctccacaccccccgcccccccaccttcctcctcctcctccttctccttctctccccccacctctccctcatttgttaaaggtatcctaccggtgctacagaaccatgactttttttttttttccaaaatagctcttctttccgctgccctccccacaccagcacacacatacacacccccgaaaacccgccctggaagaggtatttcggtgctcgctgcggactcttttaagccgcgggaacatccgagtgggagaagcaccgaaaccgtctgagcccgagaaaggaacgagtggaaaattccctcacacccaggccgcccccaggccggggctggggcgcggacactcgcacccggggcgggctcagtccgcggagcctgcggctgccgggaaaagggggaggccgagcaggcggggacctgagcgaacttgggctcaagtagttggggcgcgccggcgtggaccaggggggtgcggcgcccagcccccgacggccccgcccggagcccgggttcgcggatagggagggggtgcgggttcgtcccgggtctgcccaccaggggcccgcacccgaggcagtcgcggcgcgcggcgcttcgccgcggtttgccgccctccccgggggtgccccgtgcacgtggcctcgctctgagcgggaggaccgggccgagccgccgccgccgcctcttgctccctccacctcctccccgcgcccggcttcgctctcctcctcctcctcctgcagccccgctggctggctcccaatccccaccccccggggcccggggcgccggcggaaagcgtctccctacccgcccgggtgcaggcggggcggggccgcggcgcgcccggggctgcggggcgggccggcgggcgcgcgcgcgccgctgcagccctccagaggctgcgggccctgagccgctcggcgcccgcgccggctccccaccgcggcgctgccccgcccccaccccgtcgcccgtgcaggctccgagtgaatgaacttgattccagggattttgaagaaggcggttcgccttgcaccctttctgcaccccccgcccacatacacacaccgccccccaaatccagttttctgcttggggtggatggggacgagggggaagcaaaggcctcccagacaatggagggaggaaaagtgagcgcctggggctccgagtctacctagctgggggatccggggggcgctggggctaccgggtcctcgcgggcccatccccagggcggggccgccccgcttccacgggtactgctggggcgtttcgaggctcgcccccgattccccggtcctctttccaccgcttcccagctcgtgatctgtcccctcaactttagcccctctcact

SEQ ID NO: 588611 - DNA, 4001 bp, Homo sapiens
ggattctaaaaactaagtaggataagagatcctaacgaagctcttcctttcagttctgggaagaggagttgaaattgatttctttataataaatgatttatgtccaattctctctctctctttctttctcactcttcttctttaagtaaaaagcccactgatattagatgggcaatagtggaaatatggaacaaatgagaaaaagcaaaactgaaccttaacaaaattgctgttgtcatgttcaactataggttgtttctgcagtgttacatatggttatttctaatgcagtctctgagaaaaacaagcaaacaactgtgtttcaggtaaatatgcaaagataactgtgtatttgtgccattggacaaattcttcttgaacagctttatgcagttaacagttcagtgatgacaatggaactttaggtagcaaatataataactaagtgctaattttggagaaaacaatccttgtttctgactatttaatatggcacttctctttataaactgtaaaatgggtaaagaataaaagtatccctttatcccccccaaaaagattcagaaattattcacaagtctttatctggcccaaaactaaggacccagggtcattttaagaaaaccatcacattcctattcaagaccatatgaagtcatgcttattactttgtaaccatattctctttcaacttaataagagaaataaaaagacagccagcaatatcatgcctaacctttaccccactgaggtgttctgacatagtagctatacaaagacaccattattaattaaggtatgttaataaggaagaaataatattccattcagaagggtacagagaagatataatgggtacgtgctgcttttcagagaaccaagataaaacagaaaagtgacacatacggaggagatggcaccatactgtcattctggttttctcatgtcgcctgggtggtttcctcagcaatataacatttgtagtaatggcctccattcatttagtgcccactatgctccaggctccatgtaatgtgctcacatatatgaatatttcccatactattgagttatattactggaaatgtcaagaccaaaggctgcttattgattttttttaagggcttagagtggggtaaaatagtagaggtataaaaaaacaaagaaagatacttatcttcatttcgtggattatttctcagttttcagtttaatttctctctcaactaaccttgcagaaatttagggcctatgggaaggggattaacttcataatacctatgctgtttcttttccccgaaacatctacaatttatcccccagcttctgtattatttctgttaccatttccaaataatccttatgccagctctgaaagttcacctcagtagtcgctctacattggaaaaccagccctgcaacaggaaggaccttctctagagcagccatattttctgaaccccacactgagacacattgtctaagaagttgggacctatttgaaagaaaaactggttaaatttgtgaaatttagactcacagaaaatccaaagcacagagttgacattcttttaggaatcccagggttacatttcagaactgcacagcagacaacccagaagtccacagacactgggattctttccatactccgaacggattcccgacaagaagcctgtaggctctgcttctgccatttgcgctgttttagaatgtttgctccaggtcaccgagtaccttagcaaacgcagcttcataggaatgaacaggcagaaggtccgaagagtttgagggtgactgatggatctttatggagcagagcaagctgttaaaaacaaaatagaacaagaacaaaggggtcctgtacactcgaggagtttactccactaacagtcttgctccgacatgtgaatcttttagatcggtgtcagctcaacagtgatattctatgaagtcattcagtgtaggcatttgatcatctagacctgtactgcccaatatagtagcccctagctacagatgactactgagtacttgaaatgtggcttgcatgaattgagatgtgctataaatgcaaactatatgggaatttcaaaaacgtagaacacataaaaaagaacacaaaatatataatgtacaattttttatattgatcacatgttaaaataatattttgaatatatgttgttggaattaattttaccttttcacttttagaaatgtggcaaccagaaaatttaaaattacaagtgtgactcttgtttaaggctcacattatatatttccattgaaagcactggtctagatagttggatggaataataggacacgatgttataggccaagacaagtcttctgaaattatctttgctttgttcttaattttgcagctgacattaacacaggaattctaaataaagtatgaaaagatgttttatatgaatactttttttggtataaatgtatttttattagtgagtctctcttttagttaaaaataggcaaaaaatttgcaagtaatcaaaataacagcttgaaataaaaaattacaaatacctaccctttggtttttaatttttaacgttgcaaagaattataaataatgattgattttgtctccctgcccccagaagagttaagtttacttagatttgattttaaaattcttgaaagccagaagtcatgttcaagtgaaaaataaaaaagtcagcattaggcatctggttattatagtctttactttgaaagaaataaaatactgcaatattcagtgagagttgtttaaaagttgcatatatcttctaggttgtattgctattcttaataaatcaagaaagttcttgtggtttgagttaagcaacttggtaaaataagtatgtgacatttaacttaagccacagagtattgcccaaatgcactcttgtccctggccatctctcaatgttcagattcttttataacatgttgaaatcatcttacatgacaattttaccttggagtacgtaacagctaatcagctgtaacaaacaatactagatcaaaggcaaaaacacacatttttcttcactagtaagtcctggactttaaaacttcaatagcaattttaaagcatgtcttcataatgaatagtgtattgcaagcagcagaatgcattctcaacagtagctttatgttctgtttacttaaaatcgttccatatgcacttatgataaattacttaatctttaaacataaaatgtcttaactcaaggataagattcccactcagtaaatgcacagggatcctactacttcttaatcagaaagctaaaaatatgtgcattcagaaacgatgtttgctgaagtacttgcaagcctaagcctcttcattctaaaagggatatatccaaggctgacaccaaggagatgactttgcagaataaaagctacatgtttttcccgttaaattttgttttgttttgtttttttgacccaactttggattgttgaggcatcaggtaagaagctgtaaaaacatacattctatccatgctgagtaatatacaggtcacagctgtaactcaagttaagccaccagctaagaataaaagcacaagaaaataaaccaaccaaaatcgaaagcaaacaacatgcttatcacataataactattgaataatgcaaatattaacaaagcaaaccaagcaggaggcctccatctcaggaagaagaaaagccagcaaatggaaggcagtgattgggaaagcgataggctcttcctcctcgttcattattgagaaaaagtggatcaggactgacatctgctggccttgctaatgggatgtacccattgaaacaagggtcttggagaacaaaacattctggtggggtgatattgcatcactggcgtagggaggaggcaatggcttggcaaaggcctttctggtgagccacttccgaagtagccaatcagcgaccactcctcgggccagagtagcctcagtttttcaccctctttgata

SEQ ID NO: 588612 - DNA, 4001 bp, Homo sapiens
gaagatcaaacgatggaggacctaaaaactaagtctacctgaggaaacttttcctattacttcatataaactttctggtttattttcaacgaaaggacagatgagattgtttggggaggtggggggcatgtgtagctggttcggggtttttgtgtttggttttgtttttgttagtttattcttagagcactcttttactaaagtcaccaatataattcacattcttttaataatgaaaaactgcttgtgctagttttatctcatgagaaaaaacactgttcctaaatcaaaagcaaaatgttgtatgttcagagctatatgaagacagccaagttataaaagcccattttcagatctggaacaacttctgaaaacaaagagggtatttgggataccttatgctaaagaaaaaaaaaatcctgctttcattatttcctgattctggagatccaataaaaactttatggaataaaaagtcttgcaaaaatccttcagtgaaaacacaaccaaccactcccacccccaacccccttctaaagtaatgagagttgataaactataattgcagtatggaaatttttacattttcttatgagttttaaaagaaagattaaaaggttcattggcttttcaaacagcaattattttagcacctaaaagatacacaactaaaatatatgcgtatttattttcaaagaaacaccaacaaaaattaaaacattggtgattaggtaaatactgatgacgccaatataaaagtatttgccactgcaaagggcctaagcacaatcacatcttgtcccgatcatacctgcctgccagaacaaaataggcagctgaccaattatggggtgtttatctatacagtggtacctttgttctccaacaatgtcagattgcaaatgtcctggaacacatatttacctggaggattcttggcaggatcattgtggcttggacttcctgattgtccagaatctgtaaagaaatcacagaaaatgttttctttttaatttgttttgaaagaatttcacaatcctcaaaggactcgaaaaaaaaatttgaaggtataaaaatgaagttgagtgcttaaataaaatacactttcccaagacttttgatagaaacattttactcatcaaactacatgaatgcatatacatatttctatgtcaaaagaaaaacacaagtattgatctataattttcttgggctagagcaaggtttttttgaaacaaaagatctggctacaaagccattgaagatggtttgaaggttaggcaaatattgaggcctgtcagtagcaatatgaaataaagcagatatattctcttaaaaatgcaatctaagtgtaattaaacgtgcatttaaaagcctgaaagtatgtttttattcaatgagtaaaatacacagaaatgagagtccgcttttccatgatttcacacacaagtacacatacccactccaataatctcccaacctactggatccaggcccagatttatctacatcccataatagcaatcgatttgcaaacagcaaggaaagcataaattactaggtagaaaccaacatggctttgtggagagcaaatggttgaatcaatttaatttccatccatgacagatggacagactttgcaggtaaggaggaagagatcaatgtcgtatatctgaatttcctaccccatactattcctcattgatgctacagaaagaaacgtggaagacatacaactgttaggcaacatgccctttcggactgatctgacactgttgtgttttgctcactcctcttccctccttgtaccctctccatttatctgtgtcatttgccccatattattatacacttacttgcgagttgctttgtaatcttcttttattggttctagcatttaagttttgtcgccccaactaaattgcatactcctaagcagaggcagagattctgtctacttcttttgtgtcctcctcagtgtgctgttcatggctgtgaatgcactaggcttgcagtaaacgccggaggaatggatggctcagctccagcagcctctttgcttgcctagaaaaggcaattttgaacttgataatgaatttcaacaaaatttgataggtggggcacaaatgacggctctgtcatgtactgccatatactgacaagtctcttcccccaaaccttgccattatacttgagccaagaaagtgatttggttaagcaggaaaatcatatgctggtttttttcatcggggttattctgtccttccaggtaagtgattaacatactgaaattgctgcttctactattaaatgcaagaacatcctgttagtttcttctcatataaaacctggttatttatttctgccctttgcctcatgcctgttagcttagatttaatgctgaaatcagaattttaccccttcatcccatttccttaattgtctttttggttttattctagaacagatttcatgagatcttggcaggcatatttagtgattcccacattttcctccaattgtttcctgatttttcaaaatgaaagtaaagaaactagaaatgaccattcttcatctggctcgagtctcctgaagacagtcagagagctgagaactctctgaaaatctctctcatctcccatgaagtcctcttattactttttctgaaatcaaggcaagattcagtgacttataaattaggagatcaatcttcttcgttctacattcctttaaaaaactggtacaatatgggccactttccaggcctggagtatgatagctacataaaaatgataaatcataactttttgctatagcatcagctatttttaccttgagttcctctgacaaatgtctctcagcattgatattacattccagtttaatttctcaagcgattctaacattttttaggaattcctacttatgtataatacacccactgaccagagcctccctatgttttactttccctccaaagctatctcactcttatgaaggtctagacatgcacccctcaaggtggctaatgccaagcttgtgatgacacctgagatagttaaagttgtcaattgttgcagcagtcgccttatttcaggagttgtagactctgcatgagccttagcatgtttagttacagcaacttcaaaatggtgccgcaaaactcttttccatcatctgttgctaaaatttgggtccagcagagaaaagaatgaaaagtctcttccattcgtaagaaactatccagctagaacaatggcatcccctgttaccacaacatcccacttgggaaactctattcttttctgctataaattactttttcttctcatttccaacaactgcagaccaacttcttcgattgaaaaaatatacttactaaaaaaaccacaagcatttgagggaaagctgaagtagaccctaaatttgaggcacacattggctttttgtaacaattccactttctaaaatgatctggtgtttactggcacacaatgacagactccttcatatgccaaagcccataccttctcatgaaataaagcagtgtatactgtgtctcagaaacataggagagggccctctcagtgagcaaatgatagagcatttacttttcagactgtaaattctaacactataatctactcttaactcttatgtcaccttatatcggtcacttaattccaactgctggaaaaggaagtaaccagggagtcgtggttggcagagaaaccaaaaatgaactgttattgtggttgacttcagagaaggaattattcagaccacatctaaaccccttccaattcaccacctaggtcaaattactctatacccaaaggttttatttaaccacttccatcactttgctcaacaccccccacctctctctctctctctctctctctctgtgtgtgtgtgtgtgtgtgtgtgtgtgtgtgtgtgtgtgtgtgtgtgtgtatttaatatgttacagtgaagcctggctctgtccctcactagtg

SEQ ID NO: 588613 - DNA, 4001 bp, Homo sapiens
tgatttgtcttgtcgtgtctgaaaaagcaatgacaataaggtgagaaaaagggctgatcgaatggaatgcattaaaattaggaaggtggggaggtaaacgtcacaatggttcgtcccagatttaaaaataacagctgagaacattgaaagggcgaaccccagtagtacccaagatcagaattcaatgcgagcaattcttgcttttaggttttgtagtatcgttttaaaacctgtttatttgggacgtaatatagacgtaaataacgatctaatatccaacgctgcgcctcaattaccaaatcattgcacacatacgcgcatattcccacatcagcccgcaattcttgccaacatttcaccgtgggcagattatgcaatgtatgaaaggacaaatcccacaaccttcccgagggcttgtaaaacacgctgacgacaaacagggtggaaaacgtctgtgcagacacagcccctgacacaaacaaacgccgcgcaggcattctccgaatgccgtcaccgttcacgctaccaaccctttttctcaccaagcaaattaagactattccccattcctcaaccccccattcctctcccccctacgccgccagccccagagaaggaacgagaaagaaagacactagagaggaaagagcatcttcccgctcggagagggctcagcctgcctggcgctcttctttaccaaaacatcaattttcctgaaatcaggagacattatgcaacagcagcggggggagagcgcaaaccagccaggactacgtgccggcgcgaaggcgctgcaatcaaagcagccaccttaaggtggcgagtcccatcctgacaaggcagcaaaagtttatgtaatgaatgccccgcgcgcactcgccgccgctggcgagcccagcttacagcccgaccccgcacacagcgcggcccgcaccccgcgcccgcccgcccgcccgcagcgcgccctgggagcggtcgccgggcccccggccggcggtgggcggagcgcttaccgtgttcctgctctcgggccggcgaggagaaagaaaggggcggccgggagtcgggccgccggcgctcggggctcgggccgggccgggcctccggggccgcggcgggaggcgggcggcggcgagggcgcggcgcgggaggcgggcgggcgcgccgggtccgcgggcgccgtggccgcgcggagagatgtgtgttagtaggtcagttccgagcgccgcgctacgtcgccgcccgccagccccgcgtgactggcggccgcggccccaatcgccgcgcccgcacccgcccccggcccgccgccaatggccgcggccggcaggggcgggccggggcgggcactccgcggccccgccccgcctccccgccctcagctccccctccgcggcggcgccactaccagctcgcgtccctccccggccagggccaccgccgtccgagcgcccgcgagggctggcgccccattcccggcgcaacgagtgttgcgcaacggcccacgcggccgacacgaccggagcgagcctgcggaggagcccgggagccccccgtcccaccgccccgtccgctcttggctcccttcaccctcccggtcgccgcggtggctctgcgctccccgcgaccctcacttgctcgcagaggcgctttttgtcttcctgagagccgcagcctgctgggctacctgttgccgactgagcactgcgggttgcggctacccgggcgtggcccggacctcggcctccccttccccgcacactcccgagaggagccctctaccttggggtgggcaggagggaaggcggggggtggcggctggcaagctgccaacactcggggcgcgctgcggcggggaaggggttggcgcggccgggcagctgcgcagggctgcgcggcggaggcagcgattaaaatgtcccggcgcctctcccgagagccgcgacggcccggagccgggagggaaagctccacgcacaaacaccgccccctgcacaattagggcgaagatgacggctgcaaagttgttgcgtaacacgactgggaaacgaggctcgctgaggtccatctacccacccccgccacgcgggtgcggcgttcctcggaggatgtgaaggtccgcgctcgggtgcccccgctgggacgcccactgtcgtttggtgctggggcttgagacgaccgcgcgggatctcttcctgtgattttgagctgatagctgcttagtgttatttctgcgtctaactggatacggtagtcttctctcccaaattcccgggctacggaagagacgtaaaaaaatggaaaaaagagcacctagccgcgacttcttaagtcgtcgcgctagactgtcaaggcacgtggcacactccctgcgtttaccgatacacggatagtggtcagtgctggccttggcgaagggagccatgttcccgacagtgactcacaggcttgcccaaatacggagtgtggcaggtgggcaggacctccaccagccagctccctcctggtctccttgaactacgtgggggctgggccgagtgcctccacgactttccacttctttttgctcctttcgtttttaaaaagcaaaaaccaaagtaaagagaagagcagagtgaacacccaggtaccatccctagtgtctgccatgagcagcagatctatctactcgccaagattgtcttttctacctttccccttcttgcacagttaatatcataataacgcaagtcatatttaaaaaatttttatcacctatcagttgagtttttggaaagccttccagggcagcgttgtggttttgaacgcactcttgttcgtgatttatctggtagtacagctctgctgacaaggctctgaaaactcagacgtacaatatgggcttagcgtgttccccgacaccatcttcccggtgctgactaatgcaagaaccacatcccctccactacacattttccaaacttgactaccttcatgagaacaaatcctgattttagtttataatttccacttttctcatacatatataataattcaagatgtggtcttactatgttgtccaggttggcctggaactcctgggctcaaaggatcctccggccacagcctccctggtagtggaattacaggcgcatgccactgtgcctggccacttttctcaaatttactgatagtttcctttttgcccaaaccttacaatgcttatttgtagctttgagaacctctcttagatgaaatcaaaatcatatccatattagttgcctttttggggtcagaaatgcagctattgtctagaaatccagggctgtcctgcataatctaccctccccttcacgtgttctgaccttgttctgcattttgaataatttcatggaatttcaaagccgttgtagtaaatgtctttctttaaagacaactcgaccttcaagacaggtaaagaacgtgcctggagccaccccaggcagtgatgctggaggagttctctcaacctggaaacttattctttatgctgaattttgaaatcgaatgctcctatatttacttggagtattttagattgtgtatgtattatatctgtgcatcattcattgttaccatctaacttggaaatcagaggaagtgtgaaaggtatctgagataccagcttagaaaacaactctttagctcctcctggtgattaggacaccactaaacaacaggatgaaggatctgtccccagggccgaagtgatgatgtatctaatattatatcctagaacattcacagagtaggtaagtatttgcagattaactcgagtaaatggagcataaaaacctaagatatttgaaacaaattaaccagggtggggaggcttctaggaagacatcagcatgtgcctgatggtggagctgggctgtaaggttctcaggaggaggaggaaggggttcttgctctcagcaacctctcagtgctaggggtggattgagggcaggggcaagggaggaggtgcctggacagggatg

SEQ ID NO: 588614 - DNA, 4001 bp, Homo sapiens
cccatcatatacatatattcacacataatcactatgtaacagtccaggaagaaatttaatatttgggtaaattacatattcacacatcttcacataagtaaaaccagggtatccagacaaaaaaacaatctactaacctatatctgtttcccataggtcatatctggtctgggggtaaataaatacttctgacctcacttactgttgttatttacaaaagccaagaacagaagatgacacttggccattccctgctgttctcagagaacagcagtttcctaaagtgtcctttaaaaacataaatgggagccagcatccagcaaatcaccgggcgctgcgaaatgccttcctaaaaatacaatcttatcaaaggtctccgaaggcgtggagttaaaactacagcaaatggccttgaacttgtatttgcacacagccctggagaaaacaccagaaatagcactgcgaggccacaattgttaaaatgtgatagggctaaatttagaagaacgtgcgtttcatttagggcaaaagacacacattcggcagcatgagcaaactccatgcttacccggttgtctactttcctgtttaaaatatccttaaggaaaaaaaaaaaactgttatagtgacattcttaaaggctgagactgtcctactttctttgtagcaagattataaaatcacgtaattagctccctctctctatgctcactgccagcaaattcggcagttacataatgcaacatttccaggaaactattatgtgatttgtcttgtcgtgtctgaaaaagcaatgacaataaggtgagaaaaagggctgatcgaatggaatgcattaaaattaggaaggtggggaggtaaacgtcacaatggttcgtcccagatttaaaaataacagctgagaacattgaaagggcgaaccccagtagtacccaagatcagaattcaatgcgagcaattcttgcttttaggttttgtagtatcgttttaaaacctgtttatttgggacgtaatatagacgtaaataacgatctaatatccaacgctgcgcctcaattaccaaatcattgcacacatacgcgcatattcccacatcagcccgcaattcttgccaacatttcaccgtgggcagattatgcaatgtatgaaaggacaaatcccacaaccttcccgagggcttgtaaaacacgctgacgacaaacagggtggaaaacgtctgtgcagacacagcccctgacacaaacaaacgccgcgcaggcattctccgaatgccgtcaccgttcacgctaccaaccctttttctcaccaagcaaattaagactattccccattcctcaaccccccattcctctcccccctacgccgccagccccagagaaggaacgagaaagaaagacactagagaggaaagagcatcttcccgctcggagagggctcagcctgcctggcgctcttctttaccaaaacatcaattttcctgaaatcaggagacattatgcaacagcagcggggggagagcgcaaaccagccaggactacgtgccggcgcgaaggcgctgcaatcaaagcagccaccttaaggtggcgagtcccatcctgacaaggcagcaaaagtttatgtaatgaatgccccgcgcgcactcgccgccgctggcgagcccagcttacagcccgaccccgcacacagcgcggcccgcaccccgcgcccgcccgcccgcccgcagcgcgccctgggagcggtcgccgggcccccggccggcggtgggcggagcgcttaccgtgttcctgctctcgggccggcgaggagaaagaaaggggcggccgggagtcgggccgccggcgctcggggctcgggccgggccgggcctccggggccgcggcgggaggcgggcggcggcgagggcgcggcgcgggaggcgggcgggcgcgccgggtccgcgggcgccgtggccgcgcggagagatgtgtgttagtaggtcagttccgagcgccgcgctacgtcgccgcccgccagccccgcgtgactggcggccgcggccccaatcgccgcgcccgcacccgcccccggcccgccgccaatggccgcggccggcaggggcgggccggggcgggcactccgcggccccgccccgcctccccgccctcagctccccctccgcggcggcgccactaccagctcgcgtccctccccggccagggccaccgccgtccgagcgcccgcgagggctggcgccccattcccggcgcaacgagtgttgcgcaacggcccacgcggccgacacgaccggagcgagcctgcggaggagcccgggagccccccgtcccaccgccccgtccgctcttggctcccttcaccctcccggtcgccgcggtggctctgcgctccccgcgaccctcacttgctcgcagaggcgctttttgtcttcctgagagccgcagcctgctgggctacctgttgccgactgagcactgcgggttgcggctacccgggcgtggcccggacctcggcctccccttccccgcacactcccgagaggagccctctaccttggggtgggcaggagggaaggcggggggtggcggctggcaagctgccaacactcggggcgcgctgcggcggggaaggggttggcgcggccgggcagctgcgcagggctgcgcggcggaggcagcgattaaaatgtcccggcgcctctcccgagagccgcgacggcccggagccgggagggaaagctccacgcacaaacaccgccccctgcacaattagggcgaagatgacggctgcaaagttgttgcgtaacacgactgggaaacgaggctcgctgaggtccatctacccacccccgccacgcgggtgcggcgttcctcggaggatgtgaaggtccgcgctcgggtgcccccgctgggacgcccactgtcgtttggtgctggggcttgagacgaccgcgcgggatctcttcctgtgattttgagctgatagctgcttagtgttatttctgcgtctaactggatacggtagtcttctctcccaaattcccgggctacggaagagacgtaaaaaaatggaaaaaagagcacctagccgcgacttcttaagtcgtcgcgctagactgtcaaggcacgtggcacactccctgcgtttaccgatacacggatagtggtcagtgctggccttggcgaagggagccatgttcccgacagtgactcacaggcttgcccaaatacggagtgtggcaggtgggcaggacctccaccagccagctccctcctggtctccttgaactacgtgggggctgggccgagtgcctccacgactttccacttctttttgctcctttcgtttttaaaaagcaaaaaccaaagtaaagagaagagcagagtgaacacccaggtaccatccctagtgtctgccatgagcagcagatctatctactcgccaagattgtcttttctacctttccccttcttgcacagttaatatcataataacgcaagtcatatttaaaaaatttttatcacctatcagttgagtttttggaaagccttccagggcagcgttgtggttttgaacgcactcttgttcgtgatttatctggtagtacagctctgctgacaaggctctgaaaactcagacgtacaatatgggcttagcgtgttccccgacaccatcttcccggtgctgactaatgcaagaaccacatcccctccactacacattttccaaacttgactaccttcatgagaacaaatcctgattttagtttataatttccacttttctcatacatatataataattcaagatgtggtcttactatgttgtccaggttggcctggaactcctgggctcaaaggatcctccggccacagcctccctggtagtggaattacaggcgcatgccactgtgcctggccacttttctcaaatttactgatagtttcctttttgcccaaaccttacaatgcttatttgtagctttgagaacctctcttagatgaaat

SEQ ID NO: 588615 - DNA, 4001 bp, Homo sapiens
ctggcagattacaaagtccagagacaaggctggcattgcagagtctgctcaccggcagaaaagtatcctctgcactgggcttctgtttaaagactttgatgatgagggtgtgggctaaagatgatgctaaaatacgaacatggaatgggaactaaagcaaaatcaaactaaagcacatgaaaaggagtaaggaggtctttggactagaagattttgcctcattagatactttctgggttggaggtaataacttgggcacaacaccaaagttcaacacgaagactcacaactaggccccaccgaattcttcttcaaacactgaagggtacagaaatgagtcagaaacgagcctgtggatgagacgatcaatagatccagtttagagaatctggtgaaggactaggtgaggagaataacaaaatacccagcccaaaaagttttccaaccccaaggaagacttaatatccacatcaagactagggtacaccaatgcagtgtgttttccaacttttttttttgagacgaagtcacactctgtcgcccaggctggagtgcagtggcacgatcttggctcactgcaacttccgcctccagggttcaagcaattctcttgcctcagcctccggagtagctgggactacaggcgcgtgccaccatgcccagctaattttttgtatttttagtagagacggggtttcaccgtgttagccaggatggtctcgatctcctgacctcgtgatccgtccacctcggcctcccaaagtgctaggattacaggcgtgagccaccacgcccggccctaactttttaaactaagaaccatagtaataaatacattttacctgccacccagtatacaaatacatatatggtcttcttggtgccccaacggctggtcagggacagagctgagattcaaaccaatggtttccaaactccattctgcaaactgctgccctgttttccagagtgggccataaaatcaaatgaaggcagtgggctgtgacatatttttaaacgaaacagaaaacagaatatattgctgattgtaaaacaaaccaaccaacctcactgcttccagaaacttctggttcgcttttatatttatgtaagtgtacaatatttaaggtcgcgatgcaaaatgtttcttttggttgctgtccaacacatttggaaaacactgatctatggaacaccctgaggaaatggatgttatatcaacgaacaaatgaggctgtctctacacactgaggcaactccaggagggggagtgagtgaacaattacagaataggtacagtacagggcgggagccatcacaggaattaacttatctactcccaactgacagatgaggagactgagactgagtcacacggggttcgcagcaggctgagactctaaactactggaattcggctcgcgcccacgccaccactccaggcggtatgagcacaccacaccctacacgtcaagagcccgccaccgtcactggctgtgacctggccgacgcccgcctgtcgaaggtcagtgcgccgctgccccagaaacagcctgtgggaaggcagggcacccacatcgactcgcagcgccgggacaagtcctctctcctccgaaacccagctactgggcttcaccatctagtccaagaagacacagatcttcgtacgcacgatgcgcggggcttggcccttccgagccactatcctacgccctagcatgtgctactctcgcgatatgagtggctgaggccctagaacttcgtcactgacccaatttccgctccctgaaaggggcccagtcccgctcgggccgggacaatacctgagacaggaggcgcctccgccatcccgtgccgcagaacctagatcgagctgtacagccaagtcagcactgtcaccaggtcacgtgccccggacttccggcgccgcgagaatattcgcatctgcgcgccgtgtagacggccacagaggttgcgcagcccgaatctgtgtggcgcgttcgtgacgtcagatagacgcgccaggtgtcgggcgggaggaggagactagtagctggatggaaatagcaacaatcgcaggagggagggcggcgacttgcgtaatcattgtggttttcctttttttattttttgatatagggtcttgctgccttacccaggcttgagtgcagtggtctgatcatggctcactatagcttcagtctctaatcctcccgcctcagccttccggtagctggaactacaggcggagccaccatgcgcagctatttttagtagagacgggtttcgccatgttgcccaggctagtctctccaactcctggcctcaagcgatcctgccgctttggcctcctaaagtgcttggcttacaggcgagccaccacgcctggctccagacttttttttttttttttttttttacaaaggcgtttattctcatcagtatcaccgatattctcatggttcacatttgccaacgccgctcctctccttacagtagttaaatgtgcaatctcacttgggggcccagggaggggtgggggctcggcccagggtggggagggcgttggcacttcacgtggacagggtgggcagcctgtcctgcgtgaaagaggtgtgggtgagtgggcggccagggaaggggagttggcaggggagggccccgcagtctttttttctttggtggttggtgattctccattcagattccttcctggcttcccagggtaggggaaccatgcagctcagggcagggcaggggaggaagagaaggaaaaagcagcaggccgcccggggggaaaggtggagggtgaacggcagggcaagggggaacgggtggctcctgaggtaaggcacaaccctgtctttggctttcctggtgaggagtttcctcccctgcaccccctgcccgacgcttctccccacccccccaccccccagacccacacacagtcccaggagccagggggcaccacctcctggggtccctgaaacaagtgggctctgccacccaagccagtgccgcaggggctcgaggagggacacccgaggaaaaggcagagaggggcaggcaggggcctacccaggacaagggggtgggggtgagaagaccctaggcccaggagctgggccccccgccccaactaagtcctggaagtgggggagcacctgcttcctttcgggggtctggctggagccccggtctgccccttggcctccgtcaggcccagccacttgccaagtgaccagggcattgtgctttggggtaaacgctggggtggggtggcaggccaggaggcagggggagaggagggatgactaaggtgcttgtgctttagctgggggtgtcgatatcccccactcgggccggctgggggctaaggtgccaggccccggccaggaagacagtgccaagaccccagcagaccgtggcactgacccccacaacaagcagatgttaagagggacccccagtgggccagcggggctgctggtcccatcagggggatggtcttcaaatcagattacaagggtccagtaggggctggcccccaccccatctcctgaaatccccctgcccctggagagacccctgggagcagtaggtaggcgggggttggggaggcagaggagaggcagggaggacgagggccagaaacgcaaacaaggatgtggatggtgaaatgacaccccgcatagggggatggggagttaaaaaagaaaaaaaactctctgccttcacatgaaaatctaaaacaacaacaaaaaaccacccactctgggcgagaacaaaaagagaggaatggtaacagagaaaattctgcaaacaactgctaacaatggaagtggacccggccctgccctgccctgccctgcccagcccccaggagctgggcccagccaaccagccaaggcctgggacaccctgaaactatagccctgttggggaaggtggacaggggagggggaacccggtcggacccacaggagcctaggcagcag

SEQ ID NO: 588616 - DNA, 4001 bp, Homo sapiens
tcatcctcacactggctcatagcctttccacagctccctggacaccagaccgtgatcaggcctgcaaggcccctcccatcggcctggcttcccatccccccacctcctacctggccctcatgtgctctgtggtccagcctctgagcctttgctcccactgttccctctgcctagatgcccttccacacatctcagagagccagatctgctcacccaccttccctgccctccagggctcagagccaatgtccccacctccacagaaagccttccctgaccaccatgccccgccccccacgatgggctcccagcccccagggaaccccctgctttgccctggcctctcctgccctgtctgggctgggctgctctccaaccgcggcttggtggggcggggctgtgtctctctccctctggtgcccagagccaagacagtgatccgggaacaaatccaacccaatctcctctgggcttgagatgcacccatctcaggaggcacagcctatcctgccgcccgcagaagtgagcagagactgctctgagtggagggcattgcccgggcaaggtcagggttgggggaggagcagtatcccttcctttccaaggcgcttccaagccactgacctgtttattacctgacttgctttccccacttccctgaaggcaggagagaccctttgttctctctttataagaccatgtctaaaaggcccagcgaggtgtggcaacttcccaaggacacacagccggaggagccccctgcctattgctccaaagtgctcacacactggggcagggccaggtcgctggggtcccgcacaccggtcaagtcctgcagtgcgacagctcctctctaacctaggaacaagtgtccatgcagccccagggccatcctatcccgtggctcatggggccccgcctccccgaacatgtcctgtccccacagcaccggcctaggactgttcaccagcgagtgggcagagtgtctttgccccagtctggtccacgccatggagaggcctggaaaaacccaacaggctgctgttccctgcccccatccctgagggggttagaaaaggaaagaatgttcaaagtaaacaagtcaccagagggccatgccaggaccttgcaacaaacacaaggtgctcagtaagtgctgagtcctgggatgaagaattctgaagcgggaccactaccagggcctgccccctgcccacagccctcccaggccgggcagggcaagttctggagggccggtggcggcatacactgaaggctgtgtgacgtttctatttctcaaggcaggtgagtggaatagggaccacagcgggccccaagttcccccatcaaggcacgcatcagattgtgtggtcagcgtggggtgacgtaactgtctgcatgcagctggtctggagcccggaggctgtgactcccctccgcccgcctccgggcaaagtgcgcggaggagccggcacggcgaggctgaagttagagaggcccgcgcgagagtgggggggaggtcgggaaagccgggcgccggcagtccttagcccgaggagctgcgccgaggccccctccgccgtgcagccaagcgcgggcgctgcttagtggggctggggacgccagcccgccctgcgcccccacgccccctcgtcccgcccacttgccgggggtggctggagctcccgggggcatcgttctgaccctgatggggcgggaaggacttggcctagagcgggacgtcccccaacactctgcagtgcggacgcggcgcacacaggtgcccggggagccgcggcgccccgaaaggacagggcctggcaagatcatgcagcggtggggggaaggtcttaccgaggcgtccggggagccgggtgtgcccggaggcaggccgccgttgagctcgtactcctcggttcccgagtccatggtgcggccgcccaggccgccaggatccgggcctgagcgcgcccgagcctcagccgcaggctccagctgcgcgcccgcccccggcccgcccccggcccgcccggcggcgagctgctgccccagactccgcctccacccggggcgggcccggggcctggaggctgtacgctgagagcgcgcagtttggggcgaccccaacccctcgggcctgagacggtcccgcggggccccacaagggagggggcgcgacgccgatggccccagaggaccctgcgctgcgtcttgctctgaacctccgtcgcggacacttttaatccacaaaatgaggccaagaacgacctttccctggccaccaggcaaactgcatgaaagcgagcgggcgttgccgctggcgcccacgctgggtttttcccaggcggggttcgccctgggaaccgcagatcgctccagcacagcgcctgctgcgcccctagtaacagcgtcagagagtccggggttcccctgattgcgggccacgctgacacagggcttcccactccctgaccttaggttttcctgcctgggaaatgggggttatgagggcacagactgctggaggggctgggggaggcacaaaggggatgaacgtgcgctgactcatgggcccatctgtgccacctgtggcagggggtgggctgggggcagcacagtgcccagagccctggccagatgctaggcgggcccccacctgttgtatgattgaagtggttgtttggtctctgtttctccatatgttcattcctcagcactttgcccatctgggggcctgggggtcgagagcatgtggcggccaccctgggaggccaggggagttcatcctgaccacagcatagtcagcttgcggcagtatggccactctatttccagaagggcagtggaaggaaggccagctcagaccccaggctctgtccagtcaggctgccaccgggacaggaggtaggagtgagtgggcatgggcagggcagcaggattgcgcttgccctgatcctccaaacggggtcatcccatgaaggaggagctgtcgtgggcccacttcacagcagagaaactgaggctcaggctgtcactgccccagctctgcctcagaggggatctgcaggacagggtctggcacggtggcccacgacggggatggttgctgttgtcctcgcataatcagggcactgttggcacacctgagtgttcaccagcagctggaaatccagcaccattcacacaaaaaactctctcacagtatgggacaaatccctattctgggggatagtgcctgcccacgagggctcaattcctggaggggcaggaggtgtgggaccacagagaaaatacgtcacacccagaaagggccctgggagctgcaggggagccctgagaccttggaaggccaagggcgtgtagagaggccccgaagtaggagggcttggcaggtggagaccccgtcctgagagtattctttcctttgtgccatgtgggagctcctgcagtgtggttcatcattcccatccttttttttttttttttttgagatggagtcttgctctgtcgcccatgctagagtgtagtggtgcgatcttggctcactgcaagctccacctcccgggttcacaccgttctcctgcctcagcctcctgagtagctgggactacaggtgtgcgccaccacgcccggctaatttttgtatttttggtagagacagaatttcaccatgttggccagatcacctcctgacctcaggtgatctgcccgcctcagcctcctaaagtgctaggattacaggcatgagccactgcgcctggccccattcccaccttctaagaggaagccgggagggtcgcagcaccagtgacagttgggacatcagcctcggggtttgtaaacctgctctgtgctggccgtctgagaccctctcccagcctcagtttcctcagctcctggggctgctggcaggacgtgtgggtgtcagggctcaggcaggctgcagcgctggagttccctcgtctgctccgtcatcctcatttgagtatgtagtgtctgtt

SEQ ID NO: 588617 - DNA, 4001 bp, Homo sapiens
acatacacacacacatacgcacacacacatatatatatgcactcatggtatacacacaggcattcgtgatattcttataaatccatcttacttaagtttgaatagcatgtgccatttccttaagttgattacaccagaataatctgtgaagacagttttgatacctacaaagctatggacaaattagggcttatactgactagccagtatgtctgtctgaaagcagtaggcttttgctccgacatatttttgtttacaaaatacaaaattatgtaactgtgtatgataaggcttaatgataattatctagagttaattctattcgtgtgtgacttatattcttattgctcaaatgactaagcctaccaacaaaaacagctgcagctgcccctgccttttgtggacactctttttgtgcttttaaaccaaactctagtaacaatgttggtcaagaagcaagtgcctagtatccataatttcaaaattattataataaaatatatcaggagataggccaatggggcatttgtgacaaatggatttcaggttgattcgaggaatttgtatttggaggataaaatagttgatcaaaggtacacatttttacaattttgggcagtattaatatacagtagggaacctacagtgagagagggagagagatgtggacaggtggtgccagagaaggaagactgcaggggagccgggtatggtgggggagccggatgggagttaagaattttgttgcagggatgacttttagctgctagggcagaaatcatgagtcgtccatcctcccttatctccaagttagggatcattcccaccagcaacgacctccacttcacttaaaagagaacaactgatggacatttctaaaaacttaaagtttggaatcatgccataaggacgtcattcctggccctgccccactggagaatcattagggtaaaaactgcattgttaacccggggtgaatggacatgagctgctcttctttagtgctcctcagtctgtctctaggacaggttaatccccttcccatcctgccccttcagaaaggagtaaagtcctaaacatcaaaaggaaaagaaatttctaggttgaagccacagaataggccactcccgaaagttagggcagaatcacaagctccattttgtccatttctcatctaaggttaaaagagtctgtctgtcatcgtccggtttgataggaggctccggtcccgcctggttgggggagcgaccacacgaagcgcgggtggcgggcagggtccagccccaccgggaccctgggcctcctcttcaagggtctccgcgaaatgctcggaagttgtgtgcttcatttaaaagggggaggccggttccgtggcaagcggctggttgacaattccctccttcaacctgatgtctagagagggcggtggcttggaaagctacgactccacccgcggctccacagcgccaggtgacaacatgggagcgctcgctgggccgcagccgcgacatagctgggcagcaaaaacgaaacagccggcgccatgggagtgtcccggtgggtgtggcatccaggctagaaaagccttctgaccaccactgcccgcgagacgaccccggctgggggtattcccctagcagcggcctcctcctcacgcgcgttccgggtacccctgtcttggggttccggggctcacgctagaacctcaccggggccccaggtctgggcgcgcgtggcggagagcgcatgcgcattgctcgcacgtacccggaacactccccgccccgcccctcccctcccgtcgggtgaaggcttgggtacccccgtggccggtacctgaggcgccagcgtccgtgaggccagcgcccgagtcagggcgcttctgaggacgagcatggcgcggcttcggcgctgagaaaagcagccagccgtgtcctttctgagactcctctgaaggtttcccgagtggaaaggagcggctcctggatcattggcagacgcaggctggggcggggctcggcggggtcagctccaccccggcgcgggaggcgcggcgggtcccgtagcttggtgtctttctctgctgtgctgagcgttggttcccccttggtttcctgaaacgttcttaccccaaacgttagaggtgacgttaggattaactgaaggctcggatcgttcctgcttcaactttctgggccctcactcacctcattcgctccagtgctcagttgtgtagattggtaaatgtgcaggggttgtgggtgtgttgaccatggggaaagaaggagaggtgttgagtgcgtgcatgtgcagtgctttgtatttaaaatcgtggaggttttttccgagttaagttttagatgttgtgatagacgtgtatttgagcctgacctctctgcaatgaatgtgttctccatcttagaaggctcctaattaagatttagattaaattttccacgagctcagagaaatggcagcatcgagcctgaaatgaaaaagtcaaagttaaacataccctggtctagtcctcccagtccgggagtgttggttcccagagtaaccaccttcaacatttcaagctgtttcatttaatgcttgtttctgtatttttaagtaagtagtgttttctgctgtttattgcattttcagttatggatagtatgtgttgacttccttctgtggcagatgaggatttatgtctcatagatgccactgcccccaaattcacttgtcttcctgcatctaataatgcttatgttaatttacagtaattaattacactattaatttacagtaatctatattaatgtttacattattcttgctaataattacattattgtaaacattaatgtaatattgcttacatcatgaggactagggagggattgcagggccatgacctgggttgtattggttgtgccttgtggaagagctttggaattgtctgttcaaaggaagggagactttttaaaattagttatttcggaagggttgcctcagtttttctagaagagagacatctatttgtaaccatgcaagactaaaaaaatcatttgtatcaggactggatctatatgagtaaattattttcttagacctttttttttaaaccctgtaattgccaatccatttacttattcaacagatatttactaaattccttccatgttccaggcacttttccagaaactggggtacagaattgagcaaaattcaaagtcccgtcctcttggaacatccaggatggaggaaacagataaaaaaaggaagagtaaatatatcagggattgtcaaataatataaagaaaaataaagtaagatacgaataaaggtgctagtggaattctaaaagtggtcaggattctagctattgacttggatatttaggatttaggtttcttcataccactccctcaaaatacactttccttcctgcgtttattgatgtttacattaaaaatatattttggagtgagaaaaacatgttaaaagcactgtaagcacaggtgaatctcttcaaatagtgggcttcactgtgaggtgatctgacctgggtatttcactgaaggctgtatcccctccccccaaactgttatctgcaagttatttatctgtgtagtcagtgttagggaagggaaacttccagtatcttatctgtgtgagaaaagccttgctgccagtttcctgaggctgaggagggaagaaggccagaacactcagcatttggtagtatctttcaataatatattaattagggtagattaaatagctcttgtaaatcaacactcaaaaaagtgtattattactcaaacactataggagtttattttttataagaatacaaagtgggtttttctagttggcaggtagctcttctatacttagtgaattagggagccaggcttctacccggtggctttgccattccctagtctcatcattaactgcatccatccagcagaaagatacagggaacttccaagaggaatttccaagag

SEQ ID NO: 588618 - DNA, 4001 bp, Homo sapiens
gatgtcaataaagataactactcttaattctgatgaatatatagcaactgtttcctagcaggggtctacctctagccattttttcacgagaatttgctcacaagaaggctgtgggatcataatgatactcctttaccgaagaactacatttaagacttagtctctttaatttacaaagggttttcccctgtttagccaatattccatcttactcaataccatatgtattagttccacacattgaaaaaaatttattaagtacacatgccttttggcaggcccaaaaatacgtttactaacaaaaaactcttgtttttaaaaggttcctaaaaaaacaggaagggctattcaggtcaaagtatttcctgaatctactgatgaagactaccggtcaaaaacaggactggaatgtaactaatataaaaggaagctataacttatccaattgcattgtactatgggtgtatactgcataaaggctgaaaaggaaaaaaactcaacaaatgagaattgtctccatcattgtttctaattacagatgcaatatcaagaagtatgtacatttagtgcactcaattataccaagtttatggaactatcctttaagaaccaccctttgtaatagtcatatgcccaatgggtaaattttctgtcctaatctggccctctgagcctgagtgagcttaatgttcagtagcaaatgccctgtcagaaattatccagtctgtctgtatgtacgtacatgcaaatatttatgtaaacacacgtgtatacacagaccactcccgtggcattctagtttacaaatccattcatttaggcatggttagcatgtgacaatttcctgaggctcactacccagaataatctatcgcaacagtttcagtaggcatctttcactgacatatttttggttacaacatgcaaatgtctatgtagtttgtgtgcataacgtcttaattataattgtctatcttgagttcattcatctccagtatgagttatgcccttattgcccaagtgtcttagttttcttagaaaacccttcttcataccaaaaaatacctgcaactatcctttcttttgatggccattctttttgggtcagtttaatcaaattctgaaaataaaaaactgcttagtatctacagtttaaaaatattattatctcggaaaatgggccaatgaggtatttctaataactgcttttaaagttgattttcggagatttgtatctggagatgttatcctaaaaaaacgcaacagctggcgccacgggggtgtcccgggagttgtggcatttaggctagaaacagctggcatcaggctgggcacagtggctcatgcctgcaatccagcactttgggaggccaaggtgggcggatcacgaggtcaggagttcgagaccagcctgaccaacatggtgaaacccccgactctactaaatagtaaacacaaaaaaaattagccgggcgtggtggctggcgcctgtaattccacctactccggaggatgaggcaggagaatcgcttgaacccgggaggcggaggttgcactgagccgagactacgccactgcactccagcctgggcgacagagcgagactccgtctcaaaaacaaaaacaaaaatcacaaaaacactggcatccagttagaaaacccctctgacagcgactgccagcgagacgaccccggcctgtagcctcctccttgcgcgccagacggctccagagaccgcgttagaacttcggcggcggcgcggggccccaggtctgggagcgcctgagcgtggctcgcacgcttcagaaataccccccgcccctcccctcccctccggccagggctcgggcgcgcccccgcggccagtacctgaggcgcgagcgtccgtgaggcaagcgccttggtcaggccgcttctgagaacgagcatggcgcggcttcggcactgagaaaagcagccagccgagtcctttgtgagacttctctgaagtcttcccgagtggaaaaaagcggctcctggaccactggcgaactcaggcaggggcgggactcggcggggtcagctccaccccggcgcgggaggcgcgacaggtcccgcagttggcgtctttctcttcggcgctgagcctcggtcccccttggtttcctgaaacgttcttgccccagacgttagaggtgacagaattagctgaaggctgggatcgttcctgccccacctttctgggccctgacctcattcgctccgatgcgcagttgtgtagattcgtaaatgtgcggcggttgtgcttgtgttgcccctggagaaggaaggggaggtgttcagcgtgtgcatgtgcagtgctttgcatttaaagtcgagatgttgacagggttaacttgtttctttgtttgagacgtagtcttgctctgtcgcccaggctggagtgcactggcgcgatgtcgcctcactgcaagctccgcctcccgggttcacgccattctcctgcttcagcctccccagtagctgggactacaggcgcccgccaccacgccccgctaatttttgtattttttagtagagacggagtttcaccatattggccaggctgggacagggttaacttttacaggttgtgatagacgtgtatttgtagaccagtgagccttcgcttttctgcattatctgtccccattgccaccccactgtgatcttggaaggctcctaataaagatttaattttccatgagctcagtggaatagcagcaccgagcctgataggaaaaagtcgaagttaaacatagatagtttgaaactagatcgttctgtaagccttaagagcaaaacagccgacctctggtctagtcctcccagtcccagagtactggtccccagactaaccaccttcaacattttaagctgttcttctaatacctgtttccgtatgttttttatttttttgagacagagtcttgctctgtcgctcaggctggggtgcagtggcatgatcttggctcactgcaacctccgcctcccggtttcaagagattctcctgcctcagcctcctgagtagctggaattacaggcgcacgccacgacacctggctaatttttctatttttagtagagacggcgtttcaccatgttgggcaggctggtcttgaactcctgacctcaggtgatcctctcggctcagcctccctaagtgctgggattacaggcacgagccactgcgcctggcccgtatttttaaataatagtcattttctgctatttcttgcattttcagttatggagagtatgtgttgccttccttctgtggcagatgaggatttaggtctcacagaagccactcccccgggggcttatcatttgtgttgagaacattcaatatcctcctagcaatttgaaactatatattattaactatagttatcctgaagtggtatagagcactagaacttattcctcctatctagctataattttgtttaacaaatctctcccatccttgtcttcctcctaatctttcccatcctctagaatcctgttatactttttatttctgaaatcaactttttttaaagcttatacattaatgagaacatgtggtgtgcaactttctcttgttggcatatttcacttaacataatatccaccagttccagccatgttgctgtgaaggacaggatttcattcctttttactgctgaatagtattccattgtgtatatataacatactttctttatccattaatcttgctggacacctaggctgattctgtatcttggctattgtgaacagtgctgcaataaacatgggggagggaagatgtctttctgatatactgatttcttttcctttggataatgctcagtagtgggttatttgtagtttcttgaggaaactccatagtgttctccatagtagttctaagagtttacattcccaacagtgtatacgattttccttttctctgcatcctcatcagctttgttttttgactttttgataatagcc

SEQ ID NO: 588619 - DNA, 4001 bp, Homo sapiens
aaaaacaaaacaaaaaatcaaatttaaaaagctcgcaattgagttgccaggcttcatgaagcaaatgcaagcttcgtacaaactgtaaatcatgtgatgtgtccaaagagtcatcatttcagggcacgtctatcactagaatccacaccaccttcaatctcatggaatatctgtgtagtttattttcccagtgcgtgcaaggctttcctcaacagcggagagcttttgcatagcaggagaacaaactaggatagccaagagcaaacctgaaatgactaattttattttttacacttttttttaaccctaagtaaaatgttgggttttttaaaataattcaggtgtgtttattatgcttaattcatttcactactaaacacttgccttttggattctaaactgcagaatggtcagaagtggcatgtgcagaatcagcagattgtacgaactctctaacgcagctctctaacgcaaatgatctgaaagacagctgacaaagctaaatgtgctcttcaaatgtatctacaggacagtctgatattttaaaaagagaaaaatgtttccaggacttcttactctgtattctatccaacagctattttgattctcttcttccaggagatagggcagtcttttcctactattgtttaaactttgctcccttttggtaaacaaatccctcaaggctgggttttttttttttttttaagacagagtctcgctctgttgccaggctggagtgcagtggcgcaatctcggcttactgcaacctccgccttctgggttcaagtgattctcctgccccagcctcccgagtagctgggactacaggcgtctgccaccacgcccggctaattttttgcagttttagtagagatcgggtttcaccaggttggccaagatggtcttgatctcttgacctcgtgatccacccgccttgccctcccaaagtgctgggattacagacgtgaagggctggggtttttgaaaacgcaattcatgcccctcccccattggtttcatttatgtaggttcttaggtaaacagttttttctttccccaaatatacaattaatttacaatattgactgttattttgaacttatgccattggcttccttgtgtgctccagttctttcctcccaccgaagattcaatccgatagatcaggggtaggaaaactttttctgtaaagtgccagacaggaaatgctttgggctttgccagctgctactcaaccctgctgggtaatgcgaaagcggccacagaaaacacagatgcaaatgagcgtgaccgtgttccagtaaaattttacggacactgaaatcgtaatttcatgtaattttcacgtgtcacaaagtattatatttctttttatttcttttcagtcattaaaaaaagtaaaaaaaaaaaaaattcttagcaggccttacagtaacaggcagcaggcgggcagtaggtcatcaccccaacgctagaggaatgagaccatatcgatccgcgaggatcaagtcctgatcctgtccctggcgacttctccaggctgcgcggtctcttggaggcagcgttcccattttcaggattattccggggcgctagagcaccacgccaccatgagtacacgtcctcctcggcaggccacctatcagctctgtgagggtggcaagagtccaggcaaggctttcagggcgcaaccaagtcccgggctccagcacagaaaccctctggaaacacctccaggccccagcaaggcggcgcggcgcggcaggggcgagcaggtacgcactcacctggcgccagttcgagtcctcccaaacacagcggcagaggcgacagccaagcgcgcgcctgtacccagtgcgccgctacccgcagctcgctccccgagaggcccacagcccctttccccacgctcctcctgggttagagggatgccaggtaggggcggtcaccagaggccccttttctctactctcggcgccgggttccagcccccgttggggcggggcggggcggggcggggctccggctagcttggcctcttccgcgcgcccctgcgcagctccggcccttccctatcgggagcgcgcgcggcccgcggcactgcactggcgcacgcccgcttcgccctcgctcggctccggctggttccgccgccgtgcgcgccgcccgcgctcctgctgcggcgaagctgccagcccgggagccaattagcgctcggctaggcggggtccacttcctcgtcggcccggcgcgcgctctggactgctccggcggccgcggggcggggcggagcactcggcggagccgctctgcctgcgtccgctcttcccgcagccaagggtgggcgccggtcctaggaggcgcacggttgtaagccagacaaaaagaactggggtgcccggagtgccaggtggcgggcaagcggtgggcttttcggcggggtctttaggatttgcagctccaggaagcgagatgtcgaagccgccacccaaaccagtcaaaccaggtgagggaggtaaggtaggcgcttgccaggtcctgcgaccgccgcggtgccggcgcctcctctgcagcttggcagggaggacccggcgcgcacccggccccgagcctggcttccgagatcggccccaccgggatgggcgctcttagttttgcgttcgctgttacggaggagggatcgattttgatagcaagaggatttcgaggattaatatatatatatatatttaaaggggagtagccctcacttttgctacgttgtcattcgctgaaactttcagagggtgtgatggcaacgtcccatggaagttttccggaaagacagggccattgatctccctttaaaaaatgtcatgaaatgatctttagccacttcctcttttctcagtgtttgtcactgtcaagttagggttcctgaccggccagagcgaacgggaagtgcaatccctgcagggtggggtgggcgagcgagcctccctcgggacttaagcgtggagcagcgtttgaaattgacctcgggatcttgggaagagcgtttagaaaaaaaccctatactcgcgctcctggtggaaagaatctaggatgcggcagtgatctcagctgttgctatttggaagtgtcattttatcatctcctttgcctttgctctcccaaagacgttggcgtgctaaacctgagagggctgagattactaaattcctcaaagcagttttctgggcggattgtccttgttcatttttgctctgttcttagaatattttctgtgatatgcagaaataagataattgtaaaagaaactgacgtattttaattaaaagttgtaacatactgttccgctcattcatttgggtaggtaattagaaaggactgacgtatttcaatactttaacaactcttacgtgcattcatttgggtaggtaattaagggaaatacaggaaatggaagataaatggctccgatgtattcttgggttttttcttcccatagtgtaatttcggtatagcgaaatgctgaaatttaatccatttacgtcaaattttgaagtaactttctttgcaagagatgagtttcagtgattacttttttccttgattttcctaaactctatagctttcatacttatctagttttgtttctttgcgttcctgcagttggagtatgaagtccctttatttgataatcatgtacgtacgtatgtggaatagtgcttcactgaggactgacatcttggtgggctgagtgtgaaggaagttgctgagactggctctgccctgggcaaagatggggcacagctagagttgggttctgcattgcattagatgtggaatctgatgagaaatttccattttaagtgcatatgtatgaggtagctttctaaactcaggtgcaaatcaggaccttaagtatctaacagtgcagagttgttctttgatagctaaacaatattttatttatcttatttttttctgatcacctgctgccagttgaaatacgt

SEQ ID NO: 588620 - DNA, 4001 bp, Homo sapiens
tgatatacccccactggaggtctctcttgggcttcccagttccccaggccacttgcttacctctgtctcagggactgagggcaccctcacaacccgctggttgacctcccgtaggaaggcatcaatccgatccttcttcttctctgacagccttacttcctttagtagctcctctacctgtaagagagggtagaagacagtccatcagcctcagggtcccaggtacacacctcgaacaaaagctgcagacactcaacagtacctgtaaacgaagcaagctggagtggaacaagatctcagtctcccgaaggcgattaagctcctcattggtaggctccttgtacagttctgccctgctgagcttcactggctgcaggaggcccttcgctggaggttcagccaatgtacgcttcctggaggatgctttcttcccctctttgcctgtgccttccagggctggttccatcacctgtggccagtgagggagaagccattttgaggtaataggtatctagcatctgctgcctaaagtgccaccatgataggttgtgggtaaaagcttcacctgctctgtccctcttttgagtaggagtcagattttgtaaaactcaggagaatcgttacttggatgaacatcactgagcgctgagccgaaaattccttgagttaagagctctcctgtctacctgacaccacaagcatggagctctgtttggaattggtagtgatagaagctgactgggcccaggctggacacggtggctgacgcctgtaatcccagcagtttgggaggtggagctgggcggatcagctgaagtcaggagttcgaaatcagcctggccaacatggggaaactccgtctctattaaaaatacaaaaattagccaggtgtggtggcacatgcctgtaatctcagctacgcgggagactgaggcaggaaaatcacttgaacccaggaggcagaggctgaagtgagccgagatcgtgccattgcattctagcctgggcaacagagcaagactgtcaaaaaaaaaaaaaaaaaaaagaagctgactgagccctgccctaagtaatgcccaggccccttgtattttcaggaagtttcctcttctgctgatataggcctgggacttctcaaatgtctttcccattctcgctccaaccaaatcctgccaggttccacctcctctaggaagacctgactgcctcagtttacactaaatactcactgatggaaggagctagaaccgactggaccccagaggacacatttagcaagtcattaaatcctcaaaataattcttgaagacacttgaagtcccactattcactcgaggttccacaactggtacacccgtactatgagcaggcttcaaaggcaagcgtgcaggatcccaaaccttttcccctacagccgtgggcccatccgctccacgatgcctctcatcccagagagccttactggagcgctccaggagaggcaccgtatgccctccgctacagcggggagcacagaactggacacaaattctgtggaggaagatcccgcttatcgtcaaggaccaccaaataaaagaaacgacccaagtgtgggtctcttcaactttgaggtgcagagctccagaagagagcagaggctctaccggcttcactgcttctaaccaaatactgccaggttccatcacccctagcaagccctgtctcagtgccactggctggaaacatcctccagaatgggccgccggcatggctttcacccgcaagctgtcagatcacgccatctcgggccctgcagccaagggagcgcacattgagcctctgttcctccccgatggctcaacccacctctggctctccagtcgctccgcgaagctgctctccagctggcgccggccccatcactcagggtccagcactctcccgcacttcagattctagccgggtctatacctcatagcttcccacgtgggcggaaatgcctaactccaggcccaagtccagcccaccccaattcctcaggactccacccactccagagctattggattatcagtcgattactcgcttgccattggccgggcagtctcaaggcccgcccattaggggaggggacaaacgggtttctgtgctttacggcctcttcgcgacgctagaacggaagcctgcccgtagctaggcctttgctttcttttcctcacttccttcgcgtggctgcaatcgggaagggcggagctagtttgttccttttggtcaggtttgtttacagcagttattcctccctttttctttatttgctacaccttatcagttaacaaatcttgtcagttctacctccaaaacataccttgaatttattcatttttctgtgtcttcactgccaggtttagcccgtcacatcatcttgttcccgaattattgttatgacttttctccagtttttacttattacttagcttattacaatttcaagtaatttagttatttttatttatttatttatttatttatttatttatttatttatttatttttggagtagtcttgctctgtcgcccaggctggagtgcagtggcacgatctcagctccctgcatcctccctctcccaggctcaagcgattctcgtgcctcagcctcctgaggagctgggattacaggcaggtaccatcacacccgtctaatttttgtattttcactagagatggggtttcctcatgttgcctaggctggtctcaaactcctgactgccagtgacccgcccaccttggcctcccgaaatgctgggattacaggcctgagccactgctcccggcctatttttaaactattaaaaatttaaaacaaatgttgcaagaataatataatgaatgcgcatatactcttcacctagattcacttagtgttactattttgccaagtttatctttacctatgtatttacatattattttgcaaaaccatttgaaaaccaatcacacatctccctaaatacttaggtatgtatctactaagatcaaggactacctcttatgtaagcacagcccgattatgaaattaaggaaatttaatcgtgattcaatactagtatacaaattccatctttaaattttgtcagttattccagtaataaccgttatatgtttcattttatttcctaatgcaggatcatctaaattcaactattaccatataatatatatatatatatatatatatatatatatatatatattttttttttttttttttttttttttttttgagagagagtgagtgtccctctgttgcccaggctagagtgcagtgggtcgatctcagcttactgcaacatccacctcctggttcaattgattattgtggctcagcttcccaagtagctgggattacaggcatgcgccaacacaccaggccaatttttgtatttttagtagagacagagtttcaccatgatggccagcctgatctcaaactctggcctcaagtgatctgccctcctcagtctcccaaaatgctgggattacaggggtgagccaccgtgcccagtctaaaaatttgtattgaagtacaatatacataaggaaaaatgtacatatcccaagtgtaaagcttgaatactaacaaaccaaacatactcatatagtcagctcccagaaaataagcagaacatttcctgcaccttcagaatctcccctcatgctgccctctagtaactctgcccccaacaatcactattctgacttcaaacagtgcaggtcagtttatacaatagcttttttattatttattatttatttatttatttattttttgagacagagtctcactctgtcgcccaggccggagtgcagtggcacgatctcggctcactgcaagctccacctcccgggttcaagtgattctcctgcctcagcctgccaagtagctgggactacaggcgcccgccaccacgcccggctaattttttgtattttttagtagagacggggtttcaccgtgttagcca

SEQ ID NO: 588621 - DNA, 4001 bp, Homo sapiens
aaaatagctcttgaaaacttattatttcaaagataaaccttgttttttattggctataaaaataagcataattatcaaaatattccaaaaaaaaaaagaagaaaatgtccagtagtcagataaggaaacattttgattgtatgctagtgatagtctacttaacgggacacttaatccatgttagaaaattctagttctcaaaactggaagttaatatgtttctgaaatcagatgttttagaatttggaattttttcttatttcagaaacaaattctggtcaagttccacatcacacattatacctccacaacatcacttaaaacttttggtgttcagagctaacatttatcttggggttgttttattttctagcacttaacctgagttatgtctgcctataactgcccagtgaaggaccataaattaccttggtcatctttccgtgtgatgatctccacatccgaaacttctccaaatctgctgaactgattttgtaggtctgcctcagaaatgtcctggctaaggccacccacataaaggcgcttcgtttctctgttcactttcatgaaggctgggcatatacttgggtgtgtttcagtgggaaaagtaattttctgtatacagagaagagttctttcccttagttcttctaaaatctaacaaaacaactacttcctctgaaccttctgtatcaaatccgtctcctggatctgtatttcacttcctattgtattacttccaaattttagtcttcgaggttttgcccaagccctacatccacatctttcatgaatgcactttggaacagcaaccccatacccatatagacacaggtacagacagagtttttttcctccaaatggccataatattacactctatccctcttaattttatgtattcatgtttttagatgtttttccttgactcactcatacattcatttactgtctttaacaaagtctgacagaaacaggatgtaacgcactaaaagataaaaagagctagcctacctcttcctaattgtctccacccccaacctacccaccccagccttcttcctcctagaagacccaaagaagtgaatagagaggctaggagctccttatagtcacaaaagaataaaacaaatggcacaatattatgtcacaataaaagtgctgcaaagtggggttcagacacaaagatcaagggatatagcgaatacagacttgtgtttttgctatgtgcctgcattgtacaaagtagtttgcatgtttcccatttttcaggagagcagaagaggttaagtcacttcctcaatgccataccgaaaattagtgaatccaggattataatgcaggtctaccttcagaacttggaattcttaacactatactatgaaggttgctgtatcacaggggactcaggaaaacttttccagaggtactagggcccatcatagtatctctcatttcgtttagcacccggcaggcgctcagctctcgcccttcccttccccaagagctgacagactctttccagaagagactcccaaccagcgtccaccacatggcgtgtattctgggcagaacttcggcctacctcttcccgatagtctccgcccccagcctacccacggcagccttctttctctgagaagacccaaagaagtgaagagagactaggaaacggccctgtgacttctcatgcccgaaacccactcctcaccacgtcgttcacctaaagccagcgccgctgcagcccctaacttctggtcacgtgtcccaacggagcatcctctcttccttcctactcgatttccaacccagcctcctaaggttccgttaccacaattcagttcccaagagcttttaatttccttttccgtcctcccaccttccctgacgcctccgtcacctccccctcaacgactgcaaaagagcctaaaccaaaatcccctagtttctattgaacactatcgctgtgtgtaccaattcctggactaggtcggcgtaagagaggaagtaggtgaaaaaaataaagaggcgctcccctccacgtgatcccagccctgcctctttagtgaggcacgcggccgggcggctccaaggctgccggctagggtgagcagcggagcgcttgggcttggagtagcaaagaacgcgctctccagagaaagtatagccactgcttagacagccagggaaacgtgtgcggggaagtggaggactcaggctctcgtgcgagagcggagttggacgtgcagggccgctggggtcacgcggagctctcccgcctcccctccgcgtgagctctgggatggtccgcgccgggagcgcgcgcgaggcttgaagcgcgggtgaagcgcgcaggtcggagtgacagctgcgctgccggcccggctgcggtcagcaacgcgccatggacgcagagctggcagaggtgcgcgccttgcaagctgagatcgcggccctgcggcgagcgtgtgaggacccaccggcgccctgggaagagaagtcccgagtccagtacgtgaccaccccaagtcccccagggcccgctggccagggttcccgggccaggcgggtgaatctccacagacatcctcggtctcctactcccagccctagaaagtgggcatgaactggcattgatcctgtcatgacgatggcctagagttgggagcagcgcgtacggcgcccagctgtaaacgcattgcagggtattaactcgtttaatcgcagtcgtctgtgtggatgactgacaaggaggaagtcttgactatatccctagctagataattccgcctccagtatgcagaagtatctctagttgggatttaataactccgtttggtttcatggcatttgttttggtaggtcagctaaccatctcaactgataatgactttgtgtttacgatgacataaaaattcctttgaaaaataacttcggtaaaaaactaagttgataaaagaaaagtagttaatatagactgcaggagaatttgacattcctctgaggtaggtgctactgttagccctgttttatagttgaagaaactgaggctcagagaagttaggtagcttgtccaaggttccagagaaaggaattgtcagagatggattgggacccaaaaattttactccaaagtctgggcacttttggtttattgaaggagagggagagaaaagctctgcaaccgtaattatgtattatcatctcaaacatagaagcctctcgaaaacataaactgtcttcaatttttgagtcaagagtaatttgacataggtgcagaaagaatgggatttttcctgagctaactggagaagaattggtagaaaatgggaaggaggagatctacagaaaatgtctgcgtgcggtcatgaaagtagaggaagctgtgactggttaaagggagaggaaaaaggtgtgctcctccacaaatgagagtaaatgtattaaagacccttgctatttgaggtgtgctccacagatgggacgctttagcattacctggcggtttgttagagcgacatcctgacctactgaatcagaatctgcattttaaaaaaatacactgccctaacagaggatttgtgtgcacacttggaagtttaagaaccagggaaaaatagtttctttactggccacaagatttcattagtccccatagtagtgtcaactgaaaaatcatgagatctgcaaatttagagagactatttcttaaaaagggttacagtctgcaaagtggccatcctgacaggctaggaagcatagtctcaggcaaagcagaaaggcccacactttggaggaggaggggttggggcagggatttatgctgtatgagtgggctaggtatacatattcaacaggttataggaggggctatgaatattcacgaagggagatgtgctcacctgtactgaataaaaatgcatattacatgcactccatattcattttgggaagctgacttaatatttaaatgcattacaattaggccctgtacgtcaaaa

SEQ ID NO: 588622 - DNA, 4001 bp, Homo sapiens
ggtggcccacggaggagtgcccaagccctcagcagccagaccagctccacacgcagcataattgctggtgattaagtaattgccagactttgtccaataaaagtcagcacgtgaccgtgcccagactctgggccatctccagaagacaatggcctagtgttctgtcccctgcgcggctgcagaaggcaggggctctgccctcgacaaagcaacaggtcccgcaggggtggtactcacacgcaggcctccgtgccattggccgcttcacacttcccgccattcaggcaggtctcaccgggctgggagcatcgcgggcctaggcaggggcaggagaagagaggtcagtctcacccgcaccaccaccaccgaaggccctggttaccctgggggcggggacctgcacccagccaaggggcatcgtccgccccctaccccggacgcactctgctcagtatcatgggttgctggggcacgggtccgcaggaagcccctccatgaaaccaaaggggcgtcaacattctgcccagagttctgtagtcagaaatggggggaaggggagcagcagggaacacgtcctgcttgaagcagggtggggtggcctgatgtgccgcctggacgcagtgggggaaaagcagagacaaagtgggctactctccaaagcgttgccccccaccctggaggctcactgaggagtctggcagggcagggccccccatccagccgccgagattgcctctgttcaaacccgttctgcaagggggcagagctggacggggggagggggggtggccacactcagctcccgcccgtgggaaaatgcgacagctgctcgcccgctaccccgcccgccaacaaagcgccggcctccgcctcagaatcagagcggcccattgtggagtcggggccgcctccaggggcaccgggacagcaccctggggacgcggccccgcctccgccgacacccaatacctgcctccgcgggcgcgcatctccagggcagcccccatacacccacaggagggggatgaaggtcccccattcggaaggaattcgaccccatctcgagaagggatcaattactcaagcccctccctccccatcttaccggggctgagaaacgggggaggggggtgtgacacagagccgcactttctggaagaggacagataattctcgcctccaactctcggagaaagagtggattaatcactcgattccccagagaccccgctcgctgtgcggcggggagaaatgtaagagccccccacccgcgtcccgctctccgcccccaagctttccaaacttcaactccgcaaagcaaaaggaaagttcagtccccccgggcgcggcggcttcttacgcaacccctcccccaaactgagagccgggctggggggcaccggcgggcggggcgaccgggagcccggggacccagcccggccgcgcgggtcagtgaaggcgaacgcggcgccgcagagcccacactccgcgccccaacatccgccccggcgtgggccagaggcgaagaagaaagaagataaatggcccggagaagcaacaggaaaccaaaaccgactctattcaaatcgaaaaatagtaggcagcccgcccgcccggccgaccggcggcaagccccacgcgcggcgggtgaagggcgggcccggagtagggcctccggggccccagcaccccacaccggcctcctaactcggctccaggcacgggcggcgcgagtccgcctccacggggggatcgagggggaaggtcggtcctccctgatcccgggactccagaaccccacgccccgggccgcccgcttttccctctccatgctggcctccccgccgcccgctcccagccgtggggcgcgcgcgccgggcgccgccaaagtttccaaagggcgcggaaagtgggggctcgcgggtgggtgggcgcctacctcgtgcggcgagcgcgggcagcagcgccaggcagagcaggggcgccaggagcggcggcatgcctccccaccggctgccctctgcgcccgggcggcggcctcctgcgctggccggcggggctgggacgcacacgcgcggcgtacggtcccggggcggcggcggacggtcccgccctctcttccccggctggctggcggcgctgtgctctcgcaggcccccgggcccggctccgcgcccggctcgttccttcgctgcgctcgcgcccgcgcccgcgccccgcgccccgcgcccttgcgctccctcccgcggccgaggcactagtgaggctcagagtcgaggtgcgctccgcccccgccggccccgccccgcccggccccacccccgccggtccccccgccccctccgcggccacctcctcccgcacgccccgtccgcctttgcgcctccccgagctgagccgcgcgtcccgagcccagcctctccggggaggagggacccggcggcgcggcgtgggtcgggagcgggcgcctgggactacttctcgtttgaaagttttcagaggccaaaagtttgagccggggctgcggaaggatccggctctggcggttgccgcgctcggcgacaactggcgactgaaatttgcatgtgaataagcggaggagcccggggcggaatggggagggcgaggccgcggacagccgtgtgcaccgtgcgctgggccgggcggggagcagctgaggccacgttgggggaccccgggcccggggcagggctctgggagagtggcctagccgtgtgtgcgcccctagcccagcggcttcactccctcccgagggccccgtggccgcggctttaggcgtccagaggatcgatcgccgccagacatccctggccgtgattgcccgagcacttgaccgcgagggatgggggcgccgcggcctctgggcaggggactccgggcgccccgagggagcagccgggaccagtgcctcgcggacggattgtgccccgctcccccaagggggacccgcgtcgacacgctcctcggtcaccgtcctcctcctgcccgggcgccgcctgcctaaggtggccccagaaagcacaaacgggtcgggcggatctgccgctggcgccggcgcagcccttcccacgtgctccttccggctgatttatttctccaccacgatgccaggcacgggcaccctgtgccaagcctggttaagcgccaggagtccaaaatgcctgccatagtccctgcgcaaagttcacggcctcgtgccagggacagacagcgccccctccccaccccaacacagggtggtgagtgcgatggcagaaggcgcgtgtcccggcgcccctcctggagtaggagggctaagcctgccctgcggggagaccgaaaggctgggagggacctaggactgtgggggcctggggggagggctgcagaaaccccagagcatggtggcagaggcaggcacagaaagcaggacaaatctcacacctgaccccagcaagcctttcctggcacacctcttgccaaatgctgagcactctggaaacagccagtgcaggcggcctgtcccgcccctgtagctgctgctgggagcctccctcgcctgcgtcctcccagaatctggcctcacttctgcaggcctggggtaacatcttggggtcagcgccccaggagaggaggcgcctggaggcagcagagatgtttatgtaacagcagccaggcagcctggaggagcagattttccatagaaggaagcgcggggctgtgcagctcccaggctgaggactctgcccaccacgacgtcctctgctcctggtgggtgggggtggggtggggcatagggaggcccgaaggcctcaggcctggtgctgatcgggtgcgggtgcgactgcctgtgtgcctccattggcatctctgcctgtgggccccaggccagaagtaatggcccatgtagcccaggcccgggggccagtcctcagcattttgcggaggggcggcctgggaggggaggaggggatccctggatagggggtctcccctggtct

SEQ ID NO: 588623 - DNA, 4001 bp, Homo sapiens
aataaaataaaaatccttttttgatagttcatgcaaaatgacaccctagaaatctattagaatcagaaagaacaacacacgtcttcatgtgtttatctgtgtgtaaagcacagctcttccttaaaccagactcaggaggacacagaaggttctgaacagggaccgtggccatcagttaaatgtgtgtgacaggaagggtgctacggtctctttcacaaatctggctgagtgggggcttgtcgttgaaccaagttcacacaggtgtgaagtgtggcggctgagcacaggcacgcagccctgatgtggggtggcggctcagggccagcagaacccacctgtctgccccaaacgtcacgcaaggctcctaacaagagacagcagttccagcgacaccctctgcaccctgggctgcccctcacgtgatcggctttatgaatcatagctgttccatctgctttcctaagttcccatattcctaacatgcatatgctgtgggttagtcgtatgactttcactgcgtcccctctctgtagtgaaaccaggcacaagagcacaagtgactgggttagccccggacataggatttgttgctgaaccacctggtgtctaaagattacattccctttcttggataacattttaaaatgaaatcattgtgggccggacaaggtggctcacatgtgtaatcccaccactatgggtggccgaggagggtggatcacctgaggtcaggagttcaagaccagcctgaccaacatggtgaaacccgtttctactaaaaatactaaattagccaggcgtggtagtgggcgcctgtactcccagcaactagggaggctgaggcaggagaattgcttgaacccgggaggcagaggttgcagtgagccaagattgggccacggcactccattcagcctgggtgacagaacgagactccatctttgaaacaaacaaaaaaatgaaatcattatggaggtgattgtaaatttgtacgcagctttaagacacaagagaggggggtctcatgcgctttgcccagtctcctccaagggggatattttgccagtcaggggcgtggagaccctcccacagcgcgcagttccctctcctttaaatcactgctgtcaccgagccttcagtaaccgtgggcacctgcctgcttctgcggggtgcttgggactgagcgggggtgggcagcgctggcgtttgggatgcgcaggaacaggcggccccggaacgcgagggggcacgagaagggcaccgggctccgtgcagggcctcggccgctgcaccctggcaccctggactcctggctgtttcggggagtgggctgggggagggctgagggctctgaggaggagactgacccggtctcccggccatgaccacaggcgcaacgctttccccttagggcagggcggtccctcgggcctgacccagcccagcagcttcccccttcccggtgtgagtcaccctcgggccccggcctctcccggtgaccgccgcgccccccagcgcggcctcgcttagctcaggtgcggcccccctgctcggctcccacctgccggggcgttcgctgggtcgggggcggcagggcgaccccgtgacggtcggggaggggcgctgggccctccccaggggctcgaggcggaggcgtcgcccgcaccggcctccccacgccccgctcacccgcagcgcggcctcggggtccccggccagcaggtgcacgcagcccgcgttgaagcacagcctggcgggcggcgccgggacgcccgagaagaggtgcaaggcgcgggcccagtccccacgatccacagcctgcgcgcccaggtgccaggcgcgcaccaggtcccccagagaggccatggcggccggtggcggcgctcgaggaggggccaggatcccgcggaggggccggggccggggccaggcggcggcgcggggctgcggggtctccgaggcgggcagaggtgcgggcgccaagcgccaggtgcaaccccgctgccccgcggcgccccctggcggcaggcgcccgcccctccccggtaaggccacgcccccgccagaaacggctacgcccactccagaccctcaggcctcgcccacctcccattcggcccccgccccggccggacttccgccgggagctttgtgcgcccggcttcctcgccccgcccgcgctggccttggtgcgccggataaagccctccgggccagcggctgcggtcgggccaaggttccgcgccgggcgtggacggtgtggggcggtcccggccccgcaggtgagcgaccccgggccgcgcgggccaggtgggcggtctgggcgccgggggcagagcggggccgggccgggtgcgcgtcctgaggtgagggccgtagctgggagtgagccgggggcgggccgccggctctcccggggtggggaaactgaggccccgatggggcggggaaggtgcgttctcccgcagggccccgctccggaggccgccgagcagccggacgccgcggggagctgagccgaccccggcgaccccgccgccctgtcccgcagggcctgccctcctccgcgccttccgagcacggacatcacaggacccggaggcccttcgctccctcgccgaggaggaggcgctcccggtgggacgcgcgcgcgcccgccctgccctccccgggagaagggacgggcgcctccctgcaggggccctggcttcctgtccaccggcgctgagtcctgtattagttgtcaacctaaaataattaaaagggtcagaatgtggtgcccggtgggtttattcaggcacagaggtcgagggcggcctgggtcaccaggtgcaacggagaacaaaacagaggctcaggtttttaaagaaaacagagcccatcggagagcaggtggtttcgaacgttgcccaggagctcactggcttgtagaaatggcattggttcgcgattgaccacggcttggtgtcatcagtggatagttacttggctcgaggggtagtgaggggctgcggtttcatttgaaatgctttctggcacttaacatcaagctttctgggcccacagtttaaaagggctttacattcctcagataaatgatttttttctttctcatttgccccccttttgatcaaaatctttcttcttgaaagcattgattatcaaaatctgagggtcagagtgtcccctcttgctgggaaggctcattcccacatagtcctgtcccatgccaagcagggaaggaggagacatttcagggagttttttttttttttttttttttaagaacaccacaaactgaattggaatggcattacagggtggcaaacatgaggtctcagtgaagtcattaatttatacaactgctgtcacctgttgaatcatctctagtttttagaaacaccattaattttaattttctcagaagtaacacataggactataaccaatttgtatgccaggatgaaaaaaacaaacctgttccattagggagacaactaaaaacatgaagaaactaaaatccatgttcttctttctttttatttatttgtttacttagaaatggggtcttgctctgtcacccatgctggagtgcagaggcacgattcccactcatcgcagccttgaactcttgggcttaaatgatcctcttgtcttagcctcctgagtacctgggaatacaggtgtttgccaccaggaccggctaattttaaatttttttggtagagactaggtcttgacaccttgcccaggctagtctcgaactcctgagcccaagtgatcctctcatctgggcctcccaaagtgctggggttataggtgtgaacctctgcccagccaggttcttctttgagacttgtagccagaagattgttcaggatttagtccagattgtaggaaaataaaaaatacaatgatcagggctagaatccagtaacaggtatgctgtagtttttctctgaaacataatttttctctacttccccatttctaccaaagat

SEQ ID NO: 588624 - DNA, 4001 bp, Homo sapiens
ccgcagtggcaggtgggcacaggagccaacgccaggcaccgcacaccctccacaacctggggcagcagcctccagtatcagtgggccgggacttgggcacgttaaacattaaacctgtgccagcaggtccacctgggcccacccgccaacttggcacctggggagtgaggcagtccccgctcctgtgctgataccccaccgtccaccacgccaaaggcaggggcctgaggtacaaagctggctctagggtctgggttccaggcccctcctagcccttttccccagcccaggagcctccatcccccacttcctcctcctgaaaagaggtcgcaggaacaagagcagctggacggtggctggcacacccccctccacccgccaacgtctgggctgcctgagggccctcccttccaagcactgggcactgggaatgggaggagttgcctagggagggccctgccaggtctcccggtgaggcagacacgaagctgcagaggccggtgaactgaggactggcacctgccacccacccgggctcagcacagcagctgcagccccgtttcctgaataggtggcctccgcctttcctggctgagcacactctgattctcggaagcctctcctgttcatgcccacctcccatccaggggcactgagcccaggaggaagccggcctcactctggccccttgaggccacacacacagaaccaggctgcccaggacagcgcctcagctgtgccacaatccacttaacttctccatgcctcggattccttgcctgtaaaacgggctcacagcacctcttctgcagggctgccaggagtactgtacgaatgcagtcgcaaagtctcccagttcagtccccccagaaaaacgtcagctttgcatcctgggttcctgcagggagctctgctctctggaccctcaggacccatctgtgcaggtgagagggtgtcccaggaccctgggcttatcaccctcctccggagtccacctgcagccctcagtcccaaagacagaatgccagtgccctcgagggcaggggatgcaggcggaggctctgaggctgcaacagtctccctcctattgaagctagaacagcaccccgagcctgcgccataagtgcccccagaacttcagcgcccaccatggcgcacaaggccggtgcccagcgccacccaaggcgtgaggacaggcagagcagcactgaggccccgaccccgggacgcgcaccggcagcgaagccggcgggcactcagggccagccccacacccgcaggagccccgaacacggagacacagagacgcacacaggcagactcccggcgggcccgcccagagccagatggccgcggcgcggaggcctgagccagacgcgctcccggcggaagaagccatgaatgtaaggtacgcctctgggaaccggcagaagccccatccggcgcggccttttggaggctccgcgctgcgccctccggccaggcctgtttattccatcgtgggcgaggcggggcccccgccaccagcggaccaggcctgcagggcctgcgggcctgggcaggacgagggcggcggcgcccggcaacccggtccccgcccggcgatcccggccccggggcgccccgcggcctgcgcccagcgcgctcgctcacccgggtggccggcggcggctccacgcagggcggcgccgaggacgaggccggagagcagcagccgcagcagccgcaggtgccgcggggagggcggaggcagcggcgtcgccatccttcagcgccgccgccggggcagcatggcaccgcgaggccaggggctcggcgcgggctccgggctccgcgtcgggagcagcggaggcagcgggggaggacgcaggaggaagaagaggcggatgccaaggaggaggaggaggaagaggaaaggcacgggcggcggcgctgacgctgcagcaaggatccgggatggaggcgccggcgaggcgcgcacgcggagactgcgcctgcgcgctccacctgagggggcgggagggcggctccagactgcgccccctccccctgctccagttctggtcccctctccgggcctcgctggacctctctcggcctcagggtgtctcggcacctgcggtctctggggccggtgcggttcccagaagtccggctgggtttgggccgcgggtgggcttctccaggatgcgctcccttctggcctcttcccggtaggactccgagcccctcacccgcacccgcgatggggcagaggacctgtgtgggcctagcctcgcgagcgcacagagacacaggagcgccgggcgcacgcagacaggtgctcacgagctgggcaggtgcacaggaaggcacaggtgtgcccacagaggcaggggcacccccactcgcgggaaaagcaaatacaggaacacagaacggccccggccccgactgcagctttggctggagccgcggcggccgcgctcagtgaggccaccagggggcaagagtgatccggagccactgaggaccggagctgggagctgtccaaggtgttcagggtccccaggtgacagccctttagctccctcaggacaatgggcatctttttttttttttttctttgagacagcgtctctgtcgcctagcctggagtgcagtggtgccatttcggcccactgcaacctccacctctcgggttcaagtgattctcgtgcctctgcctcctgagtagctgggattacaggcgcgtgccaccatgctgggctaatttttgtattcttagtacagacggggtttcaccatgttgcctcagctggtcttgaactcctgacctcaggtgatacgccagcctcagcctcccaaagtgctgggattacaggcgtgagccactgtgcccagctgacaacgggcatctctgatgccccccttgcacctcacctgttgcctcccaagagcacgcccaccccatcccactagaaacctcctttgactagtcattcagagaacaagagtgagacctccaacccggggtgtccccttggtccttccagtctcagaactccaaagctggggctggctgccctcaggtttatcaaatgactttaaaaaaaaatggtgaagaggggagggaagagcagaataagaaccaccaccctcctcgccagggcactgagcatagagacagtgtctaagctcacttcccaggaaggtgaggaggcgagtgggcaagaccaggccttcccatcctggagaaaactggcttggggaggggctgcagggcctggctggggctgcaggatgccttttggaggtgcaggacactcagtcccaggtgagaagggcaaggtgccctgtgccattgcatggctcagctccacagccaggttctgtgcaagattcctgcctatgggtcctggtcctgatctcatctcccacccctgtgccacctcctgatgtgggcctgccctcccgccagtctctaccagcactgactgccccctaggaagccgcctggctggctgccacccactctccgccacctccctgacctctaccctcacccccaggctcactgtaccaggacccaaccttcagtctggccttggtcaccaacgcagatctggatgtgatggttttggggaactctgctggccagagaagactcaagggcccaggaacattccctcgggccagccatcctgcagctactctaggctgccacggcacaccagggcagcagccagtgccccaggcctggctccagagcagaaggcagtagggagggatggtgtccaccctcaggaccaagggcaggcccgtgcggctagaacagcgggaaggtgggggcacaggccacagcaaggatgccccaccccacagacactctcctttcacgtctctaggaaaaactttttattacaaaatttttacaagtaggtgctgggctggctgccagcccgtgggctgtgaccctccccagtacagacccagactacacagaaggagcctctaagggc

SEQ ID NO: 588625 - DNA, 4001 bp, Homo sapiens
ggctaggatcagatctcttcctgaacttttctcccccacaatatagcctactactggcacttaggaaagtcagtgttttaggattttggaggcagccaaagtcagtcttggcagcaagcacactaagagtcacaaaagtagagaagtaagaaagggtgacactagactcagaatgcctctgttcattttactcctgtggctcacaattcctgcctggttcctagggtttctttagggtcttgtgagagagaatttccagcgaagcacctcttccccctcctccttcagatttggctcaaatgatacctgaaaggcctctctgagggcctgggcctgttcccgggtgcgattgtcctgccagggccggcctgtagcacgtgtggggcctgcacggagactctccccaaagacatccaggtaaaagaagacataatccccattggtcagattctccctctgggcctgaagcaggatctcatgcagcatctccagagggccgcagatatacacaactgggagcaggtacatgacagaggagcaccctgagaaggtatccaggtcccccacacagccccctctctgaatcactgggatgtccctcttcagcaagaaagagagtgccctaacctatcaaccccaaagcagatgctccccagcccacccctcttggagtccaccataagtaccctggggccatatggaccatctggcagaagtcagagcctgtccagaccccagaggaagggagctgtcactctcaagcccctccctttcccagagcctcccttgctgctccccacccaaccggcctgctccctgactcttccctgcccttccctgggctcaaaggcacagacagcacagatttctcagtatgagctttatctgtctttcccaaatctgctgagccctgagtccgttcatggagccctcattatttttacaccaccaaggggtcttggcgcccagtctgggtggtagctctgatcacagacagggcacatttcagagtggctatcaatcacattcactactctagggcacaaacattgctcccgaaacttaatatcccctcattttcacattccaccttgatacaaggcttcacccctcatgctctcttcttccttgtttgcatctgcctagggtgttcacaagctcccatgatgaagccttggccctctcacaggtgctctgtccacgtgtgcttcttgatcccaaccaccacatacagctgctcaatgcctatctccatctacagttccccagtgctgagctttagggacacagcgaccctcctcccatgaccctaaaatagcccaggccacactcactgcgcccgttggcccggatgaagtgggtggcctgctcggggccccctggctctcgggcatacacctggtgctgcacactgaggttgctgccctgcagggcctcaaagacgccctcgatggtgaagtagtgaggccggtcatctgtgcgagcatccaggtacagcaaggcagcacgggcagtccaattgaagtgcccgtgtagtgtcaccacaaactcacccagcttgggagcagaggggccagtgcgaaccagggtacgataatggtcattcttagccgaaaaaccagaggccacagcacccgcagtcagcaggggaaggcgccagtgggaggcaaagcgggccacagaggcagcagggtacacgcaaccgggacctaacagcaggtcggggtcatggtacagcttgaggtccacagcgctcagcggtgccaggtactcagagcaggcgccttccagttcggagctgacaaaccgcaggtccacgggcagtgcccggcccagagcctccacagctagtgccacagcgggtcccacccgtggccaggcccaggcatagctcaggttgtgttctggcagcaccaccgccagcgtcaggttccgcgccccgggaggacgcaccccacctgccagggctgccaccaacagcagaagtgatggcagcgccatggggataaagcagcagccccaccgcccccagaacttggggctgctctggcctacaggggagacgcgagcaccccccagcctggagcctggggaagagggccaggaagaggaggagtaggctaggtaggctgggatgcagaaggtgctgggggccggggagaggagggggagatgggaggaaggcggggggcgggcaaggagtgggctaccagcctagggcaaggactgaggactgagaacggggtggcagggggagggagggaccgagggggcctgcggccaggatggggacagtgcgaggtgaagaagcctgataaatctaaagctgagaaggaaaaggggatctgggactgggatggggtgggggtggggggcgggtggtacaaagaaacggcctgggggaacctcacagctgaaagggccgggagggcaggagggcgctgcgccacataggaccaagggggtaaggtgggagggtgcccgcgccgcggaaggactgggatcatgggcaggcggggagcgaagcgaggcctgggccggagggcaggggaaggcaggggtaaatctccctgtgaaggattctcccggagctcctgcttggactaacgggcccgggcgctggtcccatccggagctacggcggccccgcccgtgtccccgctcctctctgctccgcttctcctgggccctggcggccggcgctgcccggcgcttcctcccgccccccgcctgggccccgcgcgcgccgctcgtccgggtcaggtcgcctcggcccggcccgtctccgctcgctgcgccggcggccgagtgcgactcccccgggcaggccgcccgcccccgcccctcccccgctgcctctcctcctccctcccggccccaccctccggcgccggctgccttcccccaccccccacccgggcgctcgggaccgccaggtcccaaacccaccccggtgagcacttgggggctccgcaccaaggcctcgccggccagcagggttcccgggcgctccctcactctcagggcctaccctggtctcccccacgcccctggtccccctgccgcccctccttccatttccatctcacacacgccagcgaccccagggtttgtcctctccccctcgctcagcccgttcttcttgggtctcccctctgaactccctgagtccctcagtggttccagtctccaggaagcagtcgaggatccccagacgtgtggtatcctcaccagccccctcacctagcaaaccatagcgccctcccgacggcagtgcggcttactccaccgcggaccatgcccgctccctggacgggcccctccagcagccaggggcccctgctgtacacttcccaccagtccttagaaagtccacgaggctccttcttgcttgggactcaactctcggccccccgctgtctccatgccccctgccctcctcgtgtcctcagaggcccaccgcagcccgcccggcttcctccgcaccatctgctcagtcagggcctcgattttcttttgtctcctgcacagcgcaggctggcgcctggggaaagcctgtaacggaccggcgggacactccccgcagtggaagcccatccacgctctcctggggttccaccttgctcccagcttcccttaggaagctctccctagggccctcatatctggagtgccaatctgaccccaagaacagcttgtgagggatgatctcatggtggctgagagggactgctatgggaccttggggatttttctccaactgtcataaaggacatgcacataagcccattctctgcccgcgctaagagccacggtttctctccccccttcaagctatttctccagaaatcacaagctaagagcgctcctggagccctggagtggggtgggagtgtatagggcgaggacgggcatggtttccctgagatgaaggcgacacctagtggtttggtgggggaaattaaggacaatgccactttatccttaggcacgatatttat

SEQ ID NO: 588626 - DNA, 4001 bp, Homo sapiens
acagaaagggaaagactgagattctcagaaagaccgagggagactagacaaaccgcggggaagaatttctgtgagcgcacggtcccaggcaaaggggtggatgggtgccggggggtggggggcggagcggacgtggaggttgctgtggcctaaggaggctttgatactaactctgcgagcatcttgttcagcgaaaataactcgaataaagtaacttcattcattgtgcccatcagccacgttaggcagctttttctttccctaacttgattctataaaatatttcccggtcgtgggaaaaggagatccggcactggactcgcgatggaatgacggctccctgttcttctctcccagcaccacaaggccctgggatcacagcccgacatttctgattactaactcctcgcagctcttccctctggagaatccggacgcataaataaataaaaggcaatctccaagaacgtttttggaaatcaagggacaaatgcgttcttcctcaccactgccccgaggcttccaacaggttggagaggtgcctttggaagtcagtctccgcaggctgcgctcgcatgaccgctctcgtctcaccaccgagaactttcatttctactaagagtaaaacactcggagcaacttctccaaaagcgcgagttctgtccgtgaaaaagcatgcctttcccacaccgagccaacgtccagaggagagggacaccgtccccacacgtgtcagtgtgcgggagtcgccaattacacccgatttacctcctaagggaaaagtgtaaaccggcatgtcagcgacgacaggcagacgtgcctagtggaaccccaggctcatttcaatacaataagccacattcctacaattacgccctctttcctgaggtcctccgagtgcgtctgcaaactctggccgtcgctgcctaggcccttccctcctaagcttccttccagagaaccagctcggtgccaccattagcaacatttacttggacccaccagagctcctattttcaatcctacttaaaaggcaggaaaattactgccgttcatcaccggagctgcaactccctgccgctgccgctgccgccgccgccgccgccgccgagagcatcattaccatgacaactagagccgaaataccctgaattacatcgctggagccgctatagcacaaatcccggtcctcctctttgttagaggcttttcgcctcttcgagtggggggaggaatcccacgagctccagagatccccgcgggcccactacaggggaaaagtttcagatcagaacctacgggccgctgggctagcaaagccggagccgggcggcaaggtcaggggagggaaccccacactcaaagttgtcaatttcaggagcgacgcttcccagcaagccaacttttttagcaagtccccttattaactgggcgaatctcatacgtacttgagtgctgtggcggttccgtctttagagcgagtttctagagagctgtcccgaaatctgcactgggggggagtcacagctgctgtcccggaagggctgcggtgtacaagcccagcggctcccggaggcggtgagcggctggtgggggatgctgcgatcccgactcatgggagagcacagccgagaggttccgcgggcgtcctggcttgggctgtgaccaggggggaggatgccgccgctgttcccacctccacggccactgccggcaccgtcagcgttgcaaagtgagcccgggaggggcgtccagctgcggcgccgcgctgcaccggcaagggctcagggcaagaggggtgtgagcgcgcgggagagcgaagtgtgtgtgcggagcctgtgtgcgcgcttgtgtctgtgtgtgcgagtgagggagcgggtgtgagcgcgtctgtgtatggggagcggaggaggagcaggagctggaggggtggggggcgggaggcaggagactccgctctcccggctgcgcgttcgctcgctctctcggcacgtcatttatgccacaggagccctagcggcctctccatagagtgcctggaatgcgagacgtcaatgtgacgccatgggacgctacgtcaccctcctcctccctcccctggcccagccggttccgcgtgtgcgagggagggtgtgtgtgttcgtgtgcgcgcgcgcgcgcgcgcgttcctcggccagtcgcacggccgcacaatggaaactccgccgcacggccggccccggcctgggggcttctctttttgcagcggaaccgctcgccagggcgtgcgtctgcgggagggtgcagcggcctgcccacgggtcaggcgggaccgcccagctgtcaggctcgggtggagtagagttggaggagtgctgctggcgcgcctccgaggctgccccgaggcacggagccagggcgaggggggtaagggagaggacagctcttccgaaagggaaggctccgccagccagcttctgaccagctccagtgacctggcagccggtgcagaaggcgtctggcaccagcccgaagacgccctgaggtgcagctgcactttcctcttgcataggttctaaagctgtttacgttgctccggtcctctgcgcccaggctaatcccccctccccgcatcatttactgggtgcgtgtttcacacagggatgcagatggttccggggataaggtttgatttctttacacgtacggcgtgggtttcttaactggacacgttataacccagcgaagtgcacatccatcatgcacacgcgcgctgcagcagaaactactctgtgtgtaaaacaaacacacacgtgttgaacagctgagcgggtctgactattgcaaatcattcctcctccccggcaccgggtcagaaatggaactctcaactagcactttcactttttgatggttgtagatgccctccgcccacatctcccaaattaaacatttcgaaatcaatcaacaggacttattagtcagtccctcgctaggggatttgctttggtctcctcggacacatttgtcatgaaatggtgtgccgaaagcctgggtgactgtatgaaggagagcaatttcttcctggaaatgataaatttaagtgtaaatttcttgatgaaaacaaaatttatcagagttaaagacccctagtcccaaaggttgctgctgagtgaacgcagtctctttcagaaatgaatttttggacaggagaaaatatttgagtgaaacaatgcagatagagtggtccccatgtggtccgcttgaatcacaaataccgttttatatgtttgacctgtcccaatttgtgtgtgtgtggcgggggcggggggcgctgcgccgaggggagatacaagattcctttgtagacagcacacatttcagaatcgaagaaggttcgagctaggaccagaaacttgaaaacaaactacatataggtaaatatggcatgtatatctttcttcgcctccacttccaattcagacacggtggtgcggagaggatcgtgggagaatgccccgaaagttgacccagccgagagcaaccgagtctctgcactgcggcgggttccaatccagcctcggaaggaaggagggcgctgctacattgtatccattcaaaggcttgaagggggggagcaggacctggagccgcgcggcgctgacgcacgcgaggcgcgtgattgacgcaggcgatgttactaaattcggcggttggccgggacccgccgccggcgcgcgccgcagatagcggagtaggttcccctcggtcacccccgccccttctccattcaacgccgcgcggggcggggcagggcgcgcggggcggggcggggcggggcggggagcgcgcggccgcgccaggatccggccgaaccaaatatagtcgggcctggctatttttagccgggtctcgggcgcgagcccgccgcgtgagggggcgccctgaccccgccgggagtgcggagggggcgggggcggagtcgccatcttggactcggttcgaccaggtctggtgaccgg

SEQ ID NO: 588627 - DNA, 4001 bp, Homo sapiens
tcactcgagcctgtagcagctctctccccgtctcgggtcttcagttgccgcatctgtgaagtgggtagatgaccgctcttcctcgctaagggtgggtcgtgaggatgaacccaagcagtaggggcaaagcacgcgtgtggcctggcggaagcgctcagtggcgcccctctggggagatctggggcgaaccccttctgctcgctagcctcaggtcgctgggctggaaatgggactcgtggaaatcccattttacaaatgtccgaggcctggggggacccgaagcctctacgggcgcaggagctgggagaggagcccggaggcagggccccgctgctcccctcggagctctcacgggggggtggggcgaggaagaaagcgctgggcggtcttggggacaaaggggttcccgggcctatgggccaagcagttgctctgggctagggaccatccgcggggccactgtttttcagctggagaaacggacccgaaaggaaggggcctgcttgcatcctgcctccgcccccgctggcacctggggtcagagagagtttggggaccatgaggccaaaaagctgcgatcttcaagcaggaaaataccgcaattttgcattgacagcggcgcaacccaccaaaaggctccatctgggctcccgcccgcctggaggcctcgggcttcggttggagctgggcctggggcctgcaagttgtggccagagaaccccccgcgcagaccgcactcagctggctcacccacagaaggagcagaacccgcagactagctgtgcaagctcgggcaagtcacttctcctctctgaaacgagagcctcagttttctccgagcataaagtggaacatgttggctttacagatggggtactgcggtttccatgcaagaatcttggatgaggagggaagaaagagccagagaccctgttaatcgtaccccccgcacccccaaacccctgagaaacaagagcatctgcccgagctggaggtgggggtcactgccgcctctgaacagctccccaccacaatggagccctcagacagtgactgcaggagggaagggggttggtggatgatgggctggggtgccccagttggctgttctaaggtagagctcacccgaggtctcctggaaacctggagctggacacacaggccccagccgccggggttgggtgggggctgggctcaggcccttctccctctatctccaatcccctctccccaagggtttctactctcaccggctggaagcccatggctcctctgcactccaggctccgaggcacccacccccacaggttccaggttccagcccaccgcctggggagttccagcccctcatccacccacccagggagggaagcctagacctggcccggccgcagaacccaggctgacagatggatgccggagacagacacacggatacacagcaagactcagagagagccacagagacaacacagaaactcaggtgggggacagagccccaagacaggcccagagccctccagacacactcacagacctctaggctcagacccacacagcctggtggatgcctggccagagacagcgggacaccagcggacctccatggggcttgtggtcacaggcctggctcctcccatcggcagcccagggaagaagagggggtagcatggtgggagggtgagtctgggagacccctggcaccttccctgcccagagcagggggcaccggtcactaagtggagcaggcagtggccggcccaggctgcagggaggcactgcagaaggaggctggccattagaggcctgggccaaggccctcacttacgaagcggaagcagcgctctcacaccggatgagggtggcagtgggcaccaggggtccagggggaggctccggcagcccaggtgggacggtggcgactgtgggtgcgcagaaaccccctcacaccacggcgggcggcagccggacagcaggctggccctgtccgtccgtcctcctcctcctccccgccctggtgggggggccaccggaggcccaattggtctctgcccccacgtgactctgcaggcctctcgccttctttgttggtgtttctcttcatttacgtctattttttcttcttctcctaaaagaaaaaaaatacccctatctatctgggggctgagggtgggggcggaggccaaggcactgcagaggccttggccagctggctgttccaggcccgctgtgggagcccagaggcagggaccccacagaggcgggtaggcagccccgcttgttagaaaccgggtgggagtggggcttgatttatgggctgctcccccacccggcctgccgcctgctcctctctccttgtgaatggctacctccctggggcctggcctggcatggtctggcccagcccggacattggagtagagtcaggacaggccagtgcggaggcaaggccatggcgacttgactaggcggcctgctgcttccacctctttttcctcttccatcaggtggaagaagaggggggccggaaggggagcaggtgagcggcctggacacctggtgcgtgcatgccacggtggcctctgaatgtcctcatctgctgtgggctgctgatgttcccagtcgatggctggaaaaactgaggctgggctgagactgcctctgaggccaagtggtggctatagtggccccaggttgaaccaagtatgaagctagtccaggataggacagggtagcaggaaggggcccttatctagaaggctaggcctccctagacaacctgggacgtccccatccaatctctgggcccagatgggctctgaaatatcctgttcctgtagggcccgggttgcagggtgttgtgccgctcccacggtgactggatcttttgtgtgttcctctgtttgtctcacatttactgagcgcacacttaggggtcaggcactgttccaggcaccagggatcccataggaaagagaagaaaagtctctgtcctcagaggatttacctccgtgcctttcatcttgggagagcagggaggggcacagggtgactatggggcagtcactgttgagaaccacccctcctcccacatatcccttcattggaggaaataaataaatcacacccaacacctcacttatctggaacaagagggacttttctggataagtgaagtgaagccaactctccctatatatattttttcatggaaggccactgaaaaagtagaaacgccaactatatttaaaacctatgtgttttccagccagtcactgtggctcatgcctgtaatcccagcactttgggaggccaaggtgggcggatcacctgaggtcaagaagttcaagacaagcctggccaacatggcaaaacgccatctctactaaaaaatagaaaaattcacctggtgtggtggcttgtgcctgtagtcccagctacttgggaagctgaggcaggaggatcgcttgaacctgggaggcagaggttgcagtgagccaagattgtgctactgcagtccagcctgggcgacagagtgagactccgtctcaaataaaataaaataaaataaaataaaataaaataaaataaaataaaacctagtgtgtgttttcctcattatgccacttaaaattgtgtgtgaacatacaacaataatactgatagactgtagtcccggctactcgggaggctgaggcaggaggatggtttgaacccaggagttggagctgcagtgagctatgattgtgccactgcactctagcccgggcaatagggttttaataattaataatcattaattcaataataataatttttataatataatttcaccaacagtcatagctaactgatcgaatatattccacctacaacgtaacagacaacttattcctcaatgtgcatgaccttgtaattatgtctttttcacctagagaagttcttacaagatatacttctcttgcatatggctgaacctaactagtctccctattttaata

SEQ ID NO: 588628 - DNA, 4001 bp, Homo sapiens
aagtgaagttaaccaagctctcttctacacggacttttcccttttgtaaaaaacaccagatctcctgaactaacaaaatgtttgactagttaataaacgtatgaaggcacggatccaacccaagatttccaccgtctgtagctactcactcattcaacaattgagcgcctaactgacctattttcaggttactttcctcacacctgccaggtcactgtcctgattgagaaacctcttggtgaagcagttaatttttagtgcctcctaactgtcccgggtgtttgcattcaatttgaaatctgttacttgttagacactgttcggtcctagatctctcagagaactgcgagtttatggcgcagcgaggggaggaggcactgatctctgagagcctccctttattcggaaatgaggagatgtgaaaggtggaaaacagggcaaataaataaatcgggtttgccgccggagcgtttgccggccggtgcgagcaccctttgtaatgcaggcctcccggggcgatcgcctgcgctaattgctccagggcgctttccaagttcaaaagttcaccttttacgacctcacaaaagctcctaacacgttaccaataaaaacattccgcggcaaacaccgaggaggaaaatatcaaacagatacaaataaaacaccccgcagggggagggagcgaaggggaggagggcgaggaagccccgaggaacctgaggacccggcccgggcgagggggcgagggacgagcggtaggaagggccgggccaggtgagggattctcagctcccaaggtcccggatcgggacaagaaagaggagaactgagactaagaggtggggaccgggacctgccgggcagaagccgggaggaggcaggtgtccggggccccggggcgggctggagccctcggccagggaaagccgttgcctggcggagaggggagctgagcaggggcggagaccggccagagcgcgcggggcgttgaggaaggtgaggcgcaggggaagcaggaggcgcgaaggggtccgaaaaaggaaacgactgggggatgtctagcgaacgggggttcggcagaggtggggggctcgtagtattcaaggaagaacgctcgaggctgcagaagaggaaaacgctctagaaagctgagcggtacaagggtgctgtggagtcgggtcaacagggcaagaagggagcgtcctcggtgggaggaggaacccctgtaggggaaaagagaggctctgcgttaagggaacccgagtgaggggatgcccccactgacggaccgcggtggggacttccaacctgaggagcccggggggaggggaaggttcggtgctgggaagacagggggaggggacccggggggaggagggaggattggtgctgaggggacggggggaggggaagcctgtgcagaggggacggggggagggggaaatgaagctcggtgcccagggacccgggcagggggagggtccgcgcagaagggaacagggacgaaggaggaggatccaccctgagcgagaccggggaggagagggagggtccgcgccaacggggaacggggtgaagggccaccctaaggggccgcggggccgctgcggcttcccagggcgagggtcggcagagaggagggggatccctggcggaggctcaggaagccggttcctgcctggcccgggcgtcgcaggcccctcacccaccgttgcgcggcggcggagggagcgcggcgggaggctccaggaaccccgccgagcccccgccgcctccccctccgctaggcggcggttcgtcccgctccatgcggtggtgcctagggtccgcgccgggtttgttgctccgccatgaccggcgccctagtcgccgtggtcgtcgtccgccgaggggaggaggttgtcaggagcccgcgagctcccggccgcggctctctctgggccccgagccgcccggctccgcgccgctccgcgcccctccgcgccgcgccccctcagcactggccagctccctcccctgacgtcacacgccgctgccgcgcaaggccctgcggggcacgctggaagttggagtccgctcagcgaggccggccacgccgaccgcaccaactgaaggggtggaaggagggataagaagtcctgagaagggaaagctaaagtctgtcaatatcaagaaccatgacaaagcgtttgatgtctatgtagtaagcggatacttccgggccttgtcttgattgtgatttctacctgatcaaagttccctaagagtcctcgtaaccccccaccccaacaatgagtctttgcgaggaggtggatcgcgaggcagccgggtgagcacgtgcaacgaagcccagccctgtgggcggggccctggaggcggggcttgaaggtactcacgtgggcctctccctgccgctgcgggacaaattggaccggagattaaaggaccggagtttaactcgaggtgactgcgttcgtatgcaaatggaatatataaaactcttctttccggggtagtctttaaagactttttacctccgggtgggcggcaaagactaaagtttcccctcctcccctttcattttccccctgcccatagaacagatgggcaaactaagctccgggccattggggctattaaagaaagccctaggctcttgaccccaggtgtcttgaaaccttccgtttaagagggatcccttgcccagccttgtttgccttcccctttcctcagtttccctatctgtaaaagggggttggaataaggacaggatcaagttggaagatcgcaaacccctgcccctcccacctcagtttcccgaagctttccggaagcaaaatcccgaattttgcagcggctcccggccgaatccacccgctgcggccaccaggtggcgcgcggccaccggtcactaggcccgccggggtgtccgtcttcggcgaccccatcgggaaaggatttcgctgctgccgccaagggtctaaggcctacctggcccacttgaagacaaagaacgagaacgttggtgctttgcccacttctgctctgccggattatgctgcagcttcctcggtggccgctcattcgccctctcctgccccacccgccccaccaatcccttagcccttttattttttttttgcctaattttaagtcctcgtcctggcattcgcatccctgcttggcctgacccttgcccacatttcgcaccataccccgtccctcacctgctacgaaagttgcaacgcttctctgcacttgggggcaactggaccttaccaaccctggtgaaactgtatttcatacgtaatctgggagacttacattaacgctctgccgtctaaacctcatacctgctctatgagatagcaacaatattgtccctttccagcactgatgaagtccaccagaagtgatggggattccagctccattctgtcacacaccagaaccttaatccttggctccttcaagctggaacgcggctgacttcacctgacccactcccaaactcctattcatctttcaagatcctgttcaaatgtttcttcagtggcatcttccttaataccttccaccgagggacaactagatcccctctgctaggtagcagtgtttcaggagctaaaccctgtgactaagagaggacggcctgccattccctcagctgtgggttctaaaatactttaggaccttgctgggcgccgtggttcatgcctgtaatccccacactttgggagactgaggcgggcggatcacctgaagtcaggagttcgagaccagcctgaccaatatggagaaaacccgtctctactaaaaatacaaaattagccaggcgtggtggcgcatgccagtaatcccagctactcaggaggctggggcaggagaatcgtttgaacccaggaggcggagactgcggtaagccgagatggcgcaattgcactccagcctgggcaacaagagcaaaactccgtctcaaaaaaaaaaagaaagaaaaaaaa

SEQ ID NO: 588629 - DNA, 4001 bp, Homo sapiens
caggatttcgggttcgaattgagtcctcgaagctctgggaggctaaaaaggggcaaaacgatccttcaattaactcagccattagcacaagagattcacagtcttataggtattttataaaaatataaatatgggtacactctgttgccttcacaacgctggatacatcgccctttaaaattgggtttataaccaagattcaaaaaatacacctaaaacttggcttaaaatatgttaatattttatattctgtcataaatgttatgacatttaattgtggcaaatccatttactttttttaaaaaagtgtgcaaccgttaactatgatagaacgcactagaaaaggtaacgaaccttcacccacccccccgtgtccccgccaccctcgagcgccagcgagcttccaggatcctggggaaactgcaaaacaagccggtttgggggatggtggcctcatccaggaggggcgggggagagaggccctggggcttccaaaactcacggatttgagggagagggagaaggagggagggggaacagaacggggtggggaggtagacgcggggagaagggaagggggagggacagcacgggaacaccatcaggctgggcggtattttcagtgcaaccaagaaatggtagactcaagtttttagttttaagactagaaaaaaatgcatcactcccccccataaccacattgaccacgcagtgttttccaaacaaaaaaaccaggcgcacaaactccacccacaaatgtacacacacaagataaatagtttagaacaccagcaacagcgaacagccgagcgtctcctcggccgcgcgccagcggcgcggacctcggacctcggggctgctcctcggctgcagccggcatcggcgcgtcccgggcctgcgggcgggtcctgaaggcggcggcggagcgctccgagtccgccttcggctcccgccgcccgcctttcaccttcgggagaaaacattttgcgcagaggatccggtatctcgggattccgaacttgctggttgcgagactcaaatttcaaaaggggctggagcccgcgccccgcccccacccgcgaggcggcgggcaggcgagcgggtgggggccgtgggaagctgctccggcccggccgggcccggctaggccgcagggaggcgctcggccggcggggctgccggaccctggggccgggacgcacgcgccgtattcgccgtggccacgggccttctggcggggcctgcgagccgggcgcgcaccgaggtagttggcgggaaggtacagcagagacgacgcgggcgcagggccggggtccggggtcccggcgggcatcaccggccgctggccgcgtacttcgccttggtgatgagatagagcacgatgtcctggtggccaccgaacgcggcgatgtgcagcgcgctccagccgtcgcggttggccaggcggatgtcggcgccgaacttgaccagcagcttcacgagctccaggttgccgtcgatgaccgactggtgcagcgccgtctggccctcgggcccgaacgagttcacgttgaactcgcagttggtcatgttctgcagcagcgactgcagctcctgcgtgttgcccttgcgcacagcctcctggaagatgcgctgcgtctgcggcgcggagcaggtggacagctcggcctggctcatgctgccgccgggcgcgggccgcgggccgggccggggctcagcgcgggcggcggctgcggcgcgggcccccggctgtctcggggcgcgcctcggcgcatggagggcgcggcgtccccgggccccgcacgccgcctctgggcgctccgggcgctcggggccgggggtcgccgccgcggggaccccgccgcatccagccgcgcccgggtgggcgacgggggcgcgcgctcggctcgcgggggccgggcccggccggggacggcggcgccgcgcggtcccggtccctactcggttcggctgcggctcccacgcggtcccaaggcgcctccccacgcgccgcagcactagctcgcccgccgcgccggggcgccttttaccttctttatatttgcataacaatggcagcccgtgacgcgcgcgccggcggccccgggattgggccgcgcccacatgggggcggggcgtgggcggtgccgtgcgcaggggtccgggggcgggtcccggcggcggcgcgcttcgcggcagggggcgctggtcgccggcagcgcctgggcgggggaggccaggtggccgccgggggggtccagctccgtcgccgccgccgtccgcgcgccccccgggcgctccgcgtctctttgcggtcgtcccgccccttctccctccggccacccggggaattccaagctccctcagcagccagacccaggccttgcccggtacccgagcgcgaccgccaggtggccccgagggcggcctctcccgggcagggggttcgcgggcatctcaggcccgtggcgaaggagagacccctctgagcggagaggcgcgcggcgaccccggccagcccgcgcctccgggctcaccgtccacgcgggtggcaactccaggccctgacgtggggccttcagccacgcgggtccttcccgcgcgcgggcagcctcatggccgccggctcagcctatgtgtgccccaaccgtactgatgcgaggggcctccggccggccaccgcggcttctatcgcctggcggtgaagggggttccgctgtcctctcgggaggaagccccgggccggggcgcagcgggagggtcgggaccgcggcctgcctccctctgctgcccacgcaccagcatgcgggacacataggtcctgcccaggtgagcagggctaggtgtggcgccagggccagaagggaattctgaaacgcctggcttccaaactgtaaaacccatttttattgaccactctaacaattgaccgggaggcactagcaggggaagcacagcgcatttcctcattagagttttacagtttacaactcgctgtggtcgttggaaattaaggaggagtgattctcaggcgcggagcaggaggccaggcaggctggggcttgaattccttctgaagccaagccgggaattccgcgcaggcagctctgagctcgggctggggagacccccatgccaggccttgtctgaggaggcttccgcccaccagctccatgtccccacatccggctccccacaggggtgtgtccccaccccatgctgtgcccatactggcaggaaaaactgggcaggctcccttcgggacagaccctggctgaccggagcagggtcctgaggccctggggtcctcctggtgggctgggaacctctgtccctcaaaggcacagctcagagctcgctctggtcttcctggggccgtgatcccgctggttctgttcagctctctcctttgggcctcactgcttctcccaggagctctcaagggggccacggagggtggaggggtgctccccaatatgcaggtgaggacacagtggagtcccggagtaggcccccagcagaacagagatgggcgctgtggagcccaggcccggggcagggatggcatggcctggcctgccgtgctctgctgggcacctttggcctcttaaggagggggagccgctgggctgcctgctggtccctggtgctggctgtgtctctggacctcagaccagggctgggtgtgcagggtgctctgagctcactgtcaggagggcaggagctctgtcctgggcattgatggattttgtgcatatgcccagggcccagccaggctagactggcaagaggcagagggcatgactggggggtgggcagagcccttggtgctcaacaggcacagggcctcccctggagggtgggtggtttgcaaacaggccgaagcccaggtgggctcaagccgggcctggagaaggcatttggctatgctgtgggccaggagcagggcctgggagaaagtgccgtcggcatccgtggcggcggcaaacaaaggggccctg

SEQ ID NO: 588630 - DNA, 4001 bp, Homo sapiens
ggctgctgctgtcagaccctggcagcggcatgcacccccaaacctgtctatgccctgacacaaacccctcaccagacacacggtcaacgctgtacatcctctccagcttcttgcggcgaccggaggtctcaggcagaggtggctggtccagcccaaaggcccgaggggtggggccaggagccagctgggcacatccggggcactccttggagccctggcggctgcccgcccagctctggcagggcctgctgacgtcctcccggctgccaccagggctggcgcgcaggggctggctgtgatggtgagggtgccgctgccgccgccccttcaccaccgccagctcaatggcctccgcctcagggctgggcagcagggcaggctccccagagatggtgtacactcgaggctgagggccctcgcctgcgggcttcctaatgctgggctcctctgagaggctgccctcgtagcagccgttggagacgagggacaggcggcgcttgttctggggggccggctgcatctcgggggacccgtcgtggccagagtaggcatcagccagcaggtgatctaggagagacactgagtgagcctgcctgccgcgtgtgggccccccgctgccggtttcatagcaggccgaaggcagagaacacccagtgggcacctggcctctgtgggggactagggctgcccaaaccctagtcactggcgtgtttctgagcccctcactcctatctgggcctgaagctctagcatgtgcgtgggggctgggtgacgctgtgctacctgtgtgcggtcctgccgggtaggaacacgcaggccatcccccagcctgcgatcgcaccgtttgcctggtgccaacttccccctccccccaccagctggcccccagaggcagtggtgccagccctgggggagccaggaggcctgttgccatgccaacggcccaggcggggtgggtgccatggtgacgagcggctgggaactgctcctggggctcgggcagggagggcaggggatgtaaggaagccaggccggcagggcgccgggcccacgcgcaaccaatgcccctcacgctccacccccggaggcagggatcagcatcccttgggctggggggtctgggcggccctggcacggcctcgcgtgcccctacctgcgccgttgcggttctcagggtgactctgggacaggtactctccaaacgctcgggctgctctgagggtggacagagggcacggtcagaggccacggcacgaccctcccaaacaccgggccgcgcaagagccgggggtccggtccccagccaggccctcggcgtctggaaggagggtcggggtcgtccccctccgggagcccacacacccttggtcctggtgcgccctggccaggcctgcaggcccggcccctgcccgtcggaccgtggagaggggtcgcgaggccggtcggctgctgttccccgggggaaccgaggccactcccgacctggggggtgcgctcgcccaccacgcgctcgcgaggggaggggagggaagagcagggcaggggaccaggaagagggaggcgcggggcgcggggagggcgcctcagtggcagaggccggggcccgggagcccggggagcaccgcggggcaggggcggactcgggcggggtcggaggtccagggcggggtgcgggaaggcggccccgccgcactcaccgcactttggccgccaccgaggacatggcctcgctcctcagcgccctcctcctggaggcggcggcgcccatggtcgaggcggcggcgcatcccccgggcctcagagcgcgccccgcgcccgccgcctccgccggggtagccgcgccgcaccgggggtcgcgctcgggctcgggctcggggtctcgctcgggctccggctcgggcttgggctcggggtcgggctcggggtcgggcccggtccccgcatggccgcacccggcgctccgcgcgtgccgccgctcccgggagagcgctgcccgaaccgagggccggccccgcccatcgtgacgtcagggcccgggcgggcccagaggggcggtcggccccacctaccgtgacgtcagggccccggagagctcggagaggacatgtggccccgcccaccgtgacgtccgggcccgggttgagttgggggcggggccgggcggcctggctccgcgccctctcgtccaggcctccagagcggggaaactgaggccagcggccccctggtcgcaaagtcctgggccctcggccctcacgatctgctgctcagacctgcaggatcacagggaggccggttctccctccccttacacaaaagggctccctgtgcagtttgggaactggaaaccgaaggggaagccagtttagggggcacccagtttgcacgaggccagagagagacagaggggcccgtcctggtcctggggggccacagctctatgcagactctggacgccctacctgcctggcctgcatttgccgccctagggctctcaggccccagcagtggggtcctttgaggaggactggggactgcccagcctcagggaccacccgcatcagggagaaccagtagtgtttctttgccacagggacctcggcccgggagacacgtccaacagtgagatccacctttattgaaacatcacacggcagcatcagggctcccacacctcacagggcagcaggcagttcacaggacagcaggcagttcacagggctttgggggcctcacagggcagcaggtggttcacagggcttcggggggcctcacagggcttcggggggcctcacagggctgcagggggttcacagagcttcaggggcctcacagagcttcaggggcctcacaggactgcaggggggctcacagggccctgtatgcagggctgctggtacaaagaagaggcccagagaaccctaacacagcctggggccccggggaagtcagggcttccagcagggcaggtacagaggcccctaggacttggcaggagcctcagccttggggacagtcccacggaagacgctgcatccgggctctttagcagaggcctctacccgtcctggtcagaggagccctcagacagttttgggaaagccagactggggtgtcgatgccgcagtgaggactcgtcctcctgcaagcagaccgcatgttccaggtgaggaccaggcagggcaggggctctgcagcgctggtaacccggtgggaccacagggagggagtggccggcacagggccaggcaccaaggctcagctgtgggcaccaggtgggaccatgcccagctcctcaccaagtctgagccctgctgggctgaggtgctctggaagtctgcgtatgcatccctggggacgtccagcagctcctcctcgtactccgtctggtagtcagattcgtctggcaccgagggtagggctgcgtcagtcccctcccaaggaagggaccgtacccagcatagccacactcagaggcagaaccggccacagatgcccacccccgcctccaaggtggcccggggccctacacgcagccacctggtcccagggcagccctgcacaccacccctggttctgtctggctccagctttgccccagcacatcacttcgtgggtcttccacaaggacaaggagcgggcagacactcctccccttgtcagccaagcaccctgagggctccagcaccccagacctggcaactgtggataggggctgccttgcccagggccctctcggcctgcggcagccatgaagacgtctcccaggagaatgtccagttctgctgtgaggaggccactggctgaaggcccaagcgcagggccctggatggagcatggagggtagtggacccgcccttcttgtcctgcggcccctccaacaagcagccttcattcccatttcccactgggtggggtgggaggcaaaacgtggttctacttcaggcctgaggtgtggctgggagttgaggtgaatgaagggcaggggctgggtgacccgg

SEQ ID NO: 588631 - DNA, 4001 bp, Homo sapiens
tccctttctggacattcacgccccgtcccccgtctcagcaggcctgattctacggcccctcctccaggtggccttgcgcagcccacgtcgccctctctgagcctcagtttaccccaagggtcgcggcgggccccggcccctgcgccggctgcagcaccgcggcgcgcccacgcgggggcagtgttggcctggctttggcgccgcctggcgcggccgaaacttctcagcctctcgctccagggtcggaaacttttcccctcgcgcggcgctcgcgcccgcccgcctccgcctccgcgctgctggctccgcacagccccgctccggccgcgcgacctcctggcacctgctccgagcccacgaccggccctggcgggtggggggaaacgcgccgcccccgccccccaacttccctctctctcgcttttgttgttcagcccaaaattgctaggcttgcagccgtgcggcagcgccgagcactgaagccggagtccgcgtggagcccccggggcgggtctcggcgcccccgcgaccccggactccacgcccttgctcgcgccgggggcaccacgccggtggggggggggcggggcctgcagggagacctggcccccgcctaccgcttacccctccccttcccccctttcccctctccctccccctttcccctccccctccctcctccccccctcctcccccctcccctgtggctcggcccgcaaggccccgggatcccgcagcgctcctgtccgctccctgcgctgtccactccctccccgcagaccacagatggaggacggaagcctcagtcccgccgctttcggcactcacacccaccaccgagatacgcaccccgagacacacacaggcacaccacagggccacacccacacggtacacagacaaaacaacgccccacagacacccccttcagacacacacaccacacacatacccggactcctgccctacaaacagccggtgaacacaggccgacctcacacatacacggcctctcacggggtctcccagggccgcagcccccacattcggggtcatctgctgccctggaggcccagacgcctccccctggccctctgtagccacttgtctgtccaccagcatgtcccccaccatgaacaggggatgaggaagagggagcgaggcattcaggggatggacccaaccccagctcttccccgggggccctccgggggcctatctctcaccctctttggcagagaccccagattgggggcctccccaggggccccaacagggcccttttccgtggggcatttccactcagggctggcgggggtggggtggggtttggggtgggggggctgcccctcctgggcttcaggaagcagcatgtcagggaggccaggaaagctctgctccccccaactcagacccatctgagcagctgggatcaaggcaggcgcaccctccaaccccacgcctgccattggtcatggacagtcctgtgcccagccagggcaggggagagtggcagcccggtctagttggggggagggggaggaatgactctgacccaaggcagaaggcagagctgggagaggcaggaggtcactgcccctttctaggtgtccccacctccccacgcctctgcacccctgcaagctggctccttagcccgtttgctgataaggacactgaaaccctgagggctcaggcggtctcacctgggcgtgctggcggtgcccactggagctggaactggtcctacagatgtcctgagccagcagagccctcggcggcgcacacaggagctctctcctaagccgctctctgtacagcctttggttgttggggaagccagggcccagagaggctcaactctttctcaagatcacacagtgaccaggtgttggagtgggcattcgcactcagcacctcttcacggggaagccccgtctcccgctgagcgcagtcctgtggaggctgcttcttcctgccgcacatggggcacctcggagcagggaggatcagggcaaggtcaaggaaggagaggcgtttatttggagagggtggaactgggcaggtgcacagggtccggaaggagctggaagcctcaaggctggtgggcaggacccacgactggagtggggaagagggcgctggctccaggcaggagcctggtgggagggagaggagggagccaggagctagggagccctgtagatgcagggccaagggaagccagccccaagtggggctccagggatggcagctgccccacgggccgattgccattctgcaggcggctcattcagctctgttatggactgaacgtgtccccccaaaattcatatgctggaaccccaggtctgatgtgatggtttgaggaggtggggccgttgaggggtgatcaggtcatgagggtggagccctcacaagtgggattcctgcccttataaaagaggcccgaggccgggcgctgtgactcacgcccgtaatcccagcactttgggaggccgaggtgggtggatcacctgaggtcaggagtttgagaccagcctggccaacatggcgaaacccatctctactaaaaatacaaaaattagctgggcatggtggtgggcacctgcaatcctagctactggggaggctgaagcaggagaataacttgaacccaagatgcggaggttgcagtgagccgagatcatgccactgcactccagcctgggcaacagagcaagattttgtctaaaaaaaaaaaaaaaagaaataaaataaaagaaaaagaggtcccagaaaggccttgccccttcctccttgtgcggataccgcaagaggccagcagtgtgcaacccggaggagggccctcacgggaacctgaccatgccagcaccctgatctcggactgccagcctgcagcctgggaggaatacactctattgcttcggagctgcctaggctctggtcatctgttaagcagcccaaagagactcagccaagtaccacacccgtgctgggccctgagtgggtaactgcctgggcagccccgcccctggagcctagagtcatggggagcattgctcaaattgagcagttccaggatgcagtgacaagtgctgggatgggaggccttgggagcagagagtagggcctcaatcctctgtgcagggcatggggtggacacctgggctttctgacggcagccaggtgggggcgtggtcagaacacagaggcacacagggaaaggcaagtgactgctactgcctttccggtcccacaggaaggctggtgatgcaattctcagcatggaccaggggaggaaacagacatgggagggctgttgagcaggcagagggaagggctggtgttcgcctagccaagatagacacacacacacacacacacacacacacacacacacacaccacaccacacaccacacaccctggctcccagccgtgtggggctgcccagcactcattccagctgctctgcctttatcggggccatttgttcgaccccacccccaccacctgcccaccctcaccctttcccatcatttctgcctctctgggtccttctgtcttccctcccaaatacaccctaagtgacagatggtctgccccttcctgttggaggcagtgaaacccttccatggggacatgtgacaccacctccgggcagccccacaagcctcaacattcccctatgaacagcaccaagaagggggatgctcactgctgtttcgacccatcggagccagctttggatgctggatggtgtctaggccagaagcagggattggactcaccaggctgggccaggtgtctctagggctctggaattctcccagtcagactcggaccccaagcacggcagccgggagcagctcctctgcctctgccatcatggagcccgggcacccttaaagactcacccaccaatgtttccctggcttatttactgcacctggcagctgagggggcttcagtgatgcccccaaactcccagggagcccc

SEQ ID NO: 588632 - DNA, 4001 bp, Homo sapiens
gcagggtctgttcatttctaggtccattgtattctgactgcctggtcttggggtggaagttctacttccagagccacccagcctaagcctcccagatctggaaagggtaggcctggctgccctggtcagagtcccagtgccccaggtggctgcggccagggcatccagggcacaatagccccacccttagtccccaggcctcagtgcccactgctactcagatgcccaggggtgaggggcggatcacaatgaccctgaagcggcccagaggcagccgggaggggctgggagaggcaccaggcagggatgatgggctctacagcctgcctgtagagagctctaaactcacaggaccttctagggccccacccagaagcccaccagggtgagtgtgacactgcccaggagtcagctcagagctgacaacaatctgggagtggggtgtggttgggaggaagcaggcttagaaacccctcagtgtcagagctgggagtaagactggggctctgcctcccaaagggggagtttgttaaaagtctgtgtcttggccagaagtggggactcacgcctgtgatcccagcactttgggaggccaaggcaagtggatcacttgagcccaggagttcaagaccagcccgtgcaacataaatacaaaaaaattctaccccatttctacaaaatatacaaaaattagccaactgtggtggtgtgtgcctgtagtcccagctactcaggaggctgaggcaggaggatcacttgagcccaagaatttgaggctgcagtgagctatgatggtgccattgcactccagcctgggtgacagcaggaccccgtcttagcaagaccccatctctttaacaacaacaacaagaacaacaaactgtcttggctccagcagagacgtactgaatcagaatgggggctgggggtaagtcatctgtattttcaacaggctccccacccaggggtctctgaggcagcaccagggctgggaggctgctggtcaggtctctcttccctcaagctggttccaggtttcctaattcccagtagagcgctaatgacggtaacagttccacgctttgaacactgcaaggcaggctaagtgctctctctaccagcggtgatgcggtgatgccgtttcacggctgcagagaggcaggtgctgctattatccccattctgcagaccagagcccccagggaaggcagagggaagttaattggcttggccaaggttacaaagctaataagtggtggagctgggactaaatcctaaataataataactttgaaatactaagaatggcagctagtctatgtgtaagcttggccagcgtgcctggcactgtaccgagcttgctgttctaagactggcatgtacttgctcatttaaacgtcacagcaacccccaaagttggctactcttgctgtcaccatttttcaggtgaggaaacagaggctctgggagctctcgcctgaagccactcgctgtccgccgggccggtggcgttcaccccgcaccgcgctgccccgcccggggcactatggcctggggctggactatgccctccccacctcagccggcgccccccacccacgcgcgctgagggtgcggtgagctgagtgcggggccaagcatgttctggcgtcgacttcgcccaggggcccaggacctggcgcccaaggggctccctggcgacggagacttccgacgcagcagcgacccgcggctgcccaagctgaccccgcccgcgctccgagcggctctgggcgcgcggggctccggggactggaggatcccggggggcggcgccgcgtggtggccggaaggggacgccaagcccggggtgggcgtcggacgcctcccgccgcgcctgcccgccttgctcaccgcgacccggcgggccgtgcggaagcgggggctgctgcggtccctgctgccgcctcccctgctgtcggccggcgcgtcccgggaatcggcgcccaggcagccagggcctggagagcgcgagcgcccccggaggcgcgtggccagggaggaccccgacttcttgggcgccttcctaggagagctcctccccagcaggttccgtgagttcctgcaccagctccaggagaagtgcgccgaggagccggagccactgagtgaggccccgcggggcccggggggcgggcccgagtcatttccggtggggggtggtcccttgtgtccccgcacccaccaccccaccacccaggctagaaggatgctaatgttagctgagtatctcagagccctcgcaacccgtccttgagggctggtctgccatcaccccgaggccacatgactagaaaggaccgtcccccagccaaggctcacaactgtttcctcctggctccagcatccccagcaccgcaacatcaaaggggtgtattagagcactgcccagggtctccgcggtgtcccaactgttcattcctcccagacctgtggtaagcgtcagtccgcttcttggtggggacggggttgccatcgatgtttccagggcgggacagcctggccactcatgccagatgtggcctgtttgtctttaaggggccagtcatcgcacctccaggatagtcttacgaagatttcgctccagcagacacctattctggggcccctgaagggtgatcactcacaattcaccactgtcagaaaggccaaccagtgagtgatgggcgggataagggtagggtagtggaggaaaggggcatttctttccttctttctttcctctttcgcccatgaatgtattcatttatccacctatctacccattcatccatccttacatatggctgtccgtgaatcagatcttctaccaacccattcaagattcattcgccagttcatcaatgaatcaacccatccattaatgaggtcttctaccaacacataattcatccatgaatctattcatatattcattttcccattcacccatccatctttgcatccatctcatccatgaaccaagtcttctacaacccgttcatgaatctctccatctatccatccatccttctgtccacccattaatctatcatggacccatgactccatccatccatacattcactcacccacccacccatgaatcaggtgtcctgtggatccattcatctacctggccaaccagctagccagtcatccatctaaaactcccacacttcggcagggcacggtggctcacacctgtaatcccagcactttgggaggctgaggtgggcggatcacgaggttaggagattgagaccaccctggataacacggtgaaaccccgtctctactaaaaatatacaaaaaaaaaaaaaaaaacacaaaaaattagccgggcgtggtggcgggcgcctgtagtcccagctactcgggaggctgaggcgagagaatggtgtgaacccgggaggcggagcttgcagtgagctgagattgtgccattgcactccagcctgggtgacagagtgagactccatctcaaataaaaatgaaataaaataaaataaaataaataaaaaataaaactcccacacttctatccatccatccattgatccaatgaccaaccatctacaaatccttccatccacttgtaaacccaggacactgtccatcgctaatctagtcataaagccatccacaaacctacatacccatctacataatcatccagccacgcatctgtccatctacccatacattcatagttcagttctattcagaccctttcattaactcacccatcagtccatccacccatcaacccacccacccagtcttccatcattttacccatcccaccatcatttgtccatttcttactctaacttttattaggttttactatatgttgaatattgggagaaaactaagggatggaggtaagagaagagcctaggaattggaacctacctgggcctagacaccatagttttaacagaggaggaaaagaagacagaaacagttcctccaggtta

SEQ ID NO: 588633 - DNA, 4001 bp, Homo sapiens
ctccagagcacagatgccgtatgtggctgaagggcctgggagggggccaggagcacacgggctttgtgtgcactctaggctagctcagagaggaagacaaacccctcatgcctggtaaatggctgctcagccagtaaatgtgatcctacatccttcacagtcacctggctgctgcctcctcctccccgccaaggtgttcagacccaaggtactgcatctcttctcccacgacccatggaagaaaacagtgctgaaactgtcaccggcagacttttgcagtcatctcatcctcctcacgtaagtctctacggaaaagcctgcctaaaagttacctccaccctctagcagcctagtggacagagtccatcctccctggatctttgtggacagcagcaggccacatgcaaacggcagagtgctctaagaaaaagaaggaagtgagaaagggagggaagaagacaaaacaggggatacatttaaaaactaacaaaggctctgatggagccagatgaaccagatctgaatcttggctctgcacacctgctgtgtaagcacagacaagacattaaacctcaccattcctcagttcacctataaaatggaacagtaataccgactttacagaaaggctgtgattaaaagtgcatatgaaaagcttaaagtgctttgcacagtgccgggcacatattctctcttgagcttagaaatctctgtcaaatgagattcttgtcaactctgcccactatgaggatcaaatgggaaaactgccttagaatgccacagaagctgtattggacacacctaggggactgttactggtatgctgggcggccaagccagcagactcaaacagctctgcaaatcagccagagtggggagtgagcttcctctgcctataagcacagaacccccaccgagattttttagatgccatccttgtgatcctagggcttccggcctccaccaaaacgctccatgcatccttccaacccccgcacagtcctcagtttacatagagaaaaaccagcacactaaaggaagtgacgtgtctttaaacatacaaacaggaagccgagaacagaattaaggagggaatccaggctccttataccagccctggttcctcccagaggctcatcccatctcactgggcaatcattctacacaccacaaccaccggttacactgtccctccccgctgtcagggcctctgacaccagttgtggcaatcacttatagtacagaggagaaaccaaagtccagagggagagatcacacagttggtgcgcagcaaagtctgggcttttcgatatggcagcctccctgcagacaggctgaccttggccgcaagggctctcgggctgtcttttttgagctgcacctgtgtcgggctggcgctcgggtggcacccaaggttaaatacgacagcaacttctgtgcagcgggcacttaactgtgccaggctctgaactgggcattttaccgattttaccgattcctcccatccatcctccaagtgggcgctctccatatccctgtttctcggaagggaaacaggctcagagaaagggatttgctgcggtctggggaccggggtgggggagtgccctgcctgggctttgagtgccttgactttcctcctgtaccccgacccatggactgctccgtagtccctgcccaggtccggcccgtagacctcttggggacgcgcacgtgaggcctgtgccggcccgcgcgcacgcgccgggtcacgtgacgagccggggacccgggacctcagggcgccgaaacagttaggggtcgcagcctcccctctcccagcggctgcctacccttcgcaccgcctcgcgctactcactccgggcgggggctcccgggaccgagagaagaagatggggaagaggaagggagggcggcggcggcggagacgccacaagccaaccgcagctccgccagaccacgaccagacgcgacagctcgcggcgcgcgctgcctttgtccgccaacgtcacttccgggcgtttaggggcgggcccatggctggctccaccccctcgctcagctcgcccctcccccgcgcgggctccggatttaacttaacttcttttgaaaaataatttaaatttttttttttttttttttgagatagaatcttgctctgtcaagcaggctggagtgcagtggcgcgatctcggctcaccgcaacctctgcctcccaggttccagcgattctcctgcgtcagcctccagagtacctgggactacaggcgtgagctaccacacccagctaatttttgtatttttagtagagacgggttttcaccatgttggccaggctggtctcgaactcctgacttcaagtgatccgcccgcctctgccttccgaagtgttgggattataggcgtgagccaccgcacctggcctaatttgacttctttaaaaaaaaaaaattagagacggggtctcaccctgttgctcaggctgatcttgaactcctggcctcaagcgaggcttccacctcggccttccagactgctgggattacatgcgtgagccaccgcgcccaacacaggttacagctcaaaacttgactaaattgacttttgggaatctagaaggacctcccgaacggaaaagagccgcagcgtcgccctctccccgtccccagcacgtacaacagttcgtttggaggctgcaggctggacttctaaaaacgagtgtgttgtgcgggctttgagtaaaaagggaaaaaaaagccattggtcctcaaatccacccatctccattagcatcttaaaataataccgaccccccaaaataaataaaataaaaagaaatactctcggcagtgccatgggattcccactgaaatgagcaaaacaagcccatgacgtttccattccaaaagcgtggcccttccctaggctcctcccatgcaaagaaattctggagctatctccgaggcagcggtgatggaaacgggagcttgcaggtgggtagagcctgttaacatttccgagcttcagtctcctgtcagaagaggaagttgagcaacgtaataattactcaacttctgatgctctgagagggttaaacttgtgggacattgcacgtcagaccttcagctcagcacctgcagtgggttctcaggaaatggaagctgttataatgacaatatccatcttaagttcatttttcctatactattaataatatccttgtgttggcagggcacggtggtgcacgactctaatcccagcattttgggaggccaaggcaggcggatcacctgaggtcaggaatttgagaccagcctggccaacatggcaaaaccccgtctctactaaaaatacaaaattagccagggatggtggtgcatgcctgtagtcccagctactctgaggctgaggcaggagaatagcctgaacctaggaggcagaagttgcaatgagcctagatcgcgccattgctttccagcctgggtgacaagaacgaaactctgtctcaaaaataaaataataataatactatcctggtgttccttcctctgggcgacgcacacagaaggtgcttaaagtgtgtttgctctaaatgtgttgaaagctacggtagaaaggggatgctaaaaagccccttctgcattgagtccgcaggatgtgtgtatgtgcatcttatttggcataccctctagactattctaggtcacaactgctacccctggtctgagcccctctcccaagcttcattttctgtgtctttaagcaaagggattgatcctgggcaatttcaatcggtgggggtgtccggaatcctccgccagggggcagctctgatccaagctctctgtatgcctaaaaatccagccctgtcttatttcctgtcaacagaagagcaagccccttccccacagccacgctccaaggccttcccaggactggccggctccctgacctcaaagcctctggcatctctgaattcccaagcctagcacatagtagtt

SEQ ID NO: 588634 - DNA, 4001 bp, Homo sapiens
aacatgattcctttaaatgtcagggtcccctgaataatctaatttacaagaattccacttacacgcaaattctgggaacaagccaggggaggcacatcctggccgggaaatagcaagcctgactttgacatctgccctaacagctgattcattaataaacgggattcctggggtcctggctacattttgcctcgtggtgtccagattggagtggggcaggaggaggtccctaagagtctgagggaacagcaaggtcagtcagccaacagcaggtggtcctgctacactctgctccagagcacagatgccgtatgtggctgaagggcctgggagggggccaggagcacacgggctttgtgtgcactctaggctagctcagagaggaagacaaacccctcatgcctggtaaatggctgctcagccagtaaatgtgatcctacatccttcacagtcacctggctgctgcctcctcctccccgccaaggtgttcagacccaaggtactgcatctcttctcccacgacccatggaagaaaacagtgctgaaactgtcaccggcagacttttgcagtcatctcatcctcctcacgtaagtctctacggaaaagcctgcctaaaagttacctccaccctctagcagcctagtggacagagtccatcctccctggatctttgtggacagcagcaggccacatgcaaacggcagagtgctctaagaaaaagaaggaagtgagaaagggagggaagaagacaaaacaggggatacatttaaaaactaacaaaggctctgatggagccagatgaaccagatctgaatcttggctctgcacacctgctgtgtaagcacagacaagacattaaacctcaccattcctcagttcacctataaaatggaacagtaataccgactttacagaaaggctgtgattaaaagtgcatatgaaaagcttaaagtgctttgcacagtgccgggcacatattctctcttgagcttagaaatctctgtcaaatgagattcttgtcaactctgcccactatgaggatcaaatgggaaaactgccttagaatgccacagaagctgtattggacacacctaggggactgttactggtatgctgggcggccaagccagcagactcaaacagctctgcaaatcagccagagtggggagtgagcttcctctgcctataagcacagaacccccaccgagattttttagatgccatccttgtgatcctagggcttccggcctccaccaaaacgctccatgcatccttccaacccccgcacagtcctcagtttacatagagaaaaaccagcacactaaaggaagtgacgtgtctttaaacatacaaacaggaagccgagaacagaattaaggagggaatccaggctccttataccagccctggttcctcccagaggctcatcccatctcactgggcaatcattctacacaccacaaccaccggttacactgtccctccccgctgtcagggcctctgacaccagttgtggcaatcacttatagtacagaggagaaaccaaagtccagagggagagatcacacagttggtgcgcagcaaagtctgggcttttcgatatggcagcctccctgcagacaggctgaccttggccgcaagggctctcgggctgtcttttttgagctgcacctgtgtcgggctggcgctcgggtggcacccaaggttaaatacgacagcaacttctgtgcagcgggcacttaactgtgccaggctctgaactgggcattttaccgattttaccgattcctcccatccatcctccaagtgggcgctctccatatccctgtttctcggaagggaaacaggctcagagaaagggatttgctgcggtctggggaccggggtgggggagtgccctgcctgggctttgagtgccttgactttcctcctgtaccccgacccatggactgctccgtagtccctgcccaggtccggcccgtagacctcttggggacgcgcacgtgaggcctgtgccggcccgcgcgcacgcgccgggtcacgtgacgagccggggacccgggacctcagggcgccgaaacagttaggggtcgcagcctcccctctcccagcggctgcctacccttcgcaccgcctcgcgctactcactccgggcgggggctcccgggaccgagagaagaagatggggaagaggaagggagggcggcggcggcggagacgccacaagccaaccgcagctccgccagaccacgaccagacgcgacagctcgcggcgcgcgctgcctttgtccgccaacgtcacttccgggcgtttaggggcgggcccatggctggctccaccccctcgctcagctcgcccctcccccgcgcgggctccggatttaacttaacttcttttgaaaaataatttaaatttttttttttttttttttgagatagaatcttgctctgtcaagcaggctggagtgcagtggcgcgatctcggctcaccgcaacctctgcctcccaggttccagcgattctcctgcgtcagcctccagagtacctgggactacaggcgtgagctaccacacccagctaatttttgtatttttagtagagacgggttttcaccatgttggccaggctggtctcgaactcctgacttcaagtgatccgcccgcctctgccttccgaagtgttgggattataggcgtgagccaccgcacctggcctaatttgacttctttaaaaaaaaaaaattagagacggggtctcaccctgttgctcaggctgatcttgaactcctggcctcaagcgaggcttccacctcggccttccagactgctgggattacatgcgtgagccaccgcgcccaacacaggttacagctcaaaacttgactaaattgacttttgggaatctagaaggacctcccgaacggaaaagagccgcagcgtcgccctctccccgtccccagcacgtacaacagttcgtttggaggctgcaggctggacttctaaaaacgagtgtgttgtgcgggctttgagtaaaaagggaaaaaaaagccattggtcctcaaatccacccatctccattagcatcttaaaataataccgaccccccaaaataaataaaataaaaagaaatactctcggcagtgccatgggattcccactgaaatgagcaaaacaagcccatgacgtttccattccaaaagcgtggcccttccctaggctcctcccatgcaaagaaattctggagctatctccgaggcagcggtgatggaaacgggagcttgcaggtgggtagagcctgttaacatttccgagcttcagtctcctgtcagaagaggaagttgagcaacgtaataattactcaacttctgatgctctgagagggttaaacttgtgggacattgcacgtcagaccttcagctcagcacctgcagtgggttctcaggaaatggaagctgttataatgacaatatccatcttaagttcatttttcctatactattaataatatccttgtgttggcagggcacggtggtgcacgactctaatcccagcattttgggaggccaaggcaggcggatcacctgaggtcaggaatttgagaccagcctggccaacatggcaaaaccccgtctctactaaaaatacaaaattagccagggatggtggtgcatgcctgtagtcccagctactctgaggctgaggcaggagaatagcctgaacctaggaggcagaagttgcaatgagcctagatcgcgccattgctttccagcctgggtgacaagaacgaaactctgtctcaaaaataaaataataataatactatcctggtgttccttcctctgggcgacgcacacagaaggtgcttaaagtgtgtttgctctaaatgtgttgaaagctacggtagaaaggggatgctaaaaagccccttctgcattgagtccgcaggatgtgtgtatgtgcatcttatttggcataccctctagactattctaggtcacaac

SEQ ID NO: 588635 - DNA, 4001 bp, Homo sapiens
acctgatattattaagaaactgcagctcccagaaacaaatagaatcaatgtgctttattttcttttaagagtcctcaggaaccaaggggggctgatagccagggtattaaaactcgaaaattagattttatcaggatttctgaactcagatttctctgtcttattgaattagcgcctcccgagctggctgggctcgccagcaggttcctcttggagttgcctgctgcgccctcgccgtgtgggaaacttgccgcggcgggcgcggggcccctgggggcacgggagggagggcgctgggggctcccggggctaggggggatactcagcccaccccggggttccctctccctcctcggcaggggcggcagaggggggtgaaatctgctttcaggggagagtggcggttgccgggagggaaagggagcttggccggcggggtcaccttcccgtcctctgccccgggcggggtccagcgggcgccccgcgctcactgtagcctcggcgggcctcttaattccggcggcccgggtgtccccccgctccggagcgggccctttatccggcccctgggtccccgcccgcgggagccctggaaagttgggcgcgggaggcggggcgcgagcagcagctcccgggtgggtcccggcgggccgcgggcggggtcgaggccggggccagggtcgagtcagtgcttcgggccggctgcgagccctgtgcctaggacaccgacgacccggcagccccgcagctgcttttcgtcttcccaaagttgcgtgcaagccacggcagcaattaataattaagcccgtaataaaggcccggccgggactgaggcgccccctttttcggcactgcctctcttaattaaaagacacagagcagggcgcccaggaactggctgtatcctttgccccggcgctgccgcctgtggcgacccggccgccgccgcccccagcccagacggccaacttactccggagcgggcggaccccgcgagcccgcggtcctctcttcccgccttcccgccgcctctgctccccccacctgcgcgccgctcagttccaggttcgactccacgccggccccaaaccagtgcctgcgccccctcacctcccgaccccctcccggcgccgggagaagtttccagccggactggccgggagtttctctgtgcaactcacaggctcccagtttgcagagagatgggagggcacgggatgggggtggctctaagcggtggcggtggaattggggtgggggagaggcgcgggagcagggttagtttccttttccgagacacatccgagcatccttgcaacatccctccccgacacacacacacacacacacacacacacacacacacacacacacacactctgtctctctctcacacacacacacacacacactctcacacacacgacggaaaggacccgggggaagctggccagaaagacaagctacccctttaagatgctgctaagaacgcaccctcacacacccctctggggcgactccagttctcagctcgtagcagccgccaccaaacaacttttgcatccgagcctttgccgggccgctgtaagtggctcccgggcccgggcaagcctgcatggtcaccgaagccctttaaaaatgaaaccggcctggccaagctgcagcctctccccccgcccgcctcccgggctctccccgcccgccttaccccggctcggagcggcttcccggcgcggagacctgggagggccgaggaccgccaccctccggcgctgcgcctcccccctcgggctggcgctgggtgggggcgcgggccgagggctgcgagccgctgctccttccccgcgccgctcccgccgctgtggccgccgccgccgccgccgtcagatcggggccagggagccctccggccgccgggggggccgcccgcagccgtcccggagacgcgggccgggggagggggccgcccgcgccgcccgcatcgcccgcccgggctgagcgggaggtcgccgctaacaagtgcaaactttttggcccccctgggcggcccggggaggacccgcgctcgggcgccgggcagcccccggcccgggtgggcttcgcggcgtctcgtcggggagccggggcatccccccggcgcggcgcgggccagatggcgggcgcttcactgcccccctgcactccgctccaagttaatgccgaggctaaatcctcttgccatcactcacgatcaccatcggggcttttatctctcggtctgatccgggctgcgtaacttcctctgtgtggctttaacacaccatcccaccacggagcaacggtcttcttaaaggtgcaggaaggaaatattgcgcggctcgggggacgcgccacggcccggggaggggcgcggcgagcaggggcgtcccggcgggcccgtggccagggtggccccggcagcctctggggggtcgctgcctaaacatcgcctcccggcccgggggccagcgggtccctgcgcccagagcgcatcctcagccggctccggtcaggcgcagccgggctgcagcttcctcttccaaaacccgggggcctgccggggtgccagcgcccatgggtgtgggggctgccccatcggcacgagggaggggggccaagtgagtcagttcccccaccccccacagccaagggctcagggctgctcctcggtctctctctgtgaagtgctgccacccagaaggccccaagcagtgggtaccggggtgggtgggtggatttggggagatggggagggggagcgatctgagcgcacaaccagagcctgaataccagctgacacatcgccgcctccaccctgatgggccctgcttttgacgaagccaagccagctctgcagggagtgcagagtagtggggcaggaggggcctggctgaggggttctctgtctccctcccctgcaagcatgggaggcaggtgtgggagggctccggtagcagcagccccgggcagaggccaccgagttcacaatatcatatccggcagccctgggctctctgatccccaggaggtttcctgccagcctgcctcccagggcttctgggagagtttccacatcttccagaagcacatgtggttttcggacactcctggcctcctggggtgggctcactgcagccttgagcagccagcactgtcatttggatgcatcaagaacaaagggcctgaggacagacagagagagaggcagagagagagagaccagcccaaggtcacagagggtgttgggaatggagcaagacatggcacctcagtgccccgccctgctgccacccttcacctccaccttaacccttccctgttctcagctgccctgaaaactggagacggagttatactgctgaataatatttggaatcttgtgacaaaacaggaagaggatgcagaattaaagactgtcatctgctgtaataataataataatatatttattgaacacctgttttatgccagactccatgcaaaccagtttgtgtgcattattcactgaatcttcgccaaagccctgtgacttcactgctagtagcaaagcctcaagttagagatgttaagtaacttgcccaaggtcacatagctaaggattgtggccggggaggcagggcttttgggtttctgggtgatgctctctcactggcctggctggctggtgaacttggaacacggcccagactgctttggggctcagtttccccatatgtgagatatgaacggtaaatccttcttttttcaaagaggggtcaaaaaacagggccattgtgtgcctctacctgcacatgctctcagatgcctaccactggagatgggcctatctcaccaagcagcccaggaaggcagacatgggcccacccctggttacctgttctatgcaggaggaagctccttgggagaagagaacagatcttggtggtttgatttttaagcattcagcctgcaggcagcagtgaagggcagggtgtggggctcct

SEQ ID NO: 588636 - DNA, 4001 bp, Homo sapiens
attcaatgggcaattaagagttataatccaagtggtctcaaaatcatatctctgggaagtcaagtccaaattaaattagaccaggcttttaggcttccaactatcatatttttttcttttgagcgagtgcatttcaacactcagaacttctcctcttacagatcattttcaaggccatctctggatgccatctcctaagcaaaatccgatatataaaatgaaaagggaaattggttaacttaaatctcaaaaaagatgttaagggagagactgtcacttccctcaacagatttgggaaagttaattattttaacctcttttctagtgaatattaatggaacttctaacacaacatacacacagcactttatgaaacaaaaatgcccaaaactaagttagtgcatactgaaagcctaaagcacacccagcagagctttgaaatataaaaagcatagtgagttccttcccacgaggaataaatatataatcggcatatgtatatctatatttgaaacttattctaaagtgtcacacttctccctgcactagcagtcccaagccagtgaaacagcaggtaactgacagatgaccctgtcctgcatcccttgtctttgacttctccccactcttgggacagcattcacttccaggacctacccacctggccagctcgggccctaggggcaaggagaaaaaggaggaaaagctccaggaactcacatttcggtgatgttctcaggatctacactgttaggctccaatctcggaaatgccacgatgccaggagaagggtcgctgcaccagatccgagaggcactgcatttgcaggacgtgggacaggcgaaagcggccctccagaagcccacaaccagccagcagaagccccagagccgcgccatggcgggtccatgccaccttatccaggacgacatccctagcagccagtgccagcccgagtgcctgtccccgcgctgcaccggccgctttcccccacccgtgcggggaggccttccctgcgcttgcggctctcttaactcctcggtgcttgttgcgggcgtgccgagtccagcttatcagaggctgagctggtccggagcgaagagtgttccggcaggcggcagggttcacagtggccccggcatagcgaaccgctttacaggggggcgctaccgctgctcggagctccgcggcggccgtcgctgcatggcccggcgcgccgggcaccgaccggcggcgctcccgggactctctggggcgcagattccttgttagatgcgaatgggggtccggtatgcacctcgaggctgaggacaaacagacacgcgtaagactgagcgtaggacccccaacaccactaattggggcactctccctctctgctcgcgtcatccccaccccgaccccagcccggagactgtggatggatgagtgcccagctccggcccaggaatcaacttgccccgcgatggcactgacgccgctggagccaccagtgtgcccactctctcttcgagcctgaggccaagggaggggaggtagggaaagggtccccaagacaggattccatggtacaggccgggcgaaggaccctttaaaggggaatgcggagactgccggcggctttggctccgcgacggggcccccgaatgatgctgcagaatccgccacggccgctgggtgccggtggcgcgggcaggtggcgcggcacgtcccacctggggagtagccgaggccgccccagggggagacagtgagggccgaggcgaccgagggcactatctgcgctgctcacccgggctccggcgcctcacgcccgccggcggcgcctgggtccaggctcctgctaccgccggggactgagcgcgtagagcgcgagcgaagcagccagcgaggctcctgctccaacccaattccgggagccgccgccgccgcctctgctactgctggcgaagtgacgtgagggctgacgcagagcaggggcagaaactccagaaaattagtctgaaatccaaaaacacacacacgctcatacacacacaaacccataacaccctccagacaaaagcaccagggaggggaggggaatctgggggcgagcagggaggagggaggcatcggtgccactggccagaagcagacagcagcagcatgtgggagttcacacacgcgcgcacacacgcacacatcctggccgtgtagacatgcacgcgcgtgcgtgtgtgtgtctgtgtgtgtgtgtgcatttacatccaggtacctctaagatgaaccgttcctccgttcgacgcctcccggtccctaattcacaccacagtctcttctacaatcgcggtagaggctgtctccctttttgaaatggaaaccgtgcttggttcagctctgaaaaatgcgctgattcttattataggaatcctccctcccttctccctccccgcgttctcctttcccaccctgcctaaaagggagggcaagctatcctaaaaataaataaatgttgtaaacaccaaaacgtgttctgcattggtaaccaaggatcaccgcccccattccgggccacctatttggggatcggtggttttggaggggcttcctgttggtgcttttgcagagggaagggagtctccaaacacaattctagctctctaagtgggtctttttcctgccgttttctgccatcacacgcccgggaaatagagacatgtgaggggaagggagcgcgcctgatgcgtattctaaatgctcggtggccaccctggcctgtccgatgtgtggcgccgcgtcattttctctcatcctttaacctgacgggatgtagccattcccagatcgtggattcactccccgcgatgcccacccccacgtagggcatcccaagcccttgctcccctgccgtaccttgcgcgtgttcatgtgtgctagggtgtgcgcgaacgcgtgccctgcgcccgcgctgcccggagcacgatatgcatccagctacgaagaagccaggcgcgggcagagcctcggggtctcactagggacaaattaggcgatccgggagggtcgggtgacaaaccgtaactattctgcgggtgcagttaaatgatggctgcggggcatttgcaagccttgtctgagaatccgtcttcccttttgcggctcggaatctgtttttccgcagtcatttaaaagagaacggggaaaatacaccgcagtgcctgacacttccgagggctctggtgcccccgcgcggggagagagcgcccggcacgctccggagcaccagcccatggcccgggtcgcggcgggcacagcgctgggggcgcgctctggcgccagatgcgcaaccagcggcgcccgacgcctgcgcgtccctgcccggccggtgcgcggctctcctggcctcgccgagctcctgcccgggggaaaaaggcgggcaatccttctctctcgagagagcaatgggttggagtctcgttcaaaatatagtaatagtcactgatctacccgcagagtttggggatgggaaggatcaagaaaccgaacgttagagtgaatgctcggatctaggccaagcgttaaatattacgaagggaacgtaaaacatctattggggcttttttgtacagatcctgggcgctgagtgtaaccgcgggaattcttggacagcacccaaaaatcttgctgcaggtcccgaaagcaaggccagcaggtctatctcaccactgtcactcggctgtaacacacatcgagtggtgaacggccaggctgaagtttactcctgagctgcgcctctattctctactaggtgaggacgcgccaaggaagagacgccaagggcaaaaatgacctggtctcagacgcacgtaaaactccgcctgtcttgtcagtgaaccttaagcggagaagcccctgaggaacacttggggaaggaaggagtgtgtgcgtaatcacccacatttctctcacactcccatactctgagcccatttttctaagaaacggcccattttcgccct

SEQ ID NO: 588637 - DNA, 4001 bp, Homo sapiens
ctcttggctcctgctctccttgccaaaaagatagagatcctagcaccctggactcagcccgacagttggctgctcccgacacatctcagctatgctaggcctgaacattcccctctgctctgctgtcatttccttttgcctgaggcttacaccataagcatcagcagcagaacaggcaacagagactaggaaggtctcttacttacattaaaaaacaggttatcttggtcaactacgttggcagaaacatggttgtatgttttctgtggaaggaaaaatgcatgcgcactcgacaaccggaaggccacagcccaagccccactttagggctgcctatctcagtatcaaacacaataaggaaaactgggagaaactttgccttacaatcttccacgtatacgaataaaatctcatgttaatgagatgtatggaatgacagcatccttcaggaaaaaaatgataacaataacagtccagtagaggtgacacaggaatgctagagaaaggactggcaagttcttgcttggtgatgcatttgtcacaaagcatcagaaaaggagaatagaaatacacagttctgtttcttcaagccacaacaagctcaaacatttccagggacacagaggtccaatgctaaagccagccttcatcagagttctacccagtgctttatcatccaacctagtcctgggaaattattcaatgggcaattaagagttataatccaagtggtctcaaaatcatatctctgggaagtcaagtccaaattaaattagaccaggcttttaggcttccaactatcatatttttttcttttgagcgagtgcatttcaacactcagaacttctcctcttacagatcattttcaaggccatctctggatgccatctcctaagcaaaatccgatatataaaatgaaaagggaaattggttaacttaaatctcaaaaaagatgttaagggagagactgtcacttccctcaacagatttgggaaagttaattattttaacctcttttctagtgaatattaatggaacttctaacacaacatacacacagcactttatgaaacaaaaatgcccaaaactaagttagtgcatactgaaagcctaaagcacacccagcagagctttgaaatataaaaagcatagtgagttccttcccacgaggaataaatatataatcggcatatgtatatctatatttgaaacttattctaaagtgtcacacttctccctgcactagcagtcccaagccagtgaaacagcaggtaactgacagatgaccctgtcctgcatcccttgtctttgacttctccccactcttgggacagcattcacttccaggacctacccacctggccagctcgggccctaggggcaaggagaaaaaggaggaaaagctccaggaactcacatttcggtgatgttctcaggatctacactgttaggctccaatctcggaaatgccacgatgccaggagaagggtcgctgcaccagatccgagaggcactgcatttgcaggacgtgggacaggcgaaagcggccctccagaagcccacaaccagccagcagaagccccagagccgcgccatggcgggtccatgccaccttatccaggacgacatccctagcagccagtgccagcccgagtgcctgtccccgcgctgcaccggccgctttcccccacccgtgcggggaggccttccctgcgcttgcggctctcttaactcctcggtgcttgttgcgggcgtgccgagtccagcttatcagaggctgagctggtccggagcgaagagtgttccggcaggcggcagggttcacagtggccccggcatagcgaaccgctttacaggggggcgctaccgctgctcggagctccgcggcggccgtcgctgcatggcccggcgcgccgggcaccgaccggcggcgctcccgggactctctggggcgcagattccttgttagatgcgaatgggggtccggtatgcacctcgaggctgaggacaaacagacacgcgtaagactgagcgtaggacccccaacaccactaattggggcactctccctctctgctcgcgtcatccccaccccgaccccagcccggagactgtggatggatgagtgcccagctccggcccaggaatcaacttgccccgcgatggcactgacgccgctggagccaccagtgtgcccactctctcttcgagcctgaggccaagggaggggaggtagggaaagggtccccaagacaggattccatggtacaggccgggcgaaggaccctttaaaggggaatgcggagactgccggcggctttggctccgcgacggggcccccgaatgatgctgcagaatccgccacggccgctgggtgccggtggcgcgggcaggtggcgcggcacgtcccacctggggagtagccgaggccgccccagggggagacagtgagggccgaggcgaccgagggcactatctgcgctgctcacccgggctccggcgcctcacgcccgccggcggcgcctgggtccaggctcctgctaccgccggggactgagcgcgtagagcgcgagcgaagcagccagcgaggctcctgctccaacccaattccgggagccgccgccgccgcctctgctactgctggcgaagtgacgtgagggctgacgcagagcaggggcagaaactccagaaaattagtctgaaatccaaaaacacacacacgctcatacacacacaaacccataacaccctccagacaaaagcaccagggaggggaggggaatctgggggcgagcagggaggagggaggcatcggtgccactggccagaagcagacagcagcagcatgtgggagttcacacacgcgcgcacacacgcacacatcctggccgtgtagacatgcacgcgcgtgcgtgtgtgtgtctgtgtgtgtgtgtgcatttacatccaggtacctctaagatgaaccgttcctccgttcgacgcctcccggtccctaattcacaccacagtctcttctacaatcgcggtagaggctgtctccctttttgaaatggaaaccgtgcttggttcagctctgaaaaatgcgctgattcttattataggaatcctccctcccttctccctccccgcgttctcctttcccaccctgcctaaaagggagggcaagctatcctaaaaataaataaatgttgtaaacaccaaaacgtgttctgcattggtaaccaaggatcaccgcccccattccgggccacctatttggggatcggtggttttggaggggcttcctgttggtgcttttgcagagggaagggagtctccaaacacaattctagctctctaagtgggtctttttcctgccgttttctgccatcacacgcccgggaaatagagacatgtgaggggaagggagcgcgcctgatgcgtattctaaatgctcggtggccaccctggcctgtccgatgtgtggcgccgcgtcattttctctcatcctttaacctgacgggatgtagccattcccagatcgtggattcactccccgcgatgcccacccccacgtagggcatcccaagcccttgctcccctgccgtaccttgcgcgtgttcatgtgtgctagggtgtgcgcgaacgcgtgccctgcgcccgcgctgcccggagcacgatatgcatccagctacgaagaagccaggcgcgggcagagcctcggggtctcactagggacaaattaggcgatccgggagggtcgggtgacaaaccgtaactattctgcgggtgcagttaaatgatggctgcggggcatttgcaagccttgtctgagaatccgtcttcccttttgcggctcggaatctgtttttccgcagtcatttaaaagagaacggggaaaatacaccgcagtgcctgacacttccgagggctctggtgcccccgcgcggggagagagcgcccggcacgctccggagcaccagcccatggcccgggtcgcggcgggcacagcgctgggg

SEQ ID NO: 588638 - DNA, 4001 bp, Homo sapiens
accgaccggcggcgctcccgggactctctggggcgcagattccttgttagatgcgaatgggggtccggtatgcacctcgaggctgaggacaaacagacacgcgtaagactgagcgtaggacccccaacaccactaattggggcactctccctctctgctcgcgtcatccccaccccgaccccagcccggagactgtggatggatgagtgcccagctccggcccaggaatcaacttgccccgcgatggcactgacgccgctggagccaccagtgtgcccactctctcttcgagcctgaggccaagggaggggaggtagggaaagggtccccaagacaggattccatggtacaggccgggcgaaggaccctttaaaggggaatgcggagactgccggcggctttggctccgcgacggggcccccgaatgatgctgcagaatccgccacggccgctgggtgccggtggcgcgggcaggtggcgcggcacgtcccacctggggagtagccgaggccgccccagggggagacagtgagggccgaggcgaccgagggcactatctgcgctgctcacccgggctccggcgcctcacgcccgccggcggcgcctgggtccaggctcctgctaccgccggggactgagcgcgtagagcgcgagcgaagcagccagcgaggctcctgctccaacccaattccgggagccgccgccgccgcctctgctactgctggcgaagtgacgtgagggctgacgcagagcaggggcagaaactccagaaaattagtctgaaatccaaaaacacacacacgctcatacacacacaaacccataacaccctccagacaaaagcaccagggaggggaggggaatctgggggcgagcagggaggagggaggcatcggtgccactggccagaagcagacagcagcagcatgtgggagttcacacacgcgcgcacacacgcacacatcctggccgtgtagacatgcacgcgcgtgcgtgtgtgtgtctgtgtgtgtgtgtgcatttacatccaggtacctctaagatgaaccgttcctccgttcgacgcctcccggtccctaattcacaccacagtctcttctacaatcgcggtagaggctgtctccctttttgaaatggaaaccgtgcttggttcagctctgaaaaatgcgctgattcttattataggaatcctccctcccttctccctccccgcgttctcctttcccaccctgcctaaaagggagggcaagctatcctaaaaataaataaatgttgtaaacaccaaaacgtgttctgcattggtaaccaaggatcaccgcccccattccgggccacctatttggggatcggtggttttggaggggcttcctgttggtgcttttgcagagggaagggagtctccaaacacaattctagctctctaagtgggtctttttcctgccgttttctgccatcacacgcccgggaaatagagacatgtgaggggaagggagcgcgcctgatgcgtattctaaatgctcggtggccaccctggcctgtccgatgtgtggcgccgcgtcattttctctcatcctttaacctgacgggatgtagccattcccagatcgtggattcactccccgcgatgcccacccccacgtagggcatcccaagcccttgctcccctgccgtaccttgcgcgtgttcatgtgtgctagggtgtgcgcgaacgcgtgccctgcgcccgcgctgcccggagcacgatatgcatccagctacgaagaagccaggcgcgggcagagcctcggggtctcactagggacaaattaggcgatccgggagggtcgggtgacaaaccgtaactattctgcgggtgcagttaaatgatggctgcggggcatttgcaagccttgtctgagaatccgtcttcccttttgcggctcggaatctgtttttccgcagtcatttaaaagagaacggggaaaatacaccgcagtgcctgacacttccgagggctctggtgcccccgcgcggggagagagcgcccggcacgctccggagcaccagcccatggcccgggtcgcggcgggcacagcgctgggggcgcgctctggcgccagatgcgcaaccagcggcgcccgacgcctgcgcgtccctgcccggccggtgcgcggctctcctggcctcgccgagctcctgcccgggggaaaaaggcgggcaatccttctctctcgagagagcaatgggttggagtctcgttcaaaatatagtaatagtcactgatctacccgcagagtttggggatgggaaggatcaagaaaccgaacgttagagtgaatgctcggatctaggccaagcgttaaatattacgaagggaacgtaaaacatctattggggcttttttgtacagatcctgggcgctgagtgtaaccgcgggaattcttggacagcacccaaaaatcttgctgcaggtcccgaaagcaaggccagcaggtctatctcaccactgtcactcggctgtaacacacatcgagtggtgaacggccaggctgaagtttactcctgagctgcgcctctattctctactaggtgaggacgcgccaaggaagagacgccaagggcaaaaatgacctggtctcagacgcacgtaaaactccgcctgtcttgtcagtgaaccttaagcggagaagcccctgaggaacacttggggaaggaaggagtgtgtgcgtaatcacccacatttctctcacactcccatactctgagcccatttttctaagaaacggcccattttcgccctagtggctgcagcatgtcaatgcggtatggagaataggcagtcttacggtggtttgtacaccagaagagtctaattatgttggaatatttgtagagtttctattagagtaaatatatgctactattatagttggattctaaatatattccactatctcccacttaaaattaggatttgcggtcctacttctaatcaccctacttctgctctactatttcaaccatagcagtttgtcctttggacagataatttacttattatatatatttttaaaatttctcccagaagaatgtacactccatgaaggcagggatttttatctattttattcattgatatctctcaaggacatagtaggtgttaaaatatatgtgtatttttaatgaataaataaaataaaataaaggagatctcactttcttaacctctaagtctgcaagaacctggataattcccccagacacgctccttctcaccttcacaatttcaaatcttccttgcgttctgagtgctcctagcactgcttaaaaccttgccttactttctgtctcatttagtagccagataggcttcagtactgggccagagagggcctcccacttattcatgctagtaactgaacacctccatggacagtgtctagaacacactggtgatcagtagctatttcttaactgatagaattgtggatctacctcgattttaagacctataagatatgtcccagagatcacttcaaggattctcagatcacacctttgtaagagatgatgaacatttttcagatgaacaatatagagatgacttttttctagatcccttgaatgcaggcatagaaattaagtgctgcaggttcctacctgcactgaaccatgatgtacctagagcaatgtttctcaaactcttttgaccatgatccacaataagaaatgccttttatatcacaacccaatgaacacatacataaaggcatatactaactaaaaaagaagtgtcataatacaaaacttacttacccttagtacataaactaatatatccttttctcttctacaccatttcatttctgaatgcatgtaataactcaatacattgattttaacatccaatactgagttgtaaaaaaataagcaagaatactgccaacttctgattaaaatggagtaatagggaacggatttgttctctcaatcatatgaccaaaacactgaacaaaatatat

SEQ ID NO: 588639 - DNA, 4001 bp, Homo sapiens
ctttagtcagaaacacagaaaagcatggctgtctatgcagtcagaaaggcctagctattgaagttaatagagcaagatacttagagcaagatacttaacttcctcatttgtaaaatgaagttaacacctactttgcatggttgttgtggagtttataaatgacatatatagagggtctgacattatcagaggtactaaatatatgagttactgttacccgtgtgtcataaaagatcatcaaaaagcttctctgttttaaagaaatgacttttcatcttgtctgttaaactgctcaacactgttcaccacagtatatatattccttataaggtcccacagcataaattccttttaatatagaaactagaaaaataatttatcttttgaagaatggatttgtttccttattagtaagaattaccttttttcccttaactgactaattttgggcaaaattgggtactcagttacaaaaagtacaccaacgcactgactagtgtatttgcctgttcttattataagaataatagctacctttttttttttgagacggagtctccctctgtcgcccaggctggagtgcagtggtgcgatctctgctctctgcaaactccgcctcccgggttcgtgccattctcctgcctcagcctcccgagtagctgggaccacaggcgcccgccaccacgcccggctaattttttgtgtttttagtagagacggggtttcaccgtgtcagccaggatggtctcgatctcctgacctcgtgatccgcccgcctcggcctcccaaagggctaggattacaggcgtgagccaccgcgcccggccgctaccattttttaagaagttactactcgccaggcgttgtgtcaagtgctttaccttcattatttcacttaatcttcacaacaacccgctgaggcattactgccatttttcagaagagtagaaagggaactatagctcagagatgtctgggtaagtgactcaaatgtaggtctgcctgactcctaacatcaatgatcttaaccttaactctataatagcgttttacatttgacaatttgattgcattcagtttttttttgttttgttttgtttttgagacggagtctcgctctgtcgcccaggctggagtgcagtggcgcgacctccgctcactgcaagctccgcctcctgggttcatgccattctcctgcctcagcctcccgagtagcagggactatacgtgcccgccacgacgcctggctaacttttgtattttgtttagtagagacggggtttcaccgtgttagccaggatggtctcgatctcctgacctcgtgatccgcccgccttggcctcccaaaatgctgggattacaggcgtgagccaccgcacccggcctgcattgtttacgctgtcccttttttgtttgtttgtttaaggcggtggggctcttgttcgactttctttacttctgctataactgccacgatattatccattcaataactgaagcaattagaaaacataaaatctcttttggaaagcaggcggggtttaatgggtagcaacaagtgaaactgaggcccagggaggggaaggttcggcgcctgggcctctgggccctaaacctggacctctcccgcctctgggatttggacgacccaccctatccccactccgacggggacaagcaaggctcagagtcagggaacctcccttctcccggtgcagacaggaaaactgaggtcctgagagcggatgggacctggcctgcccacacctcactgccaacttagaggagggcgcatccctctcgggccctgcagcgaccagaggtttgccagaggcagattcccatcgctccaaggctcatttcctccactgagaactaaaatcaagtgggcccttaagggtactcacccgaagcagaaggaggtaggaggcggaccttggacggaaactgaagtacaccggccaatcagaagagcctggttacgcttgggcccatcaatagaattcggcagaaggatcttcgacccgcctcaaaggtgcgcgtctcacactgaaacgtcgcgagatcttccctcaagcggaacgattggctgaaggtcggaaattgagagttacgcccacggtttcttcagacctctgattggtcttccagaggagaagtcaacgaacgtcaaccgattccttggatgcccattggtgggcggtgcgggactggcgacgcgcgggccacagcgcgggcgttcgaactggcgcttggcggcgttgccatggagatgcggcctggccgccgccggtggctcccgggttgacgggactgttaggttgcgggctttggggctcactcccgacggcattgtcttctcctcttctcagacagggcagaccgaggagtttggaccgaggtgagaaagggcggggagaatagaggaggggtaggtctggtccggaaccgtggcgcctgcccgcggacacgggtgcgcgtgacgtcggctgagcgcgggaggaaactggcagttgtgagggaaccgagagttggcccctcttggctcttcctaaagttcacctactttcctatctttcatccccatatctctgccttttcttcagcaattatcttgaacgccacttctctcactttgggagactaaactcttgagtcccaaagccttcttgcttttgaaccgataagcctgaccggcacctcttttagggcatttctattcgcccttgggttgtttacttccgggaagcccgttcgcttcccttttcccataaaattttgaagcctttgaggtaaggcaagcatcgttcacaatgtcttgcacatagtagattttcaggaaatatttgttgagttgaatttaatttacaagaaatagattggattcctcttcatgccctgccttgttgtctctctgcttcagagacgattttttatttcgaggctagggggaggccaccctaatcttcaatgcaaaaggacctaaaagtccacacacagtccacagctggcctttctactctttgtgaaaggctaaacttttttggattggttgctgcaactcttcctgcatctgtggcttttagccttggtctcccaataattttattagactccttttagtctttgcttaaaataaaccattctgttgctgtatgccaagataatttatctccctttagcttcttagtgaccggcagctattgtcacattttaagtgtgctttggaaaatgttttaaagcatcttctttgtacttgtattctacaagtagagaggctttgtagtctctctattgaagtgcatataacagctgctcaggtgaactccatctattcatcaggtgtctatgatagaattgcgttcctaagactgtttcgttgttaactcatggattatatattcacagcctgattgttggtgtgattgctccttatatcaaattcatagctcactggtggccttaataaaaggagtgaaaaagttcagtacagcagctatgttcttgttacccttttataaaagtttgaaacactaccttatagctgtgacatgtagtggaaacccactacatgtgggtttggctttggctctgtctctgtctctaattcactgtgggtggctttgcaagtcatttagtccctttattattattattattttttttttattagagaaaatgtcttgctctgtcacccaggctgtagtgcactagcatgataatagctcaccgcagccttgaacgcctgaatctagcccctttagacctcattttttccatctggaaaatcaaagaattgaattagattaaaattcctgtggctctactctcaagtcaagtagttgatgtcaggtagaccacacactctcagccttccaaagaccatacagactttttttttagctgctgaaagtagtagttaccatttattgagtgttcaccccgtacaaagcactgtatccagggctttatatgcatattacatttttcttagtgtagca

SEQ ID NO: 588640 - DNA, 4001 bp, Homo sapiens
tcatgctgttacactccagcctgggtaacaagagtgaaactccatctcaaaataaataaataggccaggtgtggtggctcacgcctataatcacagcaatttgggaggccaaggagggcagatcacctaaggtcgggagttggagaccagcctgaccaaaatggaaaaaccccatctctactaaaaatacaaaattagtcgggcgtggtggtgcatgcctgtaatcccagctactcgagaagctgaggcaggagaatcgcttgaacctgggaggcggaggttgcggtgagccgagatcacgccattgcactccagcctgggaaacaagagcgaaactctgtctctaaataaataaatgtgtttacttcctacatttaaaaaaaggttttttttggtaacaaaagctacacaaagaacccagagaacccactcaagaacaccaccacttaccagctctctcagagctgaccttccaagcagaatagtccacagttctctactgctcctgcaaaatgagagaacagaggtaattttgctctttctgatcatacaaacttgtacactgcctcatagccattttgtctgctctctaaaagcaaaaaatctcaatatacaaaacgatttgttaaatttttggaaagtaatcttgttatataataatattgttagggccgggcacggtggctcatgcctgtaatcccagcactttgggaggtcgaggcgggcggatcatgaggtcagaagatcgagaccatcctggctaacacagtgaaaccctgtctctactgaaaatacaaaaaattagccaggcgttgtggcgggtgcctgtatccccagctacttgggaggctgaggcaggagaatggcatgaacccgggagacagagcttgcagtgagccgagatcgtgccattgcactccagcctgggcgacagagcgagactccgtctcaaaaaaaaaaaaaaaaaaaaaaaaaaaaaaaagtggggaaaacactgctggcacagggaaggataagagacggggatgtttaactttgagggagggtggtgggaagaacgaagaccttcgagctgcaatgtggaagacagaaggaggcgtggtggtctggttatagcactggaggtacgcagacttcagcttgaaggctctctttatcacttggctagctctgagccggacttctgagtcatctgtgaaatagaaggcgcctctcggagttgcgagaattgaatgagataactcctgggaagcgctccaccagggtctgacgctagaaagcactttgtcagaattgtagttttcgtatataatatttcatcttcttgtccctaaagcctagttcaatccctgaaatctcttggaggatttggacatgctggctgacttgattcagtgcaagaaaagaacgatacgaggcgcggagaggacagaagccgcaagcgtggctccgctcaacgcgaaacaaaatcctaacaagaacagatcgcgggagaggtcggggagccagcagggcgcactcgacgccggggcaggacactgggagcctgcagcagggacgtgggtggggggtaccccaggagaccgcaaagctccccgtggctcgagggagcgtcacggccggagaaggaagcgcgggtggggcgccaagagacgcgtcggaggtgagagaggaggaaggcaaagggccctgggtgaggagatgggaggccgagcgcggagggaaggggtgaagagccggcccccctcctgaagaagactcttcagatccccgcgcgcggggaccgtttggacgtaaccgcctcccgtctcggtgcccgtccatccagccggggttggccctgccactgtcgccacatcccgcctccaattcccgccccgcttccgctcggctttgacaccgcgcttcacagccaccccggtccattcgacccgctccgcacctcacacacggcccgccggcggccgccgccatcttcgcgcgcccgctcgccctaaccccgcccccagacgccatgcccacgtgaccgctcgcccccggacccggagcgtgggcggggatttcgtcacgtgacgttgccgcggggcggtgccaagatggcgaggcccaaagaggtgaggagccggcagcgggggcggctgtaactgtgaggaaggctgcagagtggcgacgtctacgccgtaggttggaggctgtggggggtggccgggcgccagctcccaggccgcagaagtgacctgcggtggagttccctcctcgctgctggagaacggagggagaaggttgctggccgggtgaaagtgcctccctctgcttgacggggctgaggggcccgaagtctagggcgtccgtagtcgccccggcctccgtgaagccccaggtctagagatatgacccgagagtgcccatctccggccccggggcctggggctccgctgagtggatcggtgctggcagaggcggcagtagtgtttgcagtggtgctgagcatccacgcaaccgtatgggaccgatactcgtggtgcgccgtggccctcgcagtgcaggccttctacgtccaatacaagtgggaccggctgctacagcagggaagcgccgtcttccagttccgaatgtccgcaaacagtggcctattgcccgcctccatggtcatgcctttgcttggactagtcatgaaggagcggtgccagactgctgggaacccgttctttgagcgttttggcattgtggtggcagccactggcatggcagtggccctcttctcatcagtgttggcgctcggcatcactcgcccagtgccaaccaacacttgtgtcatcttgggcttggctggaggtgttatcatttatatcatgaagcactcgttgagcgtgggggaggtgatcgaagtcctggaagtccttctgatcttcgtttatctcaacatgatcctgctgtacctgctgccccgctgcttcacccctggtgaggcactgctggtattgggtggcattagctttgtcctcaaccagctcatcaagcgctctctgacactggtggaaagtcagggggacccagtggacttcttcctgctggtggtggtagtagggatggtactcatgggcattttcttcagcactctgtttgtcttcatggactcaggcacctgggcctcctccatcttcttccacctcatgacctgtgtgctgagccttggtgtggtcctaccctggctgcaccggctcatccgcaggaatcccctgctctggcttcttcagtttctcttccagacagacacccgcatctacctcctagcctattggtctctgctggccaccttggcctgcctggtggtgctgtaccagaatgccaagcggtcatcttccgagtccaagaagcaccaggcccccaccatcgcccgaaagtatttccacctcattgtggtagccacctacatcccaggtatcatctttgaccggccactgctctatgtagccgccactgtatgcctggcggtcttcatcttcctggagtatgtgcgctacttccgcatcaagcctttgggtcacactctacggagcttcctgtccctttttctggatgaacgagacagtggaccactcattctgacacacatctacctgctcctgggcatgtctcttcccatctggctgatccccagaccctgcacacagaagggtagcctgggaggagccagggccctcgtcccctatgccggtgtcctggctgtgggtgtgggtgatactgtggcctccatcttcggtagcaccatgggggagatccgctggcctggaaccaaaaagacttttgaggggaccatgacatctatatttgcgcagatcatttctgtagctctgatcttaatctttgacagtggagtggacctaaactacagttatgcttggattttggggtccatcagcactgtgtccctcctggaagcatacactacacagatagacaatctccttctgcctctctacctcctgatattgctgatg

SEQ ID NO: 588641 - DNA, 4001 bp, Homo sapiens
aagattctcaccttctttagcgctctaaactgaaaatcctgttgtgaagaatcaaaacgagatcaattcaataaagaaagaaattaaaacatgttatattcagtagacccaatttcagtacaacaaaaatatgtattactgagaccaaggtctgtctcaattgtctttttttcttttttgagatggagtctcgctctgtcgtccaggctggagtgcagtgcagcgatcttggctcactgcaacctctgcctcccaggttcaagcgattctcctgcttcagactcccaagtagctgggattacaggcacccgccaccatggccatctaatttttgtatttttagtagacacagggtttcattatgttggccaggctagtctcgaactccggacctcaagtgatccatccacctcagcctcccaaagtgcaagctcacaggcatgagccaccacactcggccctcatttttttctgatatggaacacttcatgaatttgtctgtcatccatgtaaaggggccataatagtcttctctgcatgatcccaattttatatgtgctgccaaagggagtgcgagattaccatcttctaagtctgtggttctattaataaaacctttttttcttctaccccagcatatctgaggaatatgacacaaccccattaggtggctcaccacaggtggtgattctcaaaaaataatcactattctaggacagcacggtagctcacgcctataatcccagcactttgggagccagaggagggcggatcacgttaggtcaggagttcgagaccagcctggccaacatcgtgaaacccagtctctaccaaatgatataaaaaattagtggggcgtggtggcaggcgcctgtaataccagctactagggaggttgaagcaggagaatcgcttgagccggggaggtggaggttgcagggagccgagatcatgccactgcactccagcttgggtgacagagcaagactctgtctcaaaaaaaaaaaaaaatcactattctaaacatggtattactatgccctaaatgcattttagtgatttattgttcacacagatgcctaaaatcttcctgcaacttacttcttttcactatttaaaacagatgtagcccgtctgttgtaccctcattctgtcagaacccatataagaactattaaacacaccatcctgaagttatccctgggggactcccacgttgctatcactgggaccacttggccctccctttaggttcctgactttaggctgatataccgaggtcaaaatagtcttcctagtccaatcaactaaaggttctgcaggatggatgaccttccctgactctacgttaggcaagcccgtatcaccttacagaagtactgggagagcaaaggtcttaaatgatgctggctttcagccccgcgtcaaatgtgactttagggaaattactttccgagcctcaacttactcctctacgttaacgactacttcgtagggctgccgcgatgactaccacagtgcctggcacacagtcaacactcaataaacagcagttattgccactattgtgaccgccccaggaagtagctagggtaactcaacagccgtgcacgagaccaggatgggactgggaaactgcattcggtggggctatcacgccagcggcgcggcagacgcgctggtgagagctgtgaacgcggtaaactgttcaagcaggaggcgggacagccagcaccgcgcttcgcctttcagctgggctccaaggcaacgccaggactaaagaagggagggaggccccggttagtctctgaccttcatctcccgctcgggaatcatggcatccatctcgtctcccatcgcgccgccctcagtgtgtcgaagcagccaacgctgcctcccacggccttgcccacggaacccaggccgctcgacagcaaacttcctcccctcagcgccagcggcgcgcagttgacctcgcatttccggcgcgctttggtgacgtcaagcttggtcagaggaagccgcggaacctagcgaagccgcgcgttcttccggccgccgctccccattggccagctcgggctgagtagtggcgtggccgtgaggtccctgcgcctgcgccctggatggtcctggtgccgctcccgccttcgcagccagcgcgggcttacctagtgttaagtctctcttcttgggtggcccacgcctaagcgacctatgcttcttgttcttctgaaatcttacagttccccttagatgtaggttggctattggtagcttccgattcagataagtttggaacttgacagatgttttcggggggctgctttagagagaggctttggactatgcaaggggaggaagggaggttcagaaaaacggggtcggggggtcggcagggacgactcttaaagtgtggaaggtggaaggctgggaggggagattaaagggcaccgaagaccagctttgtttgctcctatcaaggtgatcctttccagagcaagagccatatccatgtctagtcgcacgagtttgtgccaagtcctttgcaaaaaccttcagatgtgggatctcatgtaatcttgaagacatcttagtcgtcctaggggttatttatttaattgatgagacgcgggtggctcatgcctataatcccagcacttgggaggcggagacaggaggattgcttgagaccaggagtttgagaccagcctcggcaacatggcgagaccccgtctctataaaaaacaaaacaaaaccacaaaaattagccagcagtgatggcatgcgtatgtagtctcagctactcgggaggctgaggtgggagaattgcctgagcccaggaggttgaggctacagggagctgtgattgcaccattgcactccagcctgggtgacagagccaggccctgtctcaaaaagtaaataaaaggccgggcgcggtggctcacgcctgtaatcccagcactttgcgaggccgaggcgggcggatcacgaggtcaggagatggagaccatcctggctaacacggtgaaaccccgactctactaaaaatacaaaaaattagccgggcgcggtggcgggcacctgtagtcccagctactcgggaggctgaggcaggagaatggcgtgaacccgggaggcggaggttgcagtgagcagagacagcgccactgcagtctggcctgggcgaaagagcgagactccgtctcaaaaaaaaaaaaaaaaaaaaagtaaataaaaataggctgggagcagtggctcacgcctgtaaccacagtactttgggaggccgaggtgggtggaacacctgaggtcaggagctcgagaccagcctggccaacatggtgaaaccccgtctctgctaaaaatacaacaattagccgggtgtggtggcggacgcctgtgttcccagctatacaggaggctgaggcaggagaatcgcatgaacacaaaaggtggaggttgcagtgagctaagattgtgccactgcactccagcctgggtgacagagtgagactctgtctcagaaaaaaaaaaaaaaaaaaaaaaaaatatatatatatatatatatatacacacacacacacacatatatatatacacacacacacatatatatatatatacacacacacacatacacatacataataataattgatgaggtaagggaggcacagagaagttgagaaaattctccaatagccctcagtcagaaagtggtggtgacaggattagaattgagatcgtctggataaggctgactgatggtattaaagtccttcatagaatacatttctgtagtgaattataaatgctctaggacagaggttcttttttttttttgagacggagtctcactctgtcactcatgctggagtgcagtggcgcgatctcggctcactgcaagctctgcctcccgggttcacagcattctcctgcctcagcttcccaagtagctgggactacaggcggccgccaccacgcccggctaattt

SEQ ID NO: 588642 - DNA, 4001 bp, Homo sapiens
gagacaggagaattgcttgaaccgaggaggcagaggctgcagtgagccgagatcgtgccacttcattccagcccgggtgacagagcgagactccgtctcaaaaaaaaaaaaaaaaaaaaaaaagaaaaccactggatggaaactcacccaagccagtgccctaggaaccctgaagataacccataacacatcacgcccagcatgcaagtgattgtcctggcaccacccacacaagtgttaaataggggtcagattcaggccacccattcctcagtgctcagtggtcccagctgccactcaggaagctcagttcccagggagcagatctgagaagcagtggtggagtcccctgagatattgtcattgtgtagccagcaacagctgcacatgactagaacacagccagcaaatggtgagcagcagggctatcaggggaggtgtctagggattttcttttttttctttttttttttttttgagacggagtctcgctctgtcacccaggctggagtgcagtggtgcgatctcagctcactgcaacctctgcctcccaggttcaagcacttctcctgcctcagcctcctgagtagctgggattacaggcgcccgccaccatgcccagccaatttttgtatttttagtagagacggggtttcaccatattggtcaggctggtcttgaactcctgacctcgtgatccacatgccttggtctcccaaagtgctgggattacaggcgtgagccaccgcgcccggccagggattttcacagctgctagtcatgttacactaaatagtgggacagggagcccatctctggtccttctcctttgagctcccagtaactgaacatagggaccaacgaagaaccaggggttcttgggccacaggccaggtgaggcagagttgtctggaactcatccctgttcactaggacctcatgcagtctctagccaaggggaataagggatacagcacatgcacctcatcagtcaggacacacatcctagtttgaataataataataataggactgtcttcctatttgtgcgctactctccttcctctactgaaaaggaaaccagccttttcagagccttccactgagaaccagcaagaatccacacctgtcgcccgttcatgaggtagtataaatggaacaggagcaaattcttcacctccacagtaacacaaagtacagaggacgggccatgagctagctgacgagaggaagtgggtctgaagacctgagcttccaccaaagggcaaacaattcagaacaactcaggaaacccaggccctgtgttgcctgaacttccccattctgcccccacccctgttaaatcaaagccaacagctacctgaactgacggagaagccatctctggggaggaagctgagaggctctgggctgtggcagttgcagtggcccccagccttgcccacccagaggctgtcactacatgctctgtcacagccaacccacccaacagttttctggctgagaccacttctccccactcctctctaagaactagaaaactccagtccaaatccctctaaacactatggaagggcaccttccaggtgcctgaagacacggcacagggctcaggcttgcccgtcattctccctgggccaccagcacaacacgatcccaccactccctacaaacacaatgacgtgacctgtccccctctagaaaggatcaacccatcctctccatcctttccactacacggtgtattcccccaggcatcttggtccgcctctaaggagccctcctccctaaccacagactcagggtgccatggccatccccaggtgtgatgtccctggggacatccagtgctccctccctcaacatcagccctataagctgtccccagggacagttcaaatttgaattcccaaggagttgaggcaaggcagactcggataatgccccatccctacaggctcacctccatttgaagccatcccctcaggctgggcactgaccaccactgtctggcagcttccgcaatgaaaaaagtcaagggcaggacccagagagtgacctgactcagcagatcctcctgagtccaagtggagcagggataatttgcatataaacaggtttggaacacaggaccccagacattctgcagagggggaggggcagtgggcagccgggcttggcgggggtgggggacattctgtgaagggctctggccagtaggcaagaacctgaggttcccttggttcagttggttgccatccaactggatggcagcaacacagacagtgtgcgcctctttaggcaacttttaaattgtccttctgactcacagcaaaagcttctacctgatgtcccctttacttccattctttatcaacagacctacttttgtgccaatcaacccatgctccttcccactttggctctttcccactcttgatgaatttcaacaggggccacacttacttaacaaaattcagaacacgttttcagtctgagaaacacaggggttcttaggaaggcaaggggactgagtgtttgaaatcagaatggcctcagctgatccaggctattaggtggctgtgtgctcatcattgtttaggaagcagtccttgtgcccccaggtcatgtatgttgctggaatctgtccacaccagtaggccagccttacttcccgtcccctttcttaggaagactcagtccaggaaagagaggctatgtgacctacagcaccgagaccagaaatcctttcattttgtttcccagcatattgtgctggtgttaaatgtttattttgtatcttttacatgattttaacttaactaagcaatacttttgcatggttccaaattcaaattgtgcacagtggaatagacaatgaccagccttcctcccacctcttttctctggccaccacattttctttcctggaggaaataggtgttatctgattctttttcatctttccagagatatattatgcaatcaaaagcataatgaagctatttttgctgtctaaaaatattttcagttttttgggggtaaaaattaatatattaatatgttctagtattcttctgatatttgcagtgactgtatttgtcccagtaatgtggttcctctctttatttctgtaggtaaattgctagaatgagatgttggactgttttttaaaattaaaaatacatgaaagaacatagtggccagatttagcaagtatgaataaagaataccaagtggaatttgaattgaagataaacagtgaattagtttttactataattatgatccatatgacatttagagtacacttttacaaaaaaaaaaatctgtcctttatctgtgctattcacatttcactgggatcttgcactttatctggtaactcttcccaaaaaagtgtaacatattaggcaattattgttaactctccactgtgagagtgcgaacttgcagtaaggagactcaagtgtgaatcttggctgcaccacaaaaagattctgcaccacaaccattgcagaaaacaatagcaggctgatttgatgaaaggaagtcaggagtagccattataccgttctcagcttccaggtttagtggcagtacgcacagttttaagggacaggagagcagaacaccgtctttttctttcctaacataaagtggcttacaattcctagaactctggtttctccaggagttagaaatccacaacccacgtccattctgagacaagcaaggatgctaaccaccaatgtcccatccccattctcatgcatccccttgcatgtgtgaatcctggttggagtctctcagctcgttgctgtcctcatcttcatcacaagtgtcatcacatgtggttctcagcatgggaattattgtagcctgtctttaaaaaaatcttcattctcattttcacacagaattgctgtttatcagcgtcaaaatgacaggaaagagcactcatgttctgtgttgtgaacaaggggagtgttaggaaactg

SEQ ID NO: 588643 - DNA, 4001 bp, Homo sapiens
gagaattgcttgaaccgaggaggcagaggctgcagtgagccgagatcgtgccacttcattccagcccgggtgacagagcgagactccgtctcaaaaaaaaaaaaaaaaaaaaaaaaaaaaaaaaaaaaaaaaccactggatggaaactcgcccaagccagcgccctaggaaccctgaagataacccataacacataacgcccagcatgcaagtgattgtcctggcaccacccacacaagtgttaaataggggtcagattcaggccacccattcctcagtgctcagtggtcccagctgccactcaggaagctcagttcccagggagcagatctgagaagcagtggtggagtcccctgagatattgtcattgtgtagccagcaacagctgcacatgactagaacacagccagcaaatggtgagcagcagggctatcaggggaggtgtctagggattttcttttttttctttttttttttttttgagacggagtctcgctctgtcacccaggctggagtgcagtggtgcgatctcagctcactgcaacctctgcctcccaggttcaagcacttctcctgcctcagcctcctgagtagctgggattacaggctcccgccaccatgcccagccaatttttgtatttttagtagagacggggtttcaccatattggtcaggctggtcttgaactccttgacctcgtgatccacatgccttggtctcccaaagtgctgggattacaggcgtgagccaccgcgcccggccagggattttcacagctgctagtcatgttacactaaatagtgggacagggagcccatctctggtccttctcctttgagctcccagtaactgaacatagggaccaacgaagaaccaggggttcttgggccacaggccaggtgaggcagagttgtctggaactcatccctgttcactaggacctcatgcagtctctagccaaggggaataagggatacagcgcatgcacctcatcagtcaggacacacatcctagtttgaataataataataataggactgtcttcctatttgtgcgctactctccttcctctactgaaaaggaaaccagccttttcagagccttccactgagaaccagcaagaatccacacctgtcgcccgttcatgaggtagtataaatggaacaggagcaaattcttcacctccacagtaacacaaagtacagaggacgggccacgagctagctgacgagaggaagtgggtctgaagacctgagcttccaccaaagggcaaacaattcagaacaactcaggaaacccaggccctgtgttgcctgaacttccccattctgcccccacccctgttaaatcaaagccaacagctacctgaactgacggagaagccatctctggggaggaagctgagaggctctgggctgtggcagttacagtggcccccagccttgcccacccagaggctgtcactacatgctctgtcacagccaacccacccaacagttttctggctgagaccacttctccccactcctctctaagaactagaaaactccagtccaaatccctctaaacactatggaagggcaccttccaggtgcctgaagacacggcacagggctcaggcttgcccgtcattctccctgggccaccagcacaacacgatcccaccactccctacaaacacaatgacgtgacctgtccccctctagaaaggatcaagccatcctctccatcctttccactacacggtgtattcccccaggcatcttggtccgcctctaaggagccctcctccctaaccacagactcagggtgccatggccatccccaggtgtgatgtccttggggacatccagtgctccctcaacatcagccctataagctgtccccagggacagttcaaatttgaattcccaaggagttgaggcaaggcagactaggataatgccccatccctacaggctcacctccatttgaagccatcccctcaggctgggcactgaccaccactgtctggcagcttccgcaatgaaaaaagtcaagggcaggacccagagagtgacctgactcagcagatcctcctgagtccaagtggagcagggataatttgcatataaacaggtttggaacacaggaccccagacattctgcagagggggaggggcagtgggcagccgggcttggcgggggtgggggacattctgtgaagggctctggccagtaggcaagaacctgaggttcccttggttcagttggttgccatccaactggatggcagcaacacagacagtgtgcgcctctttaggcaacttttaaattgtccttctgactcacagcaaaagcttctacctgatgtcccctttacttccattctttatcaacagacctacttttgtgccaatcaacccatgctccttcccactttggctctttcccactcttgatgaatttcaacaggggccacacttacttaacaaaattcagaacacgttttcagtctgagaaacacaggggttcttaggaaggcaaggggactgagtgtttgaaatcagaatggcctcagctgatccaggctattaggtggctgtgtgctcatcattgtttaggaagcagtccttgtgcccccaggtcatgtatgttgctggaatctgtccacaccagtaggccagccttacttcccgtcccctttcttaggaagactcagtccaggaaagagtggctatgtgacctacagcaccgagaccagaaatcctttcattttgtttcccagcatattgtgctggtgttaaatgtttattttgtatcttttacatgattttaacttaactaagcaatacttttgcatggttccaaattcaaattgtgcacagtggaataggcaatgaccagccttcctcccacctcttttctctggccaccacattttctttcctggaggaaataggtgttacctgattctttttcatctttccagagatatattatgcaatcaaaagcataatgaagctatttttgctgtctaaaaatattttcagttttttgggggtaaaaattaatatattaatatgttctagtattcttctgatatttgcagtgactgtatttgtcccagtaatgtggttcctctctttatttctgtaggtaaattgctagaatgagatgttggactgttttttaaaattaaaaatacatgaaagaacatagtggccagatttagcaagtatgaataaagaataccaagtggaatttgaattgaagataaacagtgaattagtttttactataattatgatccatatgacatttacagtacacttttacaaaaaaaatctgtcctttatctgtgctattcacatttcactgggatcttgcactttatctggtaactcttcccaaaaaagtgtaacatattaggcaattattgttaactctccactgtgagagtgcaaacttgcagtaaggagactcaagtgtgaatcttggctgcaccacaaaaagattctgcaccacaaccattgcagaaaacaatagcaggctgatttgatgaaaggaagtcaggagtagccattatactgttctcagcttccaggtttagtggcagtacgcacagttttaagggacaggagagcagaacaccgtctttttctttcctaacataaagtggcttacaattcctagaactctggtttctccaggagttagaaatccacaacccacgtccattctgagacaagcaaggatgctaaccaccaatgtcccatccccattctcatgcatcccctcgcatgtgtgaatcctggctggagtctctcagctcattgctgtcctcatcttcatcacaagtgtcatcacatgtggttctcagcatgggaattattgtagcctgtctttaaaaaaatcttcattctcattttcacacagaattgctgtttatcagcgtcagaatgacaggaaagagcactcatgttctgtgttgtgaacaaggggagtgttaggaaactggc

SEQ ID NO: 588644 - DNA, 4001 bp, Homo sapiens
accttgcctgccatcacctggcaagtaaatcccagagctgggccagagctttgtgcctaattactataatgatactgccatcgtctctcgctttcaaacctgcgttctttcaaaagcttacaaataacttgagtactaaacaagtccaatcctgtttttaaaagcaccacttgaactgattctgtaagaaatccttttgcaaagtgaaccacccatcttggagattcattatcaatagaactttcagagtcccggtgtgagtgaggctcccagaagcaggttacccccctggaaggctgggcggtgccctgcctgggcctcctctttcactgggaatcaccaaaaatcatgtttgggggaataattagatttcttcccattaattactcatctacaaaactttccaaagttagcttccagttttcattttccagaaggaatgtcatctcatgataatcagtttagggggtaatgccacaacttaatgataatctccagaaatgtgaggctgtaaagcaaaacccagaaattcacattggtacctagaagggggtggccaggacaacatacttgacgaggcctgctttaaacctaagtctggactcttacaccataggagaccacaggagacccaccccaaaagcagaacaatcaatccctgtaatcccctctctgccaatccctaccccctcctttgcaacagttagagtaataaagtttatagtaatgagttttatgcttctctagtgatgaaattccatcagtgtcggtaaaaatgaaaccgcaaaggtggccagcacctgggttcctgccagccttgaagcccccgtccctccctcccagcaaaccaaccacggcctgcactgtgggtgcctgtcacagagctgatgtcctcgcgggtcatccctcatccccgcatccagacaccgggtcatgtccctgtgcttcctgcccactaactgggaggatgacgcagcggcgccgggagtccagggctgattgggccggcggttcccggagccgagcccgcgaactcacagcatcaccaccactgggagctccttcgcaatgcagattcccggagctccagaccccaggcagaaacgcgcccgcgtccatgctccacgagcccccttggggtgccgatgccctgggttttcgaatctggtctgcaccctccctggtctccaagagaggttgaaactgagactgagtgtgatttaccggagtccggacgtgaaccgagagacggggaggtgttgggggggggcgtcataaagagctccccagtgcagagggggaggcctgggggaacatgggggagacgtgccgggcggcccccgcccccccaggacccccactcactgccggtaggggtcgtggaagggcagcgccagccaggcgccatgcagctcgcgcatgaagtccagcatctcctgggagctgccgtcggctgacacgaagaccacttcgaagggcgcgggccgccgcgcctcggccaccagcgccgtatagaagtcgcagagcagcggcgtgaagtcgcggctcggcgcgcaccgggccgccgcgaagtacagtgccaccaccttgttctgcagcgccgcctcggcctccaccgtcgcgcccttacaggtcaccaggtgccgctcgcccagaatgtcaaccatggcgcagacacgcagccacctgagacccgaggacacctgcaggaggatgatcacctgcggggaggcggcggcgagcgccgcggtgccccgcctctgtccgcaccaccgggcgctggacctctcaagacctgccccagatgcgcccacaccttggccaggcctcgcctgtggctggagcaattgtgttcgcgccgacaatgagacactcagacaccagagaccccagatacctgggcgacagcgcggcacccgcctctgggagcggggccagccaggcaacctcaagccctcaggtctctgcaccctcccccaactgcgccccgcccacactcctgcgccctcccaccactgcgccccgcccacattccccgcaagctccccaactgcgccccgcccacattccgcactctccacccactgcgccccgcccacatcccgcactctccacccactgcgccccgcccacatccccgcccccgcccccactgcgcctcgcccgcatccccacactgtcccccactgcgctgggcccacatccctacactctccacccactgcgccccgcccacatctccgcaccctcccccaccgcaccccgcccacatccccgcactctcctccaactgcgcctcgcccacattccacagtttcccctcactgcgccccgcccacatccccgcactcttctccaactgcgcctcgcccacattccacagtttcccctcactgcgccccgcgcacactcccgctccctcccccactgcgccccgcccacactcccgcgccctccccctcactgcggcccgccgacatcccgcgcccccgcccccatcccgactgcgccccgcccacctcccgcgccctctcccactggttgtccagcccacatcctgcactccctccactgcgccccgctcacactcccgcaccctccccacactgcgccctgcccacactcctgcactctctccccactacgccccctaccacatcccgcgcccccgcccccatccccactgcgccccgcccacactcccgcgccctcgcgcccctgggctctcccgtcgtgggcactctccccagcgcttctacactttctcccgacgcagcgccctgccctccgtcccgccccacctattgcctcctgcgcttcccccacaccgtgctcttcctcctccttcacttcctcccactcctcgcgctccccttcagcgccccacgcagcccctcccccaaaaccccgcgtcgctctccttccctcctggcctctcttccagtctcgcgctccctgccgggccccgccgcaggtgtcccgcagccgtctccccagggcatttgaatcttgccttggagctcttgccgcgcggcccagcaccctggaagaggcatcagggaggatgggacgacgaggaaggggaagggtaattgggcttggagcgggcttgggcggggtggtagggaacctgagctccgttggttcagggtgtttgcccctgacatcctgtggcctggctgggagggttcgtgaagttcaggaagaaattgggagcagtccttacagaatgttttatttgaagaaccaagagtattaattttttggcgagcactgttgtaggccctgggaattcagcagtgagaaaaataatttcaactccctgccagacccgggctagaaggaggcaagcgagcgaggcactcgcataggggcaaaatttaagggcgcgacaaaaaaactcagtagtcaaggtaaataatgttttaatacaatatcttaaaaagtcaaaatgaatgcaaaaaaagtttataatgaacaaaatatcaaaaacttaaagacagtgaatgaaaccaaaatatgccatcctaaaatatgccgctttggtatattgattattttgagcgagaggcacttgaaaaatagcaaatgcagagagacgttctccccttacctgtctaaagacggaacctccaaaagaaactgattgtcgtaaattccctcccgggaggatggactcttatcacagcagaagtccacaccacacctagacaaactttgtcacaaactcataaagacttatgcatctttcctaaaaatcagttactctcccctaagtggcctacaccagcttccagttccccaattttagaagctctcaaagctcactggtttggggggttttcacctagtttcctgcaatgcccccatgcaggtgatattaaagattaataaatgtgtattcccgttccccccgttcatctgcccgttggcagttaatttcatagagccagctatggaactggggaggacagagagaaggtctttgctctcctaagaca

SEQ ID NO: 588645 - DNA, 4001 bp, Homo sapiens
gaccagccatccagggcagcgcttggtgcctagcacacgaaggccggcgcagggggcttccttttccccccgtgccagggcgtgatgatggtggttccactggcttctggaggcagagaccatggggcaggacatgcaggccccagcgggcccctcacccacaagctttcccatgtagcgcaggcccccacggcgctggtctttgcagtaaaagacgtagtcgtccgtcccgggcagctcctgcaggtatatgagcttcctgcccccatctgtagatgacagagaagatgggtcttcagtgccctcattcccggagagagcactcaggaccacacgaagaaacactcaggaatgtttcagtggtcacccaggtgccctggacagcctgagccaggcctggctgctccgcacagcatggacccggacacggaggcaggagcctcctctcggaaggtcccaatgcaagtaatggagccacaaggccagagcacgtccaggactagagtccggccttcccagctccagcagctgctcctgccccacttccctgtccctaaccctcggattcctgatcccaaaccctcagccttggcttcccatccctaaccctcggcctcctggtccctaacactcggattcctcaatgtgtcaatggctagggcctcccagagggcaggcttgatctggtccatctctactgtggacaagcctgtcacacctggtgtctgatgtcagggccaccagccccccaggaaggagaggccagcccctccttggaggtgggcagggctgggaccctggcagaagtgtggcctgggcactctccacctgcagtggggctggtgcatccggggttgggcatggggagtggggggtcggggaggggctcacaggcgctgaatttgccaggctcctccgtcttccgcatcaggattttcttctggatgcaccgatcctccctcctggaaaacaggagacactcgggcagcggctcccaggacacacctggcccatcctcagctcacctggtgcatggccctgacccggcaacctgaaaattccactgcccccccaccccaccgagcttcaggatgtcctggctgtttccctccaaggcagggggtgactcttcccaacacccgaaatgtggatggggcaatgggcaccaggtgggtctggggcggggagcgaaagtggcctgaggggccctgcagtgggcaacactcacatgaaggtgaacgtggcttccaagttcccaccgcccagggctgtcaccttcactggggacaccttcctgggcctcctgtcctccggaaagtccttatcgaccaccatggccttcacgtaccaggtccctgtgatctggagcaggccaaggccgtgagcccaccatgggtggcccagattctactctgaccctggcactcaggcctgcagctataaccagacacccatggtgcccggctgccacccctaaaggcaggctgggttcctgcaccttagttagagctcagctggagtgagttagagccagccccctgctcagggctcccagcccccagtggaaggagggcatgtctgcaccccatggacccccgggccccagcaccaggtgagccctccctccacagggcccaaccctgcgagaccttcgggcttcaggcgtcagtgcagcaggaacccctgagccgagcctgctccggccctgggcctcggggggccgtgtctgctggaggaacaataggacccctccaccaccaccccaggctgggagcacggggtcagaagccagccttcagtgacacctcctaaagcagggcccctggcactgccccctgcccaggagtccacctggctcctccatccgcccacgccaacccagctcacatcctcctcctccagggtgaaggacagggcagcggccaggccgagcgtgacacccaggaacagggtcttcatctccagagctctgtgctgccgacctcggcaggtcactgggcgtctgaacaaggctgtgctggctcctctcgagatgttctttatagccccctggccagtgtcctgggagcacgtggcacggtgcacccctccccatggtggcaaccagtcctgcatccgggagggggagtgtcctcattgctggcatctggtgaacagcaattcagtgccagccagagaagaaaagacacacgatgctgtccagggtttgcatccaaatgcgcccacttggatgagcccggaggactccagaggacagggcagggtagtgcacgtctgcaccccgagccacagagggagggcccacggctcggaattcttcctccctcacccctgagccctcccagggccacggctgggaccctgggcaagtcctctggggaactggccatctccctgctgagcagaaatggactgggctttagaaccatagagacgtggggctgctgccagctgagtcccgcacgccctagagcccaagcttccgcccactctgggacccactctgcattgattttccccacctggaccctgcactcgagcttcctaggggcagagaagggcactattgtgtggttcaaggtcagtatatatacggcctcctcgggccatatgagggaccccgccgcctgccccaccccgcttcactccgtaccggagcctggctgtgctgtcctcagaacacgtgatctctctggattgtcctgcctgtttcttcctgcacgtgttcatcatccatctccctgttaaatacaagtggtagagtggaatatacattcactctacatcccctctctcgtcagcttcgacggcccccagccaccgggacaggccttgaatctcatccctttagataaatgggtggcatgagcatcaagagccacctgccagcctgtgctcagagtttgtggctgagctcccttgggcacctggctccgctggcctcatccccagccaacctgagccagaactttgccttctccctcctggaccctgtagttcccgggcctgcgtcatctgccctgggacccaaggctgacccacgctctgcaggcaggtgctgggcccacacaatctttgtgcctctctggcccaagatcagacaccctcaagtgcttgctaaataatactaatgcacactctaataaaccctgggggctataaagaaagggctggcgtgacccagtgcctcacccctctcacggcaagtgctgccgagcagaaaccccatccttagggcggggactgggctcttcaggaccagagatgagcaaacaggctggagtctctacctcaacgggaagatttctccgttccccatttttgttgcctgtaccccaggcaccttgtatttctttttttttttttttttttttttttgagacggaatctcgctctgtcgcccaggctggagtgcagtggcgggatctcggctcactgcaagctccgcctcccgggttcacgccattctcctgcctcagcctcccaagtagctgggactacaggcgcccgccactacgcccggctaatttttttttgtatttttagtagagacggggtttcaccgttttagccgggatggtctcgatctcctgaccttgtgatccgcccgcctcggcctcccaaagtgctgggattacaggcgtgagccaccgcgcccagccggcaccttgtatttcattggttggttgtgaatcattgatttaagcaccgtatgacactggtgctgctggctcaatccttgaagaaaatgctggaacaacacgcgcagatgcttcagggaacaggtcacccccatgaattctatgctcgctggtacgggtgctctccaggagcctcccattgtccacccatcttgccctgtgtcccagtctcgttcaccaactgtgttcttttagatgctggttgggttcaactgctgcagacaccgtcaggggatggtagggttggaggctgggggtcaacccatggcagacagcaggggcaagatccctggcccccag

SEQ ID NO: 588646 - DNA, 4001 bp, Homo sapiens
gcccccatggtgctggtctttgcagtaaaagatgtagtggtccctcctgggcagctcctgcaggtacatgagcttcctgcccccatctgtagatgacagagaaaatgggtcattcccagagagaacactcggggccacatgaagaaacactcgggaatgtttcagcggtcacccaggtgccctggacagcctgagccaggcctggctgctccgcacagtgtggacccggacacggaggcaggagcctcctctcaggaaggtcccaatgcaagtaatggagccacaaggccagagcacgtccaggactagagtccggccttcccagctccagcagctgctcctgccccacttccctgtccctaaccctcatcttccccctcagcctccccatctctaatcctcagcttccgcagcactaaccctcggcctccccatccctaaccctcggcctcctcatccctaaccctcagcttcccgatccctaacccttggcccccgtccctaaccctcagcctccccatccttaaccctcagcttccccatccttaaccctcagcttccccatccctaaccctcagcctccccgtacctaatccttggcctccttgtcccaatcctcagcttcctcaatgtgtcaatggctagggcctcccagagggcaggcgtgatctggtccatctcgactgcggacaagcctgtcacacccggtgtctgatgtcagggccaccagccccccaggaaggagaggccagcccctccttggaggtgggcagagctggggccctggcaaaagggcagcctgggcactctctacctgtggaggctggtgcactggggttggcggtgggggagggtgggggtgggagtgggggaggggctcacaggcgctgtatttgccaggctcctccgtcttccgcatcaggattttcttctggatgcacctatcctccctcctggaaaacaggagacacgcgggcagcggctcccaggacacccatggcccatcctcagctcacctggtgcatggccctgacccggcaacctgaaaattccactgccccccaccccaccgagcttcaggatgcccaggctgtttccctccaaggcagggggtgactcttcccaacacccgaaacgtggatggggcaatgggcaccaggtggatctggggaggggagcgaaagtggcctgaggggccctgcagtgggcaacactcacatgaaggtgaacgtggcttccaacttcccaccgcccagggctgtcaccttcactggggacaccttcctgggcctcctgtcctccggaaagtccttatcgaccaccatggccttcacgtaccaggtccctgtgatctggagcaggccaaggccgtgagcccaccatgggtggcccagattctactctgaccctggcactcaggcctgcagctataaccagacacccatggtgcccggctgctgcccttaaaggcaggctgtgttcctgcaccttagttagagctcagctggagtgagttagagccagccccctgctcagggctcccagcccccagtggaaggagggcatgtctgcaccccatggacccccgggccccagcaccaggtgagccctccctccacagggcccaaccctgcgagaccttcgggcttcaggcgtcagtgcagcaggaacccctgagacgagcctgctccggccctgggcctcggggggccgtgtctgctggaggaacaataggacccctccaccaccaccccaggctgggagcacggggtcagaagccagccttcagtgacacctcctaaagcagggcccctggcactgccccctgcccaggagtccgcctggctcctccatccgcccacgccaacccagctcacatcctcctcctccagggtgaaggacagggcagcggccaggccgagcgtgacacccaggaacagggtcttcatctccagagctctgtgctgccgacctcggcaggtcactgggcgtctgaacaaggctgtgctggctcctctcgagatgttctttatagccccctggccagtgtcctgggagcacgtggcacggtgcacccctccccatggtggcaaccagtcctgcatccgggagggggagtgtcctcattgctggcatctggtgaacagcaagtcagtgccagccagagaagaaaagacacacgatgccatccagagtttgcaccacccgaacgcgcccactcagatgagcccagaggactcgagaggacagggcagggtggtgtccatctgcaccccaagccacagaggcagggcccacagcctcgggatactccctcaccaacccctgcaccctcccagggccacggctgggaccctgggcaagtcctctggggaactggccatctccctgctgagcagaaatggactgggctttagaaccagagagacgtggggctgctgccagctgagtcccgcacgccctagagcccaagcttccgcccactctgggacccactctgcattgattttccccacctggaccctgcactcgagcttcctaggggcagaggagggcactattgtgtggctcagggtcagtttatatacggcctcctcgggccatatgagggaccccgccgcctccccgaccccgcttcactccgtaccggagcctggctgtgctgtcctcagaacacgcgatctctctggattgtcctgtccatttcttcctgcacgtattcatcgaccatctccctgttagaatatacattcccctctctcgtcagctttgacggcccccagcccccaggacaggccttgaatctcatccctttagataaacaagtcgcatgaggcaccaagagtcacctgccagcctgtgctcagagttcgtggctgaggtcccttgggcacctggctctgctggcctcatccccagccaacctgagccagaactttgccttctccctcccggaccctgcatttcccaggtgtgtgtcatcttccctgggacccaaggctgacccacgctctgcaggcaggtgctggacccacacaatggcatctttgtgcctctctggcccaagatcagacactctcaagtacttactcaataatactaatgcacactctaataaaccctggggctgtaacgaacgggctggtgtgacccagtccctcacccctcccacggcaagtgctgccgagcagaaaccccccaccctcatccccccgggcaggaaagaatggggcctgggctcttcaggaccagagatgagcaaacaggctggagtctctacatcaacgggaaggtttctctgttctctgtgtttgttgactgtaccccaggcacctcgtatttcattggttgtttgtgaatcattgatctaagcaccttacaacactggtgctgctggctcaatccttgaagaaaatgctggaacgacatgcacagatgcttcagagaacagggctctcccatgaggtccacgctcagtgcgacgggtgctctccaggagtctcccatcatccacccatcttgccctgtgtcccagtctcattcgccaactgtgtccttttagatactggttgggttcaactggtgcagacaccgtcaggagatggtagggctggaggttgggggtcaacccatggcagacatgaggggtgagatctctggcccccagtgctttgtggcctggggcacttctctggatggctgtgttccttctgatggtggctcctgttgggctgccgctaccacacaactttctctctcaccacttccctcacgacccttttctttgaatctcacagtgatcacagcttttcagggctgctaattcctaggtgcttcactgaagtggacagtgtctgggctttactcgacacctgggcataagaaggtttagatggcaccaccaaacaagcacctagaccagagcatgtgctggctgggactgaggcacgccaagaaggagcagagtgggagcttacgatgaatctcagttaaggctgcaa

SEQ ID NO: 588647 - DNA, 4001 bp, Homo sapiens
tggtatgcgttttgctgtatatgtattacatcgtgattttaaaaagaggggaaaaaaaaaaaatatatatatatatatagacctctactgatcctttagccaaggaataccaaaactgagaagacaggcttttttccctaatcatttagaacattgttcacgtaaagccaatagctttgggaaatctctcagtgggtttcttgtcaaaccacctggattccattatcttgctaactgccacatccacctcctacgtgttatttatttacacctcgactcccttcaaaaaggctctgaacctagtactctattatataaagacaacaagagtgaccctgtttgcttccaggaagctgtgacatctggggagggaaggagcgagggaggtagagctaggattgtgtatacatttcgttcccccttccctttaaaaacgatttttaaacgttttggtccagactttcagcaaacacaatgaggaagctggaagcctcaggcgagcctgccctggggacccctggccacctttccctgccctccggcgcaggcgcctcccacatcggcaatacctgggggagccgcctgaggatgaggcagacatggctaggcatcaaagccgcaaaggtgggcaattgggtcagcaggctctgctcagggggacccagaggggcaggcttgtcaatgagcctctcaaggggcccggcatcaaacgtcctctctgaggggagaagggtggaagctttggggttggcagttggatgaaaacttgggaggcgctcctctactgtccaagtcgcacagcaactgtcctgccaaagtagggggaaatagtagaggctgagcgacctgggggcagaggggaggaaggggaggggacggggcagaaccgcgagggaaaggaccaccgcgcccgggtcccacgcggaggactgccggtggctaccgggggaaacctgaggcgccggcggacgtgcggagagggcgggtgagaaccgctcggccccaagtgggccccagagggccagaaccgcgcagggagccgcggggatgctggggcggggccggacaactgtctcctaggagaaggggcgttacggaagaacagatgcccgagaggaccaatagtgtttaaaggagggaggcgcggaggttgcacgggccccgggcgccccgccgcgagggaaaaccgaacagagttctgagcaggatagacgccgggctgggagggggcgggcgggacccccccccgccgggcgagggccctggcaagccggagacggtgcccgggggacagcgctgcctacggagggcgtacaagtgactgccatgtggaggcccgaggagaggacgaggcggtcggggcgatgccgccgacgggcagcagagcgagggagagcctctgtcggcggagagaagggacggccacccaccagcaggcaggagggtaccggtttctgcccatagagagaaaggtgaagccctgcccgcgggcggcagaggaggggcagagccccgtggtagccaagagaggaaggaggcggccgaccgcccgttagcgggaggaggagaggccccgcgccggtgggcggggcgggggcccaggttctgacaggagggggacgagcgcaacgcggcggggaacccaggacccgacggccccgcggggtcgaccgcgccgggggtgcgaaggcgacggtctcgcccgcggtgccccggagggcgctggatcccgcctgccggcggcctctcaccaggagcgacacggctgcgcccagaaacgccgccttatgaagtcgttgaagtcggaggccagggtcgtgccatggagacgccgcggcggatgcagtctggctctggcagcggctcctccccgcttccgcctccttttccgacacccggtcggcagctcgcccattggccagttcaaacccccccgggagccgcttgggtttcgccatcgaggcccagcccctagcgtcacagagatgccccgccccgccagaagggccgcccacttccgggccacgcgtcccgtcaccaaggagacgtgctacgcgtccagcgggcctggccgggtctcgccccccattcaaggcctttcccgctcggccctgtttcccctgccttggatcctcccggattcccctcactcaaaggagcgtacggttccgacgccctcccctcggtacccaccaggaaactaggctcacagaggacccatggaactagttattgggagctgcacactgcctccgaaaatccagccctgcccctagtccactattaatgcggagatggagtcggcttctgcgcattccccggcctctcccctgcccacatcgcctctgtcttggccccaacaggagaaagggtcggcattccccttgctgttctgttcactaccttcctgcacttttttttttttttttttttttttttttttttttttttttgagacagattcttgctctgttgcccaggctggagtgcagtggcgcgatctcggctcaccgcaacctccgcctcccgggttcacgccattctcctgcctgagcctcccgagtaactgggactactggcgcccgccacaacgcccggctaatttttttttgtatttttagtagagacggggtttcaccgtgttgggcaggatagtctccatctcctgacctcatgatccacccgcctcggccttccaaagtgcttgtattacaggcttgagcctccgcgcccggtctactaccctcctgcactctctatgccgctctgtgtacagacctattctgatgaggtccttgctggtccgccatcttctcaattatgcttcactgtcagccagtcaggggaggtctgtcacgtggctcataatgccgccctggaatctgggagacctgaaccacctccgggccaactgggccacagtcccttgacctttctccagtgaccccgcagcaccttagccacacagctccagggtcacacaagtgtttcacctgcaatcctaaagtcagactcgcaaacaaaacctgcttttccgcctcgctttcacagtatactgcatactgaatttgttctgtaatgtcagggagctccccaatcccttgatccattcattgtctctctgttgaataattgatagatttcctaatcctcattaaccatttaagactgcggtggctcacgcctgtagtcccagcactttgggaggctgaggcaggcggatcacctaaggtcagaagttcaagaccagactgcccaacatagcgaaaccccgtctctactaaaaatacaaaaattaaccgggcatggtggtgtgtgcctgtaatcccagctactagggaggaggaggcagggagaattccttgaacctggaaggcggaggttgcagtgagccaaaatcaccactacacttcagcctgggtgacagagtgagactcttgtctcaaaaaaaaaaaaaaaaaaaaaaaagtatatacaggttcaaggaaaagaggacaggaaaaggaggtcccggtcctcctggggcaggcaggagatggttcccagaggtgatggtattggaactgagccatgaaaggtgagtggaagttcgccaaacaagcagcaaagggaattctaaacagactgcagtaggtacacaggtaccacatgcaggtacaagagaatactgcatattctatgaagcatcatcactgcagtcccttgaagtgttacagggccagcgatgagagaaatcctgccaaagtcagcaggaccagactatgcagcgtctgataggccagcctaaggtgttggacttcatccctcagaagcctggaaaaccatgagagggttttcagtatttcactctaggctgggcgctgtggctcacacctgtaatcccagcactttgggaggccgaggcaggttgatcacttgaggtcaagaatttgagaccagcctggccaacgtggtgaaaccccgtctctactaaaagtacaaaaattagctgggcgtggcag

SEQ ID NO: 588648 - DNA, 4001 bp, Homo sapiens
aacctctgcctcctggcttcaagcaattctccaattctcctgccccaggctcctgagtagctgggattacaggcgtgtgccaccatgcccagctaattttttatgtttctagtaaagacggggtttcaccatgttggtcaggctggtctcaaactcctgacctcaggtgatccacccaccttggcctctcaaagtgctaggattgcacaggcatgagccaccgcacctggccccccaaagtggggggagatcagagaggctggagcgaccagggggtggcagggagggtggggcagagacagggaggtccaaaattatcatcttgccctctttacaaacacttggggaaaataatgcaacatcaaaatgcaaggaaaaaaatacttgagcactttggtatgcgttttgctgtatatgtattacatcgtgattttaaaaagaggggaaaaaaaaaaaatatatatatatatatagacctctactgatcctttagccaaggaataccaaaactgagaagacaggcttttttccctaatcatttagaacattgttcacgtaaagccaatagctttgggaaatctctcagtgggtttcttgtcaaaccacctggattccattatcttgctaactgccacatccacctcctacgtgttatttatttacacctcgactcccttcaaaaaggctctgaacctagtactctattatataaagacaacaagagtgaccctgtttgcttccaggaagctgtgacatctggggagggaaggagcgagggaggtagagctaggattgtgtatacatttcgttcccccttccctttaaaaacgatttttaaacgttttggtccagactttcagcaaacacaatgaggaagctggaagcctcaggcgagcctgccctggggacccctggccacctttccctgccctccggcgcaggcgcctcccacatcggcaatacctgggggagccgcctgaggatgaggcagacatggctaggcatcaaagccgcaaaggtgggcaattgggtcagcaggctctgctcagggggacccagaggggcaggcttgtcaatgagcctctcaaggggcccggcatcaaacgtcctctctgaggggagaagggtggaagctttggggttggcagttggatgaaaacttgggaggcgctcctctactgtccaagtcgcacagcaactgtcctgccaaagtagggggaaatagtagaggctgagcgacctgggggcagaggggaggaaggggaggggacggggcagaaccgcgagggaaaggaccaccgcgcccgggtcccacgcggaggactgccggtggctaccgggggaaacctgaggcgccggcggacgtgcggagagggcgggtgagaaccgctcggccccaagtgggccccagagggccagaaccgcgcagggagccgcggggatgctggggcggggccggacaactgtctcctaggagaaggggcgttacggaagaacagatgcccgagaggaccaatagtgtttaaaggagggaggcgcggaggttgcacgggccccgggcgccccgccgcgagggaaaaccgaacagagttctgagcaggatagacgccgggctgggagggggcgggcgggacccccccccgccgggcgagggccctggcaagccggagacggtgcccgggggacagcgctgcctacggagggcgtacaagtgactgccatgtggaggcccgaggagaggacgaggcggtcggggcgatgccgccgacgggcagcagagcgagggagagcctctgtcggcggagagaagggacggccacccaccagcaggcaggagggtaccggtttctgcccatagagagaaaggtgaagccctgcccgcgggcggcagaggaggggcagagccccgtggtagccaagagaggaaggaggcggccgaccgcccgttagcgggaggaggagaggccccgcgccggtgggcggggcgggggcccaggttctgacaggagggggacgagcgcaacgcggcggggaacccaggacccgacggccccgcggggtcgaccgcgccgggggtgcgaaggcgacggtctcgcccgcggtgccccggagggcgctggatcccgcctgccggcggcctctcaccaggagcgacacggctgcgcccagaaacgccgccttatgaagtcgttgaagtcggaggccagggtcgtgccatggagacgccgcggcggatgcagtctggctctggcagcggctcctccccgcttccgcctccttttccgacacccggtcggcagctcgcccattggccagttcaaacccccccgggagccgcttgggtttcgccatcgaggcccagcccctagcgtcacagagatgccccgccccgccagaagggccgcccacttccgggccacgcgtcccgtcaccaaggagacgtgctacgcgtccagcgggcctggccgggtctcgccccccattcaaggcctttcccgctcggccctgtttcccctgccttggatcctcccggattcccctcactcaaaggagcgtacggttccgacgccctcccctcggtacccaccaggaaactaggctcacagaggacccatggaactagttattgggagctgcacactgcctccgaaaatccagccctgcccctagtccactattaatgcggagatggagtcggcttctgcgcattccccggcctctcccctgcccacatcgcctctgtcttggccccaacaggagaaagggtcggcattccccttgctgttctgttcactaccttcctgcacttttttttttttttttttttttttttttttttttttttttgagacagattcttgctctgttgcccaggctggagtgcagtggcgcgatctcggctcaccgcaacctccgcctcccgggttcacgccattctcctgcctgagcctcccgagtaactgggactactggcgcccgccacaacgcccggctaatttttttttgtatttttagtagagacggggtttcaccgtgttgggcaggatagtctccatctcctgacctcatgatccacccgcctcggccttccaaagtgcttgtattacaggcttgagcctccgcgcccggtctactaccctcctgcactctctatgccgctctgtgtacagacctattctgatgaggtccttgctggtccgccatcttctcaattatgcttcactgtcagccagtcaggggaggtctgtcacgtggctcataatgccgccctggaatctgggagacctgaaccacctccgggccaactgggccacagtcccttgacctttctccagtgaccccgcagcaccttagccacacagctccagggtcacacaagtgtttcacctgcaatcctaaagtcagactcgcaaacaaaacctgcttttccgcctcgctttcacagtatactgcatactgaatttgttctgtaatgtcagggagctccccaatcccttgatccattcattgtctctctgttgaataattgatagatttcctaatcctcattaaccatttaagactgcggtggctcacgcctgtagtcccagcactttgggaggctgaggcaggcggatcacctaaggtcagaagttcaagaccagactgcccaacatagcgaaaccccgtctctactaaaaatacaaaaattaaccgggcatggtggtgtgtgcctgtaatcccagctactagggaggaggaggcagggagaattccttgaacctggaaggcggaggttgcagtgagccaaaatcaccactacacttcagcctgggtgacagagtgagactcttgtctcaaaaaaaaaaaaaaaaaaaaaaaagtatatacaggttcaaggaaaagaggacaggaaaaggaggtcccggtcctcctggggcaggcaggagatggttcccagaggtgatggtattggaactgagccatgaaaggtgagtggaagttcgccaaacaagcagcaa

SEQ ID NO: 588649 - DNA, 4001 bp, Homo sapiens
ggcagaggggaggaaggggaggggacggggcagaaccgcgagggaaaggaccaccgcgcccgggtcccacgcggaggactgccggtggctaccgggggaaacctgaggcgccggcggacgtgcggagagggcgggtgagaaccgctcggccccaagtgggccccagagggccagaaccgcgcagggagccgcggggatgctggggcggggccggacaactgtctcctaggagaaggggcgttacggaagaacagatgcccgagaggaccaatagtgtttaaaggagggaggcgcggaggttgcacgggccccgggcgccccgccgcgagggaaaaccgaacagagttctgagcaggatagacgccgggctgggagggggcgggcgggacccccccccgccgggcgagggccctggcaagccggagacggtgcccgggggacagcgctgcctacggagggcgtacaagtgactgccatgtggaggcccgaggagaggacgaggcggtcggggcgatgccgccgacgggcagcagagcgagggagagcctctgtcggcggagagaagggacggccacccaccagcaggcaggagggtaccggtttctgcccatagagagaaaggtgaagccctgcccgcgggcggcagaggaggggcagagccccgtggtagccaagagaggaaggaggcggccgaccgcccgttagcgggaggaggagaggccccgcgccggtgggcggggcgggggcccaggttctgacaggagggggacgagcgcaacgcggcggggaacccaggacccgacggccccgcggggtcgaccgcgccgggggtgcgaaggcgacggtctcgcccgcggtgccccggagggcgctggatcccgcctgccggcggcctctcaccaggagcgacacggctgcgcccagaaacgccgccttatgaagtcgttgaagtcggaggccagggtcgtgccatggagacgccgcggcggatgcagtctggctctggcagcggctcctccccgcttccgcctccttttccgacacccggtcggcagctcgcccattggccagttcaaacccccccgggagccgcttgggtttcgccatcgaggcccagcccctagcgtcacagagatgccccgccccgccagaagggccgcccacttccgggccacgcgtcccgtcaccaaggagacgtgctacgcgtccagcgggcctggccgggtctcgccccccattcaaggcctttcccgctcggccctgtttcccctgccttggatcctcccggattcccctcactcaaaggagcgtacggttccgacgccctcccctcggtacccaccaggaaactaggctcacagaggacccatggaactagttattgggagctgcacactgcctccgaaaatccagccctgcccctagtccactattaatgcggagatggagtcggcttctgcgcattccccggcctctcccctgcccacatcgcctctgtcttggccccaacaggagaaagggtcggcattccccttgctgttctgttcactaccttcctgcacttttttttttttttttttttttttttttttttttttttttgagacagattcttgctctgttgcccaggctggagtgcagtggcgcgatctcggctcaccgcaacctccgcctcccgggttcacgccattctcctgcctgagcctcccgagtaactgggactactggcgcccgccacaacgcccggctaatttttttttgtatttttagtagagacggggtttcaccgtgttgggcaggatagtctccatctcctgacctcatgatccacccgcctcggccttccaaagtgcttgtattacaggcttgagcctccgcgcccggtctactaccctcctgcactctctatgccgctctgtgtacagacctattctgatgaggtccttgctggtccgccatcttctcaattatgcttcactgtcagccagtcaggggaggtctgtcacgtggctcataatgccgccctggaatctgggagacctgaaccacctccgggccaactgggccacagtcccttgacctttctccagtgaccccgcagcaccttagccacacagctccagggtcacacaagtgtttcacctgcaatcctaaagtcagactcgcaaacaaaacctgcttttccgcctcgctttcacagtatactgcatactgaatttgttctgtaatgtcagggagctccccaatcccttgatccattcattgtctctctgttgaataattgatagatttcctaatcctcattaaccatttaagactgcggtggctcacgcctgtagtcccagcactttgggaggctgaggcaggcggatcacctaaggtcagaagttcaagaccagactgcccaacatagcgaaaccccgtctctactaaaaatacaaaaattaaccgggcatggtggtgtgtgcctgtaatcccagctactagggaggaggaggcagggagaattccttgaacctggaaggcggaggttgcagtgagccaaaatcaccactacacttcagcctgggtgacagagtgagactcttgtctcaaaaaaaaaaaaaaaaaaaaaaaagtatatacaggttcaaggaaaagaggacaggaaaaggaggtcccggtcctcctggggcaggcaggagatggttcccagaggtgatggtattggaactgagccatgaaaggtgagtggaagttcgccaaacaagcagcaaagggaattctaaacagactgcagtaggtacacaggtaccacatgcaggtacaagagaatactgcatattctatgaagcatcatcactgcagtcccttgaagtgttacagggccagcgatgagagaaatcctgccaaagtcagcaggaccagactatgcagcgtctgataggccagcctaaggtgttggacttcatccctcagaagcctggaaaaccatgagagggttttcagtatttcactctaggctgggcgctgtggctcacacctgtaatcccagcactttgggaggccgaggcaggttgatcacttgaggtcaagaatttgagaccagcctggccaacgtggtgaaaccccgtctctactaaaagtacaaaaattagctgggcgtggcagccggcgactatagtcccagctactcaggaggctgaggcaggagaatcacttaaacccaggaggtagaggttacagtgagccaagattgcaccactgcactccagcctgggcgacagagcgcgacgccatctcaaaaaaaaaaaaaaaaaatagtggccaagcgcaaagtggctcaagcctgtaataccagcactttgagaggttgaggcaggcagatcacctgaggtcaggagttccagaccagcctggcagacatgtggaaacctcatctctactaaaaatacaaaaattatccgggcgtggtggtgcatgcctgtaatcccagctactcaggaggctgaggcatgagaattgcatgaacctggaaggcagaggttgccatgagccaagattgcaacactgcactccaccctggaggatagagcgagactccatctccaaaaatgtggagcatggattggaaagacaagaaagcatgtagagagaggaggcctttgcaatattaactgtaaacaaaatttgggggtcaggggtggcagacgtggtggctcatgcctgtaatcccagcactttgggagactgaggtgggaggattacctgagctcaggagtttgagagcagcctgagcaacatggggaggcccaatctcttaaaaaaaaaaaaggcggggggctgggcacggtgtctcacgtctgtaatcccagcactttgggaggccgaggcaggcagatgacttgaggtcaggagttccagaccagcctggccaatgggcgaaaccccatctctactaaaaatacaaaaaaattagccaggcatggtggcgggcacctgtaatcccagctactcgggag

SEQ ID NO: 588650 - DNA, 4001 bp, Homo sapiens
acgccactgcactccagcctaggtggcagagggagaccccgtttcaaaacaacaacaaaaaagaaaaaaaaattttttcaaagagcattaggctcaggcacgagaggtcactgtgacgcacactcatcaaattaaggctcaaatattcccctaagagaataaaaaagtatctagttcccaaaatattccacttgctatcctttaagctctcaagcagcaggggatttttttttaatgccatgtctaattcaccttgcttacacatatactgtacagctccatcaccagatctgcaaagacagccaaataaaaaaaaaaaaaagagagagagcaaaagtctatttgctccaaaatctttcagcagtatatccaaaaagtccaggatgggaagggccttggaataaccatctgatccatctcctggccttttttttttttttttttttgagatagagtctcgctctgtcgcccaggctggagtgcagtggcccaatcttggcttactgcaacctctgcctcctggcttcaagcaattctccaattctcctgccccaggctcctgagtagctgggattacaggcgtgtgccaccatgcccagctaattttttatgtttctagtaaagacggggtttcaccatgttggtcaggctggtctcaaactcctgacctcaggtgatccacccaccttggcctctcaaagtgctaggattgcacaggcatgagccaccgcacctggccccccaaagtggggggagatcagagaggctggagcgaccagggggtggcagggagggtggggcagagacagggaggtccaaaattatcatcttgccctctttacaaacacttggggaaaataatgcaacatcaaaatgcaaggaaaaaaatacttgagcactttggtatgcgttttgctgtatatgtattacatcgtgattttaaaaagaggggaaaaaaaaaaaatatatatatatatatagacctctactgatcctttagccaaggaataccaaaactgagaagacaggcttttttccctaatcatttagaacattgttcacgtaaagccaatagctttgggaaatctctcagtgggtttcttgtcaaaccacctggattccattatcttgctaactgccacatccacctcctacgtgttatttatttacacctcgactcccttcaaaaaggctctgaacctagtactctattatataaagacaacaagagtgaccctgtttgcttccaggaagctgtgacatctggggagggaaggagcgagggaggtagagctaggattgtgtatacatttcgttcccccttccctttaaaaacgatttttaaacgttttggtccagactttcagcaaacacaatgaggaagctggaagcctcaggcgagcctgccctggggacccctggccacctttccctgccctccggcgcaggcgcctcccacatcggcaatacctgggggagccgcctgaggatgaggcagacatggctaggcatcaaagccgcaaaggtgggcaattgggtcagcaggctctgctcagggggacccagaggggcaggcttgtcaatgagcctctcaaggggcccggcatcaaacgtcctctctgaggggagaagggtggaagctttggggttggcagttggatgaaaacttgggaggcgctcctctactgtccaagtcgcacagcaactgtcctgccaaagtagggggaaatagtagaggctgagcgacctgggggcagaggggaggaaggggaggggacggggcagaaccgcgagggaaaggaccaccgcgcccgggtcccacgcggaggactgccggtggctaccgggggaaacctgaggcgccggcggacgtgcggagagggcgggtgagaaccgctcggccccaagtgggccccagagggccagaaccgcgcagggagccgcggggatgctggggcggggccggacaactgtctcctaggagaaggggcgttacggaagaacagatgcccgagaggaccaatagtgtttaaaggagggaggcgcggaggttgcacgggccccgggcgccccgccgcgagggaaaaccgaacagagttctgagcaggatagacgccgggctgggagggggcgggcgggacccccccccgccgggcgagggccctggcaagccggagacggtgcccgggggacagcgctgcctacggagggcgtacaagtgactgccatgtggaggcccgaggagaggacgaggcggtcggggcgatgccgccgacgggcagcagagcgagggagagcctctgtcggcggagagaagggacggccacccaccagcaggcaggagggtaccggtttctgcccatagagagaaaggtgaagccctgcccgcgggcggcagaggaggggcagagccccgtggtagccaagagaggaaggaggcggccgaccgcccgttagcgggaggaggagaggccccgcgccggtgggcggggcgggggcccaggttctgacaggagggggacgagcgcaacgcggcggggaacccaggacccgacggccccgcggggtcgaccgcgccgggggtgcgaaggcgacggtctcgcccgcggtgccccggagggcgctggatcccgcctgccggcggcctctcaccaggagcgacacggctgcgcccagaaacgccgccttatgaagtcgttgaagtcggaggccagggtcgtgccatggagacgccgcggcggatgcagtctggctctggcagcggctcctccccgcttccgcctccttttccgacacccggtcggcagctcgcccattggccagttcaaacccccccgggagccgcttgggtttcgccatcgaggcccagcccctagcgtcacagagatgccccgccccgccagaagggccgcccacttccgggccacgcgtcccgtcaccaaggagacgtgctacgcgtccagcgggcctggccgggtctcgccccccattcaaggcctttcccgctcggccctgtttcccctgccttggatcctcccggattcccctcactcaaaggagcgtacggttccgacgccctcccctcggtacccaccaggaaactaggctcacagaggacccatggaactagttattgggagctgcacactgcctccgaaaatccagccctgcccctagtccactattaatgcggagatggagtcggcttctgcgcattccccggcctctcccctgcccacatcgcctctgtcttggccccaacaggagaaagggtcggcattccccttgctgttctgttcactaccttcctgcacttttttttttttttttttttttttttttttttttttttttgagacagattcttgctctgttgcccaggctggagtgcagtggcgcgatctcggctcaccgcaacctccgcctcccgggttcacgccattctcctgcctgagcctcccgagtaactgggactactggcgcccgccacaacgcccggctaatttttttttgtatttttagtagagacggggtttcaccgtgttgggcaggatagtctccatctcctgacctcatgatccacccgcctcggccttccaaagtgcttgtattacaggcttgagcctccgcgcccggtctactaccctcctgcactctctatgccgctctgtgtacagacctattctgatgaggtccttgctggtccgccatcttctcaattatgcttcactgtcagccagtcaggggaggtctgtcacgtggctcataatgccgccctggaatctgggagacctgaaccacctccgggccaactgggccacagtcccttgacctttctccagtgaccccgcagcaccttagccacacagctccagggtcacacaagtgtttcacctgcaatcctaaagtcagactcgcaaacaaaacctgcttttccgcctcgctttcacagtatactgcatactgaatttgttctgtaatgtcagggagctccccaatcc

SEQ ID NO: 588651 - DNA, 4001 bp, Homo sapiens
taccaattgatagagggtctaaactgttaaaattgatttaaaaagaaagtcctatattgactaggttttcagtttttggtactgtatgtagatggcatatataaattattgtggaatgctattgatatcaaaataaccagtactcttctatgtattttcttcaaattgttttctataataataaccttaagctgataattcatctttatttctccaaatacacatttccgctaatttatttttgaggcaacacaacattgcaagtatagggcattgtgtaacattacttaatatataaattgcaactggtgagggatcatcttaaagtctagttttctttaagttttattttttggttactatagatactgtttggttaccatagataccatttattaatttggaaagcatacatactctaaaaatacaatcttagggacaattattatgaattcgtttgaatcatttaaagtgattttcccttccccttaccttatcagacacattcaggaaaagcaaaaacatgcatttaaatgggcagtattttagaagctaaatttagaatagaaataaagtaccttaatattttttccatccaggtatttatcctcataatcttggctaaatatggattcttcaaaattatctgttccataatcatagataatgcgtgagtcctgctgggttggtggtgctggctttatcagaggcacaagcagtaacaggagaagtgtagactgcagagtcttcattttagcaaaaatcaaggtgactggaagttaataaactagtggcctgctgactgtgggacaaaactctctttttccctggaaataaaaattcagaccatcgaagcaatatttaaaagcttagaggatgttttggcagggtgtgcgcagtaagggccagagaacagtatttaacccttagtgatctttaattagatgctagcagtttttatgtatcagtgaacattctgaaaaatagttttggaaaatagttttacttctctatcagaaattcaagaaagattgataattttaagtttcttaataattaagtgccttcagcagacatactaatatttaattgaaatattcttaggatacctgtagtataaatagttaaaataaagtcccaagatcctgtctcatgtgagttaaaaatatcatatttccacttagctactttataagaactcttgatttatattggtatgaacagaaacaagttccaagaaaagttttaaaacttaaatttaacattatgaaaagtagtcattaacacctttaggtggtacagaatataggaaaagccatacgtttttaattttcttagttttgtaattttaataggtgatcataatttttagttaatagtattgtatttttaatttaagctaagaaaactgaaagaatagtattgcaggctagaggaaataccgaactttaatcaaagaactttgaggaatgtaatagaaaggattcctttaggctcatcaatggattttctctggtgggtacacatttcagactttttcttaagtaacttcaaacagaatcactcaagagttgctgatgctgcattatagatgccagtttgtcaaaaatccagaggttgaaaatgaagaagataatggatttgtgacttctgcagcaccctattcttgcctgcgtggatgttaaatttatgcgatgatatacataagtacttcttaaaaattaattgaggtaactgaaacttaaaccagagatggcctttacatttattaagactattagatgagtcagtcgcactttaacaaacaatatttaaaataatatatgaaaagtaagcctaccgttgtagctgttttgaagttttttgtggttttcctcaatagatgttcatgtctgtgcattagccccaagtgggagggtgaatgagaaaagctatgtcttgatttcaaactgctgagtaaaatttcagggcccagcagctttaagaacagtttccatgtggtagagatctttgccagcattctttctctagggtgaaatgcagtgtgttgtactagagaactgtgcttaagttatttgttgtaactgctgcactcagtctgcttcaactaatttgactataaacttgtgtgattttattattgtgtaataaacattcatgttttggtgaatattagtttatgaaaaatgatatagttttaaagtcatccttttcattttggtgatttcccaggagatcaaacaatctgctttttgaatgaaataggacaccaaatgacaacatagtccatgttgttaattttatgaggattaaaaatattgccctaataccataattaatatatagccagtgtaatatatttttccagtgtaaaaattagttttagcacaaattatttgatagttttgtcatttggattttttctcccctttattttagttacatataagaaaaactgatgcataaaaattagctttttaaaagtaaatttgatttatagtttttgaggttgatagtaaaagatacttttgtttgctgaatgaaggaaactttataaaattactttaatattgaaattggcttttaaaaattaaagtggcattgtagataccatacaagcaactttgaagatttttttaaagagtcacttttaaaaaattcctccttggtgcttttaccaatcaaattaacttttctcctttaagctaaaaatttaacaaatatggatatatattttattaaaatagaaaatgaaagaataacaatttgttttcttttctagacaaaattgttttagaacctttcaaatcaaagcttaaataaactaagacttgagcactgaagtttttatttgaatgtgaattatcttaaatttaattgtgatattgtctggcttgagttgatataaattgttggttttatggcttcaaggatacagtaaaacttttttaaatactttgaaatatataataatgaaacaacagacattgatttgttttgtattgtgtggcaagttaacaagatattgagaagtaagctggatagataccatatgtccaaatttagagaatcttagagattcatagtttcattaatggtacactttgatgctttgtactacagaaaattattttgtgaagaacaactttccttgaaaagttatgaccagtgaatacaatgttattagcattcactcatttaataaaagtttattgagcgccaattctgtgccaggacttcagacacgtaagctcagataagcaaacttcagtttcttccctcaaggaagatttatagcctctaagtcagcaggaaaagcagcaaacaagcaactagaatccatggtagggcttgctacacagaaatatgcagagttctgtgataacctgggagaagccacaaactgactgggagtcaaggagactgcacccaaactgacttctatagagaggataggagaggagggtaagcgcaggtgatgaggtattctaggcaaggggatcatcacgtgctccccttagggaggggatgggggtagatcattcagaaaatttataatttgttttgcatactgctggagcttggagggagagagagaagaagtcagggggatggaccatattaagagatgcgactagacagggggaatagaggttggattaaagaaagtattttatatcctgctaaagtatttgggctttagtctgtagtcagtgagagaccatgtagagatttttaagccagtgatggcttaaatatgatcctgtttgcattttagaaacattcctctaatgttgcattgctgaagaataccactgttcatctattgtagtggttatctattactgtgtaaaaaactaccacaaaggaatggcttagttaaaataacacacatttattatctcacagtttctgtgggtcaggaatttggcgtgtctttgcttgatggtctgcttcaggatctgcatttgaagtgcatctggcactgcagcctcacttca

SEQ ID NO: 588652 - DNA, 4001 bp, Homo sapiens
gcccagagctgtgatgaaccccgagctacagcaacctcccagccggcagcgtggcacagaccgacccgagaaaacactaggtttccagctccttgtgggctccccccacgagccatttggtggaggtcgccaaattgctggtgacatgctgtgcaggggtcacccccaacctcagtcctgaggtttgcccaaagatcaccaaagaaaccggagctgcccatgtctggtctaaccttgcagcccagccctgccaggtaccggggcgggcactcctgagcctacacagctccatcctgctgctggccctactgtctctgagcacgctcccctccggtggcatcaggtcatctctctgctatttttagcatgaagatggggaggagaagttgggcgggtagaatctatagtagtcatatctttaatctcattcattcccaaccccagaagatcgggaccggcaggccggaacaaagtcatcatggaggaatcgccctccgattcctgaaggagcagggagggcggcctcaagaggggtcttaggagggagccacaccacggagccctcttcgcagggcactaaacccctggcagcaaaaagagagagggagggagactcacgtccttcacctctcctttcagcctaaagggccagtggtctggggcgcgccttcccggcagcggccccttccccgcgcggccctccgggtggcggtttcagctcagcctcgctcagccatctaagtcagctctgcccagaagcagccccggccacggttcccctcccgctaggctcgagagggagacgcgatttcaatttcagaggccaggagggaggggtgcgcgcagaagacgaaggcaaaggcgagggggtgagcgcccaagggcaggctcccaggggccccacccaagcccctcggcaccgtcctcggaggagaaggaacaaaccctcctatggactggggaggaaagggcgccttgggactttgggaatgcaggcgcgggcaggagctccggagcccaccggctggggccccactcccagcccggtccggccagtctggcttttacaaactagggcgggctcagtccccgctggaccgagcccagactagggtctagcggcggctccacccctcactcgctgagtgtgaccttggacaagtccccaagtccccagccttagtttcctaaccttttcaatggggggctcatgattactgacccaggactccaagcctccgagaacccaccaagctcccccggccccgcggcgaggggcccagacgaaggaaacgccgccccaggggcgcgcgggcggagatggagtggcccaggctgggggagcggggagcagggtcgccaccgctgcgccggcccgcgacgcctgcccttgcccgccctgctccccgccgcctccctgggcgactcgggtcccgcgcggcgcccgcccagcccggggctccggaccgaggagggggaggaggaggaggaggaggagccgcgccaaggcggccggcgggcgcacttacgccggtgctgcggtccagcgtcccgccgccggccgccgagagcttggtggtgttgaggcccaccagcgagggcagcgtctgggacatccagttagtgatcatggccatggtgctcagcacgaccccgatcttgagcagcggcaccgacatcgcgcctcgagctgcctccagcgcccgctccgagctggcaccggctcccgcgcccaggcggccttcaggcggcgggcaccgcggcgggcaggggcgcctggctgtgtccccgcgccccctcggcccgccgccgcccgcccgccgccgccgccgccccgcgcgccccggccatcgccgcgccttccccgggcgccagggaaggtggccaggtggcctctgcccgccgcgccctgcgcctcgcgccgcccgccctgcgccctgccttgcccggctgcgtccctccgggctcctccgccgccaccgggaagcgccgtccggctctgagcgctgcgcgggctgcgcgcgggggccgcggccgggaggcggggctcggccgggcgggaccgacgcaatccgcccaggaaatgggtggatttttcctctcgctcggctccccgccgccccctggctgctggcagcgaggtctgcaaactccagtccgcccaggagttgggatcagggtgacatgaggagacggacacaccaccacccccagatcataaaatacccggcggcggcgcggggactccagctgggggcacggcccgcggccctcccgtcccggggcttctcccatcctcacgccggggcatccctctccgatccccgcagagggtccgctttggggcaaaggttgccggcagagagacggcgccgtcctgcctactggagcccttttccgcggtgattcgagggtcccagccagcctgggccgtcgcctgaaacccagcaggcagggcaggctccgaaaagcagccagactcgcgagggcctccagcgccaggggggcgtcggggcatcggtggagagctaaaggcgcccctgcgatcccagggcagccgcggtgccctaaggccttgcttgggaggaagggagccaaccggcactcctgacacctgcacagcaaggcgggggctggggtggtctgccgtggcccgcggtgcgcagtgagggccctgggagggcgcacacccggcaggagctgcataaggtctggggctcaggcctggacctcaggagctgaagggaccacgcccatgaacctggtgttggggaggtgggtgtgtggggcggggactggggtctgtggtggaggggtgtgggttggggggtgtccttactgactcaggggtggcgctcgagtcatggcgcccaggcacagaggcagggcaagtggcgcacgctgcccctcttcccggccctctgcggcgaccgcagcaggactcacgcgtgtcagtcccacctgaagcgcaggcctgactgggtcaaacacgttaatagggcttttgcatttacagaaggcttctaatcggagatgaaagccacttcctccggggccttccattaagctttcccagccatttgggaaggaaagaatcctccagatcactcactacactcttctctgcctgggcgaaaattaatctcccttcctggatgggatttgaaagacggacgccgggccggaaggagcgcgcctccctggcgcccgcctgagaggaacaacgccttcctggggcttttctctctgtgtgcgcagtcctcggctgaagagacttcagctgcagccaagatgatcctggcctgagtgctgggtgtgagacccgctagttaaatgagcccctcagatctgcttttctgattaatgctgtaatctcaggcagccgggctgggtcggatgccaggaaattccaactgttggggaagggcgccatctcccagtgtaagctgggactgcaggcccggctcacagactgggcccaggcggagacacaagtccggttgggctggcttcgcccccctcctctggccatgcatgtttaacaccgattcaaggccacaagccgtgtctgtccagatcactcacgccgcttcccgctgcggaaggacaaggaccacttgttctgcgggaacaaattcaaatgcaacccaatccaatccacaaaactgtcaggccatctcagaagccatagacatttatttatttaacgaagtaaaagattaacctgcacttggactgctctaacctgcacctgagcggctccaacctgcacctgagcggctccaacctgcacctgctccaaactgtcctgtccagtttctaaaatctgtgattcagtgggcataatggttttgaaagggtcgtcagataaggcttgagtaagtgtaattggatttagaaggccatggagcattccagaaggaaagtatggatcgttgaagaatgaaggcatttggattaggggatccatggcgccaggcaataccaagtgttcctaaaga

SEQ ID NO: 588653 - DNA, 4001 bp, Homo sapiens
agtcatatctttaatctcattcattcccaaccccagaagatcgggaccggcaggccggaacaaagtcatcatggaggaatcgccctccgattcctgaaggagcagggagggcggcctcaagaggggtcttaggagggagccacaccacggagccctcttcgcagggcactaaacccctggcagcaaaaagagagagggagggagactcacgtccttcacctctcctttcagcctaaagggccagtggtctggggcgcgccttcccggcagcggccccttccccgcgcggccctccgggtggcggtttcagctcagcctcgctcagccatctaagtcagctctgcccagaagcagccccggccacggttcccctcccgctaggctcgagagggagacgcgatttcaatttcagaggccaggagggaggggtgcgcgcagaagacgaaggcaaaggcgagggggtgagcgcccaagggcaggctcccaggggccccacccaagcccctcggcaccgtcctcggaggagaaggaacaaaccctcctatggactggggaggaaagggcgccttgggactttgggaatgcaggcgcgggcaggagctccggagcccaccggctggggccccactcccagcccggtccggccagtctggcttttacaaactagggcgggctcagtccccgctggaccgagcccagactagggtctagcggcggctccacccctcactcgctgagtgtgaccttggacaagtccccaagtccccagccttagtttcctaaccttttcaatggggggctcatgattactgacccaggactccaagcctccgagaacccaccaagctcccccggccccgcggcgaggggcccagacgaaggaaacgccgccccaggggcgcgcgggcggagatggagtggcccaggctgggggagcggggagcagggtcgccaccgctgcgccggcccgcgacgcctgcccttgcccgccctgctccccgccgcctccctgggcgactcgggtcccgcgcggcgcccgcccagcccggggctccggaccgaggagggggaggaggaggaggaggaggagccgcgccaaggcggccggcgggcgcacttacgccggtgctgcggtccagcgtcccgccgccggccgccgagagcttggtggtgttgaggcccaccagcgagggcagcgtctgggacatccagttagtgatcatggccatggtgctcagcacgaccccgatcttgagcagcggcaccgacatcgcgcctcgagctgcctccagcgcccgctccgagctggcaccggctcccgcgcccaggcggccttcaggcggcgggcaccgcggcgggcaggggcgcctggctgtgtccccgcgccccctcggcccgccgccgcccgcccgccgccgccgccgccccgcgcgccccggccatcgccgcgccttccccgggcgccagggaaggtggccaggtggcctctgcccgccgcgccctgcgcctcgcgccgcccgccctgcgccctgccttgcccggctgcgtccctccgggctcctccgccgccaccgggaagcgccgtccggctctgagcgctgcgcgggctgcgcgcgggggccgcggccgggaggcggggctcggccgggcgggaccgacgcaatccgcccaggaaatgggtggatttttcctctcgctcggctccccgccgccccctggctgctggcagcgaggtctgcaaactccagtccgcccaggagttgggatcagggtgacatgaggagacggacacaccaccacccccagatcataaaatacccggcggcggcgcggggactccagctgggggcacggcccgcggccctcccgtcccggggcttctcccatcctcacgccggggcatccctctccgatccccgcagagggtccgctttggggcaaaggttgccggcagagagacggcgccgtcctgcctactggagcccttttccgcggtgattcgagggtcccagccagcctgggccgtcgcctgaaacccagcaggcagggcaggctccgaaaagcagccagactcgcgagggcctccagcgccaggggggcgtcggggcatcggtggagagctaaaggcgcccctgcgatcccagggcagccgcggtgccctaaggccttgcttgggaggaagggagccaaccggcactcctgacacctgcacagcaaggcgggggctggggtggtctgccgtggcccgcggtgcgcagtgagggccctgggagggcgcacacccggcaggagctgcataaggtctggggctcaggcctggacctcaggagctgaagggaccacgcccatgaacctggtgttggggaggtgggtgtgtggggcggggactggggtctgtggtggaggggtgtgggttggggggtgtccttactgactcaggggtggcgctcgagtcatggcgcccaggcacagaggcagggcaagtggcgcacgctgcccctcttcccggccctctgcggcgaccgcagcaggactcacgcgtgtcagtcccacctgaagcgcaggcctgactgggtcaaacacgttaatagggcttttgcatttacagaaggcttctaatcggagatgaaagccacttcctccggggccttccattaagctttcccagccatttgggaaggaaagaatcctccagatcactcactacactcttctctgcctgggcgaaaattaatctcccttcctggatgggatttgaaagacggacgccgggccggaaggagcgcgcctccctggcgcccgcctgagaggaacaacgccttcctggggcttttctctctgtgtgcgcagtcctcggctgaagagacttcagctgcagccaagatgatcctggcctgagtgctgggtgtgagacccgctagttaaatgagcccctcagatctgcttttctgattaatgctgtaatctcaggcagccgggctgggtcggatgccaggaaattccaactgttggggaagggcgccatctcccagtgtaagctgggactgcaggcccggctcacagactgggcccaggcggagacacaagtccggttgggctggcttcgcccccctcctctggccatgcatgtttaacaccgattcaaggccacaagccgtgtctgtccagatcactcacgccgcttcccgctgcggaaggacaaggaccacttgttctgcgggaacaaattcaaatgcaacccaatccaatccacaaaactgtcaggccatctcagaagccatagacatttatttatttaacgaagtaaaagattaacctgcacttggactgctctaacctgcacctgagcggctccaacctgcacctgagcggctccaacctgcacctgctccaaactgtcctgtccagtttctaaaatctgtgattcagtgggcataatggttttgaaagggtcgtcagataaggcttgagtaagtgtaattggatttagaaggccatggagcattccagaaggaaagtatggatcgttgaagaatgaaggcatttggattaggggatccatggcgccaggcaataccaagtgttcctaaagaggactttcaatcccaatttcttcacgacttctcttaaagccagggctcatcacacctgcagctctgaacaatcatacggatgctgatggggcaggtgctgcgcccctggtggcactggggctttgccatgcctggcacccaatccttactgaagtgcatggtgtggtggcattgactccactgtatagatgaggaatctcaggcctagaaagatgataagacctgtccaaggtcatatggtgacagcctatttccagggctaagcccatacacatggtggcatcctcgtcttataaatgtcatggccatagttaaatctcacgagccccagaagtggcatgagttgcatggccacagcagccctggctgtccgcacagttccacgagccacagaggccgccagaagac

SEQ ID NO: 588654 - DNA, 4001 bp, Homo sapiens
acacaggcatagccctttgtggggcagcttgccactaatcaggacctggttggctcttctctgcaggtatctgctcccctgtgtgtgcatgtgtgtgtgtgtgtgtgcacatgaatgaatgcatctgtccagcaacagtgcacaaccaccaccctccaccaggccttcctggggccaagaaaacctctcctagaggccatgcagaacctctccaggagggactggctgatcgtctgggcagcaccaggagaagggctctgagggtaagcgggacgacataaccccactgctggattgggatttggactgcacatcctgggcagagccagggagccagcgtgggcttccaggcaaaacaagggaagctcgttcagtgtcttctctcctgtggtcttcctctcgctctctggccctcccatcttctctgctttgttttctcttttattctgagggagatggaggaagggaggaaggaaagaagggtcaggggcagctggggcttggggccaaggtactggctgcccatcacttcctggacttgcaactccaaagggccagagtctcccagttcagagcgtggcacagtggcatcattgaaagggcattttaatgtcactcccaagcagcccggctccctcggctggcaggctcttccgagcaccatagtgccaaagcaaccctcccagttcggcgctcacagacagcccttctcctcccccaagacctgccagctccaatatgcatctttaaaatggagaataccaagcagagacctttctctattgatacattgttcagggtacgacaagcccgtttgaaatgcccacgatccccacaccagcacgccacagggctcctcactcacctcctgccgggcatgtggccacagccccccaagccctgcatattaagccagcaatgcacacagctggccggcacgctggctgcccttccaggtctcagcggcacaatccccaccgcctgtttctggagcccccaagggcagcgttatgcccaaagggaggatgagccactcaggggtgtgtgttgggggtaggactaaggtcccgccacctctgaaaatgcctggggtcttggctatccggctctcactcttccccctccagatgacaatagcagccaaagaccccctcgtgctgccctttgaacttctcagcagggagtcgggggcagcggagtcctaggaaaaagggggcagctgtcagctctgctgagccggggctggaggagcgccgtctccggtcagcctgcacccctccctcccacccaggtccagcctagcgccctggccccctccccaaccccggcacttcgggcgcccaggccgggggcgcggggcggcgcggagccagagccgttcccggactttgtggggctcccgaggggccgggccgggcgcctggcagggaggaaaatggcgttggatgcacgtacttgagtgagttcagtgcccatcaggatgaggaagaggaggctgaggagcttccgggccgggtgcatgtctcgctgccacctccaacgacctggcatgcagggccctgggtgctggccggccggcggctgcgtggacgcggacgcgctccggctctggccccggctccgctggctccggcggcggcgcctggctcgtgtccccacgcctggattcagcacccggagcgggcggcgcgcgggctctgctgcgcgaagcctccgctctgcatatttatcgcgtcccggttccggcgcgtctgcctccgggcagggctgggcagggctgggctgggcgggagctgcgccctcctctctcctcgcctcctaatggctcccccgcgcgcctggcattggcggagagaggcgcgccctgcggagcacgaacgcgcgctgggctgcggtgggtgccaaaagtttgctcggaaggggcgggggcgggggtggcgcagagggacccgcgcgcctcgctctctcccggggaggagggcggcggccggcggggaagcaggctgggacaggatgtgacatcaaaaaggcgggggaaattgaactgggatagagaactccatcctggccggcctgagccctcgcgggctccaggtcccgggaatggggacagaggggttgcccgcgctggggacctgggcccctggacagggagtgggccgaagattggggggggggaatgacagctgggagtgggagggatgggatgttaagtcttgatgtctatggagtgacaggagataaaagctgaatgggtccttaaaattcacccttcaatgaggtaaactgaggctgggtcaggaaggatgtttccaggaggaggggtcagggaggaagccagggttagaaccctggtcacctggcacgcagccctgatgagtggggaggtcagcaaaggggtggaagcaggaacaagcattgggtgctgggctcctgtccccagacagggcatgtggacgagagtctgtctgtgtgctcctgggggtggatacgacgtgcctgtaaggggccctgtcatcgtgtgttaggttgtgacacagctctgccctccccaggtgccttttctgaaccaggaacctaagagaggagctctcccaccagggccggggacttccagaacccccttggctctgcccgtcctggtgccctccttccctggccctggtgggagagctcctcttaggttcctggttcagaaaaggcacctggggagggcagagctgtgtcacaacctaacacacgatgacagggcctcttataggcacgtgccaggaccacagggccccttacaggcaggtgcgtatccacccccaggactcccttggctccgcccttcctggtgccctcctcccctttcctccctctctatgtcccctctccctccaccctcctttaatgtgtactcagacccgttgactaaaggagctgtcttggggcccacgttttccatttaaattcctgattttgtggaagagtcccaagcacctgtattttctgagaagctaaggttgcagtaggtatctagaagcctctctctgttctctattgtttagtctttagtctatggaaaataaactccctaaagagaatctctgacaagaagagactccagactcaataattgcagagagcagcactgcccaggatgatgtggcccggccccctgtgtcacagatgaggccgctggagttcaggggagtcacgtaccggggtcacccagggatatccagaacaaggacaatgccacctcctgcccctgtcaccatgctgctggcatctgggaggcatcccctgggcattgggtgcaggagctgggcacatgtgctgaagaagagaagatgggaaggggccctccgacacggccgttgcaccctgagggcctttgctgtggggactctgttctctgagtgctggggacagagctccctccagggaagccagagggcccgcctgttggtctgggtgggcttcccagcctcagacgagtttaagcagtggcattcctggtgatatgccacggcccctgaggcagggtggcccccaagactctgtgaggagatggtgctgggaagaaattggggggggggtgcagctgtggaggcttcttttctctctgcccccctcatgttactacccccagtgtctttgttgtcctagaatggaggaaagctgtttgtaagccccttggggatcgttgagagaggcagccaggggccggagtggaccctgtgtttggagctgaagggatctccgggtagtggctgtctgagcctcagtccccacatctgtcgaatgggaatgaatggtccatatactgcaggtctcggggctactgaggagatccagtgcaggaataaacacactctatatgcttaagaactctacgtgcatggggcacgcgcagcaccccaggcctcgacccaagtttctccttcagccttcacattgatgctccaagtggccgctaataaatgtctgggctctgggagacctgtgacatg

SEQ ID NO: 588655 - DNA, 4001 bp, Homo sapiens
ctttgtggggcagcttgccactaatcaggacctggttggctcttctctgcaggtatctgctcccctgtgtgtgcatgtgtgtgtgtgtgtgtgcacatgaatgaatgcatctgtccagcaacagtgcacaaccaccaccctccaccaggccttcctggggccaagaaaacctctcctagaggccatgcagaacctctccaggagggactggctgatcgtctgggcagcaccaggagaagggctctgagggtaagcgggacgacataaccccactgctggattgggatttggactgcacatcctgggcagagccagggagccagcgtgggcttccaggcaaaacaagggaagctcgttcagtgtcttctctcctgtggtcttcctctcgctctctggccctcccatcttctctgctttgttttctcttttattctgagggagatggaggaagggaggaaggaaagaagggtcaggggcagctggggcttggggccaaggtactggctgcccatcacttcctggacttgcaactccaaagggccagagtctcccagttcagagcgtggcacagtggcatcattgaaagggcattttaatgtcactcccaagcagcccggctccctcggctggcaggctcttccgagcaccatagtgccaaagcaaccctcccagttcggcgctcacagacagcccttctcctcccccaagacctgccagctccaatatgcatctttaaaatggagaataccaagcagagacctttctctattgatacattgttcagggtacgacaagcccgtttgaaatgcccacgatccccacaccagcacgccacagggctcctcactcacctcctgccgggcatgtggccacagccccccaagccctgcatattaagccagcaatgcacacagctggccggcacgctggctgcccttccaggtctcagcggcacaatccccaccgcctgtttctggagcccccaagggcagcgttatgcccaaagggaggatgagccactcaggggtgtgtgttgggggtaggactaaggtcccgccacctctgaaaatgcctggggtcttggctatccggctctcactcttccccctccagatgacaatagcagccaaagaccccctcgtgctgccctttgaacttctcagcagggagtcgggggcagcggagtcctaggaaaaagggggcagctgtcagctctgctgagccggggctggaggagcgccgtctccggtcagcctgcacccctccctcccacccaggtccagcctagcgccctggccccctccccaaccccggcacttcgggcgcccaggccgggggcgcggggcggcgcggagccagagccgttcccggactttgtggggctcccgaggggccgggccgggcgcctggcagggaggaaaatggcgttggatgcacgtacttgagtgagttcagtgcccatcaggatgaggaagaggaggctgaggagcttccgggccgggtgcatgtctcgctgccacctccaacgacctggcatgcagggccctgggtgctggccggccggcggctgcgtggacgcggacgcgctccggctctggccccggctccgctggctccggcggcggcgcctggctcgtgtccccacgcctggattcagcacccggagcgggcggcgcgcgggctctgctgcgcgaagcctccgctctgcatatttatcgcgtcccggttccggcgcgtctgcctccgggcagggctgggcagggctgggctgggcgggagctgcgccctcctctctcctcgcctcctaatggctcccccgcgcgcctggcattggcggagagaggcgcgccctgcggagcacgaacgcgcgctgggctgcggtgggtgccaaaagtttgctcggaaggggcgggggcgggggtggcgcagagggacccgcgcgcctcgctctctcccggggaggagggcggcggccggcggggaagcaggctgggacaggatgtgacatcaaaaaggcgggggaaattgaactgggatagagaactccatcctggccggcctgagccctcgcgggctccaggtcccgggaatggggacagaggggttgcccgcgctggggacctgggcccctggacagggagtgggccgaagattggggggggggaatgacagctgggagtgggagggatgggatgttaagtcttgatgtctatggagtgacaggagataaaagctgaatgggtccttaaaattcacccttcaatgaggtaaactgaggctgggtcaggaaggatgtttccaggaggaggggtcagggaggaagccagggttagaaccctggtcacctggcacgcagccctgatgagtggggaggtcagcaaaggggtggaagcaggaacaagcattgggtgctgggctcctgtccccagacagggcatgtggacgagagtctgtctgtgtgctcctgggggtggatacgacgtgcctgtaaggggccctgtcatcgtgtgttaggttgtgacacagctctgccctccccaggtgccttttctgaaccaggaacctaagagaggagctctcccaccagggccggggacttccagaacccccttggctctgcccgtcctggtgccctccttccctggccctggtgggagagctcctcttaggttcctggttcagaaaaggcacctggggagggcagagctgtgtcacaacctaacacacgatgacagggcctcttataggcacgtgccaggaccacagggccccttacaggcaggtgcgtatccacccccaggactcccttggctccgcccttcctggtgccctcctcccctttcctccctctctatgtcccctctccctccaccctcctttaatgtgtactcagacccgttgactaaaggagctgtcttggggcccacgttttccatttaaattcctgattttgtggaagagtcccaagcacctgtattttctgagaagctaaggttgcagtaggtatctagaagcctctctctgttctctattgtttagtctttagtctatggaaaataaactccctaaagagaatctctgacaagaagagactccagactcaataattgcagagagcagcactgcccaggatgatgtggcccggccccctgtgtcacagatgaggccgctggagttcaggggagtcacgtaccggggtcacccagggatatccagaacaaggacaatgccacctcctgcccctgtcaccatgctgctggcatctgggaggcatcccctgggcattgggtgcaggagctgggcacatgtgctgaagaagagaagatgggaaggggccctccgacacggccgttgcaccctgagggcctttgctgtggggactctgttctctgagtgctggggacagagctccctccagggaagccagagggcccgcctgttggtctgggtgggcttcccagcctcagacgagtttaagcagtggcattcctggtgatatgccacggcccctgaggcagggtggcccccaagactctgtgaggagatggtgctgggaagaaattggggggggggtgcagctgtggaggcttcttttctctctgcccccctcatgttactacccccagtgtctttgttgtcctagaatggaggaaagctgtttgtaagccccttggggatcgttgagagaggcagccaggggccggagtggaccctgtgtttggagctgaagggatctccgggtagtggctgtctgagcctcagtccccacatctgtcgaatgggaatgaatggtccatatactgcaggtctcggggctactgaggagatccagtgcaggaataaacacactctatatgcttaagaactctacgtgcatggggcacgcgcagcaccccaggcctcgacccaagtttctccttcagccttcacattgatgctccaagtggccgctaataaatgtctgggctctgggagacctgtgacatggccatagagctgga

SEQ ID NO: 588656 - DNA, 4001 bp, Homo sapiens
actatgatggtctggtgcccaggggacctcctggtcagctgggtgaggggctcagagaacccttgacttgaggacaataacttcttccttttttctccattttgggcttcctctttgcacaggccctgctgtgggcagcctgggccctggcggggaagggggtcatccccctggtcgaggaggaccacagggaggcctggcctaagcagcctgccagggcagggtgcctgttcccacaggccttgctggcagagtcagatgcctgcagctgttcttaggcagtgccccagccaggggtcagaggctctgtgccatgtccagaccaagctggcagggcttgggccagcagctgggaccagggtaaagaggcccctgagtcctgagaggccaagaaacaagagggctctcaaaggagcctggtccctgactgtttcacctccttgcgccccttgcacatgggctggaaggagggctttgcaggaggaggtggtcagcaggacctaggaaggggaggagcaggtttgggacacccctctgggacatcagaagagagcagccatctggggcgggtcttagtgggggaatcaagaaccacaacccgtagagatggctcagaaatttggggtatcttgaaacgtgtgtctcttgtttgccaattactttgtcacccttctctgtgatgcagcagagagctgcaggaaaaatacaagagtctgtgggctcttccttggggatataagaagagggaggagctggagaggaaatgagagatgccctgaaagcccttgtcacttctcaggagcccggtattctcctgcccctcactgtggcagctgcctggtcataggtattttttctcactagactgtgagatctgtggggacagggactgtgtctctaccattccctgtcacctggtcagagcggaccttcagcacattttcaaaagcacaaagaaaagtccagtgaaggtgaagacagctgtaaatactgaaaagccactgagtggccctgcaggttggttctgccatctcatcccaatgaccccctgagtggggtgttatcctcatatgtgaatgagcagagggcacccaacaggtaatcaatgggtggaactgaatctggggtggtcccactgcagagaagatgaggggattcctaggaggcatccatccctgactccccagggtccccattcccctcctactcacctgccaccgcctcggtcacctcctgcttgcctgccttgtagtaggtgaagccccggatcacagcctgctgctgggccagggcgcggggcttggctgtgggctggaggaaactgcccttgccgctctcctttctcagcttctccacctgaagcagcttctccttgggaggttttgggaggcctctgtctgcaaagcttttctgcacactgccatacttgctgatgtccttgccttttcctctagctgtgtcctgggagggaagagaagtctcagacttgaaggacagtagaagaaatgttgtggggagtcctgggggctcagcatgtggggactggaggtggccatgttgccccaggccctatgtcccaagcactcacaaagtcacagctttcctttaccccaccatggtggctacatccatgactggtttgcctcagtttcctcacccagctctttagctcccttgcaggcttgaagtccaacctgataggttagattcctgtcccacttctcaactcctgtccaatccccctggggggcaggctagaaggaccagctccctgggaggcagcctcctccacctgctcaccttcccagccttgtctctcttactcattggtcttagtacgtgggcaggggagaggttcttaggcacctaggcaaggtgaccaactcatcccagagtgcctggaacattcctagttttagcactgaaagtgctgcatcctggaaaaaccctcaagtcccaggcaaactgggacagggttggtcacccaacctctaggatatgccatttctaactttttgtgttttgttattttcacttcctatttaaatgcctccgatgctggcttggcacaagaacacagggcctgtgacatcactcatcgttaggcagaagctccagcagatacggcaagtacagtagctgggtgccttctgcaccattgccaaaacacgcttcattctcgcctgcggaattggcacgggaatgagcaggaagccagctgggggccaaggcacaggcttcctagctgctttatcggcatctaggcagtcccagttgcagacacaaatggccgcattatcacaatgtcagcaaaggagaccgagatgtggagaagaagagaggaagagggtgggcttggcagtcacgcagacctggctgccagtcccagctccgccaccgcctctccatgtgacctctctccatgcctcatctgccaaatgggcaggggtcgcccctcctcccaggtgactatggggttcactgacaatgtctgtgagaaagtcaagtttaaagtaggaattccacaaatgtcagctcccttcttcagccactcaccaaaacacaaggccagtgtgaacaatggtgtggcttgtgtcttgcccaagggtgactggccagaggagcctgaatggggttgaatccagtctgcactccatttgccaagccacatacccagcaaaggcaggagcctctgtgcaaccggctcacccaaaagtggttgttccttctaattgatctgctcagagggagaaccagcttcacagttcatctgcctacagagaggacgtttatcacatttgcacgcaggtgtgttatctgtcatgggtggctctgcctagtgacagaaccagtgcctctgctcactctgctctgagcttggaggtcgagtgcctgggtattggctgcaggggttctgtaccccagggtgggttggatgaatgggtatcagtctgcaggggtccctgaggcattgcccacctccctctgagcaggctcaacccagccacagcaggggaggctagaagtggttttgctgcagccaacctggtctctgagggccaggcagggggcaccacctccacaagcttgtccctactagtttcaagcttgggaatgagaaggatgccaaacacctggcttagggaccagcccccttggcaggatccccaggcctatcccccattccctgtgctgactgtgcttgctgtacagcaggtatcccctgcacctcaccctgccagggactctctggctgtgccagtcctcaaccccatcttacagccccaaacccccatcgagctgatccacagggccaacgtcctggcacactgagctcccaagttcagccagctccggccccatgatcagagctggggcctcacctgggccttgctaccagtgcccgtggcaggggtggcaggggcggcggcggcatccttctgcagcagctggaggcccaggcgggacagctccttcttgatgcccagcatgatggcagagtgattctcatagtgcctcaactgctcactgaggtggcgcacgctgtccttcaccacctcattctcccggctcaggttggccttgatgctctgcggagggggcaggattggaggtctttcctgggccagcttcctctgaacccctagcctggagggacaccccagctttggtcattaggctttgctgcccagtcccccgaacgggctaggggcggccgcagtgagcatgagcaggaaaaataggctccaagagaccctgtgtttatgaactttttaaatttaaaaagtgaaggaattaaaaaaatagataatacatgtgcatggtactaaatgtaaaagatatcaacggctataaaaagtcaccctcccacctttatttctcagtgccaacagttattataggttccttgtatatccttctaaagagagtctgtatatttacgggaacacatgtatacatacacacatatttttaccacttttcttttttgctgaacagcc

SEQ ID NO: 588657 - DNA, 4001 bp, Homo sapiens
acaagccagctgcctctgtaaacaccctagtttccccacctgtaaattagaaaaaatactcattccctccttgtctctggagtacatgagcagcgttgtacgtgggtgctttcatgccctgagctgaatcaggctgagagttggccagtgcccactgctcatatactcaccgtgtggctagtggcttctgtcttttatctgtccgtgggcaggcaggacactcacattctaccaggaaagaggctggagaggtattggaagtcacttttttgccctcacgctctgtgaccagggctctggtcctgctcctcactctccccaaggtctgtccgtttttttttttgtttgttttgttttgttttaagacacaatcttgctctgttccccaggttggagtgcactggcgcaatctccactgactgcaacctccgcctgctgggttcaagcgattctcctgcttcagcctcccgagtagctgggattacaggtgtgcaccaccacacctggctaatttaatttaattttttttttttttatagagacggggtctcactctgttgcctagactggtcttgtgccactgcgcccagctaatttttgtatttttagtagagatggggtttcaccatattggccaggctggtcctgaactcctggcctcaagcgatccacctgccttggcctcccaaagtgctaggattacaggtgtgagccactgaacctggccatcagggagtcatttccagaacaccccaagtgctctggtgctaagtattttttttttttctttttttttttgacacggagtctcgctctgtcgcccaggctggagtgcagtggcgcgatctcggctcactgcaagctccgcctcccgggttcacgccattctcctacctcagcttccggagtagctgggactacaggcgcccaccaccatgcctggctacttttttttgtatttttagtagagacggggtttcaccgtgttagccaggatggtctcgatctcctgaccttgtgatccgcccgtctcggcctcccaaagtgctgggattacaggcgtgagccaccgcgcccggcctagtgctaagtactttacaggcatgaccacaccgcatctagagaccatcaactgcaggaagtgggtcccatgattctccctgtatctacaggtgaatagacggaggctcagatgggcgatggcggatgagaagcggatgtgcgactgaacccaggtcggcttgacaccagagcagatcctcttagccacagcagagaacagctcagaccacttctggagctacctagtcctccagggggtgcacccggtccctggcaagaacatcagaggccaggcgagtggccagcgcggctgcgttcatcgggtagagaagacccccagtccccagcgggccgtgaaagccgtggcccagggcttgctgcaagcctgggagtcgttgggtaacagttgccaggagcttcccctacgaaccccgagtctggccagcactccggggaaatcccccgacccctccgggaatcggacccggtcccagcgccccttcctcaggccccgggtccctagcatccctacatctccagcgcttgttcctccacgcgcccctctctcggggcccctgcccctgcggcttcagtgctgagaagtcccaggttcggtctctcagctcccggctcctccgccctggccccgggctccctcccgggccgcaccccagccacagcgccccctcgcgccccgctacccgccgagccgcgcgggtccgaggggcgtgcgtaccttactgtcggcgcgcgtggggcggccgctcagcagcagcactagcggcagaaggagcagcggccggggcgggagggcggcagcggccatggcgccacgggcacggtaggcacaggcggccgggcacggacgctgggaagcgcgggctgcactgcgagctccgcgccttcgcccgctctgcctgccccgcgccccgcgcctgcaccctgctgccagccccgcgggtcttccagcgccgccaggggcggagctagggcggagggggcaccccgccccgccccgcccgccgttcgcggggcctccccgtcgtcgggcggctctcccaagggcatccctgcccgcgcgccagggtgggtctcgatcgcagccggcaggagcaacggggccagggcgaggcgcgtgggctcctctcacggactcaggtcctgtcctgtgagtcgtgggaccttgggcgtgtcccttcacctgtgtgcctcagtttcctcatctgtaagatgggggactcgtgctttccttttggagtgtttgtaaagttcgcatgagagacggatgttcccagggcacgtgagcccttgcgctctccgatttcacccacttctggacagggacctgactgctgtaagccttcccaaggctcagcaaccccaacctgtcttccgtctttcatttctccttccctctggaatccctcctgtcggctcccaaactccagtagcttccggcttttaaatttttatttttctcactctgttgcccaggccgtagtgcagtggtgcgatcccagctcactacagccttgaccttcccagctcaagtgatcctcccacctcagcctcctgagtagctgaaactacaggtgtgcaccactacacctggctaatttaaagttttttttttttttgcagagacggggtctcactctgttgcctagactggtcttgaacttctgggctcaagcaatcctcccaccttggcctccgaaagtgttgagattacaggcatgagccactgcacccagcatttccttttttttttttgactgggtcttcctttgtcacccaggctggagtgctgtgttgcgaatacagctcactgtatcgtcaactttccagctcaagctatcctcctccctcagccttctgaataacttggactacaggcatgtgccaccatgctggctaatttctgtatttattttagggatggggtcttctgtgttgcccaggctctcaaactcccgggctcaagcaatccagccaccctagtctctcaaagtgttgggattacaagtgtgagccaccatgcttggtctcattttcttcatagaatttattgctcaatgggactgtctttcttgttggtgtgtttgtttccttgtgttggagcatgacttcctagggcacattcttagtttctccccatgaacattgaactcagtggttctcaaagtgtggtccttggtctcagcctccgcatcatcggataacttgttaaaaatgcaaactctcccagcctgggcaacatggtgaaaactcgcctctactaaaaatacaaaaattaggctgatgtggtggtgcatgcctataatcccagctactcgggaggctggggcaggagaatcgcttgtgaacccgggaggcagaggttgcagtgagccgagatggcaccactgcactccagcctgggcaagagtgacactctgtctcaaaaacaaacaaacaaacccaaaaaacaaaacttagctgggcgtggtggcacatgcctgtagtcccagctacttgggaggctgaggcacaaaaatcacttgaacccaggaggcagaggctgtagtgagccaagatcgtgacactgtactccagcctgggtgacagagcgagaccttctcaaagaaaaaaaaaagaaaaagaaatgcaaattcttaggccccactacagactcacaaaatcagaaactctgggcatggagtccagcaatctgtgttttaacacaccctccagggctccagggggcttagggtttgagaaccactgacctggcacaaggtacggtgctctacaactctcagctgaattaaagaaccctgtgcaaagcacacactgagtacaaataagctgctgctgcttctttttttttttttttttcttgagacagagtcttgcactgtcgcccgggctggagtgcagtggcgcaatctcggctcact

SEQ ID NO: 588658 - DNA, 4001 bp, Homo sapiens
gagcacctaagaagaaagtctttccttgaggaacaatttctcttctaaacctgaacttatcttaaacatccttgtcctcctccctccacgttcctaaccatgtagtacaatcttgtcccactccctttgattaagtgcagttttctgttttgaaatccatcctgttttcatctatatgctcattattttctatgcctcttgctctttccccaggataatttcccctgttacaacaatctcttattttatccaaatttttcattccccaactaatctcttctgagtcatttgctaagcatatttttgttacttctgcttttcatactctacaatgtatgccttgttctctataggataactcacagcaatattgtataattcattgttgatcatctcatttcctaatatcttttaacagaatctaatacaatgcagtgttataagtgctcaaaggtgtgttgaatgaataagttaataagttataggttaaggcttgctagcaaatgcttctctctactaatgttgattattcctaggcatttatttcactatgataatttcttcaaatgaacatattcatgagagcttgactgttcctttttctattgaatatttcttcatcacaatatactgtattcctcactttcctagtacatcgtgtagcaggaaaagaacaaatgtgaaaaagaatgtttggagcaaagtaatatatatatattaccagttttcaatgtgaatttttcatattatagcaataaaaccatctgtgtcataatatttctcttacttggagaaaagcactcgtgttcatcaagaaaagtttcaattgaaattactaatgaggtataatttacttgttcaggaaaagtttaaagtaaaatcctcaacattttattatgttaaagacataattgtttttatttgtatgacatagaaactagcatataagaaagcaaatattagcatataatttagatttttccaaaaaagttctaaattttaattttataaaatttttttgctattaaaaatacaattacctcaattatttttagccataatacatttaaatcgtaattaactaaaacccaaagtaactagatccttcaatagactagatagagcatctgtattttccctttgagaaagaagtaaatgaaaagaaaaacattctatatcagggatttagtcagtagagaaatttggagaaaatcttgagtgaaatttgtacaaatgcccatcaaccccccaaccggaatcactagcattgctcagctgtatgcctcaaaggcattagctggttctttgttacttataattcatagaaaaaaagagacctaaggaagagaaagagattgattcctttaacctgagaatctttcctttcattcaaagtaaaaaaaaatctaaacaaagattttttattgggtaaatcttaaatgagaaagttaaactcattatactactttatttgaacattttgcctaatcaaaagtttaacataacttttttaccagattttgcttccaaaaattgtgcttttgtaatagatgcagtctattttaatattaaaaaatccaatatacttttaaattttaacagtaggaatacattcttaaaaaattgaaaattattttattatcatacctgttcaatttgctttagttttcaggggttgatgaatttgtaaatcctttaaatgaatcagaaattcctaaattctttaactgagtctcttaaaaatccacagtaactctgtgtccagacagggctgtctcttgaattactgtagcaatttaagcaaatacaatcttcttggaaaacactcgggttgaattaaaattatgtatttcttttcattacatgaaactttgtggattcaaattaagatgcttgtgttcttggtcagatttatgtggcttacttctttcttttccccttaattttggtttgaggtgtggcaagaatttcctctaatgtgaaaggcaaacaaaactaaatgaaacagcatgtactgattactgtttttattttcattttcatgccaaagaattcttcaaattaaggcccactgtgacagggaactccagagtctcagcaacttaaggtggaactcaaaatttcttttttaattttttgagatggagtcttgctttgctgcccaggccagagtatagtggtgcaacctcggctcaccacaacctccacctcccgggttcaagcaattctcctgtctcagcctcccaagtagctgggattacaggcatgagccaccatgcctggctaatttcttgtatttttagtagagatggggtttcaccatgttggccaggctggtcttgaactcctgacctcaggtgatcctcccgcctccacctcccaaattgctgggattacaggcatgagccaccacgcctggcctggaactcaaaatttcttgagtcccttggttattcaacacctaggttcatatcagtacttctatttgttaaaacaagaaatcaggattagaaacataacatttcgcattgtttatttttaaaatgcacttgattgtcattgcttacacagattaactatacgacttttctatacaaaggcttacatcttcatttttatcatcatttttatcagctatctcatttctcctctttttggcagatgtacccactagaatgacttctaatatcctttcagataaaattagtcagttggttgcactccaaaggtgtatcttcaatttgcctgtttttactattgcacaaaataattctgtagtattgaataaaatgggatgaaaagcttatgttactcaatagctattgcctttattttgtagatttagaaaatttcttcatttcatagagctatctctcctgaatagtaacagttaactgtttttaatgtttaatttttacactgttctcatattctaaacagagagttgacttgtgtcttttggcagtagattcggagttcattttgggggggaattcttttaagcttttacaaactaataagataaagtgaatcctggagttcattttgtttcctcaaaaaagtgttttccattagctttttacaaagaactcacaagatttattttgttaaactttgcattaagaaaagtatacagtgtttcaagtgatgctttggcagttgtaaaaatctagtctattatttgagacattggtatgaaaaacgtggcagaccacactttagccaagattccatcttgttactgatcttttccatatgttttctgttagtgtctttgttcttaaaactcaggctttcactaaggaagagagagcaaatctgtgtactttttcaaaaaattgttttataggccttcacagtccttttggaagattaactgaaaatcaacagcctaatgtttatataacttctcattaactctgtgatttggatttatgatattgattatgttattcatgtttttaacaagtgtgaaagaaaaatcagtagataactagagcagacagaataaaaatgtctagaaaatttaaactgattggcagtgtctatctaggaggtttaaggtggcaagggatggggatggggggaggtggtggtagttagagtcaggccttaaaggaaaaaataggggatgtgagtttgtaatagttcactgttttagttaagtggttataattgtagcaattggggagaaaaggagttgaattgttgaaaagtgtaaattatatgctatgattatactttgattgaaatagattcagtatctcaaagctgagtgacacaggactggctaggaaaggccctcctgagacctgcttaattaacataataagcattacaattttctgctcatttgttccactttattcactggacacctactttgtgcagattttagatgcttgggactcagcagtgaaagtctctgttatagagaaggaaaacagaaaataaacataaataagcataaaatgcagaatataaacaatgtagagtgcgat

SEQ ID NO: 588659 - DNA, 4001 bp, Homo sapiens
agaatgtggttcactcctgaacacacttcatcattcatcttgggctgtaaatttaaaatgtccttcaatagagaaaaaagttgacgtaaaaaccaaggaaaagcaaggtagtatctgactttccccaatcctcttcttcctcaaatcaaactagttagtaacagagacaagacatcaatagtattcttactaaaaattaagagcttggacattcttctaagatttggaaaaatattggaattccctcgggacagcaaagaaatctggcatcttctaaatgggcattgatatgacactccattcagcccaaaagtagtccacattattatctagaccagtagactgattttcaaacccatttttaattttgcaaaatgttctttagagccaacatgtaagttaaagcaaagaaagaccataaagcaggatatcctgactgattgcataggccctgcttttaaactctatttatctactgccctttgatagtcccagatactcaacttcacacacacacaaaatttaatacagaaaaagaaactggtatttagtggcttaacaggatctggagattaacgtgaaactataacacaaggcttgtccctggaaaatgtgagtacactatgttggggtttttctgttttgctttttctacaacagagggctttatttattttgaaagattctatgaaatgttgcctatgaaataacattatggaaaaaagtgaacataaaaaggcacatcacacccaattccaatgcagaaaaaaaaacccataatatgaaagttactgttcaaaatgttgaaacggggccatttcccactagtagagtaataggtaacccctctttcttcttcatcctactgccctgtatcttgcaaattctctagagtggacatgcaataattttgaaatgctgtatctcattattttaacataatatatgaaaatgcataaaaatagtaaaagtacccaaaattctaacataattctgaagtttcaacaatatcaagtgtgttcatattccagtacattttgcactcacttgctaaagaaccttctgttcagtaggtgttttactgcctctttcacatccttgtttctaagactgtagattaaaggattcatcatgggagtcatcaccccatagaacatggatataattttgtcggtagcatccaagtcatccgaattaagtgtctctttagacttgggcttcatgtacatgaagaggatggtcccatagaatattatgaccacagtcagatgggctgaacaggtagaggaagctttgcttctcccctcggaagagctaattttgaagatgctcacaatgattaacgtgtaagagacaatgattaataacaaaggtgtcaatatgaacaatgttgtggccacaagcatgatgaactcattgtctgagatgtcagcacaggccagtttcatgacagccagaatttcacaggtgaaatgattgatgatgttattcctgcagaaaggcaattgtaccacaaacactgattgtactgcagaattgacagctcctatgatccaggacccagctgccatgggtacataggcatccttactcatgatgatgggatatctcagagggttgcagatagccacatagcggtcaaaggccatcatgcccagaagcacacactctgttgtccccatggccaagccgaggaacatctgcactgcacagccagaaagggaaatggtctttctttctgaaaggaagctcactagcgtggagggaatagaggtggtggtgtagcagatgtccaagaaggagaggttccccagaaagaagtacataggggtgtgaaggtgagggtccaagatgctgattaaaatgagagtaccattccccagaaggatgaccacatacattatgaagatgagcacaaaaaagagtaactcaagtcttgggtgaccagaaagtcccttcagaaaaaattccaccagaatggtgtggttttcccattccattttactctctatttaacctgtaagagagagcatgttaagacaaatatttatcttactctgattactttcaagcatgtatcaatgaatatgtatcataatccccaggaaaaagaaaaataaaaaaggaaaagaccaaagaaagaagagagagcataaagaaaagtggacagaaaagagggaattatgaatggagagagggaagggaatgaatgaatgagtgaatggagagagggaagggaagataaaactaacatgtttcgtgctacagccatttaattcatttaatatcatcacagttctaggagaggcgtattagtatccatattttacagatgaataaatcaaagcagatatgttaagtaaacttgaccaaaggtaaatactatatagcagagctaagattcaaacctaaatcttcctgttgaagtctgaactttttgtcatatttgtcatcacatacataaactgtaggttataatagaaatgagcattgtattacatatacttgaacactaaactatttttattggctataaatcaccacacaatagatcgatgctcttgtcactccttgaaattatactatgttacgtatgttgtctctctttcccagtagaatgtaaacttcattagggctggtacttattcttgcttatttccacagcccctgtagctagaatagaacagacacagatgcaaatgttcaaaaacatttcttggatgaatgaacaaaatcaaaggcaaaataattgctacatttcttactgtgtgccaatcctctattaattgttttctttgtgcattacataatggagtctgaatagcaagcctatgaggtaattactgttactattagtatcaccaagcctattgtgtagaggggaaaataaggcacagaaaagttaagtaatttgcttaaggtcaatttcataaagacaaataaatgaaagagcaaggacttaaacccaagcagtatggcttcagaattcgagctctaatactcatttggcaaagagaatttggctcacagactagaataccttgtattctaattaacaatactaatatttcaaaagaaatatcagataaaaactgtgatcagataaaaaaaagaagatttcaatatggtaatttgatagcagttgattttatactttatattttgctagaaaagtactcatttctataacaaatattttgtcacagagttgcatttgatcattataattcttgtgtcctcccttacatgaaaagttctcattttcattatgatgcctgtttgacttttttttttcctttattcgactcacaaggggttttcctatattacaggtctttaaaaaaaaaaaaaaacagctttaggttagatttatcctcgtgactttttgagtttcattaagtttctgtcttcataagtttcttgtttattcggatctatttttctaagtttctgatttctaatttctatgttctctattctaatactatttatctaatttcttgaaataagaagaaaaattcttatttcctcctccttactcctctatttcttgctcaaataaaggcacttagaacagtttttgttctattatagacttagttttctatgagaattttttttactggtttctagataatttttttgtttttctctttagttcctcttaaatccaagcatctttcttcattatttagtgattaggcattttcattctatttttattatttatttcccattttatttaattaatttatatatttttatttttatttttttctgcgacaaagtctcgctctgtcattcaggctggagtgcagtggcgccatcttggctcactgtagcctctacctccctggttcaagtgattctcctgtctcagccttctgagtagctgggactacaggcatgcaccaccacgcctggctaatttttgtgtttttggtacagacagggtttcgccatgttgcccttgctgatcttgcactcctgacctcaagtga

SEQ ID NO: 588660 - DNA, 4001 bp, Homo sapiens
ggaaacatataatggtatttagggtagtaatacgacctttccaatggtaagttagccaggaactttaaaagtttataccacctggcctattaatttcatgccttagaatttatcctgtgaaaacatgtgttggacattaaaaaaaaatttggcccaagtgctcatagtagatctaataaatcaaaataaaaacatgatgaatacatgattcctacttactaagagaaacattagaatgatatatttgggaggtggccaatttttctttttttaattcttttttattttttttagaattttagaaaatattgaattttaaaattttagaaaatattaccttaatggggtgactttcagtgagacatctggctctagtaattattagctgagagtaaaagaggggataaatagcaacttttagtcctcactatggagtcttagcttcaattctgaaattcttggacactgtgaagccagtattatgttaggtgcttcctccaacttattgaaacattaaatgatattgggacctggatttttttattattttatttccttattacaagtaaggtaactatgtcttagaaagaaagaataatctatccaatatcacctaggtagtttacggaactgcagattttgtactattgctctctatttccaaagcttatagtgtgattgttttccactatgtttctacacagaaacactcatttcagacatcacaagggatgagattctaagagaattaattatgtttgtgaaacgtggatcagggcatgctggagtttgtagcaaactatagttatcagtgattctagatgagcagggctagtaaaggcaaaggataaaaatctgtctctctaaccatggtttctccaaaaaaggttcaggctgatttacctaagagtccatctttgtgactgttaaacaaagacctacatgtcctggtttcattagtgaattggttttttgttcagcaaatattttacagcagcttttacatccttatttctcaagctatagagtataggattcagcatgggtgtcactaccccataaaacagagaaatgagcttgtctaatgcttgcaatttttcttccccaatcaggtcttgagacttcggtttcgcatacataaagaagatggtaccgtaaaatatgatcaccacagtcaggtgagctgagcacgtggaaaatgccttgcgtcttcctgtggctgaattcatttgcaagatggtgtagaggatgaacatataggagaaaaaaatgaccatcagtggaagaaccaggaaggccatatttgatatcaccatggtgataatattgagggatatatcagcacaggccagcttgaggacagctaatatttcacatgcgaaatgattgataatattattcccacagaaaggcagtctcatggcaagtaatgtttgcacagctgaatttattccaccggacagccaggacacagaagccatcaatacatacgccaccttgctcaggatgatggggtatctcagtgggttgcagatggccacataacgatcaaatgccatcatgccaagaagcagacattctgttgaccccattgcaaacccaaagaacatctgcactgcacatccagagaaggaaatgtttcttttctttgagattaagctcaccaatgttgagggaacagaggaggatgtatagcagatatccaggaaagagaggttgcccaggaagaagtacattggtgtgtgaaaatgagaatcaaagatgctggctatgattagaacaccattgccaattagaatcactaggtacataactagaatgagagcaaagtaaacaatctcaatctttgggtatccagaaagacccagaagaagaaattctgacacaagtgtctggttaatctcacccatgtcatctgctttcaggaaatcaaaagaagatctaacatgaaatgtatttactgccaagaaacaaacagtacaaattaactgaacaatcattcttttgacacatattagaaggagtgcttgcttgaagttctgacatccagttatcttcagtaatgtgtgtgactagaatacaatgaaattgggaatgatggaagcacctataccgcatcgccaatatgtgaagatctacccacgatcagacacacatgcagacggaacctttcctgctgttgaggacatgttcctgagttgaggacactctcccgagctgaggtttctaaaacccctggccaatcaacaactctaagcttaacatcttcatttcatcaaccccagcaaacaagcagtaaagggggcaaaagactactcaacaaagactggaattttaattcagcaatttataaagtgtttaaaatttcacagcaactttgacatttttgtgtgtttatatttttttctaggcctgatactaataccttatagttagtttaattgtgtattttacagacacttaataataatacattgaatcacataccctgaaatttgacaattgtttaaaggcatagttagttgttgatctcatagtatcttgttatgactgttcctatgacaagaccattgcccagaacagctccgcatgaatgtgatagtctttggagaacattatatagtgtctttacatattttactctgtagcttaagagtctgtcttgataatttactcatttaaatcaaccaataaaaacagtaataatgtttaaatatttcatataaatatgtatacatgtgtatgtataccactttaccatttacaaattataatattctttatattaaccccatttttcaactataaaatatggaacttggccaagattaactaggtagtaaataataaaatgtaatgtaaagctaatattttcgacacaaagtctagttcttggcttcactaattttcatatacacgtaaagcatctaggaatttttttttcttttttgagacagagtctcactctgtcaccaggctggagtgcagtggcacgatcggggctgactgcaacctccacctacaggcgtgcaccaccatgcccagctaacttttgtatttttagtagagacggggtttcactatattggccaggatggtctccatctcttgacattgtgatctgcccacctcagcctcccaaaatgctgggattataggcatgagccaccacacccggcaaacatctgggaaacctaaaaaccttcagattctcttttagtgttcaggccagtcctgagattctgcatttcttgcaggtgcccaggtgacgcttatgccactggtcccaaaatcacttgagtagcaaggcttagtctatactaagttggccaattatctagatgtttctaattcaagccagttttttttgccttattgtgtagattggcaataagaaccttgaaaatgtcaagagcataattctttgatgttttacggaaactccagattgacaccattttttaaaataccctttaaaaatattattgaaacacatatttttaaaaagcagcatttttaaagtgcctgtcattacaaagttcacaatttaggtagggatataagaaaagaacatatcaaaataatttacagtcactttctatagcttacatgaaaattacagtttttcccagaaggaagaattttatgagaaataaattaggccaaggagaactccggagtttcagtgttcagctgaacctgggagtatggaaaagaattagacagggttaaaagagaaaagggatatctcaaaagtgagaagttggaccaaagttaggagtaagccgactggcagcacaagggagtttctgtgaaagagtggtgggaaacacatctgagaaagaaagcctgacaggtgcatatagaaaggctctaaaatcaggcagaaaaagtgtcatttcttttggtggaaaagaggtctatcattagaaagcacagagcatggggtaagcacctcgcccattagactttagcagttctctaaatttgacctcatagaa

SEQ ID NO: 588661 - DNA, 4001 bp, Homo sapiens
attttttcctcctaggtctccagtcccgtgatgggaggggctgccaggaaggtctctgatatgccctggagactttttccccactgtcttggcaataacatttggctcctcattacttatgcaaatttctgtagcaggcttgaatttctcctcaaaaaataggtttttcttttctatcgcattgtcaggctgcaaattttccaaacttttatgctctgcttcctcttgaatcctttacctacttataaatttcttctgccagataccctaaatcatctctctgaagttcaaagtaccacagatctctagagcagaagcaaaatgccaccagtttctttgctaaagcataacaagagtcacctttgctcaagttcccaacaagttcttcatctccatctgagaccacttcagcctaaactttactgtctatatcactatcagcattttggtcaaagccattcagcaagtctctaggaagttccaaactttcccacactttcctatctttttctgagctctccaaactgttccacctctgcttattacctagttccaaagtcacttccacattttcaggtatccttatagcagcaccccactacctgttaccaatttactctattagtccattttcatactgctatgaagaaatacccaagactgggtaatttataaagaaaagcaggtttaatggactcacagttccacatgcctaggaggcctcacaatcatggtgggtggtgaaggagaagcaaaggcacattttacatggtggcaggcaagaaagcaggtacaagggaactgtgcttttaatgaaaccatcagttctcatgaaatttattcactatcacgagagcagcatgtgaaaaacccactcccatggttcagttacctcccaccaggtcaatcctacaacatatggggactataggagctacaattcaagaattggatggggacacagccaaaccatatcatatgtacattgtcaaatggctaaggcaagctaattatacataaaagacccatatatccctttgatcttactggttaatagctttcctgctcagcaaatattttatagcagcttttacatctttatttctcaagctatagattatggggtttaacatgggggtcacaaccccataaaacatggaaacaagcccctctgtagcttgcaagttgtctttcccaaggaggtcctgggacttaggttttgcatacataaagaagatggtaccataaaatatgatcaccacagtcaggtgagctgagcatgtagaaaatgccttgtgtcttcctgtggccgagttcgttcgcaagatggtgtagaggatgaacatataggagaaaaaaatcacgagcagaggaagaactaggaaagcaatatttgacactgctagggtaacaatattgacagatatatcagaacaagctaattttaggacagctaagatctcgcataagaaatgattaataatattgttcccacagaaaggccatcgcatggcaagtgatgtttgcacagttgaattgattccaccagaaagccatgatacagaagtcagcagtacatacaccaccttgttcatgatgatggggtatctcagagggttacagatggccacataacgatcaaatgccatcatgccaaggaggaaacattctgttgaccccattgcaaacccaaagaacatctgcactgcacatccagagaaggaaatgtttcttttctttgagattaagctcaccagtgttgagggaatggaggaggttgtatagcagatatccaggaaagagaggttgcccaggaagaagtacatgggcatgtgaagacgagaatccaagatgcttgctatgatcagaacaccattgccaattagaatcactacgtacataactagaatcagagcaaagaaaatgatctcaagtttggggtaaccagagagtcccagaagaatgaattctctcacaaatgtctggtttatcttgtccatgtcccagctttcaggatgccaaaggaagacccaatgtataatattttcacagccaagcaacaaatgtaaaaaataacttgaataaacattactctagggtgaaatagagactgtttgttttaaagctctgccattgagttatcttcaatagtatttgtgcctagaatacagccacactaggatgtttagagtttctatgccctgtatctaatatgtgaagatctacctaggatcagaagtaaatacagacacaacttttcttattgttgaggacatcccaagttgagttttctaaaagccttagattattgcagacaacaaacctaacttcttcatttagtcaagcccagtgagagagctgcaaagaagaaaaaagacaactcaacaagaaccagaattttgacccagcgtttaatagaaatgttcagaattttaaagcaggttagatgttcacatacatttgtttgtctgcctaaaactctgaatgtctttccagtcagataaatgtgtatttttatagggaagatatttgataatagtaaattgagccccacacactgcaatttaacatctgttcaaaggtaaagttatttgttgatctcattctaacatcccactcttactattttgttattccctatgacaagatcatggtgtagaccagctctacaagtatatgatggagaatctttggagaacaatacatgatctctatttgttttaccatggcttcagagttaatcttgagaattcatttaagtaaacctgaaaaaagaggaataatagtcaaacatatttgtgtgtatgtgtgtgcagcactttacaaaagcaaatgaatcttctcattatccttaatttgcttttctcaaatgtaaaagacagaatgtggcctatatgtacaaagggaaacttaaagctcagctctttggatggcaacaccaaaagttattttaccttgttttcgcaaagtactatccaaaatttttagctttgatggaatttcaatttttcaaatttcatatgcacataaatcacctgaggatactgttaacatgtaaattttatgttagcacgtctggggcaaggcctgtgattcttcatgtctattaagttcccagggtatgttgaaccactgagatgagggcacattttgtgtagcaagacattggtttatctatagtgatttagtagagtatccagagatttctgatccaaatagattttcttttgtgttattatatggactggcttaacaacctggaaaatgactgaaagcctaattcttttgtgtttgccagcatactccagggccacatcttgctgttcagtatacttcagaaaataaatgctattgaaacattttatgaaagcaggataaacttttgctggactgctataatatgggtatgatattactgatttcctaacttgagcacagtcctcttccaacacaagtaagggtggaaaaagtatgacacaacatgtctaccatcaaaaagttcataattcaataacaaaaacacaaaaactacacatggaacaatttgataaagaatattattatatcatgtggccagggtgaatattataagtaacctcagaaggaggaagtaaaggagaaataaataaatcacgtgagggtcctgaaagaatttcaaagttataccaggtctggaagcacaaaaggaatggggcaggtttggaagagaagagagaaacagggctattccagaagggagagcagcttaatgttttagaggagcagattggcagtaccaggggagtttcagcagaaacacaactgaaaagttaatgaggcaggcatatagaagggcccaaaggttaggaagaaaaaaaatggcattcccttttgtatgtaagggacttattattagataagaacacccagcacaaggtgattgcttagcccctgtaactttagctacctttcaaacctgacattatataatttgattttatgaggttttgaatagacatgtg

SEQ ID NO: 588662 - DNA, 4001 bp, Homo sapiens
taatagaggctgtctgtaagagcctgaaaaggctaattgcaaaaagtatatcaaggatgtcttataaagcaatggcatatacaaatccatagaacaaaaagaagtatatgtgcaaatgtatagctatgaggcaattttaagagaactgtcgaatccctagcaatgatggggaataagggattatttgaaattttctatttgtctatagatattatcccattacattttaatgttaacaataagttataggccaaggtgtacaagctcaaaatagactcatcactatatacccctcatctcacaaaatacaagccaataaacataattttctaataagagagctaacatgttccagcaaaaaatgtagagttgttttgttttgaaccctcattcttttacttgttatttaatgatcacatatcattttagatgagttggttgccaatctctccaaaataaaaaagacaaccaaagacgtaaaagaactatacactgaaaactataaaacattgataaaaaaattgaagaagacataagtaaatcgaaagatattacatgttcatggattagaagaattaatattgtgaaatgtccatattacctaaagcaatctacagattcaatgcaatctgtatcaaaattccaatgtcatttttcataaaaattgaaacaacaatcctaaaatttacatggaactagaaaagaccctgcctgggcaaagcaatctgaagcaaaaacaaagctgagagcaccatatgctgcagttttaaaatatgttataaagttattgtaatcaaaagagcatggtactcagataaaaatagacatatcaaccaatggaacagaatagaaacttatttccaaacactgaaatttatttatttacttcttttcattatgtatcgcaatcagagaagtgtattttggagctttagaacttcgagagatgaatgtgaaacagcaacgagaacctatctgtttaaccttggtttctctaattgatttccatattgtgattataaaattactctcacctttctcatttacttgttaaaattttttcttctcagtaggtgttttactgcctccttcacatccttgtttctaagactgtagattaaaggattcatcatgggagtcatcaccctgtagaatatgaatataagtttgtcagtggcatccaagtcatctgaattaagtgtctcttgagacttgggcttcatgtacatgaggaagatggtcccacagaatgttatcaccacagtcagacgagctgagcaggtagaggaaggtttgcttctcccctccgaagagctaattttgaagatgctcaaaatgattaacgtgtaagagacaataattaataacaaaggtgtcaataggaacaatgttgtggtcacaagcaggatgaactcattgcctgagatgtcagcacaggccagtttcatgacagctagaatttcacaggtgaaatgattgatgatgttattcctgcagaaaggcaattgtaccacaaacactgtttgtactgcagaattgacagctcctatgatccaggacccagctgccatgggtacataggcatccttactcatgatgatgggatatctcagagggttgcagatagccacatagcggtcaaaggccatcacgcccagaagcacacactctgttgtccccatggccaagctgaggaacatctgcactgcacagccagaaagggaaatggtctttctttctgaaaggaagctcactagcgtggagggaatagaggtggtggtgtagcagatgtccaagaaggagaggttccccagaaagaagtacataggggtgtgaaggtgagggtccaagatgctgattaaaatgagagtaccattccccagaaggatgaccacatacattatgaagatgagcacaaaaaagagtaactcaagtcttgggtgaccagaaagtcccttcagaaaaaattccaccagaatggtgtggttttcccattccattttactccctctttagcttgtaagacagagcatgttaagacaaatatttatcttactctgattactttcaagcatgtgtcaatgaatatgtgccataattcccaaggaaaaagaaaaataaaatgggaaaagaccaaagaaagaagagagagcataaagaaaagtctacagaaaagagggaattatgaatggagagagggaagggaatgaatgaatgaatgaatgaatggagagaaggaaggaaagataaaagtaacatgtttcatgctacagccacttaattcatttaatatcatcacagttctaggaaaggggtattagtatccatattttacagatgaataaatcaaagcggatatgttaagtaaacttgaccaaaggtacatactatatagcagagctaagattcaaaccgaaatattcctgttgaagtctgaactttttgtcatatttgtcatcacatagtaaactgaaggttataatagaaatgagcattgtattatgtaaaactgaacactaaactattttattggctataaatcaccacacaatagatcaatgctcttgtcactccttgaaattatactatgttacgtatattgtctgtctttcccagtagaatgtaaacttcataagggcaggtacttattcttgcttatttccacagcccctgtagctagaatagaacagacaccgaggtaaatgttcaaaaacatttgttggatgcacagacaaaatcaaaggcaaaacaattgctatatttcttactctgcgccaaccctctattatttgttttctctgtgcattacataatggagtctgaaaagcaagcctatgaggtaatactgttactcttagtatcaccaagcctattgtgtagaggggaaaataaggcacagaaaagttaagtaatttgcttaaggtcaatttcataaagacagataaatgaaagagcaaggacttaaacccaagcagtatggcttcagaattcgagctcttaatactcaaaacttaatactcagtacttaataacttaatgcttaaagagaatttgcaaagagaatttggctcatgggctagaatatcttgcaatctcactaacagtattaatatttcaaaagaaatatcagataaaaatgtgattggtcagtaaggggatttcaatatggtaatttgatagcagttgattttgatgcttcatattttgctagaaaagtactcatttctataacaaatgttttgtcacagagttgcatttgatcattataattcttgtgtcctcccttacatgaaaatttctcattttcattatgatgcctctttgactttttttttcctttattcaactcacaaggggttttcctatattccaggtctttaaaaaaaaaaaacagctttaggatagatttattctcttgactttttgcgtttcattaagtttctatcttcataaatttcttgtttattcggatctatttttctaattttctgatttctaatttctattttccaaatctatttttctaatttcttgaaataagaagacaaattcttatttcctccttcttactcgtctatttcttgctctaatgaaggcacttagagcactttttgttttattatagactttgtattttatgggaatttttttactggtttctagataatttttttgtttgtaaagttcctctgaaatccaagcatctttcttcattatttagtgactgagcattttcattctatttttactatttatttcctattttattttatgtatttatttatttatttatttatttatttatttatttatttttctgagacggagtctccctctgtcattcaggctggagtgtagtggtgcgatctcagctcactacagcctccacctcccagattcaagtgattctcctgtctcagccttctgagtagctgggactacaggcatgtgccaccacgcctggctaatttttgtgtttttggtagagacagggtttcacc

SEQ ID NO: 588663 - DNA, 4001 bp, Homo sapiens
ttagtcttattataaatcaaattcaagaaaagttatggaaaataaaaggtgatgccttagctattaaggagtgtatatgactaaatgtcaatacagtttatttagaagtatttaatctaatcaatttctgatgaataacctttgctacctcagataccacaaacatacatttctcgttttatatgtgaggtggctcacctatttgttcaaaaatatttattgagcacccattatgtgtcaggctctattacaggattttttggatgttgtagggtaataaacagacaagatcctaccctcagggagcttatatgtgtagtggacaatgtacagtaaataaatgaacaattaaaaatgaatatataatacatcatgtggtgattaatatttactttgcatactaataaataatgaatttaatataggtcataaattgctttttcaaatgccttttgcctttattattttccgaagattggagagtgattattttctgctcaggcttccaaagagattttcaacatttatccatgatagtatgttttaacaccaggagcatgttttatttctatagttatatatttttaaacaaaaatctaacagtaaaagagaaaatatttctgttttgagacgaagtctcgctctgtcgcccaggctggagtgcagaggtgagatctcggcttgctgcaacctcctcctttcccgttcaagcaattctcctgcctcagcctcccaagtagctgggactacatacccacgtcaccacgcctgtctaatttttgtatttttagtagagacagggttttgccatattggccaggctggtctcgaactcctgacctcaggtgacccaccttccttggcctcccaaagtgctgggattataggcatgagccactgtgcctggcccaaaaatatttctaccatatggttttgaatgccacatggcaaaatttgttttcacatggtaattttatctttctgaattttatgtctgcagcagcattgaatattaagtcatgtagtataaatcagtattcattttccatcagaaaagtttttcctacacagtatgtttttgacagcagcctttacatccttgtttcgcagactatagatgagaggattaagcatgggagtcatcactccatagaaaagggagatgagggcctcaatgatgtcttcattacctgaatcaacagaggctttagactcaggctttgcgtacatgaagaagatggttccatagaatataatcaccactgtcaggtgggctgagcaggtggagaaggccttatgttttccttcagtggaaggaatcctcagaatagtggcaacaataaatatgtaagagatggaaattactaacaatggaataaccagaacaatcagattcgaccctgtcatactaatcacattgattgaaatatcagcacaggccagtttcaagatagccagaatttcacagacaaaatgtttaatgacattattagcacagaatggtaactgcattgcaaaagctgtctgcactactgagtccacaagcccagtgacccaggacccagctgccatggccacataggcacccttgctcatgatgacagggtatctcagtgggtagcagatggccacatagcggtccagtgccatcgtgcctaagatcatgcactccgtggcccccatggcaaaagaaataaacatttgcaccatacacccagagaaggaaacctttttctttactgccagaaagctggcaagaattagtgggacagaggaacttgtgtagcaaacgtcgaggaaggaaagattacagaggaagaaatacatgggggtgtgcaggtgagaatcaaagatgataactgagataaggactccatttccaagcaggatcatcaggtacatccacaaaattagaacgaagaaaactgtctggagctttgggtgggcagaaagccctaccaggaaaaattctgtcgacgtggaatcgttggtcctttccatattacatatactgatctccaacagaactctgtgaatgatagaacaggaatatgttaatacagtgtctgtgagagctacttttaagaatcatattctgtattattgcagttctgtttttggatgcaacaatataagtttggggacaatttcttcctgtaaaacccaggccactagagtaggaatcctaacctgtctcagagttaagagagaacacatgattataggacctttggatcccaatccactttattgctgtttccacaagttctgcctcttaacccattggctgcaaatcagtgttctacagcctggattcagcagacaggtgtgctttgtttggcagtgattgtctgcactgtgtttaaatttgaaatagagatcaacattcttttttttttttttcgacacggagtctcgctctgccgcccagtctggagtgcagtggcgccatctcggctcactgcaggctccgcctcccgggttcacgccattctcctgcctcagcctcccgagtagctgggattacaggcgcccgccaccactcccagctaattttgtttttgtatatttagtaaagacggggtttcactgtgttagccaggatggtctcgatctcctgacctcgtgatttgccctcctcggcctcccaaggtgctgggattacaggcgtgagccaccgtgcccggcctagagatcaacattctaatcaacagatatggtataaaaatctgtgccttcagcttgtctttgaataaattagaatatttgaaaactttagacctgtttctgtcatggagcttagttatattaataactgacccattggatccaacgcatgtccctccattctaccagactacaatcctcactctcttgtcactggaggtgaatataagttatcaattaacatgttagtctcatgttattctcaattgttggtctcaattgtttatattacctggcaggatcttatatggatttggaatcttgacttatggctgcacggccaacttatccattaggcacagtactccgaccatattgtgaaaaacctaggaaaatgttttgatttcttttaaaatatgaagaaaaacgttaactttaaagttttaatatatactatatttgtttttgtaacaatgcagaagtaaaatatgacttttaaatctttatggaaataaggccccacaaaggccaaaaaaaaaaaaaaaaaaaaagtgcctagggcccatcaaaatcataatgtggccctgtgtggttgagcatcttttgaaaactcagtctggtctactggggtatagtagtggttatgtatctgcatatgacctctttgaggagagtaacctcgttgagaaaaggaacataccttcatactcctccagtatgttttttcagtacaatgaggaagtattcattcaaagaaatgatttttaaaaaattgaataaattaaaatttacaaagccaattttatcactggctttgattaaaatatgtaatggtgtttattgtagcctctacctaatttattttcaagcatgcaacaactaaagaatcaattgtgataatagtgcttttattcaaaatatatacattgaactgaaccaatgatgtctaaccattcattattgaaaaataaaatttatacagaagtgtaatatataaaacaaataaaaaggaaaatttctccagttgaagttacactggtgtacaggggagaataaaacaccattctttacttgtttattcactcttactccctcagttaagtttaagaggattccagggagcatagttttaaaatcgtcaatgcaatacataaaatcctttaatcaacaacaagaataataagatagtaatttatgtattgattatgccagatacatttctaatttttttaattcataataacccaaggtaatgggactattattgtaggagataagaattatcctttcttaaacatttggtaaacatcagtaaattatggtatgaatagact

SEQ ID NO: 588664 - DNA, 4001 bp, Homo sapiens
ttcactcctgaacacacttcatcattcatcttgggctgtaaatttaaaatgttcttcacatagagtaaaatgttgacgtaaaaaccaaggaaaagcaagataatgtctgacattccccaatcctcttcttcctcaaattaagctggttagtaacagagacaagacatgaatagtatttgtactaaaaattaagagcttggacattcttctaagacttggaaaaatattggaattccctcgggatagcaaaaaaattgggcatcttctaaatgggcattgataggacactccattcaacccaaaactagtccacattattatctggaccagtagactgattttcaaacctatttttaattttgcaaaatgttctttatgctaaagccaacctataagttaaagcaaagaaagaccataaagcaggatatcccgattgattgcataggccctgcttttaaactctatttatctcctgccccttgatagtcccaaatactcagcttcacacaaaaatatttaaatacagaacaagaaaatagtatttaatgactcaacaggatctggagattaatgtgaaactataacacaaggcttgccactggaaaatgtgagtgcagtatattgggtttttttctgttttgctttttctacaacagagggctttatttattttgaaagagtcaatgaaatgttgcctatgaaataacattatgtagaaaagtgaacataaaaaggcacatcacacccaattccaatacagcaaaaatttaaaaaccataatacgaaagatactgttcaaaatgttgaaaagtagccatttcccactattagagtaataggtagcccctctgtcttcttcatcctactgccctgtatcttgcaaattctctagagtggacatgcaataattttgaaatgctgtatctcattattttaacataatatatgaaaatgcagaaaaatagtaaaagtatccaaaattctaacataattctgaagtttcaacaatatcaagtgtgttcacactccagtacattttgcattcacttgctaaagaaccttctgttcggtaggtgttttactgcctctttcacatccttgtttctaagactgtagattaaaggattcatcatgggagtcatcaccccatagaacatggatataattttgtcggtagcatccaagtcatctgaattaagtgtctctttagacttgggcttcatatacatgaagaggatggtcccatagaatattatgaccacagtcagatgggctgagcaggtagagaaagctttgcttctcccctcagaggagtgaatcttgaggatgctggaaatgattaatgagtaagagataactatcaagagcagtggcatcaatgtgaacaatattgtggccacaagcatgaggaactcattgcctgagatgtcagcacaggccaacttcatgacagctagaatttcacatgagaaatgattgatgacattcttcctgcagaaaggcaattgtactacaaatgtagtttgtactgcagagttgacaatccctgcaaaccaggacccaacagccatgggtacataggcattcttgctcatgatgatgggatatctcagagggttgcagatagccacatagcggtcaaaggccatcatgcccagaagcacacactctgttgtccccatggccaagccaaggaacatctgcactgcacagccagaaaaggaaatggtctttctttctgaaaggaagctcactagtgtggagggaatagaggtggtggtgtagcagatgtccaagaaggagaggttccccagaaagaagtacataggggtgtgaaggtgagggtccaagatgctgattaaaatgagagtaccattccccagaaggatgaccacatacattatgaagattagcacaaaaaagagtaactcaagccttgggtgaacagaatgtcccttcagaaaaaattccaccagaatggtttggttttcccattccatttaaatgtctctcttttacctgtaagaagtcaaaaaaattaatataatttatttacatggtaaatccaagtataccaatgtacaaatataaaaatttgccacggacccataaaagtattgaagaaagagaaaatagggaagaggaggaaggaatatacggaaatggaatgaaaagaattaacaatgcaggaagagaaatatgaggggaaagcttatgatattgatcactcattcttggccaggaactttgtgattttttttcacattacttaatttaaactccacattatcatttgaaagataagaaaacctaaagtgagagagttcagcctaaagtcatataactaatgtgtagcaaagcctaggctccaagactacctgtttgtgtcccatacttgcctgaggttttttaatgaattataaaagcaatacagagtgtattgcataagagatttggtaatttactttaaaacctcactcccaggtcaggagaactcaacaataacccatatgtattccaacactgaaagaagtgtgtcaatctggagggagaatcatcagaaatgaacccaaccagtgattactgcattcctgattatccagagaacacgaccaattcatgtaaagcccaataatatgaaatcttcgtgttaaagtgcaaacacctttttctttggttaggggtggaatttttttgttgttttttaaaattatcatacagttagatgtcataccataaactgactttttatttcctagtgtatggttctgtgaattttaaaacatgtatagattcatataaccacggccataaccagaacacagaactcttctattaccccaaaacacttctttgtgatattcttttcttagtcacctcttccacttacctgtacatcctggcaaccactgatattttctatccctatagttttacgtttaccataatgtcatataaatacatataaatagaatcatatgagccactggggttgagcttctttcacttagataaagcctctgagatccattcaagttattattgctaaatagtattctattgagtagattactgtattttgcctatctgttcaccttttgaaggatatttggattgtttccagtttggggcaattatgaatagagctactataaatatttctgccccaatttttgtataaccataagctttcatttttttagaatatccaggaatgagacaataagcatgtttaaatgtataagaagctgccaaacagttttccagagtggctgtaccagttttgcatttcaaccaacaatgtatgagagttccacttgcttcccatctcatcatttaatattgtcagtaattttttatccattctaatagatagtcatatttaattatgattttattttacatttccttgatgactgatgatgtttttccattctttagtaaagtatcttttgccccctttttttgttaacaaatgggggtctcgctattttcccaggctgtcctcaaactcctggcctcaagccattctcccacctcagcctctgagtatctgggactacagattcatgtaactaccagcttaaccagaacacagaactacaggcatgcaccaccatgctggttctattgctcatttttaattttttttccttgttgagttttgagagttctttatatattttggatatgagttatttatcatgtgatttgcatatattgtctcccagcagctggtttgtcttctcattctctaatgcaaacaccttttagttgccatgttaattggttgctgcctaagtccaattgaacatgatgcaaagaaagactacgactaaagagacatgttctaacagcacatctcactttaggtgatactgcaggaaaatatccactggaaaatagccattccctgggaattggaaatggtggattttgcttaaacttgcctcagaaagtctcaagctatctcttttaattttttctcaggaacagtcatt

SEQ ID NO: 588665 - DNA, 4001 bp, Homo sapiens
tgcgttcaagagttaaagtgacaccatcaagcacactctgtatctcagctctgctttcattctcatgctgtcctcacatattggcaatggttgccagtaggaattctgagttaacattctaccagtttagacaccatttcaaaaaacagtgtgtctttctgacaaaggcagcattcctgggatggagtctaattagtatggctcgggtcacatcctgcactataccaatcactatgactagaggaattagacatcctttctttctttctttctttctttctttctttctttctttctttctttctttctttcttttttttttttttttttgccaagacctcttccatgcttatctttattttcagaggtttgggtcagccccaccatgtacaacatagactgagagtgggggactttggttcattaaaagaaaaatatacatctttctattaatatatattatgcagatctgtcaattgggtggcaatattgtgcagggatgctgcacaacaactatatatccacttcaaagtgactgagaaaggagacaacagaaaagaaaggaagagaaagaaaatatacggaggagaggagagagagtagcagaatagagagagaggacaaaatcagaggagtagagagagacacacacatggcaggagagagaagaaagagagacagacagagagagagactgagtgagagagagagattcattttaatggacagcatcaatatttttatagggccagtttgcagaactgcttacagctacaaacccagcagacaaggcactattaagaaggttacatgagcatgaaaattctacgttgaaaagaatgggaatctaatagttggttttgcaaacacacaagctctcgtgacagtaggttttgcagtatctaaatacaaaagacaagctctcttgccccattgaggatatcgcatgcccaaggtttttcacattttcaataaatgcagatgtctgctcaggactttctttacagcctctttgacctctttattcctgaggctatagatgatgggatttaacattgggcttaccactccataagacagcccaataatctcatcagatgtattagtgttctttgacttgggtttcatgtacataaaaagggctgaaccgtagaataagatgaccacaatcgagtgcgctgaacaggtagagaaggctttctttcttccctcagcacaattaattctcaggatggaagagagaataaacacataggagatgaaaattaacagtagaagaatcaccagtgaaacaatatttgtcactgtcatgataagcacattgatggtgatatctgaacaaacaagttttagaagggccaaaatttcacaggtaatatgatcaatgacattattcccacagaaaggcaacatcattgtcagaactgtttgcaatagggaggtcagacagcctatgatccaggaccatgcagccatttgcacatacagcactccgttcatgatgatggagtacctcagtgggttgcagatggccacatagtggtcataggccatcacagccaggaggacacactcagtggagcccaagccaagggacacaaccatctgcagagcacagccaatgaaggagatggattttctctcagacataaatataataagcattggaggaatggatgaggatgtgtaacagatgtccaagaatgagaggtttccaagaaagaaatacatgggagtatggaggcgagaatccaagatggtgatgataatgaggaggctatttcccaggaggattatcatgtacatgatgaggcagagcaggaacagaaaaagctggagctctggatattgggaaagccccaccagaaagaattcagtcatggcagagtaatttcttgtctccatgtgttctaggtcacctgcctgctgggtagtatagaaaaggacatgattcaggtaaattgaaatgtttgatacatcaaaatctgtaaatctgtacatctacaaattttcaatacaaatttgcttccgatattgtgtttgattcttagaatactctcagtaagcaaaacagtatggatattgtactagttttattgattatgaaaattgagacattgagaaacccaatatatcttaggactacacagcagcacattcaaagctaccaatactgccagaattattctgggaagtgtcaaataaagtttaggaacatgctgctttcaaatgtagaaagagattttgaacttaaagctgtttttttgatgaagctggcctctatttaaaagattttatagactgccagtgacatatcatttaacctggatgtagctttggtaagttgtttatttttctgagttgcagatagttcatagtaagcttggaaaaagcaataattatttcttagagtatagttagaattagataaaatattaggtgcctagaacctaatggttccaacatggcatatgtgtgtgtgtgtgtgtgtatgcatatatgtaatataattatatttaccttatacaagatataatattaaatgtatttttatacacatgcattttatgaattatagtataatatttagatctaccaatcttaaaagggaaaagtagatttagctttttaaaggtaaaaggtttaaagtttgaaaccacacttgacagactgtgaacatttttgttctcagtgggatatttcattgcacttctttcaaaaacctgttaggagtctgagaatcattggaggactgttctagaagcttccagagattaaggagtctaggtcccagcatgtacagctttttttccaggccctgggattctctcttcttaagtgtagtattactgccattttacaaagtaggaaacagagacaaagaaaagtttaagtaactttctcaaggtcatacagatagtaaatactaaagccagaattcaatatctagccatctggctatagaatcagcccttttacccaccatacactactctctctcagtggttactacacagattccacgcaagagaagactattacaaaaatgtatcttctgttggggtacagtgagacagcaaacatcatttacttgtgattctgatcatatgtgatgtgatggagaactctgaaggctggaccacttactttttcctgtagcttttgattgtggtctgctcagttttcttttcttttctctcgctgttttttttttttttttttttttttaagacggaatcttgctctgttgcttgggctggagtgcaatggcgcgatctcagctcactgcaacctccacctcccacattcaagcgattctcctgcctcagcctcccgagtagctgagattactggcatgctccactacacctggctaatttttgtatttttagtagagacggggttcatatcatattggccaggctggtgtcgaactcctggcctcaagtgatcctcccaccttggcctcccaaactgctaggattacaggcatgagccaccctgcctggtctgctcagttttctatgtgtagaaggcgatttcacagctatgaaaaaaagcatgatcaagaataatgatacaaaagtccttttcatcacctttgcctttttcttttctttctttgtttttcttttgagacagagtctcactctgttgcccaggttggagtgcagtggtgtaatctcagctcactgcaacctccgcctcccaggtgcaagtggttctcctgcttcagcctcccaagtagttgggattacaggcgcataccaccacacccagctaatttttgtatttttagtagagatgggatttcaccatgttggccaggctggtcttgaatccctgacctcaggtgatccaccctcctcagcctcccaaagtgctgggattacaggtgtgagccaccatgcccagcccacctttgcctttatcagtaacatatcaaaaataccacagcccctgccctcactctgcaaatctaaatgcagcatagagtcttt

SEQ ID NO: 588666 - DNA, 4001 bp, Homo sapiens
atatccatagatacttcaggatctcccaattgtacctctattccacctcatacataggattacaatagtgccaacccttgttatgatatatttgcacacacacagatattttatcatcccccacatataacattccaaataaagaaaatcactcagccgggcgtggtggctcacgcctgtaatcccagcactttgggaggccaaggcgggcggatcacaaggtcaggagattgagaccatcctggctaacaaggtgaaatcctgtctctactaaaaatacaaaaattagccagacttggtggtgggcgcctgtagtcccagctactcatgaggctgaggcaggagaatggcgtgaacccaggaggcggagcttgcagtgagctgagattgcgccactgcactccagcctgggtgacagagcaagaccctgtctcaaaaaacaaaacaaaacaaaacagaaaaacccaaaatcactcatatttcattacagttaaaaccatgttttttccactttaacatgttggaaactaggaagagttccaaaattgatgctgttttggttttacaaattattaggggtgtgtgtgtgtgtgtgtgtgcatgtgtgtatactttgagttgtatccacactaattaaaaaacatatattctttttaaattgaggggaaattgtgaattatttggagtaaattatttcaaaattgactagtctcaaaattttacagttttggcatatttattgttattatgcttatgtcacagctggacactgagatgctatagaaagtaaatatgaaataataggcaattatctaattttaatgttatactaatattcaataaatgctaattgctttcttggaaacttaatttattcttcataaatgatttgttaatatgaaaagttttacttataagacaaatcagaatagaggatataatagtaaacttctattgaaaataagtagtttccagggttggtttaagtaaactattatgcagttttctgggtaatgttgattatctatatgagtgtgattgttatttgaggatggaaatgaaggcagtattaaaatgatttctaatcagcaattttttcaaggccactttcacctctttgttccgtagactatagatgataggattcaacatgggggtttgtccggcatacaccaaagccataaatttgtctatttcctgtgaatctacagcggagggcttcaggtgcatggagagagccgtcccatagaacaaaactaccaccatcaggtgggctgtgcacgttgaaaaggctttacttcgaccttccactgagctgattctcaggatactggcgaggataaatgcataagagatacaaatgagtagcattggcatggggagaagaagtacactgatcaccagcatgattaactgcaccagggaggtgtccacacaaaccaatttcaagatggccagaatttcacaagtgaaatgattgatgatgctattaccacagagagacagtggcagcacagacatcatttccaccatggcagtgagacagcctgtcatccaggagccagctgcaatctgcacacaggttctcctattcatgatgacagggtatctcagggggttgcagatggccacataccggtcatatgccatcatgggcaggagcacacactcagtggagcccatggcaagggagaggtacatctgagtggcgcaccctgagaatgaaatagtgtttctccctgaaacaaagtttgccagcattggagagagggcagaagaggagtaccagatgtccagaaaggagagattgctgaggaagaggtacataggggtgtgcaggtgggaatctagaatggtgatggagatcagaaaaatgttgcccagcaaggtgatcaggtacatcagcaagcacaccgcaaatatgatgacctgaactttggggtagtgaaaaaatcccaggaagaaaaatacttttacagatgtccaatttgccgggaacatttttttatgttatgttcacctgtacgtatgcatagaaggattaacgtcacacatatataaaacataaccccctccttcacatatctggcatgttttatttatatgaacttgtgttctgttcttcaatggttctctaggttagtgatagtaatatatattgaagaaatttgtcactaataagaaaaatttaagcaggaagtcaacagatacatccttaaaatgttacttttgctgtaagattttcttttggcaatgtgagggtaggaggatggtgtatttaatcggtatcacaaaagaatgagaaaagaaacaatattttgcattctttctttttccaaaaccacattttaactgatctatttacctctgtaccattggcatgattttcttcctctgatttggtaataatcttcttacttaggaactgtttggatttccaagttcacagtttcttctgccattcctagagatatatccaaaataatttggaagtctcagggaataaaggcaaaaaaaggtatagatttctgcagccataaagtaacagagactttggacacttagaaacaagcccagagtttccttctcaaactcaggaaaatggtgacatgtgtctcatgctaggagacacatggcagatacttctttcatcttgctgttgtcctgatgtttgtgctgcagaaacatcctgcaaagaaccagccattggcagtgtagggcaatttaagctatttgttccttttgaaaagtcttcaattcatgcagcaaattaaacatctatttgtatagtattacaaattctaaaactccagggacagtgtcccataaacccaattatagtcagtagcttgtcttgtctaactgtagggttattcaaacaatacataaacatgtttcctgtctacattgtctttgggaaggggaactttactcttctcccaatagtgttatgaagtcaggcttgttgatttaaatgaagttaaaaataatggataatgttggtagtttctccttcagattgtaggagagttttataatatcaatgagatcaagttgtacttgatatggagcctaccaaagacaggggaatgcgtgcttaagtaacttttctattgttcaatatggcttaaagagaaggccattgagggcagatatttctcatagaacatgaaggtccatttgctttcagaaacactttttcttttgggaagtgagcttcaccctataaaggcatcgttacccttcagaaatccactgatggttctatctatttgagtgatgctttataatccctgttcacaacttgtctgttttccaagtgagagatgaatggttaacagtgtatggtggcgtggggaatgcatattgtcaatgtcaccactgtacaatagtgattgtataacttgcttcttagtagcagattgtaatcatggccattactgaattgttttatatcacatcaaatattcttcattctcagagaaggtcataaatttgaatgattgccaagatttttcaaagcacagtaaaaaaaaatctcttcgctagttagtatttgcaatcagaatgcatcttttaggtctgtcatgtactcactccaacagagatagaactttcatggccttaggatcatgcatatggttcccttctttaactataggaaagcttggtgcacaggaaagactagggtctttgtgcaataaacactttccactttaccacttcatttttgtcacctagagcaagttgatgatcctcactgagattcagattatttataaaagggcaatgacaatatttctttatcagagttgttttgaggaatagagatatttcatgtcaagcaactaagactgtagttgatgtacagtaggtaattaataaatgttagatttttccccattctgtggtttttgacttgcttcttcaatcatcttttttccttgtatttattctcccttttcattatttccctctttgactatggcaatgcccttcct

SEQ ID NO: 588667 - DNA, 4001 bp, Homo sapiens
cccttgaacaatggactccaagttcttcagtctggggactcggactggttctccttgctcctcagcctattgtggaaccttgtgatcgtgtaagttaatacttaataaactcctctatcctattagttctgtccctctaagagaaccctgactaatacaggcctcattgctgcctctactgtcacctaccagggaagctgggccattctcgtcatctgtggactccgtctcagctctgctcagttttgggaagaactctaggctctgccattgtcacccctacattgacatgttaatatctctatttaagaaacttgtgcagggcctagagttgggcaaggctggaccttgggagagagtagaatctgacactccctgctcttggagtaatgctgaaaacacagaggggcacagcaagaggagcaaggtggggtggcttcctggtggaggtggcatttgagctgggcctgaagggtcaggcagtcagtccttttacatatggagaagtgtgctggggataggggagggggtgctgcctcgtggggagaaacaaggagagcacagagctgggtggtgcagggcatgtgggggccacaactggctggtgtgtgtggctgtgaggagggagatggggtgggaggggaggaaggctggggagccagtcaggcagggccagcttgtgagggcctcaaatgccccactgaaaagcttccactttgttctgagaacagtggggagccacctagggatttcagtgagaagagtgatgcaatcacatgtgcatttcaaaaagatgccccatgaaggagagattggagggaggaacaggactgaagtcttgggaccagccaggaggctggtgtgaaggccagggtgatgctgagagcagagggtgatttgggggctgttctgtggcaggatcagcgggacttggtgctgccttgctgggatgaagataccagacctgtagccccagccctgccatgtcttcactggcattggcatacgatggcctcagctactaacctgagacctgcgtctgtacagagccccgccctccctcacctggaggcccgactcctgccccacaccttcctggcggcctccttcacctccttgttcctcaggctgtagatggtggggttcagcatggtcgtgaccatggcatagaggactgtgaagacctcatcagagatgtgggcttccttactcttgggcttcaagtacatgaagatgatggtgccgtagaaaagcagcactacagccaggtgtgccaagcaggtggagaaggctttgcagcacctggcggccgagggcaccctcaggatggtggccaggatgagcaagtaggacaggcagatgaatgccaggggtacaggcagcagcaggatggagcccgccagcaggaagtcttcgctgaccgacgtgttgccgcatgccagcttcagcactgccaggatcttgcaggtgaagtgactgaccacgtggtggccacagaagggcagcctcatggagatgaccatctcagtcaccgacttgaggaggcagaggacccaggcagctcccatcagcagcacgcagagccggtggctcatgagcacgtggtacctgagtggctggcagatggccaggtagcggtcataggccgtgatggccagtagcaggcactccgtggagcccgtggacaggctcagacacatctggatggcacagacagcaaaggagatggtcttccgggatgacaggaggtggaccagcatcagaggcacaaaggtgggcgtgtagcagatgtccagggtagagaggttgcccaggaagaagtacacgggcgtgtgcaggtggatatctagcacgctcaccgccatgatggctgtgttccccaggagggtcaccaggtacatggctgagcacagagggaagagcagatgctccagggctgggtagccagaaaatcctttcagaaagaactcggacacctctgttctgttgagcggctccatgctgcagagttctgaagagatggtccacagctgggatggaaggagagagggtacagggtgcggggaagctcacagagccctttctgggacgaggtggactgtcaggatcttttccagcactgccacactcactgtctgtgacgtcgggcaatccctttatcctctctaggcctcagtttatccatgtgaaaaatgagcattgatttagatcagcattccctgagagaatgttaatgagaacattagtaagcaatctgaaaaatcaatttgagacaacattggattaataaaaaataaagctctttactgcaggacttctcagagcgtttactacgctaatgtgatctatgactcctgcaaagcaatgtagaacatctgtaccccaaacttatttgatcatggatccccttttacagaaaacccattaacctactgcagataagtgttctatgagcatagtctgggaaacagtaggctagatcaacagttctcaaactttaacatgcaccagaatcacctggaaagtttgttaaaacagattgttgggccccaaacccagtttctgactcggtgcgtctgggcgatgcttctgctgctgatgtaggtaccacactttgaggaactagtgggctaggtggtctctgagcaggtggagattctcctggctttaaggaagcctctgagccatcgcatttgctattccttctgtctggaatgtcctcggcctgcagtggtctgacctgtctcttcaggcctactctagtatccatgaacaaagcatacaccgtgctgtgtgttggagggctgctgaccttgaagcctatcgctgggcatgttcccctgtcccctgcccagggcctgtttcattagctaccctgtgtggattggaccttcacaatctgccttcctgtgggtttcccagctaaaatctgatggagcttttggcccagctccaaacccctatgttctgtgggccagagcgagggctgctttgacttcatgaactcctagggtattagcatggaacatgaccagaggccaacttgttggatctcccattgtatagatggggatgctgaggtcacacaacaggtctctggtgaggtgaagctagaatccagccctcccaacagtgtgacccctataccatgctcagagcaggtgtatgcttctattaggtttcaaacaatgcttgttcttttaccattctagatggatatcagtgccccaggtgctgccacaatcctctcaccagcaaaagagcatgagtcacctctccttagtgttccagggtatctggcacggtgtcattaatcccatgggacacgatgccaaatcctgggcctgggtggagcacagttcctctcagtgccttccttgcaggagaccatttccgtcttttattccaccctcacttactcatcccagaacctagaagtaactgaggacctgctacatgtcaggtggtgccagatgtgagggagcactgatgacaggtgtgctcccaggctgctgagtgcaaacccttcctaggcagagaggacccccaagtcttccatacccagcctcaccgtccccccactcttccgtacccagcctcacccacccctcccactctcccatacccatccttgtcctcccccaccctcccatacccagcctccccctcccctgactcttccatacccagcctcacccacccttcccactctcccatacccagactcaccctccccccactctcccatacccagcctcacccacccttcccactctcccatacccagcctcacccttccctcactcttccatacccagcctcacccacccttcccactctcccacttttccaaaagtaactattgttattagttttgtgtatatctatccagatacttttctggccatttgcatatgtatatctatacatggaaataggtcttgtgactttttagtatgcttttttgttgcagctttattgaaggatggttgatgtacaac

SEQ ID NO: 588668 - DNA, 4001 bp, Homo sapiens
cccaaatgtccaacaatgatagactggattaagaaaatgtggcacatatacaccatggaatactatgcagccataaaaaatgatgagttcatgtcctttgtagggacatggatgaaattggaaatcatcattctcagtaaactatcgcaagaacaaaaaaccaaacaccacatgttctcactcataggtgggaattgaacaatgagaacacatggacacaggtaggggaacatcagactctggggactgttgtggggtggggggaggcgggagggatagcattaggagatatacctaatgctaaatgacgagttaatgggtgcagcacaccagcatggcacatgtatacatatgtaactaacctgcacattgtgcacatgtaccctaaaacttaaagtataataataattaaaagaaaaaaaattaatttaaaatatataaaatagaattcaaatgcatcagagttagatgctcacactataagaaacccatggaacttaatcctaactcatggaacagtagaatcatgattatcatttcatactcactctgggacatatttttgctcattgaatggaacaggtagcgaacttagccctatttgtctaaactgtcatcttcccttactttctgatatacacaaacacactcccacaagaacacacaccaacctaaatgtgatgatgatgattaactctactgctcttcgtttagttcatagtttcacaatcctatcctcatattccctcagaactctaaaattaaaactacccagacttggtaattctttttcatccactttgataaaataaaaggcctgatggagggtgcccagaggtatgctgataagggagccctgatcttatgtgtctatgaatgtggaatgttcatggctccatcaaagcacaacattgacaagagccaaatctggagttccttaagttatctaggccctccacccctctgatctccccaaaaccaactctgctcagaatatgcccatgacttttctcacctattcaatatggcccacagcaggctaatcaggggtctaccttcacccattcaagcagcctgcagagtgcacccttgacatccttattgtggaggctatacacaaatgggttggccaaaggtgtaatggcagtatacattactgaagccaccatgtcctgatactgagagttctggaagggaggctggaagtagacacaaatgatggtgccgtagaggaaaccaaccatggtgaggtgggatccacaggtggagactgctcggcggcgaccagcagctgaaggcaaacgtagaatagcggccccaattcggacataagagagtacaatgagggcacaggggcccagcataaggaagccaccctcaaagaatatggccagctcattagaatgtatgtcagaacaagaggctcgcagaagtggccggtggtcacaaaagaagtgaggaaggttaacgttgcccccagcatccccagtccagcaaagaggcaggacgagtcccacacgcaacatggtgtgcagtatggacaccacccagctcaaggctagtaagcaggcacaccgttggtgattcattaccaaagcatagtgcagggggtcacagatggccacatagcgatccagagccatgacagcaatgacaagtgtatctgtaaccccaaatgcatagaagaaaaagaactgagccaagcagcgggcagcaggaatggttgggtaatgagagaccaaatgggccagcaactggggcagtgtaactgtggatagccccatgtctatcacagagaggccacgaagcagataatacatgggtgagtgcagtctggagtcccaggagatgagcagcaccagtgtcacattccccagtatggtggtcaggtaaatagccaggaacaggaagaagaggagagtgtaggagatgttagctctcgagaacccaaggagcaaaaaaaccggagagtgtgaagcattaggggcaaagctcatcatgagtgacagtcagcctgcctgaaagacagtttaagtcaaaaagaaagtcatgggtctgatgttagggatcatagcatttctagttaattatattacgttactaaagatcgttaaagacctagattcgaacttgaccatctactctccctccctaaggtctaggatttcgcttccttaatatgtatttattttctcctttatttcttccttttcacccaccctagtgacttgttccatctaattcacaagccctactaaagtccctcccacagtgaaaaactcttcattcattcttgtcttttcatccaactatttcttatctttttccagtggccgacttcatgaaagaattatctatattcactgtctccagttccttaccttccattcacacctcacccaactgcaatcctcatgatgtcttctctctgaacctgtatggaaaataacataccattaaaacacataccatacaaagaaacaattctttcgacatagctgacttttttacattttcctctaaggtctggaacaagacaaggatgtccacttttaccactcctattcaacatagtaatagaagttctagccagagcaattagaccaatgaaagaaaagccacccaaattggaaaagaggaagccaaattatccatgtttgctgataacgtgatcttatatttagaaaaacctaaagaccccaccaaaaaactcttagatgagatactgctttagaatgtcatgaaattactttttctttctctttattccctgtgttagttaatagcattatcattatcatcagcctgatgcacaaacaaaaaactgaaggaattactccatcatctcccacatccaatcattccttaacgtctatgttttcccttatatccattctttgctgttagtccactatgactatttaagttttagcatctctaaccaatactaatttctacaacctcattactggtttctctacttgactctcctgataggtcttccatactgatactggaataaaactttcaatatgtgactccttgtttaaatagtcagggacttcagaataaaatccaaatgcttaatctgtcttgtatggaactttcattattagtacctaacttctcttagaattatactgagtcacctatccagggtttttttgtttttgtttttgtttttgtttttttaagacagtctcactctatcacccaggctgaagtgcagtggcttgatcttggctcactgcaacctctgcctcccagggtcaagtgattctcctgcttcagcctcccaagtagctgggactgcaggcacacatcaccacacccagttcatttttgtatttttagcagagacagggtttcaccatgttggccaggctagtctcgaactcctgatctcgtgatccaaccatctcggcctcccaaagtgctgggattacaggcatgagccaccgtgcctggtcccagtgttttaaactagacattttttcttaattctcaaacatggtaagctctcacacccctgcacatcttcccattattttgagaatttgggctttctgaaatatgaggtatgtaatacaatcatccacacatgcccactcaacacagaaacttagagaaaatataataatcatactttttttttttttgagacggaatctcgttctgtcgcccaggctggagtgcagtggcacgatctcggctcactgcaagctctgccttccaagttcatgccattctcctgcctcagcctccagagtagctgggaccacaggcgcccgccaccatgccaggctaatttttttgtatttttagtagagacggggtttcaccgtgttagccaggatggtctcgatctcctgacctcgtgatccgcccacctcggcctcccaaagtgctgggattacaggtgtgagccaccatgcccagccaataacatacttttaaaatcataactaagctttcaagaacataagggaaatacaagagtc

SEQ ID NO: 588669 - DNA, 4001 bp, Homo sapiens
tacactgagtcactctggaatcagatgccaagattcaagtcttcctttcacgaactatatgatcttggggtattcttccccttttagagcctgagttttttaaacttaccttttggagtttttgtcagaattaagttagatgattttaaggtatattaagttcttagatcagtccctgagagaactgaggtgacatttattttgtcactgaacatctgtatgtgtttggggagaaaggaagtgtgggctatattctggaaggacaagacagcagtgtgttaattattatgtaaggagtgagaaatgtcatatgtttttcttaaaatttctgaaagggcttcagcttcctggatatctggtgcctgggcgaaagaggagccatatcttcacaaaagtggaaaattcctaagaaatagaggtgtgaagggccagacacattttataacaaatttaaaatctgggaaaggtcagccctgatggcttccttttcataccagccaaagtgacataacatgctcagaatattttccaattccattacccaagaaaagagcaaacaaagtcctatacaacatatcctattttactattccctcaaacagatgcaataataatatcaggaaagcatttcagagtgacagctgtggaagaaagacaagtgagctatattttcaataatttgtatttctgtattattgaggaaaaatattacatgggatgttttaaaagaaaggtaaatatcagttagaataatggtttttttttactcaataatttttttttcttttttcttttttttgacagagtcttgctctgtcacccaggctggagtgcagtggcacgatcttggctcactgcaacctccgcctcctgggttcaagtgattcttctgcctcagtctcccgagtagctgggactataggcatgcaccaccatgcccggctaatttttttgtatttttagtagagactgggtttcgccatgttggccaggctggtctcgaactcctgatctcaggtgatccgtctgcctcagcctcccaaagtgttgagattacaggcatgagccactgcgcctgacctactcaagagttttcttagggctcccttaatgtctttatttctcagactgtaaatgaatgggttcaacatgggagtgactgctgtgtatatcactgaagcaattatgttcttgtcattggtgttgctggatgggggaagaaaatagagaccaataattgtccgataatagatagtcaccactgagaggtgggatccacaagtggacaaggctttgcatatgcccttggtagagggaatctggaggatggtgaccccaatgtgaccataagaaaccaggatgcacaggaatggaagcataatggctgtcaatgctgctgtaaagattgctaactgattgagggaggtgtctgagcaggacaacttgagcagggcaccaaggtcacagaagtagtgagggatgatgtggtcagcacagaaggaaagctgggccaggaggagggtatgcaaaagagcacacgcacaagcgatgacccaggacccagccaccagcatgacacactggctctgagtcatgatggtggcataatgtagaggatgacagatggccacatacctgtcatatgccattgaagtgataaggaaactgtctaagtcagcaaaaaatatgaaaaaatatgtctgtgaaatgcatcccttgtaaaagacggctaggtgctgagtctgcatgttcatcagcatcttagggacagtgacagatgaaaaggagatgtcagtgagggccaagtggctaaggaagaagtacatgggggtgtgaaggtgagagtctagctggatgagcagcatgatgagcaggttccccagcaccgtggtcaggtacatgcccaggaacagggcgaagaacacggcctgctgctctggccggatggggaggcccaggaggaggaactcggacacgctgctctggttctcagggctcatgtttatatcagctggagggcactagggaaatttgaaggaaaaaaatggtatgtcttggaataagaaatgataactgtggcatagtataatagagatgttcttttgacttagagaatgtcttcatattttcttacatttgccacatattttgctgcaaatgtgctgaaaaagaaatgaaggtttagtcgatatagctactttctttctgaatctggtctctgtaaatgatagtactaaaagttgtttgctaaatgttttttaatacactgttccaatagctgatgtattgtaagtgattcaatagccttcaatatatgagctgggtggtactgttattatttctactctttagatgtgaaagctaaggcagacagtcttatagtcacagcaataggaagaggagaagctgggatttggaccgaagtatcttgactccatagtttcttctgtggaaacaaagcaattatttgacattggaaatctcattgccttattttgtgtgcaatgacctatttaattctgtataccctgcttgtctacacagtgcatgattatttctaatttattcattgtttatagacccctaatctttttttaagacataacactttatttattaaaaaactcttccatgtaaacaattactccaaaagacaacaaaacaagttattttgagtgatttttcaaaggacatacccacatattttatcatgatatatatgtactattctagaaggtggggagggtggtactgttgaaagtccaggtaaataaatcataatacgaagtaagcaacaagatagaaaatctttcttatggtttcagatccatacataattgctctgatctttttttgtttgtttgtttgtttgagacagagtctcgctctgttgccaaggctggagtgcagtggtgagatctcggcacactgtaacctccgcctcctgggttcaagcgattcttccagctaattttttatttttagtagagacggagtttcaccatgttggtcaggctggtctcgaactcctgacctcatgatccacccgcctcagcctcccagagtgctggggttacaggtgtgagccactgcacccagcctaattgctctgatctttttaaagtttaagataagtgtaagatatttaattctatgtttgaatatcaatgtgtagcgcgaaaacatatatatattcctccaggctcaaccacacatgtgacaatgtctcttggggacgcagcggtgaattcctctcacagtatgtctaaggagcattggctcagtgagatttcacattcagtggatttcagccatctcatcaatttctccatgctactgaaatctcattgttccactcagaatttgtcttttccccaggatggctttcaaagcattttactgactgtgtcaagccagagtaagtaaaatgctgatgagtttggatttcctcctccagtctctcggcctttgtgttttattgttttgtatctcatttctatatgacatcagatgctgtattagaaattcctgcttgatcttgaaatatatcaaaggtactgactgatgaggcattaaacacaacttaaattcagtctttaatcactaccacttttaaaacatttaatagtgtaattacgaaaaattcataaagacttggaaacttcacatcataataaattcagatattagcgaggctgtcagatgctgttactctattctaaataccagtaccagaaggacgagacaatttctcaacatatttggaaataatacttcaggttaagatatgagctggatgtcttattttggtctattctttttcatgtttccatgttcctttctctttttcttgaaagattagacctagaatctatcataaccaactaatgcatactctatataaatttgttgatcaaataaaatgttagagctatttaaatttatcataacagctttattaaaaaacttttactgggcttagttcaagaaccagctttgct

SEQ ID NO: 588670 - DNA, 4001 bp, Homo sapiens
gcttaatggaaacaagaagtcacagatggacactggatgttaatttttttccaaactttggcttcattttcattacatatataggttggcgtgatgatacaaaccatgatatggagtagctgggtatttctatattatatacaaatgagataatttagagactggggagaggaatttaccacagctagagttaatccaaaaatatcaacatgaatcactgatttctctattactgaaataacttaaggtgtctcttgtttcatcccatctactaccagaattcagatgaggtgttataaatgtgtgtcccacaacttccaagatttagtaaacattctacagcattgttgcatgtggcagcttgttaggaatgcaaattcttagacctcacccaaaattctactaaatcataatttgtagtggtagatcaaaggaatctgagttttgacaatctttccagaaattctcatgtaccctaacatttgagaagtgttacttttcattcttcatttggaagacaggactatccttcatgaaagacagtcagtgctgaatctggagtggcacctttaggaaaatgatactttccaagagttagcacttgaatttggttatatttccaaggagactggtatgaagcactacttcactaatgataccactcagtctacattagagagaatagtaaaataatacagctaattctttcaattctatgttgtgttaaagcctgggattataggccaaaaatatatatgtctccaaacatctcctcaaataagggataagaaaactgtatattattgcattattatgtcccttctccaagttgcagaaataaataacaaaatttggcattcactgaccaaaaactataaagaataacattgttaataagagaatggaattctggccaacaaatatttaccaattacattcaacatgttaacatttgtcttagggcttcaggacataacatgttttgagacatattcaaatggaaaatcaaatacatgagataaaccaaaatgagattctaattttttaaaaagtcagatgtcaccaagagaaaaatgttgctctactgaagagtttcccaagggcctctttcatgtccctgttcctaaggctgtagataaaggggttcaacatgggtgtgaccaccgtgtacatgagagccacaatgacatccttgtcaatagaactgcttacagtcgggaaaaggtactggccaaatattgacccataatagagagacaccacagagagatgggagccacatgtggacaatgctttgtggatccctttggttgaagggaccctcaggatggtggccccaatgtagccatatgataccaggatacacatgaatggcagggtaatgaccaccacccctactgtgaacatgaccagctcattgaggaagatatctgagcaggacagcttgagcagggcagcaaggtcacagaagacatgggggatggtgttcgcagcacagaaagacagccgggtcaggagaagggtgtgagagagggagctggcacaagacagaatccaagatacagccactaagaagacacagagctcttccctcatgatgacagtgtagtggagagggtgacatatggcaacatatcggtcatatgccattgatgtaataaggaagctgtccaggtcagtaaaaaatataaaaaaatacatctgagaaatgcattcctcatagaggatcgatttgtacttagtccgcatgtccatcagcatcttagggacagtgacagatgaaaaggagatgtcagtgagagccaagtggctgaggaagaagtacatgggggtgtgaaggtgagagtccagctggatgagcagcatgatgagcaggttccccagcaccgtggtcaggtacatgcccaggaacagggtgaagaacacagcctgctgctctggccggatggggaggcccagaaggaggaactcggacacgctgctctggttctcagggctcatactcctttgccctctgatggagatgaagaatgcttgagaatattagaggctctgaaattatcatttttagcagtcatattaaaagatgtacgttttaacatagacacagggagaggaacaacacacactggggcctatcgggggtctgtggggaggaagagcatcagaaaaaatatataatgcattctgggcttaatgcctagacgatgggatgataggtacagcaaaccaccatggcacaggtttacctatgtaacaaacctgcacatcctgcacatgtaccccagaacttaaaaatacatatatatatatgttttatttcagaaagtgcaaaatttaacctgcttctcatatttttccttatatgttatgtaagaaaactagaaaaaagcattgaggcaaatgttactgagagtcagtatttcttggttcgataacaaaacataaatcttgcacctgtgggactgaggactaggctgtggagaaaggtgtttcagccaagttactgctcccaaaagttaatgtggcgagtattccaagccatcagtcatggtacagcaaccattagaagatctgacttcaccagccatggttaaatttcagatgagaggtggccttttcaaataaaagtatgtaaagaatagtattcctaatttaagttctggggtacatgtgcaggacgtgcaggtttgttacacaggtaaacgtgtgccatggtggtttgctgcatctatcaacccatcacctaggtattaagccccacatgcattagctatttgtcctgatgctcttcctcccgcaccccccgacaggccccagtgtgtgttgttcccctccctgtgtccatgtgttctcattagaacagttatcattatgcatacatttttatttgtttcaattatgtagagggttcctaagaaattagggattgtatcaattcattttctctacttcagtcttggagatctttttttaaactacctttcaacatgacttccctgtctaaaaattctcaaaggattcccattgacctttaagattagagtgtaacaaccttaatatggcttaaaggccctgcaaaacctgcatctctcctacatttcccatttctttcttgccctccctttcccctcacccttgccaacctctctgttccaaccttgtgggaaggcacatttccatttaacgtcatttagacttcttccccttggtggttgtggatttcttgtgattccctggcatgttgagaaagtaaagatcagactggctatgagaaaatactttagggaaatttatttacgctttattgtttactgtcaacacaaagcagtttaagtgacattatcttaaattatattcaaagtgtgcattttctagttcttttgcaatccagtctccctttcctccctaggcaataacactcatcccataacaaactgtgaaggctattatcaaaagatggcaaaagaagtgagattttaagtgtactccaagttttcagctccctcttgggtactcctgtcatcttaaaacacaacacctcctagtcagctgtggtaagcagaataagaacccccaaagatgtccacatcctaatctccagaacctgtaaatctgctgtggtgcattccaaggtgggattaaggttgtagatggaattaaggttgctaatcagctgactttaaaatggggagcttatcctggattatctgggttggcccagtgtgataatgagtgccttaaatgtggaagaagacatagaagagtctgaatcagagacgtattcgaagatgttatgttgttggctcagaggacgaaggaaggggccatgagataaggaatgcaagtgggctctacaagctagaaaaaagcaagaaaacaagattatgctctagaacctctcgaagaaatgccaacctcttcagttttaacccactgatacccattttagacttctgacctccagaactgtgatataataacatttgtgaggtttttct

SEQ ID NO: 588671 - DNA, 4001 bp, Homo sapiens
tatgttaggtgttgcagaacttttttcacctatacagaagaagaaattgaggttcaaaggaattgggtgaattgtctgaggccacgcagccaccaccctggtatatagagattacaaatgagatctagctttccaaatattcttctcttgcagctacacattgctgcttctcagaagcatttgtagttctgtttatctttaagtagaggaatgaaaaaagagacctatatgcccttcactggatggcggagaccatagaagatagaagaaaaagataaaagatgacttgggcatataatacaaactaggggccattaagctgagtagaaatgcttttcaataagaaagacaacgaagacactgaatgggaaaaggatcaaatttagtgacggcaacagaaggctcctgactgtgaagacttttttgttcttctcattcattacctggagtaagtctgcggcgtgattgaagctcacatgtgtagtcagaaagcttcataaacattggtctgaaagtgaactgttgaatgaaagttattgtagtctagaagaggaacctcaagttctgaagtggaacagctgaacttatgacagtgaatagctttttggatctgtaaagggtactatatagtttcttctccttacccaccaccatcagcaacaacaataaaaaatgtgagaagagaactgaatgggaagaaagaaagggaaatgcctttacaagtacccaatccttcaacttttctatggcaagggaatcctgttagtcaacatatttaaacaattcctaagaacaaataaatttccaggaaataaaatgaaggatttaagttctgttaactatgtaatttctgaatctaataggcaagataaataaacaattatgtaaactcagaattcacaatttgcactaaagaggaaaagggagaataactgtaacaggatgcaattcaagtcatcagagagttactgagcacttatcccttgctgggatcagaagtaaggatctatgatctggaaataggtcagtacatatgtctgttataaagaagagtaaatgtcattgagataagactgttgccctgttgaagagtctctccagggctccctttatgtccctgttccttaggctataaatgaagggattcagcaatggggtgatcaccgtgtacatcacagaggcaattacgtccttgtcactggaggcactggatgaggggagaaaatacagtccaataattgtgccataatacagagacaccacagagaggtgagagccacaggtggacaaagctttgaagatgcccttagtagatggagccttgaggatggtgaccccaatgtggccataagagatcaagatgcatattagtggtagagtaatgactgcctgtcccactgtgaaaatgaccagctcattgagggagatgtctgagcatgagagcttgagtagggcaacaagatcacagaagaaatgggggatggtgttgtcagcacaaaaggacagctgggccaggaggagagtgtgagacagggcattggtacaggagaggatccaggacacagtgactagtaagttacacagtccctctttcatgatagtggtgtagcggagggggtgacagatggccacataccgatcgtatgccattgaagtgagaaggaaattgtctagatcagtgaaaaatatgaaaaaatacatctgagttacacaccctgcataaagaatggattgatcctgagtttgcatgcttaataacatctttgggacagtgacagatgaaagggagatgtcagtgagagccaagtggctgaggaagaagaacatgggggtgtgaaggtgagagtccagccggatgagcaggatgatgagcaggttccccagcaccgtgatcaggtacatgcccaagaacagggtgaagaacacagcctgctgctctggccagatggggaggtccaggaggaggaactcagacacactgctctgattctccctcttcatgctgacagtcttctctctgctggaaatagagggacattgaaaaaggcagaaacaaacaaatgttgatttacagcagcagataagaataagatccttgctactgatgaatatgccaatgtctgtctacattgctatgtccctacaaaaaatcatttcaagtagatggttttatcactcaaaatgggataattcgccaagagagtagagggtttgaaatagaagagaagaccagccatgtctagtcagtaaagagaaagcttcacaccgtattagcagatggatcgtaagataacgtctttccaatttccattgtttatgtacttttaaaaacaatcatcaggctagtcatgagccttcatgttgtaacatattgaactttttaaaatttgacttcaaaatctattagtaagcaacatatagggatgaagtttccataacacatatccaaaagaaattggatcaaagataaacagccaaagttttcattatgtataaagttgatgagaaaaaaaacttgtctattgattacaatatcactgccataaaaaaagtaaatcttacacaaaatatttaaaggtgagagcttcaggaggtaattaggtcatgagggtagaaccccatgaatgggattattgcccttataagaagaaacacaagagtgtctctggcattgccatgtgaggactcagcaggaaggcagccatctgctaaccagaaagtggacccgcaccagaaaccaaatctgctggtaccttgatctggggcttcccaggctccagaactgtaacaaataaatgtctgctgtttaaagtcacccagctatagcagcccaaccgactaagacactcagtaaactaaataatacagtaaacaccatacctagtggagacattttaaagcatttccattaaaatcaggaatgagaaaaatatgccagcttcctccacagccactatctacccattaaaatattctaaagccatggcatatatgtgccacattttctttatccagtctatcattgatggacatttgagttgattccatgtctttgctattgggaatagtgctgcaatgaacatacataaaaaggaatgagaccatgtcctatgcagggacatggatggagctggaagccattatcctcagcaaactaatgcaggaacagaaaaccaaacaacacatgttctcacttataagtgagagctgaacaatgagaacacagggaggagaacaatacacactgggacctgtctagggagcttgagggggtgagagcatcaggaaaaagagctaacgaatgccaggcttaatacctaggtgatggggttgataggtgcagcaaaccaccatggcacacgtttacctgtgtaacgaacctgcacatcctgcacatgtaccctggaacataagaaaaaaaaaacacctcaaaaagatattctaaacctaagttaccaaatcctgcaaggccagtaggaatgagtttatagtgccactgtgtcttaattgaaaagttccctttaagtcaaaaagcaatgccaaatgcctaatatatataccaacgtatactaagtaaatagaaaatgtgaggatttcattataacagttcttaattgggagaaaaattcagaagagctttgtacaggttaaggataggcttaaaattctttgcttctttaagctggtgagttgagcatactcctatttcatatgagaataccatccttcctttgaaacttaccaaaaggcagccaacataacagagttccgaatggacccatagagaaaaggggcaagaatgcctggcccaggttccccggctgcacctgctcactccagcattttaaggctccctggggctgtgaccttaaggatagagcctagtgtctgagggtagtatgttgtactgacaaaagcattgcaattagccctagattcaagtcctggcaacatcacttcatatcttcatatttgtgagttctggagaagtgatccagttg

SEQ ID NO: 588672 - DNA, 4001 bp, Homo sapiens
acctatgcctcctccttctcagctttgctttgtttattcatgactgtgcgtgtccacaacgtgctccttctacagaatgccaggtggggcagaacaggtgccatgatagcaaacaagggaaagaacaaagaattagaagaacggacttcttctaaatgcatgttagtatgaacacagagtcatttattcatattagatgtgcagagggcctcctgtgtgccacactgagctcattaggaggggctggcccttcacacatgagtgtgtgaatttctctattccagtcccagttgagaagtcaatttatttgagaacacatggccatatgactgaagagaaagtgctcatccacacaaggcatgttctgcggatgtcacaccctcctggattgccctcggtctgtaggaaatggtggaatgcattctaaatgcctaagagtgatcatcagaagagcatgatgtggcagaaggggtgcaggttttgctttctaagaactgtgtgaatttgagaaagtcacttcttttttttttgagatggagtcttgctctgttgcccaggctggagctcagtggcacaatcttagctcacttcaatcttcatcttttgggttcaagtgattctcttgcctcagtctcccgagtagatgggattacagttgtgcgccgccatgcttggctaattttggtatttgtaatagagacagggtttcgccatgttggccaggctgatcttgaactctcgacctcaggtgatccaccacctcggcttctcaaagtgctgggattacaggcgtgagccgctgtgcctggctggaaagtcacttcttatctttgagcctaaagacaaattttcttgtgtgtaaaaccggatcataatatctgcatcctgggtggctgtgggaataaaatgagatcaggcaaggatctgcttccgggcaggtgctcaggaaatgacagctgttatgatttttgagcatagcagaggacagagggtcacgttcaacagttgccagtgtgggtgatgcagtctgtcctcagtggggtcctgccctcaggagtcactagctgagatccttcgcccaatgagaagggctcggagtgccccctgtacatcgcgattccagaggctgtagatgatggggttcagcatgggggtgactacagtgtacatgacagtggccacacggccccactctgcctcgcgtcgggatgtggcctggaagtagactgcaatgactgtcccatagaagaggctcaccacagccaggtgggagccacaggtggacacagcccggagcctcccagaggctgagggcagctggagcacggcagctgcgatggccccataggaggcgaggatgagcaggaagggagtgaccaccactgcggcgccctcggtgaagatgagcagctggatgtggtgggtgtcagagcacgagagccttaagagaggctggtggtcacagaagaagtggggcacttggtgggaagcacagaaggacaagcgagccatgagcaggatatacaggagggagtggacgtgggacaccagccatgccattcccaccagggctgcgcacatggcccgggacatcctcgtggcataggggagggggtgccggatggccacgtagcagtcataggccatggccgccagaagacagctatcagttacccccagggcaaagaagaagtacatttgggtcaggcagccagccagcgagatggagtggtcatgggccaacaagttggccaacatcttgggcacagtgacggaggcgaagcagaggtcagcaaaggacaggtgggccagcaggaagtacatgggtgcatgaagggctggactggcctggatggcagccacaatgagtccattacccaggaggctggccacatacaagagcaagaacagcacaaagagaggccgctgctgtccaggacttgttgtcagtcccaataaaacgaatgagattccctctgaagactcattggcagcctccatggcaggctggttattcgcctggaacctgaagggctcctttctattgatgggtcacctccccgatgtctaacggaaaaggtgaggggataaattgttcaaggcttcctggccatgggaaaatatcaagagtttagagtcaggtagccctggccctaggcacaggtatgactatgggcaagtcatttcacctccctgaaccttcttcctttctgggccttagattttcttttctttttttttttttttttttgagatggagtcttgctctgtcgcccaggctggagtgcagtggcacgatctcagctcactgcaagctccacctcctgggttcacgccattctcctgcctcagcctcccgagtagctgggactacaggcgcccgccatcacgcccggctaattttttttgtattttttagtagagacggggtttcaccgtgttagccaggatgttctcgatctcctgaccttgtggggccttagactttcaacctgcgaaataagagaattgaagtaactcatctgcaaggtcacgtccaactttgatagtttgtgatttaagcaaaaatagaacaaaagatattgcacaagatgtagatcagggaaggaggaaaatatgaaagaaaagatgaaacagagtgaggttcgacacagaaagatctggccaatggacatttattttggaaaagaaaaaatgaaaccaaaccaagatggaggagagaaacataagaaagaaactctagaaaaaaaatctgaagagcacatatgtttacattgaaatgaatatgaactcacaacacctagacacaaatagtggaattttagaacactggaaatgaagaggagactccagtacttcctaagggcatggggtgcaatgaactgatgatatccatgtaattagattgccatcaaatgtttcaattcaacagtagattatagaacagtttaacaatattcaaattctgaaaaaaagcatttcgaacttggaattcttcactcagcaaaaatactactcaagtgtgagtaaagaatacagatattttcagacttaaaacacaaaacaaggccgggtgcagtggctcgtgcctgtaatcccagcactttgggaggccaaggtaggaggatcacctgaggtcaggagtttgagaccagcctggccaatgtggtgaaaccccatctctactaaaaaaaaaaatacaaaaattagccaggtgtggtgtcacgtgcctgtaatcccagctacttgggaggctggggcaggagaatatcttgaacccaggaggcagaggttgcagtgagccaagatcgtgccactgcactccagcctgggtggcacagtgagactccatctcacacacacacaaaaaaagaacaagagaatctgaatgactcctcatatccctgaaaactttccccatgaaatcaaacacttactgagcaccaagcagatgcacatcacagggtgagaaactcctgtggacagatggacacatctgcccaggcatagcgacttgactcttaaggagagaggcaacttgttttcaatgtctcagtttttttcctgtctgaatttcattgcagaaatcttgggcaattctgtaagaagagaattgaagtaactgagaggaattttagggcacaggtttgctgaagactgtgctgaaaccacctttacagggaaatgatcttttaatttatttccacatctttctctattaaaaaaaaatcaatgaaggacctccctaccctatcgtattccttttttcctccattggttaagaagaatctctggcgttagcttcctctaaagcatcttttcttaagcccctaattctttctcactttcctggaggggaagaggatcaggatgattgggtaggatggaaggggaaacctgtttatagaattgcttttggaaaatggacctgctctgacctgtgtctaaattggtcccaagaagcgttcaaatatacaaagatgtttgtagaaacattcaaa

SEQ ID NO: 588673 - DNA, 4001 bp, Homo sapiens
tgtgtttctctgtaccttgcaaacctaaaacaatccaattaacaggaaattgccctccaaatacttgtattgcctgtgttattttgtttccttagaccctgctgatctttggccttcagattgttgacttaaatcatgtagtacattatctttgtttttaagtccagtaggctggttcatggtgtatcagaagtagaaatttgttgaaagagcaaatgaattcataaatctctgagttgcaagataattcatggactagcagtgactaatatttctcagaactcacaaatgagcaaaagtgtttctttcctacccaatttgtttttctggttggaagactgtcttcaaagtctgttaaggaagagaactgccccagcagttggaggcatctgctactaaggttactgggacctaacacatacctcccgggaaaacagtgcagttgagtttgggtcaaatgaaattaatgagagatttaaggtacagtcagctttgccaggtgggaagcaggaagaatactgagatgccatactcttaggaacctgacctggcactgattcactaagagttatctagtgggatgattttatttgttgagactatgacaactatagaagccaggctttaatctttgaggaaatgcagaggaaggagtcacagttctgacatttataatgggagaaagagagagacctcgttattgaggagcccctgggctaatatgatgaagcgacacacacacacatacacacacacatgcacacacgcacgcacacacacacagagtagctcaaagacattcaagcagctttacattactatacaagaaaacccagctgcatgaatagggatactcaggagattacagtgatccaacttagtttgtaggcattatattcaggagtagcttcaatacatgcaataaacattcttctgtaaggaatgaaacaccatcattgaaggtactatcctttcagaatctaataatcatttcagaatcacatacccattaataacctatagtccagggcaagagatctgtggtattctcttaagaccttaggtcttttactgacatttcatcctgtgcatcaactttgccaaaccctgcttcatgtctttgttcctcagactatagataaatggatttagcataggagtcagtacggtgtagataattgttgctatttgatccttgacagtatagttggacaggggctgaaaatagagatagctaatgcttccataaaacagggtcaccactgtgagatgagagccacaggtagaaaatgctttacgctttccagcagctgaaggaatcttcagaacagtgatgaggattcttaaataagagatgatgatgcatgaaaacggggtcattatgacagccaagccttctgtcattactgtgatttctttgacaaaatgggaggaacaggacaattttagcactggttgatcatcgcagaaaaagtgatggatgacatttgaggcacagaagatgagctgattagtcagaagaatgtgcaggagggagtgaaaatgtggaatgcagaaggagagaaccagaagcaggacacagcatctgtgactcataatggtgatgtagtggaagggattacatatggccacatagcggtcaatggccatggctgctagcaggtaactgtctgtgtttccaaaggctaagaaaaagtacatctgggtcagacactcactgtaagagatggtctttgtctctgataagaagttcaccagcatcttagggataatgactgtcacatagcaaatgtcaacaaaagacaggatgcttagaaagaagtacatgggcgtctggagacgagtgtctgagcggatggccaggatgataagcaggtttcctatcactgtgataaggtagatggggaggaacacagcaaagagcggcttctgatcctcaggtcgagaggagagtccaaggaggatgaattcagagggtcttgttaggttatttcttcccatagttgtgggttcacctaaagataaactaacactgtaacagattcttccaacatctgatacaatctgtccaaaatttctccttttattcttcttatcagcaaagaaaaaatttaaaacattacaattatctggattgtggtttctttccattaatgtgggatatttagaaattaatatatattttaatctcagttgcctgctataaagaaacaaattacagggaaacagaaatgggaaaaagagaaaagaagagatatagggcaagaggaaggagtgagtgcaagagaattcccagaaggagaggaggggaatcctggagaaattattctcttctttttctgtatatatttatcgtattcacggttttcagtaattagtttatgacaggtttaaaaaagtttcatctctcaatttccagctgatggaataatgatttcccttagttcggatacttctgtctgcatcagttattctggaggctggcaatcatgtaaaaagacattgaaatatgagattacccaacagttactccatttccctcattttttagtgaaaccttatttgagtgaaaggataggtatgaagaggcaaaagatagacagaaataacaggatagtaaaaacatttcttttccttatttttttttttttgagacaaggtcttgctttgtcacccaggctggagtgcagtggcacaatcttagctcactgcaacctctgcctcctgggttcaagcgattctccccccttagcctcctgagtagctgggattacaggcttgtgccaccacacccagctaatttttgtatttttagtagagatggggtttcaccatgttggccaggctggtcacgaactcctgatctcaagtgatccgcccaccttggccttccaaagtggtgggattacaggcattagtcaccgcacccggccaacatttcttttaatgtaacataaacctcatttttgttatccagcccctaaatgctaaaatcgtcattgttagtgcatgcttgtctgtgttggtgtaattcttttcccaattccagtctcagttatatatatgcttccccaaaaaaccacacagagaaggcacctgattctagacaagctttcaaccctcatgaagctgaagattttcctctcttcctcctctgggcctcccacatgctgaagagattaaagacactcatagaccccaccctctgtcaagggagcatcctttgagatcatcaagaagtccctggagttcagatggagaagacagcagaaaacaagccaagaactattacggttttggagtttcttccccaaggagcctggggagtgtcagtgccttctctctctctcagaaatcaccctcctgacctaactccttttggtgaaaaagaccccacctgtgtgaggctggctcaagtgacagacttcctgagcctcaccgctgtgctgcttacattgaaagacagaatgtggggttggagaacgttttctcggaattcgttgatcatcaagctaaaacaactagaacatcttatgccactagtcactttcccatctcccagtgttagaagcagtcccttgctagacactgttcttagaactttaaaatataataagcaatagggttaagactttagaccctaggcctggaatctttactcttctgtctgaagcatccttaagtctacttatgtatgacccttgcttctcactcaggaaagccatcagggcatatatatatagcgttagctattaattttattacagttgtaacacacaaacattaagcaaaccagatcgatatttttattgttaaagcaactttcaaaaaaagtggttggggccgggcgcggtgactcacgcctgtaatcccagcactttggggggccgaggtgggtggatcacgaggtcaggagatcgagaccatcctggctaacacggtgaaaccccgtctctattaaaaaaatacaaaaaaattagctgggcatagtggcgggcacc

SEQ ID NO: 588674 - DNA, 4001 bp, Homo sapiens
ggcaggcgcctgtaatcacagctacttgggaggctgaggggtgagaactgcttgaacccaggaggcagacattgcactgagccaagatagcaccactgcacactccagcctgggtgacagagcaagactctgtctcaaaaaaaaaaaaaaaaaaaaaaagaaaaagtcaatcagataattggtagcagttgttgagaatctatgactccagagtccaggacattcagttcttgtgataattttaaaaagggaccataaagctgggcatggtagctcacgcctataatcccagtgctttgagaggctgaagcaggaggatcacttgaggccaggagtctgagaccagcctgggtaacatagcaagaccttgtctctacaaaaaattaaaacaattatctaggggtggtggtacacacctgtagtactagctacttgagcggctgagggaggaggattgcttgagcccaggagtttgaggttatagtgagctatgatagtgccactgcactctaacctgggtgacaggggggtacgaccctgtctctaaaaaggtggagagggggaccatagcctgtagtctcatgggcaggtgagacttgtacatacatacacacatgcctgcaaaaaattcctgacagctttaaatagaagagagtgactatgtgtgcataatatcattgcacatatttaaatttctacataggtatataggaaaattctctgataattgaaagaccaaacttggatgaatttataaacacaaagaaatatgagaggctccaaataaatatgcaaagagtaaagggaatgtgattttctggaattaagatatattatgaggtgagtctgtgattggggcattgataccaagacatcctaattgttcaatcatacgatgacagagaccacagggtggaaaaccacgaggtgaagctacaaatggtgaagatgaaggaacgttttttcaagaaaagagtggcatcaggtgctaacacacacacacacacacacacacacaccttgtaatcagggtccacagattttattggtctttgtagagaacctactcatttgagacttaatcttgtttatcaatttctgtaagccccgtttcatgtctttgtttcttaaactgtagataaatgggttcaacactgatgtcaacacagtgtagttgattgttgctattcggtccttgacagtatagctggacaaaggctgcaaatagacatagctaatactcccataaaacagaatcaccacagtgagatgggagctgcaggtggagaaggctttgtgttttccagctgctgagggaatcttgagaacagcgatgagaattcttagataagagatgatgatacagacaaatggagccatcacagaggccagcccttctgtcatggccacaatttcattgacaaaggtggaggagcaggacagtttcagcacagggttgacatcacaaaaaaaatgatggataacatttgatgtacaaaaggtgagccgattcaccaggaggacatgtaggagagagtggaaataggagaaagtgatggggaatgctagtagcaacacacagcatctgcggttcataacagtgacataatggaatgggttacaaatggctacacagcggttgatggccatagccgccaggagataactatctatgtttccaaaaaccaggaagaaatacatctgtgccagacattcagcataggaaatggtctttttctctgataagaagttcacgagcatctttgggactatgactgttgtgtagcaaatatcagcaaaggacaagatgcttaggaaaaaatacatagggttttgaagtcgaggatcagagtggatagccaagatgatgagcagatttcccatcaaagtgaccaggtatatgataagaaagagggcaaagagtggcctctggtcttcagaccgagaggagagtcccaagagaataaattcagagagtcttgtcaggttggacattcccatggacttgtactcacctaaagataagcaacactgtcaattaatgacataattcttatgtcatctacaacatgcatctttccacgttgttcttacactgagtagttattaatagagcatttactctgtagtttatttttcttcctgagcatggagaatcagaactgaaagtgtgttttcactttttaaaagatctttgaggtagatacctgtcttaatcagttcaggttgctataataaattaccatagccaggtcagatgcggtggctcatgcctgtaatcccagcactttgggaggctgaggtgggtggatcacttgaggttaggagctcgagatcaggctggacaacatggtgagatcctgtctgtactaaaaatacaaaaaattagccgggcctggtggtgcatgcctgtagtcccagctactagggaggctgaggcaagagaattgcttgaacctgggaggcagaggttgcagtgagccaagattgcaccactgcactccagccggggtgacagagcgagacttggtctcaaaaaaacaaacaaacaaacaaatcatagactaggtggcttaaacaacatttacttttcacagttcacgaggctgggaagtccaagatcaagttgccaacagatccagtgtctgcagagggcttgtttcttggttttcagagggctgtcttctccttgtagtcttgcatggcagaaagcagggggaggaagcaagcttttcttataagggcattaatcacatcaggagggccccaaccctcatgacctaaattacctgtcaaatatccatctccaaatgctatcacattggggattaagtgacttctggggggacataaacatttaacccatagcaagatctatagagaacagatacaaggaaagagagagacagacagacagacagagaaagagagaaagagattgggagcgaatggctgataagtttctcctcctacttactctgtggctggtaattacaggaaccacagataaagactttgaatcaagttcaggccatcttctgattaaggattctgagtggctaaaccacatctaggtaacaagatagttatctcacctagcttgtaattgatgaataccttttcttttaagtccagatgtttctttccacatcatttacaatggaagcaagaaactcacttagagaacactgagttgaatgtaaacagttacagggaaaagaaacacggggaatgagagagtgagggggacagaatacttttgcgagaaaattctctcccaagctttcctactctctggctgataatccatattctgaggtcaggggaatgtaattctggagttggctagggtaaaggaagatcagactttagagtataaatacagataatctacacttagggtgaacataaattcgctctcttatttaatgtccagtaaggactaattatttcccagagatcaggtatttccactttctcatcaggcactcgctaggttgattaattaattaattaattaatctctcatggtattttagacaatgagcagatggattatcttaaagtgtaaaatgatagaataaggttctggggatctattacacagcaggtgactacagttaataagagtcaaaggtactcttgggtcagagtacctttccaggtaagcctggaaaggacattaacgtctggccttatgtattcattcctctcatttatgctccatgaaataactagtcagaaagaagataaatctgtgccaagaaactgcatacaaaaaggtatctaattgtcgaaaatctcccagtgcttcttgattctgaatgctcccttccctggattcttactgtcattcacaagttgtagatacttatagcccttgttttcctcatgggagtatcttctgagactgtgccactaggtctctgatgtttcctaggggagacagtaagaaaacaaccattcattaactttgtgcagaattgtctccagggatccag

SEQ ID NO: 588675 - DNA, 4001 bp, Homo sapiens
acaagaaaaaaaacaaccgcatcaaaaagtgggcgaaggatatgaatggacacttctcaaaagaagacatttatgcggccagcaacatatgaagaaaagctcatcatcactggtcattagagaaatgcaaatcaaaaccacattgagataccatctcatgccagttagaatggggatcattaacaagtcaggaaacaacagatgctggagaggatgtggggaaataggaaggcttttacactgttgatggggatgtaaattagttcaaccattgtggaagacagtgtggcgattcctcagggatctagaaccagaaataccatttgacccagcaatcccattactgggtatatacccaaaggattataagtcattctgctataaagacacatgcacacgtatgtttattgtggcactattcacaatagcaaagacttggaaccaacccaaatgcccatcaatgatagactggataaagaaaatctggcacatatacaccatgtaatactatccagccattaaaaaaaggatgagttcatgtgctttgcagggacatggatgaacctggaagccatcattctcagcaaactaactcaagaacagaaaaccaaacaccacatgttctcactcataagtgggagttgaacaatgagaacacacggacaaagggaggggaacatcacacactggggcctgccagggggtggggagctaggagaaggattgcattaggagaaatacctaatgtagatgacaggttgatgggtgcagcaaaccaccatggcacgtgtatacctatgtaatgaacctgcacgttctgcacatgtatcccagaacttaaagtatgtgtgtatatatatatgtgtgtgtgtgtatacatatatatatatatatatataaagaaactgagtgttttgctcccaggttaattctcttactgatatccaacaccacttttcatgacctctttgaatgccatgtggaaaagggttaggaagggaggataaactgataataatcttttaggtcatgtcctgattttgacatgccaacattttgttctttctatgagtaaattctgtgtcttaatttcttcaaaccccttttcatatctttgttcctcaggctgtagatgaaagggttcagcatgggtgtcactactgtgtacataactgtggctacccggcccttcatcactgagtacatggacagaggcctaaaatagacatagatgacactcccatagaacaggaccactacagtgaggtgggagccacaggtagagaaggccttccacttcccggctgcagaggggattctgagcacagtgacgatgatttgcaggtaggagaagatggtacacaggaagggggtcacaatgacagctaaggtctcagtcatcaccaccatctggctggaggatgtgtcagagcaggagagctttagcacaggctgggtgtcacagaaaaagtgcttaatgatgtgagaggcacagaaagacaagcgagacataagtagcacgcggaacagggaatgtaggtgggagatgctgcaagaacccaatagcatgagtaggcaatgccatggtttcataaccacatcatagtgtaaggggttgcagatggccaccagccggtcgatggccatagaggccagcaggtagctgtcagtgttcccaaatgccatgaagaagtacatctggatcaggcagcccacataagagataatctttgtctctgatagaaaattcaccagcatcttaggcactatgactgttgtgaagcagatatccatgaaagacaagttgctgagaaaaaagtacataggggtgtggagcctggggtcagagtagatggccaggatgatgagcacattccccaccgcagtgagtaggtacatgatgaggaagatggcaaagagaggtttctgcagcttagggttggaagagaggcccaggaggatgaagcctgaggtgctgctgctataattctttgtctccatgtctctggacttcctggatagggtttagagaagcaatgggagagatgtaaaggacagtttgaccaagacagcttcttccccacctcaaatctattttaaaaatcttactgctattatacttcgaaagaacatttaattctgaaactacatagaaacagatagtaaaattcaacaaaagaaaagttaaaggatgccaagctgtcttctaaattagaaactaaaggttttccatgtgctcataggaacttctatgtggcctaatttgtttgagttcttctcatttccttttgtaaagattattctgaggttgtttcttgaccatctccttagtcttattattgtcttttttgtcccggggaagaggttgctggattctacttagaattagaatgctgtcatacaaggaatccctatgaatgaagttatctctttcagcattctctcttgctcataggtccatagatggtagtagtagttgggatagaacaaaactaagcaacagaattaatcaaggctccttggtaattgcagaattcagataatactttctttcatcttcagaaaaacatttctaatgtttatttaagcatttctctttggctaatatgatctgatgctttatcatcttttggcccaaggataccagttaaaattagagtactcccagaaatagcctatgtaagcaagattagttctttgaatatattaatttttctggttaaaacactatgaagtcctcattctcaacattcaaatattgcaggactataaaacatagactgtaagagtcctatttccaccaatatcatggaaagagaaggcaaagatagccctatgaccaatattaagctacattgctgagatggttgactgagtgagtaacaaagcaaaactaaagcatcaggaggcataaacattaaaaaagaagaaaatgtcatttttttgtggcacgattgtgtaccaaaaaattcaagataattatttgaaaatcttttaaaacctatggcaatttcaccagtggccagatgcgctataaaactaaaagtattaattatctttctgtattagacaaatgtaatgaagaaaaggtttcaattgataatggcaagaaagtctaagtgatacttagaaattaacctgagggacaaaataaaagaatgagtaagacctatcagaagaaactataatagaacacaaaatgaatatctgaatatgtggagaactatactcctgaaaaggaagactatattttaaaatatgaatccttattaataaaattcagtgtacttctaataagacctgaagggaatttttaatggaagttgaaaagattattctaaaattcatctagagtattacatggctagagacagacaacattattttggaaacattagaataatgatgggaaacttttttaaccccacataaaagcacagtatattgataatcaataagataatgacacacatagggaaaaataaaaaactgaccaatataaagcattttgtatatctatatgcctatatttagatcatgatctatattaaacttaacatataataaagatttatttcatagcaatggaaaaagaatgggctataaaataaatgctatttatgacaactggaacatttgggaaaaaataagcctaaacttctttgtaactcacaaataaaaataagttatcagattggcactacatttttggggatcatatccaaaggaaaatagaccttcacatatgctgaaagtgtgaatcagtgtaggccttttggccatctctgtcaagagttggaaatctgcatctctttatccaatgattctacttatagcactctatcctttagaagtagtcatatttgtgtagtacacagtatgtgttgcttgtaataccaaccaaaccaaccaaataaacaaagcaacccatagagggaacaatctcaatatgcacatgtaggtgaaagactaaacaatttatggtgcagttcctgttactc

SEQ ID NO: 588676 - DNA, 4001 bp, Homo sapiens
aattaagagggaagggaaaagaaatcgggtactgagccttcacactgtcatgaaacttaagtgttggtgggggggagaataaatgcattttgtagattcttctatctttccagccgtattctcctttctctcaaactgatgaagcctcagcttttcattgtccctcaaacacattgcagtgcttattgtctccacatgcttgggtggttttcactatttgaaatgctttgcccatttcttcatcttttgaaacttcctctttcaaaattcagtccatccttcaagatgccattccttcaagaagtcttacccaatgacctatcaaacccatgtagtttcttcttcttaaaactaatgagttttataagtcgtggtggctcacccctgtaatcccagcactttgggaggctgaggcaggaggaacccttgaagccaggagttcaagacctaccagggtgagataacatgaccttgtctctacaaagaaaaaaaaaaaagtcgagtgtggtggcatgttcctgtagtcccagatacttgggaggctaaggcaggagaatcacttgagcacaggagttagaggctgcagtgagctataatcgcaccattgtactccagcctgaacaacacagtgagattatgtttctaaaaaaaaaaaagccacgcacacacaagaacaacccccctccgccaaacaaaaaactaacaggatttaaactccttgactgctagccattgtcaggcttatagacaagttatttggagatagctttatttctctatatgattgccaatctattgaggatgcaatactcagctttcaaaacctgaaaccttttcctgaaatctggattcctaacagtacctagcctgagactgaatatgtatttggttaagatcatgcatagaaactaattgttttgctcctaggtcaattctcttattggtatccaacaccacttttcatgacctctttgagtgccacgtggaaaatagttactaaggaagaataacctgataatctcttcgatcatgtcttaattatgacacaccaacattttgttccttttaccggtaaattctgtcctgtaatttcttcaaacccctcttcatatctttgttcctcaggctgtagatgaaagggttcagcatgggtgtcactactgtgtacataactgtggctacccggtccctaaccactgagtacatggacaggggcctaaaatagacataaataatactcccatagaaaagggctactgcagtgaggtgggagccacaggtagagaaggccttccacttcccggctgcagaggggattctgagcacagtgaccatgattcgcaggtaggagaagatgatacacaggaagggggtcacaatgacagctaaggtctcagtcatcaccaccatctggctggaggatgtgtcagagcaggagagctttagcacaggctgggtgtcacagaaaaagtgcttaatgatgtgagaggcacagaaagacaagcgagacataagtagcacgcggaacagggaatgtaggtgggagatgctgcaagaacccaatagcatgagcaggcaatgccgtggtttcataaccacatcatagtgtaaggggttgcagatggccaccagccggtcgatggccatagaggccagcaggtagctgtcagtgttcccaaatgccataaagaagtacatctgggccaggcagcccacataggagataacctttgtctctgatagaaaattcaccagcatcttaggcactatgactgttgtgaagcagatatccatgaaagacaagttgctgagaaaaaagtacataggggtgtggagcctggggtcagagtagatggccgggatgatgagcacattccccaccgcagcgagcaggtacatgatgaggaagatggcaaagagaggtttctgcagctgagggttggaagagaggcccaggaggatgaagcctgaggtgctgctgctgtagttctttatctccatgtctctggacttcctggatagggtttggagaagcagtgggagagatgtaaagggcagtttgaccaagacagcttctttcataagcttaagcctgtaaaaatagctcatagccctttgttacggttgttttttttttctttgagacggagtctcggtctgtcgcccagactggagtgcagtggcgtgatctcagctcactgcaagctccgcctctcgggttcatgccattttcctgcctcagcctcccgagtagctgggactacaggcatccgccaccacgcccggctaatttttttgtatttttagtagagacggggtttcactgtgttacagttttaaaaaatatttactttaagaaaccatggagaaacaggtagtaaaaatccaacaagggaacagttaaaattatccaggctgcctcctaaactagaaactgaagattttcaattttccattccatgctcatggatcaggagaattaatatagttaaaatgaccatactgcccaaagcaatctacatactgaacataatccctatcaacgtagaaatatcatttttcacaagattagaaaaaagcgattctaaaattcatgtggaacccaaagagccagaatagccaaagcaattttaagaaaaaagaacaaagctggaggcatcacattacctgacttcaaaatatattacaaggctatagcagccaaaatagcatggtgctgtataaaaacagacacacagatcaatggaacagaatacagaaagaaataaatcaatatatcaaagggatacctgcacttatatgtttattgcagcactgttcacaatagcaaagatcaacctaagtgtccatcaatggatgaatgaataaaagaagtggtgtgtgtacgtatacgtgtacacacacacacacacacaatggaatactgtttagccatgataaataatgaaatcgtgtcatttgtagcactatggatggaactggaggtcattattctgagtgaaacaagccaggcacaaaaatacaaatatacaaataaaaaaatataaaatcagaaaacactaatatcacatgttctcactcataagtgggtgccacaaatatatacataggatcattgtgagtggaatgatggataatagagactcagaagaagtgggggtcaggagtaaaaggggaatgaatgatgataaattgcctcatgggtacaatgtatgttatttgcatggtagacaccctaaagaccctaacttgaccgctgcacaatgtattcatgtaacaaaactgtacttgcaccccataaacttatacaaatgaaagataaagatttttccatgtgttcttcggaacttctaagtggcctaatttgcctgagttcttctcatttccctttctgaagtttctttttaggttgtctcttgaccaacttcttagcttctttttttttttgttccagaggaagtggtttctgggtcccaccttgaatgaggatactttcattcagggtatctccatgaatgacaccctttcattcagggtcctctcctgctcatagttctggaggtggtgatgatagttgagatagtacaataatgaacatcagaattaatcaatgctccttattgtccacagaattcagatgagccttccttaagtcttcagagcaaagcctgcttaatgcctgtttaaacctttctgtttggttaatatgatgtggatactttaattttaagcgtttggtccaaagatgtcactcaaaataggagtactaccaggaatagcctatgttactgtgattagtttttaaagtatgttaacttttctgattataaaattataacatcctttttctaaacattcaaatattacaggattataaaactttgatcattaagagtcttattctaccaatatcatgaaaagagcagaaaaggatggctcctgttaccactattaagctatactgttgatatagtggtctcaatcagtgaaaaagtaagaat

SEQ ID NO: 588677 - DNA, 4001 bp, Homo sapiens
tttgttccatatcttaattttcttacttaatggcttttcaaggaagcagtaaagatatatttgattctttgaacatgctgcatatagttacactttatggaattagtcatagcatctttctccatttccctattgaaaaggttttaggttgttgccatttttacctattataaactgggatttccctgaacatctttggagattatatatacatatatctcacaatattcaatacacatttacaataatattactcaatacaaatttataataatatttctataggctagagtcctagaaatgacagtttctagacgaagtattaaatcacacattttaaacacatagtttatgggaaggtgaaccagaagaaatgtttcaacctcccctgtgtgaaatggataatttccatgttatcccttgtggtttttgttctttctgaccattagcatttttaaattgtatgataaaatataagaggaaattaaaagtaaataaaactacagcagtataataaaggaaggatagaaagataaaaaagtaaaagcttaagatttaagcaataaaacatttttagaaggagaaaaataaaaaattataaaaattctcaagaagagaaaattagctaaaatatatatcctcctcttccttcattctttctcttttcaatttttttgcaaaaacattcaatggctacaaattacacatttttcagcaatatattgaaatgtgaagaattttggaggatctgccttaataaaaggagagaaatttgtttaggaaatattcatggggaaaggattagattaaagcagtttttggaaaatgagaaagtggaaaaaataaatctttccaagaaagaggagacacagacaggaaacgattgtgatttaagagatacaggccgaattgttgggtcatcatcaatggatgtaagtgcccacaatagccttgtctcacatgggtcagaagtgctagcttccaacagctttgactgttcaccagaaaccagtagaaaacacgtccaagttgagcagattccacttacgagtttttcaagagggtgcttcctaggatctcttgctcataagcttcctcaggccctgtttcaggtctttgtttctcaggctgtagataaaaggattgagcatggatgacaaaactgtgtaaacaattgttgccacgtggtccttgacagcgtaggtggatgggggctgtaaatagacacagaagatgcttccataaaagagcgtcaccacggtgaggtaaaaaccacaggtggagaaggctttgcgtttcccagaagtagagggaatcttgagaactgtagtgaggattcgtatataagagaaagcaatgcagagaaaacgagtcaccaaaacaataggtgcttctgtcatctgcacaatttcattgacaaatatggaagagcaggacaatttcagcacagggctgaggtcacagagaaagtggtggataacattggagtcacagaaggtgagacgattcagcagaagtgtgtgcaggagtgagtggaggtgaggaaatgagcaggagaaggccaccagcaggacacagtggtggtggctcatggtggtgacatagtggaaagggtcacagacggccacatagcggtcaaaggccatgactgccagaaggcagctgtcactgttgcccaaggcatagagaaaatacatctgtgtcagacacccagcataggagatggtcttcttttctgacaggaagttcatcagcatcttggggacaacgcttgttgtaaagcaaatatcagtgagagacagaaaactcaagaagaaatacataggggtctgaagatgggggttgaagcgaatggccaggatgatgagcaggttccctgttatggtgaccaggtacacgatgaggaagagaacaaagagtgtcttttggtcctcaggccgggaggagagtcccaggaggataaactcggagacactgctggtgtggttgattctttccattgacttgggctcagttataaacaagaagttttgtcatttaacatgctctgatttcataacaccaatcatgagaacctagcaagtctttgtttcttctgtttggtcacaattagctactgtgctaattgtgggatggcttgttcacctcatggtccttgatggggtcctcccttcccaaatctatgggctccataagggcattatattgaaatctggagggacagagggagagttttcctttagaaactttcagaagtggactcctctaattcagactcagtatttcctattctgtgaaaagcactattcacctgccggggacatagcaatagagcagacagatttctgcttatgtggagcttaccttctagttggggaggtagatcattatactacaaaatatgtagtatagcatcagttagggatacattttatgaacaaaataaaatagtattagaagatggaggttgctggggagtcagactgggggtattttagatggggaggtttcaggacactctttccctatcaaagcatactcagttgtgtcacgctgaagtttatctttgcattgtcttgaaaaaaactaatggtttttcaaaacagccaacagggcaaatctaagacgactgttgaacgcagtcaatagagtgatttttttttctgctctgctcacagaatgaaaggttcatcctccctagctcatgacatgctatcatcattagtttgcacaagtctccctttttttgtaaattgtttttcccttctttaattctctgtcctaaatcacatttgtacagaataagcacccattgttaagtgttaaatctgtttttaatttatcttttacgtgttaaaaatatatatgagaaacatgttaattttttggtatatatatttttcatcccgatccagttacctaccaatggatatcaaagtggcttccatttcttgctactataaaaaaactctgcaatgagaatttttgtatcagcaaaatgttgtcacaatttttttgcaattaaagtttttgagtaagcatattcattcataccttgtgaataggcatattacatagagattttcaagcatttttagatattggttatttatacatttttggctaccataaaatctctacagtgaacatatttgcaccaccaagatgtttgaaacaacttcattttattttattttattttattttattttattttattatttaagttttagggtacatgtgcacaatgtgcaagtttgttacatatgtatacatgtgccatgcttgtgtgctgcacccattaactcgtcatttagcattagatatatctcctaaagctatccctcccccctgcccccaccccacaacagtccccagagtgtgatgttccccttcctgtgtccatgtgttctcattgttcaattcccaccaatgagtgagaatatgcggtgtttggttttttgttcttgcgatagtttactgagaatgatgatttccaatttcatccatgtccctacaaaggacatgaactcatcattttttatggctgcatagtattccatggtgtatatgtgccacattttcttaatccagtctatcattgttggacatttgggttggttccaagtctttgctattgtgaatagtgccgcaataaacatatgtgtgcatgtgtctttatagcagcatgatttatagtcctttgggtatatacccagtaatgggatggctgggtcaaatggtatttctagttctagatccctgaggaatcgccacactgacttccacaatggttgaactagtttacagtcccaccaacagtgtaaaattgttcctatttctccacatcctctccagcatctgtgaaacaacttctttacagcagtatattcttttacacattgtgaatgggccttaatacaccagaattttcacatatttttaaatgttggctatttatatattgatgtactaaaaaattaaatgcttacatttttctt

SEQ ID NO: 588678 - DNA, 4001 bp, Homo sapiens
tgaaagatgctccataagtattcattgaaaaagtgcagcaatcataaaacattttagaataggttaggtctgagaaacaaacttaaatgaggaaggagtttaggtagccagtggacacctggtgataccagatgtaagaaatcaaaactatatagcccttatatttaaaataatatttttaatatttctaagattcttggagacagatagaatgccatttaccttcaaacatcattttttccatctctgcaactaatttaagctgctggtgccccttttagatgtggacgcaaacctgcagtcaaataaggagagaggatttccacgttcctctcatctaatagtcactaaaaggatggtggcattgcacgtttctgaccagcatggggcagaggtagcacaaggagctttaacccccttcctagtgaaacattagccaaccgtggggtgggcaacccgcatggaaacctaaacattgaatttgaaccttttgatggggatctctttagctattctgcagcacatggaatgcagcctccatctttatttcttttgtcttactccccacttaatgccacaaacaaaacaagtgcccccaaaattttaatgatcgacaaattaataacctagaatgaaagtgtcatgaaagcagggactttgtcttgctcagtgtcataaccctagcacttacaataacttccaacacaccatagatagtaaatatttattgaacaaatatatctcagagaaaagattttttgacttctgagttgggggaggaatgaagaatactaatagtaataataatagctatcccttattgaacacctactgttattcactactatactgaatgcatttcatagtttatttcagttaatcctccaagttacattattagatagaaactgttatctccattttataaatgagaaaaccaaggctcagagaggctaagtaaccagactacaatcttatggctagtgtgtggtagaccccaaaatgaagcccgtttgtctgactccaagcctatgtcttttcattaaatgttgctgtcaccacatctaagaggaaacaatactcctgtgactgaagagcctctttagggcccccttcatgtccttgttccttaggctatagataaaggggttcaacatgggagtcactatggtgtacattgcagctgctgcaatgtccttctcttcagaggcaatggagggaggacacaggtaggcactgaagagggtcccatagaacacacaaacaacgcagaggtgggaactgcaggtggaaaaggccttgcccaccccaccacgggttcggaccctcaggatagctggcacaatgtggatgtaggaggtgacaatgcataaaaaggggacgatgagtacggtgcctcccaagacaaaaaccatcatctcgttgatgtgggtgtcagaacatgacagcttcaggacaggagtgatgtcacagaaaaagtgagcaatttccccagtcacacagaaggacaaccgagccatgaggaacgtgtgagtcagggcaacgatattggtgaggacccagcacaatgcaagcattagggcacagacttggggcctcatgactgtggagtagcagagggggtggcaaatggccacatagcggtcatacgccatggcagccaggaagaagctgtctagatcaccaaacatcagaaagaaatacatttgcgtgaggcaacccgtataggagatggtgtgatgccgagtctgtatattcaccagcatcttggtaactgtggaggacgttaaacccatgtcaacaaaagacaggttggccaagaaaaagtacatgggggtgtggaggtgcaggtcagagccaatggccaggatgatgagcaggttcccagtcaaggtgacaagatacatacacaggaaaattccgaagagggactgctgttgctctggaggcgctgatattcctcggaggaaaaattcagaaatgctggattggttttccatgactctgcagcatctggagctgagggaagacagttagaatgctagatttcatctacaactgtgtgggctgactcccaaatctccctttaagttcattatattcctaatcctgactttatcttcattctgatcctgcttcttttctctcttcatcagagtctcattttccccctttctcctctctttaccactatttaatcttttacacatagagtccccttccaataaggtcagggcatattctcccttggcatgaccatgccttagactagtctatagcctcatgttagtttcatttttgcagtaggctgtctatgtgagtagactgaggtcagctaaattttacattcttttgggaggtagccaaaaaacccacacaaaattcttaattttgacacatcctcattcattttagagtgaagggcatatgaaggactcatgcctctttattttttcattatttcttttgaaaaagaaaatacgaagtcctgcatttctccctgcatttgagtttttgtcattggcatcatcatcatcctgtagctaacgcatattacatgttagccacatatatgacaggtactctactaagtactttatgaagattgtttcctttaatccttaaacaacactaggatgcagagattgttattcttacccttatataagaaaactgagtctaaggatgtttaagtaaattgtacaaggacccagagctcataaatatttgagacagaattcaaacccacagcaatggtttccagagactgtaccatcagtcaatatagatagaaagtaactttctaggaccacatttatatttaatccctcagtattcttagtttaacgtatttagtctcacttgcctttactatcttttatatgtgtgttttacagaagaacaacgaaatttaagaactagatagaacctgaaagatcacctggcccagaggtctcaagcattggtctgtagaccagtttatcataatcaagtgagatgcttatttaaaatcctgatcccggctgggcacagtggctcatgcctgtaatcccagcactttgggagaccgaggcaggcggatctacctgaggtcagtagttcaagaccagcctgaccaacatgacaaaaccccatctctattaaaaatacaaaaattagccgggtgtggtggcatgtgcctgtaatcccagctacttggtaggctgaggccggagaagcacttgagcctgggagttggaggttgcagtgagccgagatcatgccattgcactccagcctgggcaatagagcaagactccgtctaaaataaataaataaataaagataaaaataataatccctacctcagacctgtcaaatttaaatttctaggatacaatttaggtacctgtatttaaaaactaaaactgaaggcttctcaggtattttgatgctcagtgaggattaagaaaattttgcttagtccaactcctccctttgattcagataaataagctaaagttcaaaagaccaaagtgattgaaaaagtttacactatgtcttggaggaagatacggtatgaaaaccagggtatcaatgctctcagacaggtgttctttttaaaaatcagctatcttttcatttttagaattctttgtcattaatatcttacagatctagatgtgtttctttgtcctgatttatatttagagtctatacctgaataaaaagttatcttcaaattgatagctttactaaagcactgtttgtattctgaagtggatagcaacatctgagaactattgcgtatgtatctatccctgaaccctacactgactgaagaacatctcagggttttacaacttttctgagggatctgaggctacagtccaagttattttctcccctacttcagcacttgataaggcaccctctgacagggcacattctaatagccatgtccagaagggtaagagatcctcttatgattcagctgattgtttgtctcatcaaaagaaggg

SEQ ID NO: 588679 - DNA, 4001 bp, Homo sapiens
tctttttctctgtgagttatcactgcaacatttttttgtgccaaccctcaaatttcatttccttttttgaaaaatatctacatgtttcaaaacatgtagctataaagaagaaattgataacctagaatttcattgcaaaaagaaaaccattgttaagctttgtgacttctcataatatcagtttccaccagattgctttgcatcaaattattgccctaaaaatttccagcatgcttgatttatcatttttgattctagaatattttatgaaagaattcagagaacggatggtgtagttagtacaaatctggcactagtaggtgtacaacaaatattgattacttttaatctatttactacaacagaagagtgcttttaagttaaagaaatgaaatagtaaggaataccataacatatattaattctttttctcctattgttatcattcaatattaaccttagatgtacactcacaccttccttgtcatgatcctcacaaagtggtaaaatagaaagggagtcgataggcataaattgacttgttaagttatttagcatcctaattcacagttttcacaattctacctaaagtaactgatgtaaggaataatgaggaacattgtggatagtcaataaatgtttctattctccttccttcacctcatcccatgcctgccttgctggggtagaattgctcagctccagagcctcataacaaatgccttgttcactatggctaatatgctggttttagagatgtgaggaggaatagtagttttgctgttagtaatggttgcctcactggggtcaggaaagaggctgagacagaacatctcattccacagcctaataaaagaatgaaacactcttttttttttttttacatccctaactcagagtcaacggataaccttcccctaatatcaacatgacagtagtagaattactgaagtgatggaagacagggaggggttgatcaagattagacatcaccgtctagatgtctaatcataaaaagaatgtttttccactgacaaaaagtttacccaaagcctccttcatgtctctgttcctcaagctataaatgaatgggtttagcgtgggaataatcaccatatagagaacagcagccctactttccctctctgtagagtaagttgatggaggaagtaaatacacacccataagagacccatagaagagcagaaccaccgtgagatgagaaccacaggtagagaaggccttccatctccctccaggagatgagatgacaaacacagcccagaaaatgcggacataggagaagacgatcagcaggaggggaacagtgaggaacagcaagcccatggtgatgatcatcagctcgtttacatgggtatctgagcaggcaagcttcaggagagcactaggatcacaatagaaatgagggatggctttctgggcacagaaagccacgcgggtcagcaacagtgtgtgcatcagggcaggacagttggttagcacccagcacacacccagcattagtgcacagagctggggactcatagatgtgctgtaatggagtggttggcagatggccacatagcggtcatatgccatcacagccagcaggcagttgtcaaggccaccaaacataaggaggaaatatagctgtgcaagacacccagaatacgagatgatctgactctgggtatgaatgttggccagcattttggggatggaggcagaagtgaaacaggcatcagttaatgacaggttggccagaaagaagtacatgggagtatggaggtgtgggtcagagctgatggccaggataatgagcaggttccccaccatggtgaccaggtacatgccaaggaagatgccaaacagaagaggctgctcctctggccactcagagagtcctagaaggaggaagtctgaaacagtggtttggttcactctgcctggttttcccatcccttgtagttcgtgtgatctgcgcagataaaaaccttccatgtgtcagtatttatttattagatcaatttacagatatgcatctgtgtggccagaactgtgctgggagaaaaagaaaagaaaaataaatggtctttgccaataagaatctctgaatctcactgggaatgcaaggaaatacccaagagacatttagagaacagttaagataatatccattcaaatctcaattgtgctttgtatgctatagcagaatccaaagaaaagagatttgtttgaccagagaaattggcatgggctatttagaggaagtgagaattgagaatagcttgatggcaagattagaaaagccatttgttattgtcaattggaaagaagatgcatgatctccatcaaactcctacccctcctccaacacacacacacacacacacacacacacacacacacacacacacacactcaagccctctttgtgggggctgaaattgacttttaagacaagatagcttcctccccacttgcctttcagtgctgagaatttgacctcacccattcaaaccagtcctgtactctttcctaactagcggcaaaggatatgtgagctgagggcagtaggtgtctggtgtcgtactcccccatccactgttaggatgttccctcccacacacacgcatacaaataggacagggagccactctctcccttccatcacttcctctcctttatccctgtcctcttcccttttttgctgctatgcatctctatctgctctgggaactgatattttagttcacctgtgccttcacccctacatttgtactacatttatctaatatttacttttaaccagagggagggaaggtgaaaggtatcgccctgactttttggtttgaaaataaccagtctgtttttttgctgccctagtgagctggtaggagaaaccatttcatattgatcttgtagaagtttggccttagaagcttttgtaactattttagtcctccatttgttctttggttcatagagaagcttctgaccttaggcagagactcagcactttcccaggaaacttttgcctggtcacctgatcatcgaactgggaaggaaggtgtatatgtgtgtgtgtgtgagagagagagagagagagagagtgtatgtgtgtgtgtgtgtgtatgtgtcctaccccttccaaatcctcacctgtcagattatggatcagttttaggcatcttcaaattctccaattctcttccttggatggataattcataataaaaaactctgagacctttctgactcagaggcaataaagtcggggtctattgagtccagagtttattagaaatacctgaagtgtatggctcgatttcagcttccccgggcataagaagacaggaatatctcttaaggttataaaggctcctagaacaccatctcccaatgtgctcgttaaggtcgacctcggtgtcattgtgcagcctgttctccagccaactctggctggatcctaggggagctgaggacctctctttcccaggggttaagatctcaaatgtgggtctcgggaatgtgattctgaagcctcttgctggcaatgcagtgtacttcagcctgactagcaggtcacctgggaactcctgcctatatgcattaggcaagtcagcacttgtcccatgtcctaggtaaaactgcattgaagaagaaatcaggagtataaactaaaacacaactatttctgctggcgatttccttaaagagaataatcctgatggaaacaataccctcaaaaactccaaaactcaattaatgaggcaacctaaataaagcacaccagccatagtgcctcatacaaagcagctgctcaaaaaaagctacttatatctactgtattttaattaattctattaagtggagagagtggaatccccacctaggtctgtaatgactctggagtacatgctattatccactatgctttgttctagtatcattgttggtttcaatcataagcaatttcataggtctaaaataatccaact

SEQ ID NO: 588680 - DNA, 4001 bp, Homo sapiens
agaatcaacattttaacagactcttgatgcttgaacctgttcttcatgcccagtattgattggtcagaagacaaatcaattttcacccactattagaccagttccacatatcaactacagaagagatcaggaacatgctgaggcaaaatgagtttgacttatccctgagtagtgcaggtaaagcaggttaagaaaaatgcaaattggtaagcatgacagtgcttcattctggagcatatataacttctgactccaaatagtagacattatcattatgttcctcttcttatattggagtagttaccccatttcacctgacttctataaacttatagaaaataaaagcaccaatattgctctcctagttttcctggcagctaggggatgtgttggtgaccaaattcttgaccagtcagatgcaccaccttattttgaatctagacatagtagtgaaaagaataagaaggggacagttctttctggaagtggtaataaccagtttatagacctccaagaactatgcccagtgactactgctggtagtataggaggaggtacaagctgcagtgaatagagtttggtggctacagtagtgtcctcattagactagttctgggatatgattttcactgcagttctgatgatatgacctttattattcttgtccatttttcttgagtctagttccctagccttggaaatgcatgagctccacatatcttttcaagaaactcatttcctccatgcataagccagaatcagtttctattgcctacatctaagaactctgagagttacaaccctagtgtttaattgcagagaaccctgttaattatagttaaagaaacgctagtgttttacactaagtacatggtggttcctttttgttttatgtactttggatttaatagatttctctgggcaatatccagtgagaaaacacatgatatatagctaatttagatatttctggaaagttctaaagaaagcagatctgtgaggcacaacattatttctccagaaccataggtaaacctctgaactgtgtttggggttttatctaaagaaaaaagtctgcattctgctcatccatttcatgaagcctcccttgacatccccattcctcaggctgtagatgaaggggttcagcatgggagtcaccactgtgtacacgactgttataatgcgacccttggtcactgaatagctggaaaggggccggaagtagacccaactgagggtgccatagaatatggccaccacagtgaggtgggagccgcaggtagaaaaggttttccacctgcccttggctgaggggatccggaggaccaccaggatgatgcaggcataggaggcagtaatgaaggccagagctccactgattacaacagcaccttctgtgtgaatcataagggtgttgaggtaggtgctggtgcaggagatcttcatcagagcgtagaggtcacagaagaagtgggggattctgttatctgcacagaagattagttggcctatgagaaaggtatgcagcatggcatgaaggtgggagagagcatggcacatgaccaccatcttcacacacagcattctagtcaggatcatagtgtagtggaaagggtggcagatggcaatgtacctgtcataggccatcacagccaggatgaagttttccatgacggcgaagcaaatgaagaaataagtttgggctaaacagcctgtgtaggaaattacctttgtaggggagaaaataatctgcagcatcttggggaccgtggtggaggtgaagcagatgtctgtcaaggccaagttactgaggaagatgtacatggggatgtggaggcgtggagcagagagaatcagtgtgatgatggccaagttgccagaaatattgattgcgtacatgagtgagaaaacaaggaagagtgggatttgctcttctgggtgggtggaaatgcccaagagaacaaaatgggacacactggtccagttgctgttgtccatctgttgccataagaacaaaaagaattagttctatagacttggacatatagtcactgttgtgccccagtgtaaactacacactgtgctgataaagggattaagtgcttatgacttttccaagataatatggatttttcattaacatcatcattattaaaagtactgctaaaaaccacaattacttttgcaccaacctaatagccccatagctaacatttacagaacatttaccttaaaccagggacttttctgtgttatcacatttaaatcaataactctatgaggctattattactactactactattattattattattatttcacttttacaaatttgaaaacaggcacggaaagtttaagttcataaagagcaaaatatcaatttaagtcacatttatctggtgccaaagattatactattagccactatatgacatgactccccagattaaaaccaagccatcttattcatggtaataagacctattgatgagctatataaccaaggaatctgcctgctgaaagggaggtcagaggtcatttggttcagtaattttcactttgggggacacatactcttgctgatctccagagacttctcagtacatagaataatggttttaggaaaataattgtctagatcctcaatttccacagttctcttttctaaactcttcttatctttaagatgtcacctagtgcataatcttgtttcccatgtaacaaatgaaaactaaatggtaatataattgatgttgattttgacttactttagtaataagtaatactcatttctagatatatgaactaaaaaagtcctactagatgcctttaattaaaatctttttaggaataacaattattttcaaaatttgtgatatattaccatatgaaattactatttttgtagatcaaaataggtgaatgttggcaacttaatataattgaagctaacaattacatagttttggtcagttgtttaaactgaccaaattggtgccaattagtaataattgtgataataactcaatgtagatgatttttcataattattttaacacaaaattttgtggtcataagaaataaaaaaacttttattttttattgtgaaaagtaatataggtgattataagagactttccagcataaacatttattacaacaggataaaatttgtataggagaagaatggaaatacatgtttaaatggagaaggaataatgtaaaacatacacattttcaggatgactttgttcttgcattttaaaaatgaatgatgtgattatcaaatcactctgtgtttagatgtcattgggtacattttaagaaataatgtaaagttttgttttaaaagtacaatactccatgtattatatacttatagctatttaaacatcaaatggataattttatatgcctctttttaaaagcgcatgggtcttaataaaaaagcatatataagcaaaaactataaatcattgaaaactataaactcattgattgagaacttgacccaacttctcaatcaatgttcagtctctttttataggatcctggggaaataatcatcctttctccttttgaacgcttttagtggcaggaagctctagttgtcagatttttttttttttttttttttttacaggagaagctaaagtataattgcctctcatttctgtctcgcagaatgaggttggtcctctgggatctcacacaacaagcctgttattcttcaccatgacagcccttgagaaatctaaacgtgcagcactgtgcagtggttaaaagcccagccttcattttctcatctgtcaaatggggatttttatagtttattacacttaaagttgttacaaggattagatgaaagtacctggtttctgtaaagtattcagtaaatgttggtgattttttctttcattttttttcagtcttgttaaacatagcgtctccaggtttttctgccatccaggtctctactgtgacactgttcactt

SEQ ID NO: 588681 - DNA, 4001 bp, Homo sapiens
cccaatgtatggtcactgcacaatctgtatcagaatttcttggggctccacctgtaactacagactattgaggaaccaccctagagtcactgaatcagaatatctgggagtgaaggcatttttaacaagcaatatttgtatgcaaataaatgatttaaaacaactaatataaacattgtctctgtaatgtttaagtatttataaagcaatatacctcattgcctttgtttcttctttataattttcacaagtggtaccttcttctcaaataaagtgactggtgtaaagctgataaatgtgttaatttactgaatgagtgctgtaaacagaaaaggtacaaaataacaagaatacatgtctctgtgaagtcaatcatccaatgaagaaaaaaggcaaacatgaatgaaaaagacttaattagtatatgagtagtatactggcataaaagcagatacaatttgcacaagtatttatgtgcttagaaaagcaaggctggcaagtggaaaaatcaagtaggcatcattgaatgccttactcagggagataaggagttttaatcaggagttttgaataatgcggggtaattagagagccaccatcatgtggtagaacaagctctggccaagaaatcggaaggatgtcatagtcccagttctacagttgtgtgatgttgagctagtcttttacatttttaaattctgttttctcacttgcacaattaaggccagtctttatttgtttctttatgctcccacctcctttgagaaaggattaaatcacagaagatatacacgatttcttctgtagcaaacatttaatgactctataactcaaaacctcacaaccacaaaacacaaaaaggaaatattaacaaatgcaaattgaaacctactattattaataggcaatcactctgtgtatgcagctcataactgtgaaattatatagagataagatccgatcagagttctaagaggttgtatgttgtctcgaatttctctgatgagctctgccaggggcacatctctggtaaaaccatagggacccaatcagagatgttcgtgtgtttgatgcaatgttattttgcccagcaatttcttcatagcatctttgacttccttgtttcttaaactgtaaattatggggttcaacataggggtaagcactccgtaaagcaacgagatgattttgtctattttttgtgcatttgatgaagaaggctttaggtacatagagagggcagccccataatacaaaatcaccacagtcaaatgggcaccacaggtagaaaaagccttgtttcttccctctgctgaggtgattctcagaatagtggaaaggatgaagatgtaagagatgcaaactaagagcattggaattggcaagaggagaatgctgaccaccagcatgatggtgttcatgagcagtgaacttgtgcaagctaactttagcaccgccagaatttcacacgtgaagtgatcgatgagattcccacagaggggtatctgcagggcaaaactggtttccagcagagcggtcaggcaacccgtcacccaggagaccgtagccatccgtgcacagacgcacctgttcatgatgatggagtatctcagcgggttacaaatggccacataacggtcatatgccatcacggccaggagcacacactctgtggagcccatggcaagggacagatacatctgtacagcacacccagaaaagataatggttttctgggatgacagcaagttcaccagcaaagtaggaacagaggcagatgtgtaacaaatatccatgaaagagagatttccaaggaataagtacatgggggttttaaggcgtgaatctaggatagtgatcaaaataagagtgctgttgcccaagagcgttgtcagatacattacaaggctgaagacgaagagaaccacttctaaccctgggtactgggaaaatccctccaagaaaaaaatgctccaaatggtgaagttttctccttgcattttctttctttcatctatatttcttccagtactattcccttcatttaatctgaggacataaagaaatgaataaagtgtgatattcatttagttaggaaaatactctcaaacttattttcactattataaatgcaattttactacaagaaatcacaggatagtgtgtttattgatgtaagggggggagcaggttgatgtacataagttgattcttccacaacaaaatttagaaaacagcaaatttgaaaaaagaatatacatatttaatacttgaaactgagctcctaaacctatccttggcacacagtaggtctttaataaagatttgaaagtgaccgaatgaggaaaaatatgaatgtacattgaagaagttattgagctcaaatcagaaaagtaatccagataagtgaggaaaagaaagctcaaatgtacaataaaaagcaatattgatcttcactaaaagaagaggaggaaccttgaaagaaacaaataaattttaggccgggcacagtggctcatgcctgtaatcccagcactttgggaggctgaggcgggtggattgcttgagctcaggagtttgaccagcctgggcaacatgatggtgaaatcctatctctacgaaaaatacaaaaattagccagatgtggtggcgcacatctgtggtcccagctactcaggaggctgaagctgagacagggaggcagaggttgcagtaagccgagattgcaccactgcactccaacctgggtgacagtgagactctgtctcaaaaaaaagaaaaaaaaatttaaaccaacttcatagtcggaagctctgggtctaaatgaactctgccctttccagctaacagtttgggggggctgtacactggtttcaaaaaggacaacaatgcttgaagcattgtagatactaatttgtgattatatttaagagccagtttatgtcacacaatttaatactaatacgtttaatactaatacatccaccgtacaatttcattcattgttgagccccatatctttgtgagtttgtaaagagctctaaaaattatagccaggcaatatacgaaaacccatatatccaggaaatgcagaaactaaactcccttggaagattaccataagatctctttaaaaataagattacagagcacatagttataaataagtacattggaattggcaagagaagaatgttgacccaccatcatgatcatatccatgagcagtgaacttgagcaaactaactttagcacttccagaatttcacttgtgatcaatgagattcccacagaggggtcgctgcagggcaaaactagtttctagcaggacagtcagaaacttaaagttgtatattttttccttacatttcacattattaacaaaaaattattacaaaaaacttaccttgcttctgcactcatattgccttttaataaaccttcaaccgttttctttctccactgagtctttcctattttcatatatacatgttcttaaaaattgctttcatcttatgaatttctctgccaaattttatatttaatagatttctctaataataaaaaatttattagattattataaaacattacttcaaagaagcttaatttttgtgctactcttaagactaacaagcacaagtttttaagtgaaaaaatcagcccagttacctgagatttgatattcaaaagtatttaatagtagccaagaagaattggtcctcccatctgaattccgtatcagcaacttcaaataaaacgttgttttatgatgcacttcataaagttaactacgtccaagaaataataaattaattcatattttaaaatgttaaatattatgtacaaatcaatagtgcgattcatttcttttgaaattattaactcttaccaccataactaaaaataccaaaggatagcaactgaaatattaggtaaatttaaatcatttattgttttgggggaatatctgttgtccctgaacaatttaaagttcagga

SEQ ID NO: 588682 - DNA, 4001 bp, Homo sapiens
gagaccagcctggccaaaatggtgaaaccctgtctttactaaaaatacaagaattagccgggcatggtggtgtatgcctgtagtcccagctactcaggaggctgagggatgaggcttgcttaaacctgggaggcagaggttgcagtgagccgagactgcaccactgtactctcgtctgggtgacacagcgagactctgtctcaaaaaaaaaaaaaaaaaagaaattagacccaaagtcttcaaacatgtgtagccaccatctgtctacttctatctatatctatctaccatcatcttttttctagaacatgatttggcatctatcagaatacaagctttgctgttgtgaaattctgtaagaacgtcaaatttgaactcattactccttgaattttatttaatttactaggtggtgttcaatgatctgcagtgcatcaggaaaaaatagcctaaattttctcatagctaaaaagatattcagtcatcaaaatagattattcacaactaaaagctccctaagtgaagaacttaccttttcttagccattcaggcaaactgagtgtaataaactgaagcctcagtaaaagtttccactccctccttatttctctgatttccctggtgaatccagtagggctggtaagttgctgtgagaacattctcacgtccctgttctaactctagagctgagacactctaagggccatgcgtcatgctttcatggctgctgtctcgtgtggttttaccgtatgttcagaatgccttcatcacagttgattatttattgagtctggtgtctgttgaagctgtcagacataggactaaaactcaggagatatcgtctgaaaagtttaatatctcctgcaaatggacttagagtgagaaaccattataggtcacatgacttggcttttgaatggcagctgatgtgattgtgattccttacttccatgtgggtgacaatcacagaggacccttccaccatcactgagtgaagccttttggtctcagcagtctcctcacagcagccttcacatccttgttcctcaggctatagatgatggggttgagcatcggggtcaccaccccatagaaaagggggatgagtttgtctgaaagatcctctttgtctgctcccatggagtccttagacttaggcttcccatacatgaagaataaggtcccgtagaagacgatcaccacggtgaggtgggcagagcaggtggagaagacctttttcctcccctcagctgaggggatcctcaggatggtggtgatgatgaagacataggagaaagagatgaacagaaccgggactcctaggaagatcacattcgtcacctccatgctgatcacattgatggaaatgtcagcacaggccaactttagaacagccagaatctcacaggtgaagtggttgatgacattgtctccacagaagggcagctgaattgccaaggatgtgtgtaccacggaagcagcaccaccaatagcccaggagctggcagccatgggcatgtaggcagccttgctcatgatcacggagtacctaagggggttgcagatggccacatagcgatcaaatgccatcatgctcaggagcaagcactctgttcctgccatggcaaaggagagtgccatctgcacagcacaggctgagaaggagatggtttcctggggagtcaaaaagctgtccaggaccagtgggactgaggaggtagtgaagcagatgtccaggaaggagaggttccctaggaagaagtacatgggcgtgtgcaggcgggagtcaaggatggtcaccaggatgaggaccccattgcccagcaggatcacgaggtacatcagcaggatgagcacgaagaatgtcttttccagctctgggtgggcagagagcctcaggagaacgaaccccatcacaggggaggtctcattggctttttccatgtgatatcccctctgccatcagcaaagtactgagcagcgcatcaggctttttgggaagagtcctaggcatctaatatgtggtcaagttcccattgcataatagaagaacatatctgtgcaagagaaaaatgacggaaagagacagtagggggtgtcttagaagacagaaggtcagagctggacaggtagtgggtgagggcctcaaatgtccggttgtgcatgagggatttttctgaagttgctgcaccctctcagtgtccacaaaggtgatagaggcctggggaggagaagtgacctgtccaaatcttctgagcaagttggtgacagagacaagacttgaacccagcagagcatatccctggcccaaggagggcttttcctcttcattgtgattaagtgctaggaaatgctatgaattatttctctttaatgcaaatccacagcaatttcatttgatctgggctttcttagattctcagagaggaaaattcccaagaagatgcaattcttggacctagcaagtgattaagtttctttaaactttgattacacgtggggaggaaattgcgcaaaattgttcaaccatattcacacagaaacaagcctagttaatattcagccataaagagcattacttcttcagtctagtgacacaggcttgagcattgacaggaatagatctgcctatttgaaatatggatttattgcaatatatggggaggtcctatagctgggaaatttatgaagccaacaaatggatttgttggagtgactgaactcacaccatgagacaacactgtgtagcttaccagttagttaatgcaatattaataaccacactctaactatagttatcgatagtagagtatatggcattaacttctgatcccatctcattaggatgtctgtgaaattcctaaccgtgaatgactaagaatgttttttctttgtccttttatgtttgcattttattcttgcattatcttctgactctctgactccattcttgagttctatgcaagcagctggcttataggaagacttatatgcctttgtatagaggatatctagtctcttacttgcaatttccctgactctaaattcaaagtactcatagataatattttgatagctccttcttaatgacagtggctctatgagtgtgtataagagtgggtggatgatggaagatgagtggttaatattaatattagtgagaatattagggattctcactaatattaaggaatataagctgtgccatatttcttgaaacagctcatggagaagatattatcattcaggttttacaggtgaagtaactggagctcagaagataaatttgctccttggggttgaatggcagagctggagttggattccaagacctagtcctgagttctttcacgaaacagctgcttttctcttttggtgcacagctttgcaaaagattctgtccctccaatattagacagatcttatagtcctatttataattttctctgtgctaatattgctatagcataatgataaattaaaaggacaaagtcaaacttgtacacactgttatgatctcaattagctctgtgtattctctggccagtctcactgtctgtccaacactctctcttcagtcatgggggagggtttatgtcagatgtgttgtcaggcagtgcacctcccaccctaaatggaactcagggtttctcaaattctttacgattgacattttgtgctggataaccctttggtgtgagggctgtcctgtgcattgtaggatgtttagcagagtctctgacctccaccaatcagttgccaatagcaccttctaccctgagttgtaacaatcaaaatgtttccagacgctgccacatgcttccaggggaaaggtgtgtgtgttggggcgggggggggggggttggcgggggggacggtgcaaaattatacccagaagagaacgattggtctaacccaggagaagcttcccccattacacaaccatgggtctcaaggtatttcctgtgcaatcctattcccctcttcccatcccttcatac

SEQ ID NO: 588683 - DNA, 4001 bp, Homo sapiens
gcgtgatctcggctcactgcaagctctgcctcctgggttcacaccattctcctgcctcagcctcctgagtagctgggactacaggtgtctgccactgcgcccagctaattcttttttttttttttttgtatttttagtagagacggggtttcaccttgttagccaggatggtctcgatctcctgacctcgtgatctgcctgccttggcctcccaaagtgctgagattacaggtattattattatttttaacttttaagttcagaggtagtacatgtgcaggatgtgcaggtttgttacacaggtaaatgtgtgtcgtggaggttggttgcacagattattttattacccagatattaagcctaatatccattagttttttttttttttgcttctctctctcgtcctaccctccaccctccgataagccccagtgtgtgttgttcccctctatatgtccgcatgttctcgttgtttagctcccacttataagtgagaacttgtggtgtttggttttctgatcctgtgttagtttgctgaggaaaatggtctccagagccatccacgtccctgaaaaggatatcatctctttcttttttgtgactgcatagtatgccatcatgcccagcttatttttaacaattttttttttttgtagagatggtgggggggtctccctgtgttgcccaggctggtcttgaactcctgccttggcctcccaaagtgctggggttacaggcatgagccactgcacccagctgaatattgaagaatgttttgaatgttgaagaacctgaggcagtgcaacagaaacattagcctggtctagcgtctggctctaggtctagccctagatgaaccccaaatctttttctccctgctataagctttcatttccctctttactgtcccttaaacaatgacatgagacatccaagccagaggaacatcccatctttaccgacagtgacggggccagaaagaggccccgaccttcctcatcccctcatagtcagacctacccagcctccctggaccaatcactgggacccctgccctggacagtggaatcggctccaggtctgcctgagggcctccttgacctccttattgcggaggctgtagatgagtgggttgagagacgggatgaccagggtatagaacacagaggccatcttgtcagtgtccagggcatagctggagctggggcgcaggtacatgaaaatgagtgtcccgtacatcatggccacggctgtgaggtgggaaccaccggtggaggctgctcgccgactgccctcgaccgagcgcatgtggatcacagccccagcgatgaagccataagacaccgtgatagctaacaccgtggctgtctggatgaagccacagatggcgaagagaaggagttcattgagactggtgtcactgcacgagatggccagcagtggagggatatcgcagaagaagctattgatcttccgggagcggcagaagctcaggcggaaggtgagggttgtgtgaacaaaggcactcactgccccacccaggcctgatgctcccagcaaggccaggcatagacgctgcgacatagctgttgtatagagaagtgggtttctgatggccacgtagcggtcataggccatggctgccagcaagcaacactcagtatcagccagacctgcaaagacaaacatctggagggcacaggctgtgtaagggatggtggctcggggcagcagcaggtccactagcatcttggggccgatggcggaggaatagcaggcatccagcagggagaggttggccaggaagaagtacataggtgtgtggagccgggcatccatgcggatcagcagcgccatgcccatgtttcccagcaggctcaccaggtagacaggcaggcaggtcaggaagagggccacacgcaggtcccagcgatttgtgatgcccaggaggacgaattcagcaggggcaaccgcggcccgggtgaggttctctgagttcatcctactggacagagactgagaagaggcaaagcaggagggagataagagcaatggcaaggccatggccagggagaagaaagcatcctgtactgggagttaggtaggcttgggtttcagctcacctgtgcaacaaaattgctgtgaccttgagcaagccacgtaacctctcaaaacctgtttctaactcttagaagtcattgcagaagcctttttttgtttttgagatggagttttgctcttgttacccaggctggcgtgcaaaggtgtgatctcagctcaccacaacctccgccttctgggttcaagcgattctcctgcctcagcctcccaagtagctgggattataggcatgtgccaccgtgcctggctaattttatatttttagtagagatggagtttctccatgttggtcaggctggtctcgaactcccaacttcaggtgatccgcccacctcagcctcctgaagtgctgggattacaggcatgagccactgtacccggcccgtctttttttcttttttcttttcttttcttttcttttttttgagatggagtcttgttttgttgcccaggctggcgtgcagtggtgcaatcttgggtcactgcaacctccgcctcctgggttcaagtgactctcctacctcagcctcccgagtagctgggactacaggtgcccgccaccatgcccggctaatttttgtattttttaagtagaggtagggtttcaccatgttggtggtcaggctggtcttcaactcctgatctcaagtctgcctgccccagcttcccaaagtgttgggattacaggtgtgagccaccacgcccagcctttttttttttttttttaaagagacacaaggtctcactatgttgcccaggctgaactaaaattcttgggcttaagtgatcctcctcccacctcagcctcccaagcagctgggattataggcatgctccaccacacccacaggggtcttgtccctcttattcacttttgtgtctacagcactgagagcattgcctagcacatagctggtgctcaaaaaagatttgttaaatgaatgaatgggatgatatttagtgtccagccaatgattgaaaactttgtgactctatatgcattctcctctccagttttccaggtaagaaaagagacagtggaatgagcagaaataatcttcagatccaacgggcacctggccatggcttttgaggtttgctagtagggacatctttcctttggagtaagatcggagaaaggagtagcctggtatcttgcgaaaacagtggggagtagaaagaacagaaaatgtgaatatattcctgagctgaattcttggcctctctgagcctcaatgttctcatctggataatgggggaaagctgcaaggattcgatgagataatgcatgtaaagcttctcacacagggcctagcacacgcaggcatttaacaaaggccctgcgaatggaaataaattgaactggatgctctggctccaaactggaaggaagcaactttatggcaatcaaaagtagtataattcccagaaaatgcaatgttgcttcacactcctgtgccttgcatttgtcctctttgcctggaacccatttcctccttttgtgtttggtaaaaagtttctccagtgtgaagccttccctgatctgtcccttaaaactaaacatttttcttgtctgtggcctgctgcactggagcatacagtagttcccccttatctatggggaatacgttccaagaccccctgtggatgtgtgaaatcacagatcgtactgaaccctatatatgtgatttttttccctatacattcatatccatgataaagcttaatttataaattaggcatagtaagggataacaacaacaataataacatagaacaattataacaatgtactataatacaagttaggtgaatatggtctctctctctgtccctcaaaatatcttacttttatatatatatatatatatatatatttt

SEQ ID NO: 588684 - DNA, 4001 bp, Homo sapiens
tggggacatggtggggcccggcgggaggccagggagggctggggttctaggggccagcccaggggtgggtgaatggggggtgaggcctgagaggggcatgagtttggggctgctaagcatgcctaccatagacagacagcccccagttcttctcatcgttcacgtcaaaagcaagcatgtaggtcttggtgtccctgaggatcagcaagtgagcgaaatgctcttggcctcccactggaagagaaaaggagcctctgggtgagaacatgggatggcacaatggtgtctgtcttacaggtgaggaggcctaggtgtgtcagtggccacacagcccatcagtgaaggcccagggctcctttgggccaccgtgtgcccagcccctgctgcatgcccagctccacgccaagcactttctgtacatgagatctcaggagcctcacacagaccgtggctgtcagggcctttctccgttttacagatgaggaaaatgaggcccagagaggaggctcgggatgctaaatggtgtcagttcagctccatcagctccctgccatgtgccacctctgcggtgatgggggacatagttgaaggtaccacctctccaacatacaggcttctaccattggtttgcaaaggatcttaaagagggcatgagagagaggcagatctgaagccagcctggagttccaattctagttctaattataagctgtgtgaccttggggaaactatttgaggtctctgttcttctttttcctcctctaattctctcagtgtcctcttagagttgtttctgagcacatcgttagagctcaaaaatgttagtggttatttctctgtgcccaaagcctccagggctctacatccagcccccaccttatgctggcctgccctgttcccacagtgaaccctcctgcctgagggctggccctcaccgtatctggagatggtcccattttcccgctggacattcaggtaggtggtgttatagatgcactggtcctgtctaaagccaaacagaaggcggaaggaaaacaggaagattattgagaagtggccaatcgcccatcacagtcctggggcaagagtctggtggagattaaagccagccctcccggttccacccatgggaaggccaaggccaggaagaaggagggacttgctcaggtcttctggccagaagctgagatgggggtgcattggaatgggggctctcaccgggtctggtactctctgagaaagatcgtgtcctctgtcttgttgggggtgaagtaaaagaaggttgcttggatctcctgaaccgacttattgtactcctcgtttcgaaaggccgatgcgatataaaaccacttgccagtgatctggggagaaggtgggagctggtgatgggggcttgatgctgaatctttgactgtcagctgggaggagactcaggcagatctctccctgattttgcagatggggagatgaggcccctggtgggcagtgcgcatgcaggagctcaccctgaggatcagtcattgccccccaggcagcccctccaggcccagcacagaaccgtcctccgtgaaggactctgcagtgaggcttctgtgtttggaggcagggggtgcctccagagtcccctgggctggtgagaatttcaccctggggacccagaagagaaaaaggcagagccgggagtgggggtccgaccacagccagcagggaaagggaagcccagagaagggaggcagctgcccatgtgctcaggacagggctagcccaggcactcacccggtccagggtggcgttggtgatgggcaccggtactaggttggcacacaatgggatctgggcttccagcagaggtaggaggctcaggactgtaagaacccaggacagcgccatactgagaccaggaggcacgtggagccaggcagtgctggtggctgcagggtgcagtcacctttataataaactatgggcggtcacttggagcccagcaaaagtttactctgtgtctgtgacacaatcctgccagcacttgggaaatgcctcgcacaaaacctcccccaaaggccagctcggagcaccgcctccaaacccaggtctaatttgagttcctcacatggagaggttacaaaagccctagagtatggctgcccaaggccaaggtgggtgcggggctgcagcaacattagtaaacgtgtgagtccacagatttcctagagaggcctcccgcagaggaatctcatgtcttcattcaattcctatccctctgagtgccaagacttacttcagtgggacccagccacaaacctaatgatgaagccacctttgagggtccccaggctggcatgggatgtatgttgtggcggggagagttggggtgaaggatgccggggaagacaaacatagattcagttccactgagtgtggcaacagctgtgtcagagccaaagttcattggggccccaacccagccctggacgcaggcacatttccaaaaagggacatccaagttgaatgtctatttccagtaaatatactactcgaagcatctcccaacatctcaaacaggaaactgtctccctgttttcccccattccctgccatctgagcaggcagcttgcttctctttcaccaatacgcccccaatcctggagcagtgcccagcacttcaagggcactcggtatattctgtggaatgagtgattccgtggcccatttgtgttcctacctcacgggtcaagtctttatttgtatgaataaatactttcagaaagtattcatttttttttttttttgatacggagtttcactcccgtcccccaggctggagtgcaatggctcaatctcggctcactgcaacctgtgcctcctgggttcaagcgattctcctgcctcagcctcctgagtcgctgggattactggtgccctccacaacgcccagctaattttttttgttgttgttattttcagtagagatggggtttctccatgttggccaggctggtctggaactcccgacctcaggtgactcacccgtctcggcctcccaaagtgctgggattactcagaaagtattcttacggtatgattataattttgcattcttattcatttcattctgaataactttcatatttcagtgtagtttgtagttaaaagcttaatggacccaagatgggagagtcacctgagtcctggagttcaagactagcctgggcaacatagtgagaccctatctttacacaaaaatatttaaaaattagccaggtcggccaggcgcggtggctcacgcctgtaatcccagcactttgggaggctgaggcgggcggatcatgaggtcaagagatggagaccatcctggctaacatggtgaaaccccatctctactaaaaatacaaaaacaaaattagctgggcgtggtggcaggcgcctgtagtcccagctacttgggaggctgagatgggagaatggcgtgaacctgggaggcagagcttgcagtgagctgagatggcgccactgcactccagcctgggtgacagagtgagactccgtctcaaggaaaacaaacaaacaaacaaaaaaattagccaggtctggtgccatgtacctgaaagcctagctactctggactctgaggctggaagattgcttgagcccaggagttcaaagctgcagtaagctgtgattttgccactacactccagcctgtatgatggagcaagagaccctgtctcaaaaataaataaataaataaataaataaaagtgtaatggatgcacaacttttcattcacttactctattctttttttgtttttgtttttgttctgaaatggcatctcactctgtcgcccaggctggagtgtagtggtgggatcttggctcactgcaacctctgccacccaggctcaagagatcctcccagctcagcctcccgagtagctaggaccacaggtgcgtgccaccacacctggctaactttttgtacttttgtagagatgggggtct

SEQ ID NO: 588685 - DNA, 4001 bp, Homo sapiens
tggggcccggcgggaggccagggagggctggggttctaggggccagcccaggggtgggtgaatggggggtgaggcctgagaggggcatgagtttggggctgctaagcatgcctaccatagaaagacagcccccagttcttctcatcgtccaggtaggaaccaaacatcaaggtcttggtgtccctaaggaacagcaggtgagcaacatgttctcggcctccctctggaagagaaaaagagcctctgggtgagaacatgggatggcacaatggtgcctgtcttacaggtgaggagtcctaggtgtgtccggggccacaaagcccatcagtgaaggcccgggtctcctttgggccaccgtgtgcccagcccctgctgcgtgcccagctccacgccaagcactttctgtacatgagatctcaggagcctcacacagactgtggctgtcagggcctttctccccgttttacagaggaggaaaatgaggcccagagaggaggctcgggatgctaaatgatgtcagttcagctccatcagatccctgccatgtgccacctctgcggtgatgggggacatagttgaaggtaccacctctccaacatacaggcttctaccattggtttgcaaaggatcttaaagagggcgtgagagagaggcagatctgaagccagcctggagttccaattctagttctaattataagctgtgtgaccttggggaaactatttgaggtctctgttcttatgtttcctcatctaattctctcagtgtcttcttagggattttttctgagcacgtggtaagagctcaaaaatgttagtggttatttctctgtgcccaaagcctccagggctctacatccagcccccaccttatgctggcctgccctgttcccacggtgaaccctcctgcctgagggctggccctcaccgtatctggagacggtcccattctcccgctggacattcaggtaactggagttatagaagcactggttctggctaaagtcaaccagaaggcggaagaaaaacagtaatgttatcgaggagaagtggccaatcgcccatcacagtcccggggcaagagtctggtggagattaaagccaaccctcccggttccacccatgggaaggccaaggccaggaagaaggagggacttgctcaggtcttctggccagaagctgagatgggggtgcattggaatgggggctctcaccgggtctggtactctctgagaaagatcgtgtcctctgtcttgttgggggtaaagtaaaagaaggttgcttggatctcctgaaccgacttattgtactcctcgtttcgaaaggccgatgcgatataaaaccacttgccagtgatctggggagaaggggggagctggtgatgggggcttgatgctgaatctttgactgtcagctgggaggagactcaggcagatctctccctgattttgcagatggggagatgaggcccctggtgggcagtgcgcatgcaggagctcaccctgaggatcagtcattgccccccaggcagcccctccaggcccagcacagaaccgtcctccgtgaaggactctgcagtgaggcttctgtgtttggaggcagggggtgcctccagagtcccctgggctggtgagaatttcaccctggggacccagaagagaaaaaggcagagctgggagtgggggtgcgaccacagccagcaggtaaagggaagcccagagaagggaggcagctgcccatgtgctcaggacagggctagcccaggcactcacccggtccagggtggcgttggtgatgggcaccggtactaggttggcacacaatgggatctgggcttccagcagaggtaggaggctcaggactgtaagaacccaggacagcgccatactgagaccaggaggcacgtggagccaggcagtgctggtggctgcagggtgcagtcacctttataataaactatgggcggtcacttggagcccagcaaaagtttactctgtgtctgtgacacaatcctgccagcacttgggaaatgcctcgcacaaaacctcccccaaaggccagctcggagcaccgcctccaaacccaggtctaatttgagttcctcacatggagaggttacaaaagccctagagtatggctgcccaaggccaaggtgggtgcggggctgcagcaacattagtaaacgtgtgagtccacagatttcctagagaggcctcccgcagaggaatctcatgtcttcattcaattcctatccctctgagtgccaagacttacttcagtaggacccagccacaaacctaatgatgaagcacctttgagggtccccaggctggcatgggatgtatgttgtggcggggagagttggggtgaaggatgccgggtgaaggcaaacatggattcagttccactgagtgtggcaacagctatgtcagagccaaagttcattggggccccaacccagccctggacgcaggcacatttccaaaaagggacatccaagttgaatgtctatttccagtaaatatactactcgaagcatctcccaacatctcaaacaggaaactgtctccctgtttttccccattccctgccatctgagcaggcagcttgcttctctttcaccaatatgcccccaatcctggagcagtgcccagcacttcaagggcactcggtgtatactgtggaatgagtgattccgtggcccatttgcgttcctaccttatgggtcaagtctttatttgtatgaataaatactttcagaaagtattcttttttttttttttctcggagatggagtttcgccattttgctcttgttgcccaggctggagtgcaatggctcgatcttggctcaccacaacctcccctgctggtttcaagcaattctcttgcctcagcctcccgagtcgctgggattacaggtatgtgctaccacgcctggctaattttgtatttttaggagagatggggtttctccacgttggtcaggctggtctcgaactccctacctcaggtgatccgcccacctcggcctcccacagtgctgggattacaagcatgagccaccgcgcctggccttccagagcgcctttcaacagtgaacagcagctgctgtttagggagcaccagctggaccctgattcttacgctaaacactgggcattgtctacttcacacagtccctgtactagctctcaggaccctcactctgccccctttttactgatgaggagagtgaggttccactgggccatctgcccaaactggtttgggagagagcctgggtttggactcacattagtttgactccaaagtccacattctttgttatgtgtgttttttgcttcctctacctccatgattctttttctcttgacctctggtttcttcctcacgtggcttttccttccatgttccccacttctcgtctcccttgcttctccctgccctgcccatcacgactcatttctgtttcatttttcagcggatcctcctcagtatggttgaaaatggtgtcttactgaaagtaacattgaaatggggaaacttcttttaggttctgagccttcagttccaggccactgtgggaccccagaggctgtcctgtccacttgccttctgaggacatcagctcggtgtccccagcctccgtgctgtgggcacagcagtggtttgggtgctgagcaaaggatgctgtagtcttggccctgtggagcttggctgttgggacaggaggtacaaaggggagtggtgcctgaggacacaggactggaccctggggtgtcagagcctcaggctcatggtcttatcaccctgtatggtgtacgcagctgcacatacggaatagatggaacaactcaggcccaacttttctgccacgggaggagtgctgcttccctcacgtaacaagaggctgtcaatcatgagcccccaggtctgggtgaggccggcccttcgtggcttgtgccactgagtgggctgtgcctcgggcttggctccacct

SEQ ID NO: 588686 - DNA, 4001 bp, Homo sapiens
tgcaaagttccctctaaacacctgtcatgtttaaccataagctttctgatgtgaaggagaaaggaggttcctgggaatgtatccacaattagtaacaggatgacccttaaacccccaagtgtgaatgaacccacatgtatacattactgtgtacacacacacacacacacacacacacacacacacacctgtcaatgtccctccatttgcaatatagacagcatttaatacgcatgaagagatttttaaaaagggcattctttaacgtatttcaactggcagcaggtgatcagaaaaaaataagataaataaaatattgtttagctatcaaagaacaactctgcactgttagatacttaaggtcctgatttgcacctgagtttagaaagctacctcatacatatgcacttaaaatggaaatttctcatcagattccacatctaatgcaatgcagaacccaactctagctgtgccccatctttgcccagggcagagccagtctcagcaacttccttcacactcagcccaccaagatgtcagtcctcagtgaagcactattccacatacgtacgtacatgattatcaaataaagggacttcatactccaactgcaggaacgcaaagaaacaaaactagataagtatgaaagctatagagtttaggaaaatcaaggaaaaaagtaatcactgaaactcatctcttgcaaagaaagttacttcaaaatttgacgtaaatggattaaatttcagcatttcgctataccgaaattacactatgggaagaaaaaacccaagaatacatcggagccatttatcttccatttcctgtatttcccttaattacctacccaaatgaatgcacgtaagagttgttaaagtattgaaatacgtcagtcctttctaattacctacccaaatgaatgagcggaacagtatgttacaacttttaattaaaatacgtcagtttcttttacaattatcttatttctgcatatcacagaaaatattctaagaacagagcaaaaatgaacaaggacaatccgcccagaaaactgctttgaggaatttagtaatctcagccctctcaggtttagcacgccaacgtctttgggagagcaaaggcaaaggagatgataaaatgacacttccaaatagcaacagctgagatcactgccgcatcctagattctttccaccaggagcgcgagtatagggtttttttctaaacgctcttcccaagatcccgaggtcaatttcaaacgctgctccacgcttaagtcccgagggaggctcgctcgcccaccccaccctgcagggattgcacttcccgttcgctctggccggtcaggaaccctaacttgacagtgacaaacactgagaaaagaggaagtggctaaagatcatttcatgacattttttaaagggagatcaatggccctgtctttccggaaaacttccatgggacgttgccatcacaccctctgaaagtttcagcgaatgacaacgtagcaaaagtgagggctactcccctttaaatatatatatatatattaatcctcgaaatcctcttgctatcaaaatcgatccctcctccgtaacagcgaacgcaaaactaagagcgcccatcccggtggggccgatctcggaagccaggctcggggccgggtgcgcgccgggtcctccctgccaagctgcagaggaggcgccggcaccgcggcggtcgcaggacctggcaagcgcctaccttacctccctcacctggtttgactggtttgggtggcggcttcgacatctcgcttcctggagctgcaaatcctaaagaccccgccgaaaagcccaccgcttgcccgccacctggcactccgggcaccccagttctttttgtctggcttacaaccgtgcgcctcctaggaccggcgcccacccttggctgcgggaagagcggacgcaggcagagcggctccgccgagtgctccgccccgccccgcggccgccggagcagtccagagcgcgcgccgggccgacgaggaagtggaccccgcctagccgagcgctaattggctcccgggctggcagcttcgccgcagcaggagcgcgggcggcgcgcacggcggcggaaccagccggagccgagcgagggcgaagcgggcgtgcgccagtgcagtgccgcgggccgcgcgcgctcccgatagggaagggccggagctgcgcaggggcgcgcggaagaggccaagctagccggagccccgccccgccccgccccgccccaacgggggctggaacccggcgccgagagtagagaaaaggggcctctggtgaccgcccctacctggcatccctctaacccaggaggagcgtggggaaaggggctgtgggcctctcggggagcgagctgcgggtagcggcgcactgggtacaggcgcgcgcttggctgtcgcctctgccgctgtgtttgggaggactcgaactggcgccaggtgagtgcgtacctgctcgcccctgccgcgccgcgccgccttgctggggcctggaggtgtttccagagggtttctgtgctggagcccgggacttggttgcgccctgaaagccttgcctggactcttgccaccctcacagagctgataggtggcctgccgaggaggacgtgtactcatggtggcgtggtgctctagcgccccggaataatcctgaaaatgggaacgctgcctccaagagaccgcgcagcctggagaagtcgccagggacaggatcaggacttgatcctcgcggatcgatatggtctcattcctctagcgttggggtgatgacctactgcccgcctgctgcctgttactgtaaggcctgctaagaattttttttttttttactttttttaatgactgaaaagaaataaaaagaaatataatactttgtgacacgtgaaaattacatgaaattacgatttcagtgtccgtaaaattttactggaacacggtcacgctcatttgcatctgtgttttctgtggccgctttcgcattacccagcagggttgagtagcagctggcaaagcccaaagcatttcctgtctggcactttacagaaaaagttttcctacccctgatctatcggattgaatcttcggtgggaggaaagaactggagcacacaaggaagccaatggcataagttcaaaataacagtcaatattgtaaattaattgtatatttggggaaagaaaaaactgtttacctaagaacctacataaatgaaaccaatgggggaggggcatgaattgcgttttcaaaaaccccagcccttcacgtctgtaatcccagcactttgggagggcaaggcgggtggatcacgaggtcaagagatcaagaccatcttggccaacctggtgaaacccgatctctactaaaactgcaaaaaattagccgggcgtggtggcagacgcctgtagtcccagctactcgggaggctggggcaggagaatcacttgaacccagaaggcggaggttgcagtaagccgagattgcgccactgcactccagcctggcaacagagcgagactctgtcttaaaaaaaaaaaaaaaacccagccttgagggatttgtttaccaaaagggagcaaagtttaaacaatagtaggaaaagactgccctatctcctggaagaagagaatcaaaatagctgttggatagaatacagagtaagaagtcctggaaacatttttctctttttaaaatatcagactgtcctgtagatacatttgaagagcacatttagctttgtcagctgtctttcagatcatttgcgttagagagctgcgttagagagttcgtacaatctgctgattctgcacatgccacttctgaccattctgcagtttagaatccaaaaggcaagtgtttagtagtgaaatgaattaagcataataaacacacctgaattattttaaaaaacccaacattttacttagggttaaaaaaaagtgtaaaaaataaaattagtcatttcaggt

SEQ ID NO: 588687 - DNA, 4001 bp, Homo sapiens
agaccctgaccacctctgtctttttaaaaaaataataattaacaaaatagaacaaaatgttgcaaattgttaggaagaattcagtggaccaaggacatgctgtaagcccctctctcttcccccagagaggcctgggagctcagcctaagaccagagctgcagccccagagtgcgcaggaggcagccaggcccacgggaacagcagccacttgcccacctgcccacctgcccacctgcccacctgcccacctgttcacctacccacctgcccacctaccaacttgttcacctggccacctgttcacccacccacctgttcacctactcacctgcccacctgtccacctacccacctgtccacctgtatacctacccacctacccacctgcccacctgttcacctaaccacctgctcacctgcccacctgttcacctaaccacttactcacctagccacctgcccacctacccacctgttcacctaccctcctgcccacctgtatacatatccacctacccacctacccacctgcccacctgcccacctgctcgcctgcagcctccctggccttttgtgaggccagagtgaacagtgcaacaaagcacctgtcccctgtgcctgggcacagtgcagacccacatccagtcatgtcatgccaagaattagtgcttcccctgccctccaggtaaaagatgcctctggggtcagcatcaggttgaccggagtaaacactctgactccctgaagcagagagagtggggacaggccaggccccactccctcatgccccagcagagccgcctctgggagagcgtggctagcatgccagcactgagccagcccttggggcctggggacactcacagttgatcttgaacttctttggattctcagtcttctctccaaggaccttcttctcaacacagctgttgttctccctgaaaggtggtgacaataggatgagtggccacttgaattggagttgccttcactgtcactcctaaaatcaggtcaccacgggaacttccccgggtccaaggagcaccgcagcccgcagccgcccagaccttctcctcagtctgacctggggctgcactgtgtggttggctgttggcccagagcctggggcaggggatccaaggggacagggaacgtctggagccctggttttccaccccaccctcatggaagggccacagtgaagcccctggctgtcagaaaatgcctggggctaagtccagctccgcccaacccacccagtcctggacccctgaggggggagactgagcccccgcccagcccgtctcaatgatgagaaacccaccatctgtgcagaacgatctccaggttgtcctcgggggtgggcaacagtgaggtgatgtggaccctcagaggggccttcagtgtcgccatgagggagatgttgttggtcgccatggccatggagtgccaggtccctgccaactgagggggccttgggctgcacggcggtcccaccccaccatggctctcgttgcacccggtgcagacggggctgagtctaactgggatgggtacagtgagcattggatggttgtctgctatctaccagatcctgggctatgaaatttcctgtacttaaaatgaccagtgtgtgctaactcaggagtgttccaaagtccaaataatgagtcacctaggatgctgggaaaccagagaggccaccctaaagatggagagcagggctgagggcttcctgacgtcatggcgtccattctgtgcttcctgtaggtttctgagatcctgggcttcctgcctgcccgcagctcccacccgccccaggcctcccacagtaaagtgcccgctcccccagcctcaaacctttgggagctccaggtcctgcttggtctgggggatgtccatggccgggacaccacagaccagggccacgcccagggtgagcaggaggcacagcatggctgcggctgtgggtggctctgagctctggagccagagggatgctgaggcagtgtgggctcagggggccttatgtaggaggagggcagacaagatccccgcccacagcctcgccatgtgattcctcgaacctgtgactcatccttggcccctgggcagcttcctccactggggcaatgggaggctcttccctgcgtccacgcgggaacctcctctgtgtccgggctgggcagttcttggcagggcctcaggcgggaggggcctgggtcgggtccaggctggcagcggcgggagcaccttctgggttggggctcctggacaatgttgggtcagaggccagcactgaggacagctgtgtccagggcaggggtatggcctgtggggcaggcagagggcctgagagccccatggctgccccaggatgccacagacatcatgccagtgggtgactgactgcacggtcataatcctgacctgtaccttccactcagacatccccaggtgtgcacacctgtgtccctcaaacagccagcctctggacaggtgcacactgcctgttagcactgtttctctctgactcacaggcaagactgggtggaaatgggaggcagtggactttcagactttgtcctacagtctatattggatgtactttttcccacagggaagcatcactttgtaacttacaatcgagcccgcatctcactccctggagagcacttgagtcctgaggcaagacacgggtgtccactcccactcccccatccatcagagcaggtcattccggccagagcagctaggcaagaaatggtaactaaaggcaggcagattgggaagggggaggtatacctgtctctattcgcatataacatcattgcccaggtacaaaattgcaagaactctacaaaacccctcctagaaccgagtgaggtcagcaaggtcaatcgcacaaaaatccaccgtgttcccacacagtgtcaaggagtagacagaacccgaaactggaaattcaggatttgtaatcacacacacagcatgtaggcaaaaatctcaccaaatatggacaggacttaaactctgaacccaaggaagggaaatcaaagacctaaggtaaaggacaggcacaatgtgttcatgggctggaagcttcaacacagcaaaggtgttagctctcctcaactcaacctagagatttaatgcaattcctatcaaattctcagcaagatattttgtaggtagctatagacatgtgtgtgacacacacacacacatatatacatatatacatttttttgaggccaagtcttgctctgttgcccagggtggagtgcagtggtacgatcttgactcactgcaacctctgcatcccaggttcaagtaatcctgctgcttcagcctccagagtagctgggattataggcgcccaccaccacacctggctaatgtttgtatttttagtagagaggggttttcactattttggccaagctggtctcgaactgctgacctcaagtgatctgctcacctcggcctcccaaagtgctggaattataggtgtgagccaccacaccccaccatatgtagatatatagagaaatttttttttctaaaatttacatgtcaaggcaaaggagctacaattgctaaagccattttgaagaagaataaagtataaagagttagtctacccaagtttacaagcactattatcaatagtcaccaagagattgtggtattggcagagaaatggacacatagatcaatgggaaatagagagtccaaacatggactcacacacaacaacaacagacctttaacaaagctgcaagaacagtgcgtgggggaagtgttgtcggaaaagagggtcccagtccagaccccaagaatgggttcttagatctcacacgggaaagaattcaaggtgactcacagagcacagtgaaagcaagtttatgggaaatgactctgtgccagagccgggcaacctcagcgagcaggaggaacgcccgtcctctgtgagtgcctctgtttgtaagaagctgta

SEQ ID NO: 588688 - DNA, 4001 bp, Homo sapiens
cttgagcccaggagttcaagactagcctgagcaacataggacaatcccgtctgtatgaaaaattaaaaattagctgggcatggttgtgcatgcctgtagtcccatcagaaggctgaggtgggaggattgtttgagcccaggaggtcaatactgcagtgagccatgatagcgccattgcactccagcctgggtgacagagtgagaccctgtctaaaatgaagaatagcttggtgccaatccgaaaccccaataaatgctgtagactgtagtattaggttggtgcaacagtaatttgcggtttttgccgttgaaagtaatggcaaaaactgcaattactgttgcaccaacctaataataatagataatattcatagataatagatgatatttattgagcttattttatgccaggctctgttctaagaaccttatatgtgtatgtatcaatttacatcattaacttccttaatgttcacaaaaagtacatgaaatagttactattattattcccattttccagatggggaaaatgaggcccagggagattaacatcattcagcaaagtgtcagaagcctcaaaccagccaatctgactctagagcccagctcttaaacatgacactagttccttaaatttgtacatatcttacaatttacaaagccctttggaagagatacagatattacatgatcctctcaataatgcttcaaagtgagtaaggaacatctttgtttccattgcagagatagggaaactgaggctcagagacattcaattgctggagtaggaaatcaataacagcagtatcaggctaggtggggcctgaaatccatgactgtgactcctacaatgctacaccatctctcacttctgctttagcagcctttctgaggattaaattgcatctacacaatcagatacgcagagggataaaggctgcatctaaggtttcttgggtttggtacgaaggtcctgatgtctgaaaacatgactttatctctaacttgaaatatgatttcagacggcctcaatgtcaaggagtagtgtgggaagagaacggaagaggagaagctgaccaagtgagcgggatctaatagctggctccaaaaatgacccttccttggagtggctggctgtcgcctgtcagagtggtcctgctgtggcagcagctcgagagagtgtccaaaaagcaatgtagggatgcaaacacagagaagagaggaatcctagaccagacccacaaccggagccctttatttaatgtcttttctggttaatgcctctcttgtcttccccacccatccatgccgtattcacggtgccaaacgttgtaattccactccgggctgccgccaatatgtttgtcttatttctccaataccccaggaacaaatcaattcttttgggtcttctgatggtttctagtagccaggacattgcagccctggctcatattacccactaactcatccttccattacacgcttcacactgaaccgcgtttgcttccgatccgcagtgaccccctccctctttttttaactgcagtccaataatgctgacatggttaggaatcggaagtcatggctattgcggccaactccccgataagcggaagcttggggcagagataggaaagcctagaatatgcctccgtccttagcaacatcatctactcccctcactcgccccccaggccctgctagccaaggggcagccgcaaaaaccacgccacccggggctcccaccccttgcctcctgccgccgcggcggctgctatagaaacaccaggcgtacacacggggctgaaattaaacacccatcctggacgcggacccgagcgggatctgcctgccgccgcggtcaccatggcaacatgccgagaggagagcagctggcggcgcggctcggggatactcactccatcgcggggctccgcggccgggtgcgctgctgcggggctcaccggcgctgctcgcctctcccggagccgagtgcactggccgcgccgcgcgcgaggtggagctgggagccgtctcccctccccacccgcaccccctcctcccctggagggttgaaagtgaatgctcaggctctctcagctcccagcctgcgaataaaacgggaagcaattggataatgttgttcgctgggcgctagacaagacaccccacttcagggtttcggggagggagcgcgctggcagctggcgtcgggtgaggtgcccaccagcgcgcagtgccgtgcgccctaggcgccaggtgcgccggcggctcccctgggactggcggcgcggcgcggagcctggggagaagggtgggtgggggagcagggcggctgcggctggtggcacagcccagagggcataggcaaacggttgagtcattggcaaggtggcagctctcgccgcttagaagttgcaagaagcgtctggcctctgcaagcagcaaggactgcccccagtgggctgggcatgggttcagaaacgccattgtgccggccgggcgagatccctctgagtttcccaagcaaaactccagctatcttgaagcgccttaatgcggcgtttcaccaccttggcgaccccatgcccctttccgtttcactccaaattctgcgtgttcccgcctgccaggaagacattgtccagggtcagtttccctagtctgctatttgaaaacaatagctatattgactatggtttcccaaattaccacggccccggccccgcggtaataagccacctggagtacgcacaccctgcctccaccccctctgagaatcctctactcctaacggtttccagagcagggacctggttgtcatccaggtgtcctgcacctgctacaatacagagtagatgggacagcttcaggcttttcttctatcttgcagccgggtccctctgtgagtcggtgtctgccaggtgctgaaaacgcagcaccaagcataagcatagccatcacagtccctgccctgcaggagctcacgggttaaagtagaaaggcaaagcacagataaagacaaaaataaacatatcgtcacaggctgaaaatattgctataaaaattaagtaattagatgctgtgatgaatgttctagaattaatttttggtgatgattgtgcaactgaacatactgaaagctattgaattatacactctgggtgaattttgtggtctatgaattatgtcttaataaagacgtgtttttttaaaaaaatgctttgatggagaataaaagggaagtggatgtgcctaggtaggtgttcagggaaagccttcctgagggactggggttgaaaggggagagggctcagatatgcaagccacagggctagggctttcctgccagtcaactctgtatggtggctctagatgggagactgctccatatgtcaaggggctgggaagagaaccgtgcaaaatgttctcagtggattcactgctcctcgttttcctcaggagagtgagatgcaaagtcaaacccagtgaagattcaaagagctgttttgtggaaggaaattctgtatcaactccaggtttcccttcacagagaaattctatgtgaattcggagatcataaaaccctcccccagtccatgtccctttccagttgcatataggattaagttcatgtgtgaataattaagaggcttaaacaggaaaaagatgtgcttttgtgtcttaaaagttcagagataagctgtcctgggccagtttatcagctcaactcctgaaagagcaaagagatccaggctcctacaaaacattgctctatcatatgtggtctcccttcctaaaattgtttcatggtccaagttggctgctctggctctagcccttatgtctgcattccagccaacataaatgtggaaagaggaaagaaaagtaggtaaaggaagcacgcctgatgcctcttaagaaaggctcccagaagctgcctcaggacacttagatctccttggccagaattcagtcacatggctacattcagtttc

SEQ ID NO: 588689 - DNA, 4001 bp, Homo sapiens
aataactgaagaggcacaagtgagtatttgtgtgtattcttatatgctcaagagaattcccaaagatttgcctagatctttcttggaaaatcgacttggcctctgctgggattactcaaccgcacttggaaaagggtaccccagtgttagcagctactggctccatgtttggaaagcaagtcctttcatggagttcagctgttcctcaggcatccagtaaagctggttgtgcaaaggcagaaaatgtgacaactgttggaagccttcagcagcagccaatgggaacagccactgcatcaacagttaaagcagcctattatccagttcacacaaaacacccaccagctacatggcaccattaactcaatatcaccattcttatcaagttcatgacacactggccatgctgccttgccaccaactttagaaaccacaaataacttcacaaaccatcaaaatacacatgcacagggggaaagagaaagaagaaaaaaacaacctttctgagttcagagcaccacgttcaaagattacctaataggcaaaccatggcatttcaatattgccagcaaacatctctctcacttcagtggtgaagtctccaagacatttcagatttgaggcgtttgagaaagagggtctcagagccttggagaccatgtcaaatgcttctaaaaaaggaagggtctgtgtgcattttcccaatgaagaatctgtccaaaaaggttttggaaaacgctttaatatactttggttccaaaacattacacactatttctccaacaaatttatatgtgtttccagagaacttccgaactgaaaaacacaaatgtatttaggtggaagaatgtctggagattcttttatgccaatatgttaacggaccttcttttttaattgttactatttcatacggcagcagtaatcattccctcatcctcgaaggaaatatataatccagctgtggtggctccagtaaaaataccacatctgtggatcattggcaacactgtgttaagattgctcaaatctaggcagtctcagagagttcttttttaaacccaagatgcacatgggtacacttttctgaaagtgcctacgaactttgccaaaactgactactcctttgtaggctgaaaataggttttcagatactccacaccataagaaggaggctctcatggaatattataaccaggacccagttgtatgaagtccccagacctccagggtggtggcttgtgccagtgcccttgtcaatatcaaacagagaagggaaaactaacattcccggtttctgggaggaggttctaccgcgtggctggctgagtcgctgactcctggttttccacttaacaggaggacagcttccgcagagaggatggcagccaccgttcaggtcacccttctcttggttctccaggctatgaagccaacgtatgcctgagcattcggtcataatattcctggagtcgtccccccaccccaagcctctgtttagtccttccccaaagcccagcagcaagcatctttttttaagccaatcttccacattcaaatcctcagtccaaagcgcgcccttgggggtctccatctatagacatagaaaagaaaaggcagcctagctgagccctgacagagttttagcccctggaacatatgacctgcggctactgtgctggcatgccgcttgccccgaaaccctcgggggcccccttccaccccagacaatagagcaagaaaataaaatgaaagtggacttactgctatggcttgcagcctttccttgtgcaattccgcctctgccatcctggagaagggcacacaggcaggggaaagaggaaagaaaaaacacacgctgtagtcacccaaggaaactgatgggcaccccggggggctttgctagaacccgggagaacgcccagggacggctggggatccgctccaggggcggcgggcagagctgtgcgcacggcgggctcgcccgggctcagcctctggcccccgccctcccggccgcctggctgcgccccagcgccgccgctcactgcatctcccggtcgccgccgccgccggccgcgccagccgaggacgtgggacgccggcagccgccgggagggcgcgctagcccggcgctagttctccgccctgacgtctcggtgcctcgctccgcccctggagtgtgatggacccgaggccgcggtccaaggcggctccgagcgatcgccgccgcgggtctccaaggcgcagacggagggcgcgcgagccagtgggcacctggggcgcgggcgcacggcgagccgctggggcgcacggctggcgtggcgcgcccgcgtggacacgcgcttgctggggcggaggcagagcgcagtggcgcctccaccgggcagatgccagtggagaggggcgtctgaccgaatgtgggacccgagcacgtgctgttacgtgggggctggggccaccgagtgttcagggcaccttctggctcaagccagacgcttgagctccacgtggggacatttacaatttgggaagggctgccttgcccaagtggcccacatgcttaagatgaccaagttctcaatatcaagtcggccgagggtagggtatatctccagagaggccacccttctggtgaggcgatatgtggccttaaaagaagccgagagtttttagtcctgggtgctagactagatttcacaatgtgttagctgtgaaatctcaggcaactcgcttaatcactctgaacctcagtttcctcatctgaaaaaatggaggatcacataggtgtcattagagacgaatgagagacagtatgtaaaggtgctttgtaaagggcatcacagacatctgctcttattatcctgtgacattctggattgaaatcctttcagggtcttctgttcattgcatctgaaaggaaaagtaggatctactcactaaaatatttcacctattctttactaaaacaggataccatgtggtactaatgtgagtcttttgtgacaggtcctggactggatgtaagaagtggatcaggcccagtccaaaaggagatcaatgccaaaagcaaaaaaaaatgcctcttcacattgaggcaggacctgctagaattcccaacattcatatgcaaacgtttcttcatcaaatgaaataaacactgaaataactaatatggcctctttagagccataggatttaaaggcatgttaaaagatatacacatcaggccagatgcggtggctcacacctgtaatcccagcactttgggaggccaaggcgggtggatcacctaaggtcaggagttcgagaccagcctggccaacatggtgaaaccccttctctactaaaaatacaaaaaattagccgggcgtggtggcaggcacctgtaatcccagctacttgggaagccgaggcaggagaatcactggaacctgggaggcagaggttgcagtgagccgagatcacatcattgcactccagcctgggcaacaagagtgaaactctgtctcaaaaaaaaaaaaaaaaatgcacatcaaattttcccagatcacctgtttcctgaataaatgcttccatttcaactaaattgccctttcaattttcacagaggttcacctgtcactgatgaacaattactcctctgaccaaagatggaagcactcaccaaaatcgtttactgatggattgttttcccatctttttcataacaagtgtaggtggagctgattgtttaataaatccaagccagtgccagattctacatcccactccaatatatcagaaacttctactttctggctaagcccatccttttcttcaaatgcatccttttttcttcatttccagcacaagccccagcaggacaagttatttaaaggggtttgctcacaaataaacaaagctgttattgcttcagcagagtgattgtagagaatactaagatgaggaaaatgagaccagagaggttgaaagactcagctacagttatagagctggga

SEQ ID NO: 588690 - DNA, 4001 bp, Homo sapiens; identical to SEQ ID NO: 588689

SEQ ID NO: 588691 - DNA, 4001 bp, Homo sapiens
gcagcagagtgtgggtctcctaaaggggtcttcatgtcaactggatagtcagtgctacatctgtgaaagtccaagccatggaaagacaggaagaagcagaactgcccggagagctcacagctttcccttctaagaaagtgtgtgtgtgagggggtgggatcgcaaaacgccttcacacgtttcctggctgcagtgaagggggaacccctactctcactttaagacgtcccaggacatggcaagattgtttgtgcagaaagggaatctcccagacagaaaaggcaaaactttcctcctctcttccagcgccgcccccacctccgctccccagttttattaaaggcatttccacagattcatttagaggggggaaaatggatgctggagcatttctaaggtttgcaatcctcgcaaagtgtccgatttcactataggctttgctgtggaacagcgaaggggagagagagggaggttgaggagggagaactcaaattcattacgggctcataaagtcccatatgagaaaagcgccccgtttcgcagccgcgtctggggaacgctggcggggtatgcgttaggaaggtctcgtcccagccccgagtgacaggcaatgggctttaaaagctaggacatgggatggcgtggagggggtgagggtgagtcccagaggcaggcttcaatcagtgagcaactttggggcacttcgaggacttctaagtcctggccattacaacaaccttgcccttgccggctttcaggggaatggggcctaatgaaggggagttacctccattaaaacgtcaaagaaatcaacggtccccaagtctcctttcacatgcatctcaattgggtcatcctccctttcatcccaaaaggagagagtgcatctgaccattcggagcacgggttacgtgccctaggctccgggaaccagccctcactggccgagggtccgcggggccgccaggagggctccccaggttcctcccagggatggagcagctacgccttccgagtgtgcccattccaccgatggagcaaagtgaggctctcagctcgcccggatgtctctgcgccgctcgcggggcagctctcgcacagacacgcccgcaagcccccgacccgcccgccacccgcgcccagacacccgcgagcctctggggccgcagggacggtgcagcgcccgccgaggcgccctcacctacctgtgatcactgccggagacctctggcccccctccgctcgcagccacacttgcagcgtgaacgcgtcccggggcagctcgaggtcggcccggaggcgcagctgctcgcctcgcccgctgaaatagagcgcccggctcggcgggctcggctcctcggtggcgcccctcgcctcccgctgctgccgccgccgggggacgcgcacggcttcccaggcaccgcccggcggcggcggcggcggcggcgaggcgcggcggccgcgggccgcccgggtggcgcaggtggccgggccggcggcggggcgcgggggtcggccggcccgcgggtctctccgggcccggcggggacgctcggccagcccgcagcccagcgcggcgctcagcagccccaggtgcagcacccaactccagagccgcatgtccgacggttccccccgcccccccttcgcccctgcaccgccacccggagctgccagctttgggagcctcggcgcctcgactttcttcgcttcttcacccttcttgggcgagcccccctttccacttgcttttttcttttctttctcgctttcctcctcaaggtgtgtgctccactctccccacctttgaaaaatacagcccaactcctcctggttggcaattaatttctctccccgctcctttatctgccttatttttcccctaacagctggttgccttcctccttgttttatttcattttattttatatgatttctcgctccaaaaaaaagctcctcttaagactgatccgctgaattccctccccccaaaagatgctctaatttatttattttttgcgtcctttataacacaagccacagcccccttctccccccccaagtcccccctcccctccctccttcttctcaaaatgaaaggaaagagggggaaaaaatccctcagaagatgagtaaacaagcgtatgctaatctgctccccagcgctccaccttcccaattgaatgagtccctgttaaaactgcggggatcatgactaatcaatcagtttggagaggccgagctatccagctttccttcactttgccttttgcctcctttccttcgctcccgcttctccaccaccccctccttttctctctctctctctctctctttttttttttttttttttaaggagacaatcttaaagtaacaatttaatgaaattctgtacacacccccttacggtcctcccagctctcattcctgctcaaaacacacattcctgtttttgttttgttttgcttgctttttttccctccctcactccccccacttattattattatttctgatggcaggagaaaaatctgtctcttctcttaggatcccctttgcactttgctggtaaacctcatccttttctgtagcacataaagagtcttgaaacttgattcttagatttttttttttaattctctctctctgtctctccctccctccctctccctctctttctctttttctcactctctcccttactcttcttcccgcttcctctccctttacctctttccctcttcttttccctgtccttttccctctcagaatttccttaaagttgtacgatgatgaaccattcccctcttttctgagcccccagataaggctggcttcagctaacccaaatgtttccaaagttcttatggaatcatcagaagaaaatagaagaaaggcactgtccaggacatctgcctttcagaagctgtagtcctagtacaactgggtctctgaatttccccgaatactctttaaaatactctgttggtcattagaaattattttaattttataagaagaaaatgagagaaaaatattaatttgcctaatgttttcaacttaagcaattcaggtcctctgaaattgttaaagtcacaggtaaggatctgaccatttgctgctttgtaggtctgtttttgaactgggacatacatgtaatatatttttttcttcttttttccccctctttatagaactcaaaagctcccccttatggcaaaacagatcttcttttattttgtccaagtgtttaataagtcaaaacatgttagcaatggtggattacaagctattaattaccaatctattccaataaggtagtgataaaaatattctgtgtgaagtttgcatgtgaatagcgtgctgaaagtctgcgataaaattaactccactaaattgtaactttcttcttcaattgctcttatcttccgagctgctccagatctttcttgagagctaggaacattgctacacgcttcaggaagagagaaaaccaaggaagaatgtttgttggcaaaagtatgacgatttgtcggatgagcaaatgactcagacatcccctctatgaaagctggaatgcgatatatgcaaagattatggaagctttctgaaaatgggagatctcagattcataccttcctagtttagaaagaagttgctgaatagtcttagactaagaacgtttgaactctgtttctgtagtcataaaatgaaaatagcacaataccctaaatgtgtttccagagactggctggaggaaagaaaatcttgggtgcacaatgtcatgaataaagaatttgcctaagcaaatctttgactttttgcaactccaagtcatctgtaaaaggttgccattggataaaaagagagctatgttgaacaacataaattgtatcattcaaaatcccccttcctctccaatagaggttggaccatgactactgatttacttcagttgtggcaattaggcatttagaaactgcatgtcttccagggggatt

SEQ ID NO: 588692 - DNA, 4001 bp, Homo sapiens
aacttttcctgagccctcatcctgggagcactcttctgcctcagatctctgccctcacttctctccagccacaattttggaaacacagttatgccccagaagttgtcctgggcttggggtctaagtttatcctttttgctcttaggcttgtatttgaggctggaggagagatgggggttctcagagggcacagagatgggggaagggggcttcttgccagggccaagagagtgtttgtgtgggagttacacagtggcctagtgagtgaaagaggccccccatacctgattcatgcctcagggcagatggaggcctactgtccctgctatctcctctcagacataaacacatcctgctacctacttctcaggcctgtgggaggcacatggggacctaagccagggaggcctgtgcgcatacaggccctagagctgaatgcccagactatgcacatgcatccacccactgtgctctcctccactggtgcggcacccacaggataaaacctgaggacacagtgtgtgtgtgtctgtgtgtacacacaaatacacacgccagtgtcagaggcttgtctaggtgaaagtgaatgtaggctgggggtccctagaaatgtcacaactaaccctacaggtgtccgctgtcatctgcaaggttgtgcctgccacaggagacctgtttgtacaaatggtagcctgaacagtgctcactgcacaccaagaggctgcatgccctgaattcacaccttcattcctggtcctatctcccaatagaatggacactgggccttacaatgcacatgctaaacaccacggatctccataggccccagacccacgtctaggagtttgcctagagacacaatgtgaacattggcgtgtatgcatcggacagccgttgacatccaaaaatggaaaggtcagtgtagccacttctttctcacatccaaaaatcacttgggatataacaggtgaatgcagaccctttaaatagtggatgtacactcagatatttccgaattacataaataacactcatagtagacacacattttggatacccaaaagaatatacacaagtactaacttataaacacacacgaataccccacgagtataaagatacacacacacacacacacacacacacacaggcaaacaacttttggacacaaactcatatatttttacatcttttaaaaatacatatactgtaatgaacacactgagtcccttatataaacacacaggccctaacttgcagacccccggaaggacgccagcgtgaacattcagaaacagagaaaaacacagacaaactcacagatatttggactgatgcagaagtgtgtgaacagataggtgaaaaaacataacaaacacgccgcagttagacagtctctacgaaaatgcggcgcgccccctcctcctccagggtcaccctgcgtggggaccaaggcctggccgtgtcccggagtttgcacatctggagcccgtatcgcggtcctacctgtcctgctggtccgaggagtcggataatttttctctaaatccattttgatttttcaggacttgatggaatggacagggaaaagtttccacttttttgtgcctttttttttcttttttttttttttttttttttttttttggtgccaggggccgctcacaggtcggaataattcaagccttccgctcccccgccgagctggggtagctgatcactgagctgaaactaaacgttttaggtggaaaaaaagcgtccgaaggcaccgtgaaatgattaaggaactaaagagcttctcgccatgtgagatcatgtcctgttctcgccaacatcacaagatgtccccagacacgccgcgcccccagcgcgccgccccacactgccggcccggagcgaggaaagggtaggcgctgcgcggccgggcctgctcagcgcgccagacgtggcggacccggcccggccggagtagagcgggaagccgggagagcagcagtgctgctgccgcgccgccccagacttttataggggttggggggagggaaggaaggcttcagcctgcgccgggcgctagccagcgcacctacgggaaggggcagaccgaagcggagcccgggagcccgggtcttccagccgcaccttctattaagacatgcgcttgggggtcgcggccctctgcgctgtgcgcggggcctgtgacatctccatgtgcaaaccccgctgcttagacgagcgcaggccgggtttttgtttttgaagaaattaactgctcggccaagcaggtgcttttgaaaggggttgcaaaggctggcagtgttgccaggcaccgaggcgacgttccggtttactccgattcacccctagggcggcgcccgaccccagggttcccagccatccaacccccaccccaatttgttggggtcctgactattgctgggcccctgaccctagggcagcgccagatccctaaagcccccaggtcccatccagtcttctagtcccagaacccctccccacatcaagttccattctggcccagagcatggaggttaagctgtgaaatactggagatgaaatccgggcttccgctttggagcacccgggcagagcagaacatctcagtagtttctggagattggcgggagttccagacaccttaccccggcccataagtggaatcgcattgccctcgagccctgagacgttgtggagtcccagagccccaggacttgattccagagaggaaatcagatccacagagaccgagcagaggtgtggcatgtccagccctctctcttcgggccagactcaagcctcccctccctgttcccctccccagccttgagttagttcagctgctgggcctagccactgaaagcctgtggggccctgcagcggggtggtcgcaggggaaaggttctccagggcgggggagcgctccgtaggaggactcctggcccgccggacaatggcagttttggagagtgaatcgtcctcagcaagagtgttgtttgttttttggagggggtggtcacgaggctgggtcgcaacctagggggaagagcctagagctcgaggaaaggggggcccccggcggcaactggacatcacatatccactgagcagatttcgccacaatcggaaatgtggctgtggattcccgggcggcccccccaccaagtggtctgcgcagttccccagcgccgcctcctccctgcagcctgcgggcccgtgtccctaccccgagatttgatttttggccatctccgagtgctcgactctttccctccgcagcccagccccagcccaggcttcccgccctcccgcctcgcccgcgccgggaggcagcgcctgggaggagcggcctgtccgcgcctggagatcaaaagccctcccggaattgacatttcaccccgggctgggggcggggggtgttggtgttttgttgttgttgttgtttccatttagagggcttgttttgtttttgtttgttttctgtgagttttcatttttccatgggatattcttttgtttcgggtgttttgcgtgttgttttttcgtgggattgattttagcgggttttgctctgtaagtcctggtctttggggtgagttttgattttgtgtaattttgtactttgtccttgtaggctgtctttttgtgtgtcgtttgtaaggcttttccttctccgcggtgtttagatgtgttttgatttggtgtgagtgggtgtcgtctgtgtgtgtgttgccttagggaatttcgtgttgtgtgtgttttgtttccttcgatttgaattttatttttttgaactgtacgttttggtgggggatcgggttatattttcatgtgttgtctttagtttttgtgtttgtgagatgcgctggtgagagtttgcgtgtgtattttggcttttgtggggctttgggattagggaggggacatcagccgctactccgttcctgcccgcacccatgaagggcagaggattaggccaagcatca

SEQ ID NO: 588693 - DNA, 4001 bp, Homo sapiens
gtgcttggctgtcagcagaaactgaagtggagccctgatagcaggaaaacccttggacactaagcatcagaatttactgagaattgcatacttttaagcttctaaactaagaatcttcaagactgaatgctagatgtcttattttacagtcagataaaaattatctactgctttaaatcaaaacgctttctaaaggtagctaaaaatcaacacaaaataaaagttagtaattcaagaaaggatcactgagcattaagaaaccagccataatatgtgaatgaaaaccaggaaaagtactctttggcctcccttattatttgctgcttattatggtttagcatatatatttaatagacagcaataactcatcatcttttcttgattacttttaggatcagaatagtattgcaaagcgaaaaacctgtttcaaagaaggctgactcgcctatcaacctaacaattatttgcactgtgctatttgtacactcaatttaaacacaatcacatgtaaccttctaaatagcctcccttggatagtgctatatcctggacttcaactttttctcctttgcctcaactttcaaaatggcaactttaaaataccatacatccaacacacaccaaaaaaaaaaaaaaaaagaaagaaaagaacaggaaaaaaataaacagtagagcttgtttaatgtacttgtttgccacatacagggaagataatgccaaatacaaactaaaacatccaaatctctgcttcagtttgagcagttacctcacgtcaagactgaaagaccttcaattaataaagtctgacaagaaagttaaactgaaacgaattgccaaaaatttgccaaatatgtacctgtagttttcattccagcacttctgcaaaacctatcttcttatatattccctgacttggacacttcaaaattgtttaacctgcatctgtagacctttttatactttatatattaagcacagttacaagtgtaatgacttcagaatacaaaataatacaagtattaacagatgtaatacatcgtatgtgtctacacatcattacccttcctcgattctctaaagtagccttcccacctaaaacactaattcaagcatgctactggggtctgttcaattgcatctattcttctatccgtgcagctgaagcttaagactgtctaagtaaaacaaagttcgggcgatgcttctcccggggactcggtcctggcatccagtctcccgttgctccttttaaaaactgacacacaaacaaggcgaaaggagagggaagagggcggctggcgctccgggccccctccccgcctgcagccaggggcggccgccgagggacggcgatccagcccggtccgcacctacacttcattttacaccaggagcagaactgagaaattgactccagatttattgcagttttttctcaagatcaggacgtgggaaggagagaatgatcaaagatggcggtgcccaaaagcagcagctctcaactggagagtcgaaggagtagctccgacccccacctcgggggtctccaggcccactgcggggcgcagcgtcttacctgttttctctttgatctcacacaggacgctgaagagcgctggtttcattctgtgacagttcagggcatgtttcctaaaaaacaaataacgaaacacaaaggtattagcatcacctatggaataatatggcgccttcctttaagttagacccaagatttaattccagccccccattctggaaggcccttttgaaccgtgggaagtcaacaaaaactccagttgactagttcccgacagccagcaagccccggcggcgaaagctgcagccggaacaaggcggacccatctgcccggcaggcagcagcctcggccactgcagacgcgacgcgaacccgcgcggggagcctcgccccgggggcaggcgaaggcgacccgggggaggggacgggtgcggaggggctcccgcgtccgctcctgtgcagaggaggccggccgactgcggccagcgggagggtgacagctcggcaaagtttgcaaggcggccctccctctccgagaacttggccgtccgcacccggacccgccagggaaccgcccatcgccccgcgccgggcccgggtggccgcccgcatcgcgaggtcgtcccgcggccgcgggagccggcgccgggactccccgccggaggagaaagttacacttcccggcggcgcggcccgcacggggtcggggcgggaggtttaaatccctgggagggggccgggctgcgaggggcaggacgggggaaaggacgccacggaatccgcgccgcaccgagtccgtcccgagccccccagagcaactttgccgactcccgcccgcttcggggggcgcgggcaagtccccccgaggccggggcgggcggccggctttcggagaaagttccccgccgggggctgcggccctagccccgggcgccaccccgggcctcgactcggccgcgggcccggctcccgcacacacacaaaagatgcttaatgagacgacaccaactttgcttgcgcctcgtccaagctctggtcggtgatggtcatgatctggtggaggatgtcgccgatgtcctgcttcctgccgtcgccgtccgccccttcgtggccgtgcgggggaggcggcagggccatgcccccctgcaccgagtggccagccaggttcaccccggccagagtctgcagcatcctggattgatcgtccatcccgccgcgcgcgggcgggagcgggcggcggctgaggcgaaggctgaggcggcggcggcggcggcggcgacgagggaggagaagaaagagggggagggggagggggaggcggccgcgcgctccccgcccgcgcggggagggggcggcccggccggcagggcccgcggctgaggcgatgaggacgggcgcccggctccggcttccgccgccgccgaggctgaggagaagcggcgggcggaagcgccgggctccgcggcggtggcggaggcggaggcggcggcgcccgctgccctcacgcggccgccgcgccgcctcctcgccgccgcgcgccccgccgggcggccccgcgcaacttgctcctcagcgcccgccgagttgccgggacgcccgccgccccccgcgccagcctgcgcactgccctcctcggccgccgccgccgcctcggccaggcgggatccgagccccggcggccccgggggaggcagcggcggcggcggcgggcggcggcggaggaggaggcctgcgggcgggccgcggggagcgagggggggcggaggaggaaagtttgggagcgggcgggcagaggcggcgggggcgctgagcccggaggagggccccggcgggccgcgcgccgggcggacagccgatggatagggcgggagaagtcgccgccgccgccgccggagccgcgcacccagccagcagccgccgcggaccgggctggaaggccgctgggccgagggattgacaggctgccagtgccactcactcactgcggccccgcgccggggggagggacgggggctggcaagggcgggggagcgctcctcagaccccgcccccggggcggtgcgcgcgctcattgggctctgcgcctcccgccgccgccgccggcaccgcccccggggcccggcccgttccctctggcctctgatactccgcgctccggagtgtgccgccggatcctcgctccaacctcgtcgcgtcctagccccccgggatagaccgggccggcccacaaacggtgtgcccgcaccccgactcctgctccatgcttttggcagtcatgggagcggggggttgtgtatgggacagtgggcaactcgctgcaaagccaaccgtgtgctcccccgccgcgcccgtgagcttcacgcctcggacagctcctggtgcactttcccgctcttcctgtcaggaggtggtgccctctgggtaccaggccgctcgtcccgggccaatcgcaaagcgcttagag

SEQ ID NO: 588694 - DNA, 4001 bp, Homo sapiens
gttttcattccagcacttctgcaaaacctatcttcttatatattccctgacttggacacttcaaaattgtttaacctgcatctgtagacctttttatactttatatattaagcacagttacaagtgtaatgacttcagaatacaaaataatacaagtattaacagatgtaatacatcgtatgtgtctacacatcattacccttcctcgattctctaaagtagccttcccacctaaaacactaattcaagcatgctactggggtctgttcaattgcatctattcttctatccgtgcagctgaagcttaagactgtctaagtaaaacaaagttcgggcgatgcttctcccggggactcggtcctggcatccagtctcccgttgctccttttaaaaactgacacacaaacaaggcgaaaggagagggaagagggcggctggcgctccgggccccctccccgcctgcagccaggggcggccgccgagggacggcgatccagcccggtccgcacctacacttcattttacaccaggagcagaactgagaaattgactccagatttattgcagttttttctcaagatcaggacgtgggaaggagagaatgatcaaagatggcggtgcccaaaagcagcagctctcaactggagagtcgaaggagtagctccgacccccacctcgggggtctccaggcccactgcggggcgcagcgtcttacctgttttctctttgatctcacacaggacgctgaagagcgctggtttcattctgtgacagttcagggcatgtttcctaaaaaacaaataacgaaacacaaaggtattagcatcacctatggaataatatggcgccttcctttaagttagacccaagatttaattccagccccccattctggaaggcccttttgaaccgtgggaagtcaacaaaaactccagttgactagttcccgacagccagcaagccccggcggcgaaagctgcagccggaacaaggcggacccatctgcccggcaggcagcagcctcggccactgcagacgcgacgcgaacccgcgcggggagcctcgccccgggggcaggcgaaggcgacccgggggaggggacgggtgcggaggggctcccgcgtccgctcctgtgcagaggaggccggccgactgcggccagcgggagggtgacagctcggcaaagtttgcaaggcggccctccctctccgagaacttggccgtccgcacccggacccgccagggaaccgcccatcgccccgcgccgggcccgggtggccgcccgcatcgcgaggtcgtcccgcggccgcgggagccggcgccgggactccccgccggaggagaaagttacacttcccggcggcgcggcccgcacggggtcggggcgggaggtttaaatccctgggagggggccgggctgcgaggggcaggacgggggaaaggacgccacggaatccgcgccgcaccgagtccgtcccgagccccccagagcaactttgccgactcccgcccgcttcggggggcgcgggcaagtccccccgaggccggggcgggcggccggctttcggagaaagttccccgccgggggctgcggccctagccccgggcgccaccccgggcctcgactcggccgcgggcccggctcccgcacacacacaaaagatgcttaatgagacgacaccaactttgcttgcgcctcgtccaagctctggtcggtgatggtcatgatctggtggaggatgtcgccgatgtcctgcttcctgccgtcgccgtccgccccttcgtggccgtgcgggggaggcggcagggccatgcccccctgcaccgagtggccagccaggttcaccccggccagagtctgcagcatcctggattgatcgtccatcccgccgcgcgcgggcgggagcgggcggcggctgaggcgaaggctgaggcggcggcggcggcggcggcgacgagggaggagaagaaagagggggagggggagggggaggcggccgcgcgctccccgcccgcgcggggagggggcggcccggccggcagggcccgcggctgaggcgatgaggacgggcgcccggctccggcttccgccgccgccgaggctgaggagaagcggcgggcggaagcgccgggctccgcggcggtggcggaggcggaggcggcggcgcccgctgccctcacgcggccgccgcgccgcctcctcgccgccgcgcgccccgccgggcggccccgcgcaacttgctcctcagcgcccgccgagttgccgggacgcccgccgccccccgcgccagcctgcgcactgccctcctcggccgccgccgccgcctcggccaggcgggatccgagccccggcggccccgggggaggcagcggcggcggcggcgggcggcggcggaggaggaggcctgcgggcgggccgcggggagcgagggggggcggaggaggaaagtttgggagcgggcgggcagaggcggcgggggcgctgagcccggaggagggccccggcgggccgcgcgccgggcggacagccgatggatagggcgggagaagtcgccgccgccgccgccggagccgcgcacccagccagcagccgccgcggaccgggctggaaggccgctgggccgagggattgacaggctgccagtgccactcactcactgcggccccgcgccggggggagggacgggggctggcaagggcgggggagcgctcctcagaccccgcccccggggcggtgcgcgcgctcattgggctctgcgcctcccgccgccgccgccggcaccgcccccggggcccggcccgttccctctggcctctgatactccgcgctccggagtgtgccgccggatcctcgctccaacctcgtcgcgtcctagccccccgggatagaccgggccggcccacaaacggtgtgcccgcaccccgactcctgctccatgcttttggcagtcatgggagcggggggttgtgtatgggacagtgggcaactcgctgcaaagccaaccgtgtgctcccccgccgcgcccgtgagcttcacgcctcggacagctcctggtgcactttcccgctcttcctgtcaggaggtggtgccctctgggtaccaggccgctcgtcccgggccaatcgcaaagcgcttagagccgaatggggcgggacagaggcaagaaagggtcgtcccaattggagcgttcgaaaggttctgggcagaggcggggaagcggcgagtgggggcctcgccccgcctgcggtcgccatggtaaccgagagggcgcagctcagcgttggcgccagcaccggggtcttgtgctgtccctcaatgggtgaccagttaaggtgggaacctgtggtctcacatacttgaagtctgagctgagtggacctgactgccatagactttccattgaaaggggaaatgtgtcagagagaagcgagtctgggaggagggaaagtgccttcagtccaggactaatttcaaggtttacaacactttacacactctgcaactcctgataatccagggactactcctttggcagcgtttgctattcgatgcctccagatgtactgaagctgcaaaaacgagctcttcattacaaagatacgtttgtttaggaagagactggatttcacttgtcaacttaccccatcaccacgagtcatttaatgttggtaacgccagccacgatttttcgtatctataacaccccttcttccattgaattctacctacaaataactgaaggctcacattattttggaatatggacctccgcctcttgtggagacttgagattgctcttaagctgatttcccaaacaggggctgcaatgtgtgttcccgattttagattcattgagctcaccctagatgagtcctttggttcggtggttcggaaaagtctctttgttccttctccaaactcagtaagctgtcttacctgaaaccaaaaataggggtatgaggatatgaaaaatggctcttactctgcagggtttaatgta

SEQ ID NO: 588695 - DNA, 4001 bp, Homo sapiens
ggaacgcaatggcctcagaaactgtccgtactctcccactccgccggcaccagccagcacctccctctcccttccccctggcagagcacgcagggtgcgtgcaccccgggcagtccccaaagcgcgcctgctggaaaggcgccatccatcatcctcacctcccattccagcggattctcgcctgagcccagccagggcccgcccctccggccaaccccaaagatgcttgcggtgtgtatgtggaggggggtactttctgggacccactttcatagccctctctacccccatttctcgcaggggtgtcgggggaagagaaccagaaagccaagaccactgaacccggagtacttccaaatctgttacgcttccaatcatcctcatagcatcaccttagtttatgggcatttctccctagcaggagagctctgccaaaagcccgagagcggcaccccacaaaaaccccgcgcccctgctgcctgcccaactctcgccccacggcgcaacctcccggcccggcaccttccgtcccggggtaagactcctcgttttcccggagcggaacccagccagccggtttcggaagtttcccacctccccactacaactcccttccgggagcccccacgcggacctcgcttaaggcgagaaagcctagaggtctcccctaaatctgcactcacaccggggccggccccctcttccctccccctcctttctcctcccttccagctccagtccccgcgcctccggagtctccagcgccagaggttctctcgcccaagaggaaacttctttctgggctaaattcaggtccgagcaggaaaggctttcccttccccgcaggcatcagaggcgcgctcaccccctatcccccaaaagacctaatttccccctctccccacgatcaccctctctgagactgcctcagattactagtgctactcgacttttcaggtcaaaaggtccagccgtctctgaagccaccacgggggcactctggatttttcccgagaccctaccagtcccgcgtggcttggaaaagacaagtaaacaaaacacggacccggcaactctggggtgtgtgtgtgtgtgtgtgtgtgtgtgtgtgtgcgtacgcgcgcgcgcgcaggagacagagcatcgcccaagagttagggcaacagctgctagagcacatctggaagagggggagggggttccacgcagaggggacaagaagcccccagtggcttcagggccgagggctgggctagcctgtagttcgttacctgtcctatgttgatgaatccgtacttgctggcgatacggttggcctccgggaagcccccggcgattttgactgcccagtggttggtgtagacgcgcgtccgacacacggggagcaggcagcccccgagcagcgccagcacgcacagcaggtccaaacgtcccgggcagcagcagcggctcccccagcccatggtcccggcgcctcgctgctccctcgctcgctggctggttccgcgcactaagggcgcgcacaactaacttctccggcctgcgccgcccggcgagcagccccgggccgccgcagctcgcagccccgggcgatcggcaggaggcggctagccccggcagggagcagagcagcgagccttacgccggctcctagaccatccctggggctgccgggacctgtgctcccagctctccggcccgtggggcgctcggcgatgctccccggctcggacgcaggaggaggctgagtggggcgggcgtcctccgcagttgggtttcgcccggcttggctcccggactctccgactcggtctcgctcctcccggggcccccgagcgcggcggagatgaccagcgggagcggtacaggcagcgaccgggcgccccctctgctggcccgggctccaaacgctcgcttgctcgctcccagcgctccctccggctccgagcagcgcgcgaggattctgagtggcaatggcagcagctcctgctctgcataaatgacttcccccgccccccttaacacccctcctttcccacatcgccctcctcctctccctcctccgccctcttgaaagcggccgcagccaggcgctgacgaggtcctagcgcctccgggttcgcccagctgtaacctccagggttccgggcagtaaaggcaagtctttccaaaggactgagaagagcgctccgagatcgtggttttactcccttctcttccctccctgctggatttgtatgaatttaccgccacttcccgaaagactaaagaaatttacacgccggtgcgaattaaccgccctgaagattcattcatcctcgttctaaacgtccttaaataactaggcatttaaggaggtcacttacgtgtcaattgccgaacaaataactcgagattttcacttcgttaattcttcatgcttttcagcagctgtttattttacactttctgctcccgggagaagctaccacacaggacagtaagtcgcatcgactcctagaattggctcgaaagccaagtctgttgcctgctcactttcgaaatctgcgatactaggcaacgccacgggagagtacaattccggccttggaagtgaggaaagatgtttctatgaatatttggtgtgctagtggatggacatgttgggccaaggaaataactccattcatttgttggattgcgtctgacgagggcttctttttctccaccaagggaaaagtttcccaacttttccaagcacagtcctgtaacagtgaaagactttaatatgaaaaagaccacagaggaagttcagatgagatatgtggcggcgtcaccttcattactctatcatgcactgtgactgcagcaggcaggagggagctcaaattaaccctcttctcgcttctcctttacaacctccctgccttcctggagcgggggtggggcacagggtgatttactgtgacaagaaaaattatcccgtatgaaataattcaactgactttaaaagtattcactatatccctaactgtcctcctttctctcctcctaccatgccctatttctttcttcctgttaatttaaatgtgtttgagattaattaactcatcccacctatagcttttggtactgattttttaaaatctgaaagatacctgcagacttaaaattccactagtacctttgagcatagcatttgacattttacatattgtataaggtatgctatattatttaatcttgaaaacaaacccacaaaataacatcatccccacattatagctgaagaaatagaagatcagaagaactaaaacatgtgcagaagtgtatgtattttattcgtttatttatttgactgattcaacacatctgttttgagcacctagcatgtgcaatgaattgtgctgtacactggagaaaggggaagggggaggcacaaaaaattagtggaattcagaatctctgaatactgtagagtaaatgtggtttattattgaaggtatgtatgtatgtatgtatgtatgtatgtatgtatgtatgtatgtatgtatttttgagacagagtctcgctctgtcgcccaggctggagtgcagtggtgtgatcttggctcactgcagccttcgcctcccggattcaagcgattctcctgcctcagcctccccgagtagctgggattacaggctggctaatttttgtatttttagtagagacagggttggctggtctcgaactcctgatctcaaatgctctgcctgccttggcctcgcaaagtgctgggattacaggcatgatccaccatgcccgtcctattattattattattattattattatttatttatttatttttttgagacggagtgtcgctctgttgcccaggctggagtgcagtggcgcgatctcggctcaccgcaagctccgcctcccgggttcacgccattctcctgcctcagcctcccgagcagctgggactacaggcgcccgccaccaggcctggctaatttttttgtattttcag

SEQ ID NO: 588696 - DNA, 4001 bp, Homo sapiens
gcaggaacagaggactagtgaaaaaggcagagacaaggtggtcagaagagcatcagaagctcccccagggcagtacttctgaggcaatggaggaaaatccctcaaagcaggggcagttcatcatagggagccgtgaagactaagaactggaagtcagcccacaggtgtgttagagacagctggaaggcatcagaggtgactggggctagataacctttcagatgctcttgtctgtcctggaattctgtgagttgatttgaaggttatcgagcccagctacagtggagcagggtgtggcatgaggaggtgatactacagttgcccctttacagagtaacccacgtatgcaacaattaagacatatgacatatttggacattagcatgtggaattaaaatgacacacaacaatctactggttgctgtccaatgtattgtaaagcaaataaactctgaagcatgacccataatactgtctctaccatctcctttttcaaatcaacctcaaacttccccctgtccattacacgaacatttcatttctggtgattctcctgacatttcatcaaataaatccattcaacaattcggcaagcacccactaagcacctatgtgtattgccaggtactgcactaggaacttgggactcagagaaccttaaaggtgtgcttcttgcctgtgaggagctccagttcaatggaaaagctcaccaacaggagaaatctggggagaagacaccctgaagcagcagacaacaaagagcctgatgatggggagacctcaaataatgaaggcaaatagatcaggttccagtggcaagagcagcaggaccaggattgttcatccactcacagaatcttaggcttggaaaggagcttggaggacatccaggccaactccgtatttgaccctgatacaactgtctcattactgctcacactgaatatttttactctgcattttgtcaatttaggtctctcattccctgcccctcagagccatagtatttttgggttaaaagtcctgattagttggtaatctcactcaggcttagcctctccacctccatcccctccacatgaacccattgcctttgctcttctactcagtgcatccaggcggtgagcaatcaatagcaattatttcagttctgtttaatttttctaccttttcgctgatcattttatatggaaagaataagcctttccatagtccccaaatcatgcttttgttcaataatgattacctctataagttattaagataatagttttgggttttttgtttttgttccccctccaccaacagctgcctcttaggcatagcttgtaaacaaaggccagcctggagggatcaccgtctgctaaatggataatcacaaacagatgtcagtcataggaaaacagatttttaagttcttcaccattaagcctccgaaaactctaagctgagagacaatcttaagaatagttatattattttacagtgcacatatttggtgcagaaaatatctcaccttataaaactgagcaacaagaacaatatgcataggaacaagtgagagaaatctggggcaggaggacattagcttatttgtgcccctcagcacaatttctgaggcagaatgtctcttgcctcaaatggtgtggagagaaggtaggccacccttcccccaccctggcagcctcatcatggtccacaacataatagtatgagagtatctcaacccactcgttactcacatgaggacttgccacagctccacaagtaaagatgcaaaagtaaacaacaaaaaacagttgctgtttgtgttagatttccttatagtagccaccaaaatgaacagccaaaaggaaaaacaaaacaatcaacatgcagtagctccaacccaggattctttctagctgggacatatgaggatgggtaacaaaaaagcactcaaaatttggcgttaagatatattcaagagaagaaaagttgttcattcagcttaaggtttgccgtaacatgagagtgagtcaaaccagaactagttctgaggaactgacgaaagcctggcttatttggaaagttttggttttgcttttagcagtttgtctgtgaatgggattgcattcctgatttggctcttggcttagctatggttggtgtttaggaatactagtgatttttgtatgttcatgtgggatcctgaaactttctgaagtttatcagcttaaggagcttttgggctgagactgtgggattttctagatataaaattatgtcatctgcaaacatgggtagtttgacttcctctcttccttcttggatgccttttctttctttctcttgcctgattgctctggccaggacttccaatagtatggtgaataggagtggtgagagaaggcagccttgtcttgtgccggttttcaaggggcatccttccagcttttgcctattcagtgtgatgttggctgtgggttcatcatagatggctcttattattttgaggtatgttccttcaatacctggtttgttgagagtcttttttttaacataccttgagagtttttaatacccttttattccctctctttcccctattcttatatgtgctccagcttccccattgtccctggagcacatttaggaataggggaaagggatggaatgaagaataccagcatgtcttagtgctgtgccaggaaattgactcatttcctagggcttctgtaacacatgacctcaagtccttggcattccctgacttatagttgtatcactccaatctctgcctccatcttcaaatgacattcttttctgtgtgtatctctacattcctctcctcttatgaggataccatccgtttgattagtgcccaccctaatgcagtatgacctcatttagactacatctgcgtagaccctacttccaaatatagtcacattctgaggtcctcagtagacatgaatttggggggaacattattcaactaacctcacttcatttcatagtgcctcatttcattctcagtgcaatgtgtggtttagagttagacccattttacacatgagaaaacaggaccaagatcaaacaatgtttccttagttgcatggctgaatttgaactcggacctcagtggccccactataccttcaggcttgtgattggtgagattaaaaccacatggcaagaaaaggcaaacttgaatataggcctgaatgatcaatccttctcctgctgcctcccgcccttttccttgtgcttataggggtaggaccagcagagatgtggggctgaacactcagacagaggatgtttttaagaaaacatctctccttgcctgtcctctaagccttccctgcctccttgtttcttctacaaaagcaaggatctcctttcctcctccttgtcctgcatcctcttttcgtcccatcgcttgaacaagaagtactttaagaagtactacgaagctgtgtagtacctacagatgggagtggctgcctagacggcaagagttgggactgtgtctgtgggacccgtgcttcctctggggatctgcttctacacccacggctccaggcatgtggtttccttaggagttgccattctcttacctgaccctctgttcctggccacagtgactggctgaggaatggacatatgtcccctgtgtggctttgagttttagtatctatggaaaacacacctcacctaccagagttcctgtccttctttaggagtgaggtgcactcaccacagtttcctttcctctctcttgggtagcctttctccaggcttggcctgcctctcctcttcacactttcctttgggcagttcagctctgctttgccacagtttagggcatcctgaagcaaaggaaggcccaggtatattcacagcaaggccaaatgaaactcaagctagtgtctcagcacattagcctgcctcataaatctatatgtctagagaaaataatggagggttacaaaccaaagtgttaataaaggcatttc

SEQ ID NO: 588697 - DNA, 4001 bp, Homo sapiens
gcaggcacagaactgctggctggggcacatctgcctcggtccttgtcctcgtggtcactgtcctcatcctcactgctgctatagtagtactgcagtttctcccccagcaacttatcatcaagggtggtcatggtgtctggaaaaagaaagcatatcaggttctttgctgatttgagccagacagacatgaatctgaagcatagggggctcgcctgtgctgagatcctacaatttccaggacactaaagtgattattttcataaccaaaatcttaacaaatccctaccgttaccctgtgtgttagggcttatcacactctttaacagaaggtaaaactgaagctcagataaaggaagagtcttcaccaagcttaacagcgaatgacggagctgggaccagaccccagggattcctgactccaagagcctgaggtataaattactctagtctgagttaagtgtacaagccacctgcactggcttggaggaatctactgactagtggttttatctgtgcttttagttttcccaccagctaagactgctgcctaattgaaaaattgtttaagtatcctcaggaaaaaccccaaaaagaggcatcaagagtacaatgctgagtcactatttgtctaggcaatcactctctgtcaccagccttcaacttcccagacaacaccctgagggcttggatggatggtctctgaaacgctacctattctgacagtttaaaagaagggcccatacaaagattttaataactcccaagggtttaaaggactatgatggccgggctcgcgcaggtaatcccagcacttagggaggccgaggagggaggatcacttgagaccaggtattcgagaccagcctggctaacatggcgaaactcttgtctctactagtaaaagcaaacaaacaaacaaacaaaaattagccaggtgtggtggcgggtgtctgttttcccagctactcaggaggctgaggcacgagaatctcttgaatccgggaggcggaggttgcagtgagccaagatcacgccactgcactccagcctgggagacagagcgagactctgtttcaaaaaaaaataaaaactaaaaatataaaggaccaggcttctgcatcagaagtagccaagggcattctgatgaaaagatgcagcttagcccccagaggcctgcttgagaattcagcaggaatgcggctgccttaaagacttatcaccgggcctatcatactccatttacaaagtgactctctcccaccgggcaaggagttcttgaacgtagggacctctagtcactacctctatccccaaagcccagcacaatgccgctgcacaatttgctaaactcgcagcctgggtcaacgggagaatcggaggactccagcagtcagatgcaaaggagacagggatcatggagagacaggtggaggtgccaagaaggaacaaaaccaaacttaaggcccaggaatgggccaagcgggggacacagcagcggcggaggggagggaaggagttgcgctcctaaaggagggaccgctgcggggaggagacgagggcgggccccctggagacgcgagcagaggaggcggggcccccggacgggaagcagaggggtgtgtggagcttttgggggaaggctggaagggcccgggggaggtggggccagaggaggaaaggggacgaggaagacgcggagaacttgggggtcgagacagagcgaagaaggggcagttttacccaagctcgccaaccccactccctcccgtagtccgcagctgctgccgcttcccggtggaccccaatgcagttacctgccctagctcgctccggatccctttgggccagcagctccgggcgccggaaggaatggagcactttcttaagaggaagagcagtgggtcagcgccctgagcgctaaagagaaaagccgccgaagcccgacagcgcggaccaatgaggcggccttcctgcgtcgtggcggacgcgcattgtccaatcagaagccgctactcccagctgaggggcaggggagaagctacgggtcctaccttggaacaaaacacctcgacaacaacgctctcctaattgctttgttttggttttaatctgcacaacaaaaaagtgaattgtatgacccagcgtcaagcaataagaaaaatgtattcacaggccgggcgcggtggctcacgcctgtaatgccagcactttaggaggccgaggcgggcggatcacttaaggtcatgagttcaagaccagcctggccaacacgttgaaaacccgtctctactaaaaatacagaaattagccgggcctggtggccgacgcctgtaatccaagctactcgggaggctgaggcaggagaatcgcttaaacccaggaggcagaagttgaagtgggccgagatcgcgccactgcaccccagcctgggcgacagagcgagactgtctcaaaaaaaaagaaagaaagaaaagaaaaatgtattcacttcccttcgaagtttccgaagccattcaaagtgtgttttttattggttcttcatcgcatcacgtctattagacggaaaagtgactcagagacgttcggtaatttgcccgagagcacaaatccctcaagtacagggcatagattaaaatatatatatatatttttttgacggagtttcgctcttcttgcccaggctggagtgcagtgacgcgatctcggctcactgcaacctccgcctcccgggttcaagagattctcctgcctcagcctccagagtagctgggattacaggcgtccgccagcagacccggctaattttttctatttttagtagagacggggtttcaccattttaaagaagcggcagccaggagtggtggcgcgcgcctgtagtcccagctacgcaggaggctgaggcgggaggatcgctcagcccaggacttggaggccagcctgggtgacagagcaggaatgtaatgtgaaatccggaattggctcctggtatagaaaaaggacatggggccgggtgcggtggttcactcctgtaatcccagcactttgggaggccgaggcgggcagatcacctgaggtcaggagttcgagaccagcctggccaacatggcgaaaccccgtctttactaaaaatacaaaaattagccgggcatggtggtgcacacttgtaatcccagctactcggaggctgaggcaggagaatcgcttgaacccgggaggcggaggttgcagacagctgagatcgcaccactgcactccagcttgggggtcaagactgagactccgtctcaaaaaagaaaaataaaaaggacatgaatgggacaactgacgaaatttgaataaggcctattaattcatattagtagtattgtatcaatagttttaataattatactatgtaagatgtgaacttttggagattctattagatgaagaatctagggaagcactatcctatttttgcaactttgttttcttcttccagggtaaagccatactatgatattttgcaacttttttttctttttcctcaggcatactttgtcgtctgtttttgcaacttttttaaaacctaaaatgatttcaaattctgagcccttgttgaagtatccaatacacaaccgtgaagttgctcatagaaagctttgggtaaattgaatcatagaaaatattctagaaagatacactgtttaaaatagggctcttaatttggggtaggggatcttaatttgtggttctaggaccacctgaaattgtctgcaaatttctgtacctgcctgttttcagagaggctgtttgctgaggccctcagaggagtcaaaaaataccacacacaaacacacacccattcaagaatactgtattaataagtccgttttcatactgctgtaaataaataacccagtgtcaggcagttcatactgctataaagaactgcccgacactggtttatttatttatttatttatttaagacggagtcttactctgttgccaaggctg

SEQ ID NO: 588698 - DNA, 4001 bp, Homo sapiens
tcaatcccaagtgaggagccagagataaatcaaaccccatatatccagcatcattgtctactggagtcaaaaatcacaattccactacccaccccaacaccactggccctgtttctcccaattgcgttttattatgtttttaaaaaaatcctctttccccatccctgcaacaccgagaaggaggaattatagtagataaatatgaagcatggagatcctttaaaaatgtttttaataataaatgagaaaatgaaaaggagagggttgggaaggaaggagggaattcaaatgccagggaattgttcagtttcgcttttaaagatgttaacactcatttatacatctgcaagacactttccttaaagaaaagttctatgagtgtgggtctggttgcatgaataaggataaaattacttttttagacgatgtttcccacatataattcagagacccctgaaattaggtatccctcttgtagatgtccttgagatgctgctggacctgggaaagaggaaactgggatatgggtctatgccaaaaggtgcttctagttataggacagagaggaaaggggcagagggagaaaaacctgaagtctgagaatctggattgcagaagactaccgaggtcgtgggagaagggagagaaaacaaggatgaaaaccgaaaggggaagaggcatgaaatgttgtcaaatgccaaaaggcatttggagagaagttgggaattgcattaagaaaaccactgcaaatctcatttcagaccatttagagatatgccccctgggaactgcgagctcaggctgtttagcatcaaacaaatggatccactccatccctaccctaattaaataaatcattcagtaattccactgggttaaagaaccaaaataataaaaaccttcagggcctactcttgccaaatatgtcagggatcgtgtgtgtgtgtgtgtgtgtgtgtgtgtgtgtgtgtgtgtgtgtgtgtgtgttctgagacaccactactgttaaataggcagagctaagacttaggggactggcagattattgcaaaaagggcacggggcagagggactatgttgtgagcctgcgaaagaagtttgtgtggggactgtgggcagtgaatgcgttgggaacaatatggaaaactgggagctgccttggaatctacagggccgggtaagagaatgtccgaaagaaaaatgagcaggtgcgggatgtgcgcagagtcggagaagagtccagggcgcccggagtggctccaggaacgacggaaacccctcaaggcttttgggggcggtgggtactaatagaacccagtgtccggggtgcaccggggaggctgcgagcgcggcgggagtggggcgctggagggtgaggacgcgggagtgaggtagcaaagccggggccgggcaggggcctcccaactgggcccggaggcagcagggggacaagggctaggagagggcatggcggcggcgcggcgggaagcgaggggcatccggacactcaccccgttggccgcggccatctgcaccacgatctcgatggccgtcctgctaaagtacctgccgtcgctgcccaccaccatggtgcagccctgacggtcgcgcaggtcgatggacgacagcacgctctggataaagttgggcaggtagttgcgctggccctcgaagaggccggtgggtcgccgcagacccccgccgccggccggccgctggtcctcgtagggcgcggtgggcactgtcagcaccgggatggggctcccctccatggcgcctcctggccggtcctgctgcggctcccggagccggagggaatctgcagcctgccgggggcctccaccagcctggctgcgcgccgggactccgcctcgcgcccgggccccctctccagcaggtcggcgccctgcgccctgcacccgcccgcctggggaccgcccgcccctcctctccgcgcggccgctcggctgactctctcggcagagattgcttctgccttcctgtaaagttttctcccacccaccttctccgctgccagaccgcccgagctgccctcagtttctccccaagttggactcactttcggggtgtcccaaaagcctgattccagggcctgctagcccgaccccggtgacgcctccacccgcgcctggccccagccttcacccgcgatcgccgccctccggggcacaccctccgccagaaaacagccggcgggcggcgagactttgggcagagtccgggttcctctccggcgcccggcccgtctccctgtctccctgggagtgcgcagcctacacacaccagtttctctttagaacaaggacggggagggatttgggagggggctgaaaccttttgccatcagcgaacagcctcagccaaaaataaccctggaaaggcgagctaagaatggttatctcctgccagcgctgaaatcggaggctgggcgctgcgtgtggggtgtgtgtgtgtgtgtgtgtgtgtgtgtgtaccctcccaccccgaccatttgttgaagggaatcaccactgtcagacttcaatccaacaggacccactcgagccatccacactttccccagcctcctccaaaacagcacactttccggtatggacaattctttttttttttttttttttttttcacttgtttgtttgttgtggtggttgcaacagcagcaacacagacgacacatatttccctattcttctcgcccttctcaccctccctacccagctcctgccttagaaataggctttcctacactgtatctgtccacactgtctgaactcttccttgaattaatcgttttcaataggagggggctaaatcccttattaatgccctaccaggagtgaatgaataaagccaagttaaaggagacctgggtaccagatactgtgctaggttcctttgcatgtatcctttcattctgctggagctaaagattttctgcctcctctccataaaacgcacccaaactccaaaaccaggaaattctccatagaaaataggagtgaagagagaaaagactaacaggataaaacccaaagcaggaagaaagttctatctcccatttctctcaaggaatttttggacccaccaaggctactgtcctgaaatatcctgctgcttctccttccccaaatattgtccacttactgagagtaaggctgacttgccgcaggcttataaagtgtttggtcacagtaagacaactgtgagtaataacacacattgtatactgttttgcaattgattaaaggctttgcatctgttttttctttggaggctgaagaaaagaagaatggtattcatgcagttcccattttacagatgaaaacaagaggactttttctgtgaagtcaagaaagtggttacaatggtactttcagcctgtccgaattatgtattgcccctcccctttttattaataacattgaagtgtgatgggacaaccactgaagccgtctgttgaaacctgctgggactttttagccattctcttcaacataaagaatgggtgtttttggagggggtgagaggaatggggaaatgttgtcaaagagtacaatgttttagttgagacaggaggaatatattttgttgagatctacagcacagcatggtgactgtagttaacaatgaagtattgtgtatttcaaaattgctaagacaataaatttcaaatgttctcaccacaaaaaagataggttttgaggtgatgaatctattaattctctggatttaattattccacaatgtatacatatatcataacatcacatcatacctccgtaaatacatacaattttaatttgtcaattaacatttttttaaaagaatagtgtggccagtcggggaggtagtttttttttttcctctagtctctactcagtctccaagatcccatttcccataaagttcctgtcacccaggtggagtgcagtggcacaatcatggctcactgcaccctctccctcttgggctcaagcgat

SEQ ID NO: 588699 - DNA, 4001 bp, Homo sapiens
ccaattctgggacatttaaacccacttatgctttcacccagatacacatttgctccaagcagtgaagtcatccatccccatgccagcctctccacgcctgtctctcaccatcctattcaacgtgcagttcacccatcgatttctctctccctgcctgtggtactgccttcatgcatctcaaactcctccaagcaattagttgccacagccggcccattttaagtgccatgatttctggctttccagctctagcttccatcctcctgccctggtctcagttcaggcctcatcttttgcttgggccattcattcattcattcattcacccaataacagtttcctgggccttgtgcttacctccactaggcacctagggtggggaacggtactaccagcacccagtgctaaacaggccgttcctgcattcctgcctctccaccagactcttccgcagggccaccaatttccttccagaaactttctggggctccccactgccctcactggtgctcaaagccgtccctaacgccccctcctttctgctgggctcacctggctccaagtccctccacatgctctccactacagccacacacagcctctctctttccccgcgggcctactcgggtctcctccttgtggccatggcgctgggcacctggtgttgtgactatctgttcacagggagagagtccagtgcctgtttctgtgtggtgcgtgtgtgtactcctgtgagactgggcaggatgatgtctacggcattgtgccagggagtgtgtgaagctaagtatgtgcggggccctggggcgagccaggcactgcaggggtctcggctccccagatggtggcgtggccacgaccttctccacccccactcccatctcctttttctccagcgcagagcgcacaggctcccgggcaggggatgcggtctgaatccctgtcctctccctgccacctggctcgcccggcgctgcgaggtccccgcccgcccggccaggggccaggccggggccgctgcaggttcacaaactgacacttcctctcccgctgcgcctctaggagccggccgggtcgccgcacccgcctccaccctggccgggcgggggcccccgggtggcgcccccccagcccccgcctccgtcctcccggagcgggcccccgcgggctgtgattggctgattcaaacccatttgcaaagaaatgcctgtttgcgggttcccgtctgcgtccagttcaaatccgcggcaccgggagcgcggggccgggcgggggcaggaagcgaggatgattcatgcgccggggcctctcccagggcggccgttggctttttaaaaaggatgttcaggaggggggaaaaagcttgcagaagcacccccttcgggttcagcgctcctctcctcagtcgctcggacgccaagcctcccccatcccaaccctgccgcagcctgacttcggacgtgagcgaaatgccaaacgcccgtctgtccttcccccaccccgataggaaaattaaagatcgggggcgaggaagaacgacctgtcacccatgccccccggggctcgggaacccgggtggggcccctctgccccgcaggtaacctgcacccccggtccccacccccgagagccccgctccgcaggagtctcaccccccggaggcgttcgggccgccaaagttcagggagatttcgaaaagagagggatgagggccgggaggggagagcgtggcggggagtccgcccaacagcgcagaactcaccgcgaggctgcgtgtccgccggtcccacttggagtctggccaccaggcgcatcggtggcggaggcggctgcgctcggcccgcggctgcccggccgagtgtccgcccgtggggccggggtcggggtctcggcgggggcggggcggggcgggggcgccgcggggaggagggggaggcggcggagggaggggccggggcgctcaggaaggggccccccgggcgcggggcgccatctttttcgcgttttcccgcgaattattgacgtcccgcttatgtaattagcgggggccgcgccggcctcgccattggagcccgcggccgccgggctccgcagcgccgccagcccccgcccgcccccgcccgccccgcgggcgcgcatcctccgcggccactagccaggacccgggccccccgccgaggagcggccacaccgcggcgcacacggagacgccaggcagcgctcatggcgcacacgaccgctcgcacacttgttgaggaaacacagctctgcgcgcaggcaccggcggaccctggcacagacacacagcagggcggcgcggacccttggcgcagacacagacccaggacgcccaaacaggccacacaacaccttgcactaacagcacaggcgttcggcacagagacacagcacaagtataatgtagatacacaacacacagtgcacaacgcatgttgttccgacacaggtcagaacacaccacagcatgtacaggacacaaacacaccacaaagagaagtactgtacacaccagccataggcatagatacacaagggggaacacactgtacacaacagagacacacaacagaacatgcatgtaaggtagacggacataacacataaagtcacaacacagacgggcaagagacacaagttttcctgaaaaagtggcattcagataggttgtggaaataggttagtgggtgtgccaggtggagggaattcagtgggctaacaatgcaatttttaaaatacgggttaaggatatcaaaaggcaattcacaaaagaggaaacctacatggccgaaatagccccaaacaacaaattgcgtagagacacagtgcacagaaatacatggtacaatcgcaaatatataccacacgcacaacatgtcatgtaaataaagggcacacaatgaaagacaacatgcacagagtcataggaatggcagatggagtcagtgggcagagctccaatcatagggaccctgccctgtgggggaaaggcagacatggccccacccagactcactcttgggggaagggaggaagaacacttaccaataaccccacccccatccttgccctcagtccacagcgcccacctctgtggctaccatcccactctgcagacacccccaccagacagggatatgtgctttcatgggtgtggccagtggacagcaccttcccccagagccttccctgttcactgtcagttgctcactctgggccctctgcctcctggccttggagcatgatctgtgcagccccccacctcaccttctcagcagagatccaggagtcctttcacctccttcctcacttccttctgccccttgatccccctgctctcacctgcctcactgccccattctggatcctggcgcctcagcagaacctagcactgctgagtacctgcctgaacctggaaggaaagcctgggagcagccccatggcacaaaatctcccaatcctggagagcacattttcaagtcccaaaggggccctaggattgtgctacttaaccatgttctgccaagagaaggtgtgtccaacgcgggtagggctgatgatgggagcagaacactcccactagcttctaagctggctgggtctgccttcaggatgctgggggacagagatgatagagcgaagtgctcacctctgaggctacaggccagctccacccattactggccatgggagcctgagtgtgtcacttctttctttcttttttttttaaacaattcttgctccagagactttaagtcttaagcctccgtgtcctcacctaaatagagttattgggaaggttagagttaatgtatgcaaagcccctggtgcccagtaggtgtgcagtaagtgatcattgtattaatactttgttaagaaattctgtattcagaatcttgattgccccactgtgtgggactagagcggggggatgtgagacacacaggtggatgggagacacacaggtggatgagagacaagga

SEQ ID NO: 588700 - DNA, 4001 bp, Homo sapiens
tcaggaaatgagggcaggatggtagagtggaaagcagcagtttagagatggaaagacaatagccctgccatttcctagcgactgggaccttagccaagctgactaacctctcttagcctcagtttcctcgtctgtacaatggggacaatctcagtgccaccttatcagagttgctgggaggattgagtaagatgatgtaaagtgcctagcatgtaacaggcacttaataagtggcagctgtgattatttcaacaccagaaataccctcatctatgaatgtcattgttaaatgacttagtaaaggcagtaatgtgtgcaacatgagtgaggacgctctccctttgctcaagccagctagagtgtgacagagaaaccacatggattcactgggtcaataaaatggggaggccttccagaagctctcgattccctcagctccttgtcccaggtctctgctcccctccacaccagggcccctctgattatagcagtgatggcaggtggctccctgtctgagtgtggctgccccatcactcccctctcagcatgcttatgtgctaaagaccctgtcctgtctgcccccgtcatccaatctctagccctagccctgtacattccctttctggaagcctctggcagttttctgcaagcttcccagccctgactgatccctctcctggtcatcacttaagtgagcaaattcatctttgaacggttccttgaccttttgcttgacagatgcacgcatgctttagaaagcacacgtcatgcagtgcacaggaggtgcactcagagatgactgaatgtagtgtctggggctcactccctctgagggttggacaccaggcagacagtcaggaaagcaactctctaatactgttacgagggagaaaatacatcatatagatccctgcgatggaaggtggtctatggtgagttgtaggtttccctaagggcctaaaatttattcataagaggcactgttgcatagggcagtggttctcaaagtgtagctccagacctggagcatcagcctagactgggagctcttataaatgcaaaatctccagcctcactccagaactactgactcaaaccatgtggggcccacccagcgctcccagttttcacaagcccaggggtgatcccatgtagggccggtttttggaccactggaatggtggattcatttggaacctgtcacctcatctgtcaacagggacgaccctaatcatggcagtggcttctggaagggccacgagatgaacgtgggaagcctgcctggcacgtggttggtgctgagccaccgtcccctaagactgatcacccactacctttggagggtcagctaccgcctggcgctgttctctgtcagtcatggaacccaagataagggctccagcagaaaggagaaacaggatggaggtcagggaaagctgatctgaaacttaggctaaggccctgaatgccaaccttaggacctctctttgcctctgtctgcggcggagactcacatgtttccattacttttctgtaatacaacaaagcaacggaatccttgggattctggccatcccggaggtacctcccgggtccgtggcggggcaagccctttttccacgacgcctcccacccgcctcgtctgctttggccgcgctcccgcgaaggccgcggcgggaggcccctgatagggcgcgcaggccccggctgccaagagaaggccgggcgcgggccaggagccggcgcctgcgagccagggcagccccgcgcgtttggaatgcgagcgccgctcaatgcgttccatatggcggcggcgcgggcccacccggccgcccgcggctccccagcctcgcgcccgccccgcgggttcttgtcgatctcccggacccacctgggcgctgggatagggaccacggattaccaagaccagcatagtgcagggcacgtaggaggcatccggaggctttgatgaatgaatgctaaatacacgacttactggtagaaggcgtcagagagtcgactccttaaataacccagcacacagtccgccagcctcggctccaccaaaaatcgatgggagcctgccatgggcgaggaccttctcttgtatttgtgtaatcccagtcccagatccccgactggtcagggactttgttctccagctttgcccaagatgacagttgggctcagagctggtgatgtgacttgcccaaagtcacacaggtagcaagtagcacgtcgggatttgaatccgggttaaaggactccacgtccagtgctctttctatccaaactccagagggaggggaccctgctgacaccttaatgtaccctggcctccctggaggcttttctcattggaatcccagagttactaagacttataaaggatagaactgtccccttaatcccgggcatgggggctaatgccagtaatcctagcacttagggatggagaggtgggaggatggattcagcctgagttcgagaccagcctgcgcaacatagcaagatcccgtctcaaaaaaataaaaaatatgccagggtgacaaagagaaactctgtctcaaaagaaaaaaaaaaaaagataaaataagaaaacaaaaaacaaaaacaacaaaaaaccccaaaacaaagcatagaaccccccagtgagctctactttgctcccctctcccagggttttgagctttaaatttaaggacaagtgattgccttaaagagaagcctgtgactttcatgttgcgtttatctaattagctataatggcacttttttttttgagtcaagttctcaccaaggctggagagcagtgatgctatcttggctcactgcagcctcgacctcctgggctcaagtgattctcctgcctcagcctcccgagtagctgggactacaggcatgcaccaccacacccagctaatttttgtatttttagtagagatggggtttcaccacgttggccaggctggtcttgaattcctgacctcaagtgatctgcctgcctcatcctcccaaagtgctgggattacagatgggagccactgcgcctggccaaattatacactttaagtgggtaaattgtatggtgtgtgaattgcatctttaaaaagctgttaccaaaaaactccaagctttgctgctcctcactagccatgtgaccctgaagagtgacctcacctctctgagcctcagtttctttatctgtaaaatgggcaggataaaagtagctgcctcaggaggttgttgtgaggttttaaggggaggaattatgtaacaagttagcatggtacttgatatacaataaaaccttgataaataataacactagctagtgtttactgagggctcactcgtacctggcactctgctaagctcttaggtccatgatctcatttaatcctctaaccactctcatgccaattgtgtagtggaggagaccgaagcttggacagatgaggcacagattagaaccctgaagcttgggttctgaaccatgagacagtgttggtttttgtgtagttttatgtttgtatggttctttttttttttttcttttttttttttttttttgagacggagtttcgctctgtcgcccaggctggagtgcagtggcgcgatctcgactcactgcaagctccgcctcccgggttcacgccattctcctgcctcagcctcccgtgtagctgggactacaggcacgcgccaccacgcccggctaattttttttgtatttttagtagagacggggtttcaccgtgttagccaggatggtctcgatctcctgacctcgtgatccgcccgtctcggcctcccaaagtgctgggattacaggcgtgagccaccgtgcccggccgtttgtatggttcttttaaattactgtaacccacttcatttggagatgctgcgttgcacaccctgaaatgaagtttcatctacttatccacctccttccaaatcgattgtttccctttctcttgtgtaggatactttataaggta

SEQ ID NO: 588701 - DNA, 4001 bp, Homo sapiens
gcctcgtggaaccactgcctgcaccggtaacattgcagcatccgcaggtaccatctggagagacagaggagccaaggtcagccaggaccacacccccagtcaggtatgagcttcggcaacctttcccaagttaaatttgccctccactggcagaaagggaagagaattcagttactgagcacttaggctgtgccaagggaggacctgagagttggacatatactctcatttcacctcaccacctggtaaaagatgggacactgtccccatattacagataagtcacaggtgaaatggcttgccctagctcacaggcaagtggaggatggtgattcaaattctggtttccctaacttcagaggctgtgctctccttgccatgccacaatgaagccaccatttctggacttgctgcttcccaaacactgctgacagggaaacgtttgccttggagacttcacgggagaataatggtttctgtaagctgcacgggggcaagactacatctggcttttctcacctgcaactgtatctggcctatcatggtcatccaacaactattcatggaatatgaagagcaaaatgctcaatgcttcattgacaccttgtcaggtgagctccaggttaaaacgcagattccttggtccactgcagacctattcaatctttggggaagcctctgggatgcatttttaacaagcatcctgtgcaactctgcccataggcgttgagaaacactgcattaatgcaggaaaggtttccataagcatttctccatctgacaatacttggggaagctcatgggcctgaagttaaggttaagcccatttgagagatgaagtagttcaagctttgcccaagttacccagctggagcttggggctgagattcaggacttcagggggtcctgacggctgaacttcctgagggcagagaccctccctcttacatctgtggttccttccacaatgccacgtgcactcagcccaaagaagcaagctcaactgccatggctacatagaggcccaggtcggcaaggaagaatcaaagactcttgccgcagagccaggacaagaattccctccacagtggccccgacatagcatgccccgccccccggccccctacccctgcctgattgcacatctccagggaaaagaatcttttctatttttggagacagggtcgtcctgctttgtcgcccaggctggagtacagtggcatgatcacagctcactgcagcctccatctcccaagctcaagtgatcctcccacctcagcctcctacgaagctgggactacaggcgtgtgccaccgcgccaggcgggaaaaggatcttcatatctcaccagcagccggttccactgactctgactgtgaaaaggttatcttgactttcatgcattagtaccaccactaccaccagtaacagctcacattttttttgtttaccaaatgccaggcactatgagaacctctatgtgaattacgtaattcatgctctgctcataatcaccacatgatggggaaactattcagagagctgaggctaaggggttgcacagctggtaaggagcagagctaggacgtggacgtcctgggaggattcgcactgtgtccggcccaggctcttaaccactcttcaatacttcctcgtttcctacaaagctccaaggtaacacctctgccctccagccctgctccacagtgctagatgccacgcggagccggccttctgttctccccttgaggtcccgccccctcgggccccaccccgagcccttcccttcagggaccgccccttgaggcctcgcctcctcaggtcctgttcccgaggccttactattccctcctccccaccccgcccctccacagggtgcttctcgacctgcctcacctccctggggccctgcttgggcggtcgcaacccgccaggcccgcctcccgaggcctcgccccaaggtctaaccttccgggcccgccccccgaggccccgccctcaggtccaatcttccgggcccacccctcgaggccccacctccgcagcggctgacccccccctccccgagtcccgcccccgaggccccacccccgcggctgacactccaggcccgcccctcgaggccccgcccccacagcgcaacacactgggcccgccctcaaggtccccgccttggctgacacgccaggctcgctccctatgggcggtccctgctggcgattcttggagacctgccctgccgcccggggggccctgaccccctgccttactctccgggcccgccgcagtagcagtagcattgctgctggttggtgcgatggggcgagtcccactcgagctcctcgggctggtaggacagcaccatcttcacggcctgcagcgtcctggcgatggcgcccttcttcagcgcgccgcctttctggggggagacgagggccccagtcaaccaccaggtccgggtggaccacgcgagtcagcacgcggctgtctattgagggaagtgctgccagggcttgggggacccgcagatattccaatatagtcagaaaagcaaggagctttttctcattaattccaaacccatcccctctatcccagaaggaactccgttgataacagaattaagagtaataagcgcaataaaggcaacaattaccaacatgtatttacatggattttcttttttaatagtaaagcatcatttattggtcccgttattcccgacaccaaacccatctccactttacagttgaggaaactgaggctcagggagtctacaaatcctggccaaggacagtggcagaggcgctatctgtctccaaagcccaggtgtggcccttctgcttggagctcagactctgtgatgggagtctctggtctgccccactggaggaggcaggagaggcagggactggggaggatggaaggctcacccgcacagccagtgcgaagatgcagcgtcggcagaaccaaggtgtgagcaggggctggtcagcactgcccgctatggggatgtggcactgctggtggtaacctacggcagaggagggggcggtgagcgcccacaaggacatcgtggcccaaggccagttggcccaaaggaggcagggctgggagggctgagggaagtcctaggagctctgcctgccagctgccgggagcctggctgctggtgcccaccaagatggccaagtcagtgtccaggctgggaactaaatgacagcattggccagttgtggggttgggggggacacaggaaggtctgacttcagtgcctgagccccatctttcccacccatcctctccatctagctgggccccaaattacatacaccatcataccctcccagctttccccaggatctcttcccaagccctcacttacagcaactggccccctttcaccctgcagtgccaagagaaacaggaagccagctgaggccccaacaggctgcagcagtacccgtcaggggccagtgcgtggggacctataggtcggggccttctcagggccctgctcgctccactcacccaggccacacttcccgcagatgaggatctcattcagcggccctgatgtcttccctaggcagatgttgcacttgggctcctctcctggaacaccggctgaaagagagggcctcgagggtcgggtccagctcacaggaatggaagttttatactcacattccagatgcccagcctctaatgtctgctaggcctagcgctgggccccacatgccacctcactgaatctccccaaccactctgagatgcctatcatcattaccattcgaaagatggggaaattgaggctctgaaaggttaagtcccttgcttagctagtaagtaggtgagggggggattaaacccatggctgtttgacatcaaaccctttgttcttttgacacatcatgctgcctctcccgccttatttaacttgttttgttaaatggttgttattttcttaaaactttattatgggataatataatttgttt

SEQ ID NO: 588702 - DNA, 4001 bp, Homo sapiens
ggtcttctcgcgttctctcactctccctactctgggccccgagtgtgggcagcagccaggagctgacacaggtgcccagaaggttctgtagcagagtgactgcgctcgccaggtcagggctccggtggagatgggggagaaggcagaggccccaccactttcagggcttttcagggccagcagctcagcatccctggatatgaggagccttagaggctctcactcactttggcccggccatgaacttctcaacggctgccagttgagggtgtgcatgtcagccctgttctgggcagagcccggtgttcacactcagtctcccttgctctaaggggcttccacagccctgggcatacccaggaaggcagcccagatttccgtgggcatccccaccccacagagtcccaggcccttctaacagcagggaggtaggactcaggactggggctgacagacatagcaggccctgtcacatcccagccacccaggtccccacatgtaaactggcaggactggacttggggccacagcccactcttaagcaccactgaccagtcttgaagacccagtcttagaacctgcaggaggatctcctctctggaaggagaatcccggaccacccaccaccacacacccctctctttcccccggctgcttgctgccggtggtttgggactggagccccagagggcatacagccctggccagccccgggtccaaacacatcccacaggcaaagtcagatgcaagagaacctgttggagcagtttgggcaacactgtcacctcctcttcctcctcctccatttacttcttggtgggaagggacctgccctaggcatggggccaggtcatggccatcggcaagggccaagagggcgggggttttcagtgtctccaagcgttacctccttcccccctccccatcttccttagggagcataagatcatgtcaaaaccggcgttcctgccgggaacggagaggagagaaacggggaaaactgaaggccagggaggaggtggcaaagccacaacaaaccccccttacccaactcacagacactattctgtcaccgcactcctgcccgcggacctgcaggcctgccgggtctagctgctccgcgggggtccgggaggggtcctgccctcggggacaaggtccaagggagctcgccggccacggcggagggtgggcgcgccggctgccacctcgccggagcccccacggactccccagccctgccggagtcggagcccgccactcgcgcctctcccgggacccgcgccgggctgcgcgcccgcttctcccggcccggccaaccccgagcccgcgcggggaaagttcctgcaacttcgcaggggggaggcggcgggggctccgggcctcggcctccctccggatgcccggcctctgcggccgccgcgacccagctgacaggcggcccggcccgggcctggagccccaacttccccgcgccccgagccccgagcccacctcccggcccgcgggcctcgctttgtgcgcggcggccaggggcgcccagcgcgggccccgtgcttggcgcccccgccctgggcacaaaagggcgcgcggcccggcacggcccagccccgaccggggcgcccggaatgcggcggcggcggcggcggcccgtccccgagccgggcctgcgggcgcgcagccgggggcgcggggctcggtcgggcaaggtggccgggccgggccgggccgagccgagcagccgccgcgcgctcacctgccgtggaaccagtccttgcaggcgtcgcactcgatcatgaagcgggtaacgtcgtaggggagccggcagacgcagtacacgggcaccgtcgccatgttgccgcgccgcgccgccgctcggccccgccgctgcgctgcccgggtcggtccgggccgggccgggggccgggccgcgcgggggcggcgggggcggcggggcgcaggcggcgccgcggccgggaggggacggggacgggggcgcacgacagcccccgcgcgcgctcccggccaggcgcgtccacacaatgccgggcgcgctggctggaggggccgcgccgggagccgcccgccggcccgcggggctcagggcgctagtgtgcgcgggggacgggccgcgcgcgggacacaaaagggaatggacgcgcgggggcggcgggcggggagccgcggccccaccgaagggacccccggccgccgagcggcctctacgtcagcgccccgggtggcgccgcctccgcccgccggcctgggccgccgctcccgccgccgggaaggcgggctggggaaccctgcgggggagaaggtgggttgggggaccctgccgggggagaagacggccggggggaccctgccgggggagaaggcgggtggggggatctcgaaggtggaagataggccgagaagggcccccaaggctgaaggtagacccaggggtccgcgggcgcgaaggtgagctgggggagccttgagactgaaagtggggtgggaccccggggagaaggtgggcgggaccccgaggataagataagttgggggaacccgggcaaggcagaaggagagacgcggggtgcgggagtggagcccgcaggagagccttcctagtctagaaggccgacaagcaaatacttggccctaactttcttctgacccccaccacggtgggggtgttcctcctcctcggccgcgctgcctccctccgttccccactgagtttctggttgggacaccacttcctctttcccctcattttcggctggggactgccgcctccctcgcaggatcccgcggacttccctgatgctcagccccagaggaagaggacagaagcccgggccgggagtgcgctggcacgggctggtcagctctgttccctggcatttgagccccccaggcccgtgacctaaggggccgggctggtcagctctgtcaagagagagctccctggcatttgagccccccaggcccgtgacctaaggggcgaggagtatgggaaccctggcccccgtgtccagggaactgagcccccacggtggggaggagaagcggaggtgcgctctgaggggtcacttgcacgcgttctagaggaggacttccctgcctcgccagcgctgcatccttggggcatccgcgctgggcaggggccacatccctgcccgcccttcctccctcaccctctttctctccccatcctccctcagcaaaatccgcatcgtgctgggaaatgtgggccacccctgctcggaattccagaatctccggacaggaaacctggctcagtctcctagcagcatccatgacaaggctccttagcccctcagcccctcaccatcaccgcccacctgcagctgccaaggggccgtttgctccaccgcaggcggctcaattaaggtccttcctcctactgagccaaaatctaccctcagagtcagccacccacccccaacaagtgaccccgtggatacagactcagggcagtgcccaaagcactgggcactggggaagggggcggggggagaagtagctggccatagagggagaggaaagagcaggagacccccagctcccacacctctggactggccaggatggcctgcaataggccttcctacctgaattccggttgtcactggttcccttcctcctgggtgaaagcctggaattttttttttttttttttttttacatactgaagttctgggaaagaagtaactcttaagccattgtctactattatgtagatagaatgctcagcctgaaggttgagagcccaaaaggcgggtttcaggtgagtggtgcccacttccttgatagatacactctccctcacccttacagcagtactaaagtagtcaggtgagcagtgcccaaatgaagctggaaacttctagaggctgctgtgatgcaggggaggctgccctgatgtgggcatccccccatcccttaacactcctattagcctgtttacaaacagtgacagtagttag

SEQ ID NO: 588703 - DNA, 4001 bp, Homo sapiens
tagtcggggtacttggctttgattttctcagttgaaatggcgtgctgggcaggaccataggcctggagaagagaagacgcctgctggcactacctggacccttcaacccgatacccggctctgggcatccagccaccagccacaccagaagcgagtgtgggaaagggataggcagtgcctggggatgccaaacccaccatcccgaccgcccttgggggctcccctggggagaggcgacctccacaggcaagcaaaccttgatggtggatcctggggcctgaggcgcccagagggacgcacgtgggtctcatctgctggtggtttttgtgaagagcacaggtggggactctgagctccacccaggtactgactgcctctgggggcccagggcccaaagtgctggaggacagctagagcccagcaaggcctcccaaggcagggagaggagacagccggccatgtctgggggtgtccgtcccacccctcaggtctggcgtgtgctccatgggggaatgcaggaacacaatgggccctggagggagggctctgccgccgaccctgggagaaccccaggaagcctgcgtgctcagctggggccacgggtcagggcagcaggctcaggtgggcctcgaagctggtactggggcctccggcagggcgggacggggctgcggctcaccatggaatagccgtacacgtgaatcttcttgtcctgactctggtgggagatgcgcccgccgcccagacactcacagtcgcagccttgcttctgcatgtcgcccgacactttgtcgtagatgtccgctgggatgggagggcggcctcaggacgtgccctggccgcccttggaggccgcgggaggaactcccagccgaaggggtctgaaatcccagctctgaacagccccttccccaggagagacgaagccccttgaggctgggacagggatgaatgagcgaaggagggtggaaccggggagggcgcgggaactgggagactgctggggagggtgtcaggccgtgtcacgcccttcccgcccaggacctcagcctgggtcaaacctagcaggggcaggactcggagcagagcgcagtccgctacggcccgcagccccgcccccgccccgccagccccgcccctgcctcgtcagccccgtctccgtcccgccagccccgcccccgcctcgccaggcgtgcccctggcatgcccgcaggtcccgccctcaccatggtactcagcccacttgtagccgcgcacgatctccttgctctctgcagccggagccccggagcggggagccgagtggactcggatcagcacatacttgaagacgccgtcggagtcgatgtccacatcaggaatgagagcgaggtccgccaccgccatgttcctcctcccggagtcccctcctcccacccgacccgggggccgcttgtactgcgggaggcgggctctgcgagagcgacgaccaatcccgtcggggaatgcttcccaaggcccagcgcctcagccaattgtaccgccgaccgaggcacgtgctgaccaatcgcaatccagttccttgccgccttgcggctccgccagccccgcttaaaggaaacgtggaatcgggaatgggtggtgatgaaatccagccaacggagaagttcctctccagcggggtccggtggcacccttggaacggggcagttaggcggcccgcgaggctggggcaacgagggaggcctgagggacttgccagccctgacctcctgtcccgcacgtagtccgaagaccaccctccccgtggcccccaccgcccaaaggcctccctctctccccctcccaccgcccgaaggcctcccccctccccgctctccaccgcccgaaggcctcgctctccaccccctccaccgcccgaaggactccctctcttccccgtccaccgcccgaaggcctctccctttctcctctccaccgaccgaaggcttccgtccccaaccccgctaccggtacaaggaggcaacggcagccgctacattcaagttctattttacttggttcgaaagctcttgccccctggaaattattccggtccaggggcgttcccggccggccctcaggggtggggccgaatgcagaggccctggggtagggggcgcggggcgcggcggcgggtgggcaagcgggacgcctggccggtgcagacgcgcggggacgagatgggcgtgccgggtgcgaaagcaggagcggaggcgggggtgcccaatttctctcacttggtgccccctcccctggctccgaagtagggctggggactccaggagggcccttgcgtttggcctccacccctctcccgcataccccaccctccagagagctctgggcgcggaccagggtgcacttgggggacaggtggaggccgggccgccgggcttgcgcctccacgcccgcagtacggcgtgcggccagagcgggtgtgcggggacctctcgggacaggtcaagccccctcgggtgggcttccacgcttaccaactagctctctccctcacctgctcgcaccacgctttgccctccaggctcccacctgggaacgccccgtcccttggtccttcctctcctagccaggtgtcagctctggccaggcccaggtgctctgcttcccctgttcaggtcccctgccccttcggctgggagacttgcatatcggcctgaagacctccctgcggtttttcccagctcctgcagggcccagactgcagcggctggaggcgaagggacggcagggcgcgtggcgtggttagtgtgctggctccgaccagcgggaacgcactgcgcaccgtccgccctgcccaccgcctcggcgggacgcgctcgcgcacacggacgcacagaggtcgaccagggtgttctccagcgaggaggcaacacagccgcgggaggcggggcggggcgtgtttaaagtgacagactgggctttggttacgtcgggcttctggacgaggggaaaccggagtcggggaggctccagcgagagccccgcggaccgacggggaccggatctctacgggtggggtctgtgcagtagtgacccctccgagtgaaggcagagctcggcggtcctcaggcccaccccgcctcccagcggggagcaccgagggcgaggaccgacttcttctggggatcctcgagggcgagctgggagagggaggaggcccggaggagggagaggggttgctgggggtgggaaggcgaagggcctgtgaggaacactacggggacgaagggccggggggtgggggcctgggcggagctggaggccgaactgagcggagcttggaaggctggggaattagaggcggggcctagaagaagtcggggtggggccctggcggggctcgggggcggccctgggtgggccgggcggggcctgagtgggcagggcagggttcgggccagcgcctgggctaggcctggtgggcccggcgcctcacatgatgtcgtccagcaggttggcgctggccacccagtcgagcgcgcgcggctcggaggcggccatgatcatgcacatgaaggggcggccggtgcgccggtccgtggggtagatggtggtgggcgtgaagcgcctgttggcctcgacgaactcgcaaagctgctcgtagacgcgcgggaactcgtggcgcaggaagacgccgcgcagccgcagctcgcgctggatgtggatgaaggccacctcgcgcgcgcgccggcccgcctcgccgtcctgatccaggcccgccgtgcccggcggtggcgtcaggatcagcgtctccatgtcgggctcgcggctccgcgccgggggcggccgcgcggggctgccggccgccagcgctaccttggcgaacttgcgcactgttggcccgtggctgcgtggcgcgggcgcgggcagggccggtgtccccggtggcgcggtgccgggtcccacggccacggacacgctgagcaggaagcactctgccggttcgtagaggcgcccagcgg

SEQ ID NO: 588704 - DNA, 4001 bp, Homo sapiens
tcctccctaccctcccaaaaaaacctgtccagcacttgattcgtggtagctgttgtaacagactttgaaacaaagcttctagagctgtatacgaaaatattaagtctcagcgtaggaatgtatgagtgattttttaaaaggctgttgcacactaattcctacgaggtagccttttgtgattggacgaacatgggccctcctgggcccctcgcaggccccgccccctcctgggcgctgcgccccccaacagcgttgccgactcccgcccagggctgaactggtgggttccgaggccttattctcgtttttggtcaaacacacacgtccccaccccaccctaccctgggtcctgtgatctagacacccagggctatgtgtgaagaagtcaggaggggttgcggttgggaacccgctcctctgggcttcagtttcgtcctcggtaaaatggggcagggggtgggttgggcactgggactactgaaggtccggcagggacccccccgccatgaccctcccggccccgacttgcaggctcctaccttctggagctgcgaggggctcaggcaggccatggagacgctcagggcactgggcggcttctaagcgcggcctcctggtggggaggagaaagtttaggagcctgggaggacttaacccttccctacccggagaaaacccggtcccaccacccaaccctccttccctagacacagccagatcagcctgtgacctccaggctaatctcccccacccccacaactaatccaggatttgccctttcccatctccaaggattttatctgcttcctctgtgtttcttctggaaaccaccccccaccactgcttaccaggtgccgggaaattatgctgtgagagggtcaggccaagcagctgggctgagtcccagtccaggcgccgccattccctgtgactctgaggaacgcctgcctctctctaggcctcaatctggatagaatgggatgcagggttggtctgggggatgtgcggcaccccccttctccaggtaatgggcattccaaaggtggaagaggtcctggggagaactatctgggcccctcccagcaccgatctgaaaccctctcggtcctgggaggattatggaagggaattaacgcatccatctgcagctcagacgaaagtaggagacatggggtatcttagtaggaggaaggggctgaggagagagagatgcttcctgttacccaccctcaggcccaagatacttggcatctcaagtcgggctggcacagtggagctggggtcagaacaacacctgcaggccgggtgcggcggctcgggcctgtaatcccagcactttggaggcagaggcgcgcggatcacgaggtcaggaaatcgagaccatcctggctaacacggtgaaaccccgtctctactaaaaatacaaaaaattagccgggcgtggtggcgggcacctgtagtcccagctgctcgcgaggctgaggcaggagaatggcgtgaacgcgggaggcggagcttgcagtgagccgagattgggccactgcactagagcctgggcgacagagcgagactcggtctcaaaataaataaataaataataaataaaaataccaaaaactagccgagcatggtggcaggtgcctgtagtcccagttactcgggaggctgaggcaggagaatcgcttgaacccaggaggcggaggttgcagtgagccgagatcatgccacggcactcactccagcctggacgacagagtaagactccatctcaaaaaacaaaaacaaaaacaaaaagagagaataacacttgcacaccaccacccttctcagcttgccctgctcagcagctggcagggccactcgctggctctgaaaaaccggctgctgccttccccaaaatgatgccttctgaatggcgaagggacaaagtgtttcaggagtgtgcatggggacactgctcagccctcaagagccttggcctcgagtcaagtcgtgtttgctgggccaccgctctgggagctgctgcttggtccaggccgtccggggggcaggggggagcagtaagtgcagctcaggctcctggttcagaggggttaggctgggtgaggggcaggcagatgacagaaccacgaggttcactagaggcaggatgtgttcccagctgtccttaacccttctgatgcaactgcccaacaaagacagatgcctaccatgtgccaagaacactgaggtcccctcggactgggccagccattcccctgggagcccccacagaaggcttgtagtagagactcagtgaagcagactgtgtttgcgtcccagatgttcaggccttactttcccagtctgtaatttggggctagcagtaggatcccctgtgagcagtaaataagatgaatgcttcgcagctgataaagagcttggcaccaggcctggcgctgagtaagtgcctaccaactggtgaacaagttgttcaccaaatgttagcaggggctgttctgagtggaatattatttatttatttattttttattttatttattttttttgagatggagtctcgctctgtcacccaggctggagtgcagtggcgcaatctcagctcactgcaagctccgcctcccgggttcacgccattctcctgcctcagcctccccagtagctgggcctacaggcgcctgccaccacgcctggctaattttttatattttttagtagagatggggtttcaccgcgttagccaggatggtctcaatctcctgaccttgtgatctgcctgcctcggcctcccaaagtgctgggattacaggcgtgagccaccgcgcccagctgggtggaatataatttaaacaatttttttgagcttccaaaattgctgttacaatcagagagaagaccaccacagtggttttaggcagagtggagagccctgggtgggtgggggagggggaggggagaggcccagcctcccactaactgttcattctgctcaactttgggaagtgggtgggcggtgtttctacatggtggttttttccaaatgtaaaccagctccagatcgaactctcctgctccaggcgctggacagcctcaaggccagggtgggggcgggagtggggtcggggggtggtgggaagggtaccaaactgggggagggacctccaccacggaaacagaaaagaaggccccagcccggcagtcacagtccagctgctcagcctgtcagcccatggcagggggagaagagggagggaatcttggctcaggcctgagttcacctggaggggtcagagtccccgtggagggaggagggatagactctgtccagttgtagaggaggtgcccaagcagccacccaggcctcatcactaaggtcaaagtcagatatgatggcctttcttcctcacccagtctcctgccgcagggcgcccacgttggcccaccacaaggatccttggtctgggtggaagatacaaggccatttattgggtactagcagccaggtcctccaccaaaaaccccatctacctacataatcgccattgttccttgaacagtcctgcaagtgtgccattaccttcctgattttacaaatgagaacactgaagccccacatcaaacacggcagaactggcatctggaagcagctgtctcagcctctgccctttaccacactacctcccaaaggcccccaaaggggctgggagctgaggcaggcttccccacgatgactctcagccccacctctgtagaccacttgggactcactgttggaattgcaagggacctttgagagcacagagtggaaattcccattgtccacatggggatacagaggccactggagaagggatctgcctagcttcatgcacatcctgtcccatgaagctgggacaaaggcccaggactactggttcccattccagtgccctcctctcccatccccacccatcaaaactcatgaggggccaagcacggtggctcacgcctataatcccagc

SEQ ID NO: 588705 - DNA, 4001 bp, Homo sapiens
accatgcccagctaatttttttgtgttttttagtagagacggggtttcaccatgttagccaggatggtcttgatctcctgaccttgtgatccgcccacttcggcctcccaaagtgctaggattacaggcatgagccactgcgcccggcctgtttattttatttttgagacgcagtcttgttctgttgaccaggctggagtgcagtggcatgatctcagctcactgcaaactctgccttcggggttcaagtgattctccagcctcagccttctgagtagctaggattacaggtgtgcgccaccacgcccagctaaatttttgtatttttagtagagacagggttccgccatgttggccaggctagtctccaactcctgacctcaggtgatccgcctgccttggcctcccaaagtgctgggattacagaggtgagccaccgcgcctggccagttttatttttttttagagaaggagtcttgctatattgcccaagctggtcttgaactcctgtgcacaagcgatcctcccaccttggcatcacaaagtggattgggattacagacgtgagccacagctaggaattgttttaggaggattacgcaataggggatcaaagatatacatatacatatggggatattcactgagccttgtttcatgacagaaccaagtggggagtaatctaaatgctcagcgcaaggggattagtttaacaaagtatagtttatctatctggaacacagtatagctgataaaaatcatgtagaaacatatttcctctcaaagattggctatacatgattatctggccattgtgagaacttgaccaagtaagtgccctcctttctctggccctcgggctaccaaacggggatagcagtacagcctcctttattgaagctggcaggctgggcgcggtggctcatgccttgttgtcccagcactttggaaggccaaggcaggaggatcgctttagcccaggagctctggaccagcctgggcaacaaagtgagaccccatctctgcaaaaataaaaataggaccgggcacggtggctcacgcctgtaatcccagcactttgggaggccaaggcaggcggatcacttgaggtcaagagttcaagaccagtctggccaacatggtgaaatcctgtctctactaaaaatacaaaattagccaggtgtggtggcgcatgcctgtaatcccagctattcgggaggctaaggtaggagagtcgtttgaacctgggagtcagaggttgtggtgagccaagattgtgccattgcactccagcctgggcaacaagagcaaaactccgtctcaaaaaaaaaaaaaaaaaaaaaaaaagagctgggcatgggggcgtgtgcctgtggcaagaccccgtctcctccctaccctcccaaaaaaacctgtccagcacttgattcgtggtagctgttgtaacagactttgaaacaaagcttctagagctgtatacgaaaatattaagtctcagcgtaggaatgtatgagtgattttttaaaaggctgttgcacactaattcctacgaggtagccttttgtgattggacgaacatgggccctcctgggcccctcgcaggccccgccccctcctgggcgctgcgccccccaacagcgttgccgactcccgcccagggctgaactggtgggttccgaggccttattctcgtttttggtcaaacacacacgtccccaccccaccctaccctgggtcctgtgatctagacacccagggctatgtgtgaagaagtcaggaggggttgcggttgggaacccgctcctctgggcttcagtttcgtcctcggtaaaatggggcagggggtgggttgggcactgggactactgaaggtccggcagggacccccccgccatgaccctcccggccccgacttgcaggctcctaccttctggagctgcgaggggctcaggcaggccatggagacgctcagggcactgggcggcttctaagcgcggcctcctggtggggaggagaaagtttaggagcctgggaggacttaacccttccctacccggagaaaacccggtcccaccacccaaccctccttccctagacacagccagatcagcctgtgacctccaggctaatctcccccacccccacaactaatccaggatttgccctttcccatctccaaggattttatctgcttcctctgtgtttcttctggaaaccaccccccaccactgcttaccaggtgccgggaaattatgctgtgagagggtcaggccaagcagctgggctgagtcccagtccaggcgccgccattccctgtgactctgaggaacgcctgcctctctctaggcctcaatctggatagaatgggatgcagggttggtctgggggatgtgcggcaccccccttctccaggtaatgggcattccaaaggtggaagaggtcctggggagaactatctgggcccctcccagcaccgatctgaaaccctctcggtcctgggaggattatggaagggaattaacgcatccatctgcagctcagacgaaagtaggagacatggggtatcttagtaggaggaaggggctgaggagagagagatgcttcctgttacccaccctcaggcccaagatacttggcatctcaagtcgggctggcacagtggagctggggtcagaacaacacctgcaggccgggtgcggcggctcgggcctgtaatcccagcactttggaggcagaggcgcgcggatcacgaggtcaggaaatcgagaccatcctggctaacacggtgaaaccccgtctctactaaaaatacaaaaaattagccgggcgtggtggcgggcacctgtagtcccagctgctcgcgaggctgaggcaggagaatggcgtgaacgcgggaggcggagcttgcagtgagccgagattgggccactgcactagagcctgggcgacagagcgagactcggtctcaaaataaataaataaataataaataaaaataccaaaaactagccgagcatggtggcaggtgcctgtagtcccagttactcgggaggctgaggcaggagaatcgcttgaacccaggaggcggaggttgcagtgagccgagatcatgccacggcactcactccagcctggacgacagagtaagactccatctcaaaaaacaaaaacaaaaacaaaaagagagaataacacttgcacaccaccacccttctcagcttgccctgctcagcagctggcagggccactcgctggctctgaaaaaccggctgctgccttccccaaaatgatgccttctgaatggcgaagggacaaagtgtttcaggagtgtgcatggggacactgctcagccctcaagagccttggcctcgagtcaagtcgtgtttgctgggccaccgctctgggagctgctgcttggtccaggccgtccggggggcaggggggagcagtaagtgcagctcaggctcctggttcagaggggttaggctgggtgaggggcaggcagatgacagaaccacgaggttcactagaggcaggatgtgttcccagctgtccttaacccttctgatgcaactgcccaacaaagacagatgcctaccatgtgccaagaacactgaggtcccctcggactgggccagccattcccctgggagcccccacagaaggcttgtagtagagactcagtgaagcagactgtgtttgcgtcccagatgttcaggccttactttcccagtctgtaatttggggctagcagtaggatcccctgtgagcagtaaataagatgaatgcttcgcagctgataaagagcttggcaccaggcctggcgctgagtaagtgcctaccaactggtgaacaagttgttcaccaaatgttagcaggggctgttctgagtggaatattatttatttatttattttttattttatttattttttttgagatggagtctcgctctgtcacccaggctggagtgcagtggcgcaatctcagctcactgcaag

SEQ ID NO: 588706 - DNA, 4001 bp, Homo sapiens
tccacccagacctcacacttatccttcctacaaaatgctctcctagttctgtctctgggtatctctactgagttgtttttcctgggtgtatcctgcttcttcccagtcagtgaatgaacagggcctgtatttctctgctttcttctccacacttgcaagccaagatccacatcttctcttcttcccttctcccttttactgagaggtctccaagaataaaacttacactccattcagattagaagcttcataggaacaaagcccagatcccttctcctctgtctcccaaactgagctccctaccagcagggccctggcctctttcttctcctctgtcccccaaactgagctccctaccagcagggccctggcctctttcttctcctctgtccccctacaccataatcaagtgtgcatctgggcacccaaaggtctgactccctgacttcaaattttgaagaaatttgccaaggtacttctggccttcaaagtggcccacactgacctgcactggtgagctgcttaatgagattgtcttccactatggcgtggctggcgaagttactaccagcatcaataaaggtaggcagtgagccagtggtgagggccttgaggcgctgcatggtggtggtaggagggtcaacctgagatcggtagagccgggcatggtggggctgaatctccaggatcctctgcaaggagcttagtttgcccaggaagggtagggagacaggaggctctctaggcacgtgtgaatgctggggctgggcgaagtcaaatcgcagagcatctatcagcaccaacacaacccgcgaaaatcgggaagccatccagcaggccccaggtttcccttggctcccccatggcagggacccagggcctgggggctcttggcagctgctatggttggtgagctccaaacgggtgagcaggaagccactggtgaagagggcaatgccagcgtagaagaggaagcagacccaggccaggaagagcaacactgaggctttctgcatcctgataggggtggggaagtaaattcattactgtggggcaaagaaccagtggatattctggtccctgaatacaagcccagctagaatcacttcctcccggaaaccttcctggagataaaccatttcacagccaacccctcgcaatattactctcctcctatttccaggctgggcatggtggctcacgcctgtaatcccagcactttgggaggccgaggcgggcggatcacctgaggtgaggagttcgagaccagcctggccaaaatggcgaaaccccgtccctactaaaaatacaaaaatgggtggcgggcacctgtagtctcagctactggggaggctgacgcaggagaatcgcttgaatcggggaggcggaggttgcagtgagccgagattgaaccactgcactagagtctggacaacagagggagacgccgtttcatgaggtcccaccccagatctactgaatcaggatcttcgaggggtagagcataggaacgttcacatgtacaggcaggaaatgctaatgctgcctgtacatgtgaacagtcaggagggaaacttattccaattggtagtcaggctctcttacacgccgtttctgcgcctctcccctcgccaatctcaatacccagtggaaagggatcgaagccgcaggggaatccgggcccagccgacggcgccgcctggcgggcaccgaggggacgaaggggaggagtcactctccgcttccgggcggccaggttcgccaggagacctgaggcacgaccttcgccacgcaaggaggctggggcccgggtcgagagtcgactgggcctccgctgggacccaggcgtgcgaccggctctgcctcctccggtaactacccagcctcccgctgggcaccctagccgcggtactgagcaccttggttaggagctgaggggaagagggagactcccttacttcagggtgaggggaataccggggggtgaggttctcgggagaccctggctcacctgcaatggcacccggaagtgcggcggcggcggcgcctgcgacctggcagcacagagatgcgtgcgccagacagagtggcccgtcggtggctccatcgccatctgccggcacctcggtggaagtttggccaggagcgtggggctggccccagtttgatgggatatttagtaattgaaaattggggacaggggaccaagctggaggaagagttcagggaaccactgtccattcatggttacgactaagagcacggctgctggagtcaaacttgacttgaatcctagcttggccgcacatattgtcatcattaggcattacctcatctgtaaaatggagataatacttattttcccttttttgcttagctgagtccaactgagatttcattactcctcctttcaaagcctgtaactaaatcttacgactgaataattaagcaaataatccttcggagtggaggaggggaggctgggcccagtggttcacacctgtaatcccagcactttgggaggtcaaggcaggtggatcacctaaggtcaggagttcaagaccagcccggccaatatgacgaaacgccgtctctactgaaaatacaaaagttacccgggagtggtggcgggcgcctgtgatcccagatacctgggaggctgaggcaggagaatcactcgaacccaggaggcagaggttgcagtgagccgagattgcaccactgcactccagcctgggcaacagagcaagactccctctcaaaaaaaaaaaaaaaaatgccaggcacgatgactcacacctgtaagcccagcactttgggaggctgaggctggagaatcagttgaagtcaggaattggagaccagcctggccaacatgctgaaaccccaactctactaaaaattacaaaatttagccaggcgtggcgatgtgtacctgtagtcccagctactgaggaggctgagactggacaattgcttgaagccaggaggcagaggctacagtgagctgagatcgtgctactgcactccagcctaggcaacagagcaagactctgtctcaaaaagaaacaaaacccgtccactggtttctcatctcagagtaaaagttcttgcattggctctacatggccctgcacactatctgcctcttccccttctgattcatctagctgccacttctttgcttccctaactctgttccatccacagcagttctgcctcaggacctttgcatttgccatctcctctgtcagcttcagttcccgatgccgaaatggatctccatcaccttcatattgaagctcaactgtaacatcagcaaggcttcctgcaatcccctactttactagttcagcacctcccaccaccacaccccctggaaaaatttcccctcacttccttaatttcttccatagcacaactcatcagcatctgaaattctacacgtatttatggtttatcccctccgagtagaatgtgagctcattgaggtcagggaattctgttttcttcatgatatcctcagcacctagcatatatttgaggttcacatactgaccaaacgaataaaggaatatgttaatttttaaaaaaagttgagttattcttccaccttcatccccatagccccttatctcagttcagacctcatcccttctccaggatcactgaggcagccttctcactgtcctcccagcctcctgtgtctccctactatcccttctccacattgcagcaagacagctctaactaaaacattaatgtgattactgttatttttttcttttttgtagagatagggtcttaccatgttgcccaggctggtcaactcctgggctcaagtgatcctcccacctcagcctcccaaagtgctgggatcacaggtatgagtcactgtgcctggccaatgtgatgttttatcttaaaattcttcatgggaagggaaaaaaacccttcataggccgggcacagtggctcacgcctgtaatcccagcactttg

SEQ ID NO: 588707 - DNA, 4001 bp, Homo sapiens
ctctgggtatctctactgagttgtttttcctgggtgtatcctgcttcttcccagtcagtgaatgaacagggcctgtatttctctgctttcttctccacacttgcaagccaagatccacatcttctcttcttcccttctcccttttactgagaggtctccaagaataaaacttacactccattcagattagaagcttcataggaacaaagcccagatcccttctcctctgtctcccaaactgagctccctaccagcagggccctggcctctttcttctcctctgtcccccaaactgagctccctaccagcagggccctggcctctttcttctcctctgtccccctacaccataatcaagtgtgcatctgggcacccaaaggtctgactccctgacttcaaattttgaagaaatttgccaaggtacttctggccttcaaagtggcccacactgacctgcactggtgagctgcttaatgagattgtcttccactatggcgtggctggcgaagttactaccagcatcaataaaggtaggcagtgagccagtggtgagggccttgaggcgctgcatggtggtggtaggagggtcaacctgagatcggtagagccgggcatggtggggctgaatctccaggatcctctgcaaggagcttagtttgcccaggaagggtagggagacaggaggctctctaggcacgtgtgaatgctggggctgggcgaagtcaaatcgcagagcatctatcagcaccaacacaacccgcgaaaatcgggaagccatccagcaggccccaggtttcccttggctcccccatggcagggacccagggcctgggggctcttggcagctgctatggttggtgagctccaaacgggtgagcaggaagccactggtgaagagggcaatgccagcgtagaagaggaagcagacccaggccaggaagagcaacactgaggctttctgcatcctgataggggtggggaagtaaattcattactgtggggcaaagaaccagtggatattctggtccctgaatacaagcccagctagaatcacttcctcccggaaaccttcctggagataaaccatttcacagccaacccctcgcaatattactctcctcctatttccaggctgggcatggtggctcacgcctgtaatcccagcactttgggaggccgaggcgggcggatcacctgaggtgaggagttcgagaccagcctggccaaaatggcgaaaccccgtccctactaaaaatacaaaaatgggtggcgggcacctgtagtctcagctactggggaggctgacgcaggagaatcgcttgaatcggggaggcggaggttgcagtgagccgagattgaaccactgcactagagtctggacaacagagggagacgccgtttcatgaggtcccaccccagatctactgaatcaggatcttcgaggggtagagcataggaacgttcacatgtacaggcaggaaatgctaatgctgcctgtacatgtgaacagtcaggagggaaacttattccaattggtagtcaggctctcttacacgccgtttctgcgcctctcccctcgccaatctcaatacccagtggaaagggatcgaagccgcaggggaatccgggcccagccgacggcgccgcctggcgggcaccgaggggacgaaggggaggagtcactctccgcttccgggcggccaggttcgccaggagacctgaggcacgaccttcgccacgcaaggaggctggggcccgggtcgagagtcgactgggcctccgctgggacccaggcgtgcgaccggctctgcctcctccggtaactacccagcctcccgctgggcaccctagccgcggtactgagcaccttggttaggagctgaggggaagagggagactcccttacttcagggtgaggggaataccggggggtgaggttctcgggagaccctggctcacctgcaatggcacccggaagtgcggcggcggcggcgcctgcgacctggcagcacagagatgcgtgcgccagacagagtggcccgtcggtggctccatcgccatctgccggcacctcggtggaagtttggccaggagcgtggggctggccccagtttgatgggatatttagtaattgaaaattggggacaggggaccaagctggaggaagagttcagggaaccactgtccattcatggttacgactaagagcacggctgctggagtcaaacttgacttgaatcctagcttggccgcacatattgtcatcattaggcattacctcatctgtaaaatggagataatacttattttcccttttttgcttagctgagtccaactgagatttcattactcctcctttcaaagcctgtaactaaatcttacgactgaataattaagcaaataatccttcggagtggaggaggggaggctgggcccagtggttcacacctgtaatcccagcactttgggaggtcaaggcaggtggatcacctaaggtcaggagttcaagaccagcccggccaatatgacgaaacgccgtctctactgaaaatacaaaagttacccgggagtggtggcgggcgcctgtgatcccagatacctgggaggctgaggcaggagaatcactcgaacccaggaggcagaggttgcagtgagccgagattgcaccactgcactccagcctgggcaacagagcaagactccctctcaaaaaaaaaaaaaaaaatgccaggcacgatgactcacacctgtaagcccagcactttgggaggctgaggctggagaatcagttgaagtcaggaattggagaccagcctggccaacatgctgaaaccccaactctactaaaaattacaaaatttagccaggcgtggcgatgtgtacctgtagtcccagctactgaggaggctgagactggacaattgcttgaagccaggaggcagaggctacagtgagctgagatcgtgctactgcactccagcctaggcaacagagcaagactctgtctcaaaaagaaacaaaacccgtccactggtttctcatctcagagtaaaagttcttgcattggctctacatggccctgcacactatctgcctcttccccttctgattcatctagctgccacttctttgcttccctaactctgttccatccacagcagttctgcctcaggacctttgcatttgccatctcctctgtcagcttcagttcccgatgccgaaatggatctccatcaccttcatattgaagctcaactgtaacatcagcaaggcttcctgcaatcccctactttactagttcagcacctcccaccaccacaccccctggaaaaatttcccctcacttccttaatttcttccatagcacaactcatcagcatctgaaattctacacgtatttatggtttatcccctccgagtagaatgtgagctcattgaggtcagggaattctgttttcttcatgatatcctcagcacctagcatatatttgaggttcacatactgaccaaacgaataaaggaatatgttaatttttaaaaaaagttgagttattcttccaccttcatccccatagccccttatctcagttcagacctcatcccttctccaggatcactgaggcagccttctcactgtcctcccagcctcctgtgtctccctactatcccttctccacattgcagcaagacagctctaactaaaacattaatgtgattactgttatttttttcttttttgtagagatagggtcttaccatgttgcccaggctggtcaactcctgggctcaagtgatcctcccacctcagcctcccaaagtgctgggatcacaggtatgagtcactgtgcctggccaatgtgatgttttatcttaaaattcttcatgggaagggaaaaaaacccttcataggccgggcacagtggctcacgcctgtaatcccagcactttgggaggctcaggcgggcagatcacgaggtctggagttcgagatcagcctgacc

SEQ ID NO: 588708 - DNA, 4001 bp, Homo sapiens
ttccttctgtgtttacatggtaaaaagtctttgccctgcctccctcagaaatgtttggaattaggtgagaacactcaaaagaatttacaaattgcaagacactgatgcaaatgtaaggtgttattattaaatctctctagtcttaacgtggacaaaaatgtaatgtggttctatcatttagtgcttcacagttttccttctcaggtaagatgtcatcatacatcagtctcaaactcaccagctttctcatcagtcctcataagtctctgcccacaggaccatatcagaaccaccgtttccctccgctcagagatcacacatgaaactcactcaacctcccactggtttacacttggccgattaaggttttttcccagcgtctcctttcagctgggaatgctctagcaaagcttccatgaacactaccctacttcatcacattagagtcctaatgaaacccatccttacttcatcacattagagtcctaatgaaaccaatcctttcgcctttctccactccaacagctgcagaacgcttcagtctcttcgcagaacaggggagaagtctctggctgaatgtgcttcattagagggacaaaaggggttccccaaaccgagactcagaagtactgacacagagaccgcttcttccttgcacgagattaacacattctgaggtcctaccggtcccttaaggatcattccccttaaagctagggcctcctgcatctgagaatgtcacagagaggtagtgatgatagtgggtgttatttctgatctgtaacacgctccctttaaaaaagcatcagagtaactaggattgccttgttcggagccctgatttcagtagattcgatgaaagaattaatcaatctacccaaataacttctccggaataggtttctactcagccacgctgggcaccagacaagagagctgggggttgggggggataagaaatgacaacacgctcatctgcatagatgccagataagcagacatttgttttcttctgttctggcgactcctggcaccggcatagtaaatcaaacccgggcattctccctccccagtgcccctacactcccagcccctgccccagatgttgaagcgtcacgttgaccaggctgggggagaaagcctgggaaacgcagaagtctgttgctgcatttagactggaaccataccgcacctgttcaatccggcaccagcgccagaaatgagcagaacaccaactcgcaagcccctcttgagataccagggcgcctaacaagttcaccgctgtttcgtaccgggggagggtggtgggagacctttccttccgctgccaaactctgcaggttccccggaaaaggggagagtactcctatttaagtgaacccagagtgatctccgagtgtcactgcggccccggggatccgggtgacgagcgggtgggtgtccgttgggagcgcgcagctgtggcccccgcggaacgaaggtccgcttcggtggccacgggcgccctctccacgtcacccccagcacaacgcagacaggcaaagtggaagggtagagagaccgacgggtttcagcagagatgcagagcccctaagcgcaagcccctcagaagggtctagtgggaaggggccggggacgcacaggaaacttacctcacccgggcagcattcgggtgcctccgctaccaagaccagttgcgccacagtctgcaagttatcgggacgttgtcgcttccccacagcgaagggagagcagtgcaggcgaggggcgggaggggcgggaggggcgggagggcggagggggcggcgggcggggccggggccgggggcaacgctgagggcgggcaggtgccggggctggagccgcggggccaaactcgctccggacgcgccttggcgggggcgcgcggctacgagtgtgcagtgcgcgcgcgccgcggcgagtgtgtgtgtccccgctttccccttccttccccgccggtcctccggccagacggagcagcgagcggccgccaaagcccagcagctccgagcggctccactgccgggcgcagcctcgccgcggcgcgttcggggaccgggaaccggggaccgagaggagcagcagcggcgcccgccgggctcgggcgcgggttcccgcttggtgcgcgccggagtcggagcgaggcgcagagagagccggctgcgcggcggctgccgcggctggggaggctgcaggccccgcctgccggccgcccaggctcttccccttttctctccacccacttgccccatccccgcaagccctgcagcgaaggcagaccggtttgcagcacctgccgcaacagcggccggagcttcagccgcagtgggctgggcgtctcagccggtgtgtggggaccgggcgcctgtcccgccgccgctggcccagactgagagcggggttggggtgggcccctggaattggcgggtgcctccaagactccaggggttcccggccgttctcagcgtcttgaagccctgcgaaacagggctgtggggatagggcgtcccctttccccaggccacagaactcagctacgcctggtcgcccgcctgctagactctgcctgaggcggcgaagccggcacttgagcgcaggcgcccccttcacgaggaagggacaggccaggattccaaggcgttggttgctcccattctaaggacagcaggtgttcccagcaagtaagacctacccaacaggtaggggtaggctggcgaggaggtcctaggagagagaagctgggggatgtcatgggaaagcgctgtgacggggctgagggccaattcctactgatagcgcttagtgggctgggggcacttgcaacgtcacctgatgtcagtctagctgcgaagagggtaggggtcagatctaaaggactcctttgggaaaatgctatcatgaaagctaaagctaaattcacttaataggaaccaaaaggtagcggatccttcgcggctgaattgaagcaaatggtatttttcagcctcatcacttccttccacttacccttctttaccaaaaacaacgccggtggaaaacgtgggatacattctgtctggggaataacaacatttcatgatccttatcttcagagatctctggcttccagtttctgtttgaaggatactcccttagttctctgcaaatgaacacctcttttcagttttgtaatctctttgtttctctcaccccccaccttgagtgagtctgctatggtttaatatcagccttgaatcaagtgcaataatttcttgataacagaagtatctatttttttttagctttactgagccataattgacaaataaaacaaatatctgttattcttcagctgttttcccagcctgcttcttgcagatgtggctggccattactgagagatttaaggtatggtttgtttagaaccctgtgacttgggtctggttttctcctggcatcctagacgcttcacagctcagagcaggaggaacatacatctagtccagccctcccgctttacagatgaggaaactaaggtctcaagacattaagtaacccaaggaccagaacacagtttccctgactctcaatccctgaacaataactagcagaaatattgtattaacaaagttcaagatggggtggatagaccagtggtggaggacagaagaaccgatcaaagaaccgttcatctgactggtacgaatcactgtatagggggcagcatcataccgctgtaactagcaggctagtttggaatctgggaatggtaatcccagtctctccttttcctgcttctcagacttcagctatgaaatccagagtggaaaatgaatttgcctcccagggaggcggtggtaagtgaaagtgcaaagtcagtttctggtaatgcaggggagatgaagacaggtaaagccaaacattggatcaaaagtgatcacgcattacgtataaatgtccaaatacatgtatccatacacatgacccttttcccattaatg

SEQ ID NO: 588709 - DNA, 4001 bp, Homo sapiens
tgtccagtacaagggggtggccctgaagccaagggacctgcctgatgcaacctgggaggggcaaaatcagagaagccttcctgggggtggagacctctaagctgaaatctaaagggtagtggagaggaggagcagggtgctcgcaccagtagaaacagcactggtggctgccggcaagggaaggagggcccaagtggctgaagccagtgagggagggatggagtgtgaacaaggctggatgcagctggatctggaggtcatgctgagtattggggagccatggaagcttttcagcaggtgatgaggtcagtttgtgatttagagaactccctcgagtctctacactttccctggatctccaggtccctgtgcccggatgtggtctgtggaatgtggtcccactgcgcacacatgcacacacacgaacaccacacacatgctcacccaggcccgcccagctgctgagcttgcagttgggccacctttctgctgagccagccctgcctcagcctgagctccagagaggatgggctaggccagcagggtgggggtgggggtcccttttcaaccatataccctggcagggctgggagggcctcagaaaccaaggagtataatctccccccattatacagatggggacactgaggcccagagagaggcagagacccacctagagtcacacagcaaccacctgagtcagggggttcctcacacccccaacgcaccccagacgttccagctcccacaccacaatgttcctccctctctgccttcctccccttgatatccctctctgatccccacacctgcagtttcagccagacagggcatcagccaagtcttgccattgctggtgtggagattcgtgggacagatgggccactcaccgtgggtgggtggtccatggagacctgggtggcagcccacagccctgcctgcatcatgcacgtcatcccatgcagttcatgccccgggctgatctcaaacaggcccaggcgagactgcttgtctcggaggcgccagagaagcccccgccggctggaggtgactgctctgcatccagcctcaggggagggggccaggacctggtgggaggaggcacaggacacagcctgtggcagcgtcacagaggaaaaagatcagggttcaagtcccacttccactacttgtgagacttcccctcatctctctctgcctcaatttcttcagctgtaaaatagagatgatgctggtacccagaggggccacacagtgcctggcacgcagtcagcacccgaatagagcaatggttatgattatcagtagatagggcgtgcactctgcagtcaaacctggccttagatggaccgtctctcaccaaccttgtgaccttaggtaagtcacctaacctttctgtgcctcattttttcatctgcaacgtgaaaactagaacagcttcttcgtggtaggtatgaactcttgttacttttgagtttgagctccttgcacgggagcccttgatagtaggagctgtgatgccggtgattcagtcacatctattccattcgcctatgctgagcgcctccaggccagcacggaggggccagcacgatgcttttcatagccgctgacccaccagtagtgggcatccaccgcgtgccccgcactggatgagagcttgacctcctaacagctccctgaaggaggagctttagcatcctctccattttcccaatgagaaagctgaggaagtgttgagggatatccgccaggccgcccctcgggatacctggcgccccgtgtggggcgtgtcctggtcttcgccggctgcagggcccctcccaggcttggatgggggcgtgtccgcgccgctcgccgaggggaggcccggcccctgcccaccaacccttccctctcctgtcctctctcgggtccgcacctacctcgcggggccccgggctcggcgcagccatcgcccccgcagcagcttcccgggctttggccgcattccccgccgccccgctgcaggaatcaggccccgcccctacctcgcggccgaccaatagcatggcgccgactgcggctgcatccaatccacgcgggaggcgctggcgatcgcctgcgggtcccgcccccacggctgcagcatccttcagacctcggtccggctggggcggggccgccggacattggctggggtccctcgaagggagcacccccattttccgccctcggcgtggggactcgggtcgctagggccgcctggggaggcgagtaacctaaatcctgtgccacccacccattccggcgtgaaatccccattgcccgtcttttgggtgaaaaaactgagagatctagagaaagaagtcactacctctaggtcacacagcaaagtcggggacatccattcattgaacacatagatattgaacacccactgtgggccagcagtgctaggccctggggatttagtggtgagcgagagggaggggctcagctgcccgcgtgatctttaaaagcataacttggatgatgtcactctcgtgcttaaagcctccagtggctcccatggcaatggaacaaaacccaaacccctcaccctgaccccaggcccatctcaaaccactcaccctacacttaaccactgagccgcccggcccctcctgttccttagccgccaaactctcccattcaagcctctgcattttgctattccctctgcttgaaactcttgaccccagactgctactcgcctcgttctttcgtcaccttgccagactccaacagagcgctcccctccccccactcctgatcacatcacctttattttctttaccaccctaacactgtcagagactgtcttgtttattgtttatcacgtctccccctggagtgggaatgccatgaaagcggggccatgtcattcctgcctcctggctgagtgcctggcacaagcctgtgccggatgagtgtctatgggaccaagcgagtaggacgtgcaaagggccttggtgagtccaggaagtgaaaggccagagtggctggagtgaagaggggaaagcaggctgagaggcagggccctgtggggacccagagaggtactgtgagtatgggtgtgtgtgtgaggcaccaaggttcgagggttttgtttgtttgttttaagacagaatctccctctgtggcccacgctggagtgcaatggcgcaatctcggctcactgcaacctctgcctctgggttcaagtgattctcatgcctcagcctcccaagtagctgggattataggcaggcgtcaccatgcccagctaattttttttttctttttttctgagacagagtcttgctctgtcgcccaggctggagtgcagtagcgcggtcttagctaactgcaacctccgcctcctaggttcaagagattcctctgcctcagcctcctgagtagctggggctacagccgcgtgctaccatgctgggcttttttttttttttttttttttttttgagacagtctctctctgtcgccaggctggagtgcagtggcatgatcccagctcagttcaacctctgactccccggttcaagtaattctcctgcctcagcttcccgagtagctaggattacaggcattcgccaccacatccagctaatttttgtatttttagtagagcgggggtttcaccatgttggccaggatggtcttgatctcctgaccttgtgatccgcccacctcagcctcccaaagtgctgggattacaggcatgagccaccgcgcccagccatttttgtattttttttttttttcgagacggagtctcgctctgtcgcccaggctggagtgcagtggcaccatctcagctcactgcaagctccacctcccgggttcatgccattctcctgactcagcctcccaagtagctgggactacaggcgcctgccaccacgcccggctaattttttgtatttttttttagtagagacggagtttcaccgtgttagccaggatggtctcgagctcctgac

SEQ ID NO: 588710 - DNA, 4001 bp, Homo sapiens
gtcttgctctgtcgcacaggctggagtgcagtggcgccatctcggctcactgcaacctctgccgcctgggttcaagcgattctcctgcctcagcctcctgagtagctgggattataggcgggtaccaccacgcctggctaatttgtgtgtttttcgtagagacagagtttcagcatcttggccaggctggtcttgaactcctgacctcgtaatccacctgtctcggcctcccaaagtgctggaattacaggcgtgagccacggcgcccggccgaatctgggctcttaataactcaggcagagggcagcagggacacccttctaaacttcaccctgaatgaaggaggaacaggcagtggccacccccgtggctcacccaggttgatggtcttgccctgaaagttgaggtccttcagcaccagaacaagggggctgccctcaggggcgggatccacccagcggctcacctcgcagcctttgatgtcatacctgggtggggggacagaattcagctttacatagatttgagacacagagagaatctcacaagagcttccagtgactacttatgtgcactgaactattacagagatcatccccagtcctcagcacaaccctggcctgtctttttctctttctttctttctttctctcttttctttctttctctctctcttttctttctttctctctcttctctctttctttcccttccttcctccccttctttcttccctttttttttttttttggagatggagtctcacctgtttctttctttttttagagaaggtcttactctgtcacccaggctggagtgcagtgaaacaaacacggctcactgaagccttgacctcctgggctcaggcaatcctcccaccttaacctcccaagtagctgggactacaggcacgtgccatcacacccagctaactttttcattttttgtagaggcagggtctcactctattgcccagggtggtctccaactcctgggctcaagtaatcctcctgccttggcctccaaaagtgctgtgattacaagcgtgacgcaccatgcccggccctatagctgaaccccggcctattattgtttctgagttaaagataagagcagagcaggcattcacactcaggccactggtggcccagcccaggcttgagccctgcctgtgcctgcctctggacaccttgtcacccctgagggtgtcccagacacagggatccaaccccaggcggtggcaacaggacggcttgggggcagccaatggccggggggcggggaacctgtgggtagagtcagcgctggagggcacagggggttacgtgcagtcagaggctgggtctgagtccctgctccccacatgttagctgtgtggccttctccttcctcggtttctcatctaggaaggaggataagagctgcccctcagcgtccttctgggaattaaaaagcatgcgaagggcccaacacggcgcctaacgcacactgagtgctccagagatgctgggtgtgggcgtcactgtctctgacccaccagatcttgggaacgccccttctccttcctgggcctcggtttcaccgtctggctagtgagtgtgggtgcttcgggccgcgagtttcggctgggatgggggcccaaacctgcttaggccactcacctctcggagatgcggccggcggggtagaagacgctctgcatgacgatgaagtacgtctgggggccgggacagggagtgagggaggccggctgtcgccctccagccgcccgctccgcccagccacctcgcctcggcttcacccaccttctttccccggtccacccgcagactgtgcactcctggaaggggagagggcgccggatgaggatccccaaactccacaacccggggtgcatccggcgccaatcccagcgccaggccacgcctccttctcaagatccgcggcacctggacccttccttggctggtccggatcccgacccgatcccacccctaaacacagccccagtggtgccccgcccccacgtatggccccacccccatgccctacaaccccaaatccgcccatttgggccccgcccacataccccgccctccccaggtatatgatgacctaggacccgcccccaccgagccccgcccccagccaagtacccagcaaccgcgccagcagcgagtgcgggtgccgctgcaggtgctgcacgtagcggggcaggtgggcgagcagagcctgcacctctcggcgcccctgggtcttcaggaagaagcgctggtcgtggctggggggcaagagaaagaggtcactgcccaggcctggctggagcggctcccacccggcccccttccccgacctgtgcacgtggatctcgctcccaggtctcggcaccgcctctctcgccttcggccctcgccctcctctcctccccgatctgtccaccatccggccctgaccctcccagattagggccgctctgtttctctcttcagggggccttccccgccactgggaattctgccctcccagccaggggtaccactcccacccctgccccacccctgccgcaagctcacgacaggaagaagctggccttgctcttggaggtgctgaggaactgcaggtaggggccgccggggcccagggcagcctgatagtcctcctccgccaggcccagggagcggcgcagccaggcaaaggcggggccggccagcgtgcccagctcgaagccctgcaggggaggaagagcctcctctggagtgtctgcgtgggcccgggtgtgtgcagttggtcctgggacaggagggtcagggtgaccacacccttcctgcaaggctcaagtctcagggacaagccttcactcccactgcacagatgggaaaactgcagaggagagagcaagaccagcacacgtccctcccacacgggagtctgggcctcctacctcgtgaacctgggttaggacctccgagaaatcgtcccgggagggcggcccctgcagggagaggtagaggagctcagggcaaccctcagtcccctgctgcctgccccaggatctccagatgtcctgcacctggcccgtcccccacctcctccaattggattccttcagcaaaccgggaccggagtttctgagagtgcctgagttgggcagatgcattgctcacctcccagggatgccagggggacaagagtgacccacggcaaggcctgagtgtatctcatccactctggatcaccagcaccaggccatgagttcaagccaggcacgttcccagactcacaggctggccaagtgaagccagattctgtccagtacaagggggtggccctgaagccaagggacctgcctgatgcaacctgggaggggcaaaatcagagaagccttcctgggggtggagacctctaagctgaaatctaaagggtagtggagaggaggagcagggtgctcgcaccagtagaaacagcactggtggctgccggcaagggaaggagggcccaagtggctgaagccagtgagggagggatggagtgtgaacaaggctggatgcagctggatctggaggtcatgctgagtattggggagccatggaagcttttcagcaggtgatgaggtcagtttgtgatttagagaactccctcgagtctctacactttccctggatctccaggtccctgtgcccggatgtggtctgtggaatgtggtcccactgcgcacacatgcacacacacgaacaccacacacatgctcacccaggcccgcccagctgctgagcttgcagttgggccacctttctgctgagccagccctgcctcagcctgagctccagagaggatgggctaggccagcagggtgggggtgggggtcccttttcaaccatataccctggcagggctgggagggcctcagaaaccaaggagtataatctccccccattatacagatggggacactgaggcccagagagaggcagagacccacctagagtcacacagcaaccacc

SEQ ID NO: 588711 - DNA, 4001 bp, Homo sapiens
gccctgggtaatcaggctgctctctctacatctgggacccaaagtagagtccaggagccacaaaagctacgccgaataggggttcacacgaagccacatgagaaggcagccaggggcctgggagccagggcttgttcccctgatgtcccaatgccacaggtagcaaagcagaggcacagagaggaactggggaggtctccgggtgcccactccctgctcagctcccgggaggaagtagaaggctctctcacggcttcacccaggttggagccaggaacaggaacacctcctttccagccgccagcatttcaaaccaaccggtgccaaaggtgacctcaggccgggtaacccatgatgccccgcaacacgggctgttgcaggaaccccatcttacctctctgtgttccatcttctcctgagcccagtggaaggggccgcaaccccagactcagggacccccccaccccagacctcagcggggcctgctggcccagctgtcagagggcaagggcgaggctcaggaaatcctctgaccgccctaggccacagggccagagccaaagaccggagcaaacaaaggtcccatggagctgggggcccggccaccggggtcctgagtcacccagctgccgctgcagggcggagccccgcaggaaatcggaaaatgtgtacaagctacgtctggaacaggcggagggacctccagaggaagggggtgggagggggcagaccgagccccagccctgaaggcggcctaaacgactggcttgggcgctcaaggagtctacacgcaccccgcaacacccccatggtcccgtctgccctgggttggaactccaacatggacacacacaccacctcctttccgctctttgcggggacccactcctgtccgcaaatgcccccctcccaaccactcgctccggaacaggacaccacctctccctcctcaggagcagatagacatggcctcggtcctccgggcccacgcgcacctactgccagctctggcaggaaacccagccccctccgcattctagaacccgctatgtacccaaaggttcccgccctggggcgggggaggccgctcccctctcatctacgctcccctcgtgcctcctgtgctccgggaaggactcctgccactgccaagcgcgcacagactgcgccccccgctgcgcgcacattctaacccccccaggcccctgtgccccgcctttctatcccggctaattcccgtcggccttggagccccaccgaggagaaccgacttaaggacactctggggaccaccctggtggcgcacactgcggactcagccgtcctcgctcacgggctggttggggttcagtctccgggtcagccgcggactgatttggagactgtgcaaggtccaggaaccaccgaacccggagatcaggtctgctctgcgagggcgtcgcggggccggggccagggcaggggcagggaaggggcgcgggtgaggggaggatcgggggaagcggccgcggttcggggctccggggcgatgacagaggctttctcgcaccccccgggcccgcgcgcccctcccacgccgttcacctgccgcggcgccccctcctccatggcgccgctccggccgcttggggcccttctctcagccactccggtcccggaagccgcagaccctccgccaggactttcaaacttgaaacttcccgggaagcggcgccggagacgcgggatcgggcgccccctcccgagacccgctggcccgcgggaccagcgccgcctcccgtccgcgccgatccagcgcccgggaccccacgcccgaggtcccgcgccccagcgcctccctcggatccaaaattccgcgggattctgggcccagtacccgggcttcggcgcctgcggttcccgctgggcgtgaccgcgcctcacccccggtttggacgctcaggaggcacatcgcccgcgcccaggtcctctggccttccccgccgcgcgcccgcgggagccggccagttagggacagggatgggggaaacagcgccccctgaaggttgccgggtcgcccagccgggtgcagccggtggagctggccgcctcctctaactttgagcccctctacaacctggctcccgcctctaacgcgctgggcctcctcgaccaagcccctcaagtctctctttgtctcgcacgttgttggtgtaatgtgggctaatccaaaattgtctctctcctcggagtggttggcccagactagatattagtcactacaagaatgtatactaggccaggtgcggtggctcacgcctgtaatcccagcagtttgggaggcagaggtggacggatcacgaggtcaggagttcgagaccagcctggccaacatggtgaaacccccgtctctactaaaaatacaaaaattagccggtcgtggtggcgggcgcctgtaatcccagctactcaggaggctgaggtgggagaatcacttgtacccagtaggcggaggttgcagtgagccgagatcctgccactgccctccaacctgggtgacagagcgagactccatctcaaaaaaaaaaaaaaaaaaaaaaaaagaacgtatacttgtggaaaagtaaatcctcacccaaaattatgataaattacaaattacagatgaatgaaccagacctctctccggcccatctcttactcagactgagcttgctggttcagcccgtgccactttttagggctttaccctaaaaagcccatccatccacacgggagaaaagccatttacacctggtgaaatagccgccactatttcagcccaagggaggtgtgctggtcactgcctagtctatggcgggccattcagcccgtcctggcatcctgcgtttacaggaggttgtgtcagcacttcgtggaggagcgtcctccaggaggtgggaaggtgatgaagggtcaaataccgacagtgacttggaacagacaggctctggtgctcttactgaatgaaggaagccacatgttgtgctttgcactaatcacttccttcataatggactggaaaaaagtgaaattggtgagccatggacaacactgggttgtcctgctatgggaaatcacccaagtggcattgacatataagcaaaggcaacttggctctgtgaaacatgcccagatttcataatcagaggcgaaatgtgacatttacacattagagttgttgaggtctagacattagcagaagcacctggcacatagtaggttctttgacatgggggttggctgggcatggtggctcatgcctgtaatcccagcactttgggaggctgaggagggcagatcacttaaggtcaggagttcaagaccagcctggccaacatggtgaaatcccgtctctgctaaaaaaaaattaaaaaggcagctgggcgcggtggctcacgcctgtaatcctagcactttgggaggccgaggcaggcggatcacaaggtcaggagttcgagaccagcctggccaacatggtgaaaccccgtctctactaaaactacaaaaaaaaaatattagctgggcatggtggtgggtgcctgtaatcccagctactagggaggctgaggctggagaatcacttgaacctgggaagtggaggttgcagtaagccaatctcgccactacactccagcctagatgacaagagcaaaactgcatctcaaaaaaatacataaaataaaaaattagaaaaactagctgggcgtggtagcgcacgcctgtagtcccagctactcgggaggctgaggcaggcaaatcacctgaatctgggaggcagaggttgcagcgagctaagatcacgccactacactccagcctgggcaacagagcaagattctgtctcaagaaaaataaataaataaaaataaaataaaatggaggttaaatgaacgttattatccatcatttagaagcaaaaaggctgaccaagcccagtggctcatgcctgtaatcctagaactctgggaggctgatgaggc

SEQ ID NO: 588712 - DNA, 4001 bp, Homo sapiens
gatcatctcattcaattcaatacaggaatttgctctatactatccctagcctagtggaccatcttgtgttgattatactacttcaaaagcctccaagcaaacccacttctacacttatcccttctcaatctattctctaccatcagctagcagaaacttctcaacacggaaatcagatcatgttgctccctgcttgaaactatttgaaggcttccatctgcaaactccataacctggctcttgccagcctcaaaacctgccctcacctcacagctaattccctcctgtttgctcctccagctgcctggaatgctcttccaattcaatcctccctatttgctcttccacgaccagctccatccatctcatgcttcaaatgtcaactttaaacaaacaactcctcagagaggcttcctttaatatatctctccacctaattaactgtatgttttcttcacatgccagtttttaattatttattggcttgttttttaatctatcttccccatcagactgtaagaaagctccagaaacactggcaacttgtctgtctttattcctctccagtatcccaaacaaagaggaggcactcaacagttatcaactgaatttatggatggtgactcaaattctaaaatctctagcagtgggagacctactaaataacaaaataactaacctcaatttttctttctctgaactgcaatctgtcttctaggtcttaaatatcctgttacaaccagccaaatcagggctgaacccgtgaactcgatcaggactgattcctaacctttttcttctttttttttttggttcgtgaacccttctgataaatcctttgaaggcaatggatgctgcttctcctcaagaaacagcacatgcacagaaacaaaacatccgagaggtttcactccctcaggaccagcacagaccacagactaaaattctaacctggacgaaaagaggattcaccagtgcaatttttgagaactaaagtcttcaaaaattaaattttacagaagactacagagcatcttcttcgaaaaaaaaaaaaaaagaggacatttcagatgccttcaaactacctcacttcggagggtgcaactgcaatcagtaaattttcaagtctaaaagaaacttgggagatcatcgtccaaaaactgaaggcccaaaaggtaggagactcgtctgtggtcaagttagcacaacaaggcaggtctttggtcccccaaccctgtgctctttccacttaaatcccgatggtttcttacagagttctaatagtctgagaattggaagggagcggagagcagagggaaggctggggggagagagagacggcaggactgacagggaagggtcactctccttccactctccgggaagcgtgcaacacagccggggcaacccgactcccagcgctcacctgtctggggcccagaggcgggtggtgcggtctcgggacacggacacaaaggctcccggcggataggcgcagcacaccaggccccgtacgtccagctcgtggccccggagcgagcagctcagccggtacctggttgcgccgctcgtcatggccagtgtctgtctggcgcccggtgcccaggcactgtgcgagaccagtccgcaggggcgactcggagagcgccgggccgcggcgggagaagagcctgcaggtaaggggcggccggagaccggaagagcccgagagccggtacggaagggcggctgggaaggggcgcgccgagcgggccgagtgacacagcaagcctgacaggcactccggaattcatcatcggcctcagccctccatgacgcagagtgtgtgcgtcccaaccgccgacgccgatgcggagctgagctggctttcctccagggctctggactccctgctgagcaagagagaaagaggcccgcccttccaccaggacgcctgaccctggggtccttcccaaacccgggtctcttccgactccgggcccaacagtttgtggtaaatcgggaagcgggccgggactacaattcccataatgccgcgccagctggcgtggacatccggcgcgccgaatccggatattttaaacctgagtctttcgcgctgggcatggcggaatggctgagtgaggttgtttggtgtctactgttaggtcatcctcactgcttttccctgagaatctcgaggtttttgcaagttaaccttgtttttcaattaaaacgagaaagcttgaggccaaattgggaactattaatcattgaactattcctccgtttcaagttatctgaatctcctactctctgttgtcaaatttagcaaatacggtggtccaagtcaattttttaaaggtataactacttttctctggcggcttgttaaaatgtagattctgattcagtaggtctgagttagagctgagatacgtatttttaacaaccccgccgcccacccacccgtggtgctacttgctagtcattatcagaccttattgagtgccagggtaaacatgacctgtctccttactttgttttcttcccatccgctattctctcgcatccaactacacttttccacaaacctttctaaattgctaagcccaattcacacttttctgacttctcccttcctaaaactcctactctaggtttggaatcacttttcccctggtttgggagatcattcttgaaatgctgacttttgatacttctttgctatcatatcccctccctgggtggattatttactacttggcttatttctagagctgtattcccatattgtcttctccaaactctagatctgtatttctagctatctgttagaaatctgtaccaattagtcctacttaaattatttcaacatttctctggcctttctaccccttctctccagccaatcctacacattaaaatataattatctttctgaaatatacacttaattgttttttctctgtttgacaacctgtgatggctttccattattttttttttttttttttttttttttttttttttttttttgagacggagtgtcgctctgctgccaggctgagtgcagtggcgcgatctcggctcactgcaaccctcgcctcccgggttcaagcgattcctgcctcagcctcccgagtagctgggactacaggagcgcgccaccatgcccagctaaattttgtgtttttagtagaaacgagtttcaccatgttggccaggatagtctcaatctcttgacctcataatctgccctcctctgccttccaaagtgctggattataagcgtgagccaccacgcctggccggctttccattcttatagtacagcattacatagggcctttcacacaatctccctaatctgttttactagattcatctccctctgttatctctcttactctagacatttcgaatttgtcacaattccctgaacacattatgctgtatgctctccatgtctctatgctctttgtacatgcattttttttttaaacttagaattccactttctccatctgtcatagttcaacaccagtttatcttctgtttttttctagttcctctggggaaccaatgcagttttgtctgttgtcaatatagtatttactgcattctaatatgttcttttatgtctgtcttttctaccggactacattttattattatcaagacctttattttacatgaatcttaaccatctaatttactgcctcctatataataggaaatgtttttcaacttggtatagtattcagtttaccaattttcacagtctctcatttagttctcacaataaccctgcaaggtagatagtattattcccatttcacacatgaagaatttgccttgtttaaaaaatgttaatttggaggccattaggttgagatagttccagctctggagcccaactcaatgtaaacagtaaaatgaaacttaagcttaactaacagaaacagacaaacctctaactaaggactttccactttaaccaatcaagtaagtatattttc

SEQ ID NO: 588713 - DNA, 4001 bp, Homo sapiens
caaggatacacctggagtttcagggctctgtgccagagtcagcttcaaagctgagcacaggataccaaaccacttaccaggatgaagaggcacaatgctgaaaaggcctgaggtggtgagatttccctccccttctgccactgtgccactcgagcaccctgtgaccagagttagaggccactcactgacagcagggtgatttggcagttctttcctttctccaaaccctaacagtcccatgcgactcatctctaacagcagaccagaacctgcctgaggttaggagcgagatattatccatcttgatagtctccatggtgtctacttcccctaaatatttgcacaaagcatgagagatacaagaaaaactgtggctcaggccacttgccattacttatttttcttctgaacataggagtggatgactaaatttttacacctgctgcaaacatttataaagaaaacaactgtactctagtactattcctccacataccctgtatatcacagagctgtgtgctttcaagtgctcctgtttgtaaggggttaggatctcccctgaaaagagagagtcctcatgtcaatcatctgggaaagaaacactgtctgggaagttagtatttagatttacctctttctgggccttgctctcctgggtctggacttgtagtctgaatgtgttagaggacgctcccaggtggaagggttaaaggtggaagccaagcaggaagaagagcttccttatgggaaaccacacctgagaataaataaatgcatcacaccttgtaaatttcaccctggagttcagtattttcaacattctttcctttcccaacttccccattcctggcaaagtcatttcccaaagtctgggaatattccgtagggtgtccagaacactttcagctatctcctcttgctcacaaaatatgtatcagaaaataagcaaaattgaccttgcaatagggataactttgatttcactcacttgtataagttaagtcttttaaaaattctaacacttttcaccaggggtaaaaaaaaatgtcttgctacttatacaattttaaacatcactgtgtctcagagtgatgttttgcagagaatgctgatttcaatccctctgtcttcattttccctttgattccttctgagatcttggaaggggtctttaatgcttcagccctgcctcaggtgagctatagattactatgggaaggtgtatttctggggaggagaagtggtgcctgcaagttccagacaacctttcttccggtcacccgtgagtacctagatttgattttacttggggggacataaaaaattaattgcatgaattctgtcatcgggattaccacgctgacttatttcccgatcagatgacacattgcctgaatgtatgactgatcgtctcaccacagtcattttcaatatttgcatcccattgaaattaagccacatccccttgcaaattccagcccagagcccacagcttccggaggttttctgtaattaacaccgcccttgctccctgaggccagttactgtaatttaggtattccccgcaatagtgtgctgatttctgttgagagcactgtgcctgtttttctcaactctattttaaagctacggagagatccggagtccacgccaggcgacaagaacgcgctctaatggaacgaagttggcaatacctatcagcaccaggggcagtgcgagagccaagagccggcgctcacgaggagcgggcgcccagcgctgcctggcaagcccggagcccaggagatcgcgctgactgacatggccgggctgacccttctccccacccgcctgcggccggtgttcactcactgggcggcgctggtgccgggaccaggcgaccggtacgcaaacctccaggcccgggctcctttcgcccgctgcagggaccgggcctcgctccgcccagcgtcgggattggcgcccagacacagtagatgacgcacctcagccaattcgcgcagccctcagcttctttaaagagccggcacttccgccagaagccgggtgtgtccttccgggccaggctcagtgttaccagaggtgggaggggaaggtcaaaagaggcaaattcaaagccgcggcgactcagctgccagatttttgagatgaggcagaggaagcggagtggaattctcaattaaaggcctctgtcccctcatctgttaaattggcactattaaaaagtcataaagataagacagaaacgagaaagaagagaattgactgaaattacccattcttttttgaacagagccgtctttctcccctgctgctcagagagatgtcggtctcgcctcaacctcaccagcaatttctatcttgaataagccacgtctctctcccagcctgagagaatgcttgaattgttggcactctgttctttgctaccaaatggcttggaaaaatagcatgaacgtcaccagtctctggccttcaggaaagtccctgctaaccaccacagcggtggagaaggcgtctaactttctccaggctcagcgtgtgagtgcacaccgccctgacctcctgggcgcgtcttgatgctctcaacagcagccctcaggattctggactgtgggtcccacattccagataccatttgtggaatggctggatgagaaaattgcaacagcaccctcatttccagttaagggaatgggcgggttaccaggaggtttgacactcttgaagggaggttaacaactgatgcaagaagtaaggaatcgtgtttgagtgcacagactctagcataaacacacctaccttcaatttctagctctgtcactgtcactctgaatttatcacctctgcaacaggactaaagccatctaatttattggattgtgaggactaaaagataatatatgtgggcatttagcacagtgtcgggcacatagttcgccttccgtaaccagtagtaaccagtaacagcggggagctgttagtaactatagggctgaggggtgggggaaggaagcagttactaaaaccaggcgagagcgagagcggtagctgtggctgtacgagagagtaaccaactggaaccgtgtcgttcagtagaggaaagcaagcaatgccaacttttcaccaagtaaggtgagattctatagttgtagccagtgctgagacgtcagcccaaagcagggacagagtggagaagacccacctctctgttctcccagctctgatatccagctggggtcttccgctggctggatccaccaggaagccagaagacagtggagctaggtctgtgtagtctgtagaggtcagcctactaggcacaatgcctggagggagaaatagaaaatatccagcacaccatttcttttttttgtttgtttttacactttaagctctagggtacatgtgcacaacgtgcaggtttgttacctatgtatacatgtgccgtgttggtgtgttgcacccattaagttgtcatttacattaggtgtatctcctaatgctatccctcccccctccccccaccccacaacaggccccggtgtgtgatgtcccccttcctgtgtccaagtgttctcattgttcaattcccacctatgagtgagaacatgcggtgtttggttttttgtccttgcgatagtttgctgagaatgatggtttccagcttcatccacgtccctacaaaggacatgaactcatcattttttatggctgcatagtattccagcacaccatttctacaaccttgggtttattgtgtttggaagcctagatccaaaggaaggaatgctgccactagaagaccccgtcactgaattgaattgaatttcaattcattgattcgaaagctgaaactgccctctggtcactttgattcctcacagtgacagaatggtatgattcatcccaaataccaaaaggaaattgggttacatctatatattgagggcaagaagaactatgcatgacacctggagattcactgggcacttcttaat

SEQ ID NO: 588714 - DNA, 4001 bp, Homo sapiens
ggatcataaacatctgccaaagctatgaaacaggccttctgtggacaggcgcggtggctcacgcctgtaatcccagcactttgggaggcagaggtgggtggatcacaaagtcaggagttaagcctggccaatattgtgaaaccgcgtctctactaaaaatacaaaaattagctgggcatggtggtgggagcctgtagtcccagctactcgggaggctgaggcaggagaatcacttgaacccagcaggcagaggttgcagtgagccaagactgcgccactgaactccagcctgagtgatagagtgagactccatctcaaaaaaaaaaaaaaaggaaagaaaagaaaagaaacagtcctcttacggtaatgagggtcacctgaaagtttctaggtaaaggcagtgtatgccccaggaagggctgaggagttccagatgttactgctgtgagctcaggggctcgccactgaccagtcccttgacttgcatcttgaaaaatcagaactcactttgcggctctagcttctggatgatgggcagagcactggtcatggccacggaggtgatggtcttcacaccgttctctgccatctcacacacagacttcaggtagggatactggtcctttgtactgagataggctgaggacatgaggtcatacgtggagctcaccaagggcaggttgaccacccgagtcaccacactctgcaatcaaagtagggagggtatgcttattaatctctcaaaacacaaaaggagagaaagtagacaaaggctactcaaaattcataccggttgtggatcaactgcaacggatgccatttttcttcctggagaaagaaatctgcagaaaagagacttatttcagaacaccgggataagactctcccaaattcattccccaacccaagcaaatgctgattacaagtagagaaaaatgcagggtgagctccctgtagtcttctgcacttctttcctctctccagctctccaggtccccctcctgaaagacccacacccacacaaccccactccctcttttgaggcaaagtttcagagcttatgtgtaaacttgcaatactcaggagggagaagtaaagttgttgacatacttctcttgtttctccgagtatctgttaacaaaaatgctagccaagccggacgcggtggctcacgcctgtaatcccagcactttgggaggccgaggggggtggactgcttgatgtcaggagttcaagaccagcctgaccaacgtggtgaaaccccgtctcttctaaaaatacaaaaattagccgggcgtggtggcgggcgcctgttatcccagctgctctggaggctgaggcaggagaatcgcttgaacccgggaggcggaggttgcagtgagcctagatggcgtcactgcactccagcctgggcgacagagcgagactccgtcaaaaaaaaaatgcggttttctaacgcgtttccctttcgataatgtcccttcgacaaatattgttttcccacaaccacccaagcaggccaagggacattcgatagcaatcgccctaaatctgttggcaggaaagaagcctcaacgcacaaaggcaagggtcgaaagcgcgggttcagcagaccgcccctacccagccaggacctggaagccgcgaggcgagcggggggtctcggaccatcacccccgcgtcccgtccacctttgagccccgcggggagcagagcagcggtcccaaggccccggggagccccccaccccaactgggcgccgctgggggcccgggaccggttcgctggggcacccactgggcgcgcactcaccgacggactgcagcgaaaggcgaagagcaggcgcgtcccgaagacgactccggctgccacgacccggtcaaagcgtggggcccgcgggcgcccgggctataaaccccgcctcgccgcccctccccaagcctccgcagcacgtgacccgcggcagcacgccctgtcccaagcccgagtgtcaccctcgggcacgtcccggcgccctcccccaacgccggccctcctagagtggtgggggcccggtcgggttgagagggtgtgctgcctgggcgaggggccccgccacggggagaggagcctgtcgggagccgggcgggggcccggcctggggaggctgggagttggaggtagccctgcctggagtcggggcgctgcctggagtcggggcgctgcctgtggtcggggtcctgcctgtggtcggggtcctgagaggcccggggcaaatggggatggcgcccaggccggctttggggttttgaaaaatgcaaacaaattcacaccaacttgttgaacggcgttagtcctcagaatagaactctaaaaatggaagcggtggctcacgcctgtaatcacaacactttgggatgctgaggcgagaggatctgtcgagcctaggagttcgagaccagcctggcgaagatttttattttattttaaaaaatagcccagcgtggtgtcgtgcgcctgtggccccagctacctgcgaggctaagatgggaggatcgcttgagcctgggaggtcgaggctgcagtgagccgagatcgcgtggcgctgcacaatggcttctacgctgttatttttagcgaagtaataacttttaaaagttttgtggcggctgggcgcggtggctcacgcctgtaatcctagcactttgggaggccgaggcgagcgaatcaccagcctggccaacatggcgaaaccccgtctctctcaaaatacaaagaaagcagcccagcgtggtggcgcgcgcctgtagtcccagctagtcccggctgtttagcggggttgggggcaggcgggtgggtggctgaggtgaaagaatcttttgagcccaggtggtcgaggctgcaatgagtcgagatcgcgccactgtaccactgcaccccagcctgagtgactgagaccctgtctaaaaaaaaaaaaagaaaagaaaaaagaaaaagaaaacaaaaaacttaactccagatcactccagaatgacagctgcctagggttatgtgacataggcaactttatacgtgcagggttatgcattgtttttcaaagacaacttaaaacgtcatctgagtcccagttgtgtttttttgttgttgttgttttgtttgtttgtttcttgtgtaaaacgcacagatttggaacgagattatttgagcagacaagttgcgccagcgcccgaggccagatagggctcgtgggacttcttcccccgtgagtggcgggggatttccagatgaagctgtccggcctcggcccccactccccccccccggcccccgacacagctcgcagggaggatacagcagagaggagggttgggaggtgggaagggagcaggcgctggcgccgcgggtccgccccctgagaggcccacagcgttggagtccctggctccagccaggagggactggctttgtgaagctttggagttgtaactgtaggaagctctcagagacttttaccccaatttgttttcattttctgttgttgttgttgttgttgttgttttttgagacggagtctcgctctgtcgccaggctggagtgcagtggcgcgatcttggctcactgcaaccccagcctcccgggttcaagtgattctcttgcctcagcctcccgagtagctgggactacaagcgcgggccaccacgcccagctaatttttgtatttttagtagagacggggtttcaccatgttggccaggatggtctcgatcgcttgacctcgtgatccgcccgccttggcctcccaaagtgctgggattacaggcgtgagccaccgcactcggtctaacccagtttcttaaccaatcttgcatgcacacagatactgttgatcatatttaaagctccaaacggacccattaaaatggtatcccttatcccattatacctgaatatataatagtacttacttagcaagaaaaattaaagtatttttacccctcctccccacatgtaattcaaaataa

SEQ ID NO: 588715 - DNA, 4001 bp, Homo sapiens
tgaccgaaaatgccaatttttccaaaaagtgagcaattccactaaggtatttcgcttcatatctcgatcctgaattgataagaactagtagtaaaaagaaaattgacaggttacatcagatattcaaaataagatttaatcaagagaaacattttaagatgtcaatatgacatgataatcagatttaattacatgagggtgattgtgctgatggtttcacaggtatatgtgtagctcaacatttatgaaatcgtacactttgtttccactcagggtacaattcataattggcatgctaattacaactaacagtcaactaaagcatgtgcatgttaaaactgcgggaccacccacgacaacacaacagtacttacttcctactgtacaaaactgtccaaacttattctgagatgccacgcgaagcccattatccaatgtggttactttggtttcaaacttttcctgtccatcaactgtagcaaaaacaggcttgggtactccaggtaagggagaagagagggggatgttgggataggcaccaccactactaaaccgtctgtacgcaggaggtccaaacctaaaacagagaaagcggcccagttacaacaggcttgagacaacaaacctgtgatgacctgttaggtgcggttagttatgttttgtctgggttaaaagtgagcatctgcctttctacaggacttatttctacagactttggaagacaaagcagaggctgacaacaaaggctcagccacgggacctggagcaagctggttccgtcctttgggtcttagttgctatctctgtaaaaacagggcttattaacagtaactcactctaagtgcagtttgtacacataaagcacttaacagctctgccctccaacagcaccaccgaagtcttggataaaagccatatcccttattaacctggtccgaaggcggggtgtgacttggcctctgtctccctctccaaactcatctcttgaacccccacactcccataggtcctggtcacactgattcttgtcaattcctggaacacatttgactcatcaaccccaaagcttcttcaccgttccagggcttgccctttgcccatgcctaccccttctttcattcttcagctcttcccttaaatgtcaccctgatggaggactatccctcaccagtctagtctttcctgctattttctatcatgaaaggctgcttgtttactccaaagcatttacgcgactgccgatattttgtttacgctccagcctgtatccatctcctggaggcagcacctccgcacccctgaaacggcgctcgttgtgtggggaggggcgacgcctgtgctgtcggaacaaagttccagcgtggggaaaggcaggcccggtcacttgggtgggaggagcggtgggtacggaaagggttcttaaacgtcagagatcaacggacagaccgcagcaaccgagagcctggaccctggtgtcagaaccctgcgggtctaacagagctgggcccccaccggctcagcctcctgaaggagcacgcggtaggtgaagcgcgggggcaaatatgaggcatggcctcggagaaggcccgtcgacccgggaagtgagggggggagaggacccagcagccggggagaggagagacagatgggactgcgtccccgggctcgaggcgcaaagcaaggcagggcccccgtcgcctcggggacaccagtgtcccgaagtgcgagcccgtcccacgggcgccatgtcacctgtagaaaccgaagacggagcgtccagaaagactcgagccgcccccgccccaggccgaagcctggttcgcctttggctcacctcagccgcgaacagccccaagaacccgagccccgcagcaaccgcgtcgccgccagcaccacagccgccatcttgcgtctccgccccgcttcagtcgtcacttccgcttccgcccacggcttcccctccccctcgccgacggcccaaggcgttcaggcacgcgctttcggtgctcggagcggaagcagcggcgagaggctcggaggcgcgggggcggccgagcggcgggcgacgggggcgggcgacgggggcgggcgacgcgggccgcggcacgggcggagccggggccatggagccgccgctgccgggctaggcaggtcgtgccccgccgggccggcggcgatgtcgggctaccagcgccgcccgggcgccaccccgctgtcccgagcccggagcctcgccattcccgacggtgagcggggcaggggccgagtccagcggtccaggtgggcggcggccgccccggcacgcagtaaagtcgctgttgtcgttgcttccagctccagcgttctatgagcgccggtcttgtctcccccagctaaattgtgagcgcccccatggcagggacctggactcccccttcttcggcattcggccggcctttatgtgctatgtgcccagcccggtgctggcttccgtgggagacacaggtgagagacgagggcgccggccccggggacgcttccagttcccgcgccacgtgtggcacctccgctgcagcacgagctcgtccattgacccatcaatgtgcagagcgctcactgcgtgccaggcactcggaattcaaaggcggagtcccctgctaggagctcacagtctggttgcggggagacctcccccaagacagacagttccagtacaggatggttagtgcccggggagcacaggagcccgcccgctttcctcgtggggctggagtcggggtgccttcacctagtgggcagtgattggaaaccgagctggagcattccatctgcctccacagccgggcagtggccagatctggttcgtcctcgttctacccaagcagaagtgctgctgggtgcccggggtgtgcaggagtgtttgtgtggttatgccaggatctgaggacattcgggggttgtcacaagacaagaggacgcgcttgccccggctgggcttcaaaatctgctgaggagccgctttcagaccacggacaccagggccagtctgcaagtcaggccatctccagggtcacaagtctgggagcttgtgttttttttaaagttttctcggctgaccgggcgcagtggcttacgcctgtaatcccagcactttgggaggccgaggcaggcggatcatgaggtcaggagattgagaccatcctggctaacagggtgaaaacccgtctctacaaaaaatacaaaaaaattagccgggcgtggtggcaggtgcctgtagtcccagctactcgggaggatgaggcaggagaatggcgtgaacccaggaggcggagcttgcagggagccgagatcgcaccactgcactccagcttgggcgacagagcaagactccgtctcaaaaaaaaaaaaaaagttctctagactgtgagaaccactgcagtggagactccatgtgcaaaagaaaaaaaccaaatgtgaggtcataaagacttcctgccagcatggtgggtgacattgtttctttgcagattttggctatggaaaggggaaatgttctaagcagagcccgtcaggagcccacgggacacattttggaggtagagtagttcagcaaccttttcttcttgtctccatccaacacagtgccaggcacgtgtctggtgggactgtcaatgtgactggctatgtggtgtagctggagcccaaaagagcaggtgggggtgggatttcaagggttcagtcttgatcctagagtagcagcgaggtgacatcagggagcggggaagccccacctggggggctggggccacaggagccagctttacatggggctcacagctgggagggtcgagtgtggctgcttaagtccccggagggtgggaaggcggtggcaagagggagaagggaaaagtgggcgttatttaggctacctaggtaggaaagtcgggaagagggtcagggggcactgggtccccagcgttgcagcacctgaggagctggttgttgttgttgttttttgagac

SEQ ID NO: 588716 - DNA, 4001 bp, Homo sapiens
aaaccccgtctctactaaaaattcaaaaattagccgggcgtggtggtgggtgcctgtagtcccagctacttgggaggctgaggcaggagaatggcgtgaacccgggaggcagagcttgcagtgagctgagattgtgctactgcactccagcctgggcgacagagcgagactccatctcaaaaaaaagaaaactcagggaagtcagaagagcactcagaaacgcatttaaagacacaattctgcaccaagacagaatgaggacgtgcccagaaagctgagcccttcgaacttggttcagaagcaaatacaagccctgggagcttctgcttcaggacaggggaacccctacgctcactctcaaccaggtggggagcagagaagcacctacgaccatgtccctcacttaaggaagcgaagtgagtccctcagcccagcaaccgcttctgggaccgattatccaaggaaggcctatcacgcgatggcccgtgacctggtcacaggctctcctgcggtggagcggctcagccttttctagcttttcactgttgctttaatgggtccagtgttctggtttaggaaataaggcctttgccatgtggctacagatgtttgactaagaaaaagattctagggctgggcacagtgtctcacgcctgtaatcccagcactttgggaggccgaggcgggcagatcatgaggtcaagagttcaagactaggccgggcacggtggctcatgcctgtaatccctgcactttgggaggccaaggcgggcggatcacgaggtcaggaaatcgagaccatcctggctaacacagtgaaacaccgtctctactgaaaatacaaaaaaatattagccgggcgtggtggtgggcgcctgtagtcccagctacttgggaggccgaggcaggagaatggcgtgaacctgggaggcagagcttgcagtgagttgagatcgtgccactgcaatccagcttgggcgacagagcaagactccgtctcaaaaaaaaaaaaaaaaaaagttcaagaccagcctggccaacatggcgaaaccccgtttctactaagaatacaaaaattagccgggcgtggtgcctgtagtcccagctacccgggaggctgaggcagaattgcctgaacccaggaggcggaggttgctgtgagccaagatcacaccattgcacaccagcctgggcgacagagcgagactccgtcttgggaaaaaaaaaaacacagaaaaaggttctaagcaaaaccatcaggcaaagtcctaaaggaactggaagtagcaactgtgaccttaggggaagaaaagacaaggcctcaggcaatgcccatgggccaccgctggctgccctcgctgtgaacaatgcccatgggccaccactggctgtctgctgtgacaggcgcgtctaacaagtgctggcagctgtgacaggcagcagagaggggccagatccaccactcccacagtcctcaggcgccaagaagccacggggccaaagagcgcggcagagcagacgccaagaggacccttctctgggtccagaaatgccccccaactgggaaatccaggcatctggtcccccgagttacatacctgtgggctgtcatctttctcttcctccatggccagaaacagaaaaaacagtcaggggcgaaaagcagacagcctgaagcaaacaagggcacacctctacccgctcatgctcacacctggacacttttccctgggttcctttcaagtcaaattatgtttcactgaaaggaaaatcctgctgaaaaagtctgttctccaggaagaaaagctgtcttttgagaagtgtctgtcatctgctaggagccacctccttccctctgtaaacagccctcacgtggctgtcccggaacccagaacagcagccagatggggcgtatccaagcaggtcaagaggagccaggcccagcgcggcggggatgggggcagcgctgccttctggagaagcacggctggaggggaggtgacgctggcggggcgtggatccggggtgtggggatgcagctggggaggagggtgcagctggggagggggtggatccggcgtgtaggggtaccgctggggagtgggtgcagctggggagggggtggatctggggtgtgggggtgccgctggggagtgggtgcagctggggagggggtggatccggcgtgtaggggtaccgctggggagtgggtgcagctggggagggggtggatctggggtgtgggggtactgctggggagagggtgcagctggggagcgcgtggatccggcgagtgggggtaccgctagggagggggtgcagctggggagggggtggatctggggtgtgggggtgccgctggggagggggtgcagctggggagggggtggatctggggcgtgggggtgccgctggggagggggtgcagctggggagggggtggatctggggcgtgggggtgccgctggggagggggtgcagctggggaggggatggatctggggtgtgggggtaccgctggggaagggcgtgcagctggagaggggatggatctgggctgtgggggtgccgctggggacggggtgcagctggggagggggtggatccggattgtgagggtgcggctggggggcgacttccgcgtggggtgagaggtcgcctgcgagggtgaccgggcaggagggctcagtgcgcaagccggacgtgctgggtccaagattattgattaatttgggcaccgcgagggctcgagtccccccacaccactgcccggcctgcgggggagcacagacagcccgggccctcccggctgcaggtcccgggctttccccgcgcggttgccggctccgcccagaggagccgcgcccggcggaggggtaagaaaggcagggtcgcggcgtcaacgcggcggccgtctcgagtccagggcccgcgtcctccccgacctcccgacgccacctcacggcctcagggggactgggctcccgggaaaccgccggccacctggcggacgaacacaggcagtggcgggcagtggagacgccagggaccaccgcgctgagagcgatcactcatccgccagccccgccccgcgagccccgccccgcgagccccgccccgcgagccccgccccgcgagccccgccccgcgagccccgccccgcgagccccgcaccgccggccccgcaccgccagccccgcgagccccgccccgccccgcgcgctcctcgcattggccgagtccccgcggccacaccccctaccagattggggccgctattggacgcggcggccgcggccaatcggagccgctcttgctgcgacgcagcggtcggaagcggagcaaggtcgaggccgggttggcgccggagccggggccgcttggagctcgtgtggggtctccggtccaggtgagtctgtcggattggggcgggcgccgcgcgcggccaggggcggggctggccgggttcccggggccgcgactacccgctctctcctcccgcagggcgcggcatgggcgtcctggccgcagcggcgcgctgcctggtccggggtgcggaccgaatgagcaagtggacgagcaagcggggcccgcgcagcttcaggggccgcaagggccggggcgccaagggcatcggcttcctcacctcgggctggaggttcgtgcagatcaaggagatggtcccggagttcgtcgtcccggatctgaccggcttcaagctcaagccctacgtgagctacctcgcccctgagagcgaggagacgcccctgacggccgcgcagctcttcagcgaagccgtggcgcctgccatcgaaaaggacttcaaggacggtaccttcgaccctgacaacctggaaaagtacggcttcgagcccacacaggagggaaagctcttccagctctaccccaggaacttcctgcgctagctgggcgggggaggggcggcctgccctcatctcatttctattaaacgcctttgccagctatacggtgtttgtttt

SEQ ID NO: 588717 - DNA, 4001 bp, Homo sapiens
aacacgtagcacgtctcatttcaagtggtaccttccaaggtgccacagtctcccgcccttttcagttgtctacttcttcctcttcattctgttcttcttcttccagcctttcttcgtcttcatcattgtcctcatccctgctcttgtcttgctcttccgagtctgtttttttgtctttgtccttcttcttttgctctgaggcctccttcttgcctttctgctcccgcctatatgctgtaaggacggaacaaggggttaggagacagagctgaaagtgagccagacggactgcaggagctaattacattgtacaattggaaaaacggaggcagatgggcgcggtggctcacgcctgtaatcccagcactttgggaggctgagacgggcggatcacctgaggtcaggagttcaagaccagcctggccaatatggtgaaaccccgtctctacaaaaataaaaaatgagccgcacgtggtggcgtgcgcctgtagtcccagctactcgggaggctgaggcaggagaattgcttgaacccaggaggaggagactgcggtgagctgagatcccatcactgcactccagcttgggtgacagagcaagactccgtctcaaaaaaaaaaaaaaaaaaacaaaaacaagaaaagcaagacaaaaacaaaaacggaggcagagaaggaaaaataacttgctcagcattacaaaacagatctgaggtggtgcccaccgaactgggtcgagtcacatcaagtgctggcttactggacttaaagggacccgcgctgagaaggctcagggcctggtgaacaggtcacacaggatgaccatcttctatgtggtttagaagacaagaggctcgttaccttccagagcttctttcaatggggtaacgaaccgctggaactccatctcttccatggctgagagcacatcactggcattcagcgtcttccgctttcctttcattgcaaagttgttagcactgagagaagagaaaggctgtcagactccctcttgtttgtaaggcgtgagtgggaaaaggagcacccagaggtggaacgggaaagcctgcctcttacatgtatggattttggtgtgacagggataagtccttcccttctctgcacaaaaaagctaaagcaaagtgattttgttgtgttattttgcttcagaacttgtaaaaactggcagaggactgtgaacatgtccccaccgagggagaacacaatcgttggggtttgtaggctcccagccagcaactcccagccaggtatccccgcgcctcccttatgcctctgtcccgctcaccaggatgtggcgtacagcacgaagacgctggcggcgcgggagatggcgctccgggcctccttggagatgttgacaccgtccgggagctgcgaggagaccgggggtgagcaaagctgccgttccagcacctgcttccctcctgcccgttcgtccgccccccccgagctgctcaccgcctccttgatgatcctggtgatcacggcattgggcaggtttaggtcctcgggcctctccgccattgccgccgctggggcttaaactccccttcgcctccgcttcagggagctactgcgtccggacttcccgcgtcgctacggtctgaccctgcgaggtttccgttccgccccacgtggcctacagtgtcccacagtgctctgagcgccatagcctccctcctccccccacagccccgcctccgcctcaaataccggcgcatccggattttgaagccgcagtggttttggcccgccaaggcttccatccaaccctaccgcaccccgcacgcccctccccaggtccatttctctgcttctcgccatcgccgcgtcgggaaccttctcaccaacttatttggctcaatggagcttccgtccgtttcccatggtgccctgcgccgctgctgggtgacggcgcggccgggcgcagcgcgtgggagacgaaggcgtggctgactcggcggggcggatccctttaggacccgaggcaggctctgggcccgccgggtccgttaatctcaccgcgccgcaaggggccacgttttaccacttgatttagcaaccctaagcggtttggaatctgctttgctctcacaggacctcagcccgtcgtgatcagattctcccactttcttttttctttcctggaatggagtgggcagtctttttccatctctaccgaagttgatgttcatttttaatcttttcgcccctcacgcttttgtaataatggtactaagactgagtgttatttagattttattgttgttgtttgtgtttaacgcgaactatttaggcagcccagggataatgctggccatatagagatgcgcctgattaggtctcaggagtcaattcggactgggcaggtaacgaaagggcgagaagcagccttttcactgtatgaagaatgcaacgtcacattcgctttcaaaaacaaaccgtgttaaaattgtatttatttttcagttaaattgttcatcatacattttttccagttaaaaccattctcaaggttttgcaatggcgtttctttttttttttttttgagacagtctcactctgtcgcccaggttggagtgcagtggcgccgatttcggctcactgcaagctccgcctcccgggttcacgccattctcctacctcagcctccttagtagctgggactacagacgcccgccaccacgcccggctaatttttttgtatttttagtagagacagggtttcaccgtgttagccaagatggtctcgatctcctgacctcgtgatccgcccgcctcggtctcccaaagtgcagggattacaggcgccagtcaccgcgcccggcgcaatggtgttttaagttgtttttaagttatttttatattaagttcgtagaaattctcactcccactgattttatttattttttaatttttaaaatttcttgacagggtctcactccgtcccccaggctggagtgcagcggcacggtctcggctcactgtagcctcgacctccctggctcaggtggtcctcccacctcagccccaaatagctggggctacaggtgcgttccatcacacccagctaattttttgtatttttcgtagagacagggtttcaccatgttgcccaggctggtctcgaactccagggctcaagtgattctccctcggccttgcaaagtgctgagattacaggcatgagccacggcgcccagcctcccactgagaattaatgctgcttttttttcccgtcaagcatgcagtcccaagtcgccctgtagttttcctgctttcgatagaagcctgattatagagaaatattttaaaacaaaagagcaaatgctatgataaatggcaactgaaagtgtttcaattagagaccataaggtctggtgggggaactccgcttggatagaacagacctggctgaaaccatcagggctgctcagcgctagtcagttgctcttcaactggaattgggctcagtgttgtcaagtattttggtccctaaaaggacattgtgggctatttcaattttaaaattgattcaaatttaaaattgattcaaagtgctagccaaacaaaacaagtaataggccaggtgcaatcccaggctgatagtttatctttgatctaaattatgaaactgtttagaacagggagtttgtttattactgttcatgtccaaagcaggtcccctcacatatttagtaatcaataaatgtgttgaataaaagaaagaaatggacactgtccttaaaaagttcttaggaataaggtggtagttagtgattgcctaaaacacctctagaaaggaaaagatgataatatttattgaacacctcccatgaataaaagtacattatctcatttaatgcttctgcagtcctacttagggattccctgccttctgcttatgttatttattattttttgtggagagggggtaactcatcttggcctaccaaagtgctgtggttacagacctgagac

SEQ ID NO: 588718 - DNA, 4001 bp, Homo sapiens
acaaagtgttgcatttgagggctccagtcccaaaattgtttcccacataggagagcctatctgtttcagctgcctaaaatgcagagaggggaaactccatttacaaccaatgttgaaaggtattaagcatcatttctcttttctacatttgctgaggcttttgaatccagactcacaatggattagaactagttcatctctggcagatgatccagccccactatctctaagggaatatggggtgtccctgcaggggaagcaagacgacttctggaagagaagcctcagatggtgctagcttctaaatggtatgaaaagctcttgggggaattctgccacaagacttgagagagaggccctgggcttctggcacttaaaggtatgcaacaaagtgattctgtaagcaatctctctttggcctgttctttgtatactctcaggaccatggctgattcactccccaatcataagcaagctttcctgcttctctgcatttgtcctcactatccttttcactcgaaacaccaaacgttgactgccaaaccctcattccagccttcaaggctcagctccaacatgacctcaccaaggaaggcattctggcagagacctctcctcccactgagctcactctgccctgtactcttccccacgtggcctcagagctttgtgtaaaagtgtccctcacagccagttctcatctctctagagcagaggttctcaatccagggaaatccactctggtgctactggcatctaatgagtagagactagggatgctgcccccacagcaaagaattattggcccaaaaagtcaatagtcctgaggttgagaaaccctgctctagagtatgaactctgagtggggctaggcctgatttggctgttttcctagaagcttgcagcacagggatgcagaggggcaggttccataaatgcttgttgaaagaacaaatgaatgaaagatggagcctgtccccacatcccaggctgctgggcatcagagttcttcaaagctccatttgctactactcccctttttctcccctcactccctcccacatccacccactcccaggggccttctgagccctgcagagtggagacagctggcaactgcttcacttaccaggatccgttgattcctcttcctggggttggtggaatctttgttctcatacaaggtaaagcgcatgttgcctggactctgtagcttcccgttggagaactggactgtaagagtgcagcccaagaatgagatgagagcagaaggccacacaatgtaccacacaatgtacggtgggactagactgtcactgggagggagtgtcagaatggggatggcaaggaagctcgggtcctgacccaaagggaactggaggagatccggggccagctgagaagaggaggtagggaggtgggagaaccctggggaggggctgtgacaggagggaatgtctcgcggaaggaggctgacagcagaggcctggtacatacctaaagtgacagaaggaacccctgcccagtgaagagagggaaatgggggaggcgggagacctggtgggtgagggggtcagcagggtcctggacacagctctggggagcgggtgagtgggatgtcccaatctggctgggaggtagtgacagaaagacggacaggggagccctgacagagcccaggggagtggtggagactagaggggtcccggccccgctggggagaagcccaacggagggcgagaggacagctgaggtaccgagacggaaggggagagggttagaggagcactgctccagctccgcagtctttacccagtacagctctctggctcccgtcgggcgccccacaatactgccacctcgcactcggcaacacctccgccgccatctcgcctgtctgtccgccaagcacaggagttaagacagcagcagccacaagcgcacttttaaacacgcgggagcccaggccgcgctgcgggccggaaaaggcgtggccccgccgggcaccgcccacagcgcgcgagccgcgtgtccccgccccccgcgtagagaggcgtggtctccgcccacaaggtgccacacacccgcttgactggccgaggcgcagcacctgattggctcagcgctcgcgtgcactctgggttttgtaggtccagagcccgaggcgccaaaggcttcagcctaagcttgctatgagccttcttccggctcagcaccttctaaagagagtgtcgtctctctctcctaccgtgacaaactcatcttcccaagacctgaaggaccaagttcaaatttagaattctctgacaggaactgcttgagccccaactaaatgtggccgctggcgaatagccgcccctctctagggcttcccacccacccacgtggacatccagctctaggtacaaactttgtccacagtccgacaaacagctccccgccatgggctgtggcgtgcacacctgtggcccaatcaacactgaggtgatggaacagaagcccagccaaccccggagcctttgggcaggagattctggactggaatagaagagggagtccgagctgatggacatgtccctttttcactgcggattcaacccttcttctgcacggggagttttcagagcagaaagaaggcgaaagcagggcctttaagcatggacgctggccgaggccccctttgcccaaagatgcgtactattgaagggcaagaactccggttgactcccctctgtcttccaaatcaccttctttcaagactcttttccttccacacaccctcaacacccgcctccaacacccaggatcctaggaataaccctaaagcctgcatgcccctttgcctgagcacttgtcacgcttttctaattacccaatctcaaacgtaaagaaacactgcaagaaatgtttttgccctgaaccatttagagtaagttgtcaacctgataccctttcaaccctgaagactatagtatttcctacagacattccctaaataacaacacagccatcagaatcagcaaattgccgggcgcagtggttcacgcctgcaatcccagcactttgggagggagaggcagttctatcccttgattccaggagtttgagaccaggctgggcaacataacaagaccctgtctctacaaaaaataatattagccatgtgtggtggcgcacgcgtgtcgtcccagctactcgggaggctgaggtgggaggattgcttgagcctaggaggcagaggctgcagtgagctgtgatggtgccactgcactctagcctgggcgacaaaaaaaaaaaaaaaaattaaacagaaaagaatcaggaaattagcactggtacattaccaccatgtaatcctcacatcccatttaagttcacccattgtcccaacgtttgttgttagtttgttttttgagacagggtctcactctgtcacccaggctggagtgcagtgttgcaaccagggctcactgcagccttgaccttccaggctcaagtgatcctctcaccacaacctgggaatacaagtgtgtgccaccacactcagttttgttttgttttttcttaattaaaaaaattttttgtagagactaggtctcactgtgttgccagggctggtctcagactcctgggctcaagtgatcctcccaccttggcctcccaaagttctgggattacaggcgtgagccattgcagctggcccaatcatgtttttatagcaaaaatgtcctgtcaagaatcatgtgttgcatttagctctcatagcctttcctcccttagaaggctaccttgcttgaccccacctcatgattttggattgaattgttcaggaaaggaaaagggaagaagaagaaagaagaaagaaggatgaagaaagaagagcttaattgtgtgattgtctcacccattgattgtttcctcactaaacttacttggggttcacaataaacactttggaggttaataaacaaatttatgtttgttttgatcactgctttatc

SEQ ID NO: 588719 - DNA, 4001 bp, Homo sapiens
gggaggctgaggcagagaattgcttgaacccaggaggcagaggttgcagtgagccgagatggcaccactgcactccaacctgggcgacacagcaagactccgtctcaaaaacacacacacacacacacacacacacacacacacacatacacacattaatcagttaataaagagcccttcaataataacagcaatcacttcccattatgacaaaaacacattctaaaaagtgctctcaacagtgaagacttacttccaaatccattaatcctctgccgtccagactttaaaactgttacttaaggctggcaaccagattttcctctactgcacccctttaatgggccaaatttcacctgttacagactcagaaggcaagacctaaaaggtgtactctgctggggctgtcctggggacagactggtctctcctctcactgccaaaaacacctatcaccaagaagccaggatttcactctcccatttatgctattcagtaagggcgcctcctgtcacaaagtacaattctagattcaccctgggaatggagtcatttagcttacaccacagcccgcgggtaggtgagtcgccacagccggctcagtaaccccatcccagtcagggccacaaggctcaagttgatgtcagccgtcaccactacagggcgcttcaaaaatccccacatcttgtagaaaagcgggctcaggcagacgccctagaaaagaagggaggagccgtggtccatgagggctcacgagaggctacagaagggatccccagccacccggctcccggacacacgaggagaaccacagcacagccgggctgctgagaaagaccgaagttcctggagccttggttcaggtagacatgtggggtgaggggcactagcagtgaactcgggtgggaattcaggggatctcaggactggacattcactcctttcaacaactcattccacaaaacctgccgagcacgtcttgggcgcgagaacactgctaaggaacgccagggtttctcccctccctccccgacgaccagaagcccacagtgcggccacagctacctgaccctgggcagctcctgggtgccatctcagctgcttacagcccagggaccccaacctggccgagcctcggggcctcctcatctctcctcaaggatgcatctgcccccagtgcctccctgccttctatcccagcggcacatcatccccgggtgctccctttctcgcctggagggtgcatttgcaccctgcgcccccacgttctcctccaggcttcatcttcccttgagctccgcttctcttgaggctgcatcaggcctgggacaccctgtctcacaccaaagccgcatctggccgttggcgccccgctggtctcctcaggccccatctaccctggacgcgcccttccctccctgagctgcatctgccttgagcgccttcgtcccaaaaggtcccatctgtcctgggagtgcctcctctccccttgcagaccgcatctccctggccggcccttcttccccacaggccgcacctgtcccgtccaccaactcccgaggctgcgtcggccccagctccgtcctcaccctgagactgcacccgcagcacgcccttcctccctagggctgcacgcgccacggagttcttacttcggggctcggccgcccgaacgccgcatctgcccgggcccgaaccccgcccccagctccggaaagacggggacgcccccggccccagcccgtccgcaagccagggacccgcgtccggcactgacggactcccccaagtccgggctgggctctcgtccccggtgtccccaaatgtacccgcgtttctccgagtccacacagagccgcgcccggctcccggcaacgcctcggaaccgtccgactgggccgacggttgggggtgaggccgctcggcactccgcaccacccaccgccctgctcaacgttcgattcaccgagcctgcggggccagacgggcagcagcgcgcgtgcgcactgggagagggtgacgcgcgtgcgcagcgggcgagggcgccggtcccggaggagaggcaggtgtgaaacgcggcgacctcccctctctcgggtgctactgttttgtgtgccaggatttctgtgtactctaagcagacgtgcagattttaaaaagcgcagtgggctcccacccatcttctgctccttgctttttcactccatctggcgtgaagatcttaattctgcgtctgcacaacggcgttctgccgggcgcgccagtttgctcctagtttttttcttttcttttcttttctttttttttgagacggagtttcgctcttgttgcccaggctggagtgcaatggcgcgatctcggctcaccgcaacctccgcttcccgggttcaagcgattctcctgcctcagcctcccgagtagctgagattgaaggcgcacgccaccacgcccggttaatttttgtatttgtagtagagacagggtttcaccatgttggccaggctggtctcgaactcctgacctgaagtgatccgcccacctcggcctcccaaagtgctgggattacaggcgtgagccactgcgtccgaccttaattttttttttaagacacggggtctcgctctgtcgcccaggctggagtacagtggcaggaccacggcttgctgcagcctcgacctctctgcccgaagcgatcctccctcctcggcctccagagcagctgagaccacaggcacgtgcccccacgcccgcgggcgctcctagtttccttgccgaaaaacatcgatgccacgatcctgcttgcacatacatctagcggtgaagtggctgagggtaagggcatttaaaacggacctagggccgggggcggtggctcacgcctgtaaccccagcactttgggtggccgaggtgggaggatccgtgagcccgcttgagtccaggagagcctgggcaacacagcgagaccccgtctctacaaaaaaatacaaaaattagcggggccccttggcgtctgcctgcagtcccagctacaagggaggctgaggcaggagatcacttggggcagagaggtcgaggctgcagtgagccttggtctcaccactgcactccagcctggactacaaagtgagaccgtctcaaaacaaaaaacaaaaccaaaaaaacctggacatcagtgggggctgcatgaccatcagaggctccagtgggggcatctcccctaaactccgtggcagaagactggaggcttcttcctccattcccagggctcctcctcatccatcagcctctccagccccctctgctgagggtcaagagccttcccaaaggcctgctttggagcagacatggtacttttggttgggtcaatgcaccccttcccatgttttccctgaacagtcggcacccagagcagggtaactgacagcaacgcaaccaggctgatggatcactcttctcagcctcgctccttcttgatctcctggtctatttgtatgttaatctatacagaccaaaagggcacactgcaggtttaataaccttcattatggttcttggctgcctgcaagactttttttccatgttgggcaacatagcattagatgacaccagttagaatttcgtggttacttctttatggcttacccttgaggggttatgtgactcacccaagatcccacagagaggcaaggagctggggctcacctgggtttgtggccagagcctgcaggcaactgtatttacagtgggcagggagggttccctgggccccaggagggagtggggctgggctgttaagctttggttcatgccatgctaacagtggtggtgcctcaggacttacagcctccatcttgcaagcccccaaccttaggactagcctctttcagggctggtctccgtttgagattttgtgagccacctgtccctagggagcagtaaatcagggcagtgagtgtggctagttaaagctgagatgcccatggccaggtccccaactctc

SEQ ID NO: 588720 - DNA, 4001 bp, Homo sapiens
tccttttccccactttattaccctgaaagaggagcattattctttattcagtggagatgactggcagcagggccccatctcctgtcatactggtcactggcataatatgtggtcagcctattcccaaactttcagttcctctaactttccccagcaacttagtttctctgccctctctcatgccatgttacgttgtaaacaaaaataagcatggggccatgtcccattcttcctcttctatgagcatcttagatatgcctaccttttaagtgattcctctttaagcaagttggctttttctctgaatgctaaaagacagtaagggagtagtgggaaatgcataaagatcttttgagggatggagggagaggagagaaagacaagtattataatctcttttcccactacccgatccacaaatatggatagagataataaattatagagataataaagtaaaaaagcttaccaagaaaatcaggattaagaagaaatctcccaactgtggcaacagatcttcagggaataaactagaaaaacctatgtcttggactttaaaaatactgtttaaaatctacctcaggaaaaggactaggattagtacatgacctgtctgcatgtatatttacagaatgaacatcatgtttctttctcgaagttcagtttacaagtggtatgttgatttagggattatcacaaaacacaaatcttactgataccaacttttaacagcaacagtataaccacctcagcttgttttctttgcagttgtcctggaaacataaacagttgttgaataaatatacaatagaggattttttgggtttttttgctttccctaatatggctgtgttcagtaatggccagtgtgtgctccagcctagcagcacatcaagatcatgggacacctgaaatcccaaaggaagcctgaaatgcctaagagggacaagcgggatggctgctggtttaggttgacatcatcgaatgtggaaaccttcagacttcctggtgccataatcaatgagatggtgtcatcgttgactccacagtaaaaagaggaccggagcattatggggtgagagccagcaatagtccacgatgctgtactgcatgtagcccagaaaaaagccaaaagctacgtcggtgacattgtgccgccccagcatgaccctggataggcccaagacgaaggcccacagaaccaccagcaccctcagtggaatggccagcaccaggtggttcaggatgaacctcgacatcagggcggcccttgtggcatggcccgaggggaaggagtacttgtccaccgagagagtgacaaacatgtccatctggttgtgggccgggcggcgcctgcggaccagccctttgatcaaggccaccagcagcaggtccaacagcagggcgaagagcaggttcatcagcacctcgcgcccggcccagctgtcgctcctgcacaggcagtagagggtgcccagcagccaggggatgccgtgtcccgagatctccagcagcttcataaggggtcgcacgctgccccacgacgagctctctcccgcgcacacccccagcttcttggacagccacaggtcgatggccagcagggagcgcagggcgatgcccaggaaggacgggttcaagtccatgcggtcctcctcgggcagcggaggcgcgggcgactgcgaggggcccgccgcggccagggggaaggagccgcggcggtgaactgggctctccgatgcacggagccgggcgcaggtggggtccacggccgtggcgcggctgctgagcagggactggaactcaaacctgctgccgccgccaccgccgccatgggctgggctgccggggctgctgctgctgctcgaagcggagacgcccagcggccgtccctccatgctcctccggggacttggcatcgcagctggcggcccggatcccgggacctggccggaccaaacagaggcttcccggccctgcagcctcttccgcttccgcactaccatcccggaggggcggggagaggagccggcgagagcgcgattgtgacacctggtggagacgtgggagggagttggaatttccaatgtgaggagagcagaggggaggatgttggcgttgggaggtacaggtgagggagtgaggtgatggggaaaatgtcagtgtctgtaggagcttaagagaaatagagccccgtgtaacaaaacaaagcaaagtctgttttctctcccttgtttgttgttttctttctttttaagatttcttgcccaggagtgttcctgcctggcaaacaagatgtgtacctcggggtctacctcatgaatcagtacctggagaccaacagctttccctctgcgttccccattatgattcaggagagcatgagatttgaaaaggtgatcttgactttctcattggcttttgttgtctgaagataacctgagagttcttataaagaacagagttcttacagcattatttggtaaatttcatttttaaaaaaattatccgaaagcacttcagcacaatgcaaaaccgcagtcggaacacttgcttttgtaatgcaggtctgagccaagttctgtcaatctagtgctaaataccctggttgatgtttcctattcttggaactcccatggcatttttttaactggagcaaagagagcatttctgaatgtttttggaggtgttagaggtaattgcattacatttacgaaagggattattaataaactgtggaccttagaaaaaactgtgttagaccaagaaaaatagcgaaaaaaaaataatgaaattagttaaatcctgtaactaaaatcctgtaacaaaaaggctgttcagatttactgtttcctcagatcatacctagattatttagctacagtgataaaggctagattccattctggtgaataacatggtgatataaatagtcaaaacattaccagccttcttcacactaaactattcatagaatattgatgttattactatgtcatcactgacaatctcttaacatttttgttttggaatttggagatggaatcaattttaaccttaataagtctaatgattttgccccaaacaatgtcattgagggagatctggggagaaggaaggctacagagtagagcatgtcacatttttttaaaaaaattatactttaagttctagggtacatatgcacaacgtgctggtttgttatatatgtatacatgtgccatgttggtgtgctgcacccattaactcattccccccaccccacgacaggcccctgtgtgtgatgttccccaccctgtgtccaagtgttgtcattgttcaattcccacctatcagtgagaacatgcggtgtttggttttctgtccttgtgatagtttgctgagaatgatggtttccagcttcatccatgtccctacaaaggacacgaactcatccttttttatggctgcatagtattccacggtgtatatgtgccacattttcttaatccagtctatcactgatggacatttgggttggttccaagtctttgctattgtgaatagtgctgcaataaacatacgtgtgcatgtgtctttatagtagcatgatttataatcctttgggtatatacccagtaatgggatggctgggtcaaatggtatttctagttctagatccttgaggaatcaccacactgtcttccacatgggttgaactagtttactgtcccaccaacagtgtaaaggtgttcctgtttctccacattctctccagcacctgttgtttcctgactttttaatgatcgccattctaactgtgtgagatggtatctcattgtggttttgatttgtatttctctgatgaccagtgatgatgagtattttttcatgtgtctgttggctgtgtaaatgtcttcttttgagaagtgtctgttcatgtccttcacccactttttgatggggttttttgattttttcttgtaaatttgtttaagttctttgtagattctggatattaa

SEQ ID NO: 588721 - DNA, 4001 bp, Homo sapiens
taggagaattgcttgaacccgggaggcggaggttgtagtgagctgaaggttgtagtgagccaagatcgtgccactgcacttcagtcttacagcctgggtgacagagcgagactctgtcaaaaaaaaaaaaaaaaaaaggaacaagaaaacctcgaaggtggcagacccagccatctcctgcatgaagtatccaatggtttctgcctccccgagtcccacccagagagcatagagcctccagactgagactagagcagggagatacgtgtttttattgtaacttcctctggaactgatgttctccgtggtccaacccaatgcccttttggaactgagaccccttgttaatgtttgccttgcctgagacctccacctcacatgtccctcaaatgatggccacaccgggaaagacaaggaaatcgatgcgggcctggcgtggagggtggaagcttcctggggcaccttggggacctggtggtgcccgaagggtgggccggacgggggctgggcatcacctctgggtggagggaatggcttgcctccacatgggccccacgtggcacctggcacagggcggtgctaatctgcaagacattggtggcaaagactttgcaaacaaacaaacccacaactggccccccgaacccttctccagtgactccccctgggaaggagcagggaagaactccagggggctgtgagtgggtggcagtcccaggggaactccctgggtccccagaccctggggaagaagcctgggcagctttcccggttcctgaaccgaggcgggaggtgctcatggggcagctcacgggaacagcctggctgggagctgtcaaggagcgaggacctcagccgtggggcaggagtcaaacagtgacaccccattccaggatgcccaccagagccctgaccgtctcccttgaggccaccgcctctggcccagcctcccttcaagctgcctctgggcagcggtgccttttgctgagcaggtccttctcacagggccgcaatggcctctgtcttcatttggcatgtggcaggagagcctcgtctatgcatccctggctgtcgctcccccacgccggagcctgcctgtttctggggcacccttcctgcctaacctcattagaccatcccagccggtttctgagggctgtgcaggtcccggccagggtggggttgggcaggccaggctgcctcccgaggggcctgacagtgagtggcgggcggcaggcacactcacccaggagcagattcatgagcacctcctggccggccagtgtgctgctcttcaccaggcagaggatggtgcctccgatccaggggatgccgtggcccgtgatgccgatgagcttgaccatggagcgggcactggcccaggacgccgcccggccagcgcacacccccagccgcttggacatacagatatcgatggccagcagggagttgaaggcgatgcccttgaaggaggggttcagctgcatgcagtcctcctctggcagctgctgtgactggcgtcgctctctggccccgtcaccagcaggtgggggctgtgctgatgggcccgaggcctttctgcccgagctgcggggctccgggccccccttggggggctggttcagggacaggaactcagcccggttgaggacgttgttgcggtcccgggcacgggcccggctctgggaagctggcatggtgacctcgctcaccccgagaaggccgatgccagcccggctccaagggccttctccccgaagacaagagctgcccccagagccgccaccgtggctgcctccctgccttctccgccgcagctgttaaatatagtgtggagagttgcacatggctgtttatctcctctgccacccagctccaaggggacgtcagtgccagccgggcagccaatcgagccctccaatgcggggcctgcaccagcagagcctccgggaggtgaggagtccacagctgcggcctggctgcctcgggcctgggctatttaaatcggccaatggctcatccctgggcttgggggactctgggaaatgtagtcctccggctgctctggactctgcagtggccttggcctctgaaggggcagaggtgggacctgggcttaccctgcttttaccagcttccctctgagccgtccagacccctgcaagtcaggcctgcctgccccagctgccgggcagcttggacctggtcctgtaaactggacggtgttgcttgggccgaggcctctttgggcaccagatggagtgaacgacgtcactgacagcatcatcttgggtccctggggccaggtccagctcctccctctgtgacagcattcattcagctggcaggtctttttttaaatcagtcttgaattcagcttcagtgcatcacagtccaatcaaacgacactccgtgagctctgatttccaccggagggaggggtcatgagttggttggtaatggattgcctcttggaggttgcctccactacctggaacttcgcaaaggacgggagtgtgacagcagcttcaggcaacccgtaaatagtttccgagcgcctggcagtgtgtcagtgctgggcgcactgcgaaaagctcacagctcagtggggatggaaagaaggacacgtgtaagtggtcacaggtgtgcaaatgtgtggcaggatcctagaagcggggctctgggggctctgggtctggtctgggaatcagggacggctgcccccaggaaggaagaacaaagggggagtcccattcggggacagcctgccttgcaggaggcccaggaggcccgtgtggctgcatggggcccaaggggacgagaggctgcaaacccagaacgcagacccagagggcccagctgaggattccggatgtgagggaggtatccctgctcccatctggaccacctgtgggaacccgaagtctccacagcccttttagggctgattgggcctgggctcgatgggggaagctgccaatttaagctgaccagaagagtcagaagtgagctcctccgtctcctgattctcagtggccaaggcctgtctgctcgcccagatgaaggcagggggctgcaacttctcttccaaccatggagccagcccacggtgcctcaggcccacctagagcctcccaagaacaggaagctgccctgggagggagtgggtgttccctggccatgggggatgggcacccaggctctggagtcagacagacggggctctgccccgccatcaaccagctgggagaccttgagcaactcacttggcctccctgggccttggtgtttccacctgtcgcatgggaatgacagtgtccacctcttagggctctcgtgagtccgggtgagacagtgtttgtgaaacgctgagctgagtccctgctgcagagtgagttaggaatcaatttcagccctgtgggttagtaattgatttcatttgacaaacgaggcacagccgtctcttccttttgagtgcccgcttcagaagggcccaaccctgtggtctggcctccacccctttcctggcagggatgaggccagagtccaggagccttcagtctggggttccctgcagacgccctggctgggtccagctgggctggagcaggctagacctgcctcattccccactcttcctctccagcgtgctccactcagactgtgcggccatagaggggatgtcgtggccgcgagacgtcctgccatcttgggtgcagcaatgatgacatgtgctgcttcatcccggacactagacggctggaacctggcgcacatggaagtgtgcacgccaggcacggatattgagcgtgtataagctctttgtgtgctgagctctctatgtgttcagcttatcgacaaagtctaatgacagtcctgtaacgcagctgtgatatccccatttacagacgtggaagctgaggctgagtgggtgaaggcctcgagccaggaagctgaaaagagaaggggtccggctcctaagtggtccctatggggggtgg

SEQ ID NO: 588722 - DNA, 4001 bp, Homo sapiens
tgctaaaaatacaaaaattagctgggcgtggtggcgtgtgcccgtaatcccagctactggggaggctgagacaggagaattgcttgaacccaggaggcagaggttgcagtgagccgagatcgcgccactgcactccagcctaggagacagaacgagactccatctcagaaagaaaaaaaaaaatcgaggggggtcgtctccccaggacagcttgtggctttaaaacattatgcgagatgaatcattcttgaaaagccccctgggtcggggatagtggctcacacctgtaatcccagcactctgggaggtggaggcaggtggatcacttgaggccaggagttcgagaccagcctggccaacatggcgaaaccccatctctactaaaaacacataaattagctgggcgtgggagcccacgtctgtagttccagctactccaggggctgaggcacgagaatcgcttgaaccagggaggcggagattacagtgagccgagatcagccattgcactccagcctgggcgacaaagcgagactctggctctaaaaaaaaaaaaaaaaaaaaaacaagaaaagccccctaatcagtccttagagataggtgtgggcccaagccagaggtgcaggctttgtcaaattgctgcctcaggatacggtcttgagggtggctgtggggacacccagcacctgcaccccaaggccacacggtgtcagattttaggaagcggtggagaacactcgggtaccttctcggtccagacatcaaccttctggagagaaccaaagcacccacactgggccctcgccatcctaacagtctgcccacctgtgagaaacgcccccaaatactctacatttctcggttggccgaaaagcagctcagccagcggtcttacctcccaggtggggtttccccccagggtagggaggccagggtctgcaggccagggagaggagccccggtgcaggagcgggcggggcagcaggaggacccgctccagccacccagaagtgggcgtgggctagaattcagctcccagccttccagaagctgcaattttacaacctcactacaagcgtcccccagcaaagctgcaccgccatttcctgtgcttgggaactgaaggcaaggtgagcccctcccggctgccccggcccgacctcccctgactcccaagcttgggctactcacggcctgcgggctgggcagggtcccccaagggagctcccctccccgagggcgcgctcaccctagccgctgggatcggcgacctggtcctcggcccggcgggagtgaacgcctcccagggaagaggccgggcctccaagcaggtctgcacccccggagttatgtttctgggatccgaggactagcgagcttggggcccgggagagcggccaccctcccggaagctccgcctggcgcagggcgtgaaccgcagtctccaggccggccgggccgcggccattctcggagggcagcggccgccccgggccgggccaaagctccccaccgcgggccctcacctgcgcctcacctggggctccaggagcgcggggcgcgcgggccgagagtcgcacggaggccagagacaggatccccgcccggggaacggagcagccccggcgccgatccccgtccgcctgcctcggggagcccccgccgcccgcccgccgcggcctgcacggcgcgccggccccggcctggctggccctcctgtccccgaccccccagcttcccagcccccgagccccccggccccggccctgcacccgctcacctccgcccgtcccccgccgcccgccgcgcggaccccgcctgcgcccgcgtcccacgtcccgggggaggcggcgggccgggggcgggccggaggctgcagggccagcgcgctccgccctcggccggggcgcggggagggggcgcaggggcgtccggccgggccccccgcctccccgcctccccgcgcgccgccgctgccgccgccccgcgcccgggccgcgccgtgggaagcgcgggaggggaggggcggggcggggggcggggcgacccccccaagccgccccctccccgcgacctaccggacggtggcggcggcggccgcactccggaagccgtgcccgtggctgggcatcatgggaatggcacggccgagttccgggggaggcgcgcggcccggccggacccccgcccgcgagagcgcgcccacctgccgccgcgcccgcgccccggggacgcccccgccccgccccgcccggttcggacgcggccccctccgcggggtgcggggcgaaggcgcttgggccgggccgagccccgtgctgcccgcctcccgtaccgcggccacctccggggggcgcgcagggggcgcggggtcgccgggaagttctgggcgcggggggcgtggccgtgggaaagcgctcggagccgcgggaagggagcgtgcggggccccggcgccaaccgagttcctccccgaagttcacgcggggctccgggctgagaccggcccgcccgcccctccagccccacagccttgggccggggtcgggggcggcccccgcgtgtccccgcggctgccccacccgagcttgcggcggggagtggacgcacgacctgcccggggcggcggctcctcgagcacacctgccgccaggttcgggggagggaacagtttctaggaactgccccggaccttgaggccgctgctgtttctgcttctgctgtgcactgaccatgtgaccttgaaagtcttcccagttttgttttataaaaggtccagggtgtgtgcccgaggctggcggtggcccgggtgtgctcagcatccccgggcggcggggaacgggcagacccgactggatcctccctcagcgcccactcgtggaaggggcagatggtgcgcaggggcaccgcgctgcttctgtaagccccctgggccctgatccacacgtgtctgggagatgaatttgtgggttcggttcctgtctagaaagtgtcagagatttgataggatcaaaatcagagacttgccttggaggggtgcttctagtcatgccagcctgggaagctggagggccagttttgggtcaggaaacccattaaagaattgttttaatgccttcgtgaattttttcaaaaagcaattttttttttctcatgaaataatactctttcattaccaaactttggggagatgatctaattaataaggtgacttcccagagacatgggctgttaaggttttggcatgctgcttcacagtttttaaaacagtgctgtggtgaacagctttcatgatgcctccttagagcggctctgagcatttcctgcgggcaaatccctagaagaggccggcgggccaaagactatgctgcattttgccaaaatgccctccagaaatgcggggccagcctgccgtccacccactggtgagcgggcatgcccgcttgcctgtcctcttgccagccctgagatatgtcattgcgttatgtctttggcagtctgataggcgaaacagcccttttcatcacttgaatcctaatttctttgactgctggtgatgttgaacatcttttcattttattattggccatttggaatattgcctgtctgtgttctttgcccattttttatttttctgttgggctgtgtgtctttttcttagggattctaagagcttgttaccgtaaggaatttagctcttctctgtgctgtatgctactctgtacaagagcgtaaatgcaatgtatggtcgggcgcggcggctcacccctgtaatcccagcactttgggaggccaagttgggcagatcacctgaagtcaggagtttgagaccagcctggctaacatgatgaaacctcgtctctactaaaaaatacaaaaattaaccgggtgtggtagcgggtgcctgtaatcccagataatcgggaggctgaggcaggagaattgcttgaacccaggaggtggaggttgcagtgaaccgagacggtgccacagcactccagc

SEQ ID NO: 588723 - DNA, 4001 bp, Homo sapiens
aagtgattctcctgcctcagcctcccgagtagctgcgattacagacgtgtgccaccacacccagctaatttttgtattttgaatacagacggggttttgccatgttggccatggctggtctcgaactcctgacctcaagtgatccgcctgtgtcggcctcccaaagtgctgggattacaggtgtgagccactgtgcccggagtcatcaccagaacttctaaggctagcttgttcaacccacagcccaggacagctttgaatgtagccggacacaaatttgtaaactttcttaaaacataggccaggcacggtggctcatgcctgtaatcccagcactttggaaggccgaggcaggaggatcacgaggtcaggagttcgagaccagcctggccaatatggtgaaaccctgtccctattaaaaatacaaaaattagccaggcatggtggcgcacctgtagtcccagctactcaggaggctgaggcaggagaatcgcttgaacccgggaggcagagggtgcagtcagccgagaccatgccactgcacttcagcctgggggacagagtgagacactgtctcaaaaaaaagaaacacaaaaccattatgagatttttttttttgcgactttttttttagctcatcagccatcgttagtgttagtgtattttatgtgtgacccaagacaattctgcttccaatgtggcttagagaagccaaaagagtggacaccccggttttttttttggggggtgacggagtttcactcttgttgtccaggctggagtgcaatgccgcgatctcagctcaccgcaacctctgcttcccaggttcaagcgattctcctgcctcatcctccctagtagttgggattacgggcgtgtgtcaccacgcccggctaattttgtatttttagaagagacggagtttctccatgttggtcaggctggtctcgaactcccgacctcaggtgatcagcccgcctcggcctcccaaagtgctgggattacgggcatgagccaccgcgcctggcctggacatccttgttctaagggcacacacccagaggttttgtacaaaataaatgtctggttttgaatgtcctaagaaacggaacccagctctttgttcacctcttttgtggggcatggaggggatgccttttctgattttcaacatttctccctcctgagaccttcccagggaccccaacattggagacaggatagcaagaatatcaaatgctttcaaaacattagctgtgtttggtcggccaacctatttgcctctgtcgggaatgtaaaagttatctatggccagtccttcttagttcaaggtaggtcggcaaacagccttctccttctgcacaaaaagggtctctaagatccttccgtagcacctccatcccagttatttaagatgaactaaaaagaggctacaaggtaaataagagttaccgaaggagatgccggagagactaacctccttgcacaaccagccttttaaaattagggatttagacaccacgggcagtttccctcaataaattctcaggcactggaaccagagagtaggaggatgaggggtgagcaggacgcggaggccgaaactggaggcgaggcgggcgcaggcccacggagcaccaccccatcccctaagcagcgactaataaagacggcagcctccggaatcactttcgcccccctccctggcagcttccccaccgagtcagcagcttacttaagcacgcgctgcccagagatgcaaaaggcccccttatgaccacggcgctgcccacccagcattcgggcagcctggactcccacaaaacccagagttgcgccccaatcaccacccctttgcagcccctggttccctccccagcggcgccccaccacccacctctcccctaaggccattcaactcagtccctcctcggggcccctcagcttttgcccctccagttcctccgtgtcatgactctcgccctcctgagcctcccacacctggcaccgcccccaccctacccgaccccggcccggcctggccccgccggccttacctggcggcggctgccgctcgccctcagccatcttgctccggccaggagccgacccggatgcttgcagtcccctctcgcctttcactcttgcacccacccttcctctccccggctccaccaaaggctccgagcttcctgaagacaagtgagcgccggccggctataaccgaaaaccgagagttaaagtcaccacagcgaagacggccgccatgtcggtgcggggcgctcagggagcaagcctattaacggccggcgcgcggcggacgcgcggaaccgggcgacggccatgtcagtgcggggcgcgcggggcgcatgcgcgccaacggccgccaagcgctaggaccgctcacggccgcccgaacgtcgggcgccgcgactgccacgattgtgcggggcgtcaagtttgggttgtgctcagccatgtttttccgggacagtctcctgtcccggagtaccacctgtcatctttgtgggtggtactgaccctaacccaaggaatattagaggacattccccggtcaacatggttgtgttttcctatcactctaagagttaggctcaaggacaccagacggagttggaaaggtgcacaccactacctccaacagcttagaagacatgtggggacaggggagagacagctggacggtgacctcctccttcctcctccacaggtctcaatgactcgccctcggccctgcccctctgtccccgcccgccgtggtcccgcccccgactcgcagccagcctactgcgacccgctaccgggcgacgccccgcccctccgtccccgcccctcctgtccctcctcaaggagactccgccccatcgatgccccgtccccgccccacagccaacctcccgggcaccgttgcccgcccggggcccgctaccggcccaggccccgcctcgcgagtcctcctccccgggtgccttcccgcagcccgctcggcccagagggtgggcgcggggctgcctctaccggctggcggctgtaactcagcgaccttggcccgaaggctctagcaaggacccaccgaccccagccgcggcggcggcggcgcggactttgcccggtgtgtggggcggagcggactgcgtgtccgcggacgggcagcgaagatgttagccttcgctgccaggaccgtggtgagtgcggcggatcccgggcctgagggccctggacggcctgggcgggccgtgcggttgcgtccgggaacggagaccgcgtcctgcggccgctgttcgacccggcctccagctgatggggtggggtcaggcgggcgtcccaggtttggcagagcaggagattggggcgcaaggtcagaagcgggattaaacccacgtcctggagcattcagttccaacgacccaggaaagacaagggggaccccggcttcagttagcacccccacccttagacccagagacaggccggtaggggagagagaccaggagcatccagaccctagctcactctcccagttattctccgattgacacacccgtcgcacgcttaggccagagccactcctccgaccctgtccagttggtcacactcctttggtttatcagacggtccctggggaattgtgtgtggccagagaaacacgcggaggcatcaagctagaaaggcctcagaactggcaggtggcagccccatggtctccctcccctccagcccccttccccaccctggctgtatccttccctccagcccccttccccaccctggctatatcctcccctctagcccccttccccaccctggctatatctacccctcagtcctccccggtgagcagcccggatgctagcctaatttcagtcccttccgtccctgatccaagcatatgttgctggtgtctcactctgtctcagacacacactacggggccagagggcggagggtgcatccaggctcaggcctagaggctcttttag

SEQ ID NO: 588724 - DNA, 4001 bp, Homo sapiens
ttcgagaccagcctggccaatatggtgaaaccctgtccctattaaaaatacaaaaattagccaggcatggtggcgcacctgtagtcccagctactcaggaggctgaggcaggagaatcgcttgaacccgggaggcagagggtgcagtcagccgagaccatgccactgcacttcagcctgggggacagagtgagacactgtctcaaaaaaaagaaacacaaaaccattatgagatttttttttttgcgactttttttttagctcatcagccatcgttagtgttagtgtattttatgtgtgacccaagacaattctgcttccaatgtggcttagagaagccaaaagagtggacaccccggttttttttttggggggtgacggagtttcactcttgttgtccaggctggagtgcaatgccgcgatctcagctcaccgcaacctctgcttcccaggttcaagcgattctcctgcctcatcctccctagtagttgggattacgggcgtgtgtcaccacgcccggctaattttgtatttttagaagagacggagtttctccatgttggtcaggctggtctcgaactcccgacctcaggtgatcagcccgcctcggcctcccaaagtgctgggattacgggcatgagccaccgcgcctggcctggacatccttgttctaagggcacacacccagaggttttgtacaaaataaatgtctggttttgaatgtcctaagaaacggaacccagctctttgttcacctcttttgtggggcatggaggggatgccttttctgattttcaacatttctccctcctgagaccttcccagggaccccaacattggagacaggatagcaagaatatcaaatgctttcaaaacattagctgtgtttggtcggccaacctatttgcctctgtcgggaatgtaaaagttatctatggccagtccttcttagttcaaggtaggtcggcaaacagccttctccttctgcacaaaaagggtctctaagatccttccgtagcacctccatcccagttatttaagatgaactaaaaagaggctacaaggtaaataagagttaccgaaggagatgccggagagactaacctccttgcacaaccagccttttaaaattagggatttagacaccacgggcagtttccctcaataaattctcaggcactggaaccagagagtaggaggatgaggggtgagcaggacgcggaggccgaaactggaggcgaggcgggcgcaggcccacggagcaccaccccatcccctaagcagcgactaataaagacggcagcctccggaatcactttcgcccccctccctggcagcttccccaccgagtcagcagcttacttaagcacgcgctgcccagagatgcaaaaggcccccttatgaccacggcgctgcccacccagcattcgggcagcctggactcccacaaaacccagagttgcgccccaatcaccacccctttgcagcccctggttccctccccagcggcgccccaccacccacctctcccctaaggccattcaactcagtccctcctcggggcccctcagcttttgcccctccagttcctccgtgtcatgactctcgccctcctgagcctcccacacctggcaccgcccccaccctacccgaccccggcccggcctggccccgccggccttacctggcggcggctgccgctcgccctcagccatcttgctccggccaggagccgacccggatgcttgcagtcccctctcgcctttcactcttgcacccacccttcctctccccggctccaccaaaggctccgagcttcctgaagacaagtgagcgccggccggctataaccgaaaaccgagagttaaagtcaccacagcgaagacggccgccatgtcggtgcggggcgctcagggagcaagcctattaacggccggcgcgcggcggacgcgcggaaccgggcgacggccatgtcagtgcggggcgcgcggggcgcatgcgcgccaacggccgccaagcgctaggaccgctcacggccgcccgaacgtcgggcgccgcgactgccacgattgtgcggggcgtcaagtttgggttgtgctcagccatgtttttccgggacagtctcctgtcccggagtaccacctgtcatctttgtgggtggtactgaccctaacccaaggaatattagaggacattccccggtcaacatggttgtgttttcctatcactctaagagttaggctcaaggacaccagacggagttggaaaggtgcacaccactacctccaacagcttagaagacatgtggggacaggggagagacagctggacggtgacctcctccttcctcctccacaggtctcaatgactcgccctcggccctgcccctctgtccccgcccgccgtggtcccgcccccgactcgcagccagcctactgcgacccgctaccgggcgacgccccgcccctccgtccccgcccctcctgtccctcctcaaggagactccgccccatcgatgccccgtccccgccccacagccaacctcccgggcaccgttgcccgcccggggcccgctaccggcccaggccccgcctcgcgagtcctcctccccgggtgccttcccgcagcccgctcggcccagagggtgggcgcggggctgcctctaccggctggcggctgtaactcagcgaccttggcccgaaggctctagcaaggacccaccgaccccagccgcggcggcggcggcgcggactttgcccggtgtgtggggcggagcggactgcgtgtccgcggacgggcagcgaagatgttagccttcgctgccaggaccgtggtgagtgcggcggatcccgggcctgagggccctggacggcctgggcgggccgtgcggttgcgtccgggaacggagaccgcgtcctgcggccgctgttcgacccggcctccagctgatggggtggggtcaggcgggcgtcccaggtttggcagagcaggagattggggcgcaaggtcagaagcgggattaaacccacgtcctggagcattcagttccaacgacccaggaaagacaagggggaccccggcttcagttagcacccccacccttagacccagagacaggccggtaggggagagagaccaggagcatccagaccctagctcactctcccagttattctccgattgacacacccgtcgcacgcttaggccagagccactcctccgaccctgtccagttggtcacactcctttggtttatcagacggtccctggggaattgtgtgtggccagagaaacacgcggaggcatcaagctagaaaggcctcagaactggcaggtggcagccccatggtctccctcccctccagcccccttccccaccctggctgtatccttccctccagcccccttccccaccctggctatatcctcccctctagcccccttccccaccctggctatatctacccctcagtcctccccggtgagcagcccggatgctagcctaatttcagtcccttccgtccctgatccaagcatatgttgctggtgtctcactctgtctcagacacacactacggggccagagggcggagggtgcatccaggctcaggcctagaggctcttttaggtgttgcaacaccctgagcctccaccgcacccttgtcactgtctcccaagctgcatccatcccacaaacagcctctagatcatcctccaggaccatccgactggactggttaccttcctgcagggaaactgaggcaaggagggacttgcccagagtcccctggacctgctcattcaaatccagcccaatcccagtgtcctttggtttatttttcataccaaaagtcctccgctcttggaccctagctgaatgagccacagctcaggaaaaaatgagtgttcgtagagggatggctcagatgggtcccaggagtcctggagagaaacaggaaataggcagggcttctggctgtcccatccactgatggccttttc

SEQ ID NO: 588725 - DNA, 4001 bp, Homo sapiens
tttggggggtgacggagtttcactcttgttgtccaggctggagtgcaatgccgcgatctcagctcaccgcaacctctgcttcccaggttcaagcgattctcctgcctcatcctccctagtagttgggattacgggcgtgtgtcaccacgcccggctaattttgtatttttagaagagacggagtttctccatgttggtcaggctggtctcgaactcccgacctcaggtgatcagcccgcctcggcctcccaaagtgctgggattacgggcatgagccaccgcgcctggcctggacatccttgttctaagggcacacacccagaggttttgtacaaaataaatgtctggttttgaatgtcctaagaaacggaacccagctctttgttcacctcttttgtggggcatggaggggatgccttttctgattttcaacatttctccctcctgagaccttcccagggaccccaacattggagacaggatagcaagaatatcaaatgctttcaaaacattagctgtgtttggtcggccaacctatttgcctctgtcgggaatgtaaaagttatctatggccagtccttcttagttcaaggtaggtcggcaaacagccttctccttctgcacaaaaagggtctctaagatccttccgtagcacctccatcccagttatttaagatgaactaaaaagaggctacaaggtaaataagagttaccgaaggagatgccggagagactaacctccttgcacaaccagccttttaaaattagggatttagacaccacgggcagtttccctcaataaattctcaggcactggaaccagagagtaggaggatgaggggtgagcaggacgcggaggccgaaactggaggcgaggcgggcgcaggcccacggagcaccaccccatcccctaagcagcgactaataaagacggcagcctccggaatcactttcgcccccctccctggcagcttccccaccgagtcagcagcttacttaagcacgcgctgcccagagatgcaaaaggcccccttatgaccacggcgctgcccacccagcattcgggcagcctggactcccacaaaacccagagttgcgccccaatcaccacccctttgcagcccctggttccctccccagcggcgccccaccacccacctctcccctaaggccattcaactcagtccctcctcggggcccctcagcttttgcccctccagttcctccgtgtcatgactctcgccctcctgagcctcccacacctggcaccgcccccaccctacccgaccccggcccggcctggccccgccggccttacctggcggcggctgccgctcgccctcagccatcttgctccggccaggagccgacccggatgcttgcagtcccctctcgcctttcactcttgcacccacccttcctctccccggctccaccaaaggctccgagcttcctgaagacaagtgagcgccggccggctataaccgaaaaccgagagttaaagtcaccacagcgaagacggccgccatgtcggtgcggggcgctcagggagcaagcctattaacggccggcgcgcggcggacgcgcggaaccgggcgacggccatgtcagtgcggggcgcgcggggcgcatgcgcgccaacggccgccaagcgctaggaccgctcacggccgcccgaacgtcgggcgccgcgactgccacgattgtgcggggcgtcaagtttgggttgtgctcagccatgtttttccgggacagtctcctgtcccggagtaccacctgtcatctttgtgggtggtactgaccctaacccaaggaatattagaggacattccccggtcaacatggttgtgttttcctatcactctaagagttaggctcaaggacaccagacggagttggaaaggtgcacaccactacctccaacagcttagaagacatgtggggacaggggagagacagctggacggtgacctcctccttcctcctccacaggtctcaatgactcgccctcggccctgcccctctgtccccgcccgccgtggtcccgcccccgactcgcagccagcctactgcgacccgctaccgggcgacgccccgcccctccgtccccgcccctcctgtccctcctcaaggagactccgccccatcgatgccccgtccccgccccacagccaacctcccgggcaccgttgcccgcccggggcccgctaccggcccaggccccgcctcgcgagtcctcctccccgggtgccttcccgcagcccgctcggcccagagggtgggcgcggggctgcctctaccggctggcggctgtaactcagcgaccttggcccgaaggctctagcaaggacccaccgaccccagccgcggcggcggcggcgcggactttgcccggtgtgtggggcggagcggactgcgtgtccgcggacgggcagcgaagatgttagccttcgctgccaggaccgtggtgagtgcggcggatcccgggcctgagggccctggacggcctgggcgggccgtgcggttgcgtccgggaacggagaccgcgtcctgcggccgctgttcgacccggcctccagctgatggggtggggtcaggcgggcgtcccaggtttggcagagcaggagattggggcgcaaggtcagaagcgggattaaacccacgtcctggagcattcagttccaacgacccaggaaagacaagggggaccccggcttcagttagcacccccacccttagacccagagacaggccggtaggggagagagaccaggagcatccagaccctagctcactctcccagttattctccgattgacacacccgtcgcacgcttaggccagagccactcctccgaccctgtccagttggtcacactcctttggtttatcagacggtccctggggaattgtgtgtggccagagaaacacgcggaggcatcaagctagaaaggcctcagaactggcaggtggcagccccatggtctccctcccctccagcccccttccccaccctggctgtatccttccctccagcccccttccccaccctggctatatcctcccctctagcccccttccccaccctggctatatctacccctcagtcctccccggtgagcagcccggatgctagcctaatttcagtcccttccgtccctgatccaagcatatgttgctggtgtctcactctgtctcagacacacactacggggccagagggcggagggtgcatccaggctcaggcctagaggctcttttaggtgttgcaacaccctgagcctccaccgcacccttgtcactgtctcccaagctgcatccatcccacaaacagcctctagatcatcctccaggaccatccgactggactggttaccttcctgcagggaaactgaggcaaggagggacttgcccagagtcccctggacctgctcattcaaatccagcccaatcccagtgtcctttggtttatttttcataccaaaagtcctccgctcttggaccctagctgaatgagccacagctcaggaaaaaatgagtgttcgtagagggatggctcagatgggtcccaggagtcctggagagaaacaggaaataggcagggcttctggctgtcccatccactgatggccttttcctggtgtctgctcccttgcaccaaccctaatttcaggaccgatcccagggctgtggtgtaacctcagcggccaggcagtctctgtcctccagccaagttttccctcatcaaaacgatcttcgcagattctgacaggtggattttttattaccttttgtcctgactccctggcactgagcccatgcagagaagaaaggaaagaactttccaggttcccttctactggaatgcccccccactagccctctcacctgctccccattcctctacttctgggagctcgggagggtggagcagcttctagagtccaggagcttcccctgccactgccacaacccccgattccaccacagccatcgccactg

SEQ ID NO: 588726 - DNA, 4001 bp, Homo sapiens
agtcctagccctgctcttctgaggacagttcatgctctgagaactcacaatagtatgtgggacacctcagggagctggtaacatttggggtacaggcagtgatgtatttactggtaaacaaattctccaaaacaaaacaaaaacaactaaaagcttttgttcttttctcaccatggctgatctaaagctaccaacatgacataaatgcgtgggaagagacacatgcattctggatctcccctggaaccacaggctccggctcacccaatggtggagatctgttagtgtgtgaggacttctgcactgaatgttccactagggaaaaggcttcctggaatgagagagctctcagtttctcttctaggcctcagatctgattttcaaaatcagcatagctggtgtagctagcatccacctctgctgtggagacacaattgtcagtctctgcatctgtgagcaacagacataatgccactttggcatcctagggagattccactgcagcctgactctactgcctctcctccgtaggacaactaactaaatgtctcattgtctccacctgggggtagggaccagtgtcggaggtgagagcactttctgggagaacactttgcttgccctatttagctggaggtccccttcattgaaattaatgctggtgtgggctgccaaccctggaaacccactgctaatgaggatgatggctgagctgggcacttagtccaggcttagcatttcctataagagccctgaagctagtttctgttcaggagctggagcaacaagtcaggaggaggccaaatgaactcctacccctcaaacatgcacagcgatttctggatgcattgtggggaatggggctgcaatctgccgaaggaaaagatgggattctgtcccctaagaaaagtgattacgagatgcccagcaaagacaaatatatttgtccctgttgctacaataggaagttaacaatctggcaagatatctgaacacaagcaaatgaaaacagttcacctaacacccatgcaaattataaatttcctcccatatacaaaatgatgagaaataacagcaaaaatgtatactttcttatttttgaacttttaaagttctagtttggtctttgaatcaaaacaaagtaaaagatgtttataaaagccatttccttttctttccccactatgctcatttgacttgctcttccccctatagggtaccctgagtcattcagagaaggagaattaatagcactgagttggtgatgaagctcctgttaggacatatggcttcacaaaaagaaatacttccagataagtcagagagacagttggacgtcttgagcaaatcttgaaagagatagggaagaaagcagaagttgttgggtggtgcttgtaagaaaaaggctcatacgatgaggaccagcttcttgtggatctccaggtctctgaccacagcactgaattcctcaaaggatatcttcccatcgccatccttgtccaggatgatgatggttttgtcgaccagctgctggagctgccagtccgtcaggttgttgcccaccatcatcttcagcacctggaagagctccccgttggaaatgtagccatctttatccatgtcgtaaatgctgaacgcaaacctcaacttctgctcctcgtcgcccttgacgctgaactgggaggtccccaggatgaattccttgaagtccacttctccatcaccgtcggtgtcgaagacgtcgatcactcgccgcaccaacgggttgtggcgcagctccggcagggacatgaactcctccacgctcagagaccctgatttgtccaagtccaacttcttaaacctcctgcccagccttttaatttcatcattgtcaaagtgggagcacatctccgccgggtaactggcctcgtttcccattgtggacatctggcaacggccacggctcaaagggtcggagaggggagcaggggcggtgagctcgggcggggctcgtgcccggacggttgggccatggggtgggggtagagggctcccgggggccctggtcgagcaaaagggcaggggagcggagggaggggcggcaggtcagagagggagcggagagaggagggaaagaaggagggaaaagggggcggaaggggaggtgggtgctgtctgggcaggagtatagggaggagagaatggagcctgggggtgcccgggagaggcagaggtggaaagctgggctgccccttctctttttccttctctcaaactccttgtacctttccatgataaccccaatttccctggcaattattttatctacttatttcttttttttttttctctgagaaagtaaaccccaaaggagaagggatcgcacctgtgttattcgctgcagtatcccagaagcacagtgcttcacaggcaatatgtgcttaataaatatacgccgaatgactgaactgcaaccaaggacactgtatacttgctttacagacctagtgtaaggatgaaacaaggtgacacatcaaggcattgatatagtatgttttccacgattccctgggaggggaagccgggattgacatccttctgtacctttttcaggacgtaggattcagagtgtttgtaagagaccaggcagataccgcgcagaatttcttacatggatcacctacaggcactaacatattcccgaggaatataaacaatgctgaattcagggcgtttttcaagatgacacaggtctcaagaacacaacctctgttactctgttccctcttatccatcatctcatgcccgagtcacatctttgttgttggtgcctggcggctattctgcagaataccttgggggaaggtctgcaatgtgcccaaagaagccttttgtgtgtgttgagagtgacagtcgcctctggatgatctcacttttctccttttgtttcaactagatttgttctttctgttgaagactaatctcacatgctccctcttattccttcttcctttcggagcgcatcaattactccaaatgcataagaaacaaatgtggttcaagagcaaacagttcaaagggacttgggggaacctcaggccactacatcaaactgaaagatgcaaacactccttcgctttaaaaaatgttggcaagttctgtgttctatagttcagccaaaatatcagtctaaagataaccatgctggaactagcaaaactaagccactgatcaccttatcattaagtctggccattttactttcctctataaacaaatgataatccatggatatgttttaaagctgattatgggcattacacaaatgaaaccccctttcccaattagactgttatattggaatgtttttttgtttcatttatttgcttgcttttcagttattcagagaaatgagcatggtacagtttgcatataagcctattgaatttgcaatattaaggataccaccttaaattatattacaagatgcctaaaatcagtgttggtctctaaatgataccaaccactatagcctgtgttctttctaaagcacaaagacctttctggactctctgggggaaatatccaggccctgcaggtgcagttctgaaaaaatcagaaacctcaggggcaaggacagaactctatcttttgggcatgcactggggctgggagcctctagaattgtgttatttctctcatcttgtgtctttgaccacagtgtagtccagtttcttggctgcaagtaaaagaatctacctctaagaagcttaacatgaaagataatttgttggaagaatctcacataatctaaagaagagctgaatgattcagtcttaggaagggtgaggatcccactgggtttaaggaaatattggaaccaacgcctcaggaccagttatgtaatttgcagtgtcctttgtttgaaaatgattgagagcttcaagatggccacagcagaacattaaaccaagtacgggaccttatgagactgcgtgggccacatgcccatgaagctg

SEQ ID NO: 588727 - DNA, 4001 bp, Homo sapiens
ataaaattaacaggtaagtacaattcagtcacattcacaacagcacgtgtggcctcaaatattatgcatacttgttgactgatgttaagtatcaacttactgtacaaagaagaaataaaacaaaacccacagtaatatatttccttaagaatacactgagtcggggctgggcacggtggcttacgcctgtaatcccagcactttgggaggccgaggcgggcggatcacgagttcaggagatcgagaccatcctggctaacacggtgaaaccccgtctctactaaaaatacaaaaaattagccaggcgtggtggcgggcacctgtagtcccagctactcgggagactgaggcaggagaatggcgtgaacccgggaggcggaggttgcagtgagccgagatggtgccaccgcactccggcctgggcgacagagcgagactccgtctcaaaaaaaaagaatacactgagtcggttaaatactagcacgagctgataagcactgctagaaacctaagctctgatttcagcaaatgcatagaaacacttttcaaagaagcagtatacctaggccggcgcggtggctcacgcctgtaataccagcactttggtaggccgaagcgggcggatcacttgaggtcaggagttcaagaccagcctggccaacatggcgaaaccccgtctctactaaaaatacaaaacagccgggcgtcgtgacgggcgcctgtaattccacctagtcgggaggctgaggcaggagaatcgcttgaacccgggaagtggaggttgcagtgagccaagatcgcaccgctgcactccagcctgggtgacagagtgagactctatctcagttaaaaacaataataataataataataataataattaaaaagttttaaaaaagaaaagcagtataccaaagtcattcctttacccatacatacatttactcttacttggactcaggagtaacaaggaactcacctcctttagaaaacgaagaaaatgaaatactgagttaagaaggggttaaggagaaagtatttgtatttattgagaaccaactactttatccacttcagtaagctcaacaacatactcagaaacgggattcacctctgaattagcaaaaccgacgatcctaaaaagcaatttggaggagtggcaatgaagagggacgacctgacgttcgctcccgccagtaccaaaccactcgggcccaccgccttccccttcctcagagacctaaacacactgaggccgcgttccggtagccggtggcatctcctgtcagacgccggccactccgcgctcctgtcacctccggtggaggcgaccccatcccgagggcactgccgcgggggctcggctccgactgcgggagacccagggatggggtggggagccgagccttctaaataaagctgttacagctgcgggtcctggggcagcccgaaggccagaaggggcgaccctgggacagaggccgcgacatccctcgggatccccactgaggcaaccgggacagcattcgacgactcggctcgcgagaccctcggcgtgacgccgggtaggaccgggtcgactggcaatgggggaggccctccaccgcgactggactggatacccggcgggggtcctggagaaaggaagggccggccggcgggcgccccacagccggaaggggcgagcccgcaaatagggctcaccttcaggtcgttctctggcaggtacttgcacagccgcgctatttccacatacttgtccaggtctagcggcgccattttaagaataacaagccgcggcaacagcggcggcggcggctgtagcagcggcggcggcagcggcggaggccgaagccggaactttccctgcgtcacgtccggcccgtgagtggcgcctgcgcagcgccgttaaagcgcgacccgtttctccccgctacgtcggtacgcccggcgccccctctggctgaaccccgactgcaggccccaagagagcccgcttcggtccaccccgcgaaacctgctgggacccgtagtcgtctgccgcgggggtgctgggatgtgtagttttctgttgtggacagccacccctctcttttcctcccgttcctccagactttcacctcccggcagccggcgaggcttttccgaggcaaaacagcggagtaggtggtcctagccactcactggtttgtttttccaacccttttaagcactctccagaatatcttcacttaacaattgggtaagcctggccgtagtaaccgtttgcacctttccaagtccctgtgaaaacctcgcctaagcctgtggcagagatgtcaggccccagtcttccagcctgaaaggaagggaaacgaatattattaaagcatttctgatgctaaatgcgatacaaatgatatttttccttttaatcttcgtaacgattgataggaaagtgaggctaggaaactgcagttcaccccaaatctcacagggaacaaaatggtggggtcaagattgaaaaatggcttaagcttaagcatgcttccagtgagaatcccacgagggcagggagttttttgctgtaactccagcaccgagaacagtacctggtactagcataccttcagcgttcgtttatccaaccactctttgctgagcaacaaagatgtgccaggtacagctcaaggcgcttgcagtacttcgtgaacaaaatagacaaagatctctattctatctgtagctacaaaaagtaccaaaattagcctggcgcggtagtgcgtgcttgtggtcccagctactctggaggctgaggcaggagaaccgcttgagttgggaggcggaggttgcagtgagctgagatcgcggcactgcactccagcttgggcgacagagcgagatcctcctcaaaaataaattagtaaaaggagctgctgtatgggactaggggtgggggtgcaatgcctatagctaagagaccagttaagagactgttatgtaatccaatagtagcaggcgctcaataaatatttgttgctcaagagaccctggaattaatcctcttgctctctaaagtatattttgtggacaattggctaaccctgaatgagatatctgggtgaacttctttgtattattcttgtaactcctctgaaagtatgaaattgtttcaaagtaaaattaatttttagaagtttgttgcagaatgaatgatgcccacaagcattcatttcttcattcattaaactaatagttacatagtgcctattggccaggccgcggtggctaatgcctgtaatctcagcactttgggaggccaaggcaggcagatcacctgacgtcaggagttcaagaccagcctggccaacatgccgaaaccccatctctactaaaaatacaaaatactggggaggctgaggcaggaggatcacttgaattgcttgaggcagaggttgcagtgagctgagatggcgccactgtactccagcctgggccacagagtgaaactccatctcaaagagaaaagaaaccagaggttacacagtgcttatgatgtgaataaaacagatatgatccctgccctaatcaggcttacaatctgctgggaagagacaaacagtatttatttatttatttacatttactggtttattattaatataaaggatattacaaaggatacaaatgaagagatgcatagggtgaggtaattaaaatttttgtttttgttgaggccgggtgcagtggctcaaacttgtaatcccagtagtgaagccaaggtgagcagatatcttgaggctaggaattcaagaccatcctggccaacatggtgaaacctgatctctactaaaaatacaaaaattagctgggcattgtagcacatgcctgtaatcccagctactccggagtctgaggcatgaaaattgctttgaggtgggggttacagggagctgaggtcgtgccactgcactccagcctggccaacagaaaaaaaaaaaaaattgttgaggtgaggtctt

SEQ ID NO: 588728 - DNA, 4001 bp, Homo sapiens
gccaggaaaaccggtcagagcccgaggcagccgaggcccggcccttccttccccgccgggaccccggcttcggtcctgcccagaccagccaaacccaagtcggccccaaatccagagaagccacccgggtgtggaggaagtcggatgtgcggaggctcaacgacctctcctctgtttgcaacctggagaccctccgtgccctggaaagcgagtggtgcgttggggatcatttttagaagtgggtttttagtctctccgcgaattctcaaagcattcgcaacttcttccatcctctgccccggataagtttaagaattaatgagccaacggcagcgagcggttttatgcacagggaaactgaggccaggtcctgcaaggaggtgaaggccaaccggagactctttcgcctagtcggcttccgggagcccactgtgtgtccaggctctgggcactggcagaggagccgggccgtgatcagcgctggggacagacctcgggctggcaggtgttggaggtgccaaagaagcaccggcagcagctggccaggctctgcgctcgctgtgtgaccccgggcgcgcccgagtccctctctgctcccaggccctggggtgccagggagggcggcgcccgggctcagacaaaccccgatgtcatctctctgggcggggaggagccgcggcggcccccagctccccgagggttcccctgtcgggcatctgcggcagggctggaagcggcgaggcgcacaagggcggcctccatgtcttacaaggttcccctctaagctacctgggaaaatacccggcgagcgggccggctgaaaggggggggttaaacggtgtccattgcggcgcggcgggcaatttgtcacgctgttaaagtgatcgcattcattcggctccattcgaaagaaattgctaattctaaattcattagccctggaagaatgctgtagcagtaaattgtagctcaatgcggaggggacttgtttaaaaggggccgaggaattccccttacaaaaaagggggattagatggttgacatagcgtgaatggaagtggaattagtcttcacggtaaattaagagaggaacagaaatcgtaaagggggaaaagagggcgacgcgcagagatgccagagccagggaaagatattgtttgcgggttgatgaatgaggaataagaacttgagacatcttaaagaaaagaaacttttctcgctctctctttctctccctcgctctccccgcggctttttctccccgcccgccctccctccaccccctccccagccccggctgccttttaaagttcttggtttaagtgggaactttcgtgggtcaagcccaagttaactaaatgaatttaaaaccccttctttttgagtcaactgctattacacgcctagtaaggctgtaaatgccgggaacccgccagctcaagcgcaggaggggaagggaggggccggcgggggcgtcggggccgagcgacggggtcgccggggtcggtccttgagccgggtgggctgcggagctgcttggtggctcgcgtcctggtttggcccatggggaaactgaggtgcaccgagcgccgggagagcccaggttggcgcgagtagcagcgaggccgggtatcccagccgcgtctcgcgcatcgccaggacgggaatgggggtcgccgggaggagggattgcgccgggctccgacggctggactcaccgccggagaaggactgcgccagcacctcggcggtgaaggctgtcttggggctggcgtggtggctcttgtcctcgaagagctgctccccgagcacgttgcgccagcggccgtacaggaagctgtgcaggatgtcggaggtgataacctcggccagcgccagtcccggcgccttcagcccggtcttgagcaccagggcctcagccgggagcacggagcccatcatgggcggcccggagctccccggcgccgggggacggccgggccgacgggggaggtgggcgggcgagaggggagcccaaggggcgagaggagagcgctgcgatggagaaggaaccagagcagggggaggacggagaggaggaggacgcaggagggagcgggaggtgagggggcgactgggaggaaagcgaacgagggggagaggggaagagagatggtgaaatctgtagagatggcaaaggcggcgcggagggtggagagacgcgggtggaggcggaggcgggtgcggggggtgcagggtgggtgagaggcgggtggttgcagggaagcggcagcaaggggctcaggcgcgcgctagcctctcgcacactcggccggggccgtcttccccttggcaaaatctcagcgcctttataggagccgcagtgaccctcctaattggttattaatgaccccctgacgtcggaggacagacttgttgtacccggctgggctcgaggagccttcgtcgcgagagcgcgaggggcgggggcgcgcggaccgctccaaacagtacccctccactcctctctccccttcctggtccttcctcccccctcctgtttttccttctctccccgtgggaagcgcagggcagggagggaggctcagccggctctgaggagaggaggggacggagaaggggagggggtgcggcgaggctctctaggactccagggaccaggctagacaagaggggacgcctggcttcgggccccgcgctcccctcaggcctgatctatgttcaccggcctggcccagcccggcgttcacctttactttgctgccccggctggccggcccagccctgcaccgctctccctccccggccagagcccgcgtcctcttccctctccggccctgcactccccgggccgccacagtcgccccgagctcgcgcgcagccctagttgccacgcggatcccctgctcagactgcgctgctgaagccggcgcttcgcttcatacgggccgcgccaactcggtcgctgtgcacggtcgggtgcgaaactcctccgcgggctcacggggctgccgaggcggggccgcagcggccgtcggggctggggctggtcccggcctgagacagcttcatggaaggccaggctcccggcccttgcggggccaggtcgggggtcgagatgggcggacaggaatcgccctggcagcctgtctctgggaaaagaatttcctacgggatatagggggattgaaaggggtcccgagacccttcctaggtgggagcaggcgtgcctgagagcgaagtccctcagaaactgcaggcagctccgcgagaggcctcagtgcgggttcggcttgcggcccggctttccggctccttgctgagctgcaacctcgggaagccggtggcgttgcggcgccccttccttcttgcctcctagttctttctttctcctctgcctctctcttctttcccttcctctcctctattcctcctgcccatcatcccaggagcagacttgctttgcggcggtttcgaggcacctcggagcccagcgatcccctctcccgaagcaggtagctgctgagcccagcggaaggccccgcttcctgcaggcttcgcggctccccagtgtcagcctcaagcctcggaccccaggccctgacatgctgggtgagggagctcaccccacctgccgcacttctggctcccatcaccagcctacaatttcagatgccgctaacagaggtgcctggaccctctcggcgtgggtcaggctcacggattagtctccgctggactgtgtggactccctagaccttctcctcagcgcggaggacttgggtggaagaacagcgagctgacctcccatgagcgagaccctgtccaaacgcctgttggcatagacgcccctccaccacccggacgcgccttggctaagagggtctcacacctggcgtccagactccagacccctggtccccagttcctgccagtagtctccggcatcccccgtccccgttgggacgcaaagggaggaaggcggcggtagctggccttca

SEQ ID NO: 588729 - DNA, 4001 bp, Homo sapiens
aggagtttcggggaaatgctgctgtgaagaaagacttgggcttggaactcccactctgtctttttgggggacaactcctctttggcagggagtagggcagctgcttttctggctcccaaagcccaagggtgaagaaaagtctgctggggaagaagagagtggagcttcctaaaagaactgagacctttgcaagagtgatagaggatgcccctggggaggggggagggggaaatcagcagttcatgggggaagttcaaaccccagagcctccttccaaagtcagtcggcttcctggatttgttaaaatggaatggggagacacggtaaggtgggaagggtgggaggggtggaagtagaggaaggaggaaaggggacactggtggaacttaaataagattttaattgttttttgttttaattttttattctagcaaacagcccactgaacatggcactaaacctctctccttcccaggcaggattacgccaaagggtaggtgtgcttttcattcatcctctcttagtaagtggtgcctgttcagggctggagttaagtttgagcccctctttccacaccgtgtcccttgatacaacagcaagacctggcctgaatagagctgagaaactcgtttaaaacaggcagaagggggctggggcaagggggaccctgtgggaggagaaagagagaagcacagagggaccaggaaggcatgggggggggtgagggagcagctggtgtttctgttcctccaaatatctgggcttcctgctcccccaaccctggagggtggggtgaggatgaaattagatacaaggaactctggggccctctggctgttcaatccaaccctcccatcccccaaaccaccaaaaacaaaaaggaaagaaaacccacaggggcacaagcacacccctaaaactcagaaaactccttggcacacttctcattgatggagatccggagctcttcctcctcgtagtcgtcaaagttactggcatccccagggcctgtgtacttcgggatgaagggagcttccaccttcttctcatagatggcgatccagctggttgtggcgaaccacttgtggttcttgatgtcgccaaccccgttcctgaggtttccgaagcgcttggtgaggtccacctgcagcaggctccgcagcagatgcttgaggtcagagctgagtttggagggaaaccgcaccctcccagagacgatcttctcgtagatctggatgggctggtcggcgtagaagggtgggaagcccacggccatctcatagatgagcacccctagggcccaccagtccacggccttgttgtagcctttgctcaggatgatctcgggggccaggtactctggggtcccgcacaaggtccaagtgcggcccttcacgcgcttggcgaaaccgaagtccgtcacctgcaggtagccctgctggtcgatgaggagattctcgggcttcaggtcgcggtggatgaggtcgagcgagtgtaggtactggacggccaggacgacctgggcggcatagaaacaggcatggggctcgctaaaccttccgacgcgctgtaggcgggagaacatctccccacccggcacgtactccatcaccaggtacaggtaggagttgtccttaaaggagaactggagcttgacgaggaacggaaagtcgatcgcctgcaggatgcgcttctcgttcagtatgtgctcgacctgcttcatcttcaccaccttctgcttgttgaggatcttcatggcgtagtggccgccggtctcctggtgcctcaccagcatcacccgcccgaaggagcccatgcccagcgtcctgagccgttcgaactgatccgagctggcggtgttttgagcggggtttccccatctgtagaggaaatctcctctggctttggctaggaactcgttcacgctctcctcctgctcggtgtccttcttggcgggggcgttgcccatggcggtggcggcggcaggggcgggggtctcgcggcggcggcggcggcggcggcagcggcggagatggcgccccctggggctggctgcgctggctgcggcgctgcgacccccgcccggcctccgcttatattcccagctacatgggaggctgagatgggaggatttcttgagcctgggaggtcaaggcttcagtgagccaagatcacgccgctgcactcaacaatatggataaatccaaaaggcattatgcaagtgagagaagccaactctaaaggagacttactgtatgaatccatttctatgacattccagaaaaggcaaaactatagtgtgagagaacagatcagtgattgccagggcttggggttaggggacggttggactatgaagggacagcctgagggaatgtgggaagtggtgggacatgtttgtatcctgattgtgctggtggttacaatgtattgggtggtggtctacatttgttttaaaactcatagaactggccgggcgcagtggctaaagcctgtaatcccaacactttgggaggccgaggcgggcggatcacaaggtcaggagttcgaaaccagcctgaccaccatagtgaaaccccgtctctactaaaaatacaaaaaaattagccaggcgtggtggcgcatgcctgtaatcccagctactcgggaggctgaggcaggagaattgcttgaacctgggaggcagaggttgcagtgagcagagatcgtgccactgcacaccagcctgggcaataagagtgaaactccatctcaaaaacaaacaaacaaacaaacaaacacctcaaagaactgtatacttccccccaaaattcagttttactgcatgtaatgttttattttaacacatacatatgatttcctttcttctgtttgctttgggtttaattgctcttatttcctaaggtgggaactaaggtcactgatttgaaatctttcttctattacaatcacttagtgctataaatttcctcctaagtattattttttgcagcatcccacaaattttggtatgttgtattttccttttcatccagctcaaaatattttctaagctcccttttcatcttctttgacagataagctatttaaaagtatattatttcgtttccaaatacttggggatttttcaagaattttcctattgatttctgatttaattccattgttagaaaacatactctgtgtgacctaaaatgttttacacttcttggggctcattttatggcccagaatatgatctatcttggtagatggcccatatgcacttgagaagaatgtatattctggtgtattctgctgtttgaggatacagtgttctacaaatgtcacttaggtcaagttggctagtagtagtgttcaggtcttctatattcttattgactttctgtttacttattctatcaattattaaaaacatgccacaggagtttatgagaagtcaaagtacatagatgatgggccttccatcactcccccaggccaccatgtcagccgccccacacaccctccagaagactgccagcactcagccatcacagggtgggttctgagctgctctccccagtcaattctgtacaaagattctgtcctacatcataaacactgagctacaggaatacccatttatcctcctattttctctccatcttgccctttaagtttgacagctaattctgcctacccaccctggctacaccgcctgtagctagtgcaagtaaacaacacactttcacctagccctgcaggctgaaaccaagcaaattggagaggaatccctgattacttgactccaagtagaaggtttctattgtgactgtgaattcttgccgctcagttcagcagatgttggtcaagcaggtgtctattgtgtgcaaggcctggttccgagtttacggtttaatctggggccagtacttgggtactgactgtatattcagagacggtcaggttagagaggaagaagaggaaaggagaaaaatctactgttgatcatctgaact

SEQ ID NO: 588730 - DNA, 4001 bp, Homo sapiens
gtgggcggatcatttgaggtcaggagttggagaccagcctgggcaacatggtgaaacccagtctctactaaaaatacaaaaattagctgggtgtggtggcgggcacctgtaatctcagctaatcgggaggctgaggcaggagaatcccttgaacacaaaaggcagaggttgcagtgagccaaggttacgccactgcattccagcctgggcaagagagtgagaccctgtcacacacacacacacacacaaaaagatttcactttgggtaaaaaataattacaaaacttcaaaagggagaatatcatgaaccactctagctgcaaaccaatgccagaactatgttagatctccagaagacaaatggaatcaatctgaatccaaatgtacactgaatttttgataagactgctcactcatagaagaaaaactatataacagattgtaagaaaaaggctctctgcatgataataagggggtaggcaaaatacagccttatagctgcaagtttaagaattgaaattctgccgggcacagtggctcacacctgtaatcccagcactttaggaggacgaggcgggcggatcacaaggtcaggagtttgagaccagccagaccaacatggtgaaaccccatatctactaaatatacaaaaattagccgggcgtggtggtgtgcgcctgtaatcccagctactcgggaggctgaagcaggagaactgcttgaacccgggaggcggaggttgcagtgagccaagatcgcaccactgcactccagcctggcgacagagcgagactctgtttaaaaaaaaaaaaattgtaattttttgacattataaaactgtggtatttaagtttagaaaggtattcattacacaaagaggtaaagatgggctcacaatttgcatcttaccagaggttatattaatatttccagcttcgatccctgctttaagtccgtctttccccaaaatcccagactctcctttggccagacgctccctctccttctcttccaaacttccataatagatgtgtggtttcttcacgaccggagcaactaagtcgtcgggtgctttagttttggttgcctgctaaatcaaagatctgcattaaactaaggtttaatcttggcaatttaccggacttcaccagaggatgaagctcaccctgagtttcacagtcctgtttcctctgtaattgaaaggacaaattggacactacttaagacgctcttcattgatttgaggaggtgaaggtagggtgagggtgtttcagtccctcactttggttgatgggattaataaaactagtgaggttctctcgggtattttcctatgaaaggtttgctctgaaatctgtttacttcattccgttggaagtgttcaatctcgtgttttatgcttcccggattactgcttatcactggggaaatactaaggatagatgaaataaccaacgcggtgctaaaggataacaagttacaacattacaagtgtatacatttcaaacgttcctagacgtgaggtagtaggagttagtaggtctcattaaaattctgagatctgccaaaggcataaaccttggccaagacacttccctatttcagagcaccgttactggatgagtcggaagagatgcttgccctttggggctgtagtgggagaggtgcaaataagctacagtccacgaaagcgcttagggatcaggaaaacggtggtccgctgtgtaggacaccgctgagtcccgcagccttcctcctcagccctccaccgccttctcccgctccttaacggccccttcccgcagagatccccttcccccttagcgctccctgccagagtgagctgggatcccgggctctgtaccgtggaagaggctcgcgaggaagccatgctgggctctggagccgcgaggccccagcgaaacccgaacactccctttcagaccgtccaccgcgcgcccagcagaggggaagtgcgtcactgacaggaagtgcgtcactgacaagacgtgggccaagaggggtcaccgcccccggagcggcgcggagcatgatggaagtcgtagtaggaaatggcgtcgtggcattgaggggcatccctcctagaacctccaggaaaagctcgcggaagacgaggttctgcggagagagaggctccaagcagtctgggaagtgtagtccagttggcttagcagtagtttcgttgggggggagccgaggttccgggaaggggctaggccggcttgaaaagaggtaggtgagtcgactcgcgcggctcggggctgaactctggagcgagtcaagggcttccggggtccgctgtgccccccgggcgtacgggggcgtttacgtcttcttggagccgaggaccatgttaccatagaaacccttgcctgggctccgaggtacaggcctggagctaggggacgaggactgttctcctccatggtccggaagtcttcccaggctccccctctgagcttgatggctcggcggtggatttgggctgcggcgggagattaagctagaagagcccgctagtgccaaagtcaaataaagacccggcggaggagcttcggcctgattttgttgatttgtcttcagcctggtctttgtatcagattgagagtaagatgatggataggaaggtgtcaggtaactctgtacgtctctctgccctgctggatgctggggcattagagacgaacaggataaggtttttatccccacatgggcggtgggagatcctcaaaatattgacgtttccctagctggccagatcctcatgcaaccccctagaacaattacagcaataatagatgttatttattgaacatttattaaatgccaaataatattccaagagcttactctgtattacgttattgacttcctacaacagcagagtaggatacagatgagggaactaaggtctagtgagaaatgaaacgaattgttcaggatcggtggtgtagtgggattaaaacctgtgccctttaacctctacagccagcacttttaactgttaatctatactgctccctagtggccagttttttgcagtttgcagaaaaggtaaaatgtatagatttttttttcccccttttaggtatccctatccctctctttccctctttggaactttggctttctctaccatttgtctgcattggaatctggtagaagataatgcctgatttagtacaaaggaatttgaaatgtaatgtgccagtgttttgtgttgataatatcacctgtagtatcctaagcttcatgggagaaggaactatttcttcctttgtatacttcacagtccttagtttcatcctagatacgtgtaataatttgtatctgtacatactttcaaggagttttcacttccatcattttcacttaatgcttatcatgttgacctttataatttttataggaggctaaaattattaaccaaactgaacagcttgcttcgatgacttctttatgtgtgaaataggaatcattttgtcaacttcacagggtttttgtgttaaaataagaatgtaaagaatgggaatggaaaaacagcacggtgctcaagaatgatctcaccttctagtcaacaaacatttactgactgtttttatagatacactctaggggatgctgtggagaatatacaaatgatgccatcaacagatattaaactcagttggggggttgtgttttctcaaaaacaaaacaaaacaaaatggtttttgttaacatagtattaccttgggatttcaggctgtggaatgctctcttgagcctttttttttttttttttttttttttgagttggggtctcatggtgaggtcatggctcacggtggcaacctgaaactcctgggctcaagtgatccttccacctcagcctcctgagtagctaggactacaggtacacactaccagcccagctattttttttacttttttgtagagacagggtcttgctacgttaccaaagctgtacttgagcctcc

SEQ ID NO: 588731 - DNA, 4001 bp, Homo sapiens
caggcgtggtggctcacacgtgtaattgcagcactttgggaggccgaggtgggtagatcgcttgagcccaggagttcgagaccagcctgggcaatgtgacaaaaccctgtctctactaaaaatacaaaaattagccagtctcataacccagtctctaaataaataaataaattttaaaacaaaatttaaaaaattctttaaggatggccgggcgcggtggctcatgcctgtaatctcagcactttgggaggccgaggcgggcggatcacgaggtcaggagatcgagaccatcctcgctaacacggtgaaaccctgtctctactaaaaatacaaaaaattagccgggagtgatggcgggcgcctgtagtcccagccactcaggaggctgaggcggaagaatggcgtgaacccaggaggtggagcttgcagtgagccgagattgcgccactgcactccatccagcctgagcaacagagtgagactccgtctcaaaaaaaaaaaaaaattctttattaaggataacactggccaggcgcagtggctcatgcctgtaatcccagcaccctgggaggccgaggtgggtggatcacctaaggtcgggagttcgagaccagcctgaccaacatggagaaaccccatctctattaaaaatacaaaattaggctgggcacggtggctcacgcctgtaatcccagcactttgggaggccgaggcaagccgatcacgaggtcaggagatcaagaccgatctggctaacacggtgaaaccccgtctctactaaaaatacaaaaaattagccaggcatgatggtgggcgcctgtcgtcccagctacttgggaggctgaggcaggagaatggcgtgaacccgggaggcagagcttacagtgagccaagatcacaccactgcactccaccctgcatgacagagtgagactccgtctcaaaaaagaaaaacaaaaaacaaaaagcaaaattagccgggcgtggtggcacatgcctgtaatcccagctactcaggaggctgaggcaggagaatcacttgaacctaggaggtgaaggttgcactgagctgagatcacgccattgcactccagcatgggcaataagagcgaaactgtgtctcaaaaaaaaaaaaaaaggataacactaatgcctattaagtcccattctacccatcaggataaaaatccacagctttggccaggcacagtggctcacacctgtaatcccagcactttgggaggccgaggcgggtggatcacctgaggtcacgagtttgagaccagcctcactaacatggggaaaccccatctctactaaaaatacaaaaattagctgggcgtggtggcacacatctgtaatccttgctactcgggaggctgaggcaagagactcgcttgagcccagaaggtggaggttgcaatgagctgagatcatgccactgaactccagcctgggtgacagagtgagactctgtctccaaaacatatatatacacacacacacacacacacacacacacacacacatacacacacacctatagatatctatagatagatatctatctatctatctatagatatctatagatatatctccccagcttcaataaggtaatagatggagaaaattccactacagaaagagtcaggatgctcaaggctctgaaatcatacctcaagtaggaagtagagagtgattctacatgcacacccagaagcctggtgtgcacggaccacatctgtctaaccaggtgagggactctgggtttctgggatatgtcactcggagaaagtttgaggaactggccttcaaccctgggccttacctgaggatctaatcgcgtctactgattttcctttatacttatcaaacaggctgagagtcgagtacttgcttttcccatccttgcccttggtaatttgccccaaacgatcggacattgcgatgaaatgtcatctagtaaggaaatttttctcggcaccgctcccgatctgcctttgaaatagagaagaaaaaaaaaaaaagagagagaaaaaaaaaaaagagtgtcactacagcagaacctctgatccagaggagtgaatccttcacgaatcatggatctccttgaagatctgaagatggctttggactgtccttagaaaactgctctcaccacccacaggctgttcattcacatttacagggcatttatgtagacaccccgaggcgatctgtggagtacccccccaacccccacctgctgttaattcctctcactctgagttggctggagtctactgcacaccaaccacactgacatgtaaacttcaacagagccctctccaagtcaaggacagctcaagatggaaaaataaatgctcagtactttaacacatccatgtataacactgaaaataaggctagcagaataggggaggtacacaacccacttacaccacggctgttcatctcaagggcaagcaaaaccaaatcaaaggagggcagccagagtattatccttcagaaataatcaagtatatacacttttcaaaataaacaactagtacccagagagaaaacatctgcttaggcaacaaaagggctctctaagctacacacatggaaaacagaaagcaagaactccccagggctagcaagggagagaccacatgggggctatgccatccgcacttgcccctttgaagagacaaccttgaaaagccctccaagaaagaagcttccctcctctgccactttctaatgtgctacaggtgtccatgagtctactagtgctctcctcatcagttcactcactcactcactcactcactcactcactcaaaatactaagcgcctggctgggcgtggtggttcacgcctgtaatcccagcactttgggaggctaaggtgggcagatcacttaaggtcaggagttcgagacctgcctggccagcatggcgaaaccctgtctctactgaaaacacaaaaattagccaggcatggtggcaggtatatgtaattccagctactgaggaggatgaggcaggagaattgcttgaacctgggctgcagtgagtcaagattgcaccactgcactcccgtctaggcgacagagcgagactgcatcttaaaaaaaaacacaacaaaaacaaatactaagtgccgaccaagggcctgtgtgccaggcactgaggactaagagcttcactgctttttattccatacccaaccttggcaataggttctaagcttccttaccaaaaaccaaacacttgatgggctcagtggctcatgcctataatcccagctactcaggaaggctgaggtgggaggactgcttgaagccaggagtttgagaccagcctggtcaacacagcaagacactgtgtctaaaaaaattaaaataggccgggcatggtggttcacacctataatcccaacactttgggaggctgaggtgggcagatcacctgaggtttggagtttgagaccagcctggccaacatggtgaaaccccatctttactaaaattacacaaattagccagagatggtggtgcatgcttataatcccagctactcaggaggctgagacatgagaattgcttgaagccgggaggcagaagttgcagtgagctgagattgccctactgcactgcagcctgggtgacagagggagactacatctcaaaatgaataaataaaaataaaaataattagcagggcatggtggcatgcacctgtagccccaggtacttaggaggctgaggcaggaggatcacttgagcccaggagcttgaggctgcagtgagctatgatcaggccactgtactccagcccgagcaacagagcaagatcctatctcttaaaaaacaaaacttgtaggccgggcacggtggctcacgcctataatcccaacactttgggaggccgaggtgggtggatcacgaggtcaggagctcaagaccagcctgaccaacatggtgaaaccccgtttctactaaaaatacaaaa

SEQ ID NO: 588732 - DNA, 4001 bp, Homo sapiens
gacaccctggcccccttccttccctcctcacccctctctcctctcccttccttcctcttcctctgtctctcctccctctctctctcctttccttgccttctcctttccttctttcccttcaccttcaagttgttcctccttctcttcccaacccctggagtctcccttcatcagggtaaaccgggacctctcctctgtcctggggttgggggaccggctcagagccgctgaggtcctcaaatgaccttgggccggcagggcattcccccagcacaaaccagagggcacctgctttcctccgggccagagtggacatctccctccccttttctactgaggagctaaaccccaactcctgggaggtctgctggcttcacactcaccccggagggtgcagccagtggccagtccactgtggccagtgagtggtggccgctgccatgagggagccagtggcttcatctcagccacaggctggcagaaggtgccccgtgaaaggcaggcgtgtcgcaggcgtcctcgtggacgcacatggattcagactaggctgcagccacctctgttttccctgcacctcctgtctctgaaaagccaaggaacgcagccaccagcctgggcaccctgagacctggaggctggtgccgggaacagggtcccccggggcgggtgggagggctgctggagtcaggcgggcacacttcaggggcccagagcccccagcaggccggcccatccccagagctaggggacaggggcctggtttcagatcaccgggcccccatccttagtgtgtgctgagccgcgaggactccggtcctcccctcccccactgaaccgtccggggctggggcctttgctttttctccatcttctccccgtccctccccttcttaccaagggctcaggaccctgccatcctgtgtcactttttgaaaaaggccacttgggtgggttgtttgtttttaaagccccttcctgatgacctttgacctctgccggggaagagaggcctggctgggccgttccaccgaggcagctgctcccggggcaaactggagggtgggggggggtgggcaggcaccctcgccccccaaagagcccaacttaagaccgaggaggagctggggcggcgctagctcgtgcgggagggggcgggtttgaaaccccaacgtgcagctcagcggctttgcccgactcaggtctctgtttccccagttgtaacccggcagcagccacacccacttcccaggctgttcgggagccgaatactggggagcgaaggcagcgcacttccccgtggggacgcaccccaagacccgaagagggtccccctcccccagcccagagtgctggtcaaccgccgtccaccgtcacttacacgcgcccccagaagtcctgccgccgaccacgcgccctgcatcttcgcccgccccgcgccggctccccggaccccgcgccccggccccggccccggccccggccccgccacccccgtccctggccggccgtactcaccatcctgcggcgccgcctcgctgccgctgctgcccccggacggctcccgtgctgcgccctcccgcgcctcggccctggccccggggcgcgccgccagccgcccggccgccgccacctcttccaggtccaggaggtggctcaccgagaagttcttgcgcgcctgggcgcagtcgccgggccccagcgcgggtggaggcggcggcggccccgggcccagcgccggcttgtccagggcgaaggcggcggccgcgctgtccatgcccgcgagcggccccgggggggccggcgggggtctcgggctcgggtcccaggaagggtcgcgggcgcgggtcggagcgagagccccggccgccccgcgctctgcccagctcccgccgcctcctagcctcgcggcccgcccggcgctgacgtcggggaaacaaactttccgccctccccttctcagccacggccgctcgctccggagccgctggtgcacgcgctgcgccggccacacgccccttcttgaagcaaacctcgccccccgtcctctcctccgccctctcctccccgcgcgcctcgcccgcccccaccccggctgctggcgctgggggcggggaaggggtgtcctcccttcaccctccccacccactttttagggagtgggaggttccgtgttttgtcgttttccatcccccaagtatctgggaggtgatggcagagggattccccccttccctttacaatcgcctccgcaggtggagggggcggcccagagacgaaggcgacgagccccccactcccagctccagcctcactcgcctcagcgcccccaacaacggccccgcccgcccgcgctggccgacagagctctgtgcacaccacccgccccaaggctgtctctcccagcaggcagcgcatcctcaggctcctggggtgtacgcgaccccccaccccgcctctcccccgctgctccctgccaggtcccccacacacacccacacacccggtgcccaccccccaggaggccccaggcccttccccaaggaaaaccaagcggagaggcaggcgcttcgttgcagaattcctggcgcacacacagaggacagccagcctgagacgggtgacaggaaagagagaggcagacttaggtgtccgctcttgtttcagttttgtttttcaatgaaagcacagaaaagatgtgcggagtgagcagacctgagaccctaagccccccggatgccactgctctttctccaggacagccgctcaccggcccgtccctctgtcgccctgccctcactacgaggcataaagtcacatcagccaaagtcgcctaccggaggaagccttcagcacatcctttccctgttcccatatggaaaaccggcccgcacacatccctgaaagcctgcggaccattatttttatttattatttattattattatttatttttatttttttgagacaagagtctggctctgtcgcccaggctggagtgcagtgtcgtgatctcggctcgctgcaacctccgcctcctgacttcaagcgcttctcctgcctcagcctctcgagtagctgggattacaggtgtgcatcaccatgcccgggtaatttttgtatttttagtagaggaggggtttcaccatgttggccagtctggtttccagcgtctgacctcaggtgatccacctgcctcggcctcccacagtgctgggattacaggcgtgagccaccgcacccagccgggaacactatttttaaggaaagcctagcaatacattataatacattaatcctcacagcgtgtgttgtttgtgtccgcccccaccccctcccgcgctggaaaggaatcgacttcaaaatgaggccgagtaggccgggcacagtggctcacgcctgtaatcccagcactgtggaaggctgaggtgggtggatcacctgaggtcaggagttcgagaccagcctggctaacatggtgaaaccctgtctctactaaaaataataataataaaaaaaattagctgggcatggtggcaggcgcctgtaatcccagctactggggaggttgaggcaggagaatagctggaacctgggaggcggaggttgcagtgagccgaaatcacgccattgcactccagcctgggcaacaagagtgaaactccatctcaaaaaatatatataaattaaattaaataagaaataataatttaaaaaatgaggccgagtgtccctgaagtgtctttagccacagcaatccgtgcaggtgcacacatgggtagggagggtttggagatgacggggttctccgtccttggacctctgctccaaggagtgtccagcaagaaaggccagcaaagaggcgccagtctccctcatcctaggcggctgggaggagcccagtctgggcaccagggcatacccagtgctgcccacagtgtgtgtggctgaaccactttctgaggaaccgagcagggtagggccactactgggctcaggatgtc

SEQ ID NO: 588733 - DNA, 4001 bp, Homo sapiens
tacaataaaatgttttgcaatagcaaggactttggctaggggagtgactctgtgtggtgaaactgtcctcacccattttacatttgaggaaaagagataatcttttgatcacacccaacacagttaacatctgtactttgaacagctaagtatagcagctgatgtttaactgaaggtaggggggagatgagaaacagaaacaactggtgccaaatgtgagattcaataacttcgcctcggccatcacaaccaacatcaaccagaagggtgcgggaggaactcacggaataaatgggaacaggtgtggcctgaggataagtaagtgggggcactgtttccttcttcatgaagatgtgagaggaaatcaaagctctttaaaaagaaggaagtggaatgcttggctcctgtaatatcagaacaaataatgcacagccagaggtcatgcctcaccttttgcttatctcaggcacctctgcttgtaaaatcagtgggccatattcaatgaaaccttcatttcagttccatatcttttcccagaaaccccaggaacagagcgagccaatatccttattaaaccaagaagctcgcagtcacgaagagctaagtctgacgccactgggcccctacctaaccacgtgtcctgattctttccgtaatttcccactgcacaacacccaggttatactgaaaatataacacatctggttaaaaacagtacacgtttctcatgaacaataagccatcctttctataaaatcagtgtaaaattgcaggtaaaatgctgtaggcagatctgtttggaaggctatgccaccctaggagacaaaaaggtgcgggaggaggaaaacggcagacacggcagaaagcagtcgaagagaacgtgaaagaagtggccatttctgcaacttttaggagagctacctgccctcaaattttgaaagggtttctatttcttaaagtgctaggtttccctggctgaaactcacatctttcttccctctagggctggatctaagcttcagaggttgtttctctggccctagacagggccacccccgcaaatttctcccccactgcgcctgacatccgcttccatccatggctccattaacggaagctaagcactggatcgggggactttatccaccgcccaatgttattagattccaggcttcctggcctcaggaaaggatctggctcatgtatttgtgtatcgcagctaacaaggaaaggcagtcggggtaccagtgcccagagctatgtgagctgtgactggacacagctcaggggccaggtggcatccacgggggcgcgcgttcccggactcacggggcagacggaggcccggggcttcacaccttcccctcaccctgcaacgcggcagacctgactcgcgggggactgagcaatattcattccagggccgcggccagccggacataggcactcgggggcggtgggagtagtgtgcgcatcggtgccgcagcccggagggggccccaggtgggcttctgcgacaccagggccctccatcccctcccgtcctcccctagaggagcctccatccctgtccctgagcccctcccagtcggtatcccctccctgtccgcgtaccctcccccgcaggtcccatgcgagtcggaaccccctctccatcacagccccgctccttggcggggctccctctcccttcgagccctcctccagtttcaagccccctgcgggtactgacgtctgacctgtgcccagcgcctcgcagccgtctgcatcccgcgccgctcgccaagtgcgtccacccagaagcgggtgcagctccaggcccgccccgccccgctgcgccccgccccgctccactctgccaggcctggcagccgccagaccctttccacacttgaccgcccttcccggtcccggccagcgtgcggggcatctgtcgtcaggtccgcacatcctccaggcccttgaccttcccttggagatgtctctggccccaggaactccctaggctgtgtgcttcaggagaggctggttcctgagtcacccaggaggactgcaaccaaccgggacctcctgggatgcaaagagatcgcagggcctgggaggcggcgaggagcccgagcacaggctgtggctctgaagagtgtttgttaccaagccaggcaaccactgcgaacacaccggagaaacagccacagatcaccgtccagcaaaggaagaaggcaccaacggtccatcagggaccacaacccagtttttctagtttaagtttggtggctaagtttgagtgtcacatagttcattcattccttcattcattcaacaaatctgccacgttcccatctgataacagatctgacaggtgggcacagttctaggtgctggcaatagagctgagaaggaaacaaagtccctgtcccggagaagggggcttcctgctgaggagcgcatgactttctttgtggtattgtgctgtggcagcggggtcctcttctgtaagctactgagaggtgaagctggctgggcttctgggtctgatggggacttggagaacttttctgtctagctaaaggattgtaaaagcatcaatcagcgctctgtgtctacgctctgtgtctagctaaaggtttgtaaacacaccaatcagcactctgtgaaaatacaccaatcagtgctctgtgtccagctaattggtggggacttggagaacttttctgtctagctaaaggattgtaaaagcatcaatcagcgctctgtgtctagctaaaggtttgtaaacacaccaatcagcactctgtaaaaatgcaccaatcagtgctctgtgtccagctaattggtggggacttggagaacttttctgtctagctaaaggactgtaaatgcaccaatcagcactctgtgtctagctaaaggtttgtaaacacaccaatcagcactctgtaaaaacggaccaatcagcactctgtaaaatggaccaatcagcactctgtaaaatggaccaatcagcaggatgcaggcggggccaataagggaataaaggctggccatcgcggccagcttccccgttcgggtcccctcccacattgtgggagatttgttctttccccttttgcaataaatcttgctgctgctcactttttaggtccacactacctttatgagctgtaacactcatggtgaaggtttgcagcttcactcctgaagccagccagaccaggaacccaccatgagaaacaaacaactctggagccgccataagactcactgtggctttaagagctataagactcactgtgaaggtctgcggcttcacccctgaagtcagccagaccacgaacccaccgggaggaacaaacaactccggacgcaccacctttaagagctgtaacgctcactgcaaaggtctgcggcttcactcatgaagtcgtgcatagaccacgaacccagtagaaggaagaaactcctgacacatctgaacatctgaaggaacaaactctggacacaccgtctttaagaagtgtaacactgcgagggtccgcggcttcattcttgaagtcagcggcaccaggaacccattggagggaaccaattccggacacacagcctcgtggaatggttctgcacagtgtgtgtgtgtttcccgtcaaccctgtgcacactattaaaagaacacaagcgctaagcctccctctcagacctactggtaagaatccagggctgatgcacctattaaaagcttctcaggaggccgggggaagtcgggattgagaaccacgggtctagatctccaagatgcctggcagtttatcccactgttgagggcactggcaatcaggaagggcttcatggaagagatgttcgtatttgggttttaaagcagggccacagatagatattagcagtgcagaaggacacaggatctgatgggcagcctcttgaccaaatggctctccctttctataaagtcaaagaaaatcactgtgaaggataaagcattagctgga

SEQ ID NO: 588734 - DNA, 4001 bp, Homo sapiens
gaccttttagctttcctttttcctccagcggtgtagtttgtggtcatttagtttttacacaagagaacagaaaagagagataaaattcgctaaaattcagatagtctctttgtgtttgtttctagcctcagtgaaggtttcggggagagggctggctggttaaaagggtagaagcttaagagttcaaagaaagtgtgaggaggacagcactcacctgtggcctctaattgttcatattcagtatggtctcatactgggaataatctagtgtttgtcttatgatctgtctacacaaacaaatatggaatgtgtctataagtaccactagttgacacactagtgactttaattctcttacaataaaatgttttgcaatagcaaggactttggctaggggagtgactctgtgtggtgaaactgtcctcacccattttacatttgaggaaaagagataatcttttgatcacacccaacacagttaacatctgtactttgaacagctaagtatagcagctgatgtttaactgaaggtaggggggagatgagaaacagaaacaactggtgccaaatgtgagattcaataacttcgcctcggccatcacaaccaacatcaaccagaagggtgcgggaggaactcacggaataaatgggaacaggtgtggcctgaggataagtaagtgggggcactgtttccttcttcatgaagatgtgagaggaaatcaaagctctttaaaaagaaggaagtggaatgcttggctcctgtaatatcagaacaaataatgcacagccagaggtcatgcctcaccttttgcttatctcaggcacctctgcttgtaaaatcagtgggccatattcaatgaaaccttcatttcagttccatatcttttcccagaaaccccaggaacagagcgagccaatatccttattaaaccaagaagctcgcagtcacgaagagctaagtctgacgccactgggcccctacctaaccacgtgtcctgattctttccgtaatttcccactgcacaacacccaggttatactgaaaatataacacatctggttaaaaacagtacacgtttctcatgaacaataagccatcctttctataaaatcagtgtaaaattgcaggtaaaatgctgtaggcagatctgtttggaaggctatgccaccctaggagacaaaaaggtgcgggaggaggaaaacggcagacacggcagaaagcagtcgaagagaacgtgaaagaagtggccatttctgcaacttttaggagagctacctgccctcaaattttgaaagggtttctatttcttaaagtgctaggtttccctggctgaaactcacatctttcttccctctagggctggatctaagcttcagaggttgtttctctggccctagacagggccacccccgcaaatttctcccccactgcgcctgacatccgcttccatccatggctccattaacggaagctaagcactggatcgggggactttatccaccgcccaatgttattagattccaggcttcctggcctcaggaaaggatctggctcatgtatttgtgtatcgcagctaacaaggaaaggcagtcggggtaccagtgcccagagctatgtgagctgtgactggacacagctcaggggccaggtggcatccacgggggcgcgcgttcccggactcacggggcagacggaggcccggggcttcacaccttcccctcaccctgcaacgcggcagacctgactcgcgggggactgagcaatattcattccagggccgcggccagccggacataggcactcgggggcggtgggagtagtgtgcgcatcggtgccgcagcccggagggggccccaggtgggcttctgcgacaccagggccctccatcccctcccgtcctcccctagaggagcctccatccctgtccctgagcccctcccagtcggtatcccctccctgtccgcgtaccctcccccgcaggtcccatgcgagtcggaaccccctctccatcacagccccgctccttggcggggctccctctcccttcgagccctcctccagtttcaagccccctgcgggtactgacgtctgacctgtgcccagcgcctcgcagccgtctgcatcccgcgccgctcgccaagtgcgtccacccagaagcgggtgcagctccaggcccgccccgccccgctgcgccccgccccgctccactctgccaggcctggcagccgccagaccctttccacacttgaccgcccttcccggtcccggccagcgtgcggggcatctgtcgtcaggtccgcacatcctccaggcccttgaccttcccttggagatgtctctggccccaggaactccctaggctgtgtgcttcaggagaggctggttcctgagtcacccaggaggactgcaaccaaccgggacctcctgggatgcaaagagatcgcagggcctgggaggcggcgaggagcccgagcacaggctgtggctctgaagagtgtttgttaccaagccaggcaaccactgcgaacacaccggagaaacagccacagatcaccgtccagcaaaggaagaaggcaccaacggtccatcagggaccacaacccagtttttctagtttaagtttggtggctaagtttgagtgtcacatagttcattcattccttcattcattcaacaaatctgccacgttcccatctgataacagatctgacaggtgggcacagttctaggtgctggcaatagagctgagaaggaaacaaagtccctgtcccggagaagggggcttcctgctgaggagcgcatgactttctttgtggtattgtgctgtggcagcggggtcctcttctgtaagctactgagaggtgaagctggctgggcttctgggtctgatggggacttggagaacttttctgtctagctaaaggattgtaaaagcatcaatcagcgctctgtgtctacgctctgtgtctagctaaaggtttgtaaacacaccaatcagcactctgtgaaaatacaccaatcagtgctctgtgtccagctaattggtggggacttggagaacttttctgtctagctaaaggattgtaaaagcatcaatcagcgctctgtgtctagctaaaggtttgtaaacacaccaatcagcactctgtaaaaatgcaccaatcagtgctctgtgtccagctaattggtggggacttggagaacttttctgtctagctaaaggactgtaaatgcaccaatcagcactctgtgtctagctaaaggtttgtaaacacaccaatcagcactctgtaaaaacggaccaatcagcactctgtaaaatggaccaatcagcactctgtaaaatggaccaatcagcaggatgcaggcggggccaataagggaataaaggctggccatcgcggccagcttccccgttcgggtcccctcccacattgtgggagatttgttctttccccttttgcaataaatcttgctgctgctcactttttaggtccacactacctttatgagctgtaacactcatggtgaaggtttgcagcttcactcctgaagccagccagaccaggaacccaccatgagaaacaaacaactctggagccgccataagactcactgtggctttaagagctataagactcactgtgaaggtctgcggcttcacccctgaagtcagccagaccacgaacccaccgggaggaacaaacaactccggacgcaccacctttaagagctgtaacgctcactgcaaaggtctgcggcttcactcatgaagtcgtgcatagaccacgaacccagtagaaggaagaaactcctgacacatctgaacatctgaaggaacaaactctggacacaccgtctttaagaagtgtaacactgcgagggtccgcggcttcattcttgaagtcagcggcaccaggaacccattggagggaaccaattccggacacacagcctcgtggaatggttctgcacagtgtgtgtgtgtttcccgtcaacc

SEQ ID NO: 588735 - DNA, 4001 bp, Homo sapiens
ctctttcccacaaatctccacagtcactagcactgtgggcacaaagagctcctcgtagttttcccagcattcttcaccccaggtctttgctaactgcgcacagcgcctgttcctccctcccttcttggcctagtgagcaccacccttctgtgtaatctaatccaagggtagccatagcattagcatctcctgggaacttgttagaaatgtaaattcttggtccttacccccacccgctgatcagaaccttggggatgggacccagtgatttgtgctttaataagcctgcaggtggttttgacgcatactcaggtttgagagttcttcgtgtaggcagcggttctcagctctgtctatacactctacagttaccagaggtagagtgttaaatactcactggtattcacactgtcttcctgagaagtttgagttaattgccctggggtaggacacaggcatcagtattttcaaaaactctgtcttaggtcgctttaatgtgtagctaaccagcaaaaggtacttgcctgcttttgtcactagctctgacaactccaagattatccctgcctgcttttatgaccacaacccttgctgtttcatggattggccttgctctggagagtcagctgctgtcaacaagttttcttttccaccacctctcccatccgtcttacccaacctcagtacttccctgggctgaagccaagctctcccaggcagcctggctgggagctttgcagtcaggggccccacacttacgtcttgtagcagtgagctgctgataccacccactgttcgctgatgagggagccaccgcagaagtgggagccagaattcagggacacctggtaggggagagaattctcctcacaggtgtagcccccaacaatcttgtcatcatcgtcaaaggggacagcaactggagtggaaataggaagggagaaggcaagtcagtagcatgttaggggtggtgctcccagcctgcggttgcttcctgccaattagaaatccttaacaagcccagtgaggccaggcaagggagggagcgctgccacccctggtgagcatcactggatgtggctcccaagtctctgtgtctgcagggcacgtagctaggtaccctgcaggggctcagatctctcctggggacaccaggctgaggatgcaaggaatgtcctcaaaatgcttccagtggggtagcagttggtatgttgttgtctcacccactgagtgcttctctcttttattcatcacctgtgtacttgccctggctatttgagccctggattgtcaggatactttggctaagctaggaaaaccccctgtctgggtagacctggccatgactagcttcccccatagctcagatctgtgcagtgagggcagagttgagggcagccccaggctcactttggcataacaaaggtagactttgttattggccaatagaagagcaattcttaactttggcggcatgcctggaaacgttaaaaatcacctgggaagcttaaaagcccagtacacaggctgcaccccagacaaatgaagttagaacttctagagttgaatctctggcatgagtaatttttgaacctccccaggtgcattcgaggttaagagcagctatagtggtgctatactggtgctcttggagccaagcctgaagcctgccacttcatttcatgggccagccccacctggtctcccttcccagcttctccaaccacagctcggatatggatgaatgacagtggtgggagtgaaatgagggaaaaggtgaaacaggtgaggcttaaagagagcccaaggaggatgggaaggagatatgtcagatggaggaaatagaatatcagagcgcagtcaaaagaggagaggtggcaagaatggcagggcatgtgtctgccaggaaagggggtgggtggggcctgaggcaggtcatgaaactcgccagcagctcccacaaaggcaaggatcaggaatggattcatggtggtagagtgtgcctgactggtggtggaaggcctgtccttatacccttccaagaatcaggagaggaggtgtctgtgaggtgagggtcacagttcttcccagcacaaacacacctgcagctttccccttgccagggtcttgcatcagctcggctacgtttggccactctgtgggtttgtgattcacaggtgataaggaaacttgccttctgagagcagagagggagactggctatttcctggaaggatgctgggatggggaagacaggggaaaccaatccccggatcacacagctgggctttcgtaggccgaggagatgagggttagaaggagggagaatggcctgggtgtctaggagtccttttaactattggggatgtatttaataatgtacttaaggaagggcaagcattggtaacaagcttggcttttcagtttcctggagcccccacgagaggaggaaagtcttatctaaggctcatttttgtgaatatgaatatgcttctttgcagtcactgtgcacaaaggtcaaatccaagactttgggtatccagaattccaacactaaggggtaaggagaagggagacttagcattccataggattctgggcttccagatggctctccttcctaccaaggcttaaaaggatgggaagtgtttcaaagaaggaggggacacaggttaggtaggagcttactcagtgcatctggaggatggaaaaccaatggcgcactcctccccttcttcaatgtgaagccacttgtctctctcatgtgcatcctgtcataggttctttttatgcagcctcacggttgtcctggcaacctgcacttagggtgatgcaaactgactcacctgctcagggctgacagcctgaaccagaatgacatgcccctgatcagatgtcagagtttggaccatggtaaatctgggttaccatctgatctgagaatcagcagtaggtagagattttagcacatggtaaatgggtcacatattgggatcaataagaagatgtggaggggtgggtctagaattttctattttagatgcagtgagattatgctgggcttagtatcaagtgaatcttcccagagaatatcctgatttgggccctaccaaggctactaagacacagttgtgtaattgactgaggcacaacctggccagagtagtgtggagatggagatgctgtctgtgatcaagtctaatgatgtaaggaaaggaggagcttccttatgagggtgctttcccttctcagcaactctgagctcaggttggtgatgggcaggagtgagcagagttcaagtttaaattctttgaaaagtaaaagaagcagagatgttctggagatggtgaacaaaatgagaaaagctcagaaacttcgtgttgagatcggacatggccagggggctagagggaggaagcaaatggaaaccagagggaattggaaaaaatgcgaatgtggggcccgtggagttgagaggacacacagagtaccttcaggttcagctcctggcatggccaacgagccagcttccccaaagccaggagatccactgctcagagacccgctctccaccccacatcccctctaatcactgatgggctcatacctaacactgctgtacttagatggtgcatggtgcctgacagctttacaagagttttcacataagcaacagtggtacattgcttttcagttatgctgagtttcacagtttgacttcccacaaacatgctaattgtgatttgtgcagagcaaaattatttccatttatagaggaagagactgagattcagaaggattctgtcttgcccaagaatacagatcttggcagagctcaccataaggccaacggaagccatggagatcattgtgaactgtgggaattgctgcaggtgacatctaaaaggagatttattgaggatcaaggcagaggtccccagaggacaaactgtgcatctgattccttcctcctgcttttcttcctggcagaaatagatgat

SEQ ID NO: 588736 - DNA, 4001 bp, Homo sapiens
acacctttgctgtggctggatgtgaaaggttaatcatgatttctagaagaagcttattccaagaaacgataaaattagcagtaattgttctggctaagacatgaaactggtaacaatatttcaaacaaccgcttctctttcctgtccttttttttttaatgatgtagagcaattgctcgtctaatgaagggtaaataaattacagattactttcaactcattactcggaaatagggaaacttccattccagcaactgctcctcagaattgagacaaacctcttgctcatatcagaccccacagtctaaatgtttattgtgaaaatattgataaataaatgttatgggagtgaaaaacagatacagcccagaactctgtgtttgtcattgattaccattttcatacacacacacgcacagttgccaaaattgtctttcatttttgaacatttctccttcattactaggtaaagaacagaacatgtacttatactatcagaaatgccaaatacttacttgagtttctgaaattagtattttcatccatgtgctctagtaaaactataaaagggtcaataaacacagagatgatcacaaacttcctcaactcggaaatctccacaaacgttcaactctctgggaggtttcaggtagaaagttttatataagcacttatcaactttaatggtcttttacaagatagttacagttagaccattgtaaggatcacacttccgtctgcactctgaatggtggttcaggcatctttgggccctcccttcctgcactccctttgttgtgcgagggtaaatgagttacagtaataaccctgcaaatatcctgccttgtgattaaaacattaccttaatgcagactttacattttggcttctatgaaggcttaaaggttaaaggcatcataaattatgcatttctttctatgccaggcctgtaaaaggtgcttttacagttctttaaagatattgcttctaaatgagtacaggcttttctttttttttctgccaaaacagaaacatttccattatgtttattactgctgtgctggagagccaaaacagtttggaattaagaaactgctagagtctgttgtttcagaatgtgtagcaactgttaacatacacagtggagttgcccattcactgtttggacagtgatatggtaaacatgggctaacacacaggtctgctcccgggagaacgatgatctggtaaactccagaacaccaacagttagagctttccccttctgcctccgccccaatttacagatgtgaacaggaattagcgagacacaagacacactagaatatccctaactcctgcagtggagcaagctctattctgtggattctccagtaccacacatgtccttgctacccagcaccctgacttcctcacttttgtcacctccagctgaagtacagttctaagggtctctttttttccttttacacttacacgtaatgcatctgcagaaggctgggctctttatctcaaggaagaccacacccatttatcccttagctttcaggagcaaactgctgatttagggaccgaagctggactgaagcgacccaacttcagccaggccacaacctccttcagctctgcacctcgtctggttgcggtggaggattctggagacagattgccagctttaagagccagagttcctgagatttcttccaggagacaacccgcacaccctgataactccgtggcaaagttgtttcttcctcctctgctgcaacaccttttcctctccacctttccattagcatacgcgcgcgcgcacacacacagctttgctcactcaacttaccagtttagatttggcgcgttgcaaaaattcttccatgtcgtggctaggggtttggaacccgggtactcggaggggcgcagtggaaaatctcggcccaaggaagacgagcggggtcccgggaaagtggcccgccggggcgcagcgaccgactgctccctcctgccgctctgaggcggctgcggcggaggctgtgcttgcgccctcgaccgtctcgcccagggctccccgccccacccctcgcccggccgccggctctgggcacccgactctgccctaataaggaaagtgggtgtgccgcccaggagccccggggcgcgccgggcacgctctctggcacgcgcctcgggcgccgtggcgcgtgggcggaggtgcaggggtatggcgaggggctcctccgccaatcgcagggccgtgctgcggcctcctgacgtggcgcgccgaaagctgctgcaaccatggacagcgcccagaagtgcgagccaagtgcaaggggctgctgcagagggaggctctgccgcaggcaccgccgcggtcagcgggggaaggtgggaagagggagacgggtcccaggagagcccccgcctcgcccagcgcctcactggctggctggcgcgttacggagcactccggcggtcacttaatgatctggtcggctggcctggccgggggaggcactcagctagattggcgtgggagggacgaggagagaaagaggggagttactgctgagctaaaagcagtacgaccttgatggataataatcagaagagcaggctaggaggttgggcgaggctgcgtctttcctccctaccatgaaaacatgtccacacaacaatgggcatccacagttcaccccaactaggtgcccttatgtcagccctgggactaatgcatagatacatccttctgcagttcccatccactgacatgtaccctcagggaaagctggggcaatagaaccttgctaaggtgaggtgcagtctgcagaccggcaacatcagcatcgctgatcttatagaaatgcagaacctcagtcccctgctcctacttaccaaatcagaatctgtgtgtttctatgagaccctcagatgatttctatgcttgttaaagtttaagaagtactacaatgaacaaatgaacttatatctacaaaccttattttaaatcatggggttttgttgtatgtagccttgtccggtccccaaacacactacatcaggctttctctgacctctgggcttttgcacaccacctgtaagatccttccagcccttgtcctagcccccagcctcagctgttctacagaagtagcctcaaccctgactgcacagtaaaatcacatcgtaatcacctgagacttgagaaagtactgataccagggctttatcccagtccaattaaattaatatctctgggcatggggccacagcatttctgtggaaagtgacccaagtgattctaatgtgcagttcaggtgtgatgctctgattctcgatgaactttacatgtatctaaatcacttagagggcttgatgaaacacagatttccgtgccccatccttagaattttagccctaataggtgtggcttaatgggcctgagaatgtccatgtatacaatctcccagggtttgccgatgctgctgatccaaaaaccacactttgacagtgagtggcgtagaagttctctttctccagaaagcctccccaacacacttttcccttcccatccccagactgagttggttgccccttctgtattccctcatagcaacttacattttccactctgctataaattgcataattatttgtctatgtcctccaccaggctgtgagctctgtaaagacagggaccttgcctgtctcattcactgatggaaccctaacatgatgtatgttcatgtcatatacaggtcctcaataaatatgttttaatgaaaaaaggtacatatggaagggttttttttttttttgctctatttctcctgtctcaatgtgtgtctgttttcttgtctgtctctgtgtgtatatgtgtgtctcatgatccaattattttttattcagaaggatccaatgaaaacaaatcagcagggtccacagatctgattaaaggagagtgataagaatattaagctccaggtgacattcaggggtgggct

SEQ ID NO: 588737 - DNA, 4001 bp, Homo sapiens
ctcaaactcctgggctcaagagatcctcccaccttagcctcctgagttgcttggattacaggcgtgcgccaccacacccagctcacgactaatttttttaatgaaacagaacagactagagcaggatagaatacaaaatagtgtatgtcacaggtaattaggctacacatcatttcataaggcatttatttttgttacaattgaatgtgtatactttgtcattttgtaaacatgtttttcactgtaggttacagtcaaaagaagtttgaaagcttctctaatatttacaattcaactaaatcaaggaaatacataaaaagcaacatctgcctgccccctcaccctcctgccccccaggttacatgcagtccaagggcaaaaatcctcccagaaaaattaataacaaataattgtattactgatgacaattgccattacaattatagtaataaattaataacgaaatacatagggaacaaacgttgggaacactccaaaacatggggggtgcaggaggaggctacaggaaacatctccacagctggagcagggaatctcgcctaaaatgaactgtaaccactgagaaaaaataagccctgtcctctcagctactgtgagcgctgcccctagaaaagtaagaagtcctttcccctttaaaattggattctctgttcttaccacaacacagaggaggctctgtcccagggagatttctactctgctcaacaattgataattgtaaaatacttggctatgcctcatgctgctccaacatattatcagctctatcctggttagaaaaataaaaatctaacggcggcggcagccgcctgacaatgggctcaaggcacatcggagactttgccttcttcactgcgggtggggctggggacggtgggtttggcgggggaggggaggagccgggctggggcctgggaaggcagagagtgagttccaccagcaagatctgattgtggcccgggagagaattcaatcactcggtttactccagaacgaaatgaacagggaattgggttaagcagcccaaagtctaccagagttagaatactcgaacgcctttaggggacaagcaggttaaaaaaaggaggggggtggggagaaaggctttaggaaagggtaggttctatgggggacaaggaggggaaagctggactgaaggttttcaaatttacatttctgaaaagcagtgttcctaagtgctggctaaagcaaacactggtgtaaggcgtaggggggcacgcacacgcggacctttaagtttgcaatccctttcagctaacgtgatccactgcatatgcaaaacctgtcatcggttcattcccgttcatcactcattcacactatgtccattcatgcatccgctccacactgcccgggctcgccgcacagctgcgcgaggcgaaggcagagatcagagctttttctttttcgccccgccccagcccccggaccggcccaggagatggcacagcccgggcgtctgcaggtgcgtggcaccggcgggacagcaggccccggccagctgagtcgtgcactgcctcgcaccagcagtcagggccaggggcagctgcacgggcacgcctcgccgagcttcctcaccaactgcattcttcccgaagcccgcttgccggagctgctgatcccgctgtgcacgctgatgcaaagcgcctaggggactcaaggcagggagcgggaatccgactgccacacgcagggatgcaaacccacccgcgtgcgtgctcccgcctgaacctcactcccggcgcccgctcgcggggacttactgagtgcggcagcttggcgggaccaggcccaaagttgaccacctgcctgggggcgtccatggtgcggcggccagggcggtgagtcagccaaggaggaccgaacgcgtgaacggctggcgttcctggccgctgcggtgagagtctgcagccggccccgaacccccgccttgttcctgcgccgagtcggcgccccattggcccgtgctgtcgcaggccctgcgctaattggttcgcgcgaaggagctcacatccccattggtcgcgcttctgagccgagtcgaagcagttgctcctcctcgcgtttactgtttcaacccccatttttgatcaatgcaaggagcgcgcgagattgcgccagccagccgagccggctcggctgcgcgcccgcccgaggattgtgggcggcgggaagaggctgcccctgccaacctgccttcgccccttgagcccgcaatctggccggttccagtcctccaaccccagaggacctcagctcctctctcttggctgaaagggcagttgccgagcagatttgtagcccccatccacccacctctccaccaccagcccccagtttgggctgtgatgtatttgttccagaaccaccagtcactaatctaccaaacttttctaagcaccccccacgggcgtcagataccccagtggagagagaggacccccccaaggttggaagcgcaggatgaagaagggccgggggtgggtggatacggttctttgtatttgcacgtgggtcctgagttcctgcaggattaaagaacggaggtggccaaggacgcagggaggagcgatagcctgggaagcgtggatgcccgccaggcaagtcctttaaagtcgctgattctccatttcctcctttgggaaacgagtgagctggaaacctgcgacagctctcaggttgcgcccgcgctgacaagctgtgagtttagaaacgtgaggagatattaacaagaacgcgatacccatagggcgctgcagcccaaaccagaagaaggtggcccctagccaggccaggcgcagggccagagctgctcaaacttttccacagaagtgtccttctcaaaagaactccagtggagacccgcatggggttctgaaacagaataccctccccctaccctgcaagaaagaagttcctttgaagtctggaatttcatcatttttaaactgtgaattttgcattctctaccataatttaacctagtttcttttaatgtaaaaatattttccctgtctgagtaaaattgatgcgccaggaatatatacagtccaactgccccgtttagagaaggcttgtaactggacaggactttggcttttgtttgcttttcctaatgagaatgtgggcggtatggggctgagagcagaggcactgctctggatctgggaattggaggacaaagtttccagaaaaaggcaaaatgaacaaggcccctgcgttcctcagcaacttcattaagaaaaccgcgacattcaagacagaataaatctcagcccagaaactcaggcatgcaagaagcatcacatatccattattttacgtaaataactcagttattatatattagtagctgcccctagcagcttatctactggagactaagggagtcagccttcatccttcctggagttagttcctaacaccagggctatacacagtcccatgtagtgggttgggagaagggacagcacatccatttggtcctctgttcccaaaagatatggctgagttgtttccactgcccaagctgatgtggctgcttgggttgatgagcaacctactacttctgtatcccactaggggcacaggaatttggggtggggtggcggtggctattgtctcatctgctaagacatcccctgcagccattcctcccgggggtcctgcagtttccaagatggtatttcagggacacaagtcacacatacagtcagcctcaggacccactgacctctgtttgtcttcctcccgcccctgggcaatctccttttcagtctagagaaaatctgtcttttccatgtttcttcctcacactgtgcccacaaacaccttaaaccagagccacaaactcaaatgcctccaggggccactcagggatatgaaacaagtagtgggaactgtggcaaattgagttcacctgtccatttgtggcacaggtgcacgcggccactgcacat

SEQ ID NO: 588738 - DNA, 4001 bp, Homo sapiens
tagagcagctagatggaagaaagtcaaggaacagtgatcgttttacacttggatggcactctcagctcctagacaggactccgttatctaatgggtgttttccaccattcccctgctgacataactaaaactacagaatttaattatttttaagaaatacattttcaaaggacagtaaattagtcgaaaataaatggcttggaaaaataaaacttcagaaccccatgtaagtatatttttaaaggatcttgagtttacctaatctaattgattgcaacatatcttaggtcctatctatctctgtttgagagcctgggtaccaccataaacaaaaagaaccctttttctaaaaatggagcgtagatctttaaacagtctcaattcctcaatgtcacaaaacatcctgggtccttaatcatttctctgtaccactagatgtgaactgaggaatctggtccacacctcctttttgcctattggaaacaaaaaggtaaaacaacttcttcaaggtcataaacatctcaaataaaaaaggagaaatgaattttctggcccttcctcggtactaaactactgtaatactttcaagaatatccagtcctgaatctgtattaaacaagcaaatccagaaggcctcatcaagtacaaggtattttttttaaaaccctgtaaatccaatttaatcacatacgcacttctctgacatccaagtgtttgtgtgtaatctgcacaaattccattgatattttgtacttgatccaaaactatggaaatgtcaatgtttcactaatttttaaacaaaaattcactcttcattatttcacctacaatggaatattaactagcaacgcatttaaatatttcctaggaagaaaatctgtccaagtctgccaataaaccatagggaaatacacaggtatgtagaaacgtctggattttcataattacacgggagattattgggcaaaaaactaaaatgaaaggtcaggttacaaatgagactaaagcgagggagagaaaggacagaagaaaaaataaagagacacggtgggcagcaggcctctggagaggagggtagcactgctaagcgcgagggctacaaatcacttactcgagctggccaatggggataacctttcatcttggcgaagatgaggtctccaggtttgaaatcgcgagtcatgtttcgggggcgagaccgggggtccgaagcccgggaggcggcgaggagatgcggcggcgcggggatgcgggcggcggacgcgggcccagctaccgggcccgcgggcgggggaggatgcctcggggcgtcccgacgcgcctgctagggagagcaccgagggcggttaaagcgaagaaccccgaagggaggggccgcaaggggagggggaggggaaccggcgggtgggggtgggagagcgaggggacggccgcctcccgctcctcccccgccagtgcgctgcctccgcgctggagcaggtcctccaccccgccaccgaagagacgccaccacctgaagcagggatgctgcccggccagaaatcgcccgtctgcccgccccatctttctccgggctttttccaccgagcttaagccccaaaagggagggggtgcatgggagagaaaaaggcagggattccgagaagcgagcggcccccttccgcccacgcaaggcctcccccgcaacctgctgcccagcggctgcagcctcggccccctcggctcccgggcgggccgcgtccacttccccgctacagccaggagcgacgccaccgaggggggggcggggcgagtccccgtcgcccgctcacctgccggggccgcgggcgccgacgctgcggttgctggccggtcgcctctacccgcgtccacgcaagccacctgcgccaccagctgccgcagaggcgtctcaacggctcggaatcgcaaccgcgccgccgctgccgccgccgtagctgcgctgctcccgcgcggctcccgctcggcgcccgctagcactggggcgcgaccaactgtttaccgagagaggggggatgttgcagcacccggcgaagctgtgtggctccgaagcggattttctggaaaccctacgtccccaagttcgctttcatgtaacaggtgcatgcagatggagaggaagacgcaagcgaagaagaaaggactgggcgaaaatagctcggcctgccgcaagttccccctgcggtttgcggagtggtcgggcccggcccgcccctgctggcttctctgcgtgtgtgtatttgtatgtgtactgtatgtaaaaggcggggagggaggaaatgattgttgtggacgcggttttgggggcgggtatccgggcctctctcccttggctgcgtgttagggagaaagtggcagtaaagattcatgttcttgtatcgtttccagggtggggaggtttgaatgctgcttttgcgcggtttgcatcatccaaaaaagaggagctgtacgaaaaccctaagatgaaattggagcatgcggcggttgcagggtgtgctgcatctaggcctcttgcacctcgctgaatgggcctcgtagtctccttttccttgaaattgtagtatgagagagccctatttcatttcttttgcatttgcatcaccaagaactattaagaaaaatgcaaccctactgaatgcaaaatgcgaagggtagaaaacaatgacaggaaaacagaaaccttttagataggatgtgagtttgggccctaactaaattttagctgcatctaaattttatttccctagtagaataggagctggtaggtggtacaatgtgtaagtgttactaaacctcaaatattttctctcttaaaatgctcttcaagggattttaaaggttaattttttgatcctttagagaggctgaaaatatttttaaaaagaatgttaagacatataaaaataagaataataagacatatattagcacctagataatactgttttaaatacgggactcaactggaaatgaattaggaaattttttttgaattggtaaaaattgagaattttttgaaagcgatacagcatgtctttaaaaaggaatgaaagaagacagtcccaaagtaaaatgtcctgtaaggagtttcgagaaactaagtatacctgggcaatatgcagagagttccaagtggagcaaaaagagaaattggcagaggagaaggaagggttggtgaaatgtcttgaagcttctcattctgaatatgaatttaatgtgtgtagtaggaagctactataggttgctcagcaagaagggggtaaaaatgattatttaaccagttcttgatgtttcaaggtagatgttagtagaaagaggctgggggtaactggagtactcatgaaatgacgcatttctcagtgagaatggtgactaagaaaagggaaggaagagcacaactaagtaattacacaaaggaatgattgtcaggtgttggctataaattatgcataggaaaaggtggaaaaagatgtattgaagaaaagctcaagatacagagtaagagagaccaaagcagcatccagcaatcatttttttgtgtgtatgcactttatttgttctaaaccctgtaaggccttgctacttcaagtgtggtccaaggcccagcagcaagggctttacctgggagctcaggtaaagctcagaccttccccaggccttctaaatcataatctgcgttttaacaggatccctaggtgattcttacgcatattcaagtttgagaaactgctttagaggatacctcagactgtaaaaacttcaaactaagaaaaacagatatataacaagttataattaacgttaaagataactttttattagtactaatggtaggattaacaggtaaagagggggtagttagtgttagaggggacctcagaaaagaaataaaaaagggaaaatggaaaagcattgatgttttactattagtattttctgttgtttttgttgttttaaaaaaaggaagtaccatacttagctcc

SEQ ID NO: 588739 - DNA, 4001 bp, Homo sapiens
tgaagaagacagaaaaaggaatgtaactgttggacacagaatacaccaacactaaatggaggtgtttctcagaaaaaatgatggggaaaagggaaaagacaaacacttcccttccaatccaaatgaacttgttaaatgtagaacttgttaaataaggaaaacactctggtcttccaaaggctaccctattttattttcagtagcactcttagtcacttaacatatgagcgtggggagggtgatttgggagattttttaaacatttcctttggcttttaacttcactgtggcatgcaaatcggaatatagatctattagacaacctcatattttcaaacacctcaaaataaacaaggatacctcgaagaccatgaaaaagtatatcagaggggccttaaacctgatcagtttccctaggctccatttgaacgtgaattgtgttttataggtgcatcatatatactacggactatggagggtataaacaaattccatttaaggttgttgccctcggtctcacaatatatttggaggtcaaagcatacacagagttaagaattaaaacaaaagattatcacgaaaggaatagattagaatgtaaaatatacagacaaggattatgactaaggattgttcaagtaagactgcaccgaaaaggcagactttataggcaaggaaaaaagctttggaaggaaacttgtgaacaggagtttacgtagagcagctagatggaagaaagtcaaggaacagtgatcgttttacacttggatggcactctcagctcctagacaggactccgttatctaatgggtgttttccaccattcccctgctgacataactaaaactacagaatttaattatttttaagaaatacattttcaaaggacagtaaattagtcgaaaataaatggcttggaaaaataaaacttcagaaccccatgtaagtatatttttaaaggatcttgagtttacctaatctaattgattgcaacatatcttaggtcctatctatctctgtttgagagcctgggtaccaccataaacaaaaagaaccctttttctaaaaatggagcgtagatctttaaacagtctcaattcctcaatgtcacaaaacatcctgggtccttaatcatttctctgtaccactagatgtgaactgaggaatctggtccacacctcctttttgcctattggaaacaaaaaggtaaaacaacttcttcaaggtcataaacatctcaaataaaaaaggagaaatgaattttctggcccttcctcggtactaaactactgtaatactttcaagaatatccagtcctgaatctgtattaaacaagcaaatccagaaggcctcatcaagtacaaggtattttttttaaaaccctgtaaatccaatttaatcacatacgcacttctctgacatccaagtgtttgtgtgtaatctgcacaaattccattgatattttgtacttgatccaaaactatggaaatgtcaatgtttcactaatttttaaacaaaaattcactcttcattatttcacctacaatggaatattaactagcaacgcatttaaatatttcctaggaagaaaatctgtccaagtctgccaataaaccatagggaaatacacaggtatgtagaaacgtctggattttcataattacacgggagattattgggcaaaaaactaaaatgaaaggtcaggttacaaatgagactaaagcgagggagagaaaggacagaagaaaaaataaagagacacggtgggcagcaggcctctggagaggagggtagcactgctaagcgcgagggctacaaatcacttactcgagctggccaatggggataacctttcatcttggcgaagatgaggtctccaggtttgaaatcgcgagtcatgtttcgggggcgagaccgggggtccgaagcccgggaggcggcgaggagatgcggcggcgcggggatgcgggcggcggacgcgggcccagctaccgggcccgcgggcgggggaggatgcctcggggcgtcccgacgcgcctgctagggagagcaccgagggcggttaaagcgaagaaccccgaagggaggggccgcaaggggagggggaggggaaccggcgggtgggggtgggagagcgaggggacggccgcctcccgctcctcccccgccagtgcgctgcctccgcgctggagcaggtcctccaccccgccaccgaagagacgccaccacctgaagcagggatgctgcccggccagaaatcgcccgtctgcccgccccatctttctccgggctttttccaccgagcttaagccccaaaagggagggggtgcatgggagagaaaaaggcagggattccgagaagcgagcggcccccttccgcccacgcaaggcctcccccgcaacctgctgcccagcggctgcagcctcggccccctcggctcccgggcgggccgcgtccacttccccgctacagccaggagcgacgccaccgaggggggggcggggcgagtccccgtcgcccgctcacctgccggggccgcgggcgccgacgctgcggttgctggccggtcgcctctacccgcgtccacgcaagccacctgcgccaccagctgccgcagaggcgtctcaacggctcggaatcgcaaccgcgccgccgctgccgccgccgtagctgcgctgctcccgcgcggctcccgctcggcgcccgctagcactggggcgcgaccaactgtttaccgagagaggggggatgttgcagcacccggcgaagctgtgtggctccgaagcggattttctggaaaccctacgtccccaagttcgctttcatgtaacaggtgcatgcagatggagaggaagacgcaagcgaagaagaaaggactgggcgaaaatagctcggcctgccgcaagttccccctgcggtttgcggagtggtcgggcccggcccgcccctgctggcttctctgcgtgtgtgtatttgtatgtgtactgtatgtaaaaggcggggagggaggaaatgattgttgtggacgcggttttgggggcgggtatccgggcctctctcccttggctgcgtgttagggagaaagtggcagtaaagattcatgttcttgtatcgtttccagggtggggaggtttgaatgctgcttttgcgcggtttgcatcatccaaaaaagaggagctgtacgaaaaccctaagatgaaattggagcatgcggcggttgcagggtgtgctgcatctaggcctcttgcacctcgctgaatgggcctcgtagtctccttttccttgaaattgtagtatgagagagccctatttcatttcttttgcatttgcatcaccaagaactattaagaaaaatgcaaccctactgaatgcaaaatgcgaagggtagaaaacaatgacaggaaaacagaaaccttttagataggatgtgagtttgggccctaactaaattttagctgcatctaaattttatttccctagtagaataggagctggtaggtggtacaatgtgtaagtgttactaaacctcaaatattttctctcttaaaatgctcttcaagggattttaaaggttaattttttgatcctttagagaggctgaaaatatttttaaaaagaatgttaagacatataaaaataagaataataagacatatattagcacctagataatactgttttaaatacgggactcaactggaaatgaattaggaaattttttttgaattggtaaaaattgagaattttttgaaagcgatacagcatgtctttaaaaaggaatgaaagaagacagtcccaaagtaaaatgtcctgtaaggagtttcgagaaactaagtatacctgggcaatatgcagagagttccaagtggagcaaaaagagaaattggcagaggagaaggaagggttggtgaaatgtcttgaagcttctcattctgaatatgaatttaatgtgtgtagtaggaagctactataggttgctcagcaagaagggggtaaaaat

SEQ ID NO: 588740 - DNA, 4001 bp, Homo sapiens
ggatgccatcagatctatgttttacaaaatccagtatggcagaagagtgaacaataggatgcctaagagaggccaattaaatggtaactgcaatagtccagctaagaaaaaagaacctctatggttcaagttaatgtttgaaaaaaagaaaaagaaaaaagaacccaaactagagccttagcaaaggaaaggataggagggaatggattcaagaggcacagagagggcaaaactggccaccaattcaattggagactgaagcaaagagaggacttgaagttactggcttaggtaacaggtggctggaaatgccatttaagggagacagaaaatacaggttgaaaaacaggttttagtaaggagcacaggaaggtcaatttttagccctgacatgtttgaaaatataagagttattcaaacgaatcaatacttactaaatattaggagatatgaagtgtatttttgaacagttcttgtcagcaacaaccatcccttcagttgctcttgtatctgctccaagaactatgccatcctattaaaaaaaaaagtttttaaacaattttacaaatataagccaaccgcaactctctattctactttagggaatactatgttggccataccacatgctcccctaatctcaaaacgccagccaaaactcatagcaaaaatattgtgctacactttcaggatttaagaaaaggtttcttagtaaatgctactaattgaatcctgagtaggtaagaattattcccattttcaagtgaggctcaggtgtcgggtaaattccttgtaaatcagagctaatctggaaaaaacctggattaagactcaggaatctttccattaaattagccatcactatcaatttccttttaaaacatgttgcttttctttaaaacatgttgcacaggtaatcattatcccttttgacgtttccaacaatttaaggcaggagttatctccatttgatgcatctgaaggtgtccctgtgagaaggaaagtgagctgccagaagttggaatcagcactatagagttcaaaggtgagacagacctgtctgaccccaaatctcgtgatctcccatcacatacttcagcttcctaaactagtaattaagaagctaactgacctgtttaaaaaaaaaaaaaagaaagaaagaaaaaacctcagcaaagtgaggaaagaacataaactgttaagaagcacacaaaacctgacaaaagcagtcgctcctgaaagacggtctcctgatgtattctatagcatttgcctttccagaccgagccgggagagacaccggaagccaagtgttctgattcctgttgccggttcagtcactgctgctcttagcctaacccggcttaccttatagaccaccccagcgatggtcgtgccagttttccggacctttggaagcttgtatcccctctttgcaaaatcggcttccaagacggcattcctaagagcaaatgagagaatcaagtgttgaagggcaggaccacatcgcacagcactggcatgaaaagtgcctaacagagaactcaggaaagctgctacttgttttcacgcccatctgtttaatgaatcctcccaccatcagcactgttctcccgttttccaacgaagacagtcttacaaaggggccgtgacgtgccttaggagacggagataaacggtggccgagtgcgctgggaaggtgggagagcagacccggcttcaggagaaacccacgcccaggccctgattcccctgagtcacactagccgcgggccacaggccccgccatgaattcttccctcagaattctcgtatcacaccttggcccagctcccacccgagcaccgcactcttctccctccctgaaccaagccccaagcaaggcggcacctgcggcagttatcaaaagagaagcctccaactggtggagcatacaccgacacagccgccatcttcccaagaaagcagttccgggtcggaggcgggtgcaaacaaaaagagccgagcacttccggcgtcgctggcaacgggggctgaaggggcggggcaaacgccgcactagaacgattgatcttagagattctggttcctagagaggccagagatgtttgaagtatatcgccccaagtggcacggaggagaaagtgacacccggaaccgggaaaggacttgtccaaggtgaacgcaccagcgaccaggtctcctgccgctcagactggacttgtttctaccgttaatttggttctgcggtgcttcagagacagacagacccaagtcccaggcacagccccaccacccccttgcgttaagcaagtctcttcaactctctgaatctgtttcctccgctatcagatggagattacaacctagctcaaaaggctgctgtagaatggccattaagtctgtgaaaagaggctcaacatgattagtcatagggtgaatgcaaagcacgaccacagtgagatcccacttcgcacccgctaggatggccataaacaaaaagacagaaaagcgcaagggttgcgagagtgtggagaaattggaacccgaatacacggctggtgagaatgcaaaacggtgcggctgctccggaaaacaatttggcagttccccaaaaagtattatcctcttagatacgcacccgagagggttgaagacatgtattcacaaaaacttctacaaaggtgaggtagaaggcaggcctccattcagagatggggctgagatacctgaccaaattgaggactagctaaaacagggcctggacggaagctgtcttccctaagactcgctcaccagccagccaagtcagtttaccgttgccatggcaacactcgtgagttaccgcccctttccatggcagtggcaccataaaccaaaagttactaccccttccctagaaatgcctgcataaaccaccccttaatctgcatgtaattaaaagtgtgtataaatatgacagcaaaactgccctgacactctgcctaagagggtaaccctgctctgcaggagcagtcatggagctgtaacgccgccacttcaataaagccgttttcttctgcctctaacttgcccttgaattctttcttgggcaaagccaagaacccttgtgggctcagccgcactttggggcttacctgccctgcgtcaaaaggggtctcattggctgggcgcggtgtctcacgcctgtaatcccagcactttgggaggccgaggtgggcggatcatgaggtcaggagattgagaccatcctggctaacacggtgaaactccgtctttactaaaaatacaaaaacttagccagacgtggtggtgggcacctgtagtcccagctagtcaggaggccgaggcaggagaatagctcgaaccagggaggcagaagttgcagtgagctgagatcacgccactgcactccagcctgggcaacagagcagagactccgtctcaaaaaaaaaagcgaggggggggtctcattattcacaatagccaaataatggaaacaaatgtccatccactgatgaatggataaacaaaatatggtaaattcatttaatggaatattattagaccataaagaagtctgaagcacagatacatgttacaacagggatggaccttaaaaatatactgagggaaagaagccaggcacaaaaggccacatagtgtatcattccatgtatgtgaagtgttcttaataggcaaatccacagacagaaagtagatgtttggttgctaagggttaggggaggaggagagaatggataggactgtttagtgggcgcagagtttttggaaaatgatgaaaatattctggaattacatagtggtattggttgcacgatattatgaatacactaaaaaccactgagttgcacactttaaaatggttaaaatggtgacttctacgttaggtgaattttattttattttattttattttatttatttatttatttttttgagactcggtctccctctatcacccaggctggagtgcagtg

SEQ ID NO: 588741 - DNA, 4001 bp, Homo sapiens
gaatacaggcgtgagccactgcaccgggcctacaaagtgtttttaatcaaacactacggatgtgtaaaaaatcaaaaataaaagttgtcctactattttcagacccacttccctattaatagtttctggtgtacctttgcagatatttgcaatgttatacaagttttacatgcctgtgggggttgggaagattgtaatcctttttaaaaattacaggttaaaattatagattgatataccctgcgattttctttttcattcaacaacacagagattggccgggcgcagtggctcacgcctgtaatcccagcactttgggaggccgaggcgggcggatcacgaggtccgtagatcgagaccatcctggctaacatggtgaaaccccgtctctactaaaaatacaaaaaattagccgggcgtggtggcgggcgcctgtagtcccaggtactcggcaggctgaggcaggagaatggcgtgaatcagggaggcggaggttgcagtgagccgagatcgcgccactgcactccaacctgggagacagagcgagactcgtctgaaaacaaacaaacaaacaaaacaaaacaaaacaaaacacagagatctttccatgtccacatacatatatatacatctacctcaataacttaaataactgcacagtgttacagagtaatagcgcataatttggaatcctctgttaacggatatttagattgtttctagtgttctggtgccacacacgatatgttatattcttgcatataatgttgtagggtcctccagtcgccccctttctttctctgtcctgatggaaaatcagagtgccttgattgctctctgacctagccagcggcaggtttccctagcaggcttgaccataaaccaggggccttgaacattcacaggcctgataaaggtacctaggttgttgcccaaaacactggaagaaactggcctcaaccctgagccaaattcctttaaactctcatctgaactccataccctgaccccctcactgcggacatacccaggaacacctttctcccggtgtccgtcttgacaatttctgcagccctctgcaggtttccccctaaacgcttttggactgatcgccttggcattcagtgcttctttttctgtcatcccaaccagccacatctcgggaaggtttgaagcactccctcgtgggaactctcttgccgctgcttttggggcgattccagcctcgggttcgaaagaacaaagtaactgcacattttgtgcgcgtatacttgcattaaatttttttaacaagaatgactggatgaaaaagcatgtgaatttaaaatgctgatggttcttgccacattgccaggataggatccttttagaaggggaaacaaatcaagaacctgtacaaagagatgtggaatgctccttgtaagtggacagctttgctttcctcctttaatttctatttgatgaagaaggcagtgcctcactgctcagaggcagcgaggccaggcgacgggagaaaacaccctggggcactctcagaggctgaacctgaaccccatctcctgcctctgaacccaggatccttccttctctgcaaatttcggctactttccacctcccctgtgactgggaaaagcgctgttcttgccctcaaccactctcatgtccatatttaggggtgcccctctcctcggctcaagcccccggggtcctctcacctatggttctcgttaagcagggagaagagcgggccgaggcgcagctccgccgcttgctggcgaagctcgttgagcggcactgcctgcagcacggagtgaagcgcgcgtagctcctccagcggcgcttccagcctcgctacctctctcagcagcgccaaagcctgggctgccatcttgccccccgacgcaggggctggcccagcggcccagttcccggggcgctttcctgaacctcgcgagatctgatcacagcctccttgtccctgagatggctatggggctgccaagcctcgcgagaagcctccgttagggccgtgtcaactgtagccagtggttgcggctccctcagtctggcgtcatctaggtcgctgctcagggaaatgcggaggccagtaggcttacgtgtttaccgcgtagggcaaagccttgccaaattcccggccagcggagcggcgagggtggggactcacgggaagttaaacagcctcgtcggcgtcctcgaggctccaaaaccaggctctaggcggggacgactgcagccgttatggaggccaccgcggctacggccgcggctgaggcctccccaggtggagcggtggcctggaggggaatcttgatcctgggccagccacctgtcaagaggaggcggagcgtcatgcctctggaagactggatgaatattctccaggagcctgacgaaggcgtgagtaatagggacgtgcgccgccttgttggtgttgatcagtccaccaaggagaagcagctggtcgcagtggccgtacctgtaatcccagcgctttgggaggccgcggcgggaggatcgcttgagcccgggagttcgagaccagcctgggcaacatagtgagaaacccgtctctaccaaaaagaaaaaaaaaaaaaaaggaaaaaaattagtgcggtgtggtggcacgcacctgtagtcccagctactcgggaggctgaagcgggagggtcccctaagtctaggaggtcgaggcttcagtgagcggtgattgtgccactgcactccagcctgggcgacagagcaagaccctgctttcccctcttgtcctccactaccctcaggaaaccaagaaagaccagcgtggagagttggtcgcccatctgctctaagctgctgtgtattcccctgtaatgtaaacatcgtgaaggtggagacccagttaaccttttaggtggaaggccagatgacagagggcggcatctgacccggaaggccctctgcaaccaggccaaatacatctacagggaaccaatgggaaacatctggggaggacaacccaaataagtatcatgcgagcaagggatggtttgagaactttaaaaatcgctgctgttttgcaacatacgaagttgatggggaggaaggacccttaaatcctgagtgggtatcgagtattccaagcaactggagagaggctttgtgcctcaacaggtcttcaacgccaaggagatgacccatcttttgcagtgcatgccttcctacttttggggcaaaagacaaaaatctggaaagcttagaggaagctaaggacaggatttccctcatttttttgtggcagtgcctcaggtgacaaaatgataaaaccactgctgctttacaaagactctaacaccccacttgtcttttagagataaacgccttcctgttttcttgtaatcacacccagaatcaccactgccactttttggattagttttacaatttttttatccatcaaatccgaagtcatttaacaaaaaaaatctggaaatcagaatgttgctaactgtggacagaggtcccaatcacccagattcattattctttgttcattctaatgttgatactgtgtttctccctcaggaaggccctagctttcttcagcccttgggtcagggtataactgaagcatttgaacataatcaagcatatgtttgaccactttgctgactgtattgaaaaaaccctcaccttactctgaaagaagcatggcaacagtacaatattgccgatgctttggtagtgataaaagaggtgatgggtgatataaaatcagccactcttaagcttgctggaaactgtgggaggatgtgtgaatgatgcatatttccctagagctaatgaagaagttaaaaaaaatcttagtgtctgcaaaacaggtgggtttaagatttattgatattagggaaagtgaaattaatgagctactcaagtttctgtctttggtcatcactgagagtctatttccataggaagaagtctttgcagaggaaattgaatgc

SEQ ID NO: 588742 - DNA, 4001 bp, Homo sapiens
aatgtttaagacctatattacaaatcattacattattccgaatatccaacttatctcaaagttttaaatctcgaatgacccaaatccttattactaataaattatacattgaggatatattaatgaggttttacagtagaaaaaggattagggaggggcattaaagtcctttaagagtttccataaatgtgatccacaagaactgggacatgttccaaactgcactgtgttaaaaactgccaagccaatgaacattcaatcttggtttcttcaaatataatgatgctcttttagtctacctcaaagaagagaacataagatgattacgacattttgtattagatttctaatctctgctgtaatttcttctagaaaaataccagtgatgagaaaatacactcttcatttgtccaactttttttttttttgaggtcgtctcttacttgcactaaggctcccattctcaaaaagaaatcgaaagactgatatacagcaaggcatcaaagcattctttagaaggctcagcaaccactatggatactgccaggaaatcattccaaacactctcattttgaaaaaggcagcagtcataagggggagggaagtggatgctgtcagaggtggcaggtgtgttttgaggccagcagtgttttgtttttaatgtggcacagttgcacgtctccaattgtgtgccacaagggagcaaaacatccaacggcttcttaactgttttacaatcatcaccttggaggaaaagaacactttggtaagatacacgtttggcaacttttttaggcagaaaagctgaaccggttagaatacttaaaaaaaaaaatcatgagctccagtctaaagaataaaataaaaataaattaaataataataaaaaataataaactaaaaaaaaaaaaaataaactccaaaaacaactagctaaaatgaaagtaatgcagaactggatgccatgtttcttttctttgaggaggaagaggtatgggaaaggaggtacattgttgcttcttccctacacctttgtataatgtagatctctctctctctctcaatagctttcttttcacttgttacataaaagcaaagtgttacaaaaagtagactcttgcggtatcttcccacagtacttcaagtaaaatggaagagatacatatgtcagttctgcagtgtcccgttaaagagggcagcagtgttgggataaaaatgagttaacatgctccttgtaactatgaatccgcttatgctaaaaagtatcaaggtttcatttgctttatcccagactccacactgcgcccacagaagcttctcttgagaatgttctgttcacctttcaaaacacaatgtattatcggagtcactttacaattttgtggcaagtaaggctaaagtcaaaagcagcctcaaaccacctttagttagtaaactgaggggtttgaggctcattaaaagtaagaggatcggttaccccctcttgccaacgtccgggatgaatctcaagagttgtgtttacaaggcatacacggacccacatcgttgtgtgcgcccgagtaccttaaacacaggaaggatgtcgacctacgggggacgtctctggagtttcgtgaactcctatgaaaaggtggggagggacagagaaagtagttccgttttgattttttgaggtcacttctagggactcgaccgcgagcgcgtcccggtagcggaaagccgggccagcggcggccgacaacggtcccgcccgacacggctctgcctcctccctagaagggctcgtgggccaggacccgctgtccgcccgccgcccgaggtcgggtggacgcttggccccgcccccgcccgctcccgacgaccctcggaggcggcggaggcgcgcgactcacatgtgtgggttcctcctgaaggcgttagtgatgtccttcacaacccgctgcaccagcaccgccacctcctcgctggtctcggccatgttggcggcggccgcgacagttcgggcgcgcctccgcgtgagccgggccgccggcgggagttccgcggagaacgagcgcgcgcgcgcgcgcgcgggtgcttcggctaggccgcgtccccgccgccgcggccgccgccgagcacttccgggtcagccagttggcggcctgggcgtggcgttagctagggttggtggccttccagtgagtggagaagttcgcctccgcgcgggtaacggactttctaagcgtcagagaagatgctggacatttgtttgcaaagttctctcaggcctccgattttcttattttaagttttaggcgaaacctcaagacacactcccagagagtcagacaccttcctgaacccccccagcaaggtccccgggcattcctgaaggaatgttcaactgaggatgcagggcctcttaacagttagtcccgggcgtttttcagagcttgtctgctttattttcccagcctgagagatgaagaggtccagaggcattgcggcggagcgagtccctatttgaccgtgttggtgacctcctttctaactgtgccaatttttgtctctgaacttgaaagcagcctttttaaaaaacattaattaaaattcttaaatttattaaaggaagagaaaggaaagtgaaggaaaagttatttgccatctgtatgtaggaagtagaagtgaaatcgtttttagatttttcgacttcattttgtactgcatttggtagcctttgcgtcaattttggaatttaaaaaaaaggatcaaggctctgacagggtttgttcataatagcaaaaataaatttttgtaggaaaaacgagctttctagtttatttaggattttgaaatgccataactaaaatttttgtgtatcaggttttcttttgcacctctggtagaaaaatctggctgcccttggttcagttttattcttccacccttgaaatctggccaggtgcggtggctcacgcctgtaatcccagcactttggggggccaaggcgggcggatcacaaggtcaggagatcgagaccatcctggctaacacggtgaaaccccgtctctactaaaaatacaaaaaaaaaaaaaaaaaaaaaaaagccgggcgtggtggcgggcgcctgtaatcccagctactccccactgcactccagcctgggcgacagagcgagactccgtctttaaaaaaaggccgggcgcggtggctcacgcctgtaatcccagcaccttgggaggccgaggcgggtggatcatgaggtcaggagatcgagaccatcctggctaacaaggtgaaaccccgtctctactaaaaatacaaaaaattagctgggcgcggtggcgggcgcctgtagtcccagctactcgggaggctgaggcaggagaatggcgtgaacccgggaagcggagcttgcagtgagccgagattgcgccactgcagtccgcagtccggcctgggcgacagagcgagactctgtctcaaaaaaaaaaaaaaagaaatctgtatctttaaaaagctattaaaaaaataaactcatggtgtgtttaatgtgaacatatgcggagcgtttgaagtagtttttatgattgtaaaagtaaaagctatctattgcatgtaaagtgaatgagaaatataaacgaaaaatataaatttactatactcagtggccagtatttcctgtgggtatgtttataaaggctggagttagccttctggttgtaaaagaagtgagataggaccgggcacggtggcttacacctgtaatcccagcactttgggaggcagaggcggaaggatcacgaggtcaggagttcgagaccatcgtggccaagacagtgaaacgccgtctctactaaaaatataaaattagctgggcgtggtggcacgtgcttgtaatcccagctacttgggaggctgaggcaggagaagcgcttgaacgcggaagtaggaggttgcagtgagtggagatcgcgccactgccctccagcctggcgacagagcaagactccatctaa

SEQ ID NO: 588743 - DNA, 4001 bp, Homo sapiens
aatcatgctccgacttgaacttccaaatgaacttaccttccagtcagtatctgtataactgccttgcatattcaaaccaataaacccattactacctttaaaaccacaaatagcgtgaagggagagtaaacttcttaaacactatcaaaaagtaagtttgcacttcacagttatcctacagtttaacagcaaagacgcaaaattcaagagtcctctttattataactatacattttacgacacaaaaaaatagcctgcttccattatttaagtcaaaccttccagacaattaactacacataatgaaatgctaaattcacagcctgcctgaaccaaaatattagtgacacaaatctttacgaccacaaaatttttcaacatataaaatgcaactgaataaggtaatgtgaaataagttttcaacaatgttctcgaagaaacttcaatcaaacaataaaaacagcttcaattcccccccaaaatatatacacctactgtgtacccaaaaaagttataattttaagaaattttttgaagcttcaatcaaataaaaataaagaacatcacaatcatgaataaaatctaaaactccactttgatgtctgtagcagtgtgcaatctgcattcaaatgaatcaatccgaaatgtcatatacacttaatattgtgaaactaaaataaatgaaatctaatgaggtcaaaagctgttggaagatttcatcttcaaatagcatatcatcaactgtatggcaacatgtgaacgacttttactgttctagcaagttgcatatattccacaacctcacagaaatcttgtcatcaaaagtaggtaacaagctaaaaaaaacctcaaatacataatgggaataaaccgagttggagatttttttttaatccgtaggtacagatactacaaccttcaattaattcaccaaaatcctaacatagttgttactttaattaccaaaatatgtcaagtcccaccccatatccctgagtccccagagaacagtttatatacatagactctaaatctttttattttggtcacggacccccattaaatttttgagcatttgaaatgcccccgaaaatcgctcgtacatcatattttacatacacgggcagataattcattaagtttcttggggagagagaaaggtgagggggaagcgtccatggtcactaagtccagacccctggtgtcgagaaagcgttaacgtatctcacagcacaagtcgggagacctcggccaagtcccgcggcggccctgggaccccgcgtgggaccatggcttgcgaccaggtcgccgcccagacgtgtaccgacgcgtgcacccgccgtcggccgctcgccccacctcgccggtaaacagcaactcccccggcaggaggacgcccgccccgcgcgccgcctccgcctcccccagcgccgcgcaccattttctgagaggaagtgtcgggaggccgagctgggctccccggactcggggcgcggagggcggacctcggcaccgcggccggaccgggctttcctctgctcccgggtgtgtcgagtaaggctaggaagcagcggacgtgtccggggcgccgcgtggggaaaggagagcctgcggcggacggcaactccgcgattccgggatccccaccgagacgcccggaagccccgccgtcgggcttggccggggccgctcctccggccgccggcgccgcgcactgctccccagcccttacgcgtcccgcggagagccgggtggaagcggcgccaaggcaacccggtgcggccgccgcgccgcctagtacttacccatccatggcccagatggaggcgcgcacagagcagggactgacgggctaaccgcgagcagaggaagcaggcggcggcagcagggcggttccggggacaagcgagctttggctctgcggagccccggccggtccgaggtggaaggagagtgggaacaggggcggggaccgggcacgctcccgccaccgccgcgcccccgccttccccaccccgcgagcgcgtccccgcctagcccgaccccgccccctcaccgtccccgccctccctcggggcccgcccctgcgctcgcgcccaccctcgccccgctggcagccggcctccggctcagctctggggcgccctcttcccgcggtcgctgtaagaccccgcctctcggcccctcggcccggcgcgcgcgcgcgcccccagcctccctcctgcgttcgcgggagcgcgcgccttgtgcttcccgctccgccgcgcaccccgcccgccctcccgcggccccgcgggccttccggcttcgcagaccgggcctgccaggtttgaatgcctccctctgccggcaggaaaagctatggggacctgactcccaagagtaggaaggaatgtcccacaaggaccccagaaacgaggtggaattgccccgggtgcgcgaggctgtagatgacacgtccagggaccagcctctggcagcccggcgctggagtcgaccgctgggaccgacaccagccccataggtgtggctgggacgatgaatgaggtgaaagaggctgcccggactggaatttgtatacaatttaagtatctgagtgcatttcgacctaaccgtctagtattgaatttatatgaaaaattcattgtacaaacatggaatggctatattcccagcattttttaaaagtttactcattattcccttttttcagatgaaaatacatatacaaagagagtgatttgctcacagtttcacaaccaggaaacgtttgcaccagagcccttccctctggtctgagcaaaaagtatatatataatataacgagtgacaacacgcttgcttttttccctttttagtgagaaattgagtactttttcaactcacagatcaccaaaatgtaaccccctaaactgttaagccaaattcttaacctactgagtaaaaaagagcggggctcctccccgtggcttcgtcatttgaaaagcaactaacaagaacctcaaacatctatccttgctaatttcctgctttcagatcagtaggtgctgctaaaaagatctaaactgtggactcattcatcattcagtcagtattaacctactatgtgccgggcactgcatgaatacacaagaaaatcaggttccagccgtcactgttgaatggattcttcagtccgtttatgtatatttttgacatacaacttttcaaataggtagagtaattcggtgaggtaattcttaaagtcctgtatctaacctcagtccccttccaaaatgtcaaatacattttgttttgtatattaaatctaaatattaagttgcatttgtaaacattgccagatggaaatgtagaatatcaacaagataagtagctgatgcagtctttctatcactgtatttgggatatattctgttgatgaaatttccttaaccctttttttagctacacaagtaatatcagcataaatgctcattttggaaaattcaagcactataaaatattgaaaagttatcattaatatttttcttcccaaaccaccccctgcccatgactaccactgtaacaattctgcgtgcatccttctggaccttacttttttttgttgtttgtttttttgtttttttgtttttttgttttgagacggagtcttgctctgtctcccaggctggagtgcagtggcacaatctgagctcactgcaacctctgcctcccgagttcaagtgattctcctgcctcagcctcctgagtagctgcgattacaggcgcccgccaccacgcctggctagtttttgtgtttttagtagagacagggtttcaccatgttggtcaggctggtctcgaactcctgaccttgtgatccacccacctcagcctcccaaagtgctgggattacaggtgtgagccaccgcacccagcgacctttaccatttttcttttttttttttttttttttcacctaaaaatcctggattatagctgggcatggtggctcacacctg

SEQ ID NO: 588744 - DNA, 4001 bp, Homo sapiens
tattctatcacgtcaaaactgtgtttaagtataaattatctcttaggaggaaacgaacacacacacacacacacacacacacacacacacacacacacacgagagacagttgggatttgaggaggaactagaaagatatgttgactggtggcttgtggtttgttttttaactacccaaataaggaaaaaggatctttttcaggctgttggaaaatgtagaaatttaattagtctcctgaaggcaaaaatgcactgtattcttaaaccacatcccttaagaccagggtgtgaaaatcccctttaaagtcctgccatacaaaaattcttctcttctaagccccaagaaactgtcttcgattaatgtttttcttcatatctcctagaagaaagctacgaatacattctacatattgttaataacctatgtcatcattacctcataaaagtcaacgaataaatgactctagatgatgtaaactgtttttaaaataccacgtagattttttatttttccttgtaaacttctgaaacttgaaattcatttgtctaaaatttaaatgtgataagtaactggacgcttgctgcataaaaaataaaatggtgtaacactatggttattggttctgatacaaagggcaaatcatgctccgacttgaacttccaaatgaacttaccttccagtcagtatctgtataactgccttgcatattcaaaccaataaacccattactacctttaaaaccacaaatagcgtgaagggagagtaaacttcttaaacactatcaaaaagtaagtttgcacttcacagttatcctacagtttaacagcaaagacgcaaaattcaagagtcctctttattataactatacattttacgacacaaaaaaatagcctgcttccattatttaagtcaaaccttccagacaattaactacacataatgaaatgctaaattcacagcctgcctgaaccaaaatattagtgacacaaatctttacgaccacaaaatttttcaacatataaaatgcaactgaataaggtaatgtgaaataagttttcaacaatgttctcgaagaaacttcaatcaaacaataaaaacagcttcaattcccccccaaaatatatacacctactgtgtacccaaaaaagttataattttaagaaattttttgaagcttcaatcaaataaaaataaagaacatcacaatcatgaataaaatctaaaactccactttgatgtctgtagcagtgtgcaatctgcattcaaatgaatcaatccgaaatgtcatatacacttaatattgtgaaactaaaataaatgaaatctaatgaggtcaaaagctgttggaagatttcatcttcaaatagcatatcatcaactgtatggcaacatgtgaacgacttttactgttctagcaagttgcatatattccacaacctcacagaaatcttgtcatcaaaagtaggtaacaagctaaaaaaaacctcaaatacataatgggaataaaccgagttggagatttttttttaatccgtaggtacagatactacaaccttcaattaattcaccaaaatcctaacatagttgttactttaattaccaaaatatgtcaagtcccaccccatatccctgagtccccagagaacagtttatatacatagactctaaatctttttattttggtcacggacccccattaaatttttgagcatttgaaatgcccccgaaaatcgctcgtacatcatattttacatacacgggcagataattcattaagtttcttggggagagagaaaggtgagggggaagcgtccatggtcactaagtccagacccctggtgtcgagaaagcgttaacgtatctcacagcacaagtcgggagacctcggccaagtcccgcggcggccctgggaccccgcgtgggaccatggcttgcgaccaggtcgccgcccagacgtgtaccgacgcgtgcacccgccgtcggccgctcgccccacctcgccggtaaacagcaactcccccggcaggaggacgcccgccccgcgcgccgcctccgcctcccccagcgccgcgcaccattttctgagaggaagtgtcgggaggccgagctgggctccccggactcggggcgcggagggcggacctcggcaccgcggccggaccgggctttcctctgctcccgggtgtgtcgagtaaggctaggaagcagcggacgtgtccggggcgccgcgtggggaaaggagagcctgcggcggacggcaactccgcgattccgggatccccaccgagacgcccggaagccccgccgtcgggcttggccggggccgctcctccggccgccggcgccgcgcactgctccccagcccttacgcgtcccgcggagagccgggtggaagcggcgccaaggcaacccggtgcggccgccgcgccgcctagtacttacccatccatggcccagatggaggcgcgcacagagcagggactgacgggctaaccgcgagcagaggaagcaggcggcggcagcagggcggttccggggacaagcgagctttggctctgcggagccccggccggtccgaggtggaaggagagtgggaacaggggcggggaccgggcacgctcccgccaccgccgcgcccccgccttccccaccccgcgagcgcgtccccgcctagcccgaccccgccccctcaccgtccccgccctccctcggggcccgcccctgcgctcgcgcccaccctcgccccgctggcagccggcctccggctcagctctggggcgccctcttcccgcggtcgctgtaagaccccgcctctcggcccctcggcccggcgcgcgcgcgcgcccccagcctccctcctgcgttcgcgggagcgcgcgccttgtgcttcccgctccgccgcgcaccccgcccgccctcccgcggccccgcgggccttccggcttcgcagaccgggcctgccaggtttgaatgcctccctctgccggcaggaaaagctatggggacctgactcccaagagtaggaaggaatgtcccacaaggaccccagaaacgaggtggaattgccccgggtgcgcgaggctgtagatgacacgtccagggaccagcctctggcagcccggcgctggagtcgaccgctgggaccgacaccagccccataggtgtggctgggacgatgaatgaggtgaaagaggctgcccggactggaatttgtatacaatttaagtatctgagtgcatttcgacctaaccgtctagtattgaatttatatgaaaaattcattgtacaaacatggaatggctatattcccagcattttttaaaagtttactcattattcccttttttcagatgaaaatacatatacaaagagagtgatttgctcacagtttcacaaccaggaaacgtttgcaccagagcccttccctctggtctgagcaaaaagtatatatataatataacgagtgacaacacgcttgcttttttccctttttagtgagaaattgagtactttttcaactcacagatcaccaaaatgtaaccccctaaactgttaagccaaattcttaacctactgagtaaaaaagagcggggctcctccccgtggcttcgtcatttgaaaagcaactaacaagaacctcaaacatctatccttgctaatttcctgctttcagatcagtaggtgctgctaaaaagatctaaactgtggactcattcatcattcagtcagtattaacctactatgtgccgggcactgcatgaatacacaagaaaatcaggttccagccgtcactgttgaatggattcttcagtccgtttatgtatatttttgacatacaacttttcaaataggtagagtaattcggtgaggtaattcttaaagtcctgtatctaacctcagtccccttccaaaatgtcaaatacattttgttttgtatattaaatctaaatattaagttgcatttgtaaacattgccagatggaaatgtagaatatcaaca

SEQ ID NO: 588745 - DNA, 4001 bp, Homo sapiens
tgaaacttcgctctcagccacagcggcgctttccggccagtagccttcccctggggacgaagcagaagggaggagtgagcgccggggagtcgcggcccgcgcgcccacgcccgcttgcgcgcacccgcccggtgagcccccaacagccgtgggggcgcgggtggccgcggcacacggactcgccctcgagactgcagccccggcggatctgagcgtcatggggggctcggtcataaagccgggccgcagcgtgggagctgcacctcggggacatcagggcgcccccacccgcgggatccctgagcgacttggggcactggggctgcaatacagaagaggaagccgaggtagagaggagagaaaccactcgacacagacaatattcaccccagagctgagaagggaggggctgcgtaatcccagcgatggagcccaaggttcaggagccagcaaaccagtcctgctctgtccatcaccctcggggacgggcgctaggggcgagcgctctttggaacaacatattgcgggttcccccaactggacccccgccgagaatggtagtaagtggggatccacgtggtgagcgcggccgccggagttcactcccgacgcatttccatagcgtggggagaggctgtgtgagctgaattaggaagtggggcagccagctgcaacttacgacaatatttgtgatcggaagagggcagccacatggatctttccctcctctcccttcctttctggttaaacgtaaaaaacagccgagtgcaaagggaagggctcaggccggcgcaggctgctccccggcgcggcatttccccggcgctggccgcggccccggcgggcccccgtctgggtgctcgccttccctggattccacacatttcagcgagcctcgtaaacacaatgaacccggcagctccgcagactcgcaccgcgaatttaaggtggcaatttgtttacaacttttcctcccccgaccaggccctaaggagaggcggctcaaaacctggaaaacgggggggatatctttttccgagaataattttttaagggagcagagatttcatgctcaacaaaaccaaaactggctgccaaaaaaggaaaccacctttatttcggctccctccccccttcctctctccgcctctctccactccgcctccccctccaagatgttaagaaatgtggcagccgtacaggagtttaggctgcaaataggggcaggggcgcaggaggaagaagttcagggcagggggcacggggcaggacagtgccgcggccgcccttgaggtggtccgccgtggacggctttccagtgctccggaaaaggcacaccagggagggcgtgtgtatacacacacacacacgcacacacacacacctccaccccctgcggacctcagacagccctttcctcccaggaccagagggagggtttgaatttttcaatccccatttgtctgctgcttttcctggagaggtgtgagtgagtgtgtgtgtgtgtgtgagagagagaggaagagagtgtgtgtgtttgtgtgtggcgggggcgatcccaaagagttagaggagggaagagaaagtgggaggagagagtctgaaatgcaccttggaaatctgctccagagcgaaggcggcgtcgcagtagctgggccggtgcagatagtcccggtccggcgcggcagcacggcgcagcccccccgtccgtctgcgcctcccgcctccagccggccgtcccggggcaccgatacagccgctgccgccgccgccgcggtcctggggctcggcggcgttaccagccgaggccatgttgccgccgccgccgccgccgccgcggggacggaggcttcccgggcggcccggcgcgctgctgccgctgctgcgggctcctggcgcgcctgggcgctcggcttgcgaggacgctgctggccgcaggctgctcgggctcgggctccggttgacagaccagccgctgctgctgctcacacggcgggcgctgctgccgctgcggccgcggccgctgccggggagtcagaccctgcgccttccattgccacattgcgcgggggtcccgaggtctctgcggccgccgctgcccacatccagttcgcggaagagcgagagccggcgcgccgagcgagcctgtccttcgggcgcttccgcggcactccttgcggtccccaactccccctacccgccccccgccccgcgccgcgaccccttcactgcagaaagagccagcgaatccccgctgctcccgccggccgcgctggctctctcggcgcctcccgggtcgcccgagcggccgcggagggcaagcgcagagccgccgccgccgcggggtccgagggtgcccggcgggtctcagcgctgccgggcccgggcagccgcagctgccgctgctcccgcggtggctgctgctggcggtggcggctccaggagctgctgctcgggctgctcgggctctggctgctgggttcgcggtggctgctcggtcccggactctgctttcttgtgctcctcggcaacccgctggaccattctgtccccgtgcagcgcgcctctctcgctcccgggacctggggactccgctctgtgtgtgtgcagcgggcagcggccgcagcagctccttgattcaatagatgagatggaagaagaaaaaaaagaactctctccatttggagaaagaagaggaggaggggaggggagggggtggagggggagagagcgagcgaaagagaaaaaggctggagctcccgcccccggggctgtcagatggcttgggtttctgcgacgcgattggctcgcggagggcagaaattactcagcaaacatgactattattagctgcttagcaacagctcaccaaagtagagagaccacccaggtaggcaacccagtgtgtgcatcctcggcttcggggcagcctctgagagcgccaaccttctcgcatgcaatacttccattaaggaatgctccccctcctttctctcttattccttttcttttcaacagtgtcttctttttgtgggatgcctttgcgcgcacacacgcgcgcgcacgcacacacacgaacatttgcctcgcggtagacacggggggaaatgtaatatttttttaagcgcttaaacaatttctgaaattcctcaaagaaaagcctttcagaggcaccttggcctcaagctgcagcaaatactgggaggtccggctcgcattcccaggcctgcaccaataatgacagcgtgctggatagtgcgccagtgtgtgccagatttttttttcctcttctcttttcttttataactaaagggaagacttaggctcttgcagggaacaacgcctcgcattaagataaacagaatggaaagttaaagaggaaagcaaggacgttgggaaaagccatctttcttaaaatccgtctgccccccagccgctttctccccccaacttaaaaaaaaaaaaaacacagtcttggtttgaaggagtcagtgttctataaacgtggaatccagacaccgaagcagtcttgtagaggcagaggcgtttttatttgaatctcgaatgtgacataagtaaaagagaaacaacagaatctttttttacaacttagagaaacggaattgtttccttgagagagtaaagttttcctgattattttgggttcatttgtacacccctttttattaaccagatgtttatatagtcagtatttttttttacaaaactcggtatgcatgttatatttaataatagtatgacgtaggagattataaatgccccgatgctggattcattgaaaacaaactgtgcgcggatcgcgaggattcgtcccgacaccgcgtccagtgtcaccaaggcatcccggggattcgcttcccgcggagggggaaaacacgcgaccctttgaggtggattctggagccagacacgtctacacaactaggctttttatttaaaaaaatttttgttttcggaaagtggaatgtgtttttcttacg

SEQ ID NO: 588746 - DNA, 4001 bp, Homo sapiens
attttatagccttgtggaaggaagctgggtgacaactggaacacacataaactcacaatcgaaagccccttgttttacaacttgggcactccatgcacctgaggcaacaatttatccggagtaccacccagaaattttaagttgcaataacaaaggatgacaccataaagcattgtctttctttgtggaggcgattaattgcatgctgaactactgtcgccaataaacacagaaataaataaaaacctaaaagaaatgcacacacacagaatgctgaaaaaggactattgtggtagttcaagacctcagtgatccaattatcaaatatttagagccacccattgtggctctttattatttatgtctagttcttttgtatttctcctccccagggaggaagaaaggataaaaagggaggaagacggtcttctctcccaggtgcaggaaaacaggtctgtgggtgtcttccacagccgcccacccatatggttcttcttaggtgatggaaacagatcagtttccctgagagtgtgctcatccacacgctagcatcattttaaacatgaacgtactaaatacgtggagacacagcgcatgtcacccagaggcacagtttctgggggtcttggggttcagcgctgggcccgggcctgtaaagtgagaatcggtccggcccgcccccgggctcccctgaggccgcactctgcactctaagcactgggctggtcgcccatctctgtaagggtggcagccacccaagcgcctgaatcggtgggcataagagtcacacacaccacctctcttacccaccgccccttccagaactccaaaagcctctctggcccttttcccgcagcatgggaggggaggtgggtaaggtgcgtctcttctagcccgggtgtcccgcacccctaggcgtgcgtgcgggctcgagagcgggtctgcggggcgcgagcgtgcccttccctgcggctgcggctgctcccgcgagctggcggcagcggcttccgcgcgcgcgctctgagccccctcccctcggcgctgtcactctccgcaccagcccttccatcaccagctctgcctccgctggcgagtcagtagccaccaccaggctgatgagcggaagccaaggtggcgaccctttcaggcgtgaaaatgggagctccggcgaccccctccgtgagaattccccccggagccgttcctcagccggggcccgccgcggccagccccctccccgccacgcggggctggcctcgggggcgggggcccgggcgtgcgagcgagcgtggaggcgcgggacccgcgctcccgcgcccaggcggcgcagcccacccggctccacggccccggcgcgcggcccgcccctcctgcccggcgctcggggctcgctcctccgtccgccgcgcggggcgtcccgcgtccccgtgtccccgcgccgcccgaggagcacggcgcgcgaggcgaggtggcgtcggcggccgccgcgctggctgcactcaccatagccggccgtcaacccctgctcggagcgcgggtgccgatggcgcggacgctgggcttggatttcacatcaattccttttttttccctggcccccctttcctcgtcctccgctcctccgtcttctcccagtcttccctcgtctcccccttgccttgtcgctgcgggtctctttgtctcccctgtcgtctttttcttctcctccgttttcttcttcttcttctcctcctcctccgtctttacaaaaggaacggaaagtgtaaaaaccccggcgcgctgggccgccggaggctttcggcggagtgcagcgcggactcacaattacaagcctgtttctattaagcagttccatggccctcggcgtgggtggtctgccgcgccataggcaggacctgtcagggtcacgtgacggatccgaaaactttacccctttacaataaactcaaggaaagcaaagtaaactcgaggaacgtgctatcagcacagccctcctgggtaaacaggcgctcccctccccgccttcctgggaggcgccctgcccggcgagctcccgcgagcctagccaccctctccccgccccccgcggccgtgtttgcggggggccgccgggctgggggtctccgcgcgctcccgcggcttctccaccttgtgctcggctcccccgcccccgcacacattatttgctaacatttggccatcttgtcccaacgccggtcgggggaggtgtggggaagcaaggaagctccttttagcatcctcagcggtccgggaagtggggggttcccagaggactgcagaagaacaccacctttcatgcttgcattctcaaagcctttccttctcgcattcccacggaagcgcggaaaagctgggagccttctagatgacaggcctacgggccgccagaggggcggggagcaggaaaaccggacagatcacagcgccttcccggggaaatttcagcacgagatgtgtgcggattcgtgtcggtccctcggaagccgtttcttctgaaagagaccaaggtggcgtcccttggaaaccaagatttgtacctggtccgaagaatcacggattgacatttgctccctttctcttctgattcctgtggtttctggggtatgccacccaaatgctcccacctactgtgccgtcctgtgccaggcggccttgggtgactggcctaaacctaggagctggtgggtcgcgcggataaccctgctctcgctcaagactgaagcgttctattcgggagcgcccccgctacaatgtctgacattttatctgctcaaccccgccgctggtagacggtgtttcacacactgcgactttaaatgggccacattatgaataaagatgaattacagatacaagggcagggtagagggagtgagaacatttactgcagctctgaagagctgactagctggtcttgaaataaagccagactcttctcacttcattctgggctgacagtgtgattaggtgtgtgtgtgtgttgggggcggggggggcggggcgggggtagaagaggtgccccatgtgttattaaataataataatcatcctaggagttttgggatctccctcccacaaagatgacgtagccattcttgagcagagtcatttgagtttccagaatgtatgtgtttgagacacgttaagtaattaagcattagaaggggggcagccctgtgaatttggctggtccagaaggtcattttcataccagtgacttcagtcaaaaatggactcaaatgcatattggctgaccatggattctaaaagtcacaatagttgtaacaacaacaacaaaaaacccaacatttcccttcgaaacacttccccctgtcttttggtgtcatatcaaagggccctgtttatctataaatgtgagtggggttatgaacaggaaggtatacataatctccaaatagaggggtctagaatatgagggagaaagggggataagaaaaaagagaaacagccgacaaagggcatttaaatggcccacaatatacagttgctaggaaaattacagcagaacttgaggagtttgctttttctagttaaaatgaagaccctcatggaagcacacttggctacatgctcctgctgagttgtggccaaggctgatactcaagagtggacactagttttgtgtggcctaggacttaggcagctttcagagtgaacggggagtggggagcttctttagcaactcaaaactgcaaacacaaaattaagtacagggccttgaagtggcctgggcagggaggagccctaaagctacctgggcttctaggaaatcgcctttcttgagtgtgcagacaggaggacgacagaactacccagtctttgtggtcctggtggtctacgctgtcccttagttaggactgaatgtgttcatatgagtcttatcttagtccaaggctttacaattgggagcaaagacaagtttgttttgtacaagagtgtaagtacttagagttgggcag

SEQ ID NO: 588747 - DNA, 4001 bp, Homo sapiens
cgggagaggccagccccggggcgcctctcggggcgcggcccaggcggacagcggcagcggcggcgggcccggggcccccggcgcgcagagtggtccgtcccggaggggccccgcgcccccgtcccgcccccgccgctctctcccaccacacctcggccggcgcagcgccccgagtagattacagcgcggcctttgtcgggcgggcctggctcccggccaggcgcccaaacaataaacaatcccccgggtgcgggcagggggtttcgccggccgcagccaggctctaggtgtgcgctggcgaatatctctatcaaccgcgaggagggaccgggccgggggcgcgggcgccgcggcgggcgctcttaccttccacccacagctcctccacgttggtctcgaggttcgctgcttttaatcccaccgcgaaggccccaaatatgaggaggcccacaaccaagaacttgccgcagtttttttgaatgtaacaacccagtttaaataagagtctctgaaacttcgctctcagccacagcggcgctttccggccagtagccttcccctggggacgaagcagaagggaggagtgagcgccggggagtcgcggcccgcgcgcccacgcccgcttgcgcgcacccgcccggtgagcccccaacagccgtgggggcgcgggtggccgcggcacacggactcgccctcgagactgcagccccggcggatctgagcgtcatggggggctcggtcataaagccgggccgcagcgtgggagctgcacctcggggacatcagggcgcccccacccgcgggatccctgagcgacttggggcactggggctgcaatacagaagaggaagccgaggtagagaggagagaaaccactcgacacagacaatattcaccccagagctgagaagggaggggctgcgtaatcccagcgatggagcccaaggttcaggagccagcaaaccagtcctgctctgtccatcaccctcggggacgggcgctaggggcgagcgctctttggaacaacatattgcgggttcccccaactggacccccgccgagaatggtagtaagtggggatccacgtggtgagcgcggccgccggagttcactcccgacgcatttccatagcgtggggagaggctgtgtgagctgaattaggaagtggggcagccagctgcaacttacgacaatatttgtgatcggaagagggcagccacatggatctttccctcctctcccttcctttctggttaaacgtaaaaaacagccgagtgcaaagggaagggctcaggccggcgcaggctgctccccggcgcggcatttccccggcgctggccgcggccccggcgggcccccgtctgggtgctcgccttccctggattccacacatttcagcgagcctcgtaaacacaatgaacccggcagctccgcagactcgcaccgcgaatttaaggtggcaatttgtttacaacttttcctcccccgaccaggccctaaggagaggcggctcaaaacctggaaaacgggggggatatctttttccgagaataattttttaagggagcagagatttcatgctcaacaaaaccaaaactggctgccaaaaaaggaaaccacctttatttcggctccctccccccttcctctctccgcctctctccactccgcctccccctccaagatgttaagaaatgtggcagccgtacaggagtttaggctgcaaataggggcaggggcgcaggaggaagaagttcagggcagggggcacggggcaggacagtgccgcggccgcccttgaggtggtccgccgtggacggctttccagtgctccggaaaaggcacaccagggagggcgtgtgtatacacacacacacacgcacacacacacacctccaccccctgcggacctcagacagccctttcctcccaggaccagagggagggtttgaatttttcaatccccatttgtctgctgcttttcctggagaggtgtgagtgagtgtgtgtgtgtgtgtgagagagagaggaagagagtgtgtgtgtttgtgtgtggcgggggcgatcccaaagagttagaggagggaagagaaagtgggaggagagagtctgaaatgcaccttggaaatctgctccagagcgaaggcggcgtcgcagtagctgggccggtgcagatagtcccggtccggcgcggcagcacggcgcagcccccccgtccgtctgcgcctcccgcctccagccggccgtcccggggcaccgatacagccgctgccgccgccgccgcggtcctggggctcggcggcgttaccagccgaggccatgttgccgccgccgccgccgccgccgcggggacggaggcttcccgggcggcccggcgcgctgctgccgctgctgcgggctcctggcgcgcctgggcgctcggcttgcgaggacgctgctggccgcaggctgctcgggctcgggctccggttgacagaccagccgctgctgctgctcacacggcgggcgctgctgccgctgcggccgcggccgctgccggggagtcagaccctgcgccttccattgccacattgcgcgggggtcccgaggtctctgcggccgccgctgcccacatccagttcgcggaagagcgagagccggcgcgccgagcgagcctgtccttcgggcgcttccgcggcactccttgcggtccccaactccccctacccgccccccgccccgcgccgcgaccccttcactgcagaaagagccagcgaatccccgctgctcccgccggccgcgctggctctctcggcgcctcccgggtcgcccgagcggccgcggagggcaagcgcagagccgccgccgccgcggggtccgagggtgcccggcgggtctcagcgctgccgggcccgggcagccgcagctgccgctgctcccgcggtggctgctgctggcggtggcggctccaggagctgctgctcgggctgctcgggctctggctgctgggttcgcggtggctgctcggtcccggactctgctttcttgtgctcctcggcaacccgctggaccattctgtccccgtgcagcgcgcctctctcgctcccgggacctggggactccgctctgtgtgtgtgcagcgggcagcggccgcagcagctccttgattcaatagatgagatggaagaagaaaaaaaagaactctctccatttggagaaagaagaggaggaggggaggggagggggtggagggggagagagcgagcgaaagagaaaaaggctggagctcccgcccccggggctgtcagatggcttgggtttctgcgacgcgattggctcgcggagggcagaaattactcagcaaacatgactattattagctgcttagcaacagctcaccaaagtagagagaccacccaggtaggcaacccagtgtgtgcatcctcggcttcggggcagcctctgagagcgccaaccttctcgcatgcaatacttccattaaggaatgctccccctcctttctctcttattccttttcttttcaacagtgtcttctttttgtgggatgcctttgcgcgcacacacgcgcgcgcacgcacacacacgaacatttgcctcgcggtagacacggggggaaatgtaatatttttttaagcgcttaaacaatttctgaaattcctcaaagaaaagcctttcagaggcaccttggcctcaagctgcagcaaatactgggaggtccggctcgcattcccaggcctgcaccaataatgacagcgtgctggatagtgcgccagtgtgtgccagatttttttttcctcttctcttttcttttataactaaagggaagacttaggctcttgcagggaacaacgcctcgcattaagataaacagaatggaaagttaaagaggaaagcaaggacgttgggaaaagccatctttcttaaaatccgtctgccccccagccgctttctccccccaacttaaaaaaaaaaaaaacacagtcttggtttgaaggagtcag

SEQ ID NO: 588748 - DNA, 4001 bp, Homo sapiens
ccaaaaagataaataagaaaccagcgggggaaaaaaattgaaacctttgtcaccaaaataatgtaaaaatgtttgtcttcgaaaaaatatatatctattttaaatctgcaactgctttgctaaggtctcaagaaccccaaaactgaggaacgtggataaaagactggcagaacccctctgagaggtcccttcaaccccgcgttcttaaaacatttcttttctttgcctgcaaaatgcagccttcccccagaataattccatgtaaaaagcccccacccgcgaggaaacattaatctactttgcaaacatgcgttccagtctgtgccttactatttttttttccactccttccacccccaccccgcgttttttgtaccttgagacaaatgtttttttccctcagagttgaaagctgtccaaaaacaggaccacacacgccgccgcctccgcagccccgcgctgcgcccgcccccggccctccccagcgcggcggccgcggccgccgggggcgcgcacactccagccagccggaggggtggcctctggctctccccgactcctttttctttggacgcggtgggtgggggtgggggagagaagaaagccgggccgcggagcggggccgggagaggccagccccggggcgcctctcggggcgcggcccaggcggacagcggcagcggcggcgggcccggggcccccggcgcgcagagtggtccgtcccggaggggccccgcgcccccgtcccgcccccgccgctctctcccaccacacctcggccggcgcagcgccccgagtagattacagcgcggcctttgtcgggcgggcctggctcccggccaggcgcccaaacaataaacaatcccccgggtgcgggcagggggtttcgccggccgcagccaggctctaggtgtgcgctggcgaatatctctatcaaccgcgaggagggaccgggccgggggcgcgggcgccgcggcgggcgctcttaccttccacccacagctcctccacgttggtctcgaggttcgctgcttttaatcccaccgcgaaggccccaaatatgaggaggcccacaaccaagaacttgccgcagtttttttgaatgtaacaacccagtttaaataagagtctctgaaacttcgctctcagccacagcggcgctttccggccagtagccttcccctggggacgaagcagaagggaggagtgagcgccggggagtcgcggcccgcgcgcccacgcccgcttgcgcgcacccgcccggtgagcccccaacagccgtgggggcgcgggtggccgcggcacacggactcgccctcgagactgcagccccggcggatctgagcgtcatggggggctcggtcataaagccgggccgcagcgtgggagctgcacctcggggacatcagggcgcccccacccgcgggatccctgagcgacttggggcactggggctgcaatacagaagaggaagccgaggtagagaggagagaaaccactcgacacagacaatattcaccccagagctgagaagggaggggctgcgtaatcccagcgatggagcccaaggttcaggagccagcaaaccagtcctgctctgtccatcaccctcggggacgggcgctaggggcgagcgctctttggaacaacatattgcgggttcccccaactggacccccgccgagaatggtagtaagtggggatccacgtggtgagcgcggccgccggagttcactcccgacgcatttccatagcgtggggagaggctgtgtgagctgaattaggaagtggggcagccagctgcaacttacgacaatatttgtgatcggaagagggcagccacatggatctttccctcctctcccttcctttctggttaaacgtaaaaaacagccgagtgcaaagggaagggctcaggccggcgcaggctgctccccggcgcggcatttccccggcgctggccgcggccccggcgggcccccgtctgggtgctcgccttccctggattccacacatttcagcgagcctcgtaaacacaatgaacccggcagctccgcagactcgcaccgcgaatttaaggtggcaatttgtttacaacttttcctcccccgaccaggccctaaggagaggcggctcaaaacctggaaaacgggggggatatctttttccgagaataattttttaagggagcagagatttcatgctcaacaaaaccaaaactggctgccaaaaaaggaaaccacctttatttcggctccctccccccttcctctctccgcctctctccactccgcctccccctccaagatgttaagaaatgtggcagccgtacaggagtttaggctgcaaataggggcaggggcgcaggaggaagaagttcagggcagggggcacggggcaggacagtgccgcggccgcccttgaggtggtccgccgtggacggctttccagtgctccggaaaaggcacaccagggagggcgtgtgtatacacacacacacacgcacacacacacacctccaccccctgcggacctcagacagccctttcctcccaggaccagagggagggtttgaatttttcaatccccatttgtctgctgcttttcctggagaggtgtgagtgagtgtgtgtgtgtgtgtgagagagagaggaagagagtgtgtgtgtttgtgtgtggcgggggcgatcccaaagagttagaggagggaagagaaagtgggaggagagagtctgaaatgcaccttggaaatctgctccagagcgaaggcggcgtcgcagtagctgggccggtgcagatagtcccggtccggcgcggcagcacggcgcagcccccccgtccgtctgcgcctcccgcctccagccggccgtcccggggcaccgatacagccgctgccgccgccgccgcggtcctggggctcggcggcgttaccagccgaggccatgttgccgccgccgccgccgccgccgcggggacggaggcttcccgggcggcccggcgcgctgctgccgctgctgcgggctcctggcgcgcctgggcgctcggcttgcgaggacgctgctggccgcaggctgctcgggctcgggctccggttgacagaccagccgctgctgctgctcacacggcgggcgctgctgccgctgcggccgcggccgctgccggggagtcagaccctgcgccttccattgccacattgcgcgggggtcccgaggtctctgcggccgccgctgcccacatccagttcgcggaagagcgagagccggcgcgccgagcgagcctgtccttcgggcgcttccgcggcactccttgcggtccccaactccccctacccgccccccgccccgcgccgcgaccccttcactgcagaaagagccagcgaatccccgctgctcccgccggccgcgctggctctctcggcgcctcccgggtcgcccgagcggccgcggagggcaagcgcagagccgccgccgccgcggggtccgagggtgcccggcgggtctcagcgctgccgggcccgggcagccgcagctgccgctgctcccgcggtggctgctgctggcggtggcggctccaggagctgctgctcgggctgctcgggctctggctgctgggttcgcggtggctgctcggtcccggactctgctttcttgtgctcctcggcaacccgctggaccattctgtccccgtgcagcgcgcctctctcgctcccgggacctggggactccgctctgtgtgtgtgcagcgggcagcggccgcagcagctccttgattcaatagatgagatggaagaagaaaaaaaagaactctctccatttggagaaagaagaggaggaggggaggggagggggtggagggggagagagcgagcgaaagagaaaaaggctggagctcccgcccccggggctgtcagatggcttgggtttctgcgacgcgattggctcgcggagggcagaaattactcagcaaacatgactattattagctgcttagcaacagctcac

SEQ ID NO: 588749 - DNA, 4001 bp, Homo sapiens
tcaaggtctccaacagcatcctgaaagggatcactgaagcgattatgcgcataactcttcagcttccacatgctgtccggaggaatgctccaggtattttggtttgaattatctacctagtcacctctaccctcccctactaccctcttgtaaggtaagggatgcccaaagtggtgtttagggttaaagtgtttccaaatagcaggatttggaacttgccaaaaagataaataagaaaccagcgggggaaaaaaattgaaacctttgtcaccaaaataatgtaaaaatgtttgtcttcgaaaaaatatatatctattttaaatctgcaactgctttgctaaggtctcaagaaccccaaaactgaggaacgtggataaaagactggcagaacccctctgagaggtcccttcaaccccgcgttcttaaaacatttcttttctttgcctgcaaaatgcagccttcccccagaataattccatgtaaaaagcccccacccgcgaggaaacattaatctactttgcaaacatgcgttccagtctgtgccttactatttttttttccactccttccacccccaccccgcgttttttgtaccttgagacaaatgtttttttccctcagagttgaaagctgtccaaaaacaggaccacacacgccgccgcctccgcagccccgcgctgcgcccgcccccggccctccccagcgcggcggccgcggccgccgggggcgcgcacactccagccagccggaggggtggcctctggctctccccgactcctttttctttggacgcggtgggtgggggtgggggagagaagaaagccgggccgcggagcggggccgggagaggccagccccggggcgcctctcggggcgcggcccaggcggacagcggcagcggcggcgggcccggggcccccggcgcgcagagtggtccgtcccggaggggccccgcgcccccgtcccgcccccgccgctctctcccaccacacctcggccggcgcagcgccccgagtagattacagcgcggcctttgtcgggcgggcctggctcccggccaggcgcccaaacaataaacaatcccccgggtgcgggcagggggtttcgccggccgcagccaggctctaggtgtgcgctggcgaatatctctatcaaccgcgaggagggaccgggccgggggcgcgggcgccgcggcgggcgctcttaccttccacccacagctcctccacgttggtctcgaggttcgctgcttttaatcccaccgcgaaggccccaaatatgaggaggcccacaaccaagaacttgccgcagtttttttgaatgtaacaacccagtttaaataagagtctctgaaacttcgctctcagccacagcggcgctttccggccagtagccttcccctggggacgaagcagaagggaggagtgagcgccggggagtcgcggcccgcgcgcccacgcccgcttgcgcgcacccgcccggtgagcccccaacagccgtgggggcgcgggtggccgcggcacacggactcgccctcgagactgcagccccggcggatctgagcgtcatggggggctcggtcataaagccgggccgcagcgtgggagctgcacctcggggacatcagggcgcccccacccgcgggatccctgagcgacttggggcactggggctgcaatacagaagaggaagccgaggtagagaggagagaaaccactcgacacagacaatattcaccccagagctgagaagggaggggctgcgtaatcccagcgatggagcccaaggttcaggagccagcaaaccagtcctgctctgtccatcaccctcggggacgggcgctaggggcgagcgctctttggaacaacatattgcgggttcccccaactggacccccgccgagaatggtagtaagtggggatccacgtggtgagcgcggccgccggagttcactcccgacgcatttccatagcgtggggagaggctgtgtgagctgaattaggaagtggggcagccagctgcaacttacgacaatatttgtgatcggaagagggcagccacatggatctttccctcctctcccttcctttctggttaaacgtaaaaaacagccgagtgcaaagggaagggctcaggccggcgcaggctgctccccggcgcggcatttccccggcgctggccgcggccccggcgggcccccgtctgggtgctcgccttccctggattccacacatttcagcgagcctcgtaaacacaatgaacccggcagctccgcagactcgcaccgcgaatttaaggtggcaatttgtttacaacttttcctcccccgaccaggccctaaggagaggcggctcaaaacctggaaaacgggggggatatctttttccgagaataattttttaagggagcagagatttcatgctcaacaaaaccaaaactggctgccaaaaaaggaaaccacctttatttcggctccctccccccttcctctctccgcctctctccactccgcctccccctccaagatgttaagaaatgtggcagccgtacaggagtttaggctgcaaataggggcaggggcgcaggaggaagaagttcagggcagggggcacggggcaggacagtgccgcggccgcccttgaggtggtccgccgtggacggctttccagtgctccggaaaaggcacaccagggagggcgtgtgtatacacacacacacacgcacacacacacacctccaccccctgcggacctcagacagccctttcctcccaggaccagagggagggtttgaatttttcaatccccatttgtctgctgcttttcctggagaggtgtgagtgagtgtgtgtgtgtgtgtgagagagagaggaagagagtgtgtgtgtttgtgtgtggcgggggcgatcccaaagagttagaggagggaagagaaagtgggaggagagagtctgaaatgcaccttggaaatctgctccagagcgaaggcggcgtcgcagtagctgggccggtgcagatagtcccggtccggcgcggcagcacggcgcagcccccccgtccgtctgcgcctcccgcctccagccggccgtcccggggcaccgatacagccgctgccgccgccgccgcggtcctggggctcggcggcgttaccagccgaggccatgttgccgccgccgccgccgccgccgcggggacggaggcttcccgggcggcccggcgcgctgctgccgctgctgcgggctcctggcgcgcctgggcgctcggcttgcgaggacgctgctggccgcaggctgctcgggctcgggctccggttgacagaccagccgctgctgctgctcacacggcgggcgctgctgccgctgcggccgcggccgctgccggggagtcagaccctgcgccttccattgccacattgcgcgggggtcccgaggtctctgcggccgccgctgcccacatccagttcgcggaagagcgagagccggcgcgccgagcgagcctgtccttcgggcgcttccgcggcactccttgcggtccccaactccccctacccgccccccgccccgcgccgcgaccccttcactgcagaaagagccagcgaatccccgctgctcccgccggccgcgctggctctctcggcgcctcccgggtcgcccgagcggccgcggagggcaagcgcagagccgccgccgccgcggggtccgagggtgcccggcgggtctcagcgctgccgggcccgggcagccgcagctgccgctgctcccgcggtggctgctgctggcggtggcggctccaggagctgctgctcgggctgctcgggctctggctgctgggttcgcggtggctgctcggtcccggactctgctttcttgtgctcctcggcaacccgctggaccattctgtccccgtgcagcgcgcctctctcgctcccgggacctggggactccgctctgtgtgtgtgcagcgggcagcggccgcagcagctccttgattcaatagatgaga

SEQ ID NO: 588750 - DNA, 4001 bp, Homo sapiens
tccaaccccctggaggaagggtctctctgtccctaacacttgtgcatgggtagtcacgcccaggcctggcctttgcctctgacgctggtggggcagccatcacctcccaccccatggatctccgcggcagggggctggcccagagtcgtcccggcaagtgtcgcccccaggctgggcccagggggccggtggaggccccactcacggggactccggtagctgtaggagccgagggaccccgcgggctgcagcagcatggttcgggtctcacactggtttttcctgtaggtgggtgacctcagggtcaggggttaggcccgagggtgtccctggacctctccgtcccagaaacccacctgcccgctgtcccacctgaggaaggtggaggtcaggttgaggccaccatccgtggcaggggccaccacagacttgcacatggacaacgccgccttcttctcccggagccagctcgagttggaggcgaggcccgcgctgaaccagcgccccaggaactgcggcgagcgacccccacccgcgtcggccaggaccctccggacccacctgcgcctacctgcgggggcgcctctgccgtctactcctccggtctccaacccggccccgcccccacgcccaatcccccgagcagccacgcccctcacgccccgccccaggaactgacccccgcccctcaatccccgccccaggagatgaccccgcccctcacatctccgccccaggagctgaccacgcccctcacatccccgccccaggagatgaccccgcccctcacatccccgccccaggagctgaccacgcccctcacgaccccgccccaagagctggccccgcccttcatgtccacaaccagggaactgaccgcgcccctcacgccccatgcccccctaggagctgaccccgcccctcacgtccccgccccaggagctgaccacgcccatcaggcccccgccccgccccgggaggtggccccgcccctcacgccccgccccaggagatgaccacgccccacttccccctcccccggagatggccccgcccctcacgcctcagccccagaagctggccacgcccctgacacccagcacccccgtctggccacgcccctcccgaggacagtccctcaccctcgcacgccgcccaccagccagcttcggcccctccgcccccggtcccgattctgtgccctggctgagcgcctggcccatacagcgggcggcagaggacgtcgcattcctggcggggatcggggcgggtcttcggctcagctctgcggaccgctggggttctcctcgacgccagggaggggcgcgcggcgcggggacccgcgctccggcgcttccccgagcagctcccgggcgagagcgcgcgtcgccggctgtctgtgcggtgcgcgtccctcccaacccccaccgcgcacggagtgtttgtcgccatccctgtgccccacccgcccgtgtcctggcacccaggtgtggaacgtgcgctcgtgtgtcctctgggggtcgcgtgcccacaggggtggacgtgtctggctggcgtgggcgcgtgtgtggcccggtgtctgcgtggcccatcaggggagacgggacgcggtgcccagggagggcttctcgcgggcagcctcctcgggcggctacccagcctccttcctgcgcgcccgctcagtccctggccggcactgcccggcactgcgggacttcgctcactcctcccagggggaagacccagccggaaagtgcccttcccctgacagggtcctgtagcccttggggatgacgcaggaaagcccctcaccttgtcctgctggaagttgggctgcacggagacctgggcctccggtgctgcctgcaggtcgcccagcacccccagcagggccagtcccatccacagtgtgtgatgagtagccattctcctgcagcagagcgggtgtccggggcctggtgccagtggtgtgggagagcgagggaggtgtgcaggaggagcggagggcactgaggagacccctatttatgggccaggcttggcctccacccagggcccggggacagcccactgaacactcgtgatgctgggggatggggtggccaggcacagctgcagcctcgtcccccacagggcgcttatgcaagaggcctgggcctgctgccccagctgaggcagcgtgggggtgaggcagaggcccctgcccactggtcccagagacagagctggcagggaccttgcccaccctcctcctgctggcagggcccaccaacccagcggccctgatagggcaggggctgtgttcctcagccatgcccgcctccgaggcctctggtgacttcccactgggggccaggacccacatctcacagcccctaccatcattccctttccgagccctgccaccccagaaggggacacaagccccacttccaccctgagagtttggtcctgaaacgcccagcaagtgaagtgttgatgagaagctcaggccaaggtagagaaacttgatctggcccgcagggtcccgagggccaggtttgctgggcatggcttcccccatggccagctgttggggctctgatagtgacccctgggtgcccatttcagcctggggcacctttgggcttgagcacaggccctatcccttgccagaggccccaacttcccccagcaatccccccaccccaagtctgccccccgccgagtctgggcctccccaccccgagtctggtccagactcgggagcaccccgtggggctgtcctgttaccccagcgctgcacccagctccttgggcccctccagctcgttggccctggctggggccctgtcacaggccgtcacaggcaggcacatgtggtgggccctctctggattctgttgggactgagcttccctggcaggcgtggtgggtgagcgctgccgctggtctgaaggtgagcccgggtggggagctgggaaatgtacatgagagcaggagtgagtcggatggggtggggtggtgagcttctacggggctgctggcgaccactgggggccggagcccgtcttcttcctggattctgtggcccatcccttgctgggggcgcacgagccctgggagtgggctggtgtggactgcttccttgttccccttccccagtgcccgggggtcaaggagcccagactgggggaggcgcatgcctatgtagcagcaggggctagtgggcagcactggtgtcagggctggtgggggtggccgggtagcatcccaggcagaggccaaggtgagggagtgagtcccagggagccgggaggcacctgagaggcagggagaaggagggcagcggtgcaggggggccaaggcagtcctgagaacccactcctccacctggacctcctatcaacccctgcctgaagcagcagcgtgctgctagctcagatgccatctgtgccatgggctgagagggagagtctgttggaacagataggggtggggtgcctaaacccgggaccccgcgtggcccgcaagcctggctcagctacagagctgggggctgccgtcaggacaggggaggggcaggaagagagttgcggctgggatatcaccacaagactggcctcctgcccgctgccagctgagtcctggctgtcattccactctggtggggctggtggctcgctgactggcctggctggaggtcccaacccaggctaggctggtccaggacaagagcgcctcccggtggtgagcaagctctggggtgtggtggcgggtggcccggggcagggagacccaggacacgtggctctgggtctgaatggcttccgtctgggcaggcctgggtcacctgccagggagggactctgaagtctgatggggccgggtcctcccatagccagaggggttcccagggatctcgggtgtccagccctcaaacccagtgcctggaacagggaccaagcccctcctcttccccattttctagtgggctgcagaaagcccagcaggtcccatgt

SEQ ID NO: 588751 - DNA, 4001 bp, Homo sapiens
cctgtaatcccagaactccaggaggccaagatgggaggatcacttgagcccaggagtttgagaccagcctgggcaacatggcaaaagccatctctaccaaaaacataaaaaattaggagcagtgacgcacacctatagtcccagctacttgggaggctgaagtgggaggatcacctgagcccaggaagtcgaggctacagtgagctatgatcgcacaattgcactccagcctgggccacagagcaagaccctgtctctaaaataaataaataataattaaaaaaaaaaaaaaaaaaggaatcgctggcctgctggtaagaacccaggcctcagccaggtgcggtggctcacgcctgtaattccaacactttgggaggctgaggcgggtggatcacctgaggtcaggggttcaagaccagcctggccaacatggtgaaaccccatctctactaaaaatacaaaaattagcagggcatggtggtgtgtgtctgtaatgccagctaccggggaggctgaggcagtagaattgcttgaacccaggaggtggaggttgcagtaagcagagatcatgccgctgcactccagcctggacagcagaaaaaaaaaacaaaacagaaacccccgcctccaagacaggatgtgggctctgaagctggacactggagttcaaaccgggctgtgtgaccttcataagtgatgtctcctctctgagcccaggttcctcacctagaaaacaggatgactatggcgcctcccctgccctcagggctgtggcggggatctcatgctcagctccgggccacattcggtcctctgggaaggattcaatgagtgaatgcagctgttctacttgatgcccggatcccatatcccaggaccagccaaggcagggagaagtcagaagctatcagtgtgctgtagcctccgggcatcctatcacttgggcagctgccctgcctttaatcctgcctgtacctgcagcagggcctgagcctggcttgtggccaagatcctcactccccaggatccacccgcatgcagtgccagagccagccttgcctcacctcgcctttgaactggacacaggggaagacagagacagtttcaggaaatgattgctttattaaaatacctggggaggaagtaacaggtgcctggggtctttctgcattctgccgccaggacagccgacaagctcagcctatgactttgcagactcgccaaccagtgtgacggacgctactggaacttgccccggcccagctctgggactcgttaatgttgttttggttcaggggctcggattagtggggaaattcctcgctgagcaccccgacggtgcccggctgggagctggcctttggaggctacagtgggcttgttagtgacatttgccaggagttgggaatttccacttaaacgtttctcggactcctgttttgccggttcccactccacccagatatcagacctcccgtgccgggaagccaccaggttagacagaggctttgtgctgtcacgctcccacactccaccctccagaacctgcttctctcacagacactcgctggctctctccatgccaagaactcagcccggtggcacggcaagcgagtaagtgctcttaagccagagaggagaaggtgcaggccttgctgacacgtgggactggcaggaagccccccggcggggctggaagaggtgctcacctcccagccctgcacacaccttggccatgtttccctatcccggggctttcctgacaggacgtggagagaagcaagtatgacccaggccggggacccccagggaggcacataccttcttccgcagcctcacttggcccgtgatgatggccaccacgtacatcttgatgaccagcagcgtgctgcagagcaggaaggccgggagggccgggctgctcatcaccaggctgtgggcaggcatctctggccagcgcagctcaactgtgggtgtgatcagctcgacagaggagcagcctgcagggaaagcacaaagtgggaggggagagccttcctgcagccagcaccgcccacgccccgccccacggcagcggcagcagggcccccttctcctgtgaagagaaagacaagcagttgccggagctccaagaagcagagagtctccgggtgtcccggacccagtccctggctctggagccctccttccaggcaaatcctcaaacactttcaaatctgtttcaaagctgtttccttatctacagtgtgggagcatgtggtggtgcctgccttctagggaatgatgaggctgggcacctggcaggacctctgcacgtggtgattatcgctgcctcctgcccacctccgcagggtcagggtaggtggtgggcatgagaaccacgccatgcgcccccacactcagcctggacaatggagctgcagccacaatggcatgactttgccatctgtggcaggctgaaggacgccctccacccctaaagacatccatgtcccaatccctagaacccgtgactgtgactatgtggcaaaagggacttttcacatgggatttcgtaaggatttgagatgggagaaattatcctagtttatctgggtgagcccagagtatacagaggggcccttccaagagggaggcagtaaaattagagaaaagatataaaaacagaggcagcattaagagaggagatgaaaggacagaataggggtcagacaggagagacgctaacctgctggccttgaagatgaaggagagatcatggcccaaggaataccaggggcctctagaaactggaaaaggggacgaaacaaactctctgcgttcagacagaacgcagccctcccgacactttgattttagccctgtgagacccatttcaggcttcatccaccagaactgtcagagaatgaagctgtgttgttttaagccactaagtctgtggtaatttgctatagcagggatggggaaccagcacgtggctccactgacttcctgagcatcacttgactatcctggaactctttccccagtcaaatgctttgattcttcatcacaagatctccccgaaagacctatcaactgactcttcagtagaaagcatcaccaggccgggcgcggtggctcacacctgtaattccagccccttgggaggccaagggggacagattacctgaagtcagaagttcaagaccagcctgggcaacatagggagactccgtctctacaaaaaaatgttttaattagctgggcatggtggtgctcgcctgtattcccagctactcaggaggctgaagtgggaggatcacctgaacccaggaggctgaggctgcagtgagccatgttctcaccactgcactctagcctgggtgacagagcaagaccctgtctcaaaaaagaaagaaagcatcaacgtttgttttctaagattctttgaatccctcacctcaaaatcctcaccttggccaggtggctcacacatgtaatcccagcactttgggaggccgaggggggcagattatctgaggtcagaagttcgagaccagcctggccaacgtggtgaaatcccctctctactaaaaatacaaaaattagccagatgtgatggcagacacctgtaatcccagctacttgggaggctgaggcgggagaatcgcttcaacctgggaggtggaggtgcagtgagccaagattgcaccactgtactccagcctgggcgacagaccgagactctgtctcaaaaaaaatcctcaccttgctgcatcctgcccgcttccccgggttctggcaggacctccacaaggtcagggatctttttttttttttcttgtgagacagactcctgctctatcacccaggctggagtgcaatggcgtgatctctgctcactgcaacctccacctccaggttcaagcaattctcctgcctccgcctcccaagtagctaggactacaggtgcccaccaccacgcccagataatttttgtatttttagtagagacgggg

SEQ ID NO: 588752 - DNA, 4001 bp, Homo sapiens
aggaagggagacacagagtactccatgccctttttacccacctctgttccctctggtccagcaaataagcatctgtgggcgggtggtgggaagtcaagtaatgaagagttgcaaggtgtggggtaggtataaagtgtctcaaggcagctgggccaccacttagggggtcaccacttggggggggcacctttctacctcttcctgtttcagcctggagtctaagtcatcagttccataaaggtaccaccactactactaaataaatacacagccttaggatttgggggcagtggggagagaggatgatgaacgtttggaaagtgaaaaaggctttccctttcctgtgatctcccatctcttaatcaaaaaagtcttaaaacacggtagaggctgggctccgtggctcacacctgtaatcccagcactttgggaggccgaggcgggtggctcatttgaggtcaggagttcgagaccagcttggccaacatggtgagacccccgtctctagtaaaaatacaaaaattagccgggctgggtggcaggcgcctgtaatcccagctactggggaggctgaggcaggagaattgcttgaacccaggaggcggaggttgcagtgaaccgagatcgcgccactgcactccagcctgggcaacagagcaaaaaaaaactccgtctcaaaaaaaaaaagtctccttaaaacatggtaaaggctgggcgcagtggctcacgcctgtgatcccagcactttcagaggccaaggtgggcggatcacttgaggccaggagttcgagaccagcctgggcgacatggtgaaaccctatctctacaaaaaatacaaaaattagcagggcgcagtggggtgagcctatagtcccagctactcgggaggctgaggcaggaggatcccttcaacctgggaggcagaggctgcagtgagccgcgatcgcactccagcctgggcgataatgcgagaccctgtctcgaaaacataaataaacaaaccaaaaaaaaaaaaaaaaaaaaaaccacggtagaagaacgattttatgagaactcgaacaattccaggtagtaggcatcaggagtgcccctattttacacaaaagaatacagagggttcggagacttcagaccaagtcactcgcccaaggtcacaagcaggcagaggcaactcctgaccctgcgggttcccaggagtcccgagttcggcgctgatcagcatccccatccccggccgggccaggccttacctgcgcggctgagcgctctgcgtggaggtcctgggcgcgcaggtgccaccgcgccgtgtggtacagccccagggctccccccagggccagcgccgcagctcccagcagccgcgggctccccttacgagctgcagccacggggctcgggccgcccgccgcccccgcgaagccagcccggctctgcgtgggtagcagcggctgggggcggcctcccagcctccaggccaaggcgcacccaccaggccacagcgcccgcaccacccgcgcagccgggtccatgttcgctccgccggcgccgcgggcgggcgcgcgaaacgaagacgccgaggcacgcgcggcgtttaaagggccaggactctggcgccccgcgggttggccggggtgagggcgacgctaagggaaccctcagcgctctcgggactgggcgtgtgcccggcgcccaagttcgaaacgcccgccagagccgcagaggcccgctcgggaacgtttgcagaccgttccatgcttccgcctccaaaggctcttgggtagtgacccggccgactgcaggggggcgaacgtctcctcgccccaccttgaccgcctaaagggcggcgtggccgtctgtaacacgtacttgcccacctctcttacgggcgcccattcaaaacaactccagcccttcctagagtcagtacaggcgccgcgacttccggccactgaaagccccggaaacgacccgacccggcaccaggtgttgcggttctctctgccctcccgcctcattgtccgcttcctactgtgacccgaaccataaaattttcccgaacccgaaggggccttggaaaccacgtgtctctgatttcgcccacgcgaagcggccggcccgccgaccccgagatttccagggagaggatggcaaagtggggtgccaggctgctcggtccttctgctgggctcccccgccctagctgaagcccggagcctccaccgcataggcgtctccgcggacagccccgggatggccccgcccggcgcccgagagggggcgggactcgcagagtgggcggggagaggggcggggcgaggggggagctctgagtcccggctctgctgctccgccgcgtcccactcttctcgctccgctttcgccccgcatcttccaccttccttccagtccttgcggcgaccgagcccgcagtgtcagtccccagcggggacctgagtatgccggtgaagacgagagcggaaggcgaggacgacggcttcggggaagcgggtgacccgaggagactgctggagcgaccttggcgtttccgggggtgccttcccgggaaggggaatcgggatgttggcttcgaagggaccgaagggcccacctcgacccgccccgagtgggtttggagttgtaggtgctgtctcggatgcagggcgagcacccgcgagcgggtaaccagtcccgtgagagctgcaggtccccagccccgttttacagatagggaaactgaggcagctgctgggacactcgcccatatgggttttgctccacccacttccttcagccactttacagaccaggagttgagggactgctcgagcttagagtgtttaggggtggttgagggtgacccccatgttctgtgctctactctatccctatccaggccttctcccagcgccactctcacgctcctgcttgctagctcctgcttgctagctcctgctcctcccagcttcatcctcctcctgtttacattaattgctcctgatcttccacactcttgattttccggattctaactccatcaaaatgtaacttgatgtgttcaggccccggggacacctaggcacttgaggggggcgggtccgtgtttggcctgctgggcttagtaggagggtctggcccggggcggggagcgcgatgctctgctgggtcagcatctccagccacctggctttgctggtgtggcctcgcagccttgccaaatgtgagcagcttacagagcaaccagttgcacgtgcttaagctgccgaggtgacacagggcgctgtagggtccagccccacagggtcggtaggtctctccctgtgtgcggcgacgagagagtgtagaaataaagacacaagacaaagagacgagaaaaggcagctgggcccgggggaccactaccaccaatgcgcggagaccggtagtggccccgaatgtctggctgcactgttatttattggatacaaggcagaaggggcagggtaaagaatgtcagtcacctccaatgataggtaaggtcacgtgggtcacgtgtccactggacagggggcccttccctgcctggcagcggaggcagagagggagaggagacaaagagaaagacagcttacgccattatttctgcatatcagggactattagtattttcactaattgactactgctatctggaaggcagagccaggtgtacaggatggaacatgaaggcggactaggagcgtgaccactgaagcacagcatcacagggagacaggcctccagataactgcgggcgagcctgactgatgtcaggccctccacaagaggtggaggagcagagtcttctctaaactcccccggggaaagggagacccccaccctccctttcccggtctgctaagtagcaggtgttgttccttgacaccttttgctactgctggaccatgatccgcctggtaacgggcgtcttcccagatgctggcgtcaccgctagaccaaggagccctctggtggccctgtgtggg

SEQ ID NO: 588753 - DNA, 4001 bp, Homo sapiens
taggatttgggggcagtggggagagaggatgatgaacgtttggaaagtgaaaaaggctttccctttcctgtgatctcccatctcttaatcaaaaaagtcttaaaacacggtagaggctgggctccgtggctcacacctgtaatcccagcactttgggaggccgaggcgggtggctcatttgaggtcaggagttcgagaccagcttggccaacatggtgagacccccgtctctagtaaaaatacaaaaattagccgggctgggtggcaggcgcctgtaatcccagctactggggaggctgaggcaggagaattgcttgaacccaggaggcggaggttgcagtgaaccgagatcgcgccactgcactccagcctgggcaacagagcaaaaaaaaactccgtctcaaaaaaaaaaagtctccttaaaacatggtaaaggctgggcgcagtggctcacgcctgtgatcccagcactttcagaggccaaggtgggcggatcacttgaggccaggagttcgagaccagcctgggcgacatggtgaaaccctatctctacaaaaaatacaaaaattagcagggcgcagtggggtgagcctatagtcccagctactcgggaggctgaggcaggaggatcccttcaacctgggaggcagaggctgcagtgagccgcgatcgcactccagcctgggcgataatgcgagaccctgtctcgaaaacataaataaacaaaccaaaaaaaaaaaaaaaaaaaaaaccacggtagaagaacgattttatgagaactcgaacaattccaggtagtaggcatcaggagtgcccctattttacacaaaagaatacagagggttcggagacttcagaccaagtcactcgcccaaggtcacaagcaggcagaggcaactcctgaccctgcgggttcccaggagtcccgagttcggcgctgatcagcatccccatccccggccgggccaggccttacctgcgcggctgagcgctctgcgtggaggtcctgggcgcgcaggtgccaccgcgccgtgtggtacagccccagggctccccccagggccagcgccgcagctcccagcagccgcgggctccccttacgagctgcagccacggggctcgggccgcccgccgcccccgcgaagccagcccggctctgcgtgggtagcagcggctgggggcggcctcccagcctccaggccaaggcgcacccaccaggccacagcgcccgcaccacccgcgcagccgggtccatgttcgctccgccggcgccgcgggcgggcgcgcgaaacgaagacgccgaggcacgcgcggcgtttaaagggccaggactctggcgccccgcgggttggccggggtgagggcgacgctaagggaaccctcagcgctctcgggactgggcgtgtgcccggcgcccaagttcgaaacgcccgccagagccgcagaggcccgctcgggaacgtttgcagaccgttccatgcttccgcctccaaaggctcttgggtagtgacccggccgactgcaggggggcgaacgtctcctcgccccaccttgaccgcctaaagggcggcgtggccgtctgtaacacgtacttgcccacctctcttacgggcgcccattcaaaacaactccagcccttcctagagtcagtacaggcgccgcgacttccggccactgaaagccccggaaacgacccgacccggcaccaggtgttgcggttctctctgccctcccgcctcattgtccgcttcctactgtgacccgaaccataaaattttcccgaacccgaaggggccttggaaaccacgtgtctctgatttcgcccacgcgaagcggccggcccgccgaccccgagatttccagggagaggatggcaaagtggggtgccaggctgctcggtccttctgctgggctcccccgccctagctgaagcccggagcctccaccgcataggcgtctccgcggacagccccgggatggccccgcccggcgcccgagagggggcgggactcgcagagtgggcggggagaggggcggggcgaggggggagctctgagtcccggctctgctgctccgccgcgtcccactcttctcgctccgctttcgccccgcatcttccaccttccttccagtccttgcggcgaccgagcccgcagtgtcagtccccagcggggacctgagtatgccggtgaagacgagagcggaaggcgaggacgacggcttcggggaagcgggtgacccgaggagactgctggagcgaccttggcgtttccgggggtgccttcccgggaaggggaatcgggatgttggcttcgaagggaccgaagggcccacctcgacccgccccgagtgggtttggagttgtaggtgctgtctcggatgcagggcgagcacccgcgagcgggtaaccagtcccgtgagagctgcaggtccccagccccgttttacagatagggaaactgaggcagctgctgggacactcgcccatatgggttttgctccacccacttccttcagccactttacagaccaggagttgagggactgctcgagcttagagtgtttaggggtggttgagggtgacccccatgttctgtgctctactctatccctatccaggccttctcccagcgccactctcacgctcctgcttgctagctcctgcttgctagctcctgctcctcccagcttcatcctcctcctgtttacattaattgctcctgatcttccacactcttgattttccggattctaactccatcaaaatgtaacttgatgtgttcaggccccggggacacctaggcacttgaggggggcgggtccgtgtttggcctgctgggcttagtaggagggtctggcccggggcggggagcgcgatgctctgctgggtcagcatctccagccacctggctttgctggtgtggcctcgcagccttgccaaatgtgagcagcttacagagcaaccagttgcacgtgcttaagctgccgaggtgacacagggcgctgtagggtccagccccacagggtcggtaggtctctccctgtgtgcggcgacgagagagtgtagaaataaagacacaagacaaagagacgagaaaaggcagctgggcccgggggaccactaccaccaatgcgcggagaccggtagtggccccgaatgtctggctgcactgttatttattggatacaaggcagaaggggcagggtaaagaatgtcagtcacctccaatgataggtaaggtcacgtgggtcacgtgtccactggacagggggcccttccctgcctggcagcggaggcagagagggagaggagacaaagagaaagacagcttacgccattatttctgcatatcagggactattagtattttcactaattgactactgctatctggaaggcagagccaggtgtacaggatggaacatgaaggcggactaggagcgtgaccactgaagcacagcatcacagggagacaggcctccagataactgcgggcgagcctgactgatgtcaggccctccacaagaggtggaggagcagagtcttctctaaactcccccggggaaagggagacccccaccctccctttcccggtctgctaagtagcaggtgttgttccttgacaccttttgctactgctggaccatgatccgcctggtaacgggcgtcttcccagatgctggcgtcaccgctagaccaaggagccctctggtggccctgtgtgggcataacagaaggctcgcactcttgtcttctggtcacacctcactatgtcccctcagctcctatctctgtatggcctggtttttcctaggctatgattatagagcgaggattatcataatattggaataaaaagtaattgctacaaactaatgattaatgatagtcatatataatcatatctaagatctatatctggtataactattcttgttttatattttattatactggaagagctcgtgtcctctgtctcttgcctcggtgcctgggtggc

SEQ ID NO: 588754 - DNA, 4001 bp, Homo sapiens
aagcatcaaacacaaagaacccaatagatagaagtccatgcacctctttcagatggaaacagccacgcatttcaaggcagtctcagaactcctgaaaaccaccggagggcgccgctgctccgccccattttcaggtgcgttttttttttttttaaatacttttttttctctcttttcttgtagagaggagcctcactgtgttgcctaggcgatccgcccgcctcggtctcccaaagtgctgggattacaggtgtgaaccacttgcactcagccatcgggtgcgaattttctttggcccagtagggatttgagtttaaactccacaccaaaccgattttgagctgaaacgctgcaccaaagcaagggaagatgatgaaggctgccccgagctgggggttcaggatgttctgcttggactgaactctgccgaatcacttgggacctgcgccttcccgcgggtgcatccgctacaaacaatccagttacgaaaccatttggagctgccagtgatctccccagctcccctaccggtgccgcgggaggggacacggtgacctggagggagcactcccgcattgcgagggagccaggggggcggtctgatctgcagcccggggttgttccttcttttctttttttaaaattaagactttttttgtgacggagtctcgctctgtcgcccaggctgaagtgcaatggcgcgatctcagctcactgcaacctccgtctcccgggttcaagcggttctcctgtctcagcctcctgagtagctgggattacaggcgcccgccaccacgcccagctaatttttgtacttttagtagagacggggtttccccatgttggccagactggtctagaactcctgagctcaaatgattcgcccgcctcgaccttccatagtgctgggattacaggcgtgagccaccgcgccaggccctacgtatcatttttacggtgagacatttgcagtttactctgttatttcgaaatacacattattggctctagtcactctgctgtgcaacagatctcagaacctactcctctcgtctctgaacttcgtaccctttggccaacaagcccccattcccccccgaacccgctcccagcctctggcaaccatcattctagtcgttatttctatgagttcaacttctttagagttcacacatctttgtccctttccccaaaaaagcaaccgctgggcttccaaactcgctacaagtccagaagccctcctggaaagggtctggccgcagaggggccaggtcccgggaaagtctcgcccgcccgaggagggggcctggcgcggcgcccggcctttgcccgctcgccctttgctcccaccctcgcctcccgccgcccgccgcccgcttgcccattcccgaatccccaccccgatctttcttcttctaccctcccccagttgtgcagtccagcaagttccctggccagccccctcccgggtgcaggaagctaccgggtgtcccgggttgtaaccaagctttcctattccctccggcgcgcggctccaagctctccaaggaactgcgggggcgggaggcgtcgggacgtcggctcccaagatcctccgagtgcaagacccagcggtcatttcgacgtaaggggaggaggtctaagagcaaacctcctccactggggcgtctagaaacttggcaggaagaaagcaagggggttagaggagggagaaaagggaaggaaagaaagcaggaggtctacttacaggagcccgaaggttccactgcctggggaaggcggctgggactgcgcagccgggcgcccggggtccgacttatgacaggtcccaagagagggtggggccaccccagggcggggctgcttctttagggtgagagcccggccccgaaagggtcacaggaggaaaaccagggtccgggaaatctgagtgcgtttgtgtgtgtgtgtgcgcgtatctctgtgtgcctatgtgcatgtgcgcgcgcgtatgtgtgcatgtgtgcgtgtgtgtgcgtgcgcgcccgcgcgcccgtgtgtgtgcgtgtagggggttagggactcctgataggaaaattcctaacagagctttgtccagctgacactggacctccgcctggggtcctaagttggagcccggcggaaatatgccccgtgggggaaccaaccgtggcatctgccaagcaggccggaagggtccaaaggcagggcctggggcggccgcagccctaataagcccccggtgctggctccgatccctgggctccccgtcagccctgccgcttgcccgcagtgcaagctttcgcccagggctgcggtgcagacaccctgcctgtctgtccccagtccgcctgctgaacacctactcgccttccaccagccaattcaaggtcacctctgtgaacccttgccagactcccccaggcaggagtgagcactcttgccactgaggcaccccacccatcacaccctagcaaacatcaggccttgacctggcttctgcaaggagaggtggtctcaggcaggggttgaacgtgaagctaagtcgttggtattagacgactgcaggttcgaagcctgcacctgccacttactagtggtgtagctttcaaagacttacttaccttctccttgcctcactcagttcagccatctgcaagatggggataagaagaatgcctaacttccagtcattgtgaagattcaatgtctttaatttatttatttaattttaattattttgaggtcttgctctgtcacccaggctggagtgcaatggtgggcatcatagctcattgcagccttgaactcctggactcaggtgatcctccttcagcctccctagaagctgggattacaggcccaccaccacacctggctcaatgtctctccttgtaaggatacccgccatattggattagagccccacttgtcagcctccgtttaacttaaacacgtctttgaaggccttgtcttcaaatactgtcaaatggattagggctcactaatatggcctcatgtaaccttaattacctctttaaaggccctatctacaaatacagttacattctgagtactgggacttggggattttaacacatgaaattggggaagacacagttcagcccataacagagtgtgtggaccaagcgtggtggacgcatgccacaggatatacacagcatcagaagcactgggttccatgtacataaagcaacttggatggaccctaaaaacacaatgccgagagttgaattcttcacactaatcagagttggtggcactttatccccactggtctgccaaattctttctttctcactctctcccttctcattaatttatgtaacttaatataaaacaaaactccattcccaggctgggtgctgtggctcatgcctgtaatcctagcacttttggagtctgagacaaaaggaccacttgaggccaagcattcaagacttgcgtgggcaacatagctttaacctgggaggtggaggctgcagcgagctgcgatcgtggcactgcactctagactgggtgtctaagtgagatcccgtctcaaaagaaaaccaaaaaaactcaatttcctgcttttctcctcctactataggtaactactgtgatgtatttgatttgcatacagtttttttttccatgttcttacataatgtgcactgtggtcatatacatttaatttatagaaacggtattgggttacatatcgcattctgcttctctcttttttttttcttttaagataacttgttacagaatcactgtttcttttggatattagaagtgttaataaaattgcaggcataaaaagtctttgcaaagtaagaataagagaaaaaagtgccagaaacacagagtggctcacatatttactcacttgtccttaaattgaagatacagataagattgggccgcaccaggtcaaacaaaatctgtttcccaaacttgatgactcagtcagtctcaaaggctgcagcttgtca

SEQ ID NO: 588755 - DNA, 4001 bp, Homo sapiens
cctagaacacagtaaatatgtagtcaactgccatgaagtgactgcattctaacagttctctagccgtcaaactgagaccagacagcacaattacaatatcctcaaatcccatcattatcatatcatgccaaccacattcatttaacatttactatgtttctggtgctgtgctaagcacttcatatagattacctcattttatccttataacttccctataagatagacattagtatcattgccagtgtacggatgaggaaactgaggtttaaagaaatcttcaagacaaggaaaaaatataaaacaacaaagaaattcttcccagccactgctaggctagagtttctctacggcactgaacagttaccggaagtgcgaatattccattccgtttctcatctcacatggagtgaattctaagaaaaagcatcaaacacaaagaacccaatagatagaagtccatgcacctctttcagatggaaacagccacgcatttcaaggcagtctcagaactcctgaaaaccaccggagggcgccgctgctccgccccattttcaggtgcgttttttttttttttaaatacttttttttctctcttttcttgtagagaggagcctcactgtgttgcctaggcgatccgcccgcctcggtctcccaaagtgctgggattacaggtgtgaaccacttgcactcagccatcgggtgcgaattttctttggcccagtagggatttgagtttaaactccacaccaaaccgattttgagctgaaacgctgcaccaaagcaagggaagatgatgaaggctgccccgagctgggggttcaggatgttctgcttggactgaactctgccgaatcacttgggacctgcgccttcccgcgggtgcatccgctacaaacaatccagttacgaaaccatttggagctgccagtgatctccccagctcccctaccggtgccgcgggaggggacacggtgacctggagggagcactcccgcattgcgagggagccaggggggcggtctgatctgcagcccggggttgttccttcttttctttttttaaaattaagactttttttgtgacggagtctcgctctgtcgcccaggctgaagtgcaatggcgcgatctcagctcactgcaacctccgtctcccgggttcaagcggttctcctgtctcagcctcctgagtagctgggattacaggcgcccgccaccacgcccagctaatttttgtacttttagtagagacggggtttccccatgttggccagactggtctagaactcctgagctcaaatgattcgcccgcctcgaccttccatagtgctgggattacaggcgtgagccaccgcgccaggccctacgtatcatttttacggtgagacatttgcagtttactctgttatttcgaaatacacattattggctctagtcactctgctgtgcaacagatctcagaacctactcctctcgtctctgaacttcgtaccctttggccaacaagcccccattcccccccgaacccgctcccagcctctggcaaccatcattctagtcgttatttctatgagttcaacttctttagagttcacacatctttgtccctttccccaaaaaagcaaccgctgggcttccaaactcgctacaagtccagaagccctcctggaaagggtctggccgcagaggggccaggtcccgggaaagtctcgcccgcccgaggagggggcctggcgcggcgcccggcctttgcccgctcgccctttgctcccaccctcgcctcccgccgcccgccgcccgcttgcccattcccgaatccccaccccgatctttcttcttctaccctcccccagttgtgcagtccagcaagttccctggccagccccctcccgggtgcaggaagctaccgggtgtcccgggttgtaaccaagctttcctattccctccggcgcgcggctccaagctctccaaggaactgcgggggcgggaggcgtcgggacgtcggctcccaagatcctccgagtgcaagacccagcggtcatttcgacgtaaggggaggaggtctaagagcaaacctcctccactggggcgtctagaaacttggcaggaagaaagcaagggggttagaggagggagaaaagggaaggaaagaaagcaggaggtctacttacaggagcccgaaggttccactgcctggggaaggcggctgggactgcgcagccgggcgcccggggtccgacttatgacaggtcccaagagagggtggggccaccccagggcggggctgcttctttagggtgagagcccggccccgaaagggtcacaggaggaaaaccagggtccgggaaatctgagtgcgtttgtgtgtgtgtgtgcgcgtatctctgtgtgcctatgtgcatgtgcgcgcgcgtatgtgtgcatgtgtgcgtgtgtgtgcgtgcgcgcccgcgcgcccgtgtgtgtgcgtgtagggggttagggactcctgataggaaaattcctaacagagctttgtccagctgacactggacctccgcctggggtcctaagttggagcccggcggaaatatgccccgtgggggaaccaaccgtggcatctgccaagcaggccggaagggtccaaaggcagggcctggggcggccgcagccctaataagcccccggtgctggctccgatccctgggctccccgtcagccctgccgcttgcccgcagtgcaagctttcgcccagggctgcggtgcagacaccctgcctgtctgtccccagtccgcctgctgaacacctactcgccttccaccagccaattcaaggtcacctctgtgaacccttgccagactcccccaggcaggagtgagcactcttgccactgaggcaccccacccatcacaccctagcaaacatcaggccttgacctggcttctgcaaggagaggtggtctcaggcaggggttgaacgtgaagctaagtcgttggtattagacgactgcaggttcgaagcctgcacctgccacttactagtggtgtagctttcaaagacttacttaccttctccttgcctcactcagttcagccatctgcaagatggggataagaagaatgcctaacttccagtcattgtgaagattcaatgtctttaatttatttatttaattttaattattttgaggtcttgctctgtcacccaggctggagtgcaatggtgggcatcatagctcattgcagccttgaactcctggactcaggtgatcctccttcagcctccctagaagctgggattacaggcccaccaccacacctggctcaatgtctctccttgtaaggatacccgccatattggattagagccccacttgtcagcctccgtttaacttaaacacgtctttgaaggccttgtcttcaaatactgtcaaatggattagggctcactaatatggcctcatgtaaccttaattacctctttaaaggccctatctacaaatacagttacattctgagtactgggacttggggattttaacacatgaaattggggaagacacagttcagcccataacagagtgtgtggaccaagcgtggtggacgcatgccacaggatatacacagcatcagaagcactgggttccatgtacataaagcaacttggatggaccctaaaaacacaatgccgagagttgaattcttcacactaatcagagttggtggcactttatccccactggtctgccaaattctttctttctcactctctcccttctcattaatttatgtaacttaatataaaacaaaactccattcccaggctgggtgctgtggctcatgcctgtaatcctagcacttttggagtctgagacaaaaggaccacttgaggccaagcattcaagacttgcgtgggcaacatagctttaacctgggaggtggaggctgcagcgagctgcgatcgtggcactgcactctagactgggtgtctaagtgagatcccgtctcaaaagaaaaccaaa

SEQ ID NO: 588756 - DNA, 4001 bp, Homo sapiens
tcccttccctgggctccctatacccctgcttcctcccatgagctccgcacagccctggtccccttggatgacagtctgttggcatttctggctccaccatcagcctgtcagctcctcccagctccgtgtctccaggccccagccaaagactggcataaataacccttggggataaaaaaaaacaattccgtgtaaacatttattatacaaaaggaaacagaaaaggcaaaaaacaaaatagcacagaccatggctcattgtgcattagtgaatggactaaaaaagaatacagacgggtgggacctgtataccaagagtgcctggatgaggccagatggggcctcagaggaagtgctgggctgatccagggactgacaagatgggtcagcgaggcaacctgaagagccccttctactccccaccaccagctcactgtgaggattcagacaagtggcttcactccctctgggcctcagagtccccttctgtagactgggtctaacgcatctctctggcagggctgttgagagcaccaaagaggtggatgtccacaaccaacctttgtaaactttaaagtgctggccacatgagtcttcctcctcctcttcccataaaccagacttttattcaacgcaatccctttcctagagcaccctccgtcctctctttgggtcccctaaatgccacccacccaaagcccgtttcaggaaacttggtctgatccaaaatccatgtacatatctttcctctttcccccacgcaccagatccttagagcatcacagcagaaagtgcggactccctctgctccctcctgccctctctgggcctcattttagagattttacacagctaggtggtggaggaaactatatccaactgggacacatgctcacacacacgcacacacacaagcagcgagctgggggaggaaggttggctgagcgaggagctgaattccttcacctggaacctggcacatgcatgggggagggaagggcggaatttccccatcaacctcccccatgaaacccagagtggctccgggtccattgtgggtagaagcagctttctgtggaaagaccttgcgaagtgtgtggacgcagacagacctgagttcagatcctgggcccaccatgtattttgtgagcttggggaatcatggcacctactgagcctcggtttcctcatttgctcaatggggatctcttaaaccccagatgaagcatcccggctcctaaatgtatttccatctcccatgttctcccgaagtcttcaccaggggagaccttctccactggcaatgggaatcaggatgggttcccagacggttagaggctggagaaagggaactcatttcccttggtgcctgcggcttcctcccaaagaggcccctataggaaacagcggggttgttgggtgcagaggctgcttagacatctggggcccagaacaggtgagggggatggatagggactgtcccttctccccaagttggcaccagatcccagtctgctgtttcccctgaaagaactagatagcccattagccaaggccacaccgccgggggggcttcagggagcccccatcccaccaaaagactcagcctcagtctttctcagcaccgcgagcagaaaggggaagctgggcccgctggaggggaaaggagggggttgaaaccaggccaggggcgcaagaccggggattcccttggggagggatggggccgcctacctggcgtgggcgcccctgggtccgcgagcaggacggggagcggcgggagcaggagcaggaacagcaagaaccagagcaagagactccctgcagaggagagagatgaggggctgagcctggcattcaaggctccaccaggaggccaagaaaattccccaccgggcaccggggtcgcactcacggctcatggcgcggctgctggggtgcgggacgcagagtgcaggctcctgtgcgtgcgcctcgcacactgcccggagctccagcccatcccctccccacccttcccccggctccacccccgctcctccctccagctgtcacctcggctgcccgcttacttcctctgcccagccccggccaaggcattttattaattagtgtatgctcgccgctaaagcggcttttcacccaagatccttgaagcacttacgtttctgatgcctggtggcactagatatagacaggaaactgaggctcagagacgatgctcaatgctgaggtcacccagggcttagggacagaactggggatggaagcggctcgtctgaaccacataccctgccccgcagagaagaaagggtctcagagtccccttctgtaaaatgggtctaacgcactctacagaaaagggtagagaagaaaaggggctagaaacagggcagtctgcagagaagaaagggggctagaaatggggcagtccagcctggcctgctgatggtttcctagatgagaaactcactactcctcagacagatctaacaggaaggacttacttcccccatgggctgggctccgccccctgaagccacaggtctctgccagaaatgaaaagaccgggctccaaactccaagagagcctagttcaaatccagactccacagcttactggccgtgtcaccttggacaaggtacttatcttttctagccctcagtattctcatctataaaatcggcttaatagcaaaaaccatcccagagggtggttgtaagattcaatgagggaatgcacacaaatctcctggtgcagtgtccagcatgtagtaggtgctcagttatcggaaggcattttttcaaagatctctgaactcagattccagggctggccagggtccatgctgtagctagactcacatccaccgccgaatttatagaatcccagcatccagctctccttttcgccagctcaggaagcacctagaaggaggaaggaataggtccaagatcacccaaagtcccatggtgctggcacccacaagtcatctccctcagtttccccagcacacccagccatcctgtgggccccacagtggggaaagccggcaggagagctcagaggttcttgtgctggctcctgggcatcactgggtgcagggtagaaattatgccaggtgggagaggtgaaacctgctgggaagcccctcccccattctcacccaagctgttcccatgctcccctgggacaaaagccagctgccctagggagacagagcaagccagggcagacctggagaaggagtggggcattggagggccctggggctctcagggtgccgggaccggcttcagccttcccttcctccccaaatcaagggccccctagcatttacagggcaaggagatgggattatcagcaaaagggatggggacagggtggaggtgtgggggtccagttgtccaaagaaagggggagtttctggtgagaagaaaggagagacgggcttgaatgaggttccatcttccactcccaggccctccctccctttgggccctgagcccatcaagtcaccacacctgtgcctcctgctgacttccaagccacccatctgcactcaaaacaagaaacacttgtgtggccctggcactgatgggaagagccttcacctcagaatcagaagtgagttcaagtcacttcttccatagcgtgaccttaaacaagccgctaggcctcactgggcctctgtttccccatttgaacaacagaatgagcagatcagatggtctctgaggactggtccagttccagcatggagcaattgagccctcactgcagccaggctctgtgaccagcaccacagatctcaacacagctgcaatacaggagaggatggagtctgagagagcaggcagggtgccgaggcagccctccagggatgaggcaggaccaagagcatggagtggggagaaggtagatgagagaaatggtggcagaagtgccagggcttggtgaccgattagcactagagcttaggggaagaaaggtgctgagga

SEQ ID NO: 588757 - DNA, 4001 bp, Homo sapiens
ggaaattgaagccagaaaaagggaaagccagacctatcaccccacaagtctcaccagaccaaatgcccatcccttcacttccactccacccccacagcctcagcagccaagtctaaggaaagaagttttccagaaccctggggacagagggtgggtgtgcaggaggagggggactccaaggtctcagctgcctcagcccccattcctgatggaatcagacttggcccacatcagggtggggtctgggctctaggatccagaagaaggtcacagaccaagggaataggagagatagggctagaaaatctcctgggagggtgcatggagctctggcatccgccctgctgcctcctggagaaactctataaggaaatccctcttggcatctaacccagatccctcagaccaccacccccttgctaaatctgcctcagtgattctttagcagcaaagttacagactcctcaggttcagtaggatccaccatcacccccaccaccctgttcagtgaaggaaactgaggttcagggacaggtgataacttggccaaggaaacagaacagagctgggcagaccaaaaactcctagcgcctggcaggaggctccatctctgaccttacacagaaaacgccgggctcctttctgcaaacatacttccttatctgggctcagagccaacgttacagggaatatggattctttgtgcaactggttattgcaggtcaaaagggtagtgaaaggccagagcagctgagggtgaaatgctgtcatctcagggtgctaggatcagagagcatgaccctgggcaagacctgccccctatcccctgccctggtctcagtctcctcactcctcacttcacagcacagggcttgacctgggcagcagagtcctcttggtccccacttcgaagacggcaacaccacctcaaatacacacacacacacacacacacacacacacacacacacacacacaagcaaggaccacaagaatcatgcaaatagttttgcttaagccctggcaactccccacagccccacaatggccccagcaggggtgtaggagggaggggtcaggggaagaaggctggacaaaaaggctttatcaggcagccacaggcaaacctggcaggcaggatccagggaaagggcctggcagtaccccagcccccgcctcccccagccacaggcccagaaaggccaagaagcctctggagcagcccccgtgctggctcagaggtctggttcccccaagaaaggacttgtcaccctgctagaactcttcttcttgcccctcctgctggcctggctctctcacctgcccaggagcccctgtagcacccactgcccagctcccaaccctggcacacaaggtccgctaggactcacggtctagttctaccactctaagggcacaggggttaggcctcccctaggctcaatttccccatccctgccacagcagggatctcaaaatgaactccagaggtccgtgcagctccaacattctgcgccagcccctcccttagccccaaaccctcagcatctccatccttcatccaggctgttagcctccttaatacatttcctccaaatcagctgagcccacgccttgcctccccaagaagtcttccccaaatgtccacactccctcctcccactctcccttgccctggctccgggttccaattcaacctgctcttctccaccataagcttccaggagaagggacccccgcttcccttaaggctttctcttcccccagcacaggctatgcacacagttggggcttaaccaggtctgggatccagatgtggtagccagagcttaacgaatgtttgtggaataaataaaatgaagtgaggagattggtcacctccagcctgaccaaaaggagtccctcatcttccaggccctcaacagctgtctgaggtggagccggaaggcctcccgccatggccctagagctctgcctcggcaggcagaagagccacaagctccagacgctgaagctggaacggctgcccacaccctccctgccaagagaggctgtgcgggagctgaggctcctccctcccagtccggcccatccagcttcccccctcccgcctcccccgccacgttctttccataaacaccactgctctggggcaggaaaagttctcccaggaaggacaacagtgggcctgccgctggtgccccaaggtgtcagggtgggcggagaggagactgggtgccactagactacagcctgaccatcacagcccagccagaaagccagggctccagccgaccaagtccacaaccttccacacccacgctcatttatctccccagcactccctaagagaggtaggtgagactccccattgcataatgaggaatgtagggcccagagaaagcaggaggcttgcccagaccccactgctttgaagttgcggagccaagacttaatctccctcctcctcctactcctggaggtacccaggactggatttggggaagggatggaaagggagagtcgctttgatgcagactgaggatgacccagttgagttggatttgtcacattccttcaaagtgaaccttgaaaatccagaacgaatgaaaccaggaccccagggggatcaccatctcctgccacaaccagatctttaggaagtattcgtacaggaaggccttccttcggtctaacttcaatcctgcatgttttcatgccaactcagttctatgctcagtggaggacacccctgttcatcaagaaagaaaaccaaggagatgcaggtaccaagtctaattcactttgagtcccccatactcagcacagggccaggcaccaagtagttgcttgggagagctgtattagagagtggctgctcttactggctgtgcattcttgggtgagtccctcccacctctggagcctcatttttctgtatatcccatgaagggggtttagcaggcgggctaaaggaggccttcctttcgacgtccaggccctctactctgggtagagccaatctgtccctctccattatttgtatcaatacaaccctcccacaactgccccatcagcagagaaccttcccatttgctctcactgagtccccaagacacgcggaggcagagatgatcagcacaccacgctgcatgccagacacacgcagcccaaaggccaagctgctagtccccatccccacagatgaggactgtccagaactgcctggttccaggacctttccaagggtttgggcaaggaacaccccctagcccaaaagtcagggctccaggtccaggactgagcgtgactaggggacaggcacagccagggaacaccaagtcctccaggatgcagaggtgtcaggctgcaagattgcccagtgaagaggcaggacccaaatcccctaaagagtaatatttagagagtctctggggacctggcagccagagagaaaaaaaaaaaaggtggggaaccctgactggtttggcctgggccccagtccccacacctaagcaccaccacaccagatccagacaactgggcccagcagctggaagagcctgctggtggggaagccctctcccggcccacagacccaactggtgctggcgagagcaggtgcaggcacccgggcagccttggcacagctggcatcttgccccatgtgcccgggtcagctggcctggggctcctctgcctggcatgcagctctggttgccaggtcatgccctatccccatctagaagatgggcactgagtcaagtccagagactagaggggaagtacttgagcattcagggcgcccccggcacagccttgcctccaggctggcctccatctcctcacccaccagagaggcaaaagcagcattctctccctccgcctgccctcttaggtgagtgcagccctcatctcttcatctcctttgcctctagaggtaaaagacaggctttggcttcctggggcagatgcccaagtagcttggccctcagtttact

SEQ ID NO: 588758 - DNA, 4001 bp, Homo sapiens
gagtccccttctgtagactgggtctaacgcatctctctggcagggctgttgagagcaccaaagaggtggatgtccacaaccaacctttgtaaactttaaagtgctggccacatgagtcttcctcctcctcttcccataaaccagacttttattcaacgcaatccctttcctagagcaccctccgtcctctctttgggtcccctaaatgccacccacccaaagcccgtttcaggaaacttggtctgatccaaaatccatgtacatatctttcctctttcccccacgcaccagatccttagagcatcacagcagaaagtgcggactccctctgctccctcctgccctctctgggcctcattttagagattttacacagctaggtggtggaggaaactatatccaactgggacacatgctcacacacacgcacacacacaagcagcgagctgggggaggaaggttggctgagcgaggagctgaattccttcacctggaacctggcacatgcatgggggagggaagggcggaatttccccatcaacctcccccatgaaacccagagtggctccgggtccattgtgggtagaagcagctttctgtggaaagaccttgcgaagtgtgtggacgcagacagacctgagttcagatcctgggcccaccatgtattttgtgagcttggggaatcatggcacctactgagcctcggtttcctcatttgctcaatggggatctcttaaaccccagatgaagcatcccggctcctaaatgtatttccatctcccatgttctcccgaagtcttcaccaggggagaccttctccactggcaatgggaatcaggatgggttcccagacggttagaggctggagaaagggaactcatttcccttggtgcctgcggcttcctcccaaagaggcccctataggaaacagcggggttgttgggtgcagaggctgcttagacatctggggcccagaacaggtgagggggatggatagggactgtcccttctccccaagttggcaccagatcccagtctgctgtttcccctgaaagaactagatagcccattagccaaggccacaccgccgggggggcttcagggagcccccatcccaccaaaagactcagcctcagtctttctcagcaccgcgagcagaaaggggaagctgggcccgctggaggggaaaggagggggttgaaaccaggccaggggcgcaagaccggggattcccttggggagggatggggccgcctacctggcgtgggcgcccctgggtccgcgagcaggacggggagcggcgggagcaggagcaggaacagcaagaaccagagcaagagactccctgcagaggagagagatgaggggctgagcctggcattcaaggctccaccaggaggccaagaaaattccccaccgggcaccggggtcgcactcacggctcatggcgcggctgctggggtgcgggacgcagagtgcaggctcctgtgcgtgcgcctcgcacactgcccggagctccagcccatcccctccccacccttcccccggctccacccccgctcctccctccagctgtcacctcggctgcccgcttacttcctctgcccagccccggccaaggcattttattaattagtgtatgctcgccgctaaagcggcttttcacccaagatccttgaagcacttacgtttctgatgcctggtggcactagatatagacaggaaactgaggctcagagacgatgctcaatgctgaggtcacccagggcttagggacagaactggggatggaagcggctcgtctgaaccacataccctgccccgcagagaagaaagggtctcagagtccccttctgtaaaatgggtctaacgcactctacagaaaagggtagagaagaaaaggggctagaaacagggcagtctgcagagaagaaagggggctagaaatggggcagtccagcctggcctgctgatggtttcctagatgagaaactcactactcctcagacagatctaacaggaaggacttacttcccccatgggctgggctccgccccctgaagccacaggtctctgccagaaatgaaaagaccgggctccaaactccaagagagcctagttcaaatccagactccacagcttactggccgtgtcaccttggacaaggtacttatcttttctagccctcagtattctcatctataaaatcggcttaatagcaaaaaccatcccagagggtggttgtaagattcaatgagggaatgcacacaaatctcctggtgcagtgtccagcatgtagtaggtgctcagttatcggaaggcattttttcaaagatctctgaactcagattccagggctggccagggtccatgctgtagctagactcacatccaccgccgaatttatagaatcccagcatccagctctccttttcgccagctcaggaagcacctagaaggaggaaggaataggtccaagatcacccaaagtcccatggtgctggcacccacaagtcatctccctcagtttccccagcacacccagccatcctgtgggccccacagtggggaaagccggcaggagagctcagaggttcttgtgctggctcctgggcatcactgggtgcagggtagaaattatgccaggtgggagaggtgaaacctgctgggaagcccctcccccattctcacccaagctgttcccatgctcccctgggacaaaagccagctgccctagggagacagagcaagccagggcagacctggagaaggagtggggcattggagggccctggggctctcagggtgccgggaccggcttcagccttcccttcctccccaaatcaagggccccctagcatttacagggcaaggagatgggattatcagcaaaagggatggggacagggtggaggtgtgggggtccagttgtccaaagaaagggggagtttctggtgagaagaaaggagagacgggcttgaatgaggttccatcttccactcccaggccctccctccctttgggccctgagcccatcaagtcaccacacctgtgcctcctgctgacttccaagccacccatctgcactcaaaacaagaaacacttgtgtggccctggcactgatgggaagagccttcacctcagaatcagaagtgagttcaagtcacttcttccatagcgtgaccttaaacaagccgctaggcctcactgggcctctgtttccccatttgaacaacagaatgagcagatcagatggtctctgaggactggtccagttccagcatggagcaattgagccctcactgcagccaggctctgtgaccagcaccacagatctcaacacagctgcaatacaggagaggatggagtctgagagagcaggcagggtgccgaggcagccctccagggatgaggcaggaccaagagcatggagtggggagaaggtagatgagagaaatggtggcagaagtgccagggcttggtgaccgattagcactagagcttaggggaagaaaggtgctgaggacacctagccttctggctcaatgctggtggtaatatccagggaaggggagctggcatgggtaggtggaatttgaatttgggcttcttgtatttgatccacttcaaggaatgaggaggatcaaaccttccctgccttctccagcttggcccatgggccagcacccccaaccgccccagcatgcagctggatacacaggggagaggtctggggtagcccttgccccagccctgggaaagagaccacagcacagggccaccttttcctgctccctactgcaaagctatagtctaaatgcctaggactggtgtcaccatcctagtcctcaagattgtgagcttccacttatagggcaagtccacctcccatgtcccctggtaggcctcctctaacatgcctcctcctcccccttctctcctctaggaagcccctgtgccttccctggccacagcagtgccactcctgatcacattgtccc

SEQ ID NO: 588759 - DNA, 4001 bp, Homo sapiens
tagtgtaagatgaagggggatgtaacgtgaaagcagcagaggtgaaaaagactcacatgatttagtcagcaataaagcaaaaatatgcaaatgacctaagctacattattagaaattttcttgtctgactatgaatgtttccttcttcatactattagtatgatagtgatggaccagaatatgacctgtggtgaacaataatgacagtggaccccagactatatcactacagatgtactgagcaaatccaatatgaaaaagtacaggttgtaagctggataagccagttgacaaatatctaattgaaaaatgggttcttgatgtataaaataattcactactagaattaaacagtgaattcctctaagtatgcttcaaatgtgatttatcagaatttttcagatgttactacatcaaaaaggtgtatttgactagtttactgtttaataaaaagcagtatgattaaagaacaatattaatttcacttatacaccataaaaaaagcaaatatcttatgttttctactgagctgacaacttgtaccacttttattagggtagactgaagggtatttgtatgaaaatgtgacctttcatatagaatataggaataacataaaagctaaagcttacctacatgaaactgaaaaattacacatgtacatcataattttctcaaatttatagctgaagttttattatttctaaacatttctgaaatttaagagctatctaattatccatttcttcaatacactttatatatatcatttcacttaattaaaaaaccctatggttttggttttattatttccaccttacagataaagaaactgagggtcaataggccaagatcacacagctaaggcaaagccagaactgactggcaaagtgaggtcctgacttcaaagtcccacactgctcctcccacacttcagggctcctggctcacacagagtgtccttcctgtatccaacagagctatgaaagaccaacaggatcactcaccaggatgagtaaacccccttaatggcttgctcctgctcactccagcgggctgggttctcatacttgcaagctctaccgccacacgccatggaacatgccatgtgtccaggaatgacatgccgtaaacgctcccctacttttgtgtactttggtgttggacgttctaaatttcctagaacatataaggaaaggaaaattcaaaattccactctccaaatgaaattgtaacatgggaaatagcttccattttatctcaggatggtagatgacaagccagtgcaaaatcaccttcatcttgtcaagaaaacaaaactgtttccctgtcaaagtgacatatatctcttaatgtaaaaaagctttcacatataataatctccacacatactggcaattaggaggaagaaactgtagaagcagatgttttacaagagaatgagttttgttcaaacctatatttttaataaaaaaacacaaaacatttgatcattttatatcctcttatatattcactaaaatagcataacagacagcaaaaagtataatatagaataaactgccaatatttaaaaaggtataaacacaacacagctgattcccattcctcaaacttatatacataggtatggcaatctataagaagaaagagacctttactttttctttcggggaaagttgggtttccctctgcatggctgactgaggaaacagccaccatcacctggagagaggacgaggacagcagcttcgtggcagagccggagcccaagccagagccccgccgggcctgctgcagccgcagtactgggtctgaggtggagtgccggcggccctggagaaaggagctgaggaagcgcacggctgagggccgcctggttgcatcctgcacctgcatggcactgggaggcaagagccggaggcaggaagagtcagccccactcactcagtgaggaactttcactgagagcagggagcattgcatcgttctgtatgatctaagagccattcagattggctgactggtttccatggcgacaaacaaagaaactactgattcccacttagatctgaacaggcaaaatccaatatgaacagattgcattttggacaaattgttcaaatatagggaagaataatataaattttaaatatattgattactaaattttgtttctcaaatgcacttaaaatatctaaccaaagaattactccccaaaatactgtagtgaatttagaaaactgtcttcctgatgcaaaaactgccttttacatacatgttaaaaggcttaaattctgttattctgttcacaacctgtctctggatattttgaaaaaaattacctttctactcctcgtttgaatagtgcagaaaaaagttaattgtaataaagtgggatatgctggacaccttacaagattattaaaatatcatccaatttttcataaccaaaaccacttctattttttcttggtaaaactattaaagaaatacttggatagaacaaataaagacatttttagaggtgatatattatcagaagacatttaacttcatgtgttcattttcagaatataaaaacccaattcttagttatgcctctgttggacagttatagtagccatgcctctcaaaaactcaaaacaccattctctgccttttgttgcagtgagggaaaaaagaagcttcaataatgtcttggcagaggcatacaaagaaagatcactaaatatcacatttttaaaggaactagatgagggggaggttgcaacttgaagataaaggatataaagaaaacagaaagtgcaacaaccactaatgtactcattgtccgcctcctcccttgttaatgtcaggctgcgccctcgcttgctcgctagctctctgcacaagtggtatttcagatgtgtgtgcacagaaacaaactactgtactgctacagataaggctattttctatttttttttttttaacgattactaatgctataccaagctccttttaaaatgccgcccccatctccccagtaatgtgcacttttgtcgaataagacagggacacagaatcccgatttggtgtccaaattcctactctatgtatagtatcatgcctttgttatttagaatgcagccatggaagaaagcacagctttcctgtcggaggaattatatgaggattattctaggcaaggccctcaggaccctaagggcaacacagaaacagcagttgcacagaggtctgcatgacaagaacatgaacttactggcaggaggccctaaatgctcaaactaaggagctgtgtatttgctatctgtgtaagagggagtctaagaagatttctgggcaagtctgtgcttctgagtatgtggcactccagaatgttaacttagctcttgagaaacaagagtggtgagctctgcagaaacaagtccatggcctggagaaccagcatctgaggacatctacagagaaaagtcaaaagtaactgctttcaactacactaaaaatgacaactaatttcattagataaggggtaggggtaggacttatttggaccaagctaaggaagggatggtttatagatcacctcaagaataatctctgtggtgaaatcttgagccctgggttgacctcaaataaacacaaaatgactgagcttaccccagttaccgtacagtcagtgaccctgtgtcaatgtctaaggaagtcaagcctaacgcaaacaggattctgcaaggtgaaagcagccctttctgcatgcttgctcagtgttcccaacaatgaggtgctgtgaatataccttgcattgatgaggcagatgaaaagaaatgtacccacctctggacacgagaaccaaatttagaataatatttaaggaacaaaatgagatactgatcatgacaaatatgaaatcagttacaataaacacaacaaagaaacccactaaaatgtaccagtgagtactgagtcttttcttccttaatttctataagtgggca

SEQ ID NO: 588760 - DNA, 4001 bp, Homo sapiens
ggtgtggtggttcatacctgtaatcccagcactacaggaggtcaaggattaatttaagcccaggagtatgagaccagactgggcgacagagtgagaccccgtctcaaaataaataaataataaaactttaatagtaactttcaaataaatgccttgaacctagttttcaaggaggatcagaatatcacagaaggaagctcattttaaaaaagcaaagcaaaattgtcaggactgtctcaaaatgagagctgttccacaggatagggtgctgtctcctaaaccttggtttcctccaacaaaagatttccttccaaagcttgaatggtcacttgtctggaaaaggagatggaatctctgtttgggaggagaaatttgagccccttgggtacaaccccacgaagactttgggattgggtgggaaattagactagaacaattgttcttaaaatggtccctgggtcaccaatatgggaatcatcctagaagggtgtgaaaatgcagatcctccagccctgtccctgatactgaatcctcatttctggagtgggagctgagattttgcatttttaaaaagccacaaggtggaattcttgtgcactaagaggtctggacacaactggacaagctgggagccaacaggatgagtgggtggttttggagccacatagacttggatttaaatcccagttcttccatttaatattaatagctctgactgtgacacgtcacccaaaccctctgagcttgttttcccacacagtaaatgaaacgacactttgttgtggagatcaaataaaattgtgtggacatatgtatgtgtgtatatatgtatgtacctgtacgtgtgtgtgttaacagtgcctggcatggaacatttataagatgacctctcggagttttccggttctcaatctatgaatgctagtatgttttaatccttccacatacataactatcgcaggatcatctgcttatccacctccctaaagcagtgtttctcaaccttttcttgattttccccctctcctcccaggagacgttttagacattttatttccgaatctgctaaccccataaaatttcaatgacataggtataacgtatatctgcttgttttgaggctctttggaaggccacaaaggacggtaatatctacgatcttttttccccctaagaacatgagcaatatcacccatgttgagaatgcatgtccgagagataaatgacttggtcaaggtcacgtgactaatttagtggcagaattagacctaaattagaggtcacaaactggcagactagaaccagcttataaatgtcttttgcttggcttccagtgtttcttcttttttttttaattgattgccaacatttacaaatcaagagatttcacataaaaatcccgatattcaacttctcatgaaaaatctgagatcgcttccagcggcagttgagaggcactcgccaccccagaacgtgggggttctcccagcatctcccagcctggtccctgcagacatctgaatgtgagaccctcaaatccaagacctttaaactttagtttcaagctcacgaccctcagtgatttgcctccaccacgcatcacttaatatctagacgtttaaaaaaacaaatctgaaagaaccatactgagtgtgcggctaaactagctgcgaattccgaaccttttcccgctcgagattccaagccctcggcgccggctggggtcagcaggacgcgccgtccgtgtcacaagtcgtctgcggtcggcggaccagggcgcggccggcccggagacgctgccccgcggagggtctgtgggtagcgggcccgagggcagcctctgcgcaccctcacggcgcggcaccgatccctgctgctcccgacgcgccctggaggcagaggggtcccagcccagcccgccggacaacgtcctggggcgagcgcctgggctgctccccgtggcggggcgcccctgctgaggccgcgtccccggcgctgccctcagcgcgcccgcccgccaatgtcagccgccacacgccgcacgtgacgtgtgctggccaatggaggcctgaagcggaccgtgacgagagcggtggctctgggcattttcgaacgggcgcgggcggtgagggaaccgtgagggacgctgaggggatggcgcgggtgcggaaaggggaccctaagtaaggggacggcgtgaggacggctaggggacggcgcgagccaagaaggacggcggcggagctggctgcaagcgctccccggccacagggtcgagaagagtgaatggaggaagagccaggagagccctggagcaccgcggacggaacccagcgactggccgcctctccgggcgcgcttcctgtgttgttcctcctgcttctactggtcctatcgtcccaactcttacggcgtcgcggccccaggtggttcgtcgcggccccaggtggttcagagaaatccgaggagcagaatctgggtgagagcaaggcccagcagtttacagagtggctgacggggtttgcctgcgtgtaacaggaacccccagattccagtatcctaaacccacgaggggcttttcccctctcccataaaagaaagtgggaggaaggtacctaaggtcgttcggctctgtcatccctacacctggcttgtgtccaccaatttgccttatgggccaaaatggtagttggagctccagccatcacatccttattttagaaagggcctttctggaagtcccacacaaaaccttctaactacatcttacagactcgaatttagtatcatgacctctcagagctggaaactgtaatcttaacttggcacattgatgcccttaaaaatctttccaaaatgaagggaagaatgaatttgattaagcaactagcaatctgctgcatcttgttttttcaccctcgcaagtggtcttgggtctcatggctcagtagaagtaagtccttcccctgcatgtgcagaacaactcactaggcaaatacatactctgtggcagaccctatactggatactttacatatattttcacatttaatccctctaggtaggcattactagccccatgttgcagatgacactggaagatagaaatggtgacaaactgtgaatgcagagaggctgttagattgaccagatggtctgataccagttggctgcagagttgcaagcacatggacctaagaatgtaattttctgtaccgagtccacaaaggccactctgcctaaagctgacaggaatcaacaaacaagatgaagctaccatactgccctgtggctcaggaagcgggccccatataatacaccaatgcaaaaatagtgtgacatctaaacaccagtatggtaatgatgtaaaaaatttgttttagtaagcagcagatgaaaagacatttgaaaacgttgacttggtatttctcagcactgtcctacagagaacagtgcccatacttgggcttgttaataagtaatggagactgggcattgtggctcaagcctgtaattccagcactttgggaggctgaggtgggcggatcacatgaggtcaggaatttgagaccagcctggccaacatggagaaacctcgtctctactaaaaatacaaaaattagccaggcgtggtagtgcacgcctgtaatcccagctactagggaggctgaggcaggagaattgcttgaacccagggggcagaggttgcagtgagtggagatcgcaccactgcactccagcctgggccacagagcaagactccatctcaaaaaaaaaaaaaaaagtaatggattggtttcatacatttaataaacaatgtcttgtgtatacttgtgctgcactaagcattaacaattccaaggtgaattagacgttaccctgcccacagtctatggggagacagacaagtataaaaacaattagaacacatcatgataacggtatttgggcggtgtgggagacatgagaagagtatccaacctggctggagagagggaaaa

SEQ ID NO: 588761 - DNA, 4001 bp, Homo sapiens
acctgtaatcccagcactacaggaggtcaaggattaatttaagcccaggagtatgagaccagactgggcgacagagtgagaccccgtctcaaaataaataaataataaaactttaatagtaactttcaaataaatgccttgaacctagttttcaaggaggatcagaatatcacagaaggaagctcattttaaaaaagcaaagcaaaattgtcaggactgtctcaaaatgagagctgttccacaggatagggtgctgtctcctaaaccttggtttcctccaacaaaagatttccttccaaagcttgaatggtcacttgtctggaaaaggagatggaatctctgtttgggaggagaaatttgagccccttgggtacaaccccacgaagactttgggattgggtgggaaattagactagaacaattgttcttaaaatggtccctgggtcaccaatatgggaatcatcctagaagggtgtgaaaatgcagatcctccagccctgtccctgatactgaatcctcatttctggagtgggagctgagattttgcatttttaaaaagccacaaggtggaattcttgtgcactaagaggtctggacacaactggacaagctgggagccaacaggatgagtgggtggttttggagccacatagacttggatttaaatcccagttcttccatttaatattaatagctctgactgtgacacgtcacccaaaccctctgagcttgttttcccacacagtaaatgaaacgacactttgttgtggagatcaaataaaattgtgtggacatatgtatgtgtgtatatatgtatgtacctgtacgtgtgtgtgttaacagtgcctggcatggaacatttataagatgacctctcggagttttccggttctcaatctatgaatgctagtatgttttaatccttccacatacataactatcgcaggatcatctgcttatccacctccctaaagcagtgtttctcaaccttttcttgattttccccctctcctcccaggagacgttttagacattttatttccgaatctgctaaccccataaaatttcaatgacataggtataacgtatatctgcttgttttgaggctctttggaaggccacaaaggacggtaatatctacgatcttttttccccctaagaacatgagcaatatcacccatgttgagaatgcatgtccgagagataaatgacttggtcaaggtcacgtgactaatttagtggcagaattagacctaaattagaggtcacaaactggcagactagaaccagcttataaatgtcttttgcttggcttccagtgtttcttcttttttttttaattgattgccaacatttacaaatcaagagatttcacataaaaatcccgatattcaacttctcatgaaaaatctgagatcgcttccagcggcagttgagaggcactcgccaccccagaacgtgggggttctcccagcatctcccagcctggtccctgcagacatctgaatgtgagaccctcaaatccaagacctttaaactttagtttcaagctcacgaccctcagtgatttgcctccaccacgcatcacttaatatctagacgtttaaaaaaacaaatctgaaagaaccatactgagtgtgcggctaaactagctgcgaattccgaaccttttcccgctcgagattccaagccctcggcgccggctggggtcagcaggacgcgccgtccgtgtcacaagtcgtctgcggtcggcggaccagggcgcggccggcccggagacgctgccccgcggagggtctgtgggtagcgggcccgagggcagcctctgcgcaccctcacggcgcggcaccgatccctgctgctcccgacgcgccctggaggcagaggggtcccagcccagcccgccggacaacgtcctggggcgagcgcctgggctgctccccgtggcggggcgcccctgctgaggccgcgtccccggcgctgccctcagcgcgcccgcccgccaatgtcagccgccacacgccgcacgtgacgtgtgctggccaatggaggcctgaagcggaccgtgacgagagcggtggctctgggcattttcgaacgggcgcgggcggtgagggaaccgtgagggacgctgaggggatggcgcgggtgcggaaaggggaccctaagtaaggggacggcgtgaggacggctaggggacggcgcgagccaagaaggacggcggcggagctggctgcaagcgctccccggccacagggtcgagaagagtgaatggaggaagagccaggagagccctggagcaccgcggacggaacccagcgactggccgcctctccgggcgcgcttcctgtgttgttcctcctgcttctactggtcctatcgtcccaactcttacggcgtcgcggccccaggtggttcgtcgcggccccaggtggttcagagaaatccgaggagcagaatctgggtgagagcaaggcccagcagtttacagagtggctgacggggtttgcctgcgtgtaacaggaacccccagattccagtatcctaaacccacgaggggcttttcccctctcccataaaagaaagtgggaggaaggtacctaaggtcgttcggctctgtcatccctacacctggcttgtgtccaccaatttgccttatgggccaaaatggtagttggagctccagccatcacatccttattttagaaagggcctttctggaagtcccacacaaaaccttctaactacatcttacagactcgaatttagtatcatgacctctcagagctggaaactgtaatcttaacttggcacattgatgcccttaaaaatctttccaaaatgaagggaagaatgaatttgattaagcaactagcaatctgctgcatcttgttttttcaccctcgcaagtggtcttgggtctcatggctcagtagaagtaagtccttcccctgcatgtgcagaacaactcactaggcaaatacatactctgtggcagaccctatactggatactttacatatattttcacatttaatccctctaggtaggcattactagccccatgttgcagatgacactggaagatagaaatggtgacaaactgtgaatgcagagaggctgttagattgaccagatggtctgataccagttggctgcagagttgcaagcacatggacctaagaatgtaattttctgtaccgagtccacaaaggccactctgcctaaagctgacaggaatcaacaaacaagatgaagctaccatactgccctgtggctcaggaagcgggccccatataatacaccaatgcaaaaatagtgtgacatctaaacaccagtatggtaatgatgtaaaaaatttgttttagtaagcagcagatgaaaagacatttgaaaacgttgacttggtatttctcagcactgtcctacagagaacagtgcccatacttgggcttgttaataagtaatggagactgggcattgtggctcaagcctgtaattccagcactttgggaggctgaggtgggcggatcacatgaggtcaggaatttgagaccagcctggccaacatggagaaacctcgtctctactaaaaatacaaaaattagccaggcgtggtagtgcacgcctgtaatcccagctactagggaggctgaggcaggagaattgcttgaacccagggggcagaggttgcagtgagtggagatcgcaccactgcactccagcctgggccacagagcaagactccatctcaaaaaaaaaaaaaaaagtaatggattggtttcatacatttaataaacaatgtcttgtgtatacttgtgctgcactaagcattaacaattccaaggtgaattagacgttaccctgcccacagtctatggggagacagacaagtataaaaacaattagaacacatcatgataacggtatttgggcggtgtgggagacatgagaagagtatccaacctggctggagagagggaaaaagagggattttcgtt

SEQ ID NO: 588762 - DNA, 4001 bp, Homo sapiens
ccccatcagctgaaaatatcataaactgaaaatatcataagttgaaaatgcatgtaatacaactgatctacagaacatcacagcttagcctagtctaccttaaacttgctcagaacacctacattagcttacagttgggtggaatcatctggcaacacagtgcactgtggagtaccggttgtttaccttcctgatcatgcggccgactgggagctgcggcctgatgccgcggcccagcatcatgaaaggatatcatacctgcacatcgctagcctggggaaagattaaaatccaaaatttgaagtacggtttctaatgaatacatatcattttcacaccatcacaaagtttaaaaaattgtgagtcatggaccatctgtatagtgagtttgcttaaaaccaaatatagtgctttttcaaaatctgctttcatctttgataaagttctaaccttgctgctcaccaaggaataaaagaaaccactgcgaaggtggctttgaatattctttaaaaaaacaaaacaggctgggcgcggtggctcaggcatgtaatcccagcactttgggaggccaaggcgggttggatcacttgaggccagaagttcaagaccagcctggccaacatggcaacttacaaaaaaaaaaaaaaaaaagccggatgtggtaacgtatgcctgtaatcccagctacctagctgctcaggaggctgaggcaggacaatcacttgaacctgggaggtagaggctgcagtgaaccgagacagcgccactgcactccagcctgggcgacagatcaaaactctgttctcaaaaataaataaaaaataaaaaacaaaacaacaacaacaacaaaaaatccatgtgtgcagagtggttgacatgtcactatgtgttccagtagctcagcttgctaagtgcagaacttgagacacagtgttttagttctgaaggggggtagggatgggagtaatccaaatgttgggtaattcagtaattggacacacctgacttttgaacacattatgtgattgaggttagtattaacatcttgccactgcctattaacattttgcaagggtagatagtttccttcatcagatacatatcgaaagcagtttagttgctcataccagaagagggaagtcaagctgggtttaacaatgtgttgtgagttgctggggagatgactaagagaagattgacagatagatggtttgagggagttaggaaaagcactgtttgaaatgttccctgggagttcagaagagtgacgggagtggccctgccagtgtggtcaagatttactcctccttgaagatgtgaaacctcctagaaacaaggaaaataagctgggaggcagaatgatttttatttggggacatcctcccctataaaggcaggaactgctaaagggtttgggaagaggaaatcctccttcagcttgtatcagaattacctggcttgtgggttaaacatatacacccccaggccctaccgctatatgactgaatctgttccccgccggaactaggccctgaaatctatacgtgtgataggtgtttccacggctgttacatctaaaaatcaccccgcaactctgcgtctgagaaagtcaagagaaggctcctggggggagggaagtactggcagagggctcacaagggcaggggtagccatgcagcctgtccttcccattcaactgtaaaatggagaaaataacagagcctgcttcctagggtggtcaagaggggtaagttagcaaatacctgcatgagctccaaggggtgcctgggcacggtagcgctgcgccttgctggcgggcggggggtgccgcccgcccgcccgccgcagaggggagctcccgcctccaggccctccacccgcgccccctcccctcgggattcggccgagcgccctacctgggctgcagccaggcgggcagcgccaagggccccatgggccgccgccgccagggcttccagcgcggtccaggaaggagtaccggggaggaggcaggggcggccccgcggctgggcgcggaagggcggggcctctccacactcagcagtttacaaaaagaaaaagcccgaggtcgtgcgttggggaagagatgaaaacgaagttctcgaagtttctgcagcactgctagagcgcgtcagggcgcaaggctgggaggcggctcgcgttcccggtggggttaccaaactctggttacagcttcctaatctttgtgttgagacccccttgcaagccttctggaaattaatgcatctgggcgatttccggggcctccgaactcgctgaagcccatccccaaacctcccgagatgagtggattccagggtgggctctgctcaatgcccaccggtgagccaggttcagacacgaagcttgtgccgggcgcagtggctaatgcctataatcccagcactttgggaggccgaggcgggaggatcttttgagcccaggagttcgagaccagcctgggcaacatagcgaaaacgcgtctctactaaatgtacaaaaattagtcgggcatggtgacgcgggcctgtggtcccagctactccagaggctgaggtgggaggatcgcttgagcctgggaggtcgaggctgcaatgagccaagatcacgcggctacactccagcctgggtaacagagcgagatcctgtctcaaaaaataaataaaaataaaacgaagtttgtagcacacctccccaacactttttcagctaggggcctgattcctcttctatcaggcctccctgctctctaatctcccttgggttctcactggtgcctgcaaatctttattcacgttgtgttaatttctctagcctatgcccagcactgctacaaccccttcgtgatctctcaggcttatgacatcactgtctccgtacacagatgacccaccctcctgctttgctaataagatccagcccatcttcaagctcctctgcccagaaagggaaacgttaaaacaaaaacagaaacatctaagaaggcacttgcaagtaagtgggacaatggcacctggttttggagttggaagttagcgcccccatttttaccaaaagggaagttgaggcattaaaaaaatgttaagtcacttggcacaggtcacacaattgataaaatggcagtatcagaacttcaaggttggtgggatttcttgtttgtttcccattaggccgtggcttccttttttcatagtccattccattcactatgcctacctctcacctctacatttctctgcaccttctctcataccctgccctcagtcggaggttaaccccaactttgtgtttaccagtcccttctcagactcactgcatcagtagttaaccatcgcctcttcttgcatcgtcatcccctcctttccattggctttcactgcactttagggacatagacaactctctcttagcatataattaaacattgtattctttctgtttctctctcaatggaatcttctaataactccctgcctgccttctctgatcaggtgcttctttcatttcctaccatcttcctgttccataataccttacagtttgactctcctgacactgctccgtccgcgagcatgttaatttttcgccgaatccctatcctgtatcaccttgcaggatgatgccccacggtccttgcttttacagaacatttgatctaaagggtaaactggtggctaacccattatcaatgctatctctgatcaggttaagcagcaagagagaaagtaaagtcccagatggcctgcagtggggcaggagggagaaggtggaaagcctgcccagaagaattgatcctttgtcaccaaacacagcccctgcatccacatcctcattgacaggtctgctgcattttaccagttctgtctgtctgccatttacccctgaagttctacatattctacgtctcttgccttatgtcccttctgtctctctggatgggtcttcttctcctgctgtatttcctcaaaagtctgccctta

SEQ ID NO: 588763 - DNA, 4001 bp, Homo sapiens
tctcagaaaagtttccaacttccaatatacttcacatcttgatttaatcatccggaaagtcatccatatcaaagcctccatacaacaaagggacaggcagcttgatgcagaagaaaaagacctgcccttggaaccaggagacttgggttacaccccagctctaccacatactgtgtaattggctgctcagagcctccatgtcctcatctgtaaaatgggagtgacaccagtctcacaagggagttgtaaagattaaataagacgatacaggtgaatgtactctgtaagttctataaggctatgcaaaggttagttattacaaaagcacaagatgaaattctcaaacaactcgggctaatgacagaaagcaagaattaaattggtggttctaaaggggtgctggggtggcattttgctccctaggggacatctgacaatactggaggcatttttgattggaacaactggggaacaggaattgctactggaatctacagaccagggatgcttctaaaccctacaatgcccaggacacaaagaattatcaaaccctaaatgtcaatagtgcaaggctgagaaaccctgatctaaataatcgcttaaagttggatttgggagctttttaaaacagaaatcttcctaagcaggctttactttctcccatcatctgcttaaacatttgcaagatggatcatcttgcaaaacagctcttttgtaagtgaagccaactgccaacttctggagtttctgaatgtataaaactgcttttaaaggagatgctctctgattacaattcggctaaattgtttttccgaaggccttgacttcggcagaagttctcctgggcacagagacagggtctgtcactccaccactaggccctgaagatggtttcctaattctaatttcctcctgaaatgagagccacgagggtctctaaacgaattaaattcacatcacgccaactgcttgctagctttgtgccgggcacggtgccaaacacctccacataatttatcccacttaatccactcaacaacccagcgaggtgggcattattaccagctgattgcaagggaggaaactgaggaccagagaggttaaacaacttgccaaggtcaccagctggccaagggggagcccaacttgaacggaggtctccagtttccaagtcacaagctctttccaccagcttggaaaacccaggtgtcaagttgtctcaacttcccatgaatttttaaggcaaccgcaacttctcagtaagtttaggtagctgaaaatgggaatttcgggggggctgggcactctcacatacactcccccatctgcagctgtctcaccgcaggtacctgataaatcattccatatcgtccgcggaacggggaggatttattggctctggagtttcgtgccaggcccaggaaatgccatctttgaaagccgagaggcggattcgccctgggagccgagcgctggcagccgctctcggctagctccccgcgggctgtgtgccccctcggagccccgagccggggtcgcggcggcacggggtcctccggaggtgccggacgcacgggctccgcgggttgcgcccgcccctgcccggctggagcgcacgcccacgctccggcgccgcgtcccggccgccagcccgccccggccgagccccacccggcgccccgcccgcgccctcccgccccggccccgccaggtgagcgcagcggggcgccccctccccgccccgacgtggtgcggggatcccggtgcagccgcacccgccagcccgcccgcgcgtccgccgcgcgccccagggacgggtgggggcggggtggcgccgagcgcgaccccggcccccggcagccccgcaccctgcccccggcccgctggggtcgcacgggcccgtacctgcagcatccgggggcgcggagcgcccaggtaggtcgcgcgtgcgggcggcgcggaagctcgctcgcggcgcgacctggccgccgtctgagcatgcccagtgccgcccgcgggcggttcccgccggccgggctggccgcgacgggcccgcgcgccgggcggggggcgggcgtccgggctggcctgcggtgttctcccgcccccgccccgggctggcgcgccccgacgcatctcctaggggcaccggggctctccgccgagctccgggcaggtcctgagttccctcgcgcatgcatgcagccattcgttccacagccatgactgggcacctactgtgtgccaggccctcagtgatttcatgcctagggaaggcaagaagtcggcgcccaaagaaactttgaaatgaggagtcttgcacgacgggtgcgcggttgagctgaggtcccgctgacttccagtccagtgctcgtcccttggcactagtaagcttccctggttaaacctccccaaggctcgtgggacccctacctgatctgtgctcctgcttcccacctccgtctcatctcacacctgccttcctgcggatcctagagcgcctttctgtccatcaaacactcgaacttcactaacctcaggacattggcgcccgcctttccctctgtgggacgttcttgcccagcttttcacgtggccggcgccttctcattgtacataggtcccctcctcagagaggcctttcctgaccaccttcctcgattagccctctgctcctgaccactccgtgtactctgttttcttcatagcatttaacagtgatttatccattttcagcaaatatttattgagcacctattctggtttttctcgcgtggggaacaaatagacaaaaattctgtcccccagtggagtttggggaaagagggacaggtaacagataaacagcaaattagcaaactatgcattatattagaaagtgataagttctaagaggaaaaagagcagggtcaggagatttggggctggaggtaagcagtgaattttcagtgaagcggtcggatagggcccttgagctgatggacggtctgattgggtgacactgagaaggtgatagtggtatttcagccacgcagataagcagggaagagcattcctggccgagggaacagccagtgccaagacccaaaagagcgccggaccgcttagggaacggcaaggaggcagaggagcagatgaggttggtcactttggcttttcctccgatttgtttaattctcatgttgtatttccctcctaaatgtcagctttggggctgtagctctgcttgtctttactgcagtgacccccctgcaacactgtctggcacacactaggcgctcaaacattatttgttgaatatgtgaacgaagggatgcagagatggttggaaccctccagtcgggcctgggtgccaggtcctgggggcagtcgttccagggatagactgaggcctcggcagcccctggaacctcatttcggtccttgtcccggagtcgcacgtcccgggatagcgccgctgcagcgggtgccgcccgtgcatcgcgtcggggggatttccgacggagcccggagtccaggggcaggaccgcccgcgccccgcccggcccggcccggcctcgagtcgccagcaaaacctggagccgcggcgcccgctcagcaccactcggacgggcggggagcgcactgggcatgctcggagccgggcggggccggagcccccggaaggaggagccccctggaggggcaggcgacgccccccgcagagctccacccagcgcccccgggctcagcaggaggcattctctgtcctttccccactgccttatcctctctgtgcttcaaccattgtgaatacctacgcttcgatctgggcacccgagtggaagttgagtgaaataaggaacgtgaacgtgtttagaccaccttaaagatccatttcttgagtgcctaccaaaatcagccgtcatcctcatgccagtttgccaactgctgagatgaggaaaccgaggtcaacggaggatgtgtgaattttcgaagttgtcttaatctgctgaccccta

SEQ ID NO: 588764 - DNA, 4001 bp, Homo sapiens
aactgtgggtgcatgagcaaaagcataaacatcagtaaactagaagtttccaggacctccaagctgaattctgcactcatctctgggcaaccagcaaatgtaacttccaaactccagacctgttttgtgggcaagtcgtggcaggcccctcagcctgtgactttgctcctctgcctggggagcggggaaaggaggccttcggcagcattgcgcaggtcaggaagcgccctggggagacttctatttagggatgcggcatacatgtgacacttggccactagctcccatgcttttttaaacccagattcaaacgggatagacattccattgtctggccaagatgacaaaagggaaacctcttgaaatctaatatagacagggcagaagtgcacaggggcaggagagaaataattttcacaattgaaacaaatcagtttcattattccttcaaatttataaaggccaaggaactggctttttgagatgggaatgcttcaaacagtattacaacctcctatttgcacagttccgggctttgtacatggtactactttgtaactttccctcttatctcagcctcataactctgtaaggtaggtaccactatctccatttttacagatgacaaaatcggagctcagataggatatgtgaggtcaattgtgtcttattttaacctggatgatcatgttataaaaaaactcactatgctacaaatttcttatatgtttaatggctaaaaagcttaggatccatgtcgtaactctaatattattactttgattataattaactacccacaatgtattgaacacctggccttgagagacagtataacatacatttgctgattcacacctatttggtattggaatctccatcttttccacctaggagaacatcatcagttctttctagtttgtttctatgtttatccaagctgacattcaaccagaattaagtgttctctcctcctacaatgctactgagagaaaaaaagagaaaggagagttatagataatccaatggtgaacccgggctttcattgacaagctcagctaatcagtatgtcttcctagggatataaatgagaagataaacgtggagatcaccactcaccaaatgctgccttgtcatatattgagcaaagtttctgagtcaaccccatggcatcatacacaaagaaactagaatagtggaacccaacccgagcttgggagacttcctaggaatcttgaaggagcctagttttgagattgccagtatataaaattctgcaaagaatgatctaaatttatcagaaacagcagttgtggaggctcacaatgaagaagatatttatttaacaattagaatacaggatagttctttagaagagatgcctgggatgcctaacttcagaaatgtaatgacctctcttgtgggtaccccacctgtgacctcaacttcagaaaaatgtaatgacctctctgcctagatccttaacaaacaaacaaaaactaacagataccacctctatacatcttctttgactcttgagagctaaaatttccttcagagggaatttccttaaacaggaactacaaagctggggtaagataactatgttccaggaatataggtaaaatcttttaagtttttttatttttcatttttttaatttttaatttttttaaagcatgtgaattaatggtagaagcctggtccaagataagatgatctggcagctagtcgtggtggtatgtgcctataatcccagctactcaggaggctgagggaggatcctttgagtccaggagtttgaggccagtctgggcaacatagcaagaccctgtttcaaaaaatatatatatatatctggcagtcctggtggcccaccagctctataagagttatgggggtggctcccaccatggctcctgttgcagtaagataaatctggtgcccaaatcccagaaggtcatagttacattctactccacaacgggataccacccttcttaagatggaaggtgggggtggggtgtcagttgtcaaccagtgaattttagaagagacagacacacactgtttattactcattctgtgctaaaatctgcctccctgtagcctccacccactggccacaattctacgaccctgcacatctagttccccttttcccatgactactcttcggacacctgaaggcagccttcatttgtgcccgaggcttctctccatcatgaatgccctacatttccacagatgtccctcaaatgacaggaaggctcagcaggaagattttgtcagctcccagagaagtgggcttctcttccacagcgtatggaagtggatggccaatggccaggatgggccctggagacaaactcctaggttgcactggccgtaggaaacctctccctcaagtttggccactggagggctctaatgtgcccagtggatgccacaaacctggggctctagtgttatgggaaggcaggaggcaggtgacaatcactagtttaggcagtgccgtccagacttggggttggaacctcccagttggttgtacaatcaatttaatgcgtcacagttggcaagtttttaaaaaaaggaagtaaggccgggcacagaggctcatgcctgtaatcccagcactttgggaggccgaggcgggcagatcacaaggtcaagagatcgagaccatcctggccaacatggtgaaaccccacctctcctaaagatacaaaaattagctgggcttgatggcacacgcctgtagtcctagctactcaggaggctgaggcaggagaatcgcttgaacccgggaggccgaggttacagtgagctgagagcgcgccactgcactccagcctgggtgacagagcgagctccgtctcaaaaaaaaaaaaaaaaaaaaaggaaataaaacagaatagaaaacttcagagtacctggtacttactatagttttataaaacgtttgcttcagtaatttatatatgtgtactgtattctgaaacaaaatatatttttactttggagttgtgatttttaaaaaacccactggttagaaccacacacacgtacacatgtacatacatacataatcacacacattatatataatatatataaaagacacatatacatgtaaacacacacatattatgttgtttttaagacatcccttcaacagagccttttttttttttctgcaacagggtctcagtcgatcacttaggctggagtacatggcttgatcatggctcactgcagccttgaacttctgggctcaagtgatcctcctagttagcctcctgagatgctgacacatgcaccaccacacctgactacttttttatttttatttttgtagaggcagggtcttgctatgtggcccaggctggtttcaaactcctggcctcaagtgaccctcccgccttgggttcctgaagtgctgggaagctcacaagtatgagccaccatgcctggcccagagtgtgttatttagtactggcctgaggaaaccttggtagggtcatttcaaacacattcttatagatttcatcaccagctctgtgtccgtcagcttatgaagtaacctgctgggctgagtgtttctatcctatccccagtttaccagcataaagagctggtatggggaaaactcagaggacagggcatgcttctgtgtggtcaccggatgtgtcataccagacaccttggacattggcttaaaaagtaataaaaaatacagtcaaattcccagtgtctgctatagtagagggaggaggtgcacaaagaaggcaaaatacagtaacagattaatatttggcctttcaacatattacaagttaaaatgtgatgtaattactgctaaaaaaaattaacaaggcaacactctgtgtctgagttaatgctgcctccttgattatgtcttttggccacgatgaatgtaaaacaggattcaatactaagcatctattgctttttttctatagcttccctccctaaga

SEQ ID NO: 588765 - DNA, 4001 bp, Homo sapiens
caacacaggatttccacaagtttttgcaagatcggtaattcagcatgttgaaggccacaatatgttccctggattcagcctgggaggaaaaacagtcaagatttcacccacacagacataggagcagggacttgtaagcatttaacccacattggtgaaatgaggtaagatgcaacagacagcagaaaactggtttcaaaatgccgtggccacaaaccagtgtaccggaatattcaagagcacgatttgttaaccgtctttatgaacatggtaatagagatgaccagaatctattctttatcatcatctgcgcttcttcatgaatgcttttatttcaaatctatttacatttctaggctggatacatttggagcaatcagataaaaaccgtctgatacactccttttaaattttaactctgggaacatctctctcctgaaggaatactctttcatctatcagacaacagcaagtttataaccctttgggtttttctctatttgctttccacaaagcacagagttgaatccagtgctcatatgtaataatcattttaatcatttgctttgcctgcattctgcatgagtttaggttttctgttttcatgttaaattgccgtcttatacatttttgtgccaccctgaatcttgcactgaggggtcaggagatccagattccagtcctagctgctctgagcttttgtgtcctcattcctaagagttcacggctctgtgaggccattttaagcatatattacctttgaaaaattgggaaattgacacagtgacagtaagtgaaaatcatgcagcataaaaagataagggtgtagtgctgtggaaagagcaggtgtctcggattcgtaatgatctggttaaaattccagctcccctgactcactagctgtgggagcctcagtttcctctcctctaagttctacatctctgtatggatgagcaaatggagttatcacagtgctatggactttgcttatgagatatatacacctaccaagccatcgtgcagtttcaacacatcatgggagggaactgaccttgctgacattcactgttactttgtggtgggctctctgccaagtgctttgaccaatcctcttttatttaatcttcacaattccctaagaagtgggcattatagaatttctggaaacaaggtaacttgggctagggaacgttaagtaacctggctagctggtaagtggaagagccaggatctgaaaccactgtctctgactccaaagcaagttaatcctccaaccagctaagcagaattatacagacaatcactggatcctccagactctggctccacaatggcatgctctttcttccctgatacatacatagcaaacagccttcaacccttaaagaactaaaagctgaagtaacttaaaaacacaagaaatggggcaaagtggtgcatgtttctagtcccagctacttgggaggctgaggcaggaggatcccctgagctcagtttgggcaacatagcgagaccctgtctctaaccacacacatacatatgcacgaaacaaagcaagcaaagacataactactcacctgtttctgtcgctgatgtatgaagaactttttccttttgaaagaaattttgagaatgttcacccttcaaaaaataaaacaaaacacaaacaaagcacatcagggatcggccaggttgaagctgatgcctctcaatgcatgtcctttactccatgatcctgatgagtgggggctcttggctgcctagagtttacttctctgtagaaatgatggcagccccactgccgcaggctaataccaagtagctgactgaagctgagcactgcgtaagggccactggattatgatgtagcttttaaataacaagaaacataggccatgcgctctctttgctataagctgcttttgtggcactgcagctctgcgtgagctggtatatacatggggaagacagctgagagcagcatggagcagctgaaagaggacagacctggtccgaaccccagctccattacttaacagccacgtgtcaagtagcctacttaacatttgcaagataacagaatttagtcaccattaactgaacattttttagatactaggctgctactaagagctttataaacatcccctcaacgaagccctgcaacaatcctgaaaagtacatattgttatacccagttttcagatgaggaaactgaggctcagagacatcaccaaagtgctcaagatcattcaactagaaattcctggagccaggacctgcaccccggtctcagctgactctgaagcctgtgctcctaagctctccactatgaagtcttcccaacagtggtgaaaacactgcccttctcagagagcggccttgtgaggattcaagcagagtaggaatgtcaagtccctaccttgtcacacagtaggcctgcaatgcttgttcctttaattaaaaacataacttttaaaataaatttacagttgacccttgattaacaaaggtttgaactatgtggggtccactatctgggggattctttttaaccaaacatggatggaaaacagtatttgcaggatgcgaaacccacatatacaaagggctggcttttcaaatacacgagttttgcggagccaactgtgtgacaagtctgtgtagatttcggtaactacaagtggtcttggaaccaatcccccaagtacaccaagggctgactatcattcatttatgcaaaacttctgtaatccatacaaagggtgcatatttctctgctggaatctttacttctgaaatactttggggaaatgaaggaattttactattctctaggatcatacaaagaccttggtagaacattctagaatggagaggctgtgtaggtaaaacgaaacttgaactattcatgggacatcccccagatggatcagcaatatacctctattacatattagatattacctaatacacatctattttcaacgatctgttggtagatgtaactgtgaagtaaattttttggggtgactacaggttaatagtctaaggatgagaagagtgtctgggctcaccccttctggagatactcttcctagtgtgtgttactgctctgccatctccctgaagtcgggggagtctcctcacgattctcctgtgccaactggcagatgcaaaaattcctgttctgcagaacgagtcaggagaatcaactccccttttgagttcttaccttgccttgtttggcccatgggtatctgtggacctcttactccccccacccctggcttcatatacaggggtaggagggcctggcaggcctcctgtggttcctagggctccagctcagcatcgccttcccaggctgaccccaatttccccacctgacagctctctccctgagctgtcaaatctgattatgcacagacatgaactcttgtcgtttccaggcttggggcctcagcggggctccctactgcccttcactcatttataagaaaaaaaaaatgcactgagagcctaggatgtacaaagttctatgccaggccctggggacagagggaagaggacatggagccactgccatccagaggcttataatccagtgagggagacaggaaccacataaagaatgatgcatggaagtaaatcactgtaactgtgagcactgcatgcaggaatgcctagagtctcacaagagcactaagaactgagcctataggctcctatggcccgtgaagccctccatgacctggcccctctcctgctgctcctcatgcccatggccagctccagcctggcctgtcccactcctcctgactcactagctgggttctctcttgtctctggacctatacaccctgccacttctctagaattttccttgggccaaagctcagctggtgttcagatcctggtgagtgccttaccctgcatgcttagggcccttcttatgtcctgcccctcctgggcacttgcccatgcacctcccttgtcac

SEQ ID NO: 588766 - DNA, 4001 bp, Homo sapiens
tttttcaagggacatcttaaggttgaaagctggtatcacaaaacatacagcatgataaatatcttaactaaaaattgctaacaagggcctttgtgatttcttttgtaagactacacagcataagaagtgtgatgaagaagaacgagaggaagatggaggagaaaaccagtaagatgacggttatctgcagaaaagattgttttttcaaacacaattttaaaagtcttcctttctaaactccacatctgtctgccacttttcaccagagaattaagcaaaggcatcactcctcagtagaagaacatttttagttatctggaaatataacttcatggacgtacaataattatatctagtaactttaagaaaaactctagctgtgatctgacattaaactgggctcccagggtctaaatgggcttttgccaaaaattaacaatggtgaaacaacttacttttgcactctagccaaacaaaaataataaaaccatagtctcaatttctctttaataaactaaatttagattacacctttaaaataagctttgacataaatggctttaaaataacaagaacatctaacatttgggtcttttcccagttaattatttgctggcattagactcgaaattccttggcttcaccttaagttgacactcccaagtgctaattaggaaactatatacattattaaccagagaatgttgtgcttaaaacatgcatattacatatgtatcttcttattaatgttattcctttcacttctcaaaatacctctttagaaaatagagctcctatttccatgaagcaattggtggctcgtgagggaattcctgtcaaaatgcaattaatagaaaggggccaagatgacacaggatacttgtcttggaaacatccttaacatgagtcaaatttaatctcactgaaatagtggagagaaatgttaatgactgcagatgtcacacattttactcatactaggtgattcccaaagaaaatggctaactcatgtatgaactaaaccactaccaaggaaccacacatgtcagggagtacaaggccgagacatgcctttctccaatactatctcttccaaaaagccacaggacagatgggaaaataaatgcaggtaaacaaggtagacctaatgatttcctaattaggaagatgtgatcttctcattaattgtcaagttaatggaccacaatagcagtttcataaattgagtccagtaatccaagctttggtgtctctagtccacagaattctcctcatacttccagacccttcatccagccacaaagttgtcagttctgcttgatttgtttcaatactgtactcgacgacagctgtcggaaacagtacattagaacagctgctatgacagctacaaggggcttggaagtttaattaggctcattgtgacattgtgcatttttctaaacacggaatgatccacaaaaataaagaaattttgagtgggtctgaacaatgtttacttattggcaccaccaactggttaacctcagtttgagttatatccttggtctcataatatctttgctaccaggctgataagaggtataaaaaaataaataaacaggaggagcagttagatgcacaagaaaaggggcattaaaacggagaggaaatggtgaggaagtcacgtcaataatctctttcaaaggctggctggtagccaaggaggatcccgcagtgtctcaggatttacttccaaaggaaatgtattcagaggccctgagcctggtgccaactgcaaacaaaaccactcattatggtcacagccccctagagaaggggagaatggcttactctcagcatccgtgcggaggaagaaagtgaggagcagcagcagcagcctggctacgtgcaccatcctgcagcttggcagcagcgtgcgcgagcagcttggaatcactgcctccggagccgcagcgagtctgtccgatctgaaatttcagctggaacactttcagagcctgaaagcggggaggaagagaaaagaaaaggaagaaaacacaaaagtgcttagatttcttactctttcccccctggttccatcacaatcaccatgacagacacaatccattgtaaatacacaataaattgtaactgtcatactttgtttgtattaggaaggaaataacttggtttgtaaaatgtaggagtcttagactatccgggtttgtgttacgtgggagctctcgcattcccaattttaggctctcctaaagccaaccaccttgactttcattctttgcttatgccaccttttgggcaaagacctaaaaaaggaactgtcacttcttatgaaacattacgtaaatacatcagtgcaaagaagcacaccagtgctatgagaaagatttaagagaagttcctccatgcaggataaaagtctattactgacacaataatggaagctgcttttttggcatcagttgaaatgacagggctaattcaacttctccaggtaaatagcagaggttagaattttttacactagcatatttggcttcttccctgaagacacatcaatgttcaagtctagtttggcatcaataagtcaaaacaatagttagcatgagcctctttcatttaacaggatttttatatgcctcctgggcaagggtttaatttcctcagtcttctctgtaaaatcaaaaagccacaaactatttttagagcacctactgtgtgcaaggcatcaagagtgacagcacaaggtgtctcaaggcagaaagatgagtcaggttctattatttttgtttccagattagtagggaaaataaagcaggtacaccagatgattagtacaatttaataagtgattagcgccaggaaggaaaaccagataatgctataaaagataggatcaagactgacatcatggaaatagtgtctcaaactaggccttgaagtttaaccaggattttaacaagatgacgaaaaggcattccaggaattctatgcaaaggcagggcagtgggaaaggaactttggaaaacctgagtttcctggtttggttggaatagggcctcccaaaggtcagcatgcacggggccccctggaagccttcttagaacagatgcgtgagtactaccatcagagttcgtgggtcagtaggtctgtggtggggatccaataattcaataatttggtttttttttgtttttttttttctgtttttttttttgagacagtctcactctgtcacccaggctgtagtgcagtggtacaatcacggctcactgcaaacgctgcttcccaggttcaagtggttctcctgtctcagccacccaagtagctgagattacaggtgcccaccaccatgcctgggtaatttttgtacttttagtagaggcaaggtttcaccatgttaaccaagctggtctcaaactcctggcatcaagtgatctgcctgcctcagcctcccaaagtgctaggattacagggatgagccaccactcttggcctaccaaagtgctaggattacaggactgggtcacatatttgcataaatttgcatttctacatgttcctgggtgatgctgatgctgccagtccagagaccacactttgagaaccttctggttgaagtcatgggaaaccatcttctattaggaaaaccagaagatgaagcaaaagaaaatggttcagagtcaggcgcagtggcttacgcctgtaattccaccactttcggaagccgaggcaggaggatcacttgaggccaggagttcaagaccagcctggccaacatggtgaaactccgtctctactaaaaacacaaaaaaattagccaggcgtggtggtgcatacctgtaatcccagctactcgggacgctgaggcaggagaatcacttgaacccaggagacagaggttttggtgagccaaggtcctgccactgcactccagtctgggtgacaagtgagacttcgtctcaaaaaaaaaaaaaaaaaagaagattcagactttaaaa

SEQ ID NO: 588767 - DNA, 4001 bp, Homo sapiens
tgacacatctttctcaaatgattccatatatgataacttcatgtcaaccaattcattaactgttctattgtcctgtctcattaccctaaaaacttatggcccaagatatttagagctttcaacactgagtaatcaaaacaactctaaaacatctctacttttttgtaataattgtaacttagcttactcttataatttctaaaaccaatcccccatgaatacagatgcttttatatactcacttaagtaaataaggaggtaaaaatatactcattctaccattatcaacaattaaatacaaggaagcccttaggtataattaataataagctgctttattgaaagaaattctctgagataagtacttttacttttcaatctggtttttaacttataaggggtttttattaaaaagtatgtattatactgagaaagaaattaacagttaaagataaaagggataaactttttctaatcactattagactctagtcagtataagtactaccatgtcaaaaaacttaggatttgttaaaaatcaggtctgttttgtctaagttgcaactcctactgtatctactgtatatgtaacaatgcaagaagaattagattcagaatccatttggcagtgataaagaaaaaaatgctgaaatgttattgattctctccctcttgtgcaaaacaaactgagtcaactatatttttcctgacataacacaaaggttttatttagatattacaaaatattggcaaatgttagactacatgttttttatatatatgtataatgaacttattaacccttttgtagaaagaagagtgtcctacttctgtaaaaagaaatgctacagctactgacatggtgatgttagccccaagaggaatactgcctgcaaaagtttttgatgcagagatattcagccttaggagacaccttaaacctgtcactggctgctgagccctgtcagagtttataacccgctgtgtcaaagtcacagtctcagccctgccctctccaaagtatttttcacattctctctccaaattaagttcattctaattctccaactattctagttccaggattttcctccaattattatctccttacaggcatgaagaaatcgcaacagaattttcatctggtctttcaaaccatccttattaactttcccttttccgccccccccccctttttttttctagagcttttcagaactaaagataaaacaaccaaccaactgaagtcagagtagggtgggagttagcatggattagggctgaggttgaaggtggcaggagaagtgagccagtagggttagatttttcaagctttttctagataaccacccttaaatcttagaaccaaccaatgtttaacaaagcaggcttccaatagcccttgaacaataaacgtttaaaaatcagttttccagtaaggctgcccatactgatcccatatcgaagtcttctaagggctcttccaaaaaaaaaaaaaaaagaaaaaaatgcttagcgaaccacttctcaaataggagctactgaagttatataagtcaagttattcccaggtaaaatgaataaactgtccacagcattggacattgggcattgaaaagcatcagcatatgcttcactttagagaaaagaaagacagaagcacagtttacttactaaagcagccgctccagtcctccttggaaaccctgaggagtcttctcttttctttcctaccagtcaaataaagaattgtctttctattccacacaggcccagaataaactgcaaaaagggatggcacatgcacagcagcccgtcagggtttggctttggtggggtgcttcgatttctgattgtttcaaaagtgggatcttcttttccggagggagggggcaaaggaagaaaaagaaagcgcgctcggaaagccggcttgggtcctgctaattattctgaaggcaaagtacctgcactctccccgccgaggctggctggcggcgccgcgccggaggggaggaggctcgggaggaggaggagaaagagcagcgggaggactcgggctgggaggggagcgcagggttggggaggccgatgagcggctcccggctcctcggagaagcagccgagacggcaaggaggaggcgaggctctgtcggggcgaggcgctgcccccacgcgctccggccgccggctgcgggcgcggctgggcggggagccgaggcggccgctcccgcactcgctcgctcgctcgctggcgctccctcctcgtctcgctcgcactcacaggcacacaccccacgtctccagcagctgccgctcggcctcacgcactcacctgcatttccttaacgagccacttgatggctgccagcggcgtgggccccgctccggcgggcgggggccggggcggggagaacgcggcgcgggatgctccgagcgcccgctggggagagaagcggcggcggcggcggcgctgcgggcgcgccagatggggcgggaggaggggagacccggcacccaccggcccagagctgcctgacgcggcctgggcggaccccgccgcccgggtgcctaggcacgattccagggatccagggtaaagcggttcgcgcgggaacaggaggatatgtcaggcacaggctattccccatcactatagccacagaggactggtccagatgcggatcccgatctgtgcttcttcaggtgttcgcgtgctttcggttattattattattattattttccgagggaggctgtcggtaacacctaaggggtagtgggtgttaatagctgggggacgtacatttgatttgcaatggaatcgatgcttatgaagagcagacttagggaggtgaagggcaggggcacaggggttgcttggcggagggggtgtacttcggctgagctggatggagttttcagtcggggcgcttggcagtctggctgggcttgagggagggatagagctctgccaaggtggtagctgagaagggaaaacctgtacaagagttgctgagaatatgcctcgctgcagaggagaggacatggatgcagggagcggattcttccccacctcctccttaccccaaggtagagtggggtatcggagtgcatcagatgtggtgtaccacagactcgggagacaggggaggaggaacttagacccccagcgaaactagaaataaggtttggagctggggggagaagaaggggcaggatgagagaaaaacagcaggaagctttttgtcattttactatctttcatgtctcatcagagcatacagctataggcaacaaatgctctgtctcttgataaacagagagcaatgtcaccatgtcggtgcgttttctaaaaagccaaaataattatcctgtttgtaatatgcaacacagagcattccaggtaccatctggtcaaaggttctgtaagcactgtagaagaaaacaaataaaaaaagaacaacgaaaaaccagttatccatctactttccttatatgtcaatgatctaatcgcagaaatgtcactttctcccgaagagaaataaagcttagtcactataggtggaattttccccagggtcccttcacctttttcttttcataccttctccactgcttgctgtgtccctttgctctttaaaagggacccttctcctgaacccacgcgctgccgggttccctgctcagcctccctaaagccacggagcctacccatccaagaaggttcccatgcacaaacagtcatcatcacttaaaaaggttcttggaaatgacaagatatgaacgaaaaaaaattacaccatatgtgcaagtgtgtgtgcatgtgtacatatttttgtaattatacaaagcacttgcccctcttacggtgctgtctccccaagatgatgatgactgactcatattctctctctctccctccctccttctccctttctgcacaaatacacaccactcactcctgtctcagttccttcctgtcagtgttcaataatggtttt

SEQ ID NO: 588768 - DNA, 4001 bp, Homo sapiens
caccatgcctggctactttttgtatttttagtagagacagggtttcaccatgttggccaggctggtctcgaactcctgacgtcaagcaatcccccagcctcggcctcccaaagtgctgggattataggtgtgagccactgcacccggcctccaagccagcatctttaatcttacagatgcgtgcccctggttctctaaaaaggcttgaaaagtttagtcttcctgaagttcccctacgtcccaagtaggacacagagagaagaacctactccagaaatggactggtccagtcacagtcacccccactttaatccgcaggcagcctggaacagtctagaggagatttgtataaaaagtagataccaaggctggcgtggcagctctgtggcagtggctgggttggtgggcactacagtcaggcaggcagccatggccactagtgtcacggccccagtgagggcccctggcttcgctcacggatgtggtccaagatcaggtcggtggctcgatccagcaacagaggcagcagctcctgctcagcaggggagaagcagcccagcacatgggcctgaaccgcctcagggtgcgccgggcgcccgatacccacccgcagccttggcattgcctgtgggagagccagagaggcccaggaagctttggcgaggtgctgggggacccctggcccacccgacccagttgcacaacaaaagggtagactcacattggagttgaggcagctaatgcaggaacggactccattgtggccccttcaagggatatgggaggggcagttagtgcctccctggggcagtgtccttccacccctccctgccccggctgggtcagagcagcccatttcctgtggagactgggtcagcagccctactccaccccaactgggaggcctgaagccctatcccaaccctgaccatctcaggacctcacctggcactgccccccagcttcagagccagtctccccaggggcttgtccagctcatcatgcaccaggtagacttcctcggcagtcagcccaaacagctccgcttagcacagggaaacggcagccctggttactgcccatctgcccagagaggcactgtcccgactcccatgatgagggaccacaactaatcccacttcacatataaagaaactgaggccccccgaagtacccaaagccatgcagcaactggagctcaacaggtacttggaggtgaacccgcggatctgtcacagccagtgctcccctctggcccccgcgccccaacccccacccccttggcccgcccgcccacccctggcgctctcaactcaccagcccgggccacgctgcgcccgttggcgttcataagccgccgtggccggagcaggaccagttgggcatcccccagcggggccagggcgaggtcggcggcacagtgccggtcgcgcgtccaactctccgccacacccagccgccgcgccagctgccccagcaccgccatgcccacgctgtgtcgcgtgccgggcagtccgggattccccaggccagccacctgcgggcggcaccagggaaactgaggcccaacaactctcgccacccccgatctcacagcgtcccgtgggccccaacgcagaggagcggaaacgcagagcaacgctgcagtggggaaggggcgcgaagaaggggcccagaaacccgacccctgagaactccagaaggctgggcaggcagggcgccctagtgcaggaacggagcttcaagaagtttggagcccgtcgagcactgaactcaccagttaagaaaacagagcagcaatttgggggcactcggctcccgggacataatggccgaactgaagctagggaccgggagcccctacgtcgccgccccacgccactcaccatccaccgcttccccggggggcgaggctccaaaacacatcggctcatggctctactcagccgctgtccggcgcccaaaaagccgcccggcctcatgctgcccccattcactccgacaccgccccctgacgtcatcaccccgcagcagccaatcgtgttgccaactgtttggcgtccaccgccaacgtccaatccgggccgggctacgtggccgccatgcttctgaggggcggaagcggcgaggcggtggccgagtccgggaacccaggcgccttcagtagcgcggcgtcacagtgtcccttcgggacttgtgtgggacgctcggagctcttgcttgaccttcggttgggaggccttgttatgccccccgctatggccctgacttgcggcgaaaatctggcaagtcctttccccgctgtaggcctcaacctctccagctaataaaagttttctacctccctccggctcaaaaagcttggttcccgggggcgtggccagaggggtggggcctgtgggcgtcctggtgatggtgcctagcaacgtcagggccagggccgcgaggtagttggcagaggcctcggggtcctcctggaaggggcctcatgacagattcggacgaggtgcgggcttgggagaagactaacgcaaaggcagagggccaggcagagagaccgaggctgggttcgcaggaaagggtgaaggccgggagaggcaggggcagcagtccgactcagggaaggccctggccgccatgccaagaaccaggcatgtgaaagatccttgtaaggctcggcggctgcttggacagaggtctctggcttgggtagctggtggggaaggtgacctcaccaaaatgggagaacctggggcagaagtcaggtgaggtgctcagtgtggcctgctggagtgagggtcctgaaggttacccaagggactgtaggacccccaaggcctgagacttgggaccaggcctgagctggagacatcaaagcttggggtgtcagtagccggaagtgggagctgggaaggccctgggggagaacagacggtgttgtaagcatgaggaccctgatccctgaccttgaccacaggagagggagaagggcaggactgcagagggacaggttggagcgtccctaaggggaatggggctgggagcgccaccggaaccccgagtgggagtgcctccttccaggcctcatttccgcctctcctccctccctgcagaatgctggggagtgtgtcagtgggtgggggtcgtctcgggggcctgctccagcttgctgtccttcggttctaggatgccctgaaggttgaccagggcccctcacgggacatcccaaagccatgggtgattccagcccccaaagggatcctgcagcacatctttgggaccagccacgtgttccaaagcatctgtgatgtaaaaccaaaggtcacagggttaacagtgcccctcaaagtcagggaatagtgagtgactaccttgctttggggtcccaggttcctgcccgacacagccattcacatgctgtgcagctttgagccacttactctcttcaggcctcagtgaactcaactgtctaatggggctcttccacctcagtgggaacgaggctgatggcctggctggactccaggaacaccagcctgccctccctgggcttctgtctactcctcctgcctctccacccagctcccttgcttcccacaacccccaccccagccctatgccctgggctggtccacagtcagggccacccctctgcctgtccccactttccccacagctactccagaggccagcagtgcttggagcaggcagactgggagacagctgtgctgctcttctcccgcgcactccacctggacccacagctggtgagaggcagacctgggtgggcacaggcagttgctggaacatgcttcctccctccctgtcgcacctgccagatccctcctctcagggccaccaagtccctgatgggaattggatgtcaactctcaggggggtggagactttcccctaccctccaggggcagatggtggggaggatctagcagcctgggtcccctcaccctcaggtggacttctatgccttacgggctgaggcc

SEQ ID NO: 588769 - DNA, 4001 bp, Homo sapiens
atcattgtcttgtccccatcacagcagccctaagactcagggcacatgcgccaagcctggggggctagtttctgtgtgggaagcgatggggaagcggtgaggagctcctggagaaggtggcagctttcataccgggtgatgttctgactctggtgttctctcccatctcagcacccattctgctccccagtcaggttggttctttgtggctcagatctgtcaccccttaatgaagtggctttctggctgccaaggattgagagctgctactgaggagtataagtcactaatagcatggaaaacactgtgaaatactccaaggtgccaagctgggcccagcccagtgtggttctaaaaggctaataaaaatccaccaattaattgtgacagctcaatgggaaattattcaattgtgaacaggggcaagctgcagctcgaaaggaggaggggaggggttgccatagtaacatcaatgtaagttctcatctcagcagcggaagccagcccgggagtgagcagcatccgaccgccgcctctgacacgggatgggatgcaggagacaccaaaggcgcgtttgaaacagatgctttgcctggccccgggcctgcagccactcccggctgagcgtgggctctccccggggcagagaagttgttttccgaatgttccttgctcttaggaaacctgggaaggagcagccgagtggaagtgaaaagcacatgtgctgtgttcctccgcccctttgaccgactgccggttacagggatctagaggaggggtgtttgggtccagtcaacaggagctccatctcccgaaaggcaaggcacccagaactcagactgtgggggaggccagcattccagtatggttttgcagttgtcacaacttttatttgaaaagatacacacgacatattctgattttgaacatgtgaaatgcaaccttgctatagcaaaaacgggattccttcccaacgcatctcccaggagactcctggccgggctaacactgggccgcggagaagggctgcggtcagaggggcaggcaaaccacagcaggggcttcttgccagggggatcttgtgctcatggcatggagaaggggatcgggttcttttttcccatttttaactttcagaaccatcctctgtacccagtggaatgcactcatttgcactctgatgtcagccgcagtcgtgcctatagagactgtcacaactttgattacccaactgtaagcactcagcccgctgcctcgctctgctattcacactcatggcccagccacagcctcagctccgtgcccctggggccagggggctgctcggagtcaaagccccaggggaagagagaggctgggacgaccgaggctccaagacagcctcctttttgacactgcctagtttttcgcttcagcaaagttggaaatcaaaagtaagcacacacctaacctgtcctaccatggatcgttcatcgtaaccaagcctacatcatctgggtgtcgtggtctttgagactgggggagaaggcaggagtgaagacaatgggggtgagtccaagaagcaaatccttccaaggcgtcctggcccttcaccgccgaccgaagcggaagctgaagccgcctttcttcctgctgtagccattgagctcctcagccaggttccctaacgggccgctggtcttctcccccgcagcagggaggaagccggtggcctcactgccttcgtcctgcctcccgaagcggaatctgcagccagcatgctctctgcccgatgtctgcagccccctggctatgacaagcagggcctgtggctgtgaagctctcagccaccgagaggaaccccacacggagtggggtcggggccccatggccaggtcggcccagcgttctccagctccgaggccacccatggcgtctgtgggctctcttctgtccagtagagggaagcaggcgcccagcggcaggaagaggaagtagatcagggggtaaggccttaccatctgacccagaggaaagagaggcagagtgacaggctgcacacgtggccaagcgcaactcaccaaaatgtttccccgggacaggctggcagcgtagatgtgagcagggggctcagctgagcccggcttccgagcagtgctgggactaggccactgttttattagcaggatcaggaggtgattgtgccagttaggccggttcttctcctgcagtccccacgatctgcgtgcctgggcagcttagcaccgtaaatccaccgctgctggctggcagagcagtgcccaggcggccccgggagagtcagcaaatgtatgctcatttttctcttattataaaatggccatatcattgcagagccatggggtggaaagttaaaagcatcaatctcccttagtgttcaactggataataaatgggtctagctatgctgtttagctgggacatcctgctaatgtctctttcacgtgggaacgagttgctcctgaaagccagaaacagattggatggtcctggcctaattcggacacccacctgggaaggagtgtgtggacaccactggggcctgggcaccgtaggtctgccaggctctgagccaagagctcacacatgtgattgtacttcatcttcatagtactcctgcttggtaggtccggccagtcccactttttcaggcaacaaaactgtcagaaaaactgagattgtgcccaggccacacagccagaaagtggaggctctggattcatgattctaatggccagacggcttcttcaagaagcatacatatctgctaggtactcccaaccctcctatttcacaggggtggtgtcggtctcaaacagctgaggtgacttgccccagatctcatggccttatcagtgccagagctagagttcaatcccaggtctaactgggcttgactcaggaaggcgtgccctaactccctcctctgtactccacatggcactcgggggatctgaaacccagcctcctgtaatgaacctgccttggtaacacttgctcccttgtctggcaaagaaaacctttttgacaatgaccgcgggggagctggagctggcttgtcctccgcagagtcaaactgaggctagactagagagcaccggccctggagaagacagtacaggagtccccagagccctttccagaaatggctccctcgaacacatttcaaagaagcgagctcagccaggaagcttttaaaaaaataatacatgcaaccccactttctacccaaatccagttcttctaagctttcgtcccccagggatggagtgacctccctcatgctgccaggaaaacctttccatcagggcgcaggcagagtgggggcttccacgaggtgactttctgcagcggcccagcccattccctcctccccataggaagcactttgctgactgcgatgtggaccagggaccgttgcatcctggtggataaatccacccgggagtggcctctgggtgtctagaaaggagacagcctgacagagcaggccctggagtggcccttcaccccttttaggggttcatgcaccccttcaagaatctggtagaaagtggggatgctcatcacgggacaggcggccccagcgcgagtcagggcttcaggccccacagccaggaagggacaggaaaagcacgggtgaggctgggtcccagccctggcagggcagccgtgaccaatctgtgctgctctgggctgttggcaggggaggcactggtgtcccctctccgggcactccctccctgtgcttctgtgtgccctctgactgcccatgcctggctcctgcctgggcagggcctgagctggggttcctgctggggacagggcagctatgctcaccgtgtggctgggactgctcccaggaaggctggctggtggatcgctgggctccggggctgggctgggcagagctgctctgggtcctcgtccaggaggcatggcccctgggctctccctgctttatatggcccgcggtgcgcttg

SEQ ID NO: 588770 - DNA, 4001 bp, Homo sapiens
cctgtcgtgactgggaagacagtcagcctcactaaaggaggcttactgagttgagttcatcacaccactgggtatggacgttactgtgtggctctcaggaggggccttccttctgagctccagggacagttctcaaggctgcctatgtgctgcttcggttacagaatttgcaatatttgaatctggtacgatctttagacttcagcgactcaactgaaaaaaaaaaatcaaaaccaaaacccacaaaaaaagtgaccaagtcctgccagggccacctgcattttaatgaacatatctgtttctgccactgaataacacacaagaactgaagggttccctacgtgattgaattacttgtttgttttcctaaaagcagtgtctaaaaaccccactgaacagtttttctgtccatctcttccagtctctgacctcagttctgagtcaggtcaacagggacataagaaaacatgagatcaaagaggaggaatccattagaatcaaaaggccccagctctctaagaggagaatgcattttaaagataaccatttacagtaacatacaaaagccctacttagacttgaaaaaaagtttctttacaaatctgtttgcgatgagaaaaatacagcaggattgggtgtaaggcataaaaacaaaggtgcaggaagaaagagtagcaatttgttacagatcttgcccactgaaacatgtaatttgaggttagcacaacacaggaagtcctgccaaacctcactgggtcgggaggacctcctacttcagtgatttaaataccattttaagggaagggtgttgtgaatgccccctcccacgccaactctaacctgtagagcaggcgagtaacttcgtgactggttaacaacgtgcgaccagatgaaagcactaaacaataaagtgcggaacactaccagcagtttggtgaaagatttctcaaaggctgtgcatctgtgatcaaggagcccaccaatgaaattctttgtagagttaaaaaaattgctttataggttgttttggggtattatagagaagtctccagagtatttggacttctaagttgtgggttcactttgagcacccactatatggccagcgatccgaaccagaaagttaatgatgaaggttcaaagggaatggggtggctacgagtgtggaataggaatgagggatcctcagagaacaggaattctgggcactggggatggggtgtgtggacgctaggaaacaggtagggtaggaggcctggaaggtcaatgaagttcttggggctcaaaacataggtattttgagagctgggatacgggagggcttccctatccccaagcgtgcggtgagggctgcgggagaatggtttcattttgacttcagacagcccaactcgtcaggatctaacggggattaactgggagagacatggggagcagctggcttagtctcccgcccctggaaaggccagggttggtccgagtcgggtgcctctgtggggcagggactggctctgcggtaaggaaagaaatacgggggaggggccccgggacccgccttctggggcggtcgcaaggggtcccggaaggccgcggtcccgggggtcggggggtccccgcgcgggggcgcgcctcacctcgcacatccccagccagggcccgccaagtgggcgcgtagccgatgcagtggccacaccacgacgagtagaactgcacgagccacgcggccgagctgttggcggtggccccgcgcacgctgccgctgtccagcacccacacggcgtcctcgcccgcgcggtacagccgcgccgcaccgcccgcgcccggccccaccgccgccgccgctagcagcactagcagccgcggcagccgtgcggcccgcggcgggggcgagcgccgggctctcagcgcaggtcccgctccgattcccgggctgcgcgccaccgccgccccggccgccgccatgttggaagtgccgccggcgcgctgaactttcaccctggcaaccaccgtcacgtgcgccggcgcgcccggccccgcccccgcgcgcccagttctgttccgccccgccccctcacgtctgaccccgccctctctccccgcccccgcccccgcccatgcgtggcagccccgcccccaagagtctgatgacgccatctccccgcccaggcgcggcaggctccgcccaggccccgccccaccccgccgcgcgttccccaaaccccttccctgaacagggccaggtggccacatttagcaaatggaagtgcacgacgccaggttcaacgtgaatttcagacaaacagtgagtcggtttttcagcctaggtctgtgccatgcctgaaatacaaatttaacaagacattcttagacgtaaaaaactattccggggttcttttacttggcaaccccacctggggcttcagagggtctgcaagccagcctcgactttttaatatgatattggaacgcttagaaaatgcagcaaaacatccactcaaagtcagatgtgttgtgtgctaccttttaggatgttccagtcgaatgcagcttcacggtttggaaatgaaatcatatgacttttttgcttcattgaacaggatacctgatttttttttttgttcctattcctaatttttacacatgtcaagattttctctgaactgtgtgaccaaaacaaaacaagggagtgggcgagcctgggcaacatagcgagagcccatctcttaaaaaaaagaaaaaagccgggcatggtggtgcacacctgtagtcccagctacttgaggggctaaggtggaggatggcttgagcctgggagcttgaggctgcagtgagccgtgactctgccactgcactccagcctggatgacagagcgagaccttgtctcaaaataaatagataactgtattgtggggttctgtgtaagattttgtttaaaaggttttgctgctaacaatggttaaccccagatgagaggattctccccagagggcccctggccaaggcgtctgctcccttttcctcacgtcctgcgtctccctgttcatgtttccttccatcacccacgtttcctggcttctgctctgtgccaagccctggagacaaatcaagaacaaaaccgagcccccagtgtccctggcctgcatttgggcagaccccaaacaaaccaacgcgtaaagcagccaccgcgtgctatgaaaagcaatgaagccggacacggaagcaggtgccagcagggctgccgtacagaggagggtggggaggtctttgagaaggtgacccgaatggagaaggaggtgagggaggaggcacacatgcaaaggccctggggcagaagggtgctgagcacgctggaggaacagcaaggagccggacctggtgggagcggagcaagctgggggaagcgtgggagggaagaaaagctgagagcccgagcgagacccagggggcctcacaacctgggccgcagactcagactttgatgctgaatgggggggtggccacggaaggatcggtgcaaggatgcagctctgcccttctagttgcagagtaggaggggcaggaggggaagcaggggacctgggaggggccgccgcctccttccacaagctggagggactccggggaggggtgagaggcagtgctggtggaggggtcggctgagtctgggtggaggcagagggtgtcacattcgcagagtttgggccaaagcaaccagaggaatggggttgcttacggctgagactaaatcctgcagcggcgagatgggagagctatgctggggaggatgccatgagtttgctttggacctgttacatctgagcagccttttcaacctctaagggaggtgtcaggtcagggtttagaagtgggagtcgagtctggagctcagcgcttgaggctgcttgaggtcccccggggaggctgtgggacagaggggagggccacacactgagccccaggcctccagaaggagcagcagcgaggtggcaggggaacaagg

SEQ ID NO: 588771 - DNA, 4001 bp, Homo sapiens
ccgaaaggttaagtaacttgcttaagatcacttaactaggaagtggcagtactggagggagaacccttgacagtatgactccaaaactcttaaccacgacatacctctaggcatgatcaaataaaactgcctaaacagaacttggaagaaaaaatttggaaaggcttgggggaataaaggggtaggagctggattactgcaaggtcaagtttgtcttcaacaatcaaatctaaataaaaggcagttgttcctctacaatatttaccttagaaaaataaaagaattttttaaaggcagttgggatagtaacgaaatgagcagtaaactttgcaagagttcaaatctgggctctgacacttgctgtggggtcaccaggaaggcacctgtcctcttggaacccgtttcttcttcatatatgaaactgaaatcctggcatctctcctttggggtttgtaagcatgaggatttgccagtgtagtggttgactttatggactttaggtcataaaagggtaatcagctgtcatccaatgcgaacacagtaaaaaaggaataaagttgtaactacattataaatggtcatgtctgtaaccctagcctaatttttgaatgtagtacagaaaccaccagccacagtgtgagccgaagccagtttgtaatgtaccatcaacagccagacacacatcacaactttaggcctcagtttcctcacttatgaagtggagacaacttatctccgagggctacgcggggcaagataaataggtacaaaaatacataaatatgtacctggcccacagttaaaacgcttaaaacactccagctctgtcgtcttctcttagattctagaaatgccacaactttctcttatttctagatgctctgtaggttcagggccgtagaggctgtccacgggcctcacaggaacgcaccaaaaccaggacatcgcaagcacaggcgcacagacccagaccccggccccggcccggcccggctgcagggccgggctccccacatcgacaaggacaccggagctgccccgagacgccaagagggctgcgaagagctgcctttgtactcagagccagacgcggcctacgggacgggaccgccacgtctggggcttgcgggctgcagggcggcgcggcacgcgtgggtacaccctgcgggggcgggctgcggccgcggggaacagcggcgagaggggggcccgcgggagatgcggtcctgcccagccgcgccgagaaggcggggaaggcgaggccggaacacacccttccctgcacgcctcggagcgccccgccggttggggagggcaggaggctcaggccggagccgcgcaggggacacctccgcccccgcccaggagtcctgtcaggccggcgccgcggcgctcaccgccgacccacgggctagccacggcctgacggggcctggccccggggcgccgcccgcctgcggcccagtctccaccgtccccacacacgcccctctgaagaacccggcgcgaggaggtatcagccggccggacactacggaaggcccgggttacctggggggttgctggtggctgggcagctttccgggcgggaggggggcgtcaggaccaggaacaggagtgcggacgcagcgggagagggggcgggggcggtcgaccgaggcgccggcaggtacactggcaggccgagaggtgcagacgcgccggcagcagtagcggcagtagcagtggcagcggtgactgctcctgtgctccctcagtatcttcctcgggctggtccaagatggcggcgctccctgcacagggtttcctgtcaccctcgcaatgggccggaccacaaaagaagggggagaagatgcgcgcgcagctggcggagcccggaagagggtggctgaggccagcccgctagccacgccccttcctcagccctcacctctggacttgtcgcgccgccgctgaggcccgccccacgggcgctcgcgcccggagggaaggtggaaagcgcgtatgcgcaagcgcagtcgcgtgtcctcgcctcttgggggagctactgcgcaggtctgcgtggaacctggtggggtgcgcctgcgtcttggagaactagggttgtcgctcgtggagacttttgaacaatttttaaagccaacatttaccacttattggacgcttaccgtatactggccaccatgctaagcatgcatttactgcattcattcaacgtgtatttatgggggcatttactgtatataccgctgtatgcttcgtatataccggtcctgtccaacaaacgtcggaggcacgcatccccattgtatccatggagaaactgaggctcaggttggtcaactctcttgtccaagatcacgcagctaggaagtgaccctgcatttcatctctattttgacttcactttggggttgcctttgacagggtgagagaaatgtgatatttttcacaatttgtctaccacctgccatcttccaacttgctctgccataatcactgccccagaaggtttcgtgcttttcgggtgcagggacacgttttgactttcttggaccctgagcacttttgccttgtggcttgtacattacacacacacatatatttcacacacatgtaagttaaatatatgtataaatatttaacatattttacaactgcattgatataaacatgacgtatcaatattatataacaaaatattttctctgacctgaaagttcatttttttcttctgactttaaaagaatgtaagccggccgggcgcggtggctcacgcctgtaatcccagcactttgggaggccacgacgggcggatcacgaggtcaggagatcgagaccatcttggctaacacggtgaaaccccgtctctactaaaaatacaaaaaaattagccgggcgtggtggcgggcgcctgtagtcccagctactcgggaggctgaggcaagagaacggcgtgaacccgggaggcggagcttgcagtgagccgagatcgcgccactgcgctccagcctgggcaacagagcgagactgtctcaaaaaaaaaaaaaaaaggaacgtaagcaaggagggctggtagtctgcgcctgtaatcctagctactggggaggctgaggagagaggatcgcttgagcccaggagttctgggctgtagtgcactgtgtcactagatagagtgtctgcacttaagttcaggagggagggaccacccaggttgcctaaggagggatgaaccggcccaggtcggagatggagcaggtcaaaactcccgtgctgatcagtaatgggatcatacctgtgaacagccactgcactccagcctgggcaacatggggagaccctgtctctaaaataaataaatattcatttttgttggcccctaaaagtattggaggccctaagccctgtgcatactgtactgtgcctaatggataaggtggccctgccttagttccccacccccaaattaaatcaatctttctcttagcgttcaggaccttttatgaactggttctgccatgaacaagtgagatttcactgtaaaagtgtgtgccagtttgtacatctcatattttcagagacctgggttcgaattcctgctctataatctaatggtatgcagttgtgcatgtcacttgatttctgagattgtcagtcttttctgcaatatgaaaatagtaatatctctctcaaataggtctttgtgaaaattaaatgggatagtatatgcaaaatatctggtatataataagaaatggaaatgattattacatgataatctaatctaaggtgatattgaaatccttttgcaaccctagaggtctaggcttctatttccacattctttaataagtatagtttgttgtcacactttaacatttttgaaactaagaaatttgcctgtgccaagtaaaggagaaaactgtgaaccaatgatcattaattgcccaggtatgaacttagacctggctagtaagtttccttatagccattatcacctg

SEQ ID NO: 588772 - DNA, 4001 bp, Homo sapiens
atttatctttattattatttttagatagagtctcactctgttgcacaggttggagtgcagtggtgcaatctccactcactgcaaccttcccctcccaggtttaaatgattctcctttctcagcctcctgagtagctgagattacaggtgcccacccacgcccagctcatttttctagcttttctagtagagacggggttttaccacactggccaggctggtcactaactcctgacctcaggtgatttgcccgcctcagcctcccaaagtgctgggattacaggcatgagccaccgtgcctggctttattttttatttttattttttctgagatggagtctcactctgtcacccaggctggagtgcagtggcaggatctcagctcactgcaacctctgcctcccgggttcaagctattctcctgcctcagcctccagagtaagctgggactacaggcaagtgccaccacacctggctaattttttttgtatttttcgtagggatggggtttcactatgttcgccaggctggtcttgaacttggctcgcctcggcctcccaaagtgctgggattacaggcgtgagccactgagcccggccatttatttattttttaattaaaaatagaaacggggctgggagcagtggctcacgcctgtaatcccagcactttgggaggccgaggcaggcggatcatgaggtcagatcgataccatcctggccaacatggtgaaaccctgtctttactaaaaatacaaaaaaaattagctgggcgttgtggcccacgcctgtagtcccagctactcaggaggctgaggcgtgagaattgcttgaacccaagaggcggaggttgcagtgagccgaaattgcgccacttgcactccagcctggcgacagagcaagactcctcctcaaaaaaagaaaaaaaaatagaaatggaggtttcgctttgttgtccaggctggtctcgaactcctagcctcaggcaattcttccacctcagcctcctaaaaagctgggattacaggtgtgagccactgctctccgctcaaaggacaaaatatttaaagaagctgagaaatactgagctctgggataaatcttggcctcaacatagcatagaaagtaaggccttctgctgttgagcttttttcccgtgaactcacctccacaatctcttgcattattggtttttttgctgttcttgtaatatggcaggccttttcataattttgcagcctgttctgcttcccctatttggaatgtcgcttcccttctgggaaatttgcaaactcctagttaaccttcaaagcccagttcaaaagtcccttccctggtgaaaccttccctgatttgcccttttctcttccacccacatccaagttacttccttcttccacccactgggctctgaaggtattagccatcaccattgcaggaatcatttggaatgtttatctatttaaggcttctagactagattctagattaaattccactagactaagttcctagagggctgggcctgtcagatccattccgagaacctaccaatggacctggcatggagtagaagtgggggagtggctagtgaatgaagaaagaaaatagattgagagatgaatggataaatctcacctgcggcctaggccactgacagctgtccccaaagtccagagctcagttaggctggcttcacgtgggcgggacctcccgcagcagccgccgctaccagcccagcaaatctcatccccacgtggcagttctaggggataggagacggggtcgggaaagaacaggctgattcggtcaaagtggccgggacggagccagggaaggcccttccccgttctttgcacccggcttgggcccactcccctaaaagattcagactccctgcccgagaccgtgatagacccggtatccggggaccctcgcccctaccctccagccccggactgcaatacctgcggcgacttaggccagtcgcgagccgtgactccaccccggaggggcggggcttaggtccgggccctcctcccaggacccggaagagcgtccgggccaaccgctccctcttccctgctccgccccgagggcccggcgctgacttcctgggctggcggtggaggggtcccccagaccgggagtggacgccaggctctgcatttctcgggaaccaagtggggtgggccttccctgggtccctccctcccggacgggataaataagccggggctacttggaaacgatttgcgcaatgccgggttcgggcgtccgtttggggaactcagatgcctgcggcagctgatctactctgtaaggggctaacagggctgggcgccaccacactccagcttgggcaacagcgcaaaaactccctctcaaaaaaataaataaataaaagggggggagggtataacagttacatttccagttacaacgattgttttttttttttttttttgagacggagtctcgctctgtcgcccaggcgggactgcggactgcagtggcgcaatctcggctcactgcaagctccgcttcccgggttcacgccattctcctgcctcagcctcccgagtagctgggactacaggcgcccgccaccgcgcccggctaattttttttgtatttttagtagagacggggtttcaccttgttagccaggatggtctcgatctcctgacctcatgatccacccgcctcggcctcccaaagtgctgggattacaggcgtgagccaccgcgcccggccacaacgattgttaacagtttctaaaggggagagttgagcatgcaatcctcctgcgcagtcttcgggccagctcaagatttggtgctttaaacagctgattcattccataattgccatttgtaattatggcaggtgctatgctgagccagacaccaccacgctttgcctccaggagcaagtcttaactagagagagatcaaagaaaaagacaactagggacgactgccaagagtgcaataaatataaagttcagccaggagagtatctgttctgaagttactttcctccaggcctcagggttgtctgtttgtaaccatggagctaataagatttctatcataggctgggcgcggtggctcacgcctataagtccagcactttgggaggccgaggcgggcggatcacgaggtcaggagttcgagaccagcctggcctacatggtgaacgcccccgcccccccccccaactaaaaacacaaaaattagctaggcgtggtggtgggcgcctgtaatccctgctactcaggaggctgaggcaggaaaattgcttgaatctgggaggcggaggttgcagtgagccgagatagtgccactgcactccagcctgggtgacagagccagactccgtctcaagaaaaaaaaaaaaaaaagagagatgtatgtagtagttgtggtggggaatacatgacataatgtaaataaaagtgctcagcacccagcagctggcacagagttctctgtcaagggtaaagctattcctgactataaatgaacaatgtctctagacatattcagaatctacattatctttgttttagttcataaccataggttctctgtgtctttcctgaaaatagagaggtggcttgctctcttatgtctgtttcaaagaactccagtctctgaaactgtcgctgtgtcctagaaaatagagaaaacagctcaggttagaaacaggagctcctggagtatagagctatggtagcttagtgggaagagatcaaacatacttgggttaaaatccaagctccaggctgggtgtggtggctcatgcctgtaatcccagcactatgggaggccaaggagggcagatcacgaggtcaggagttcaagaccagcctggccaacatagtgaaaccccatctctactaaaaatacaaaaattagccaggcacggtgatgcgcacctatagtcccagctactcgggaggctgaggcaggagaattgcttgaatcgggaggcagag

SEQ ID NO: 588773 - DNA, 4001 bp, Homo sapiens
tgctgggattacaggtgtgagccaccgtgcctggcctatgtatttatctttattattatttttagatagagtctcactctgttgcacaggttggagtgcagtggtgcaatctccactcactgcaaccttcccctcccaggtttaaatgattctcctttctcagcctcctgagtagctgagattacaggtgcccacccacgcccagctcatttttctagcttttctagtagagacggggttttaccacactggccaggctggtcactaactcctgacctcaggtgatttgcccgcctcagcctcccaaagtgctgggattacaggcatgagccaccgtgcctggctttattttttatttttattttttctgagatggagtctcactctgtcacccaggctggagtgcagtggcaggatctcagctcactgcaacctctgcctcccgggttcaagctattctcctgcctcagcctccagagtaagctgggactacaggcaagtgccaccacacctggctaattttttttgtatttttcgtagggatggggtttcactatgttcgccaggctggtcttgaacttggctcgcctcggcctcccaaagtgctgggattacaggcgtgagccactgagcccggccatttatttattttttaattaaaaatagaaacggggctgggagcagtggctcacgcctgtaatcccagcactttgggaggccgaggcaggcggatcatgaggtcagatcgataccatcctggccaacatggtgaaaccctgtctttactaaaaatacaaaaaaaattagctgggcgttgtggcccacgcctgtagtcccagctactcaggaggctgaggcgtgagaattgcttgaacccaagaggcggaggttgcagtgagccgaaattgcgccacttgcactccagcctggcgacagagcaagactcctcctcaaaaaaagaaaaaaaaatagaaatggaggtttcgctttgttgtccaggctggtctcgaactcctagcctcaggcaattcttccacctcagcctcctaaaaagctgggattacaggtgtgagccactgctctccgctcaaaggacaaaatatttaaagaagctgagaaatactgagctctgggataaatcttggcctcaacatagcatagaaagtaaggccttctgctgttgagcttttttcccgtgaactcacctccacaatctcttgcattattggtttttttgctgttcttgtaatatggcaggccttttcataattttgcagcctgttctgcttcccctatttggaatgtcgcttcccttctgggaaatttgcaaactcctagttaaccttcaaagcccagttcaaaagtcccttccctggtgaaaccttccctgatttgcccttttctcttccacccacatccaagttacttccttcttccacccactgggctctgaaggtattagccatcaccattgcaggaatcatttggaatgtttatctatttaaggcttctagactagattctagattaaattccactagactaagttcctagagggctgggcctgtcagatccattccgagaacctaccaatggacctggcatggagtagaagtgggggagtggctagtgaatgaagaaagaaaatagattgagagatgaatggataaatctcacctgcggcctaggccactgacagctgtccccaaagtccagagctcagttaggctggcttcacgtgggcgggacctcccgcagcagccgccgctaccagcccagcaaatctcatccccacgtggcagttctaggggataggagacggggtcgggaaagaacaggctgattcggtcaaagtggccgggacggagccagggaaggcccttccccgttctttgcacccggcttgggcccactcccctaaaagattcagactccctgcccgagaccgtgatagacccggtatccggggaccctcgcccctaccctccagccccggactgcaatacctgcggcgacttaggccagtcgcgagccgtgactccaccccggaggggcggggcttaggtccgggccctcctcccaggacccggaagagcgtccgggccaaccgctccctcttccctgctccgccccgagggcccggcgctgacttcctgggctggcggtggaggggtcccccagaccgggagtggacgccaggctctgcatttctcgggaaccaagtggggtgggccttccctgggtccctccctcccggacgggataaataagccggggctacttggaaacgatttgcgcaatgccgggttcgggcgtccgtttggggaactcagatgcctgcggcagctgatctactctgtaaggggctaacagggctgggcgccaccacactccagcttgggcaacagcgcaaaaactccctctcaaaaaaataaataaataaaagggggggagggtataacagttacatttccagttacaacgattgttttttttttttttttttgagacggagtctcgctctgtcgcccaggcgggactgcggactgcagtggcgcaatctcggctcactgcaagctccgcttcccgggttcacgccattctcctgcctcagcctcccgagtagctgggactacaggcgcccgccaccgcgcccggctaattttttttgtatttttagtagagacggggtttcaccttgttagccaggatggtctcgatctcctgacctcatgatccacccgcctcggcctcccaaagtgctgggattacaggcgtgagccaccgcgcccggccacaacgattgttaacagtttctaaaggggagagttgagcatgcaatcctcctgcgcagtcttcgggccagctcaagatttggtgctttaaacagctgattcattccataattgccatttgtaattatggcaggtgctatgctgagccagacaccaccacgctttgcctccaggagcaagtcttaactagagagagatcaaagaaaaagacaactagggacgactgccaagagtgcaataaatataaagttcagccaggagagtatctgttctgaagttactttcctccaggcctcagggttgtctgtttgtaaccatggagctaataagatttctatcataggctgggcgcggtggctcacgcctataagtccagcactttgggaggccgaggcgggcggatcacgaggtcaggagttcgagaccagcctggcctacatggtgaacgcccccgcccccccccccaactaaaaacacaaaaattagctaggcgtggtggtgggcgcctgtaatccctgctactcaggaggctgaggcaggaaaattgcttgaatctgggaggcggaggttgcagtgagccgagatagtgccactgcactccagcctgggtgacagagccagactccgtctcaagaaaaaaaaaaaaaaaagagagatgtatgtagtagttgtggtggggaatacatgacataatgtaaataaaagtgctcagcacccagcagctggcacagagttctctgtcaagggtaaagctattcctgactataaatgaacaatgtctctagacatattcagaatctacattatctttgttttagttcataaccataggttctctgtgtctttcctgaaaatagagaggtggcttgctctcttatgtctgtttcaaagaactccagtctctgaaactgtcgctgtgtcctagaaaatagagaaaacagctcaggttagaaacaggagctcctggagtatagagctatggtagcttagtgggaagagatcaaacatacttgggttaaaatccaagctccaggctgggtgtggtggctcatgcctgtaatcccagcactatgggaggccaaggagggcagatcacgaggtcaggagttcaagaccagcctggccaacatagtgaaaccccatctctactaaaaatacaaaaattagccaggcacggtgatgcgcacctatagtcccagctactcg

SEQ ID NO: 588774 - DNA, 4001 bp, Homo sapiens
gatgggaactggctgtgttacccaggctagagtgcagtggcacccatcatagcttactgcagtcttgaacttctcaactcaagtagtcctcccacctcagactcccaaagtgttgggattacaagcatgaatcacctcacgccacaaatatttcaactttaattatgaatctgagttaatatcttgaattaaaattacatatgaattttaaatgttaccaatacataaaaatcaatcatggattgaaattttattaatacaaagtgaactctacacaggaagatttataaagacttctcttccctattttgtttttttgtgtttttttttttttttttttgagacggagtctcgctctgttgctcagactggagtgcaatggcacaatatcggcccactgcaacctctgcctcccgggttcaagcgattctgttgcctcagcctcccgattagctgggactacaggcgcctgccactacgcccgtctaatttttgtattttcagtagagacctggtttcaccatattggacaggctggtctcgaactcctgaccttgtgatccacccgcctcaacctcctaaaatgctggatcacaggcgtgaacgcacccggcccctattttcagttttcataagtaagctctagttaagtcttcaatacatattaaatagcaccttatacaaacttgaactaaggcaacacgtccttcgtttaaaaaaaagttggatgaaccctccttagtacctaagctttttttcccaactacttttcaaacatcagtttaatgttacaaacacaattccattcaccttccgttgtttttttgttttgttttgttttgttttttgtttccgaaacaaaaacagctggaaactcacttattgtgtacttactactccaggcacacgtttgtaaatacatgtgaatggaaatataaaaggaattgtgaaaccctgtccctaacaggtttttttccctgacaaaaagccaacgaaagtcaaaagacctcaaattcaagttggaacatgatttaaaactaacggagcactagtagcgggaacactagcagcatgatcacttaacacggtctcctaggacatttgtttccaaaaaagaattctcgagtaaccaaaggtatgcagatgcgtgaaacgcaggagcagatgataaacagtctggatgcagaagagcagagaccaaagtactaccaggcaatggacagcgaactcctggaagtcttgaggttatcctttggctcaacacgtaaaaccctaagggtgcggataatcaaaagacacagcgatgaggtactggggtagctgcttcaaggagatgagaagactgggatgccaagaacgctttaattgcagacggggaaatgagactgaaagaccaacctgagatggcaaagcgacagtgaaaactagcaagtctttgaaatttaggcgcagcccaggacagcctgaggcccaggctagcttaagtcacagatacaggcctagtgagcaatggggagaaactgaggcgggggggagcggctggattcccaaataggaccaagcataaaacattaaagtcaagacacaaaccggctttgctgggggaccagagggagggccaaaaacgcaagactcagaagaccggcacccacacagacagggggaaccggtttgggcaggggctcccagagcggcccagcctgcgcatgcgccctctcccctccgtcgcagttccccctccccccaatcacggctcccctcagaactcggcccgtcgagggagctgagagcagctccactggcccgaccccgcgggatgagaagacagcttggctccccgcaggggccgtcggaaaatacccctggggttggtaggtaggagggtgggaggaggaggaggggaaacacggccctacccgacctgccgtctcctcctccgccgcccgccgctcgccgtcccggaggctccgccgcctgggcctcccaaaccgccctgtccccgcccccccacccctttactcacgtgagagcgacttcttccgccctccgccccgccccctgccccgtctcataggtctgcgaccatgacgagcgaccctattggcccaataccgggaagcgaggcggagcttcctcttctccgagccccacctgggctttcagcccgcctcaggactgtgcgcctgcgcgaagtgcactggctgtgagctggacctgggctgtcttgtgtatttggagttggacagccaactacgtgactgcagccgggactggggacgatggaagcggactgggtagtacctgttgagcctaacaaagggtacaaccccagagtactggtgcttgagcaaggaatccccctgctcacctttcatgtgcaagtcctgtttgaaaatcagtacttcacagtgtaataaaattcacctggcatttactgagggcgcacggtgtgtcagggattgtgatggttctttatgtggctatctcatttcagcttcaccacaaacccgtcagaatggtaccatttttctccttttataaagtaatttagctttagttacagaatccagtctagaagtcaaaacttccgactgccaagtcctaaaaccactggtacaacacagctgcctaaaggcatttaaggcacacaagaggacagaaatggacaaggttacatcagattgtgactcaaagatgagatttttatttaaaaatcattcaaaggtgaaacacagcaacagcaatataatgaagtttaaagtccctgtcctcaatgaatgtacaatgcagttgggaacaaaaacaatgattattaaagtgctagttaagtcttatttttaaagagaccctatcttgtccaggatgcagtgctgtggctattcacagacgatcatatcacactccaccctcgaactcctgggctcaagctatcctaccacctcagcctcctgagtagctgggactgtacataggcatgcaccactgcacctggctcataagacttgataatttataaaataattctacagcctcttccttactcttcccctttatttattccaactggcatatgctcttttcctggtgagtgagtcgtctacagtgttttctggtggataatgcatcccgatcaaccagagaaaaaacagtgagaaaaatctgtgttctgttgcaatccctctgtgatttgtctaatacaatagatgtgggtgtacccctgcagaaaaatagtttcgcttcctttctccttatacagttacaaaatatccatttcaagatattcaaagaataaagtattagggagaaagtaaaatcccctgaactcccaacaaaaccacttttaacgttttggtgcccatactttcatgtatttcttgattcatggacaccccaaatatttatgtaaatcttaacatacatttttaaataaaattgtactacacaatcagtacaacatgctttggagaatagacacaagctaaaacaacaacaaaaaaagaaaacattgcatttaaaaaaaattttttttaataaaaaaggccaggtgtggtggctcatgcctgtaattttaacactttgggaggctgaggtgggaggatggcttgagcctaggagttcgagaccagcctgggcaacatagtgagaccgtgtctctatgttttaatgaaaaacaaaaaaaaaccatggcattcccagggccaatgttaatactttagagtatatccttctgtgtgtgtgtattttttttttcaaaatgagatcactttagtcatctcctttttcaattaaaaatatctaccttatttcagtacattttcttctcacctaattcctagatcacattcacattttctatccatctaaagttatttttacagttggctttcttaactcagtaatgttacaggaaaatttcctctcacataatacctaactacaatcaaatattctgttgaccaaattatatttttctacaaccagtatacccaaattatccaatt

SEQ ID NO: 588775 - DNA, 4001 bp, Homo sapiens
ctccacgggagtctgggagctcctggacagaggagtcctgagatttcaaatagtcaagccttctccccagccacaagttcctttgatgcttgggttactgaacacaaacgcaatggattgtttgtcttcaacataatccgtttctgttcctaaacgtgttggctgcgctttctttctgatgagcacgctgactctaatttgaacttcatcaaaatcttctttgtcgtcgtatgttctagagtataagaaaagccaatacggcccttggttcggacatcaactttcttttaaatttttttttcgtatttttagtagagacggtgtttcactatgttggccaggctggtctcgaattcctgacctcgtgatctgcccgccttggcctcccaaagtgctgggattacaggcatgagccaccgtgcccggcccggacaccaactttcatacctagatgctcagacttatctttaagaagttgttttatcttgcttactgctaaaggtgtctgggtgagggtggcccgagtggtctgcagcttcctcttgctcacaggccgggggactaaggaaggcgacatcttcactgtcctcctggactagctccagccccaggaactacggcctctctccgtgcacacggcacgcgaattcatgaacttgcttttaaacctgcacaagagtctttctgatcattagttcttaaaattctacattaccatggaaatatcacggaggctctaaggctccccttaaagtgaccaaaaaactggataggcgtagcgtcctaaaacctcatagaaacatacggaaatggctaagagggaagcaatgtcaaaacagggaaccacataaaagctttcaaaaactactgggaaagagcccgcaagatggaaaaactcataagaggtcgaggacaatttacacaatttataacaaaggaatggagcgtcccaggcactcaggagtccgtaaatgactcctccttcctacgagaaatgggatgtctcctacagtcgcaagtcagcccgtgccttctggagcttttctagatacgtctcttacaaacgcttcttttaaaaaaaaaggcgagaatgtgtggcgtagctaatattctgtcttcaaactcagtaggaagtcaacaaagaaaaatcccgctgaaagcgccaaggccggctgggttccccgcacctcctgcaggtgagtggtgcccggggctgggcaccgtggagcgtcgggggcgcggcgccccgggccggcgggccctgcttggcattatgtaatcacccccgggccgggcagccgggccaaccccgccgccgccgacccgctccactgcacagcgcggcgggagcgacacgcggcaggcgagtgcggctgggaaacgacccgcggctcgggggccgcgaggacccggccctggcctggcctctcctcgcgtcccctggcccgcgcccccgctcccggagcgcccggcgggcccagcgcaccccacaaccggcaagcaggtgagaccgacacccaccaccgcgcggcgcccggggcctgggttcggagacccgcgcggcgctcccgcgcccccccggcccgccgcactcactgttgtactgcacccccttggcgaagcgcctctgcaacgcctggttcatggactgcagcccggcggggatgttcttgtcccggcccggggcctggtccgaccccaccagcttcttcagggcggaaaacatcttcccgctcggacgtcccagcccgggcgcggccggcgagctcagcggcggcggggaaggggtgcgactggcaccatgtcccggcggccccggcccccccggaggccggagccggcgcggccagaggccggggtcccggcggcggagcgcagccccgagcggcgactcgggaacctcagccgcggctgctccgctccggcccccgcggcctccggcgcgaccgctctccaggagtcagcgccgccatcttggcgccggctcggcgggacgggaggggtgcgcggctacggggcgccgcgagggccgcgggggcgcggcgcgcgcggtcggcgcatgcgcacgcggttctggcgcgcagttccgggcccgggctgcctccttacgcagaacctcccccgatcctgcgtgtcccgtgctcctctccgagaccccggtcgccccagcgtccgcagcagtcctggaaaaatgtttatttgtgtagcaaagcagggagcggggcggcggggctacttcttctttttcttggccgccttgagcttcccctcgattagccgctgcgcctgcctcttgatctcggcgcgcgaagggacgtagctgtggtccatgtcggggaactggaaggtgtctgcgggcggaggcggcggctcgcacacggggctagcccagctaggcgcagccgcccgacccgcctctcgcccccgccctccaccgacccgggccaggtgccttgccccagggacagccccagcgtgccgggaggactcagcccagcccattcgcagcggctcacgctgccctgcctagcctttcccgcagaacccccagtggaagctccggcccaggccttcaccgcgctcctccctgctccagccctggtgcctctcctccgggcccgtctggcatggcatgcctcctcctttcggagaaattaacaaggtatttcagtggctttagcctccccatggcatcactaagtcacctccatcaattaaagtcctgcaggtacaactgatgcaccctgtagccccgctgtccctccaggatgtcccggtgggatgggagccggcgccaccccgacctgtgttccagccacccgcctgcagcccgggccccagttccggggcctgtaccgatcatatcctcctcccggttctcaaagctgatcctggtgttgtacttctccatcagagtcgaggactccagggtgtccctcacctttgtgtcgccctgcagggcaaagcccccttcagccgtgcagacactctgaacgggagcctgtcagctttgaggggacgtgggctgtgcaggttcctcccagcccggggctacctcctcggtcctggacaccatctgcactctgtcagccaggtacgtgagcttcccctcgcagtacgccagcttgctgttcaaatcgagggtgttggagagcaccacttctctctgtaggccgggaggagggtctcatctcccctctggccctgcccagggacctggtgtgtggcagctcagcctcactcccggtacctgggtcgcaggcaagttaatgcccatcagccggacatagaggttgtcgatgcccatctggatggtcagcagcagctcctggcccttggtcatgttgctgtgcgccagctggagcctctcttcttcctcttttagcatgtctgtcattttcttctcaacggacttgaagctgcagaaggcaatagggacacagcagtgaggggcacaggcccgagagccatggtgggccacccaggagcccagtcctgagttgggtgctgtgccagaatcagggactcagaagctcaggtgtgtgcaagtggagtcccctggcccctctgtgggacacacaggcttgttggcagtgggtatactcccagctcccagcctggctgcagcccggggcctttgtgagactggggtgggtggcccgcagccccggaagcccggggcacctgatggagctaggcttctggcggaacttgagcacggcctcctccagctccagctgcttcaccagggccttcagctgcacccgccactcctcacagtcctccatctgcagctccaggttctcctccgtgttcctctgggccaggaagcggctagtgatgtcctggccagtccgggggagagagaagcaggtgtgggccaggatggtgggcagagggggcttcacagaactggtttcttctgggcccctcctagacgctagtgcactttctctgtgctcattcacaagtgtgatcacagctcactgcagcctcaacct

SEQ ID NO: 588776 - DNA, 4001 bp, Homo sapiens
atttcagagaagcagtgctctatcacacatctcaaaatgctttaatatgtaggctacttaaaagtctcccacaatttttacagtaaaaaacaaaaaaagcacataatgaagaaaatctcctagcaatggtctccctaccccacacataccaccttctcattttgtttctatattgtttgaatattttataagaaggcttgcattacaattgtagaaacaaaaagatctttgcaaagattaacactaaaggcagtggtcatgtaatgtatcacagtaatagtcaagtaaatggtacaaaatgcctaataagtctaagaaagttttgttaaaactagggcaaataaaaacaccttaaaacaaattatcttgctctttccattttgtatatccccctactctatagccaatgagctttgactaagtcaataaggctcccagaagccccagaccacgttctacaggtccctgtactcctccagtcctgccagcaaagctcactaaacatttacttgttcaacaaatgaatcattcccatgattccacttatctcacagtcctttcttccatttttgctcatgctcatctcaagctcacaagagttgctatactggctacgtaagttacttaatttccttggttccttctaggtaaaaattaaacaaggacaaatctgtgaccagaccaaaaacaggtctcaataagatcctatcttattttagatctatttctaatatccttggttacctcgttctcacaacaacttagaaacaggacacttagcgttgccctagaaaacataattttcattgtttattttcttactggaattctaaggtgtcgtatcaaaaacacatactaattaaaacccactacaaacatagaattgaaacagttgtcatgaaaaatatttcctaaagtcattaaaataaaaactgacaagtcattaaatgcaaacgttccatatatcccagaggaaatgctttaatttcttgccccggactaacagtattagtttttttatactaacagcaacaaaattatatttatataaatagcagcgaaagctgtagaaaccgctccctaacaatgggcttttcaaaaatatacttccagacgtataacatattacttttccttggaaataaactggaaaacagcaaaaatagttaagaattcacacaaacacaggtacagcattgactctcagttaacagtatgcgtaaagtgcctaaaacgctaaacaaatcttacagaacgtaaatacttcagtggagctgttgacagagtcactgcataacttcaatacacccacacatatttaccaaaaagccacaatatttctttagctttcaataattctgaaattaactgagtattataagccgattaagttactggggcaccaacatttgttaccacaaagaaccaaagtcaaataggcattttacgtagtttgtctgaaatcatcaaacaaactccattttaactttcacccttcaacttattaatgcacattaagcagtaaagaaatattcaagagaaattagattctattagtactgtcagtccacagggtattgtcaattacttctgaggacactgaaaagtttctcatgtataactgagatctcctgtacttttaagaagttaatcacacagcatacacccacatataaatattctgaaatcaaataattttgtaccaaaatcccaaaaaggctgtttcttaaaaaattaaagatgtacaaaacttaagattaaatgagataagtaaaacgtaacactgtatctccactcaaaggaatccattgtttaaataatcgattccatttactgaccaccaagtaaatacataccatctaatcttcacatctctgcaaggcaggtattatccctattatacagagaatgaaactaaccgtaatttgcccaaggtcatagcaaataagttacaaaaccacaaatggaactcaggtctacttaacaccaaagcccctgatctccacccaaaatagaatcaactacttttaaaaatagagttgggcagaaagctgctggtttaaacttagtattatgacaatcttggcggtgtatttccgaacataagcagtaaatttacactcacagcgtttttagattcttggcataaagttgtactgacctcaacagtgtctctttatgcagtcacaaatacagaaaaatgtataatgtggacttctgaaatgtttaaggctttaactgcagaaaggattcaaagttgttgttttttgttttttttttcttttttcccccttgaactgctactgtttggggcatcgggggagggtggctgcagcgttccaactcctacaattccaagatttctaacacagaaaacccgttaaatctgaagtttagtttgagcctggatggctgtgaagagctctaacagctaaaaccatcaccaaagaggcctcaaagtgcaatctacgcaagggtgtgggtttggtggcgggaggaaggcagcagaacgattcatttgcaaataaaagggtaaacaattctgaggggaaaggggcaaattcattttcaccaccactcacctctcggcggcaaacggaacctgatacttttttttttcttaaggctcatcttctcgggttaccaactctgggaactaagcggctaaccaggtccacacaggggtagtggcgacgcctacgtctccctcccccacctgtgcacccataccagaaagccaggctctacggctgagacggcctggaccttcccatccccctccggccccgctagcacgagctcctaggcccaggcccgcgggcgtgcgctccacgccatctgccaccaggccttcggcgtccggccactgcttccccattctcctgccacaaagcccacggccaagacaggaggatcggctccgctgtacgccgccagggccggcaccaggacccagggccctcatcgcgccctccggggcttcccccgctggagcgcgccgcccggccccacgagctcctggcgctccccgcggcccgcacgcggctgcccctgcccccggcccgcgcgcataccgtctcctcggggtcaatgtctatcttgaaggtctgctgctggagggtcttcagggtgacctgcatggtgccgccgcgcagctcggctgccgggcctgcgccgggtgctggccgctgggcggggtctgtggcctggcggggccccggggtcgcccgcgctcctcgcgctctggggaggaaggcggtgggggtgggggcttgtcacattcgcccagcggagcggcctctcccccagcccgtgccccggaccgcgccgctgcctccgcgactgcggccttccccgcgaactcgggccgccgtgcttcctcacgcgccgagcgccagccacggagtctgcagaaggcgcgagggggtcggcgagacaagcagggaatccgctagctcaccacaggatggtggccgccatcatcgtgactcgccgagacgtgccccctcccccacgcgaaaaacctggggggatggggccgggcgggcgaagcgcgcaggcgtggggtgcggcgacgctttgcgccggcgcggccgaggactccgccccagaattgggggcggggcggaaggcggtcctggaatgtcggcggcctggacccggattacgcaggcgcgttccgtgggcggcaagggctcctggggcttcctcctagcgactattgctggggcgttctctccggctgccgcggctccgcctctgtgcaggctccgcccggctgccgaagttacgcaatgtgtagcccgggaagcgcttcgtggagacccggcagagtggatgcggagccctggagcgggggagtaatcggggcggagtttaagtgaaaggatggcggtaaccacagtctgggggccagcacccgcggggcgcttgctgcggggctcagccctgggggtgtcgactgattctttaatcccgacagcacagactcctgagctgga

SEQ ID NO: 588777 - DNA, 4001 bp, Homo sapiens
tagatctatttctaatatccttggttacctcgttctcacaacaacttagaaacaggacacttagcgttgccctagaaaacataattttcattgtttattttcttactggaattctaaggtgtcgtatcaaaaacacatactaattaaaacccactacaaacatagaattgaaacagttgtcatgaaaaatatttcctaaagtcattaaaataaaaactgacaagtcattaaatgcaaacgttccatatatcccagaggaaatgctttaatttcttgccccggactaacagtattagtttttttatactaacagcaacaaaattatatttatataaatagcagcgaaagctgtagaaaccgctccctaacaatgggcttttcaaaaatatacttccagacgtataacatattacttttccttggaaataaactggaaaacagcaaaaatagttaagaattcacacaaacacaggtacagcattgactctcagttaacagtatgcgtaaagtgcctaaaacgctaaacaaatcttacagaacgtaaatacttcagtggagctgttgacagagtcactgcataacttcaatacacccacacatatttaccaaaaagccacaatatttctttagctttcaataattctgaaattaactgagtattataagccgattaagttactggggcaccaacatttgttaccacaaagaaccaaagtcaaataggcattttacgtagtttgtctgaaatcatcaaacaaactccattttaactttcacccttcaacttattaatgcacattaagcagtaaagaaatattcaagagaaattagattctattagtactgtcagtccacagggtattgtcaattacttctgaggacactgaaaagtttctcatgtataactgagatctcctgtacttttaagaagttaatcacacagcatacacccacatataaatattctgaaatcaaataattttgtaccaaaatcccaaaaaggctgtttcttaaaaaattaaagatgtacaaaacttaagattaaatgagataagtaaaacgtaacactgtatctccactcaaaggaatccattgtttaaataatcgattccatttactgaccaccaagtaaatacataccatctaatcttcacatctctgcaaggcaggtattatccctattatacagagaatgaaactaaccgtaatttgcccaaggtcatagcaaataagttacaaaaccacaaatggaactcaggtctacttaacaccaaagcccctgatctccacccaaaatagaatcaactacttttaaaaatagagttgggcagaaagctgctggtttaaacttagtattatgacaatcttggcggtgtatttccgaacataagcagtaaatttacactcacagcgtttttagattcttggcataaagttgtactgacctcaacagtgtctctttatgcagtcacaaatacagaaaaatgtataatgtggacttctgaaatgtttaaggctttaactgcagaaaggattcaaagttgttgttttttgttttttttttcttttttcccccttgaactgctactgtttggggcatcgggggagggtggctgcagcgttccaactcctacaattccaagatttctaacacagaaaacccgttaaatctgaagtttagtttgagcctggatggctgtgaagagctctaacagctaaaaccatcaccaaagaggcctcaaagtgcaatctacgcaagggtgtgggtttggtggcgggaggaaggcagcagaacgattcatttgcaaataaaagggtaaacaattctgaggggaaaggggcaaattcattttcaccaccactcacctctcggcggcaaacggaacctgatacttttttttttcttaaggctcatcttctcgggttaccaactctgggaactaagcggctaaccaggtccacacaggggtagtggcgacgcctacgtctccctcccccacctgtgcacccataccagaaagccaggctctacggctgagacggcctggaccttcccatccccctccggccccgctagcacgagctcctaggcccaggcccgcgggcgtgcgctccacgccatctgccaccaggccttcggcgtccggccactgcttccccattctcctgccacaaagcccacggccaagacaggaggatcggctccgctgtacgccgccagggccggcaccaggacccagggccctcatcgcgccctccggggcttcccccgctggagcgcgccgcccggccccacgagctcctggcgctccccgcggcccgcacgcggctgcccctgcccccggcccgcgcgcataccgtctcctcggggtcaatgtctatcttgaaggtctgctgctggagggtcttcagggtgacctgcatggtgccgccgcgcagctcggctgccgggcctgcgccgggtgctggccgctgggcggggtctgtggcctggcggggccccggggtcgcccgcgctcctcgcgctctggggaggaaggcggtgggggtgggggcttgtcacattcgcccagcggagcggcctctcccccagcccgtgccccggaccgcgccgctgcctccgcgactgcggccttccccgcgaactcgggccgccgtgcttcctcacgcgccgagcgccagccacggagtctgcagaaggcgcgagggggtcggcgagacaagcagggaatccgctagctcaccacaggatggtggccgccatcatcgtgactcgccgagacgtgccccctcccccacgcgaaaaacctggggggatggggccgggcgggcgaagcgcgcaggcgtggggtgcggcgacgctttgcgccggcgcggccgaggactccgccccagaattgggggcggggcggaaggcggtcctggaatgtcggcggcctggacccggattacgcaggcgcgttccgtgggcggcaagggctcctggggcttcctcctagcgactattgctggggcgttctctccggctgccgcggctccgcctctgtgcaggctccgcccggctgccgaagttacgcaatgtgtagcccgggaagcgcttcgtggagacccggcagagtggatgcggagccctggagcgggggagtaatcggggcggagtttaagtgaaaggatggcggtaaccacagtctgggggccagcacccgcggggcgcttgctgcggggctcagccctgggggtgtcgactgattctttaatcccgacagcacagactcctgagctggactgcccgagttcaaatattgttttttctcactagcctaaacagatggaccgatttaaaatgaaggtcaagttctgtcacacctcggggtagaactgtccagtgtttccccatctagccccgagttaaagtcagagttattagaacggatgcattagcccctcgcctttctccgagtcgccttactctccccactggtggattctaggttgcccccggctcccttaacatccttgctcagatattgccttcttggtgaggtctgttctggctgccttacttaaaatcccaacttcctatctctgttatcctgctctgttttcttgtatagcgggtatccctttataattaccctgtaatgtacgtatctcttgtttatcatctttctccttttcctgtgaaccccagactgaagctgcacagaggcaaagattttgctgtgttcacccatgaacatgcctggcacattgcaggtgcacggtaaatatttgtggaatgggtgaatgtgcttctggatcctcagcagtagaatgagaataataatgtcactcattgattattggagggggaagttgaatattgtatgtaaaatcatgataaacagtctgtaagcagttagctattagtagaaagtccgtttacagatagaaaactgaagtacagagatgttgagtaatgcacctggaataacccagccagtagtaaatggcaaatccac

SEQ ID NO: 588778 - DNA, 4001 bp, Homo sapiens
tcaagagaaattagattctattagtactgtcagtccacagggtattgtcaattacttctgaggacactgaaaagtttctcatgtataactgagatctcctgtacttttaagaagttaatcacacagcatacacccacatataaatattctgaaatcaaataattttgtaccaaaatcccaaaaaggctgtttcttaaaaaattaaagatgtacaaaacttaagattaaatgagataagtaaaacgtaacactgtatctccactcaaaggaatccattgtttaaataatcgattccatttactgaccaccaagtaaatacataccatctaatcttcacatctctgcaaggcaggtattatccctattatacagagaatgaaactaaccgtaatttgcccaaggtcatagcaaataagttacaaaaccacaaatggaactcaggtctacttaacaccaaagcccctgatctccacccaaaatagaatcaactacttttaaaaatagagttgggcagaaagctgctggtttaaacttagtattatgacaatcttggcggtgtatttccgaacataagcagtaaatttacactcacagcgtttttagattcttggcataaagttgtactgacctcaacagtgtctctttatgcagtcacaaatacagaaaaatgtataatgtggacttctgaaatgtttaaggctttaactgcagaaaggattcaaagttgttgttttttgttttttttttcttttttcccccttgaactgctactgtttggggcatcgggggagggtggctgcagcgttccaactcctacaattccaagatttctaacacagaaaacccgttaaatctgaagtttagtttgagcctggatggctgtgaagagctctaacagctaaaaccatcaccaaagaggcctcaaagtgcaatctacgcaagggtgtgggtttggtggcgggaggaaggcagcagaacgattcatttgcaaataaaagggtaaacaattctgaggggaaaggggcaaattcattttcaccaccactcacctctcggcggcaaacggaacctgatacttttttttttcttaaggctcatcttctcgggttaccaactctgggaactaagcggctaaccaggtccacacaggggtagtggcgacgcctacgtctccctcccccacctgtgcacccataccagaaagccaggctctacggctgagacggcctggaccttcccatccccctccggccccgctagcacgagctcctaggcccaggcccgcgggcgtgcgctccacgccatctgccaccaggccttcggcgtccggccactgcttccccattctcctgccacaaagcccacggccaagacaggaggatcggctccgctgtacgccgccagggccggcaccaggacccagggccctcatcgcgccctccggggcttcccccgctggagcgcgccgcccggccccacgagctcctggcgctccccgcggcccgcacgcggctgcccctgcccccggcccgcgcgcataccgtctcctcggggtcaatgtctatcttgaaggtctgctgctggagggtcttcagggtgacctgcatggtgccgccgcgcagctcggctgccgggcctgcgccgggtgctggccgctgggcggggtctgtggcctggcggggccccggggtcgcccgcgctcctcgcgctctggggaggaaggcggtgggggtgggggcttgtcacattcgcccagcggagcggcctctcccccagcccgtgccccggaccgcgccgctgcctccgcgactgcggccttccccgcgaactcgggccgccgtgcttcctcacgcgccgagcgccagccacggagtctgcagaaggcgcgagggggtcggcgagacaagcagggaatccgctagctcaccacaggatggtggccgccatcatcgtgactcgccgagacgtgccccctcccccacgcgaaaaacctggggggatggggccgggcgggcgaagcgcgcaggcgtggggtgcggcgacgctttgcgccggcgcggccgaggactccgccccagaattgggggcggggcggaaggcggtcctggaatgtcggcggcctggacccggattacgcaggcgcgttccgtgggcggcaagggctcctggggcttcctcctagcgactattgctggggcgttctctccggctgccgcggctccgcctctgtgcaggctccgcccggctgccgaagttacgcaatgtgtagcccgggaagcgcttcgtggagacccggcagagtggatgcggagccctggagcgggggagtaatcggggcggagtttaagtgaaaggatggcggtaaccacagtctgggggccagcacccgcggggcgcttgctgcggggctcagccctgggggtgtcgactgattctttaatcccgacagcacagactcctgagctggactgcccgagttcaaatattgttttttctcactagcctaaacagatggaccgatttaaaatgaaggtcaagttctgtcacacctcggggtagaactgtccagtgtttccccatctagccccgagttaaagtcagagttattagaacggatgcattagcccctcgcctttctccgagtcgccttactctccccactggtggattctaggttgcccccggctcccttaacatccttgctcagatattgccttcttggtgaggtctgttctggctgccttacttaaaatcccaacttcctatctctgttatcctgctctgttttcttgtatagcgggtatccctttataattaccctgtaatgtacgtatctcttgtttatcatctttctccttttcctgtgaaccccagactgaagctgcacagaggcaaagattttgctgtgttcacccatgaacatgcctggcacattgcaggtgcacggtaaatatttgtggaatgggtgaatgtgcttctggatcctcagcagtagaatgagaataataatgtcactcattgattattggagggggaagttgaatattgtatgtaaaatcatgataaacagtctgtaagcagttagctattagtagaaagtccgtttacagatagaaaactgaagtacagagatgttgagtaatgcacctggaataacccagccagtagtaaatggcaaatccacaatgtgacctcagacagaatgactccagagtctgtgtcccagggtgtgccactattcccctgttttttgttttaaagattattcttatttttttaaagcgtctgactgtcatccacgctggagcgctgtagcacaaacacggctcactgcagcgtcaacctcctgagctcaagagatccttccacctcagcctcttgagtagctgggaccacagacacacaccactgcttcccagctgatattttatttttttgtacagatatgttctccctatgttgccagggctggtcttgaactcctgggctcaagtaatcctcctgcttcggagtcccaaagtgctgggattatatgtgagccatcgctcccagctattctcctctgttttatactgtgcctgtggcacatttgatttagttcaagtataaaacacagttctagtcaggccactagctctatgaccaattacaaattacttctctgggacagcatcctcactaatacaatgtcactgcttggttttcagtggcttcaaggagcttgggtttaatgttttcaagaaactttccttgaccagcttctccctccactaacctgatatttcccctttcacaacacataactcccttcatagtaattaaatatgcaatcttctgccctctgtcttcctgtatctactcgtagtcaccaggtggtttcatcttggcccttgttttgaaatacctccagcctggacctttccccttagctatagagttagccaattgcctaagcaatatcttcacctgaatatgtaacaagcctctgaaacttaatgtgg

SEQ ID NO: 588779 - DNA, 4001 bp, Homo sapiens
gtgcagggctggcccatgctttgtcttctggtcacagcacagatgtccccttagcgagacctctcagatccccacccagcaggccccagccctccatggcagccccggcattattttcgctgcagcactgctttttcctttctgtgcctgtttgcttttgtgccctgtccatcgccccctccagactgccagctctggagggcaggcccccctgggtcactttcagagccacacccaagcccaacgctgcccccccacaacccagggtgagtgcttgggcacacctgctgaagggaaagaggaagctcttggagccccctcccgcctctgagcagctaacattgtggagagggatgctagtaatggggggtgtgcattgggtagaggccggggtcccccagagggaccctgccgggctctccctgactccagttgctccaatgagtacagtgggcactgcctccccctggtggccggcactagcacagcagcagcagcctcaggcagaaaacccagaaaacaaaacacacacctttgtttgggtgttgtcaaggtagcagctctcctgagtcccagggggtcaaaggagcagaacctgcaggctccaggggtaattcaaggcgcctcagaagcttcatttgctcccctctttccctctgctggtcctggggtgtccagttcactcgtgaggcctcctcactccaaccagggcaacggctctggccccacttccaaataagaaccctgaggctccaacaaggacagtcttgtcccacaagagttgtccagtgcttggccacgctctgcaccaccccaggccctcagcccttcagcccccccggcttctcttgctcagaagaacctccaagaagaaggcattttccacagacctcggtgggtagtgggggcatccccagtggagacctaaggccgacagacacgtctacgagcctgtgggacccttggagtcacccaggccaaacattccaatttatagagcaggaatttgaggcttcctttcctacagccccgtccacactgaaggggtcttttcctgcttccaggtgatcacagcggtgaacacagaaccccacaatctgtcctctccaggctgccccagcccagacagatcctgggaaccttggagaatccccgcccatcaagctggcgtgtcctccccttgccccccaccccgtgccatggccccaggcatgttgctgggtactggatgcccctgcccgtggcagagtagcccccgccctctttcttctttcccccagtcacttccccagcgtcccgtcctactctgagccccaggaagtgtgtggtgtgtgtgtctgcgtgtgtgtgagcatgtatgcgcaggcctgcgcctgtacgtgcgcggagaagcccaggcaaatgagcccacatgggagatgggcaggggtccccaggatcttagaggctgtcattcccaaagcaaaccccacgggaagggtgagccgagcccttcctggcctaagaggccggaaccctcccttcatctctggactccgccaacttcgtgtgccccgggcgagtccctgcccctctcctgtcctcagtttccctactgtcccgggcggggttggacgcggagctgcgtaagcgcacgctcagcgtggacgcggcgccgggctccctccccccggtgggtgtgggctggggcatacggtcctccctccacccgcgacgcgaggctggggacggcgcgcactcacctggcaatctaccatcatcctcagcctcggtggcacatcgccggccccagggcgggacccggggctcgcagaggccgctcgcctgggcccgcgcgcggcgcaggggtgcgcccggctgcggggctcatggcgcggcctccggtccccgccgggcccaggactctgcggccctcggggccgccccggcagccgccagcgccgctcccattgtctgcgccgcgccgcgctccggccgctcgggcctcgccgctcggttccgccccggctccccgggctcgggcccgggtgggcggggacagccgcggccccgccccagcccgcccgcaggtgcgaggggcgcgccccgccgcgtgagctcggggacgcgctcgggggcgcgctcaggcctccctcccgcgggccgacgcgggtgttccccccgcggggcagccgggcctgttgtccaaggccgggcgcgcacacggggcctgcgcgggaccgcagacagcgcgtgcacgtcactccgcttcgccgcgcgcacgcgccacgctcccagcgccatgtgcggccgatctcacgtgtccgtccgccccagccgcctgctcagtactccccaccccgctaggacctagggccaacctcgccccagccaggcgggggccgctgagtcggcgcgccggcgtcaccaaatatacacgttcaccctggcgcccagcaccccgatgccacctgctggactcggctcggcggatggctgggagctgggggacccgaggtgacagcgaactcagcctgggcagggagaaagtcaggtctccccttcccctcctcttccccacctccctccttgtcttccctgacagcacccgggaccacaaggtccagctgcagcttcagctggtgtaagatggggctcaagggagcctgggggaaggaggcctcacactggggttgagcgactgttgggggtagtcagtgttattagggctaactgatttcgtccctttttattttttatttacttttgtttttgagatggagtctcgtttgtttgttttttgagacgaagtctcactcttgtcccccaggctggagtgcaatggcgcgatctcggctcactgcaacctccacgtcccaggttcaagcaattctcctgcctcagcctcctgagtagctgggattacaggcacctgccaccacgcccggctaattttgtatttttagtagagatggggtttcaccatgttggccaggctggtctcaaactccagacgtcaggtgatcctcccaccttggcctcccaaagtgctgggattacaggcatgagccactgcaccagccgcagtctccttcttgtcgaccaggctggaatgcagtggctagatcacggcttattgcaacctctgcctcctgggttcaagcgattctcctgtctcagcctcccaagtagctgggattacaggtgcacgctgccaccaccacgcccgactaatttttgtgtttttagtagagacagagtttcaccatattggccaggctggtctcgaacttctgacctcaggtgatctgccctcctcggcctcccaaagtgttgggattacaggcgtgagccactttgcctggccaacccttttgatttatttatttattttatttttttgagacagagtctcactctgtcacccagactggagtgcaatggcacagtctcagctcactgcaacctccacctcccaggttcaagtgattctcccgtctcagcctcccgagtagctgggactacaggcatgtgccatcacacccggctaatttttgtatttttagtagaggcggggtttcactatgttggccaggctggtctggaacttctgacctcgtaatctgcccaccttggcctcccaaagtgctgggattacaggcgtgagccactgtgcccggccttttttatttttaaaaaaactatgtagagatgaagtctcactatgttgcccaggctggtttggaactcttgggctccagagatcctcctgccttggcctcccaaagtgccgcaattacaggcgtgagccactgtgcccggcttcattcaattttataccagagccaaggcaccagcactgcaggccactcagctgtaagtggccaggccctgctgtgcgtggtgacccccacttcatggctcttccccgtcactcatccccgagctggtcatcagaggcctcatcctgtgttggggcctcgctggccaggtatcccctgagtccagcgcttgggccccat

SEQ ID NO: 588780 - DNA, 4001 bp, Homo sapiens
ggcagaggtgccagccaaggtgtcgggctttggagagcggcacgacgggcgacggcccttctcctggcggtcaccacagagacacaggcaaagaacacagagcccttcctccccctgggcacggcaggcctggcacaaacctggcctgcttcccgggccatggtggggcgagagccaggtggggagtgggccctgcgggaggccctctgccagtgtgctcgtcgcctgcgtgccctagtggagtggagcacccgagtgcctgggcctggtgtcacccgcgtggctgtcatacctgctgctgtgacaggcaggaccaggaattcccgcttgtaccaggccatgggccagccgaggacgagtggagaggctgccccaagctagcctagctttctcccttaattctccaagtccccactcccattccccctgtgtcgggggcctggaaaccaccacacagagccagaaaggtgacagatacaagtaaccaaatcaaaacagggttcggtcagcagagccaccaggcggatgtgagtctagccagaggcactgggaggcaggcaggagaccccactcacttgttctggaaggcttccctgccccctagacctgagctcttccatccctggcacccaggcacgagatttcctttcttctttttttttttttttttttccctgagatggaatctcgctctgtcgcccaggctggagtgcagtggtgcgacctcggctcactataacctctacctcccggttcaagtgattctcctgcctcagcctcccaggtatctgggattacaggcacatgccaccatgctcggctaatttttttttgagacatcgtctcactctgtcacccaggctggagtgcagtggcatggtctcggctcactgcacctctgcctcccgggttcaagcgattctcctgcctcagcctcctgggtagctgggactacaggcgcatgccaccacacccagctaatttttgtatttttagtagagatggggcttcactacattggccaggctggtctcaaactcctgacctcgtgatatgcctgcctcagcctcccaaagtgctgggattacaggcatgagccaccacactcagccacttggctaatttttttgtatttttattagagatggggttttgccatgttggccaggctggttcgaactcctgacctcaggtgatccacctgccttggcctcccaaagtggtaagattacaggtgtgagccaccgcacccggccacaagatttcattttaactgggcgcaggggtgggggatgccaatggtttgtttcattaagtagggtggtaaaaaataataatattaccaccactactcccaccattcagaaaaaacaccaccaaaggtaacaagaaagggctgccatcagaaagaagggcaggcttgaaatgagtacatttggcttttagaataatttactagagtgactactggagttgtaaacaaccaccaccaccaccacaacaatacaacaacttactaccttgtccctgtttttctcattttgctgcaaaccagacattggaagccatcagacgcatccaacacacccgtctgacaagtggaaagactgagccccagagagagcagggacttgcccaagatctcacaggaaaagtgtctgtccagctgctctgcaaagcttgcagacgctccttccatcctgacctgggggccagaacactcagagccccaaccccaaagcccagagatgccagggcgaagtcagaggccaagagtctcagctacttccttaccttcctgggaacctggccgggtggatgcccagtccctggctgcaagtggagggcacagggcagggagcagaacagcagaggcggggaggagagggtgtgggcaggggctgtggagtgcccccacaggcacatcaggccctggggcccggcttcccgcccagacactgccccagcagcacctcgctcccagccctgctcctctgagcatctcacatcctcttccggtggctttgtgggccttaggggacccagctgagcagacagttcagggcctgggagctctgccaccctcagggtggagactctcaggggatgtgggtgggcatgtgggggtgggctgggctggggtgggggagcatcagagaaatggagctagagggtttcaggggggccctgaaacctacctccctgtactcaccctgtggccagaacaagtcacctccactaaaatccctccaccatttctgtcccacccagaagagaatcccaagtcctcacctgcccacagccccctcctactaactccagctgccagtgtcctctgctgggaaccatgttcttcccccttggtctcaggactcggcccccagtcagagcagccttctccaacacccctgtcttaatgcagcaacaccatccctgccccagccacccattccctgttctttttcatctggcacacttcctcctctgtgccaggctccaaggccctgtcccctgggaaagtcaggcatcaccactggcctctcttgcgcacagtgactcaaccttgaccttcgaggaacagtagagccaaccaggctgtgaattggtcagcccaggactgaaattctgatccccagggactctggaaccctgggccaatgatttagcatctctgggccttagtttgctccttataaaatgggcacaagggcgctggaggattccacaagaactcagcatgggctcggctcatggccgtgcttggcggatgtgcaatgatcatttccagtggggattgaggagttcaggtgccaaagggttacatgcctgccccggtgccaggcacataacagacatttgatcaatgttggtggatgctgcccctgtgccaggagtgccatagcctgactccatccctggcagcaaggtccagatggcagtccggggtctgcccagtgctcagagtgtggcttgtaactggatcctagcagatagcttggaaatgtttgctgatgtagaagcacacacagatgggtactgcaaggcaggcccggtcccgggagaggggaccagcgaagaggtcactgtctgggtacacactattaacgggagagacgccctgtgcagacaggcaggatctgggtgaggcaggcggcaggggttggtatccgagcagggatccgaggctgtccccagcctcggcctctcaccccggtgttgctgactgcctggccatgtgactgtgggcattgtgtggtgtggttcggctgccactccaggtttaacagggagcttaccacgtggtttgagggggtggggagggctttccctgagcctcggtttccttgtctgcaaagtgtgacctcgcagcctagccccgtagaagggctcagtggccgagaaggtgtttcctacagtgtgcgcatgtttggttgggtggggggcttaaagaggccctggaaagaagcgctcaactttctttttttcttttttttttgtttgagacggagtctcgctctgtcacccaggctggagtgcagtggcgccatctcggctcactgcaacctccgactcccgggttcaagcgagtctcctgtctcagcctcccgagtagctgggataacaggcatgcggcaccacgcccagctaatttttgtatttttagtagagatggggttttacatgttggccaggatggtctcaaactcctgacgtcgagatccgcccgccttggcctcccaaaatgctgggattacaggcgtgagccaccgtgcctggccagaagcgctcaactttcatagtgggggtgggggaccagtagggaagtggcagggaaccaggccaccctgctggtgtgtttgtgagctaatgcctttgcttggacaagcagctcccgggtaccaggccctctgcagggccttgcatctctcacacaagctttctgtgctattcttgaatagcccactccagcccagcttcccaagcctgttacccccatatct

SEQ ID NO: 588781 - DNA, 4001 bp, Homo sapiens
ggaaaacctgtcacctcctgttgggcaggtggaggtcactgacccctttctgtctcttgtgatctatatttagagcctggggaggacatgaaaagggtgaggcctggacacgctccttggtcatttcccaacactgacgtcaccattcctagcctgcctaggtcctggggtggccctctgtgggcgggtgagcacacaccttggcaggaggtgacgcagctggaccacgcgtgggaactcccggcacagcgggcgggcctggctcagccccacctcccctgccactgggttcctggcaacctctggtggcttcttcctcctccttctgccgccaggatgcaggggtccccacaggcgagaggctgaactcagagctggccaggtgagaagcgaagcaccgaaccactgaaatctccaggagaccacactgggtggcagatgtgacagcaaccctctgacctcacggggcgctgccgtcccagcacaaccagaacaaggtgtgccgatgccgggagcagtgcaaacggccctggacggggatgcagagggctccggatcagcctggggctcgctgtggggccctgctgtcatcccttggaaatgggtacacccccggcatattgagggggaggcacgcagaggaacaaacgtgataaatgcatccatgggctgcaaatcgggggccgctcggacagctgtcccccactcctgcagtgctcgctgcctggcactgtgaggagtcactgccacccccgaggggccaccaattcaacatgtgacaggccgaagtggagggaagcagaggagagaggaagacatagagggaaactgaacccaagacccaaaagtgagccggaggaccacagcgggagagggaggcagcaggcagacggaagcgaggagacagggcgcagaggggctgcggggggtgctgggcacacctggctgaggaagggaccaaaggcccagagggtcccatagtctcagcctagtacctgtccccaagcccaggggccctgatcacaaggcagcaacgtctatcccacagctgtgataggtggggcacatcacaccccgaggggccccggcatccatgatctcccctcctggagggtggtcagccgccatcctggccccggactccttggaaatgctccacaaagtgccagctggaaatgtcacagcacagggggccttgggatgagccagccccaaggggccattctttcctgtgggtttggggaactcttttaagatctggagtgcagattcgggttccagtgcctgctctgtgtcttcctagccttagtttcacctcctggggcctcaatttctccatcagtaaaatggggacagtaaccgtcatagcaccagctctcaggcttctcaggggagcagacagtgaagcagtgcacagaagtccttggtaatccaagaagcaccctctggacggagctgccaggacagcccgcagccaccctggactgacccgtggggctgggggcagctggggaggccaagcgtgtgcacacgggcaccagcagcagagcagacccccagtctcctctctcatacccgagatgggagatgaagactcccctgtgagttccaaactcctccaaccagttctggcagggaagaaagggagtcctgggaaagcaactcccatgcctggggctcggcggtgacccacccagcccctccccggcagaggcactggttgccctggaaactcacctcggtggtggccggtgctggcagaggtgccagccaaggtgtcgggctttggagagcggcacgacgggcgacggcccttctcctggcggtcaccacagagacacaggcaaagaacacagagcccttcctccccctgggcacggcaggcctggcacaaacctggcctgcttcccgggccatggtggggcgagagccaggtggggagtgggccctgcgggaggccctctgccagtgtgctcgtcgcctgcgtgccctagtggagtggagcacccgagtgcctgggcctggtgtcacccgcgtggctgtcatacctgctgctgtgacaggcaggaccaggaattcccgcttgtaccaggccatgggccagccgaggacgagtggagaggctgccccaagctagcctagctttctcccttaattctccaagtccccactcccattccccctgtgtcgggggcctggaaaccaccacacagagccagaaaggtgacagatacaagtaaccaaatcaaaacagggttcggtcagcagagccaccaggcggatgtgagtctagccagaggcactgggaggcaggcaggagaccccactcacttgttctggaaggcttccctgccccctagacctgagctcttccatccctggcacccaggcacgagatttcctttcttctttttttttttttttttttccctgagatggaatctcgctctgtcgcccaggctggagtgcagtggtgcgacctcggctcactataacctctacctcccggttcaagtgattctcctgcctcagcctcccaggtatctgggattacaggcacatgccaccatgctcggctaatttttttttgagacatcgtctcactctgtcacccaggctggagtgcagtggcatggtctcggctcactgcacctctgcctcccgggttcaagcgattctcctgcctcagcctcctgggtagctgggactacaggcgcatgccaccacacccagctaatttttgtatttttagtagagatggggcttcactacattggccaggctggtctcaaactcctgacctcgtgatatgcctgcctcagcctcccaaagtgctgggattacaggcatgagccaccacactcagccacttggctaatttttttgtatttttattagagatggggttttgccatgttggccaggctggttcgaactcctgacctcaggtgatccacctgccttggcctcccaaagtggtaagattacaggtgtgagccaccgcacccggccacaagatttcattttaactgggcgcaggggtgggggatgccaatggtttgtttcattaagtagggtggtaaaaaataataatattaccaccactactcccaccattcagaaaaaacaccaccaaaggtaacaagaaagggctgccatcagaaagaagggcaggcttgaaatgagtacatttggcttttagaataatttactagagtgactactggagttgtaaacaaccaccaccaccaccacaacaatacaacaacttactaccttgtccctgtttttctcattttgctgcaaaccagacattggaagccatcagacgcatccaacacacccgtctgacaagtggaaagactgagccccagagagagcagggacttgcccaagatctcacaggaaaagtgtctgtccagctgctctgcaaagcttgcagacgctccttccatcctgacctgggggccagaacactcagagccccaaccccaaagcccagagatgccagggcgaagtcagaggccaagagtctcagctacttccttaccttcctgggaacctggccgggtggatgcccagtccctggctgcaagtggagggcacagggcagggagcagaacagcagaggcggggaggagagggtgtgggcaggggctgtggagtgcccccacaggcacatcaggccctggggcccggcttcccgcccagacactgccccagcagcacctcgctcccagccctgctcctctgagcatctcacatcctcttccggtggctttgtgggccttaggggacccagctgagcagacagttcagggcctgggagctctgccaccctcagggtggagactctcaggggatgtgggtgggcatgtgggggtgggctgggctggggtgggggagcatcagagaaatggagctagagggtttcaggggggccctgaaacctacctccctgtactcaccctgtggccagaacaagtcacctccactaaaat

SEQ ID NO: 588782 - DNA, 4001 bp, Homo sapiens
caccaggaaaccagccccaggacggggggtgttggcaggagggacagggacttccccgccccctcccttgggcccttggtaaatggtcattgtgttcagtttccggcagtggcctcctctcctgccaggatcctggttttcctgacccagccagaagcttcccctttgatttctaaatagcagtcgaggtctggatctcagtgctgaggctgggcaaggagcgccagggccagagagagggaagacaagacccccaggcaggggtggggctcagctctgcctctccctcagttcctcagggacggagagagggaacctgcacggccactgtgagcgctccgccggaccctcccagcacacaaagcccgagctgctgccagaggtaatgaaagccagatgagcgctgggctggtgtcagcctcccacccccaccctcccaggggtccctctccagccgccaatgaggaccagagccctggatagatgagggttgagggaacacgtctggtccggccatctgccaagctcaggaggaaagggtctctcaggcgtgtggtgttcccccaccaagagctctgcccaacactgggcggagaaacaagtcgcatccaggccctgtctaggtaccgggacaccaagaggcacgagactcaggctaacaatcgccagcaatcacaacgcgccacagtctaaagccatgaagcgactggagacgcagcaaggcaacacgatgccgcacggggactcaggaggttcactgtgaaggctgcagcccagccaaagctctgatgggccctgagcccccgatccaggaatggcctctgtgcaggccctgtgcccaggcagagcagggcgaggggggcatctctggattccactccctctgctgtgtagtcagcagcagtcaggtgggaggcagatggcaccacccagagacccagggcacacgagaaacaagcccccgccctcacctagtcaccctcccctccatccatcacaggtacaccactcccttctctgaatcctacccagtccttaccgattcagggtgttggcactctttccagttaagcagaaacaagtcttgcccgccctgggcctgggccaccctcctcccctcaccaccaggacatctggtcccacgtgttggaggcctgctgctccaccccatcccccgaccccccccccaccccgctctgagcagccccgatgtccctggtcaccagatccacatctgccccaagtagggtctgtctggaaggcccctatggtctcatcacctctgaggattctaggatttggccttcccgaccacttgttccacacctgcatcgtaaaggctaacgacgcgctgcgggccctgggtgggaactgagtgaaataaggcacaggccaccgatgtaaacagggacagtgccgcagaaaaaggtccacctgggctgcagcggccttggtgacagcaggccctggaacggtattgaggggcgcaaaaccccagccgtggtccctactgttggacggggcgcggcggcagcccccactgcccaccctgctggctgatttctgcagaaggccccgacccccacctatggaggagagaggagggaggcggcccgctgggatcgcccggccccgtccggggctcgccccgacctgcccagctctgccgcgggtggggaggctccgacgcaccccccgcccgaccgccccagctcacccacctccgggcgcggcaggtcggggtctagctgcgtgaagctgtgcagcaccaccgggcagctgtcggggacgcccacctccaggcgcacggcgtcccacacgctgcggctccgccgggagcccggaaacagcggctcggcgccgccagcaggcccggccgcctcggcccacatgcgctgcaccatggaaggctcgcagcgcgggcgcggggccggcccggcgcgcggcgggggcggcggcgcggcccgcgcggctgggctttgccaccgctgtgagcccgcggcccggccctgctgatgtcaggctggggggcggggccggaggggaagagggtggggccggggaggggcggaaccggagagtccgagggacgcgtgcgtgcgcgcgcccgcggccccgccctcgccgaggtcagacccggggcgggaccgggagcctggaggggcggggtctgaacaaagagggcggggccggggaggtcgaggggtgcgcgttggctgggtctcccggaggaccggctgtcacgtgtgtcgtggggccttgggtaccccggttaggcaccgtttgcgtgtcacgctgctgcagtgcgtgtgttgcgtagggctgaaatgtgtacgtgctgatcatgtgtggggaagccgccctggagtcagctaccccgaattccagcaaagcctctccccaactctgtggccttccacaagttgcttaacccctctgagcctcactgtttcttcatctggaaaatctgggtagtgaaaatgacttcctcaaacagttgcggggaggatgacattacgtaatggacatgaagcactcagcactgagcacctgcacctgactacaggctcaggcggagtttggagaggctgaccatgtgttcagtgaccctgtcagtgcaattggaaatcctgagtgtggggctgtgtgtgcagtgggggaaagggtcagagagtggggccctacctttttggggcaaagccccacactatccccttacagacaccctcagaggaggggaagccagggaggtgggggagagcggaaggcaccaaggttggggctgagaggcatctgacaaggaggaaggcatcaagagtgacaacgctgggcagagcacatggctgcgtggcctgtcagctggggctgcttgtggcttggacatccctggtctcagggtggaagtggggctgctggggctgaaggggaagcagggacagggacatcctcaactactctttctggaagccagtgaggaaggaagacagcctggggcttaacagcagggccaggagaatggatgaatgaatgggacccttcctcatgcctcactcatcactgggcctgccctggcctcagccttcagtcttcatggaggccagcaattgctgccagcagccctggccatgccaacctccccaggtctggtccgtactattgggcctcagtttctccatctgtaaactgagagggcgggaccagacagcacattccacgagcacatcttgcccccttcccaagtgccaatcctcagacacccacgaaacacttccactgtgactggagtgaggcggcagttcatccgttcagaacaagacccccatgtgcacacgactagaagggcctacttcacaaaaattatggtggtaagttgcagctgggtggaagctctactggttttcattttacttctctgaatttctaatttctaaaatcagtattttaataatcagctctatgtgataaatgctgtttttgagacagtctcactgtcacccaggctggagtgcagtggtgtgatctcggctcactaaggcctccgcctcttggggtcaagtgattttcctgcctcagcctctcgaggagctgggattataggcacctgccaccatgcccagctagttctgtatttttcgtagagacagggtttcaccatgttggccaggctgatcttgaactcctgacctcaagtgaaccgctcgcctcggcctcccaaagagctgggattacaggcaggagcactacgcccagcctgtttttgttttttttttaagaagcaagatgggtagatttgatttgggatggagatccctagaggctgtttaggaagcctccaagccgtttggccagggagggtaatgtgggtgaggcgtatttcgaggcaggaggtccccacagggccacaaagaggtgaccgagacactgccctcggccctaagctcctcctcccatccctttcttctggggccaagctcccaatgcctccggaaactgaaagtcca

SEQ ID NO: 588783 - DNA, 4001 bp, Homo sapiens
ccaccatgcctggctaatttttgtaatttcagtaggggcagggtttcaccatgttggccaggctggtctcgaactcctgacctcaggtgatccacccacctcagcctcccaaagtgctgggattacaagcatgagccaccacacccagcccaggcatggctatttttaaagttccacagtgacaggacattctcccctgaggagaacctacgcagagtgaacttttgaaaagttataaagatttctcctgatgctgctggaatcggcagtctactccatctcccagtctcatatgtagatcctgagcagacaattctgtacaaaccgttctatacttctatacccaccttccagaaaacagaatatatcagggtgacagggtggattttcttttggatggtataatgtcatggttaggagcaccggctcgagagtcagggaggcctggctttgaatccccacccacatggcagctgtgtgattccaagccagcttgttcacctgtctgtgccttagcttcctcatctataaactagggataaaataataatatacacctgatggggttattgtgaatattaaattagacagtgcctatggaacatgcaaaaaagtgcctggtatatagtaagcaacaaattatggggctatgttggtgtaaatgtatcactcagtcatcaaaatttattgagcacttcagttatacatgtattcatcatttgctcattcatttattcaaaaaatatttattgagtacttaccttgtgctggatacacatatatgtacatatacacagcatatatgtgtgaatgtgtataatgtgtatacacatatatatacacactcaaatatatatatatacacacacacacacatatacatatatacacatacagaccagagaagaaagaagcttcactctaaatggaaatagaagtctgactcctctagttacaaaaaggagtccattcctgggatttcgggtattataactttccagtgacacaccattgtatctgccccaaacacacacaatcatacaaggggacgtgttgatcaaaagctgccccaaatacattcattggtgatgatgatgagggtaatgacaattctgctgcagcaacagctttacttaaacctatcccgatttcaggaccagagatcaaaacaccgaattttcttgaaaggtttataagaaactaactgattcctgtgactttttggcaggttacccaggatcacttcaaaagcctagcataatgaggagggccttgtgggctcaaaccctggtatggccttgccaatctgtccgaggagcaggcgttacacacacaatagggtggtggcatcttgggcctcaaatggcacccactcctcctgcatgcttctgtgccattaccgagcatggaaatcaaactctcaaaccccacagcaggggccctagcccaggccactgcagaccaccagtccttataaccatttcccactgagcaaggtaaataagaacccagggccagttggaatgacttctgtctgacttcattccggaatgtgtgtgacttatttataatcagcagcggcttttcctgggaaaggtctgatcccttcttgccaccaaaatggaatgtggcacttgctacagctggactgggcaggtatttgtttttctttgaagagaacaacttcagaaaacacgctgatcctcagggctgactgcctcccaaatctcacgcctggcatggccaggggccttaggagtgctaagaatggtggtattcacagagccctactgcctcgctgtccaaggctcagctggggcctgggttagctgaaaggagacccctctacccactgtcccgattcttgcagcctcagtacctgtggagtggcagaggtgaccaacacgctagccatcagaccattcctcttgtacatagtctccaggccacagggagcttcagggcagcctctgcaggtaacataacctgtctggagaagtcctgcaaggcaaaggggctcataaaaatcagtcttcaaaacaaatttatccccacccccaggcaaaagttgtaccagacttgagcagatcatctcagaggagacctttaaagaaaggtcataagctagtggctttcaggctaactatggcccacagatacagtttgatgggcttgtacagggtattaatatttttaaaattaataaccaacatttaaaaattggaagatttcacatagaattctgcatttctgacttttctggcaatactgggcccattttactgtatggtgaccatcagccagctgagtggtggctgccccttggattggagcagggcctttgagtccccagttagcttgtgcgaccatttcagtgcgtgcctggcccttgcaggcactagagtttgtgatctttgtcttatttattttgagacagggtcttgctctgtcacccagactggagtgcagtggctcaatcacggcttactgcagcctcaacctcctgggctcaggtgatccttccacctcagtctcccgagttgctgggactacaggcatgtgccaccatgctccactaattgttttgtggaggtggggtcttgctatgttgcctagctggtctcaaactcctgagctcaagcaatcctcccacctgggcctcccaaagtgctaggattacaggtgtgagccaccgcatccagccttgatttttcttttaaaccaaaggcagggtgaagaagacaagcaaattctcttgtgttcccctggcaccacacttcttcatccataataacctgggtaatagctaaccccatatagtaccatatgccatgcttggcatacattagctcatctaacccaaaaatcctgaagtaggtcctatcattacaccctattgcatgtggggaaactgaggcacagggaggcagatatctcattatttgatggctttgttcatgccaccctgccaccctgtcatcattcaagaccctgctcaaatgtcccttcttctggctatcatgcctgaacaacccaaaacagagccagctgttctgtcacccaagtgcacacacctctagaagagcatttaccacatcactgaacgcagaaagctgtggccactgacagctttttagtggcaagtgaccaggagagtaaggagggagttgggaggaaggcgaggagaggacaaagactggaaccaactgcagttatccaggcaagaggtaaggaagggcccctgagctgaggctgcggcagtcaagtcagaggggagagagactgagagacaggaaggacagagactccccaggcactgaagtggagggaggcagaagtaccagctgaggatgagatggtttttggcatgaggtaccagaaggatggtgtgtccttcttcaaggaaggaacagaggtgacatagcagatttgggggaaggatgatgaatttgatttgggaaatgccgaatctgtgatgcctatgtgaaaatcaatcctggagagcaagatctagcccaaaggtcactgcgaaaaatgatttgcctggataattgcagttggctccagtctttggaggtagctcaaaaagaagaaaaagtcagcctgatgatattgactccatctgcaaccctcccaggtccctcagtcacagggcctggcacacagaagtatgctgtcaaagaaacaggggtggccaggcacagtggctcacacctgtaatcccagcactttgggaggctgaggtgggcagatcacttgaagtcaggagttcgagaacagcctggccaacatggtgaaacctcgtctttactaaaaacataaaaattagccgggcgtggtggcaggcgcctgtagtcccagctacttgggaagctgaggcaagagaattgcttgaacccgggaggcggaggttgcagtgagccaagatctcaccactgcactccagcctggtgatagagcaagattccatcaaaaaaaaaaaaaggaagaaaggaaggaag

SEQ ID NO: 588784 - DNA, 4001 bp, Homo sapiens
aagtctcactccatcgcccagggtggagtgcagtggcacgatctcggctcactgcaacctccgcctcccacgttcaagcaattctcggcctcagcctcctgagtagctgagattacaggtgcccgccaccatgcccggctgacttttgtattttttagtagagagggggtttcaccatgttggccaggctggtctcggactcctgacctcaaatgatccacccgccttggcctcccaaagtgctgggattacaagcgtgagccaccgcgcccgaccctcttggaatgtggtaaaatcggggtctgtacttggatgggggcagagggacttccatagcctcaggcctgagctttatgttccagctcagagtcctcaccggggttggggtctaaaggtcagcaaacaaatgttctgctgcttccacttgccactgctccctgcgttgcagcagctccctcagaggcctcgcagagagaagcagtcacgatccaagacacggctgagtcttttgggaactcccaacaaaacctcatcccaaactgcgaaaagacagtggtctagtctcacctcttaactagaaacaaaccctctcttctttagactctccagtccctgaatccaacctgcccatcggcacaagaaaaaggaaactcataactttatccagcgatttgctcagtaggcactgtttcatcctatcctcaccaggcccctgggaggcacacaggcaggtactaacatgctcattttgcaacggaggaaacaggtgaaaaactctcccaggtagcatagtcaaaagcttctgaattctcatccctgctctccccacttaacaggctgccatttcagtctttttgagacgcactgctgagatctacagcagcttctggtaccagtggccagcaagccaggacccctcccaagcctcatactactcttcaagcacacacatttttcaacaaccgatcatccaatgacaaccaaccccccgccccccgcatcctggcaagccccttcaatagcaacaggaaagcccctgaggtgcgaaaaacagcgcgccccacttagggcgcggcgtagcataggggaggcaaccggccagtaaccagggcagctgagctccaagcccgagtcagcagaggcacaggcaggcccggacggcccttctagcggcagccccggatgcccccagaatcctcagggagcccaaagcccccgctcccacccaagcacccctgggcagcggagagggcggcctttccttctcgggcgaccactcaccctcgcctgctcctcacctggggccctgcttccgtaccgcagccacccgggccccgccccccaccgctgcaggtccccgggccccgccccccgcacctgtgctttccttgggtccagcgcgggccgcaccccacagccccgcccacggcagccccgccggccccgccccccgcacctgcagccgcggcgccccgcccaactgcccccccggccccgccccccgcgcccgcgcctcttccccgccgtccttcacgctcccggggaccagcgcgcccctggccccggaccccagaacccccggaccccggccaggccccggcgccgggcacccgcaggcacggccccggccccgcctcccgcaccgaggcccctccccggcttcggcggccctcggggtcccgccccccacacctgcagctccctcaggcccggcctcagggcccgccccgccccgccccgccccgtcggccgcgcctctcaccgccgctctccccgccgccgcagtcccggccggtcaccttgacgcgggccgcagtggctgccgccgcttcctcatggccctgggagcggcccagcggcagcggcgccttcgcttggaggccggggccacgccgagccgggccggggccgggccaggcgcagctggagcgcgggcagacgcgggagcggagccggtgcccagccgcagtaggaaccgtccgctccagggcctgagcggcgggcctctcatccaatcggcgcgcggcaccagaacagccccccaaccagctcgttgtaggggcggagacacgcaaatcggccggctggtcgtaccagtgcgcagccgctgcatccgcggtcctcccgggcctcggcctccgagctcatctgcagacgccctccccgcccgcagggatgctgcgctgccagcacacccggcccgccgcccgccacgcccatcccctgcctagaaatagccgcgcatcttattccccacacggccgtccaggcctcacccgatatcccccgtaaatccctacctgggatttatcgttttcaacaaaaatggttttgtgagcgagacatcgccttagtgcccattcttcacagctgggaggtaggcacagagcccagaacgtcagagccagaagaaacctcggagttcctggcggggcgggggggggggcggtctcatccattttacagctgggcagagttaggcccaacgaggtgaagggacttgcccaagaccacacaggagcaaagctggggaatgagcccggatcctgtctctctgctcccacatctttactctgtgccaggcacggtgaggtgggcacagaggttaagtcatttagctagagtcgcagggataataaattgcaaagacaattgaagccaggtctgtgaatccctggaaatctggaaccacagcaaaactccgttctgcctcccacagacaggaggtactatgacctgccctactccgaaagattcttggacaaatagaacatcattctgacaatcttcaaagtaattttgcagtaatatgaatgaatatggaatgattggttattatgcttcccaaagcttatgaaaggaaaaaagaaacaaacaaaaaagaatataaatagagtcagtagaagttaaaccacctgtgtcttaaaagacctctgggagaagtttctgctattttgtattaagaaaacggtaatcatcgaagaaggtgcttaattattttgcataaagagaacaagagcctggcgagttggctcatgcctgtaatcccagcactttgggaagccaaagcgggaggattgcttgagttcagaagtgtgagaccagcctgggcaacatggccagaccctgtctctaataacaatacaaaaattagcgaggcgtggtggcgcagactgtagtcccagctactcaggagagtgagatgggagtatcacttgagcccgggaggtcaaggctgcagtgagcctcaagtgatggcgccactgcactccagcctggatgacagagcgataccctgtctcaaaaaagagagagagaccatcctggctaacatggtgaaaacctgtctctactaaaaatacaaaaaattagccgggcgtggtgcggacgcctgtagtcccagctactcgggaggctgaggcaggagaacggcgtgaacttgggaggcggtgcttgcagtgagctgagatcgcaccactgcactccagcctgggcgacagagcgagacttcgtcccaaaaaaaaaaaagaagagagagagagaacaagagacagtgtagtgcaatggttctgccctggctctgccaccagcaagctgtgtacatgtgagcaagttacttagcatatctatgtgcctccgtttctttctttttttttttttttttttttgagacggagtcttgctctgttgcccaggctggagtgcagtggcacgatcttggctcactgcaacctccgtctcccaggttcaagcaattctcctgcctcagcctcccaagtagctgggattacagacgccagacacaccatgctcagctaatttttgtattttagtagagatgggttttcaccatgttagccaggttggtcgcgaactcctgacctcaggtgatctgcctaccttggcctcccaaagtgctgggattacaggcttgagccaccgcgcccaacctgcctcggtttctttattgaaagatgagaatgataaaagtagcaacctct

SEQ ID NO: 588785 - DNA, 4001 bp, Homo sapiens
acatcctgtgtgtctaagagagcaacatcaggtttagctgaagcagtcttaataagaggctcgataaccagtggaaggtactgttgaaaatcttttccaagaattttacacattctagcccatgctgaaaccatgtaagaggtctgagggtcatcatcttccatattatttaagtctgattgtgtcttcaacaacagctgcatcacatttgatgcatcttgcataaatttttccttcccaacagcaagaccaatatggctaatgcactcgatagtttttcctctcagaagcttgagttccttctgaacagcaagctcaacaatgtgctttagtgagggcatgaatatatcataatatgggacaaatttttcttctattgtatctgcaactgatgcaatggttgtcacaagttgttccaaagccaacttagttccattccgaatcaactcttgaagtttaatcaccaagacggaatgtagatttttcaccatactatccacatatagaactagcaatgatttagggcagtcttcaataaaaataataagagcagaagctgcatgtgattgcacacgctgattaccttgattttccatggtacgtaacagagctgcaatcactgtttcatgaaatttcttttggaaattaggtgcaaaatctgtagccatctgtccaagtgtagtacaggctgcagccctcacccttggatgaggatcctgaagaaaaagcaaaacggagttaactgtttcatctagaattgattccatttgttgatggcatccttctccaatggcagataaggccattaatccagcatgtcgatacttccagtcagggctctgaagcatctgcatgatatgctccttggtcattggtaaaacaacttttccaccaagcccacaagccagtctgtctagtgcactctccgcagcaactgcattgctgtcaaaatcatcttcttccatttcatcagcatttacccagtcctcatcatcttgtagatcaaccatcattgctaatatatgaggaactgcctgtgcaataatatttgtatgttttttcaacatcggagtggcagtttcagacaaggtcactataacttcgagggccagctggcgctgcagattactaagcctagagtctccacataacttcaaactcaactgtagagtatcttctaaataaggacccaagtacttaggtacggtatctgcaatctcaacaagggattctagcactgaatcatcatcctggtagcatgagtcattcacagcctgtaagattccaggaagcaagtctgcaaagtctttgaaaagagcaatattattctcattagcaagtacaaatgcagctgcagctctagcggataatgtcctgattgctggatgttcttgatcttgaatacactggtccaacaaccgtttgatgatatccaaatcatgccgctcttgggtcccaaaaatcccaggaaagtgccagaaaacgtgaagtgcaacttcccatagaaccacatttttggagtagattgaatcaataagaaacttcagaccttccggccagtggttagtgccatcctcatctatcaaattcctggccagcactgcaaaaatatcacaaagttttttcctcatgctagcatgtgtttctaacttaacagccagaatcagttcaatcttgacatctctctgaacatcagcaggcagatttggataaacctcctcaaacccagaggacaaaagccgtcgtagcagtgcggcagccatttgtctcacctcataacctgctcttctatttctgacggcatctaagaggaaggtagtcttacacagacctgggatattttcatagatttcctctgcttgcctccgcaccatacagcttggattgatcaggttcttcagaagctggtaaaactcttgcttttctgacacggtcgccggcacccctgcagacgcggttgccgccattgcgctctgtcaaagctaccgcgaccgggaaggagggagggggtctgcggctcgaagcagtgacgtaggcgaggcgccggcggggatgggcggggtgcttctccctcctctgcccagaaactctagctgcgctctggcaggctgcgagctaggttttggagagaggtgagagccgtgtggaggccaatggcatcctccatttgtttttcaataagataaacgtgcacttgcaggcgagagaagaaaagcattgattagaatgggatcatgactttttttttttttggatacaaggtctggctgtgtcacctaggctggagtatagcggcgcgatccctgctcactgcagcctcaacctcctgggctcaagcgatcctccccgcctcagttcccccagtagctgggaccacaggcgcgcgccaccacgcccggctaattgtgttttttatagagacagggtttcgccatgttgcccaggctggtctcgaactcctgggctcaggtgatctgcccgcctcggcctcccgaagtactgggaatacaggtgtgagccactgcttctggtcagattatgagtgatttttttcttttatttctaaactatattgttactttgataattttaaaacaataagtctatcttgaaaacatgccaagtgaaagaaaccagtcacaaccacatattgtatgattccatttgtatgaaaggtaccaaacaggcaaattgtataacagaaattagtggttgccagaggttggggggaggggaggatagagaatgactgctatcaaatagggtgtttctttctgagtgatgaaatgttctaaaattaattgtgatggttgcacaattctgtgattatactaaaaaccattgagttgttaaatttaaattggtgaattgtatggcatataaataatactacaataaagctttataaaataataagtgtgataataaaataataattacttccccactaccacatctaatgcagtagagtggtagctcaaaatctggtgtgtgtcagaatcacctggcctgttggttataataaagaatgggaaagacaactgagtaaagtatggtagaaagtgatctgaactaataatcagaagacagacttgcatcctggccttgtcactaaattaattttgtatcctaggacaagttactcaagattttccttgcatcttgtctaaactgaaatatgaagggatgcggttaactagaatcctaactaaccattagtgggaagctgctgaggttattccaagaaacaaatgttgatgaaactaaatttgtttcttttttttttttttttttttgtgagatggagtctcgctctgtcgccaggctggagtgcagtggtgcgatctcaactcactgcaacctctgcctcctgggttcaagcaattctcctgcttcagcctcctgagtagctgggactatgggcgcatgccaccacgcccagctaatttttgtattttagtagagacggggtttcactatgtttggtcaggatggtctcgatctgttgacctcgtgagagatcacccgcctcggcctcccacagtactaggattacaggtgtaagcaaccgcgcctggccagtttgtttctttaattcaggcaggtgtgtcaatcaaaaacaagtttcattcctataacaatgattaggtcttacttttgtattagcacttgccacactcattttgacccttatacagaattgagagattgctaggatagatataatactaaatttaggtgagaagtggaaactaagggaagttacaggatttgcctaggatgacacacctgagtctcaattctacctcttctgaaagtgacactgatgctcttttcaccatattgcttccccattaactactcttggttttgcagcatgatcagaggcttcacttactgcaaattctgtcttaaacttttccaagcagccttaattttgtttttgtaaagtgctgccgcatatacccacaaaaattagaaagtcgtagcttttacattaa

SEQ ID NO: 588786 - DNA, 4001 bp, Homo sapiens
gagcctgatggagccggtgctcaatccctgatgaatgagggatggagtaatgagtcaatgaagggatggggcaaaggtttcaaagtccagacaaaaacaaacaaacatgaatcatttctccgaggaggggatgcaaacgcaaatgtcaaaagtccaagtgggccgtcggaggtgtggctggctgtgggagtggtgaggggctctgtgggagtgtccgccacctgactcctgcccatagctgccttgtaggcaggaacaagcgctcagagttaccagagattctcatttttcaaggaaatcaggaaccaggcttttgagatttttgagtgacttcctgatttttcaatattgaccatcaattcttttgtttttttcctcaagaacacgtgcggatccaacccaacatatctgtggactgaatccagcccgcagctgccagtctgtgcttaagctccaaaaacatgacggtatcaactctcctcgctcaatgtctttattggaagatatatgagcaaaaagaaccacagtaactgcttgcacaaccagaaccatgttcatttgttctccaaagcagcctctaaacagctgcatacatctcccatcagtcttccagaacaaatccctctgagctcctagggaagagcctcttctcctctgcaggcctgcccacaagctcaccctgggagctccctaatctgtccagctctcttctactccctacctcctcgtcatctctagaagcactgtagagtttagaaagcctcccctgcatcccagcttgttcctggccctccaaattcaacctttctccaccaggcctcacttgacaggcccccaccagcccagcaagttgtccctgtgccaccctctggcccagactgtcttgattccccatggcacttgggacccccaaatgtgaggcctatgaccttgtgtattctctgaggatatacataggtatggatgaacccctcaaggccctgccccagccaggcactgctgcatgagaaagaaaatgtcccaaagaacagcaatgactcaaaagatctcccccaggggttaaggagagtcctgcacaccaaggaggtatcaggcaatgcaagggggcgggatgaggaacaggccagagctgcacactatgcgggatgtgaaggggtttcctgtttacccaaaaaaccctggatgccttaagcactgagaactaaaaacgctggttcttctactttcagggagaggagattatgaacatatttaagcaacgtttctgttgctttgagataacaaaacagcaaaactccaatcacaacaattgtttgcctggtgtcaggctctgccaccacttcacctaagggcctctcctctgaatcaaatactcctctggagactgaatagtgggaagtccattaaaaaaactccaacagaaatctaacaaaatgtcgtctaaatgcaaagggaagttcactgagaatagccagcagagaccaccaggaaaggtcatcctcactccaggcgcgccccagtcttccttggcagttgtaatctttcactatgattcctatgaactgcagcaaaagaccttctgcaaggaggctggacttccagccagctccacatctgcaatccccaatctgcaggcgaggtcctgaccctggtcttgccaatctcagaactcttactttttctgcttctcacaaaatgcatcttcctcccacactttccgcagctcctggtcagccccttcccctctctcctctttctccctgtctccaccaggtatatatctcagccctctcttcagagcctagcacaaacactgtcccctccagtgtcttcctcattcccgcactcatgacacccctctctcacctgtgtccatggcagcacggtcgctcggtctggcagcctgggtagcttagaaactgtgctaggttagacaagcttctctgggagcaggcactttcatctacaaccccctagcagaaggcggtgcccagaaaaggcccaaggacaaactatgctgaaatgaactggcctcaggtctttctcccaaatagcagagaactcaaatgaagagtcatttcattcccagcggtttgggcagctcatgggatgacaggcaactttttcctttttttaaaaaaagaggcccagcgcggtggctcacgcatgtaatcccaacactttgggaggccgaggtgggcggatcacgaggtcaggagatcgagaccatattggctaacacggtgaaaccctgtctctactaaaaatacaaaaaaatttgccaggcgtggtggcaggcgcctgcagtcccagctactcgggaggctgaggcaggagaatggcgtgaacccaggaggaggcggagcttgcagtgagccgagatcgcaccactgcactccagcctgggcaacagagcaagactccgtctcaaaaaaaaaaaaaaaaattttttttaaagtagcaatgaggtctcgccattttgcccaggcttgtttcaaactcctgggctcaagtgatcctcctgccttggccttccaaaatgcagggattacaggcgtgagccactgtacctggctgacagatgatttccaatccggttcattttacttttctgtgatttccaagttttgacaatgaacatagaatattcttatattataaagatataaaacataatataatcttatattagatataaaaagatataatataatcttatatattataaagttcttataaaagaactcagtgaatgttctttttaaaataaattatccaagtttcccaacagtaccgttctgacaagacactatacaagaagttcctgagaaatgctgcacagatgaacccaagttatttctggagcagcaggtgtacaggatggcgactcatggtcactcggcaaggctgtgggggctcaaattcagtgagaaaaatactcaagaaatggcacctgaacccaagcgccctgcccctgagaaaagcaccctggcttctggtcagagggccaggaatgaatatactaggggcctgccgccctcttgctgtctggacagccggaactcactgaacctctctgagcctgtaaaactgggaccatattctttcccacagactagcttcaaaaatttaagaagcaatgcattttaggtgctaagagttagatatatagtaaaccctcaataaagcctacaaaaatgtccttctgtgcttcaaccacagcctgcaaaagtcatattgccttgtgggtccgctgcaggggtgcaccccacagaagtatcccagattcaacccaggaaacataagcaacttccacaatcaaagccacagacctcctttgcagctccctaaaaatctgctttccctcattcagccgccaagctaacctgctaccggggttatgaccacagggcatgctcccagtacaggagcccaggagcacccgcccacttcaccttagacccaagaattcgcatttgccctgcaaggtgctgcaggctaataaagcctggggccccacaggctcgacagtcattgaatctttggagactctatttccaggacaggcaaacccagggactcggaaggtaactcccccagatttctaggaacacacaaagagacgaggtctgcatcaagatttaccatctactccaacccaccggtcccccacctgccctccttgcagagctgagcttgatcggggtggggaggggaaacttgactacctcctcaaaatacccccactcatccagcctgcttcctttgaagcaaccgaagtggacgcttctcgttaaactcgaagctcgttagaaatgacacattttacagctcagctgggttcaccctcctagcgccgagcccaggccgggcaccgatcgctgcagccgcagcagcacgcggcccgggctgttcttcccctgcttggggctcgagccattttcggaagttcccggggaccgcggagcggctagcgcgcccggccccgggttgcaggggcc

SEQ ID NO: 588787 - DNA, 4001 bp, Homo sapiens
agcatgactattcaaaaaagcacacactcctacatgactcagcaccgtttcacacataatcacatgagcaacagttcctcattataatccaccatggagttcatattcaaatttcccgaactgtcccccaatgtctttaatagccgttttgttcaaacttggatccaatcaaggattgctaaggagtaccctttccaaagtaacatgttagacaaaagaatgactcacagaaagtcagaagggctggaacctgacagtaaattagcatcccacctactttctttttaagagaaaatgatctatgatttgacaaacagcaactgctcttaatatttccatgcattttcttccagttatttgttttcttttcataaacacacccatatatgcagttgtgaaaaaactgtcttgctactgatcaaatgctaccgcaacttcttctggcaagaggaggcaaagacctggtgaagtctcgcatatgtcatctctggcatgcctgccagccggccggtctcctgggtcaataactgtgataaaaggccgctgagtgcgtcaacagactgtcctgcactgagacactattaaaggtccttgagctccaaatgtaccactgcactgctctgtggccctgccaacttcctcctcctcaagctgacatgaccccaagccctagagagacagagtaggtgttaagagaggctgttgtcccacttcctgggtgtccaggatggataaatgaaagattttacagaaagtaccttgaaagtactttggaacttttggaagtgctatatatttaaaagctgttaataacattatctaaatcaaaaaatatcacaaaagcctcaaactcctagatatcaaagctttgacctgggatatttctttttctttctttcttttttttttgagacagtttcactctgtcacccaggctggagtgcagtggcgcaatctcggctactgtaacctccacattctgggtttaagcgattctcctgtctcagccttatgcctgtagctggaaatacaggtgcccaccaccaggcctggctaatttttgtattattagtagagacggggtttcgccaggttggccaggctggactcgaactcttgacctcaagtgatccgcctaccttggcctcccaaagtgctgggattacaggcgtgagcccctgtgcctggctgacttggaacatttctaaaaaagtaaaaatgttcagccaggcgcggtggctcacacctataatcccagcactttgggaagctgagacaggtgggtcatgaggtcaggagttcaagaccagcctggccaagatggtgaaactccatctgtactaaaaatacaaaaatcagctgggcgtggtggcgggtgcctgtaatcctagcaactcaggaggctgaggcagagaattgcttgaacctgggaggcggaggttgcagcgagctgagatcatgccactgcattccagcctgggcgacagaacgagactccatttcaaaaaaaataaaaattttcaacagacacatactgcaccaaatgaaacatctcgagctgaactaaactctcagccaaaccaagccatcatattgagagaggaatcatcttattcctcaggagaattgtgaattttcttgaaatcatgttggactacctgtgctttctgctctggaaggtgattccccaggcacttcagctctgctgctgggccagtctctcagagaaaactgcctccttgcttcttcctggaaaggaagcccagggctttcttaccttgtttccaggggtacagatgacttcgtttcaagggcttctgtttttcaatagcattgcccattttaaagccagaggacacagggcccttcccagccccagcgtctttccggagcagcaactgaggaccgagtcactggctgaaaggggatatctcttggacatcccaaaccacccagcggcagaacccaggcagcctcacaagggaagcctgaggaatctcattctcaagtctttgccttctgcctttcaaaatccctttggccccagggaggaaatcagaagaaagggcttgttatcgccctaccggtgcctctcaggcatggtctatattaagaagctctttcctcagcatccttttgacactttattactcatcagcacaacagcggcttgcaagatgaattttatgtccaaatacttttaataccacttttctccgcaggagaaatggggaatcaggtgatcaaaatgctgaaagtcataaatgaaccattctggggcatgccaggagaaacattttcatacagacccttatgccacgccttctatttcagagtcccacgctcagaccagtgtgcaccacgtaacaagtactgtcagagaaaacaagctgatttcactaatgctgtgtttccaagggaaacacaaaacgaaacaaaacatcaaaacactgctacacctcagtctccaaagaagaaaacaccttggggacaaatacagctaagaatttataaccccaagctccaaactcccactgcactttgggaacaattttgctggagaaagtgctacgctacctaaattctgaacaaagggttttctagaagaaaagaagggaatgaaatcaatcacatattcttggtaaaaaggaagacaatgtcgaggtggatgaaaagatttcatttatttcagtcccagagtttgaggttataaaagcccctaaagaatccccacagcataatatgggtaagaatgcaggctctgagccgggcgaggtggctcacgcctgtaatcccagcactctgggaggctgaggtgtgtggatcacttcaggccaggagttcaaaaccagactggccaacatggtgaaaccctgtcgctactaacaatacaaaaattagccgggcgtggtgggacgaagctgtaatcccagctacttgggaggctgaggcaggagaatcacttgaacctgggaggtggaggctgcagtaagccgagatcacaccactgcactccagcctgggtgcaaatactagctcttccccttggctttgccagttgagcacagcagcctcagtttccttatctgttaactgggcataattccagtctcacctcctcagctgtaataagaatcaaacaaaagagaacatttgtgaagtacgtagcatgctgcctgacactcaggaggtccctggtgaatatttaactttttttttttttttggagtcagggtcttgctgtgtcacccaggctggcgtgcagtggtgcaatcatggctcactgcaacctcaacctccctggcccaagcaatcctcctccctcagcctccaaagaagctaggactacaggtgcatgccacctcgcctggctaatttttaaatttttttgtagagacagggtctccctatgttgctcaggctggtctcaaactcctggtctcaagtgaacctcctgcctcagcctcccaaagtcctgggattacaggtgtgagccactgcactgtgcctattatcaccttttttttttttttgagacagagtctcactctgtcacccaggcaggagtgcagtggtgcaatctcagctcactgcaacctctgcttcctaagctcaagtgattctcttgcctcagcctcctgaatagctggattacaggtgtgcgccaccacacccagctaatttgtgtatttttagtcgagatgggggatctgccacgttggccaggctggtctcaaactcctcacctcaagtgatccgcccgcctcggcctcccaaagtgctgggattacaggcgtgagccaccacgcccagcccttcatcacttttataattgtagacggaaaatacattagcttaggtggcagatatctggcttcggtcaatttagtcaaaagcaccaaagtaaatttattttacagagttggatggtacaaaatgggagcaagtatagaaccggagtaatatttgggacaacattccaaaaaagacccacagaacca

SEQ ID NO: 588788 - DNA, 4001 bp, Homo sapiens
ataaagagtataggttgtagcagtgtttaaattttgctacttccctggttggggagtaactcatttgtaaataacagaaaagatcgttacacacccactttctctacacaacccttctatggcagtgagtcactctccatgcccaatattccccttactttccaagctggagggagaagttgggaggagaaggaagtgagggcttccaatgaacaagcacactgacaaccttccagggatacttccttttcaatgttctgtctcagatgtgcaaactgccaaccaaaatgatgcctttcagagcgtcttaataacgacagccagagctcagcaaaatttcagctaaaatccaaacataaagcagaaaaacacttaacagcactgaaatgtgtgtatcgctggggcatgaagtgaaaaatagcagctggagacacccaccacaccaaggcatggacaaatgcaaacgaaactcaaaaagaaaatctgagcctctctccctccaggccctgaaatcccacctgcaggcatccccttacctcctgataattaagtccgtgacttgacacgttatttctgtcagagcagtaagagcagagaatatactgtgtcattttatcattttattccgtcacataaaaagtgagtttttcagttcacaaaatttgggtcaaatctctgctgtttaactgggcaagtcccttaacgtctgtctaatttctaggtctaagttcagaaataagctagcctaccttctagggatgttatgaaaattaaatgcgtgaactctgtaaaatgcctagcaggtacatcaatcaatatttgtgtccagcaatgtaaaagcccaacaaagtttccttttctatagtcttaggaaaacgacaaatcagaaaactattacagaggacgccaaattggcaaacagcccgggccccagccctggggtgagagcctaaggcctggggtagaaggtgacgtaaccaggacgcggtgagatgtggcgcgcgcgcctaaactcgcgcggggcgccagcagctgcagatttcaggagagctcctgtaatgaacacgccgccctttgcaggctcaggattcagcacgtaaaactttctccccaaacgctgactctctgactcctttttcttaactctagcggatcttggaaaagtcaaagcgagtaggtgaaggaagacaagcaactcacagagaagactaggggggggggccattgggtctgcacacctgcaagtaagtgggaagaagcaagcaggaagcgccagaataacctcccgcccccagctcacactcgcacctgggaatgaacttggcttcgtccccaagtcgcgcctggaaatcctgccaagcccggccgggactcgccgggccgcacgaggtggccagcgccgccgccgcgtcctcgtcgccttcgtcctcctcgctgtcgtgtgtctccggccccgcctcagacacggcgggcgcgggatccagaggaccccagtcccggcgccgccccccgcggagggacccgaggaagccacgcgcgaactcctggaaggtgatggcgccgtcacggtcggcgtccagccgctggaatactgcctcggcgtcggccggccgcacccgcagctccgtgcacagtgcccggaactcctcgcgctccaggcgccccgagcggttcgcgtcgcaggcggcgaagactgagcgcagccgggccagctcctctccgtccccatccgcctccatcccgcctggcgggggcggccgagagggctccggagcgccgcggggcgcagggccctccctggaaggacggggccacctgctgccgccgggaggcccggcgagtttggctcgtccggctggttcggccacttgagggaacgtcgggcggggcgaggaacgtcgggggtggccgagcggctcccttcgacgacggttcgggccagcccccaacaggtcccgggagcggtggggtgcgcccgggctccaggcaccgccaaggagcgcctcctgcgactgagcgcccaagcgccgaggtggctctcgccactttcccggcgggtgcagctccgcccagccagggaggaggagcgcgcgccaccgcttctccagttcccacgccccggagtccaccgctgcttgccgcgcaggtgggggagacctggctggccggaactgggattcggggggagcattgcccttcggcgtaagcgctgctcaggtagagcccagcgctccgcttctccacagaacgtgctggcgcgcgcgtcagaagctaaccgcacagaggtaaggtaggtaggggtaggattccgaatgggttaagtgcattttattatcttactcccgaaacttgataaacttctttatatagaagtttcttacaaaccaaagtacaagatttaccagaagaccccattctcaattttactggctttcgttaacgcatttttgtgcgtctaacgttaaggtcccactgcttaaacacagatcttccagatctccaattccacattttttctcaatccttgtctccaaaacctgagaaaaaatttgataaacaaaatcgtttggcagacagcattgtttaaacaaagactgaggtcgttttgtaggtttttttacttaaacaaactttatggaaattacatatccaaaggtaggttaccctttggttttaaacacttttttcgacaatactattgtttctttaacactgcttaatggatatgagatctttaaaatccacccattttgatccttttaaacactttttccatccttttccaggagaccctcagtctgtcatacggcttatgtaaccgtgcctttaggcgattctcatagcctgtgaagatatatttggctcatttttactttatttacattatccatttcctccacattttagactttctgactctgtatttttcttttatctcattctggattctctttatcgtttattactttgattttttaaaaatgtgatcattaagtaagggatattactgacacgttcctactaggctagtgttcttaaacataaagctaagtgctaaacatctggggaactatttcctcttgaattgtacaataaacatggtcaacactaacagcttctattaaactgtaactactactgataacccccatctgaaaatttaactggtaaattatgagaggcattccattagaagtcctggtcttagcaacctaattgctaagtgaatatagttgtatacagttggacagctaatacaatgaatcttatcattagtgcaatgtaagttgttattgattttgagcttatgtgctttcctgtttattctaaagattgatttttccatatgaatttaaaagtagctggcttggtaatgcctttaaagctttacaaatatacttattaaactaaatctttgaactattattatatttatactgttagcaactaatggatatctatgtctttaaaaatagatgctttcatgtttttaactgcttaggaagaagtgcttttttgaagattgcttgcacaactttattcctgaatttttactctgacctttgtgctcattttttctgaattcttatgttctgtgacctgctttgccctttccctaagccccttcattgaagagtcatcaagaaacacgaattggcctggcacagtggctcatgcctgtaatcccagcactttgggaggctgaggtgggtggatcacttgaagtcaggagttcgagaccagcctgaccaacatggtgaaagcctgtctctactaaaaatacaaaaaattagctgggcgtggtggcgggcacctttagtcccagctacttggatagctgaggcaggagaatcactcgaacctgagaggcagaggttgcagtgagccgagatcgcgccactgcactccagcctgggcaacagagcaagactatgtctcaaaacaaaaaacacaaaacaaaaacaaaaaacacacaaattattccaaatgtcttgtgcatg

SEQ ID NO: 588789 - DNA, 4001 bp, Homo sapiens
gtgagccaccatgcccagcacaaactgtggcatttccactggaagttatttctttctgagcttcagtttacccatctttaataaattttgccctgtttataacttaaggcttcgaggaccaaaaatgagacgacagatgtgaaataaagctttaggggctgggaggacagcaggctgtgtcagagttcagaagtccctgctagagaacacatatcctatacccagaagtacctcagaggtcagcactacaggaaccatggaggcagtcacaacaactgccattacctcttaatcatctcagcacaccctgtaaagtctagcacagcagtccctaggtaattgtttattgaataccctgcacatgagggtatttttcttcctttcccattcacatctttaatctgttcagcaatgtaagtcaagcaactaggaactgttaaactctgggctatgtactgaaatagacaaatgaaaaagccacagctcttgttcttacctcctgggagaaaggtgaaacagacataaatttaatcccaggggagacacatttttgtcttccctctgctttcctttccccctactttttaaacaaatcattcattcaaaaaataaattcactgcttctattatctaggacttatccagttactggagtcagagcagtgaacaagcaaggtccctatcctctggatgcttgtatttggaaggggagcaggacaaaacaaaagcaaaataaataaagaagatataattagtgatacatgccacaaacacaattaagcagggtgatgtgacagggactcgacgactatagattgagtggagggaaggcctctctaaaggagatgacatttgggacttgaatgataggacattctgattttctcatgtctaaaatcaggaataataccaatagctattaatatttattaccacgaaaaggtaccatgttttactggtaagagtgcaggctatgcgggtctgggttcaaatcctgacttttgcacctagtaactgcacctttagcaagtcacatgacctttctttaagcatcctctcgatagaaaagctttcctaaacagagttccttgttattctatatcatagccacttttccatctttttcctcctactaaatgctaattcaatgtattacttaatgtttcctcttctatttccttcactagaacgtaagctcccacagcacaggaccttgccaatcttgatcacggttctatttctagcacttaagtacactgcctgtctcacggttggtgcttaatatttactaaatgaagcaagccgcttctccactcgaagacttagtttctttttccttcctagaatgggtacaatttgtcgtctcacgaggtcgttgtgagtcttaaataagacaattttggtgacagctcagaatatggctttttgaggaaaggtaaagggtaataaaagatcaagacggcacgggactatcaaaatgctttgcgtttgcaatagcaacaatcctttagactaccagagttcacaaaacgcggttacatttgtctttccagctgagctgcaataactctggaagccagaaatagtcatctggggaaagtgcaatccagagaagaagagacacctgatcctaacagcaagcggtggggtcatgcctggaaccctggcttcccgatttctggctgcgaattcctacaggcgaagggtcattactcggattgttatttccgggccagcgacaggacaatccggggcggggcctgagatgcagtcctgcgagggcggcctcctgtaagacctcttagcgggcccatcgctgaggtgcagggacatgtcgcggccgaactcacctcgtggcctcggcgtggtgctctcagctcatgcccggaaaccaggtcccgacgccgcggtcagacggacctctagacgcgtccgcctcaatgccgccagctgccaggccgcccgtgacgcgttaagcctgcgccgcctcctggcttcgtgacgtcacgacgtccgcgcagctgcggtcgccgccgtcgcacgagtctttccttagtaacctgggcgatagctggtgagtgtccttgacagggcctcgaggggcgcgtgtggtctgggtgccagagacccttactcagggacctctgggggacctcaggggaccagactaccgtccccgacccgttcgagtccagcttgacctttaaggctgagggcgggacctgtggcattggagcgagtctcatggggtgggggcggggctccttttaccagctaggaatttaggggatgctggaggaacttactaaagagtagccgcacacttgacgggaacgtttgagtttcagaacaatcccataggagtagatattattatctcccataatgaagaaacggaagctcacataggtaattttaccagggtcacgcggtcagaaagtgagggcgcttaaattcagacctagggctatccgactcctaagcctggacttttaaccaccactctgtgccacccagtggcaaaacagttgtcatttcagtagcccttctccatttacttaaccctgacaaatagtattgtcatttacgttttacagatgagacggaagtcctgagagtttgaccgatttaaggtcacgtgcctaggaagtgctggaaccaagactcggagttttctctaagtttagtgcctttattttgttttaaaccacactgttgcatttccccccattttggaaagctttatagttggaaagaatgaaaacctgatctgaccccttcattttatggttgaaacaaaatctacgtaggagaaatcacttggtacaagtcacaagtcagtggtagagctgccgcaaatgctttttgaatacgtgtgattatgaatctaaatggcagatggcagggagtgataaggtaggcatactggaatccagatctcttaactcttaggcaaaagccctttctctacctgttaaagtgtctcattccttctttggccgtgccaggtgcataatgattctgtgtatagtcagatactacaagtacctttctttacctggtactgcatttagagaagaacatcatctactatctctaagcaaaaatctggcaaaccagagacagtggaggcaacgctgggaagcccagaacctaccataatagtaagggtagattcccatccgattctggtttaccctggataaggaatttatctttctggactttcactgatgtattcatcacattcacagtgtcttctgtgttctggcaatgtaccaggtactggggatacagcagtgaacaagaaaatcatagattagtccttgtagtacttagagtcatatggagggaattagacaatcaaataattacacaaatgttagcttgtattgttaagaattaagtgctatgatgaagtaaagggtgctatgaaagcagactacaggacacttgacctagttgggctgtaggagatggccaaggaagccgtcctctgaggaagtgatggttaagctgaaatctgaaataaaaacggagacaaacagttaaagaggtgagggaagatcatcaaggagattcaatggcatgtttgaagaccctggagcagggggagccctggagaagtgaaagatcacttttcttattttgcaaaatacgggtggtgattatcactctttagttatgagaaccagttaagatggtacatgtgaaagtattttatatgcaagagcctgcgtatatgcacactcatagaagtgcttatgttataagctagtatacagctgcattgaaaagagttgctgggacagtagataagccaggattttgggttggtcatctagccaaaattaaaatgaaccttctgtgaagaacagggaaatcgtttgagaccctcaactttggaaaaagaatgtgtgcttcaagtagtttaaaaaaatatttcagtctgtaatctcagcacattgggaggcccaggcgggcggatcacgaggtcaggg

SEQ ID NO: 588790 - DNA, 4001 bp, Homo sapiens
tccatcactaaaaagtgaaacttcaacacggtacaaactaaacagtaagtagttactaaaaccttgttatgaagttttttttagcgttcttagctattgcaaacaatgtagaagttcaacttttgaatataaaatcctgagtgtaaagaagaatgctttgccaaaatgcaaatttttggttttttcaaagtggaagacagcaaattacaaaagcagagtatgatttaacaaaaatatatgaacaaaggacgtaagtcttcttacatgtcaggttaccacaacagaaataacagatcaggggtaactcaaaggatccactaatgaacacgagtgtaattaaatcctcatagaacaagtgcctgtttgaattataacatctgctttttctaaacgtaactagaatatgtttcacattctgtcctcctagcaattttccaaactctaaaattttgaaaacattaatctccaaatcaacgaaaatgtcaatattgaaaagcagtctttaacaggatgtaacgacctctatttcttcaaaaattgaacgtggaagtaaacaacgtaagaaaggcatgtgaagctacaacagtggtatagctttttagacagctaaaaggttttttaaaaaggagaatctattaatattcttaatatcgtaaaaagcttttaactaagtttgtatgtttaaccattaaaaggctgcactggctaacatttgtttctttgcttttgagtgactttataccactgtggtatagcaacgttagctttctcaggttaaccaaaagttcctactggaacttaaaagtttggccaatacaaaattggaaaaaagattacttaaagcactttatttgggatacaaactcacccacccacaatgggtagggggagagtagaaatgaaaaaaaggaaggccgtgggtaaggggagaggaggaattaaaaagggaacccaagggttatgaaaatataaataaatcactggattagatttactttatgccagtgattacttgagtcaattttggtgtgaaggatttatctgccggtatcttaaacggctgccttgggatttgaaggatggaaatgacagctaccctcatcttctcccatcctgaaagctaaggatagaaaaaagtacagctgcttctctgggaaacaaagatgctttctaccattcttctaagatggtggaagagtctcctcaagaggctacaccaaaaaggaaaaatgagagagggaaagaagaaagccatagcagaatttcctggctgtgtttcatgccattgctcctagccacaacccctgtgcaaccactcaggtccggccgtccccatcctgggaggttaagccctcccagggcattgtttggccggggttcctatttaccactcagatcgcctccaccaccctctacgctagggtctcgggaagccccagggcagaaagctgaaaagctaggagaagacttggtttcgaggacctcttccaaacccccttactaactggtgtagaaaagggagagtgaagccgggcctttgcttgggtgggttcgttaggggtcagaggcgtccgctcggccagtgtcgaaggaaggtggccatttgagccggtcgctccgcatcgaaaaagccctaccagagagaggggcctccgcagggcccgggttccatccgagtgtcaggtgcggccctcagttcccaaccctcgaggcaccaggggcgacagcgcacaggccccagggctgagactggtctcccgcccgaccgccggggaccaggcacccgggctggggcccgagccgcatcgtgcccgcccccgccctacctgagggggcccgggcggggtcgctaagggccgctcccgggagccccgcgacggcgcggcttggcgacggaggcgcctcgtctcgccggggcagagctcggcggaggtttcacgacctcaaactccatcgggagctacagggacagccccgttggcggcggcgaaggccgcgacggggcctcctcctcctccctccacctccgcctcctcctcctcctcctcctcaccacggaggcggacctggagggatcccgatctagctctcgcgagaagttactccccacttaacgcgagattacgcaagcccgggagtcgggagttggaaggaaagcgtagtagccccagccacccaaactgcgaatcaacttccctctgcctcagcggatccaccccgatcacgtgacaagggagccccggagcactgtgggaggtactgtgagaaggactaggcaagccgaagggattgatgggaaattccctgcacattcatctgcgccttgagccggcttcctagacgctggtttgagcgagtgtcttaactcccttcgtgaaaagcgtggaatccattgagcagaatctgatacatctgtgtcacattcttcttcacactcctgtgatgacatgccgacaggatccctcaatccctttacaaagatgtcaagtaatctccccattacaaaaacaagaagaaaacatgtatttggcaggcacttccacatctcacttctttattaaagagaaaactctgtttctagacaaagagtccaaagtgggggggggagggggggaagaaagctctgagctcctcaaaagctggcaaaaataaaaaatttaagcacaaattctggcatcatatctcaaatatttgttgaagctttttacacagcgaactaaggtaagaattattcttacagtttataatttatagatgaaacagacttggaatagggatatcagaattaacatttataaactacttagtatgtgtcaggcaggtcctgtgttaggtgatatttaattttaaatattttagttttatttacatttcatttaattagcaaagtgatcctagaagacagatacaatgtaccccttgttactgatgagaaactaaagaatgtaggctagaaaatgaccatgacgccgggcgcggtggctgatgcctgtaataccagcactttgggaggccgaagcgggtggaccgccaggtcagaagttagagaccagtctggccaacatagtgaaaccctggctctactaaaaatacaaaaattagccgggtgtggtggcgggcacctgtaatcccagctactcggggggctgaggcaggagaatcacttgaacccgggagacggaggttgcagtgagccgagaccgcgccattgcactacagccaggcgggggggcagtgccagactccgtctcaacaaaaaaaagaagaaaaaaaatgaccatgacttgtaattaaactcaaggcactttccaatgtgaaatcagatgcccaacaacaaaaatatcgaagtaaacctacgataaattagaatatggaaaggttgcttctacagttttaacaaaatatatagttattacctattatatttgtctgaatgacaggcaaaaatcagtgtttttgaaaaaagattcattggccacatcgaagacgtttcttccacacattatctttttcgttctcttctctttatgaaacatatgccaggcctagagaactgttaacaaccaataattgtttcagtaatttcaactggacagtgataggtaatttacatgtacatatttgttttccaccctactgtgtatatatatatatacacacatatatacatatatgcacatatatacatatatacatacatataaatatatatacacatatatagatacatataagtatatatacacatataaacatacacattatatatacatatatgtacatatttttttttttgagacggagtctcactctgtcacacaggctggagtgcaatggtgtgatctcagctcactgcaacctccacctcctgggttcaaggaattctcctgccttagcctccccagtagctggaattacaggcacccgtcatcatgcccggctaaatttcttttttgtatttttgtagagacgggttttcaccatgttggccaggctggtct

SEQ ID NO: 588791 - DNA, 4001 bp, Homo sapiens
agctcatatgtgtgagatgctttgaagagatgctcacatacagtggagggggagaaggagaagcatactttggaacattaaatattaaattggaggccacctgtcaatagaaaaactctaaatagaactagattcattttagagaacccaggtttccaggctatacttccatttctctggaaaaaaaaaaaaaagttatgcctacttttatacaaagtagaagtccatcttcttaccatatccagctagtggcaagttctctgagctaacctgagggtaaagtggatggagagctggctgagaatgccacacagcaatcaagcaaacactttgcccaagggtcaaactaagtggaacacttgttgacggaaaagtcgtggcataaaccatttgtggtctctccctaactttctcagtgtttttgagcagtagagagaggacaggaaccaccaacacaagtttttcctaccatcactaggtttctcaccactgtacctgggatattctgcttctttccttcctaacctatctccgtcaatagcatggcatcttctgccctttatgtgcagccaatcaccacccaagagaggcagagatctaactatccaaaaaatgcattcagacagataaaacaagagccagtgcaaaatgaaacacatcagcgccgctcaggaagcttccaggaccaaccacaaacactctttttcaatttacagacaggttttttcctttttcacctgactactgactcgcccaacttgggataaccaccagtcagaagcttttaaatgcatgtatctcatgccagggggccaggtgtaaaccaaggccagttgaaaaccggcgccatttaatgagatgtgggtttaaatgggcctatttctttttaacctaccattgcagagcaagaagtgagcttggaagcctgcagtttagcgattgtcaccgaccccttttctaaagtcaaggcaattaggcccatgactgttaaaagtctatctcaaagctcctgtcctgcgcacatcaatcacagtcacggctgaaaacaaacacagaattttaaaaatttctttatccacacccaaggacaagtgtgagggcagccgagaaatcatggcgacaggaacagccggtgtccaagggggcagctgcttctgagaactgctttgagacagggcagagaaccaacccaaggtacttttctctcccaatgtctctcccccggctcattcaccatatttcggtccaacaaactgtttttctcctttgagaggtttatggcgagggcaagaggggccgaagggacgcgaaggggcgacgccagggatttgttgctacacgtaaagctggaaaacgtgcagctgtttactaccagcgccccggagacgccgagcgcagcttgcagctgagcgctcccctcgggccccgaccccgcctcccccactgtgcctgcccctccggctttggaggcgacgcgccacctgccctccccgacgcgctcgccggacgccgagccgcccaaccaacaccgcgcgggcccccacggcatcagctcggtctcccctcagcccccgcgcccacgccgcgcgccgcccacaccaagttacctcggaggcccgggttgtcgtctctggcccgaatctttcggattttgacggggcgcccgctcagggtagacaggaccagacgttggcgcaagaagttgcaccctgcgtagctgagggagtgcgcctgagtcgccatgtgcgcgctctccgaagagacgtgagcagcccgagagcggcgacttcggacagacgcgggactcgtgactccgatggtggtggtggcggcgacaccgacggcggcggctcgggctgcctccagcagcccagacgcgtccacgtggtttggaacaggaagacggagagactagacaccgggtcagaggggagcggggcggagccagtggccacctccccgcctccccgcccgaccggggcggcccccgcttcgggccacgccgctattggcccgcgccggatcagggcggtgcccgcgccgcgcctccattggcttccgctgaagctgggcggtgcccaagccgcgctgccattggtccgtagtggagctgggcggtgcccgggccctggcaacagcgcgcggctggagggaacgcgggaggatggccagggaaccccggcgcgggagttgccagtcggggcagtctcctctgtgtacctcctggcgtggtagcaaggggagatggcggactgagattgatgcctacgacgtgccggattcttagcattactacttacggcaactactggggtgaagatgctattatctacccctcctctttcttactaagagagacaacaagggttggtgcactcaccctatcgcagggatgccgctcagcgcactgccggcgcagtcccgcagctccatgctgtaaccctgcaaggtagagccatcctgtcctactcatggataaaggctcgaggaatattgcaaagctgacagtggcagcctatactgagacccgaatcctcccacagcaggccgttgcttattttattgagacacctctttgcccctttctcacgggtcccttcgtttatcgtcattgcgtttcatggcaattcaggccctcctacctcgcatgcttcaagatagatagttgtaataacttcacacacacacacgcgcgcaatgctttttccctctttcccgtcctcctccaatcctgcacaagaaaatcttcccaaacgttggattatttcacttctctactcaaaaaccttccaaaatgtacagttaactaacaaatgactacacaagtagaagtccgatatcatagtaatgtgggtttgtagccattcctggacaacactcaccaaaccatgagtcccagaatgcacgggggttcgcggggggaaggggggcggggtatgatagtgtctgaaagcggtgggagtttaagattaagggatgtagctagccttatgtagacaacagtgtgttataaagtggagtggagtggcatgctcatgactcactgcagcctcaacttcccgagttctagtaatcctccaacctcagcctccccattagctggaactacaggtgtgcaccaccatgctcagctaatttttgtattttgtatagacatgggtttttgccatgttacccaggctggtctcaaacttctaacctcaagcgattggcccaccttggcctcacaagtgtgagccaccactcccagcctttaatccatttttctttgatttttgtaaatggcaagagatagagatctagtttcactcttttgcatatggatatccaattttctcagcatcatttattgaagagactgtcctttccccagagtatgttcttggcaactttgtcgaaaatgagtttaccgtagctgtgtggatttatctctgcgttctccgctctgttctactgatctatgtgtctgtttttatgccagtaccatgccattttgtttactctagctctgtagtataatttgaagtcaggtaatgtgattcctccagttttgttctttttgcttaggacaggtttggctattctgggtcttttgtggttccatataatttttttaatttttaatttttgtaggtagatggtacatgtatatatgaggtacgggagaagttttgatacaggcatgcaatgtgtgataatcacatcctgaaggatagggtactcatcccctcatgcattttattctttgtgttattatacaaacaaaacaattatactgttttagttatttttaaatgaaaattaaattattgttgactacagacaccttgttgtgctatcaaatagtagatcttattctttctaatttttgtacacatttattatccccacctgccccccaacatccccaccccctctatgttttccagtctctagtaaccatccttctactctctatttccatgagttaaattgttttgattgtttgatcccacaaatag

SEQ ID NO: 588792 - DNA, 4001 bp, Homo sapiens
ttgtttccactgatgaagagagatgctgacttacacttagataacaaaagattttaaccctatactgttatttactcagggtggaagaacctgtccactttaatttttttgttggaacagagtgcagatggaatttaaagcctaaagcattgtgtattaatagataaaggttttaattccccaaggctaggaaccagacccttagcttccagctctagccactgggatgctttccatgtgacaggcactcaagaaatgcctgttggtgacaacggcaataaggcagaaagaaattaattctgaaattgttcttcctctggctgcgcaacctcagagctggcagttttaacttcaactagaacaggcatgtgaaaaagctgcagaaacagacttcaaaaacacagatacttacttcccagagttgactcctttcatgtgatctgtgtaaatatagatatcaggtatgaacttgttgaggatgctccttgcagaatccacaatccggttcgccatctgaggtgacacacgtacagagtacctgcagcctggagttaaggatgtcattctgcttgaattccaggacagagaaaaatcagttataaagctggcaagtatttgtggaactgtagtaacaaactgggacttccaaatctattgttttccaactgaatttactgaattagtaccataattaaatttttttcattattataaaaggtcatggcaaaaacacccaaacaatagagacagtggaaagtataaagctggaggtcctcaaccccaccccctgacttcctacccacacgcttcccctagaaatggttcaagtcaattttggaaggtgtaaagacacctgcctctctgcgggtcatgatccaggctccctctgaagcacaacacctaagaacactttctattctctgtccattcccactgctgtagccaatgagtctctctcttaagaacctaagcccagaacagacaccacacaggacctgggcgatcccaatctgactcctggtatgctgatgggagaagcagaaaaagttcagtgaaagaacatggttgctgctatttataaatatataaaaaggtttttctcatttacagggcctattttctactatttaagaattaattactccacttgtggataacacagcctcctcacacctgctaccttatggttaaaatattgataattagcactcctacaatagggcaccccagaaaagaaaggaggaagatattagtaactcaagtgaaaagattggtgcttgaggaaatggaaattattgcctaaaactagactttataacagaagctggcattccccaaccacacatgtcaaagaaaaagtaagtatgtattgagcacttcaatgtgcaatgtatggtcaagagatggctatatatttggaactaaaaaaatggagaaataacatgtgaccttcccactaccctgatacaaaccccacgtgacaagtccaacaggtagaacgaggtatataatctgcccaatccagcccaatgttcaagaactgctgacaataacatatttaattttcatctgaactgcagaaacaaagtgctcagagacgatacatgacctgatctggtatctagctcccttttttgacccatcctgaacttcatactaaaagaccaatcttcctcatgctggtgacagtctctcggtggctcctggtcctcccatatcttgttgttagagcccccagcctgctcagttgtgtccatcttcagctctgcaccatcaactccttccacccatccaaactgaccaaattcctcaacctgagctgctttgccccattctcccagcccgaggtcccaatctctctcctgaaaccctccagccggcacccaagtgttagctccacttgaacttaccatacatctctcttcacatatgcacattttgttcttgctcttcaatgagaccacacactctataagggcaagggctttacctctgtaatccctcccaactctccaatacaccacttttgtactcagaaatgctcaataaatatttaacttgactcaaaggacaaacctgaaatgaggaaagagcaaagagggatttttcaatacacacacagcccagttacatcaccatctcttcagtccagaatgtacttttgaccacagacagcttagacaaacagtcctgaatctcataccctttggaccaagcaggtgctgtccttctgaggtctgaggctgcccactgtccccaggaaagcacaagagatgtcaccatcctagcacataatcccacagagctcacggctcccaaagttctttcacatctattatcaccttactttatgctcacagtaaccctgtgttgagggccatggctccgagttctaggacttacattaaagacaactaagacaaaaaaactaagacacttgctcaaaattaaacagatctgactcccaaaaagcatcttcctcctctcacccatcccaatacaaaaacacgaaggttaacaaacagtacgaattcagggcctacagaatcctatactagaactcaggcaatgaaatgaagaaggcaaaggaactttaaagccagttgcttagaaccatctggcttggcatggatgtcctactaaggaatggctaacagcccccaagttctagaatcagattatctccgttcaagtccaagctccagcaagctgcatcactccaggttaattgtggtaacttctctgtgctgtcatttcctaatcagtaaaagaaggataatcataacactttcctcacagagtttggaggcacaaatgaaataaaatgcatgtaaagctcttaatgcctagtgtgtagtaggagcccaacaaatgtcagctattgcttttctttattacttatccaagattcaaatcccaagcagaggttcttattctttcaagaatcagagaactctctgagaatctgatgaaagctatggaccctctcctgagaaacatatatactcacaatcttgcagaaaatttttcaggtttatgaacctcctaaagcccatttatgaaaaccatattaagaaccaataccaatgtacaagtccatagctacagtccatatgggactcccactcttccccttccccaatgttccatgtcagagaaagctaagaggggtgtgtgtgtgtatgttacagtaggtggagagagagcttgattctcaaagtacctttcctacagtcaaggaaaagaaactagattatcccacgaattccaacttatccccctttactgccagctttttcacttaattctcatgtaccaaatcatgagctcctaggacagcactgcaaaactaaaacagaatgttcctttctcttacgccccacataaggcaggggtgagaaagagtgggtggcattaagtaaaaggtaactactgtgtagtcacagctgctggcaggaaccaacaccagctccctctgggccctggctggtaggtcatcttgtagaacgcaagagggaaaagatgcactttggaagtaattcagttaaaaccacaaatgcacacaagagagtgggcctctttctcccagtctgagccctcccatgggaaatacaacctccaagcttagtccagtagtcaaccagccttgcaaggaaaaaaaccacaaaaccaactcaagctttttccaaaggcagctcttttttcccaggctccaaaactggagaagagggcgatctccattcaaaccaacattcctttgaggtgtttgtgaaatgggcagctctgcagagcagtggctgaaatgtttggttaacagacagggatctgagaaagggcactgtgtcaactctcctggggagccaggaggaagcctcaaccagtcagagatatattggggatgatttccatgtcctatcccctgcctccagggagggaggaacttgggacctcacaagtctcttcctggctcagattctacacagggaaggttccaagaacat

SEQ ID NO: 588793 - DNA, 4001 bp, Homo sapiens
atctaattttagaacattttcattactcccaaaagaaacttcatactcattagcaatcactgccattcccccagcaaaaaagtttcttgtttttttttttgttgtttgtttgtttgttttaccacaggaatccttggaccctttattgtgaatctaatgtgttttgtgaatttataagacagggtaccatctgcagtatttcccgaacatacttaatagctaatatttcactgcttactacgctaaatgctggacatgtattacctcgattctcataataaaatctgtgaggtaccatttataataaatgtggctatttgagcacaaaaagattaaagctaagtaatttgctcaatgttcttaaccactccactgtactacctcctgcagaactgactggttgtgggaggagaatggacaactagtatttcataattttgtaagtgtttcagttcaatctcttttaatttaacagggagaaaaatggggcccaggaaagtaatctgatttagccaagaatacacagcattttctcttttattctttgggatagtttacagctaaatttgaaacctagctatagttaatacccctgttggaactgactttgatttttttttgagacagggtctcacttccgagggcagtggcatatcactgcagcctcaacttcccggggctcgagcaatcctcgtatctcagcctcgcgggtagctggaacaacaggcatacaccaccatgcccggctaatttttgtatttttagtagaaacggggtttcactatgttaagcaggatggcctcgaactcctgggctcaagggatccgcccgcctccacctcccaaagtgctgggattacaggggagagcctaccgcacccggctgactttgctttttttttttttttttttaaggtgtctctgcctgtctccctgtaagcaatgcacttcaccacttttgcatgcacacgtcctagccatctttcaatgtctagtacagctagggggaatcactccactttccactcatcctaggtcgatgtcctctctccctctgtgcactcatacatggcccttcatttcctctggacatttctgccttgaattcgagttacttcaatctcctgctgtaccccatctcctaccgagagagcttttggacggaaggagtcggcgtgcactcaaaaggccagcaagcgggaagcaatcaataagcacttaacagtttcctatccatccttggtttagttcttgtagagcaagaatttctctcctcaagcctgccagcccccgggggacagggtttactgatttttaatgtctcctgcccgagtccaggacccaccacgcgggctgtggggaccgtcagtgctcaccgccaccaaggtcgttatgaaccaagtgcgggtcaagtaacaagtaacaataactaactagggccgcggtagggcggctgcgtatccgaaatcccatctaaacctcgcgacgatcctgggcgggggcatcgcacccttttctgacaagcagcagaggcaagcgaaggggtcagtgccgaagagggggcccgtgtcggtgggtgacagaccaaggcctcaaacccgagtcaccgcccagaagatcttggggcggagagagttcctcactcgccccgcctcggcaccagcctctggagcgctgagacctggggtcccggggtcgccggacgtgggcagggtctgggggtcgcgcgcacccccgccccctgccccgcgccatcttggagcgctgtggcggccgctcccgacagcttcgaaccgttgctctggaggttactcacccgcactgcccggagccaggccccctgccacctccgcgacccccgccacggccagcagaaggagcagcgcacctcgcagagaggcccggacggtcgccatgtccgggccgggcggctccagagccgcgggatgctcggacccagcttggccgcagccgctgccgccgctaccgccgccgctcgcgcgaggccccgcccccagcgcccggccctttggtgactggctgcggcccgctcaagccccgccccctgcctcacagtgtttccaaaacctcccgggggcgggaacgtgccccgtaccagggctctttgttatggcccaactgtgtgtcggcttctgccaggagtccaccagcccacgttctcccagagtgaagtcagaggatgtcagagctgggagagtcattagaaaacctctgccacctcctgaggtttcgggccactgaggtgagagaggagactgaccttactcaagatcacactgcaagttcacctgagaacaagggcttagtccaaggccgaaccaaaggggcttctctccttcatgtaccctcagtaatactcgcaatattctttctgccgagacgctgcctcgcacccaaagaaagcatgtcacccgggatccttcggcctcccgcagacacggccccctgacaagggttcatcactagagctctttggcactatagcctcaatgtgtctttgttgtactttaaaaattatttatttatttatttaggcaagagtcgctctgtcgcccaagctggggtgcagtggcgcgatctcggctcactgcaacctccgcctcccgggctcaagcgatcctcccacctcagcctcctgaatagctgggaccacgggcgcaggtgaccacgcctggctaatttttatattttttttgcagagaaggggtttcaccatatttctcaagctggtctcgaactcctcgcctcaagcaatcccccagcctcctcctcccaaagtacggggattgcaggcgtgagccactgtgcctggccttgatgttactattaagcacctattcctgataggaaaagaggataggagaacgcttgtatacctagatgtggaaagccttgaatatccggctgagaagtatagactttgtccaagagacaagttggaagtgggtcccaccccacccatcagcccagcagctacgtggagaatgtttaagccactggctagcaaagctaattcattgtctctttttttctctgtgtgttcctgaattaaaccctttttcctccttttttgaaaaagcatgaccaccgttttaaattctcatgaagacacctggggctaaattacttaaaacatttttaaaattccttaatattattaaatatccagtcattatttacatttttcttattgtctcatgatttctttttacaatttttcaagttctaaacaaaatccatatattaaagttggtttttatgtttttgggctcttacatttatcctctctttcgagtttacaaaaggaaaacatgaataagttaaaatatctaaaacatctcctctgatgactctgttgcttctgtgtacaaggtaaactgaggcacaataaaattttaaagtttacttcagcacgcggtgattcatgaattgagaagctgcaaaccagaagtggttctggggctcagctctgtcgaagaagcagatttttacagagtgaatgggaaagtaataaaaagaaaatatttgattggttacagttataaagttgccttatttggtctatcccactaaaaagcctctagttatacaagtttgtggactacttctgattggttgagcttgttctgtttttctttaatatatgcatttacaagaaatagctcagattaactcaagtaagtttaaggtcacttatgaggactaaattgactatctgctcaggaattctgcagacctggtcttcattttaatttattttaacaattcccctctgagagtaatagtaccactattgacacagtcactgggccaaagagtcatgatgctatcattattaacagttgcggctgggcgcagttgctcatgcctgtaattccagcactttgggaggccaaggtgggaggataacttcagcccaggagtttgaggccagcccaggcaacgttgtcagacccccatctcaattaaaagaaaaaaaaa

SEQ ID NO: 588794 - DNA, 4001 bp, Homo sapiens
aagcatggtgccagcatctgcttctggtgaggccgaaggaagcttcccatcatggtgtaaggtgaagggggagcaggtgtgttgcgtggtgagagagcaagcaaaaaaggtgctaggctctttttaaacaaccagctctcaaatgaaccagcagagtgagaacttactcgttactgaggggagggcaccaagtcattcatgagggatctacccccatgacccaatacctcctatgggccccatctccaccactggggatcacatttcttttttaaaaaaactactttttacttttatttagagatggaatctcaccatgttgcccaggctggacttgaactcctgagctcaagtgatcctcctgcctgggcctcccaaagtgctgggattacacgtgtgggctactcgggaggctgaggcaggagaatcactggagcccaggcagcagtgagctatgatcctaacaggaggtagctccaagggagctccaagggatgtggtaagaatgtatgagtgacgcacgtggaagagtgtctaggagagagcaggcaacctctacagaagtgcaggtcactagggagacagcaggtacaacacagccttaaaagcatggactccagagtcagccacctggttcccagccgcaatcttagatgatctatttaaacttttccagcctatttcctcatctgtacaatagcgatgatggaagtgtccacctcacagtcttattgtggggattgcaacacgcatggcatagagcacatggcagagtgcacatttttaggagctcaattagtatttacttcaagaccgtaagtgtcgctagaaccccatcacatgtctgctatctgcttttcacttctacacaggaatcttctttctccctgtcttgctacacagaccagtgtgttctttcgttgttgttgtttgagatggagtctcgctctgtcgcccaggctggagtgcagtggcgcgatttcggcttactactgcctctgcctcccgggttcaagcgattcttctgcctcaggctccccgagtagctgcgactaccggcgcgcgccatcacgcccggctaatattttttgtacttttttagtagacacggggtttcaccatgttggccgggctggtcttgaactcttgacctcaggggatctgcccgcctcggcctcccaaagtgctgggatcacaggcgtgaggccccgcgcccggcctggtttcgggattttaagctaaatttctctttgtaaaatccattctagttagttcattatgcaaaaggtacaagggtttatctttgcttttttgtacttgaaataattctttcatcaatttctttcaagcaaacaagttcgagacctccctcaacaggccacctttcttgtgaaaagctgtttacaagatttcgattcaaatctgcctttacaggtcttttggggctacccaagtctttccctccgtcgcgttctgcgggaatgagctgcgcagcgctccgcccgggccccctcaagcctcacctcttgcagcgccttccagttttgagaaaagtcttctggtgcctttggaggtcgcaccacagcaccggggccgcttgctggcttcttgcttacttcccgcgccttgcttttccaaaacctttttttcttcttgtttttcttccgagtgagcgtcttgacaggacccggcttagccacggggctgctcggggcgcgcttggaggcggggaccttcgccttccccatcctgctgccgtccagcgcctgggccggcggccacccgagaccccggcctccccgggcccggcgccctggcagcacaagcgcctgcccaggccaggccgaaacacacccaccgcagggaccccgtccaggaaaagactccggaagagaccccgcacgcgttgcgcatacctcagcacgcacgctccagtccccggaagcgctcgtctctccacaaccggctggaaaccggatccctgcctctggttccgcgcagcctgggcggttcacccgcacgggacttgggccgccgccttagccagcggcatccggggtcatcgacctcgagtttgactggggcaagccgaggacctccccaagatccgggatggggatgagagatgcgaacgccggaagggaactggggggccgctgtgtgtgtagcacctggtagggcagctgagctgggggcactgggcggtggggctagtgagagccgggctaggtcgctcgcctgcgtcctggactctcgagcctttcccgccttgggctgctccttgctcagcctcacagcggctcatcttccacgtacagtggggaaactgaggcccaggcaccgggaggagttcctgccagttcactctgtagcaggacgagccgcagacaagaacccctcagacaccgaattgtagaaggaaagggctttatttagtggggagcatcggcagactcacgtctccaaaaaccgagctctctgagtgagcaattcctgtcccttttaagggcttacaaccctaagggggtctgtgtgagagggtcgtgatcgattgagcaagcagggggtacgtgactgggggctgcatgcaccggtaatcagaacgcaacagaacaggacagggattttcacaatgcttttccatacaatgtctgaaatctatagataacataaccggttaggtcaaggattgatctttaaccaggcccagggcgcggcgccgggctgtctgcctgtggattttatttctgccttttagtttttacttctttatttggaagcagaaattgggcataagacaatatgaggggtggtctcctcccttacttctgccgcctgggttcaagcgattctcctgcctcagcctcctgagtagctgggactataggtgcacgccaccactctctgccaatttttgtatttttagtagacctggggtttcgccacgttggccaggctgtcttgaactcctgacctccagtgatccatccgcctcggcctcccaaagcgctgggattacaggtgtgagccaccgtgcccggccgggagtgggtagatttgatgtgcgtgtgtaacaggcagaggttgatggagtaacagggaagtgaggctcctaggattttggtctgagcaattgggtgtggccatttatcatctcaataaatgtctgcggggagcagggtgaagtatgggggtggagccatgagctccttttcacacttgctgagtttgaacgggccgtcagtcaccaaggagagacgtctaatcagcagcaggatataagattcctaagcttagggaagggtcagtgctggagatgtaatttggaaatcgtcagcacataattagtgttgaaacatgaacctgggttagttcatccaaagagagagtaccaatatagggagtgaagggttaagaccagatagcaggtgctgggggctctccaggggcgaagcagcagaggaggctgagggggagcagtcagtgcagtgggaggagaagcggatgtgagtggcatcagagaatccagggggagaataaaccacatcagatgctgctgagaggctgagaaggacgaggacagagagatgggaaccagatatggcactgagattgtcagcaagtccaccgaaaagggttttctttttttttgtttgttttgagacggagtcttgctctgctgcccaggctggagtgcagtggcgtgatatcggctcaccacaatctccacctcccgggttcaagcgattctcctgcctcagcctcctgggtagctggaactacaggtgcacgccaccatgcccagctaattttttttttttttttgagacgaagttatgctcttgtcgcccaggctggagtgcaatggcgcaatctcggctcaccgcaacctccacctcccgggttcaagtgattcttctgcctcagcctcccgagtagctgggattacaggcatgtgccaccacgcccggctaattttgtacttttagtagagatggggt

SEQ ID NO: 588795 - DNA, 4001 bp, Homo sapiens
gtgtgttgcgtggtgagagagcaagcaaaaaaggtgctaggctctttttaaacaaccagctctcaaatgaaccagcagagtgagaacttactcgttactgaggggagggcaccaagtcattcatgagggatctacccccatgacccaatacctcctatgggccccatctccaccactggggatcacatttcttttttaaaaaaactactttttacttttatttagagatggaatctcaccatgttgcccaggctggacttgaactcctgagctcaagtgatcctcctgcctgggcctcccaaagtgctgggattacacgtgtgggctactcgggaggctgaggcaggagaatcactggagcccaggcagcagtgagctatgatcctaacaggaggtagctccaagggagctccaagggatgtggtaagaatgtatgagtgacgcacgtggaagagtgtctaggagagagcaggcaacctctacagaagtgcaggtcactagggagacagcaggtacaacacagccttaaaagcatggactccagagtcagccacctggttcccagccgcaatcttagatgatctatttaaacttttccagcctatttcctcatctgtacaatagcgatgatggaagtgtccacctcacagtcttattgtggggattgcaacacgcatggcatagagcacatggcagagtgcacatttttaggagctcaattagtatttacttcaagaccgtaagtgtcgctagaaccccatcacatgtctgctatctgcttttcacttctacacaggaatcttctttctccctgtcttgctacacagaccagtgtgttctttcgttgttgttgtttgagatggagtctcgctctgtcgcccaggctggagtgcagtggcgcgatttcggcttactactgcctctgcctcccgggttcaagcgattcttctgcctcaggctccccgagtagctgcgactaccggcgcgcgccatcacgcccggctaatattttttgtacttttttagtagacacggggtttcaccatgttggccgggctggtcttgaactcttgacctcaggggatctgcccgcctcggcctcccaaagtgctgggatcacaggcgtgaggccccgcgcccggcctggtttcgggattttaagctaaatttctctttgtaaaatccattctagttagttcattatgcaaaaggtacaagggtttatctttgcttttttgtacttgaaataattctttcatcaatttctttcaagcaaacaagttcgagacctccctcaacaggccacctttcttgtgaaaagctgtttacaagatttcgattcaaatctgcctttacaggtcttttggggctacccaagtctttccctccgtcgcgttctgcgggaatgagctgcgcagcgctccgcccgggccccctcaagcctcacctcttgcagcgccttccagttttgagaaaagtcttctggtgcctttggaggtcgcaccacagcaccggggccgcttgctggcttcttgcttacttcccgcgccttgcttttccaaaacctttttttcttcttgtttttcttccgagtgagcgtcttgacaggacccggcttagccacggggctgctcggggcgcgcttggaggcggggaccttcgccttccccatcctgctgccgtccagcgcctgggccggcggccacccgagaccccggcctccccgggcccggcgccctggcagcacaagcgcctgcccaggccaggccgaaacacacccaccgcagggaccccgtccaggaaaagactccggaagagaccccgcacgcgttgcgcatacctcagcacgcacgctccagtccccggaagcgctcgtctctccacaaccggctggaaaccggatccctgcctctggttccgcgcagcctgggcggttcacccgcacgggacttgggccgccgccttagccagcggcatccggggtcatcgacctcgagtttgactggggcaagccgaggacctccccaagatccgggatggggatgagagatgcgaacgccggaagggaactggggggccgctgtgtgtgtagcacctggtagggcagctgagctgggggcactgggcggtggggctagtgagagccgggctaggtcgctcgcctgcgtcctggactctcgagcctttcccgccttgggctgctccttgctcagcctcacagcggctcatcttccacgtacagtggggaaactgaggcccaggcaccgggaggagttcctgccagttcactctgtagcaggacgagccgcagacaagaacccctcagacaccgaattgtagaaggaaagggctttatttagtggggagcatcggcagactcacgtctccaaaaaccgagctctctgagtgagcaattcctgtcccttttaagggcttacaaccctaagggggtctgtgtgagagggtcgtgatcgattgagcaagcagggggtacgtgactgggggctgcatgcaccggtaatcagaacgcaacagaacaggacagggattttcacaatgcttttccatacaatgtctgaaatctatagataacataaccggttaggtcaaggattgatctttaaccaggcccagggcgcggcgccgggctgtctgcctgtggattttatttctgccttttagtttttacttctttatttggaagcagaaattgggcataagacaatatgaggggtggtctcctcccttacttctgccgcctgggttcaagcgattctcctgcctcagcctcctgagtagctgggactataggtgcacgccaccactctctgccaatttttgtatttttagtagacctggggtttcgccacgttggccaggctgtcttgaactcctgacctccagtgatccatccgcctcggcctcccaaagcgctgggattacaggtgtgagccaccgtgcccggccgggagtgggtagatttgatgtgcgtgtgtaacaggcagaggttgatggagtaacagggaagtgaggctcctaggattttggtctgagcaattgggtgtggccatttatcatctcaataaatgtctgcggggagcagggtgaagtatgggggtggagccatgagctccttttcacacttgctgagtttgaacgggccgtcagtcaccaaggagagacgtctaatcagcagcaggatataagattcctaagcttagggaagggtcagtgctggagatgtaatttggaaatcgtcagcacataattagtgttgaaacatgaacctgggttagttcatccaaagagagagtaccaatatagggagtgaagggttaagaccagatagcaggtgctgggggctctccaggggcgaagcagcagaggaggctgagggggagcagtcagtgcagtgggaggagaagcggatgtgagtggcatcagagaatccagggggagaataaaccacatcagatgctgctgagaggctgagaaggacgaggacagagagatgggaaccagatatggcactgagattgtcagcaagtccaccgaaaagggttttctttttttttgtttgttttgagacggagtcttgctctgctgcccaggctggagtgcagtggcgtgatatcggctcaccacaatctccacctcccgggttcaagcgattctcctgcctcagcctcctgggtagctggaactacaggtgcacgccaccatgcccagctaattttttttttttttttgagacgaagttatgctcttgtcgcccaggctggagtgcaatggcgcaatctcggctcaccgcaacctccacctcccgggttcaagtgattcttctgcctcagcctcccgagtagctgggattacaggcatgtgccaccacgcccggctaattttgtacttttagtagagatggggtttctccatgttggccaggctggtatggatctccagacatcaggtgatcctctcgcctcagcctcccaaagtgttgg

SEQ ID NO: 588796 - DNA, 4001 bp, Homo sapiens
atcagctggaagattatctaccacttgctcaggaaaattagctaaacaacagaagaaaatattttgagtcttacaaatttcgtattaaatgcctgtagccgagtgcagtggctcatgtctgtaattctaggactttgagaggccaaggcaggaggctcatgttgagctctggggtttgagaccggcccgggtaacatagtgagatcttacctctattaaaaaattagctggggatggtggcctgcacctatagtctaagctaccagagaggctgaggcaggagggtcagttgagcccagcagatggaggctgcagtaagctatgatcgcactaccactgcactccagcctgagtggcagagccagattctgtctcaaaataataataagaaacaaacatttgtaaaaatcacatgcaaggctaatgtaaatcattacattcacaagactcctacaactttgcctgtaagtatcaatcccatccttccattttccggctcagatttccctctcctattcatgtgaataggttatgaataaagtaccaggtaagtatataaagctctccaaaaaaatccatactctttgagtaggatgcaaaaaacaagtaccagagtagatggattttttcagatctgttctttcctaaccaggtactgaatcacctgaaaagtttctttcttttttttttttttttgagacggtgtctcactctgtcgcccaggctggagggcagtggcacgatctcgcctcactgcagcctccgtctcctgggttcaagcgattctcctgcctcaggttcccgagtagctgggatgacaggcacgcgccaccatgcccagctaatttttgtatttttagcagagacggggttttaccatgttggccaggctgatctcgaactcctgagctcagatgatccgcccgcctcggcctcccaaagtgctgggattacaggcgtgagccaccacgcccggccaaagcttcttatttttcaaatacacaagctcaaggctgacttaacaagtcaagacgcagctctggcatgtatttctaaggatgaattacagtcaggtctcgattattgaaattaatgtagacagaccaagaaggttagctgactctcattcaactacctatgttatcatttggacattacataattacaaattaaaaacaaaaccaccttagacccggcttgcgagttcagccgttctggcccacgttacgtctctaatgggcaagacaagcgcaatgcttgaccaactgtaccttggctggccaaggaggcgtgaacggggaatcctgcgattcatctcgggcttccggccctcaccacccctcaaccccgtccccgcggagctcggagccagaagcagggacaagctccctcaaccgagccaacggtcctccgccacagacaaggggatgcgggaggaggaagggtgtgctctctgcccgcggtccggaggccccacgccccggtcccaagtccccggctgccgtctctccccgctccccacgtgacccggcccgggggactctggccgccctgctctcacctgtggggatgcccagctgcttggagccgcggccgaagccccgcaccacttgaccccggcagaagtaaggcaggtgcctcataatgcagtccgctcggggaatgggctgcggcccggtctgcgcgtcctgcggagccgccgtcgacgcggcgcccagaccccggaccagccgggggacaggagcgtgagctctgcctgccgcgggggcgcaccagtggccggacgacgccgaccacaggccactgcgaatccctgacgccgccgacccaacaaataccgccgggcgcctgaggagctgcgtctccgctggagggcagcggagacagccgaagtaagtgccgggtgtgagcggggtggggggagggggcggcccgaagcgcagagccggcctccgcgccgccggcgtgcgctcccttcctcagccgaacgcctcgagcccgctcggcttccgtagccccgccccatcatggccccgccccgccgctgcctcgcccggctcccgccgcaagctcccgctgcaggctcccgccccaggcgcctaatgtctggatcccgggcttcgtttcagcccctggcgatgggaactaatgtggaaaccccgttttcagcctgagagccgcgaaagcacaattctcgaacaattctggtttttttttctccttcctcctgttcataacaatccggaagccaaagtgagacgctctttagctccttggcaaccgctgggttgaacgtcaggcatcgctcgttccgttcgctctttaagtatttattaaagctccaaaattcagctcaaagatcgcctcttcacagaggcttttcctggccgccctaccagaagcggtcgtcctccaggaccactgaccacgttctggagttattaatatattcgaatgtaagctccaagggagaagtccctgtctgtgacgctgttaaccccagagactagtggaaggttaccgacatgggcggtgactgtcccctccaggctgtcttcttgacaatttcacaagcccgataacaggccgtccctctactgcaatgcagatagaggccttcgtaccctcggaactgtaaatacgcacgctcctagggaagtagctctgggctcactcacaggatatgcagggtgcaaggttataagaaggtgcatcctcttaacgtctcgaagacaaagaagttttttatttatttttttaaatttttaatcaatggaatccagagaagtttaatttttttcttttttgctctatacatttgtataaaattctgtgcagaccgtgtagtctctttctaccttacatgtatgcatctctgataagatttacctgatattaaatttatgttctaggccaggcttggtggctcacgcctgtattcccagtagtttgagaggccgacgcgggaggattgattgagcccaggaggtcgaggctgcactgagctatgataacgccactgcactccagactgggcgacacagtgagacaccctcaccccttaaaagaactagagaagaagaaggaagggagggaagggaaaggaaaggggaagggaaagtgaaagggaagaaaagggaagggaagggagagaaggacccaaagaagcaattatggtcagttacttatctatacggaattaaacaaagaataatgagaataacgataatagtaataccggtagtaagagtagtaatagcaagttgtgaaaagcaattaagttatctggagaggcttaagagttattttagcaaggtgtgtacaggattctctcactcttgactcccgtccttaataagagtgctgcattccttctaatatagggaggatgtctctcatatggtaatttcatctgcttctaagaaacagaaaagaggtcagaatgatttttttgtatctattgtttttcaagtgcttttaattcaaaatagtcaatatgcaagaatggtatatttttaacttcatcagcagtgatacacctaataagaaaagcctggaggtgagaacttgataaatcatccctgggtcttacgccactaagccctaggttgcaagaaggtatgagaattaaatgagataaaataattaaatgaatcataggaggtaaatgaggaggggtggttttaagaatagagaaaatgctaagtatttttcacactgtctcatgtaatcctctcatcagctttgttggaaagcattaacctaaacgtataaaaatgggcggggcatggtggcttacgcctgtaatcccagcactctgggagaccgaggtgagcggatctcttgagctgaggagttcaagaccagcctgggcaaaatagggagacttccgtctatccaaaaattttaaaataaaaataagtaagaaagagagaaaaaagaaagaaaagaaaagaaacaagaaaaaaaagaagaaaggggaaagaaaagaagaggagaaa

SEQ ID NO: 588797 - DNA, 4001 bp, Homo sapiens
ttgacaatctcaagaataattagtactgtcacattattcacaagctgctgtgtcagttaaatcaatatatgtttgctgttagaaagaagactatttgaataagcattttaaaactgtaaatttaaaacttcaatatgtgcaactacaatagtacattatatttgttttagcacacattcattatcaaaactctactgataaatctattaactaaaagttaagctgaaaaaaatgaacaaatttaggggatctgtaaaactgggttaacgttaaccaagaacctactatataaggactaataagtattcaaatctacagagaaaaataatttttaaaagaaatacttaaaaaggaaaaagttctctctcctgagcaggttcaagtcactgtccaaagaaaatcaaaaagtaaataaaaagaatatgttaagtacacacatgcctagatcttaaccagaaagaaagtgaaatatacacacgtttcaagttgagaaccttcatacattctttatgaacttgacttgaatttcaactctcaaaggaaaatgaggagattaaaaaaaaaaaaactcttaaagtaccataactgtcacaaataacactgtgaactgagttctcacaaagcttccttgtgtcccttccctgttcatcacaaagtctcataatcacaatgaaaattgttaacactctactgcggggaaggaggatcatcaaagtgaaacggaacctcactactccccctcccacctccacatgaaggataaagcactgtcaataactactaacccaagtatcacagatgccctgcatccggtttaaatcacaagcacacacacacacacacacacacacacacacacacacacacacacacacaccaaagaagagagaggagacagactttaaaaaagaaaaacatctttcccagtacagcaaagagggcccaacgaacaggccccaggtttcaatatgtgtgcaaggggtgtgtggggggggggagaaagagggggagggaagagtgctgaatggatgttaagactgtttgccgcacaaagaaaatacagttttaaaaagaaaaaagaaaaccatgaagctgatgatggtgaaagaagagcagcccattcagcaccaggcaaagaggggcaaaaatgaagggaatgggcggtgggaaaagttcaccaacgtatgaggattaaaaataacaaaacccataacaaggccccacaagtgaacaacaacaacaacaaaacaccacctcttgggtcccccccttgcacactgttgtctatttcggctttgaaagaagcaggaaacagcagcgttggaaaagaagaaaattaaagaaagaacaaattcttatctcttcacctgaccctcctcctcagaccagacctaagggaaagatccagcatccgcatcggaaaactgtggctccctctcccgctcggctcgcagccccccaagctcccgctccatccctgaagtgcggccggcgcagggccggggccggcgggcggcgcggcgcccacacccccgacccagccgcggcgcgcagggtccattgtaaacaagcccggggaacagagcccctcggcggcggcgccgcagcggcagcccccgtgtcaggagtgagaccccagcacagccacactcggctcgcacacacgaacacacacacgcacggacacacgcgttcacacgcagccacacgctcccacacacatgtagagaccgaagaatattcaccttggctgtggattattgtggtgttgttggtgggtgatggagatggtggtggtggggaggaggaggaggaagaggaggaggaggaggagaggagtagttgttgttgatgggtaacagtcgccaggactacggtgactatggcgcttgattcacaaggcaacggttgctataactcacaaaagagagagagagagggagagagagagagagcgagagggagagggagacactcgcacggggaggggtgggggagggaagaggggaggaggcgggcccggccaagccgccggaaggggagggcgcagcgctgtgactgacggcccccaaacccgggtggggtggcggggcggcggggtgacggggcacgaggccgggattccaccgcaggactccgaagaggtgcgcctatgcttggctggggctgaggtcaccaagagtcctctcggagggacgttactacacgcgctggcgaggcccaggagtcgtggtgcgaggggtactatctgtgaaacgagggctgcctgtcccagcagccagctttgtacagagacgtcccggagccacgagagagtaacggctaacccgggggagggggtggcgagggtgattccaggcactttgtgaagaaacgagctatggcgagggaagaatccactttgaagagcggcccccgccctgcccgatacgttacttccggggcggggcgggcagaggggcccggatgtgccgccgctttttagtttctgaggcgccggcggtgttcctggtagcgtcagcctcctggcttttccttttcctggacgcttcagggctccgcggcctgcgctagactggagggtccgcgtcactctcgccctcctgctttccgcgctctcacccgctcccgcctcctgagggcacgacttgtggaggagcgcgggcggcggggcgtgagcgagctgcctctgccgccatcttagagaaggcgagcgtggggtgtgcgtgggcgcgagtcggcctcccgcggtgccgccgcagcgtggcgcggagaggtgaggtccaagcgtgtccggccctcactccataacgaaaaagcgaggtcatcactccctatctacaagggatgggagtaagtgcctgtagagagcaagaaattgccctgcccggaggctgagaaagcgcatttggcggttcccctcgacggaaggcgtagaggggcggggtagcttacacctgcctgcgataccatcctgttagtttctagttctgttagtttcagcccttaagtgctcacccctctttaaagaccgaactgggagttgagctcaagcccggatcctgttacctgccgtgctctcatcccccgttactcagcctactgtagctgagggtcttgctgtttgtggctgtattgagatagacgaatggcttccgtctgtgttgaatgttgttaacacaacctgccatctcaaacacccgttgataaggcacagcctgtaatgcctcatggttcaaacagactcctccaattctctgcagactcgagtccagcaggcacatgcccccaggccctgccaatacccaaaatctcccaacatttgccgctaagctgcttaaccaggacaatgacatagtagaagtagagccttaggaagtcagttctcctcttgaggcttaatttttgcacctgcaagtaagggatttgggccggcatgcgttcaccagcgctaaaataatactgagctcattctgtgtcccagaactggtgctaagtgttttacatacattatctcatgtaatcccaacaacaccagtgttaggtaatattcgcatttgaggaaaaacaggccgagagtcctaaaagtcggtggttttagtttatggctgcgtgccatagaatacaaggttaccttgttttaggaaccagctactttgggtacgtttttaaaagtaatattgttgcctttgataatctcatgagttagagatgttcttacaataataatgtgttgcagtagtgaacagtggtgagcctagtgctaaagctaaaaggtttcctgacccactgtggtagtaagggcttctagtcagacaaatgattgtgtggtgaccagtgtgggtcccatttgacatacagatgggaaatgaggtatacgttccagctttatgaaaactggtagtcgttatgaatattctctttattatatttactgataaagtcctcattcctataatggtgtgtagggctgtatgttcacactacatggctctctgaat

SEQ ID NO: 588798 - DNA, 4001 bp, Homo sapiens
aataaaagtaaagtaaactgccaagagtgtaattcttatttctatatccacgatgccattagaaaaagcagcatataactttgatcatcacttctagcaactgcaataacaaaaagagaggtatagattactactctaatttacagtccttccacctagaaaagcaatatagagagcagcttcgaaaccctgtctcccagtaaagtactactcagagtcctaatttaagaaaagacaaaaatggacctgctctgcttccaattatccctccaaaggtgtcccctgaaaattcaagttattaaaaatatgatttaaaaattattaatagagtagatacaaattctagagtaagagtcaaaagatctggaaaagtgtttcttgacctttctatctcaagtttcctcatcctaaatttggaaacaattccttccccatataacttactgttgggaaaagctaaataagatgctacacacaaaagagctttgtaaagcatgacctttgtgtagcatgacctattgaaaatatgaggcgtattataattactgttctataggctaggcaatattttaaaataaacgtgcttcttttcctaccactcccgttcccaagatacttccttacttcacatactacaaaggagtttaatgttatcaaaatgaaaagaggtccaaaaatcaaattgaaagagaaaaagagggaaggagaaacacatatagaattgttctctactgcttctctcagataatttaagataagctcatttcctattactttaccaagagaaggacttcaccaacacatctattgattaatttcctctaaactatttttgataaataagtttgtaagtacttttaataaaagtatactatggaaacgcttttctgcaaatccataaaaagattcacaattattaggtataatatcaatgtccatagtcagatatcttcaatcatgaaaactcagtgataagggaaaagaacgtccaactggtttgtttgacacagacaactcaaatggtttgagaaatataataaaactgtaattatttcctaggaaaactacttaaaagagttagtactaagtccctttaaatatactacctatgataaagattattgtaactctgaaattgtaacttctatacataaatgcaattactaactataaataatgttgtcaaggccttagacacaaaactactcaatttctctttcaaccttatatccataaaattgtagaaaatgcataggggaatttttgatgtactttacagaggacttacgcagaaccacaagtttgaaatggaggttacagcttcagcttatttctcttgagctttgtctcttaactagcagattgagtgtttatcttcccaaagaaactagagtatcctccatggctgctaaaacaaagaccatatatcaaattgaaataaggagtaccttgttccctgtgaagactgatggattctatttcatcatcacatctttgattgaaacaacatgaacacaatttttagaacttagaaattaaagtgtagtatttaaagataaattattaatacttttcaaaaatttaccagattatacatgcttaaaaaaaagtaaatcacatgattatttttaaataataccaattttaataatataagcttcatttattaaaaattaagaaacattaaaatagcaatgtttgatcatcctcaatgggctggcaattgcatttcaactctttggaaaggtaaggaagtaatttggatgcaaacataacctcaaagaccaatgatgacagcttacaagtactcacagacactatgcctatccctctgacacccttcccacctatccaccccaccctgactcctgcttttttcacctttctgaatggcagtggaaggcctgtctttaaagtactgtttgtagtggaagcagaagttcacacaaacaagctgctgcatcttcctacataacaaaactattattgagtagtagagtaggggaattatgacatcagcagtatattaaccaattactctaccaaatacttaatatctactgataagcctgctactgtatcattggcttaatttcataaagtcaactattatttttctacctttaattgaaacttcctttgatataggcttaatgtttagtctatgaaaccactatgaaaatatatgtggcatatacacttatttgactgccattttagaatgacaaacccatacatcacacagggtcacatatgggtatcaaaggacaggaaaagactaacctatgagtctcatatttgtgctctcaaagcactctgagtagtgcctgaaaattttacattattggagttccagtgctctttctttattgttcctctataaaactctgtgtggcagttatgacttttaaatgcagcatgaccttaatcctacctggggcaggattggttgggatgggaagttggtaggtggaaaggaaggaattctcttctggtttttacagcaccaccgaaagctaggttaactgaagcatttaaaaatataaactgaaaacacataactatgtaaataatactgttttcttgaaaacatatatagtagtgatagaaaataaagttcttcaccatattaactattgccaaccatcaagaaaggaaaaacatcaaaatatgaaaaaagaaaattactattgaaaaaattcagacatgagactccatatatgacatctgaaaatactctgtattatgtacacacagttcattatttataaagaacatgtgttcaaattacctcatattccttccagagccaaactcaacgtattctctaccataaaatgccagaatgaccaagtggcctaaaatattaaaagcaagaacaattagttcacattaaaaatgaattttttgatatgtagaagccatgtgactatttaaaattattaagtttatagataagtattaattatattaattacataactgaattattttagaagtatttcttcacatgaatgcactgatatttttagatgtttctgatttagccaaaaaagatactgtttttgattttacatgagagaatttttagttttcaaagaactataattcaaagaataatcatagtattgtaataataagaaatataaattaggggaaatctcagaaaaagcattctttaaaagaatatgtgcttttaaactgtgaagatgagagagcaaacaattctgaaaatcaccctgctaatttcttgtagagaagcaaaagtgagaatgatttagcagctgacatgcatttgctcattccttaaaaataatttagttttatagaaatttttaaaagaaagatcttttgttcaaggaaggagaatacacaagttatttttaaactaatgatctttattggctaataaagtaaatgtggagtagcaatgatatacaaacatacttacatgtatgtgtttatgtatgttccctaaatttggcccatgatatcagagatcaacttattacaacgtatatctgataatttagttaactataaagagcatcgtagttacccggcatgatttggctttaccttttttctttaaaggtaaaggtgacattaagtgacagttgccataaatttttatattgctccattagacatagaaaagtaacaaagcaaacaggcacagctgagtatatatgaataggcaacagtctaaatacacatatttgagattacttgaagaagacaggacaaggatcactaaaacaatcacaggtgtttgctgtgtatttaggtgataacaaaccagatacatcaaaaatgtaataatctacaataatcaacacacttggattctcgaaaagaatttggcaattttaaccatattattacattttcttactttactctcagtatattttctgacatgaggccttatatgttattaactaaacgactacacaatacttcttaacaattttgagcaacatgagtcaaacatatctgca

SEQ ID NO: 588799 - DNA, 4001 bp, Homo sapiens
ctcttcagatgacatgacaaaagctatccctttctcaataaggttcagagtcttaaaattggtgatggcattaataataacagagccttttaaatcaccattgtgaagattcatttttaatggttaaaaaatatatataaaaagataaaaacataaccaataaagtgggcgctaaacaattggtacacatgaacataaagatgacaataagagatactggggactctaaaaggagagagggtgggaaggggataagtgttgaaaaattacctattgggtacaatgttcactatttgggtaatgggtaccctagaagcccaaaccccaccattatgtaatttagccataaagcaaacctgcatatgtatgctctggatctacaattctaaaaaagagagaatatgcttaaaagaaataaaaggaacataagcaatagattgaaacatgtaacactttttgtagatcaaaactatatatagttcaatctaataaactggtagcttgagggatgggaaagttgtatatgtgtatatggcagagtatgctaagatttttttaaaaatgtttaaaaaataaacacaaaatggccgggcacagtagctcatgcctgtaatcccagcactttgggaggtcgaggtgggcggatcacgaggtcaggagatcgagaccatcctggctaacatggtgaaaccccgtctctactaaaaatacaaaaaattagccaggcgtggtggcaggcacctgtagtcccagctattctggaggctgaggcaggagaatggtgtgaacccgggaggcagagcttgcggtgagccgagatgatgccactgcactgcagcctgggagacagcgagactcccgtctcaaaaaacaaaacaaaacaaacacaagacgattatctcagatgtctttacttatcctaaaagccaatgacttctgtacgattgcagcacaccccctgcccaacccaattctatatcctgtaaagaatataaccttgcatctatcaattataaaaatgtccttcatcatctataacccatctatatccttctccctaaccacttatttataattgtaagagcaacgtttgctaaagagtctctttaatactaagaaattataggcaaatcttgaatctcaagataatgttatatgacatatgatctttctcacttatgttctcaccactctttagaagaaatcacaggccagtgtgttcacaatccacatacatgaacagcattactttgtcagtatctttccaaacaagccaactgccctgcgtatgaataagacctgtagtaaatatctgatgatgaattcactcccaactttttaaatagcttgagtcagatctccagaccttgaagattattctattttcattcaacagtatttatcaaccacctaatgcaaaggcactttctaaaataccacaaaggcaaaatccctgcctggaaggtgcatgcatcctattaagtactactgtgagccaactaaataaagtataatattgctgacatttcaatatgaaagaaatagaaagttgtgataaacaatgaggagagaagagaaggagaaaactttgagtggtcatatcagaaaaaataacttgctttaggagtcaagacaggctgtttgagaatacagattataacttgagtattcatttttgtatccctatagcctagcacagaaagaacctggcacatccaagaaatgctcaagaaacatttgctgaatgaacctaaaaactgaagtatgcctatcatagcaagacagtaaagttcaaataatttttggatacaggtatgttggacagccaacataatgaaagtaacagcatcttttctaagagcagcagctccttacctgttgttgtactggtacttgctgtaccacctgcgtaggcactgctgcttgactagccacagatgtttgtaaggtcactgtcgagcctgtgtccgacccagtctctgatgtctgcatgatggtctctgaaatagattaaaatgaaattaaagtttaaaatgtcactcctgcatgactagcttccttacaattgttcttaaaatcctatactgaaactaactttcaactctcatacctcttatcccaacatactaccatgacagtccgtgcatgtgtatggtcattctgaccactttataaataattactaatccacattctttaaaaaaattcccattagcacctcttatcctgagactatccaggttaaatttcattgaaagctaccttctatctcatttgttataaattgtttaaatccctttataaactatcatccaaaattatatcaaaatgttcttaattctcagaacacaaaccctacctggatgtaagtgtcatgaattctactttcttgacacttttataggctgtcaggatgtcaccagaatataatttagagtaaatcatttcttttttttttttatactttgttttagggtacatgtgcacaatgtgcaggttagttacatatgtatacgtgtgccatgttggtgtgctatacccattaactcgtcatttaacattaggtatatctcctaatgctatgcctcccccctcccctccaccccacaacaggccccgatgtgtgatgttctccttcctgtgtccatgtgttctcattgttcaattcccacctatgagtgagaacatgcggtgtttggttttttgtccttgcaatagtttgctgagaatgatggtttccagcttcatccgtgtccctacaaaggacattaactcatcattttttatggctgcatagtattccatggtgtatatgtgccacattttcttaatccagtctatcattgttggacatttggcttggttccgagtctttgctgttgtgaatagtgccgcagtaaacatatgtgttcgtgtgtctttatagcagcatgacttataatcctttgggtatatacccagtaacgggatggctgggtcaaatggtatttctagttctagatccctgaggaatcgccacactgacttccacaatggttgaactagtttatggtcccatcaacagtgtaaaagtgttcctatttctccacatcctctccagcacctgctgtttcctgactttttaatgattgccattctaactggtgtgagatggtatctcattgtggttttgatttgcatttctctgatcgccagtgatgatgagcattttttcatgtgtcttttggctgcataaatagagtaaatcatttctaaggtcctttccaactttaaaacttactatttggtgatctaaaacaattaacgtatatccaaaagccaactgatatgccctaaacttagccaaagaatcaagttaactaattttgtgtatggtataatatggtactaaaatcaaaattcgattatagtcttatacaaagatagccccaaatccataacatttaatacagttgaaagatgagggagactactatcatgtaaatgagatttgtaaacaaagacatgtactttctctcattcacaattaaacatgccacgtttctcagttttgcctgacctgccattgtttactctaacaggtatgctttctccggcttcctggccttgacatccccttttactacttatgcattcaataaaagaaatatgaatttccttgctattgagcaaagaccagatttctagttttctttcctggaggaatggagcaagagaaacagtgtttaattggtagcataagaaaagcactgcatcatagtttaaatctatatgaaatacagtgaacattaatttttaactaagaaatttttgaaagagtattcagtttttcaaggagaaaattaacccctcttggcatctgttgtcacagcatgacttcttctaattttcccccaaaaccttcaatcatattcaatttcagaaacggacctctgaagacaatgcatctattcttcttattttgtaaacgaggaacctaaaacccagagagattaagagac

SEQ ID NO: 588800 - DNA, 4001 bp, Homo sapiens
ggacatcctgaaggcctagagaaagaatgagtggagaggtaatgctgagagggaacggagatgagagtagaggttagggttttagattctaacatgagatggctaaaggtaaggggtgccagggctgaggtttacatctctatctccagaaccctccctcccttcccaactccctagcactgtcactgagaccaggaagtttccctgcagtccctcttgcaagccctctaagacaatttctgctttggcatcgcccttccccagcccttccctccaggagcccttgcttaccagtcagcacaagaaccctcagagggactctgagtaaagtgataggggagttgacacgctggcagccaatggtcagtttgtagacgtacttgactgactgaccccgaaaggagggtggtccctctatgggcagcacttcactgtaggagtctggttgggaagtagttgtcaggacagccagaggcaccagaggagtcctccctccaggagacttagaaggcaattcagggatggggacaatcactcacatgatttggactctccaggatcaagcctcaggtcacagaatagaattttcggtggagtagaaaggatacactggcccctctcacctgaaaaaggtaaaaatgactaatttaatgacccattgtccagtactgaacaagactagcacggcaagtggagatagtgaaaggctgccaggccctccgtccctgctgtgaaatgggaatagtcttctacccctaaagcaatagtcatgctccccaacatccccagcatgacagggactataagaacaagaacaattaacaacttcacccatgggtgacaatgcctccacacacaccctccgcaccccccctctcccaggcaaatgcccctctctaacctcggtgtggcagaaagacagtctggctgtcgggctggacatctggctgactagagtcaggaggaggcagtgctactcgactctcactggcatggaactggcagtggatttgggcactggcccaggccagggcctcactgtgggaaaaggaaaaggaggcatcagaggtagttcctgacctcacaaatgctttcccaagctccctatcacaccatcttaaccaacaaggttagatggctgtcctagtgatcaggaaatccacaatcccaaagagaaaccattaaataaagagtagcagactgtgcgtaaaaaggggaacgggggaggggaaggaaagcgtacagctatgtcatccacatcttctgttaaagagccctctcctacaatgacagcacagtgagcaagaggaggtggtgtcgctacaggacaacctgagctctgcctcagccccagagataatctggcttcttcccagaagggccaccaccttcagtgccagcatccccacctggatgcagaagtggccgtgggcggaagggggttggtgacggtcactacacactccagcgcctccccagccaaaaatacaggaccccggctgagctctgctaccacttcaatcatggcagctccggaatcagatctagaaggaaacaaggcggggcggaggtcagcaccttgacagggaggggcgttgcggtgagcacctagggctgagggctgaggacaggggtggtcagcaccgtggtgcccgagggagctcctggatataggaggggtaggcgggtgggagggaggcgactgaagactcagtactgcccagggggaggacatcgctctgggccctagaccccagcccctgtgcgacgggttcttctccctgggcacccccgcggagttcccaaactggcctccgctccccctttcctcaaagttccacgtcccagcccaagatcaccgccgctagtcacctcgcatagtcgacactagggatcggcacccctaggcctcatctgcccgcccctcagggacctggctaggtacgcggcggcggcggcggcggcggcgtccgctgggcggtagaggcgggacttcccttcggtcccccaccctccgcggagtcccttccggccggaagcgcccggcaggccagaccggaaagggctcgggtcatcccggcgcccagggtcaccttcccacgggctggcacctgggcgcgggcgctgccccggagccggccggcgggacctggcgcccaatcctgggggacccggtgccgtggcccaggggccgggccgaggtcccgggggcggtgccttgcgggcccgtcccggggcggtgcctggtgggctggccccgcggctcctcccctctctgcgggcccagtcgccctttggccgggcgagctaatcgtcggctcaatgacgacgaggcccgacccttcccgtccaggacctacagagacaaccgaaggagagcccaaggcggcttctttgctgtcgccgcccccactgaagcaagagctccccggctccactgaaacaccagctcatttaagctttccccaacgcccggccctccgggacgatacctaacaacgaccggcgcccgcatctggaataggctggcgagatacttagtatccgagggctcgggacttggcgccatcgaggtcatggggacccaggatccagggaacatgggaaccggcgtcccagcctcggagcagataagctgtgccaaagaggatccacaagtttattgccctgaagagactggcggcaccaaggatgtgcaggttacagactgtaagagtcccgaagacagccgacccccaaaagagacggactgctgcaatccggaggactctgggcagctgatggtttcctatgagggtaaagctatgggctaccaggtgcctccctttggctggcgcatctgtctggctcatgagtttacagagaagaggaaaccctttcaagctaacaacgtctccctaagcaacatgataaagcatataggcatgggcttgaggtgagtagaccccattgcctagaatgcctttggcttcactttgttccagctcaaaacttctagcagaggtgggaaagggcaagaaagcagttgggcttcttgtctgagtgaagcggtccctatccctggcatattttaggcctgtggttttggaccgtgagaccaggtcacatctctttgcaacacccttccctcccagtgttttgtcttttcagaaggaaagggtaggaacatttggtcatgcaatcagcctttcccattcaggctcttctcacatactggtttccaatgacttccctttgggattagctatactttgtggcaaggtaggaaaggataatctggctgctgtgatactaacacaatgttgttttatttgggggtgggggggtctcaaccccttatttcccacaagcagctggggcattctctgtacctcattagacacactgttagagtcccaacactactgcttctttcttcaagctttagctccagggagtaggtaagaagagcctccctgccctcacctctgaagtgatgagaaggtgctgtcattctgttctgggatagagagctcttgatattaagtcatttatcagagaggcactgccatagatgtagaacccatctagatccccactgagttcaaagactagtgatgaggagccagacccattaacaggaacaggtggatgtgaggacagaaagcatcaccctgaggtcatcctgactcagtctacacaatacacacagaactgtggagggaggcataaagcttgggaaaccctgcccttacagtttctagagtaggagacccttcatttccccagtcagtgctgtggggctgtgatggggagatcagttatctaaccctagccctggggagtgggaagggcctgatgctgcctgcacatctggctttgttggtgcctgtgggtagcctgtagcagagaagaatcatccctccaggctgcttctggaatcaattcagtccaagtttgaccccaaaagtttttgcatcaaaataggatctagtgtacatagagaagtacactgagttgca

SEQ ID NO: 588801 - DNA, 4001 bp, Homo sapiens
agagctctttcccccagaaaaggaggcacaagcccaaaggaaaaaaaactggggcataggttcagccattcgacgtcccagaggccaccccaatgaagaggaagcggcctggattctgactgtgaccaacccaggatcagtggggcagggcagcctataggcatggggacaggtctctgctcagtagaagaacctgacagtggcaaccagccagtgctgcaacaaaccacctggggctgggcagggggcaatgcattccccacagctatggttgagtgagtgcctactgcataccaggcactgtgctatagcccgtatatgcaccctctcatttcattctcacaacaaccctttgagggaaggactattgtcccaggttactgatggggacatcaaagtacagagcagcaaagtgacttgcccaagttcccactgccagttggtggtagagggtggctcagaagtccgtgcttttcctactgtcttccctcatccaagttattcttgccactagctagtgtaaaacaagagaacgttcacagctaagatgatgtaattctcagatcctcactcctttcgggaatagctggggagctgctgtccacctctggccctcagaagaggctgccaactgcctcttccctacctcctgcttcagcaggcctgccccccaactgccccctgcataggcctgctgcccatggcataggggactgactgcaccagggagaagtgaaaaggccagcaagttacaggctgcagctttctttcatctctcctcttcgcccagatccagcagagcaaccacctcagcaacttttgcagccaaccagacccaattcccaaatggccagcacttttagcaaaagaagggacctgaatgactcacaaatggggtaatataactgtactttgtggctggcatcggagtgtcaaaggggaaggctgtgtggtccagctcctatcccatcccctctccccaggcactggatgggctgagcagtgcccagcccagaacagcctcccctgggagtctctaatcttccccggtgctcctgccagccagtccccagaccccagcagtccacactcagctctacttggctctggcccacatggaactatacagcatacaacagcttctgccgcaaacatcccctctatcgcatccgcctggggccaatgttaaacaccagtgtgctgcccccaggcacaggctacccaatggcagaggtgaacgcatgccaggcagcatcagggaggccagcccgaattaaaccttgccataggcaaaccgaagaacagagtgcagaactgatgggccacgcttaatttggctctgtcgctctacacgagcactgtcagacccactcagcagacccaatgacatgccaagggggagagacattcgggcacaggtccccgcttgccaagagctcattgcccagagccaagttggaagctcaggctggcccccagctcaatgcagaggctcaagggtctaggctggctgaggggaaacgaggcagccaggccacagccactgtcaaggcccttaccttgctgtccgggggtgatgctgccagctgttgctgcttggcgatgttctccgacaggcaccagcacactctcttcttctgctcctgcgagtgcgcttccaaagtgaataagcactctgccttctgacgtcagggaaaatagagaaacggacggtcagggctgctccctggttcagggggctcccaggcccaagcccatccctgggctccagagggtgaggctgcagccaggaggggagtgtccgccaaaagccgcaaatgcacactaatccccagtgacattgaggcagccagaggcgcagggaagtgggttcaagggccagctggcgagctgtgggcccacaggttgggggaggggaggaaggcagtggctcccaacacagcagaggcctgtggagagcaggacagagccgatgaggtcacccccaggggcaggcagcacaaagcagcagctgagggagcacgtgggaagcccagagggccagggcctcaggctgattctctgtggagccaggaaccctccccacctcccctggctcacagaacccatcttcctcacagcgctcttctctgatcccaaggccaaggctgaacgggtggttggacgggcataccaacagaacccaaacagcaactcagggtcctttggaaagtctttgacgggcagagtcatgtggccctctgcagccccactgcccagcacatgatcttggtctaatctgtgactgttcagctcactcgagggcagcaacatcccaggcactgctgacatttaggtcccgcttcgctattcaaccttgttaagtactacagtctcgtctccccaactaaactacaaacccctcctagaaaggcctttttcatctaggcctcatatagtgcttagcaagcaatggccttggtaagctctggttgccaggaaggacttctgggataaggtcaaatccaggtcagctttggcacaagcaccagggagcttcaaggacccagagagccacccctaaagcagagtgtgctaggggcggggtagggatggtggtacatgcccagggttgccacccacaaccgggtactctcatcaggggagtacaagctctgtctgcctccactagaatttgattataaccccaaagggctgcgattagatgaactcagccagggagctaagagcatcagctgatcccttggaacagaaaaaaaaaagacagtgtttctatccagccctttctcattttgcagttggacaggcctggtttgaatcccagctgtgccacttcccagctgtcaacctcaggaaagtaccaagctgcctgtgaaatggggatataatggcatcacctggctttcagagctactaggagggcaagcaaggaggacaacaatcaggcctcaacaaacagtcactagtattactattcagtaattcatttgtttaataactatttattgactgggcgcagtggcttatgcctataatcccagcactttgggaggccgaggcgggtggatcatgaggtcaggtgttcgagaacagcctggccaacatgctgaaaccccatctctactaaaaatacaaaaattagccagcgtggtggcatgtgcctgtaatcccagctgctcaggaggccgaggcaggagaatcacttgaacctggcaggcagaggttgcagtgagccaggatcgcaccactgtaccccagcctgggtgacaaagccagactcagcctgggtgacaaagcaagactcagcctcgaaaaaaaaacaaaataaaataactatttattgagcacctgctctgtgtcagagacagtcctaggcattggaaataaagaggtaaatgagacagactaagcccatgctctcaggttaggggcaaagacaataatatttgttatttatacaaataaacaattaaagaaataatatacagccctccctatccatggtttctacaaccatggagtccaccaacagaggatggaaaatatttgaaaaaatattttaggctggtcacagtggctcccatctgtaaaccagcattttgggaggccaaggcaggaggatcatttgcgcccaggagttccagacaagcctgggaaacacagtgagacccagtctctaccaaaagttttaaaaaaaaattaattgggtgtggtggtgtgcgcttgtagtcccagctacttgggaggataaggtgggaggattgctgaagcccaggagcttgaggctacagtaagcaatgattgtgccactgcactccagcctgggcgacagggcagaccttgtctcaaaaaaaaaaaaaaaaaaaattcatctgtactacatatgtacagatttcttttcctgccattattccctaaacaatacagtttaacaactatttatacagaacttacattgtattagatattataagtaatctaaagatgatttaaagtacatg

SEQ ID NO: 588802 - DNA, 4001 bp, Homo sapiens
cgggaggcaagctcacctcctagctcggaggaagcagaattacactctgtccaccatgatcactgaccacattgagagggtagtgtccaaagaacctgaccatccctgcagcccctaggggaatgagtatgcccattttacagacaaggagataagactcgaagtgccaccccctccaccctccggctctcagccctgctctgacctggaggtgaaaggagcagccctgccccgaggccttggcggcttctgacagagcctgtccttcctgcgggtggttctcgctctttcctgtccagggcaggaacagccactgctcccaggtctcacccatgccagccccttacctctgctctcctgtctagtttctgttcctctgtcctgcctagactgtaatccccaaattctgccatgtattaaacacctcctagataaatatgcacagcagacactgagccaggctcttcacacacatcatcctattcactcccatggcaccatcgctggatttcattatcctattttactgactaggagataaaggctcagagaggaacagtgacttgctcaaaagccacagctaaagaggaacagagctagatttgagctcagacctgacaaaaagcttgctgctctcaattctgcactggtttctaacacagaaaccatcttgaactctgagtccctgagccctaggtccagcccacaattgctcctggccccactctgacagccagcatgcccagtcttctagcccatagccccagggtgaccaaggactactagatgtcccaaccagtgctctctctgtctcaccactctgccatccagacgctagtgtcgcaggggctgcttttcccagccccatgagggcaggaaacacagagtggggcctgaagggcagaacctgagagcgggggagggctagagagaaaacactggatcccctagcaggcaggtgggggggcagggacccctctgggcatctccctgggacctaagcactgccagtcagaggagtcaagacccacagtccaatctggtcattaaaacaaatagaggggcttctctatgtgattttttaaaatcaggacaatttcagaactcccttccagattagatatcacttgccttcaccatccctaaccccattcctattttatgagaaaaaatggcccatcacagttctagaagaggctcaggggagctaatgggatcataatggcccagtcttccccctttctaagaccggaggctaagaggccaaaccctcactgtaaagttggattccaaagccaaaggaatcctgagccatagtgaggcatcagcagtaggggagaggaaagttatacatatgtacatatacacgaaaacacccgatctcacatatgagcacgtgccaacatacacgcacagggggcagaatgggcactgctgtcctgtcagaagcaggaaaagttagcaaaaatacaaactctgctcccagctgctcagcaaccatggcattttcaatctcacacccacagcccctccccagataaaaagaacagaaagctagctggattatctcaccaaaaacaccacccagccagtggttaggactccatacagagctgggccctaaaggggccttgggtccagctcctgtctctatcctcctccccatatccaagtgagcctgcagggagcaggaaaggtcaaagaagaccttgtgaggagcgagatccttctcagatggtccctctacccctatccctgaacaccccacaggctccccacaagaggccaagcacccacctggcggtagcggcgctccgagcacaccttgcagagcccattgaagcggttcatggctgcgggtcctgcctcggctgccgccccatgaaaacccagctctcccccagcagcgggagcccgcactggacccgtcagcctggcatgagcaccctgggaagcccgccccacagaagaatggcaggaaatcacctctcacctccccaagccctgtctgtgctgtgtgcctctgcacgataagcccgaaggcttcctgaaacctcagaatgacaaggaagagggagagttttatattaaaattcctgtcaactagttagtattccccgggcccggcggggagagggcgcctttgttctggctgcattctccgccatgggccactttgtgattccaatgttctcacaaacacccctcactggaggagaacccaggcagaaaacgtggctgctctataacaacacctcctccccctgcaagtcccagggaccctgctagaaatccaggagactgccccagcctaaagaatccaaggataccttgggggggtttgcactcacagacatcccatctcatgacagggaacataaaacatttggagtctgaagacctgcctgccacttggaaactacttaaaagtcagtttcggccaggcgtggtggctcatgcctataatctcaacactttgggaggccaaggcagatggatcacttggggtcaggagttcaagaccagcctggtcaacatggtaaaaccttgtctctacttaaaaaatacaaaaattagctgggcgtggtggcaggcgcctgtagtcctagctacttgggaggctaaggcaggagaatcacttgaacccaggaggcagaggttgcagtgagctgagatcatgccacggtactccagcctgggtgacagagaaagagtctgtctcaaaaaaaaaaaaaaaaaagtcaatttatttgtcctttgtccatggaagtggtttgctgtcaggatctggtgatacacatggaccataaagtcaaatgtggaagggatttccaggtcatcagacaacccagcgtcctcatcttactgacaaacaaactgaggcctggagaggttatggtcaaacagcagggcagtgtggggctaggaccagaacctgggtcctatttcttgcctggcagtcccaggatagcatcctgcagagcagcgcatggtgagcccagctgcttttgcccatctcagagcccctggggaagcccagccacacactcaagtccttgatgacagagggttccttggttcaacccagctttggttgctgtgtgactgtgggcaggtcacccaggtttctgggcctccatctccccacctgcacagcacaggagctgaagagatggcctctgggggctctcccccggccccaaccaagcctctgagaagcacaccctctttgctgagtcccacagacatctctgagcacataagttcaggaaaatccagtgcacctcagaacaaggggctcagggcctgtgtgcagaatccagcacgcaggaggactttacaagccaccaagaaacctgtgatgttggaggaagcaaacttacggtgttgatgcccatgtaatttccatgaatcacgagggaggccccctgatcaccatcctctctgtgcttggcaagtagaaagagaggaggaaaggtctttgcagttccccacagaagccagaggaaagcttttcaactaatgaaaccacagaaaacaaacctgacaagttactcctggcaagtttctctgtctaacccagtcgcagctagacacatgtgccaggtaaactgaaattacttaaaactaaagttgacactcagttccccagtcacactagccactaagtgctcaatagccacaggtagcaggtggtcaccacactggccagcacagctctagactgctccatggggcagggccttagacaggtccagagctgcatcccagcacccagcacagggcccagcctacataggtggaaatatttaatgaatgatgaatgagtgaatgacttgagtcagtgaacgtgaaaatgtttggtagattgtaatacgccgatattgtgtaatacgtaaaatactattaggaactacagcaatgtcttatattcccagctaggccatgcacaggaggcagtgtgccacagcacactgaaaaggtggccagccctcactcag

SEQ ID NO: 588803 - DNA, 4001 bp, Homo sapiens
ccctgttggccaggctggtctcgaactcctgacctcaagtgatccgcctggctcggcttcccaaagtgctgggattacaggcatgagccactgtgcccagcctgtctcttcgtttcacaggttgttgtgtggattaaacatgagaacgcatacataaagggctcagcacatgcctggcatgcggcagtgccttggtggtggccatttttattactaactgggattctgttcttcccctgatcctagcttgcatcttccctgctgggtacctgggctcatggagtcattctggcctctccccttcctgtgctgctggctgccaccttgcagctgaagggccactgggccctggggattggaggagcggagggtctgccctgaggtcctacctccttgcatgcctggatcgcgatgtattcagcaaagatcttcttggccttggatgccatcttggactgtgacttgaccttcttgaagtcctcacaagccaaccagaactccagattctcctcactgaactcagtgcgaaggaaggcttggaacactgctaacccgtctgtgaggagaacggatcctggggtaagaggcaaactcagcctctcctgcccttaagatgcctcagcttacccctacaggactttaaagatgggcgtgctgggagctgagtacaatgcccgtccccgacagccaggagccctgggatgtggccccagccctgccactgcctctttcagggtctcagtggggtctccccctctctatgcctcagtgtcttcatctgtgaaatggggactatcgattctgtctcccggagccctgggaggagccgatgggaccctgcccatgagatggcaggcacatttggcgccgtgaaagccctcagtacgtagaaatgtttattcttattctgggaatatggatctgagcacacaggtcccacgggcctccggcaggcagtgccagctcacatggacggggaggggctggcagaagctggctccaaggccagaccaagggcctcagcttgggctcagcccctccgcaacagcaaggacaccctgacggccgaggagagggaaggcggcctctctagcaccagctacacagggtctggatgggggcgaaggggagagggagagagggcacagggagtgggcaggcaggcccaacttacatttgtgaaccagcagcttctccaaggactcgccccacttgagggcttcctctgaggtgggcctgaggggtgagggaggaaacacagtgagggcactgagaggcttgggaaccttgggggaagctgggccaggcggcctttgtttactgccctgggcccagtctgcagctgagcccagctggggcgcccaggaaggaggcccaccctctttcccggggccagggtcccttccagcccccatctccaccccacctagccttccccctagggcagctgctccctgtgagggtagctgcttgccaggtacccagctccctctgtgaaagcctgtctcccccagagctggatcaagccggcaagccccttcccctcaaccctaccactcagtcctactccccggggagccagtgagttccccaaagggtcccagggtgccagggaggacctacttgaatgacttcatcattttgtctgccttgcccgcgggaggggctccaggggactcattccgccgtctgaagatccccagcttgttcttcatgtccttggctctggggacagaagcagaaaagagggttgctcagcctggcccactcgcccctgcaaatccagagtcgggagagctgggtcgagggcacctactccttcatcgtgtgtcgcctctgcaggttcccgttgcgagtgaggtacatgcctcggagcatctctgtagggccccccaccttggggccgcagattggtctgtaggaggcaccactctggctcctgtcccccaccccgcgtcctgggcagcgggcagcaacggtgcaggctgcagccacacacgctctctggaatcctggcctgatgactggactcccaggcacaagccggggctgggactcagacaggaggagccaggaaatgggagggaccaggagggggagcggaaaaaaaaattccttctggccaaccctgagagggagccgtgaaaggggcatgtgtctgcaagggacagcctctggggccgccccggcaggaagccagtcccagctatttgtgactggcctcctcgttaccatggcagcagggagacagtggtggggggtgggggacaagtcagcaaattgctgaaagggaaggagggagccaggggaggcactgcccaccaccggggtggcaggactggctatttttagccaagaaccatttttagccttgccggtccccaaggaggcagcagaattcagcactgggtgaaactgctggcaagaaaggagttaaatgcctcttgctcatgttcgcccctcttttccctagaccccctgtacagggcacctcccagagaatggctcctgccagccggcctctcagcctcagtcacctgcattggcgacatccagtcatgaatatacagcaggaccccaacatcttagtagttttaagcctgaataacttcagaagtacaagtcctataaacttacaaaaacaccattttaaagtttaattatttaatgttgtgtgcatggttttgtgattttcgaataataaatgtttcactttaagttttggtctccatcctcccaaagatggaaaatgctgactcaaaccaaaaatgaaaatgaaaaattgattattcaaaaatcacataactaaagacgtgcaaaagaaatttaataattaaactttcaagggggtttggtaagtttgaagcatttatacttctgatgctattcaagcttaaaatggcactaagacctagacaccctgtctaatgaaggagagtcctgcaggggaggctgatcccaggctctggagctagtcttgggttcaaatcccagctccagcagttaccagctgtgtgccctttgacacgtttcctgatctctcaagtttcctatcaaggttttttctctgtcaagctgtttcctcaaacagaagccagcaggccaggtctccaggtcccaaccccaccactttcttgccatgtaacttagcctctttgcacagtagtttattcacgtgtaaaataagggtaaggtcaataagaaagaacagaacggaaaataaaagtagtggtaaagattaaattagattacatatgaaatacacacagaacagtgcggggcataataaacattaatggttattcttattattaccgtagatgttctaagactcttcgtctaagcttttaagagtatgaccttcagaggccaggcatggtggctcatgtctgtaatcccagcactttgggaggccgaggcgggaagatcacttgaggccaggagtttgagaacagcctggccaacatggcaaaacccccatctctactaaaagtacaaaaaaaatttgctgggtgtgatggcacacacctgtaatcgcagctacttgggaggctgagggacaagaactgcttgaacttgggaggcggaggttgcagcaagccaagatcgcactccagcctgggtgacagaaggagactctgtctccaaaaaaaaaaagtgtgggcttcaggcaattcaaaaggcagcacctacattgaaaggaggctagacagggctgctccagcacccgggatgcctgccctctgcgccacacactgcttccctacacctcccacttccagcaccacattcaacagtcctggcaccccctggatcctctctcatcctacaaaaggttaagtgaagatggttggtgcaagggactgttttggtttatgcatttcaccttgctaagaaaatgcaattggctgtggagtaagagaagccaacagttgctgcagaaagctggagaggtcaaggcagctggggtgaggaaggctttctagggtagtggaccccac

SEQ ID NO: 588804 - DNA, 4001 bp, Homo sapiens
tgaaaccggaactttaaaatattgtccacacctggactcaccagatgtcgcagacacacggaacctccctgaagaatcacccacccagggatttttaaactgcttggaggaagctcagggattcctcaaaaaacacagcatctcctgcctcacacacaaccctcgggatcctagggggttttgctgagtttcgacagtagatttcatgtgcaaagagaaaaacatttctcttaatgaaagtctgaatagcagctatgtcaccagaagattggggccccgagaaagtcaggagtgtccatggtgccacaaccacacagggaggcagttctcaagtctggggtgggcccctcccagtcaaggaccaggaatgccggagctggaactatttatttagagcccaggttctgtcttcaagaagccatagctgctgagaactaatgaaagggaaagacctcacccatactcgggaactgaacagatgcttgggaatgtgtgcacctgcgggcacacgcgcacactggcagaaaacttcaggggtaagtacccccagaacatgggttaagagctctcattgtagaaatcattaatgtccatttgatggatgagaaaactgagcccaaaggccggtgacttacccactattgtacagctgccctgacagccaaaagccatgctcgaagctgagaagtctttgaagccctggggagtctgtaatggtgaagccccacagctgggagtcagtgttcagccatggcttggggcagctgcaggctgctgcacacacgtgtcaggggtcacgctggcatctgggagcacagatgtgagcggatgtgaaagctcggcacgggtaagagccacagcctgggagtgtgaaagtgaaagtggagccctgcagagcagagaaggtggctgggcaagggaggggaggccttggaggactctagcgtgatctggccaaggtcgggaagggcacgccttaggctatggctcacaggccaaagacaggtgcctgctgatgctgtggccttcttgccctggaaatcctgcctgcagctcagaggtgactccacacaagggccctctcagacctcatagcctcagactctgaaacaacagcgatccgaaatccccactgcatagacagaaaggctgaggcccagagaggagcaaggggcaacctagaatcacacagaggtgtcaggtagagccagtcaccaacctttaggcctcaaggtgtccacgtatgaaatgggataaccagcatgcctgagtaacagatcaggagcgtatgctggaaaagctggaaagctcgaaagctcctacagaagatggtggtgttggagttagtgctttaaaaagcattgatctagagggaaattctgaagttaaggacctcaaccagaggcacgtgtttcccacatacaccaaattttgccaaacaccagagtcagtgttggcaattgtaatgtcagggcctccagtccagaattctcatctggaaactaagggctgtgcttcagtcctatcaggctgttcccaggtggacagaaagaccctccattgggtagacaggaaggctgagggcccagtctagacagtgacttagtgacttgcccaaagccaccctgcacaaattaggggctaggctggggccagagtccaggccttctggccctgttcttctcaagcccacttctgatctctgtccccatgaacaaaccagtccccagcccatcgccccacccaccagggagcattctccatcaggagaaacaaactgccctgcagccagctccctggggcccctcagtcctatcaccctaccacatggccagacctccccccgacccaccccctggcccagccacctgcctctgatagtccttggggaaagacggaaggaagcagcaaccgggtgccctcagggcctggcacggagtggcacagagtggcactgagtggggagcgggccgcatttcccctttcctgggtggtgagggtggggcccaggcctgtcccagtggtgactgtcagtcagagcccgcccaccccttggggaaagtgcagcaacaaacccaaaaccagaaatgcaagtcagcctgcctctgccaaccctgttctaaatcgaggccaaaccaaacaaagccaggaggggaagtgccactcaggcaggggtactgcccccagagggcacctacccagagagatcagccgagaaactaaccaagatggaagggttctcagagggcccagtggttatgtgctcagatacccgagccaggctgattttgatcccaatggggccactttttagctgtgcaactctggccaagcctctcaacacctcagagcctccgtttcctcatctggaattgagcccagtgatatcatactggactcacaggactatttgagtctcctcacagtgcctggccctggaaaagcttttgatacaatgggagctatcagtggtcttattttagagataagaaacctggggtcccagagggtaaaggaattacctaagaatgagaggctgatgcaggattagaactcatatctcctgcccagggtctctccctgtttccttggagccttacacacaagtgtttggggacctcagagggctgtagaaggaggaggaacagcctggagtgctgcctgaggccccgcacctgggtgcatcccacatcagcagatgctggcgaacagggcccagagctcatggttctttctgtgctcccaggcaggtctgtatgaacagggactgcgtgcaggtttggtaaggcccctgttcttgggagagctggggtgggaagtggtttgacgggagctccggagcaattataggaaacccgagaaacccaggggtgggagggtggcaagtgtaggagaaaattagggcaggaggggaggcaaagatgagggggaggttgcagaacacatggtgggcatgggatttgccctgtgagcaacgaaatgccacaggcagagctgtgctgtgtcaaagctgctctggggaatgtgggcaggatgtgtggatggcagggaggactggggcacgcatacattcatgcattctccaagcactgaggtaggtactaggaggacggcagggaacaagtcagacacaatctctgccctcagttaagtagaaaaaacagaggttagacaactagtttgaaggagcatggggactgctctgatagaggaagtacaggcagctggggacccagtgagacagctgttgcaacagctgaagtaacaagaatccagccagggcgccccaggaagaccagcttgctcacccagggccttgggtctagagtgctggaagccactgccccaccctcccaaggtgggggtctgtgtctttcccatccatcacttctttggcttggctggaccaggttaattctgcccatgtctcatctgctgtaagcacacaggaaatgaaccaggccctctaaatggagtcactgtttaggacctaatcaaatcctctcccaaatccaatccagagctcagaataggctaaggagggatggcagctatgacacccagagttcacactcataccagctttggctcctgggccccagatgcccaccggatgttgggttgagggtagtggtgggctgctgaaagtgacttgtccaacatcacacagctactcactgagcagccaggtttgctgacccagggacaacctgcagctctcactccgatgattcatcacagccaccacggatgccgggctctgcatctgccctcgaaaaccacttcctgcactgggggggtgtaaactggggtttgcctctgtctcagggtggcccttaacagccaggattttactgacagagcactggacatgcagccagaagacctggactggaatcttcactccatcatttgctagctgtgtgatcccaagctaccccactccaagcttggttttctctgccatgaaagtgggtgaggatgcctgctgcttcctgtgc

SEQ ID NO: 588805 - DNA, 4001 bp, Homo sapiens
gccctgaggccatggctgggcaggaagatccactccctgctgggcctgaaccctcctcagcttcccagatctggcaggcagattaatctaatagaagaacatggaccaatgcaaggaaatattcacatcaggccactaaggaaaacatatgggttacaaaattgtccatacaaacttgatctcaattgtgttgaaatttgacccctaaatacacacaggcacacacacacacacacacacacacacacacacacacacacagaaataggtgtggaaataagcctgggaggatataaatcagaaagttaacagtggtctccctgggaagtcagattacaagtgattttcactttcttcttttcactaagttttcagcagtaaacacatgtaaccatgataataaggaggaaaaaagcaaacatatttttactttttaatcaggacacagctaaggtaagagggcctcacagctccctgacaccctttcctgatcactcctaccccagccaatacagatcatcctggaaaccacccttgtctcacagagccctgcatcccaatggggttagcaggaattgcctcctacgctggggcattaagtgagataatgcaggtaaaacacttggcataaggaatggcaatggtaagttctcaacaaatgatggctagttaattgccctttatcgtccaccaactagaccagtgaattcctgctgccagacgtcaggcaatttcagaggccaagccactgctcttccatcattccctctacccctaaggaaaaaaagcaggttgtggaaaaccaaatatgttgagcaggagtaagcctgaaaacagaagagccaggaaccccagggagggaccaaactccttgggcactctgtctttgaaagctgggcaatgtccagtaatgtttcagtaacagccccaacctttagaaggaaattgtatgcaagttcaaacaaaaatgcgctggacaggtcatctctggaaagcttgagctcagctacgaactctgccactggctcatggaagatctcttggtttcaagtcttcacagaggaaaaataacccctctccacagagagttgcaggaccagtgaggaaatgaagggttaccctcaagggtagggttgttacctttactatggctaccaggaaggccaggtttgcccagacctttgggcagctgccgcccagctgttatttgggggaactcagtctgctacttaggggcttgggagtgaagcctactgttcacttctttccacctcaaaccctgaggcagccctgggaccctcctaagggattgttctttcttggaggagagaattctcccatctccactgtggctcagatacccaacaaagtcaaattgcagcctccccacaaggcagcagggccaaagggcccagcacctgtccgctccctgagccaaaggaaagtgggtgaatgagatctccagttgctataacaagaccttgatttaacctgagctgcttgctaatgagaaactccgtggtgacaacccaggtctctgaaagattaaccagagcgtgattattccagccaagtgaggcagaaccaaccgcagttggcactcatggccgggcagcaggtggtgtccagcagcttgcttggactgagcctgtgccctgagcccctcctgggcagtcacaggagaaaggggccagagaaggtgcccctagatagaaagagcacctgctcccagcctcccctgtcaccacgaggggctgcgtttctgggcgctgggagcagggtgaagcagcccctgccgccagccccagcgggcacttaccaaaggtggtgaggtagaaggacaagtccgggtgggcacgccggctcccgagggagacgcggtgcagggagcgctccatggcgtcccactgcgacccggacaggagcgtctgcaacccgaggcggctgtgttgctccccagtaaccggagtctccagggcgggaggagcgcgagcgggaggtagggctgccccaagcgttggaacggccagggcgcgcccggccctgattggcccgcgcgggtttgaatggggagagttccacctgccggagcagagctgggccggggtgggggaggcggcgccgccgacccgcgctgagcagcgacggcagccacccaaggagccagcaggacggtgcggccaccccgggtatcccggccccagcaccgcgctcccggttggaaatgccagtcccacgagaaggcccagtccggggtgcccactctgggcaggcttggcctcctcgtccagctctcctagaccagcaattagtcgggtttataacctgctttgaagctcaggcctataatcattagatccaagcaaaggcaaaggagcacccgatggcccagggcagtgaggtttggaaaagtgttctctgcgcttggacaggtcgccccccaccatgctgcatcctcttcccaaaccctgcatcctggatcactctcttgagcctcctcttgaacaagtgctgcctgacacaggtccggatgggagcagcttgctccaaccaacctgatggccccccgtcccacagcctgatgccatcggacagcaggacaggcccacagcctctgagaaagaggaacgcacaggaaacggagtggggtgggtgaatcccccagcctggtgcggggaggcagagctggaaggtcaaaccctgctttgctgctttgtcagcaaacatttacaggacacctcctcgtagcagtttcacaccaagacatctgctctgcaaatctctgttgccactgtgggaaggaaagctgttagtctcgtgtaaatctaaaaatgggaagtgttggtatttgtccctgttccccagacttcatcgccaagtggatatttgtggttcagtgatccactcaaaaacaagatggggagatgcaagacagaaagtggagagaagagttatgtgttgagtaccagatgccagaggctgagctgagctgggcaatttacacacatcatctcagttaatcttcacggtaagtctaataagtattagccccaatttaccaggaagaaatctgaacctcaggcagagaagacaggtgacatgcccaaggtttgcagagctaggaataggcagagctgaaatttgaacccaggcctgtctgccccaaacgccattgtcctattcttccttggcctccacatctgccccatggccaacagcaggtggaaggagcaaacgccacagggtcaggtggccaccagcgaggagcagaaactgcagaaggagccctgaatcagcaaactggtgataaatcacataaatgccgtaggattgtttgaatcctggcacttcgtgaagtcctgccctgctctttactgcacccccccaccccaccccactctccccctccaaccccggttacacacacacatggtgaacactgcctttaacaagagcaggtccactctcctagcctcaagccagtgacagatggacttacctgcaccctggactttggcatgcgtgatcctcttcctggctggagaagtttgagtccactcatctcttctgggcagagcgatatcagggcttagccactccatccagccagggaatatgggcaagctcaggctcaagccacaggatgtagagaggacactgagcacagagacgtggcagacctgcaggagcaagatgggagcatgagttagccatggcctgaagatgctccatgcaaggtgtgttcactcccagtaggaactagaaagcatggtgttcaggaaacagcaaaggaaggcccacagggaaaagggaaggtgatgtgcctgagatgatagtcacctcttcacaacttcgccagggaccactgtagagcctcctcccaaaggggagactatcttgggctccagaggctgtgagcaacctgcaggtacaacactcaggacggtgagatccagaaagaaaattgggcaaaggtgtgctgtctgaatgtgacctaggag

SEQ ID NO: 588806 - DNA, 4001 bp, Homo sapiens
catgtgctagggctggggaagaggggaggtgccccttggctgggcacagaggactcaaggggccttggtggaaactttgactatgcctgcagtgccctggctgggatcccacaggcaccagcagggcagcctctgcggctccttcccttgaggagatgtacccactctagcactgggagaggacgccagatagccacccagccagaaggcctgagggcagcaggatgtggaaagttttcaagcatcgctgtggggcctggtgtaccaagcctctcaggtcaggaaggtcagatttgaagctgaattataatacttagttcaggtcagggaaatggtttcccacatgtcctgttcttgctgttctaggaggcagaagttctctatcctggtccctgctcagccacagacctgctgctcaaacttggacaaggctcctcccctttctgggtccagatttatcctcctgccctgagtcctagggttcaagggttcttcctggacacctgggaacaagaatagagatgtggaccctccaggctgggaaaagaattagcctctgtctgctcacagtggccagctctgtggtgtgagcctgtctctaccaccaccccctgcctgatgggtctcagctggagccaagggagcaggtgcaggccctctcccatggggttggaggtcagaggcaaagcatctttgcttgtgcttccagtggacgtttcagcagaggccgtctcagggaccaaaggcaacccgctgagactagttccagagaccacctcttcccctgccagtgaaactagacacgagcttccatccctggtgcctggtgtgcggccagcacccctgatacaatagccaaccctgctggctgagcgctcccctcccatgcagtgtcccgactttttggccaccaaacatttcttgtttctctgagaaagaaaagctggctgtccagcctagaagtggggagcagccaacagaggaagcatcccccaaaacttgcagggctcccagcccctgagacagacagacagacagacacacacacacacacacacacacacacacacacacacacagagctatctcagaacagagcacaaatggtttggttgcaacatgcctatcaatggctgccctggggaagaaacaatagaaacaggggcacagggtggcttggatgcccgcccaccacacacacagtcctgtcaccaaggtacctacccagcatactccagcagggacccaggcgactcctggctgccgctcctgccagctcgcccgcccaggtttccacccggctcctcccgcaggcgggcggccgtggctgtggcagctcctggcggccgtgtcaagcggctgccttccccagacagagctcctttgtgtcagcagagctatttatggacttacccaagttccccaggggagcgatacctgctaggaaaagcagaaccaaatgaccaggttccacctcccacatctaggtagcgctttcaaaacccttgcatcacccgtccctcctcctcttcctcctcctcctacttgtcctcctcctcttcctcctcctccagcgcctttcccaaacacacaccctgtctagccggccaccgccactctggagagaggctggatttctttcttccattaaacagaaaactctgtggtttctcaaagcactttcatccgagatggagtccgggatgtctcaaagaagagggtcctgggccagcccgtccttctgcccaccccgcgaggggcccagctggctcccgggttacatgctcacacgcataggctgtgggtcccctgtggctcatccccagggcccaagctggccccaaagtgctgctccgggggagaggcgtccatccctcacaacggcaccccctggcactgggatccctagcaggctccaccccacacacatcctgagggctcccaggctggggcagcgcaaagccgcctccagccggcctgctggcagccgctccctgcaagaccaagccaatcaccgaggcaccgaggcttccctgtcacacccccaccccgacgctgttcctgtcccagtgggaggctgcaactgaacccaggctcctgcagccagcacacgctgacttccagaatgcgactgcccccagggtggggggtggcagcttcagtcccttcccagcacacagctgaatctttgaatgctaaactctgcagaatcctatgtggaaagagaacctggggcttcctcccccggagacagccagctgggagggcagtttggactgtaacatcctgttacagtaatattggctataatgagagttacagccctgaatgacagagacatccccaaggaggaactgcgggggcagtggaacaagccctggactgggaggagagggtccccagctccagttccagctccagcactggttaattgggtgtcactgagcaagttccttcccctctctgagcctcggtttcttcatctgtaaaaggaggctgctaaccttaacctgcccacctgtgggatgaatagaggattctctgagctggctcttggctaccctttcttgagcatgaactccgtgccaggccctgttcccagagctctgcctgcattaattcactgaatcctcaccagcagcttgtgaggaggggaggactatgattaccccagttacagatgaagagtccaaagtacagaatggcaaaggaagttgcccacagtcacatagccagttgtctgtatagccaggactgaaaactagttgctcctactcaccatgcccgctcttaaccaccatacagccagacaactgcaagatgctgctgtgccagcacagagctgttctctggtgctgcagtttgtcatgatgttgacaaatgcaccctgggctgtccctgaggcccaagttgggaatgcccaacttgtggctggctcccaccagagcagcaggcatcctgggatgatggcacagaaaaaatggacagaaggagcctctattttcccatgcccaccccacccaccttggccacctaggctgaagcacggtgtctctgtctctttctctccctatggtagagaccccccagggtctcgggatgtttctgcctgtatccctgcccctgtctatctctgactctgtattcctgactctctcacatacacaagcatatacatgcacactgctacaagaaaacattctttatcgggtcgactcagaatagccctcctctgagttggtcacttacaaactccaaccagtgtttcatcttgtccctgggggcagaaccaaggcagtccttgcagggcctaggaaccttctagactggaaggctgtcatcctgctggctcctgaaaagcaggattcacccttggcctgggaagctaaggaggtgagtctcaagagatggccaattctgatggagctaaacaatcaccaatgaggctggctggtttctaggatggaatttctggtgtgtgggataagatttcttagggtggggagcctgaatataggattccttcacgtcagaggtgccctcgagcttcagctgagttgtcaccttctttcaatcaacaaacagttacagagcatagactctgtgccaggctctgtgttaggccctggggattggcagagaaccaataggcagggccctgcattcacaaagctgacagtccagtgagggaggcagacattagccatggagtgagactaatgactccaaaattacgccctatgctgtgatgggcaaagcagctctgccaacccagtgtgctgagtccagaacgagtccagaatacattcatcaatgctctggaccatagcatggtgaggaaagggtagagcagctcagtgccccaaggcccagagcctgccaggccaggataggagagcatcccatggctggaggagccctggggcagccactgccctctgcctcccatagctccagacacaaatcaacagggctggggggcctcccagtgtatagcctag

SEQ ID NO: 588807 - DNA, 4001 bp, Homo sapiens
cagagttggattcattcatcaagcattgatcaagggcttcctacacgccacctgaggttgtaaccatgaaaacaataggcacagacccttctctcgaggaactaccagtcccctggagcatttaaatttacatatgtaaatttatatatgtaaatgatggaatgtgtttttcttcatttactcattaagacgtttctttggttgtggggacactggcctcagaaattaccagaggcctgcagttatttgaaaggtgtcaaggaaagcatgtcattttcataatgtaatatcaccacctagtggttccagaaaactttaccaattgatccaggaaaattttcttacaaagctatattcctgggaatgactctccaccatttctccagaacttttcttttctctatcaagataatctaagggatgattctctaatatgtattagatacccaatatctgttaaataaatgcatatatacaaggacaaatgaatttcataccctggtaccttatgtcaatggaaagagaaaatttagaaattccttcccagattcctctggacttctaatcatttctatctaagaaggaccttctaatcatttctatctaaggccagaggtattactgtccttaatttatcaagcaattcctttagtgcatttgaataaactgattttttaagtgtcactgtgtcatggatgaaaccctcactccctcccaccaaacccaaggggttttctataattcaaaaacattctgggcacggtgggtcacgcctgtaatcccggcattttgggagctcaaggtgggcggattacttgaggccaggagtttgagtccaacctgcccaacatggagaaaccctgtctctactaaaaatacaaaaattagctgggcttggtggcacatgactgtaaacccagctactcaggaggctgaggcacaagaatcgcttgaacccaggcggcggaggttgcaatgagcagagattgcgccaccgccctccagcctgggcaacagggggagagtctgtctcaaaacatacaaaaacaaaatcaatgaagaacagcatatgtcaccccagaggttgggaccaataccaaatcaaagtccagctggctctgagtatgggcctagaatatctgaagatgctttcattgattattgcttctacacaggtgtcaaactgggccaggtgtcactaggaagtgtgcttagaaaattatggtaacccaggccaggcacagtggctcacacctgtaatcccagcactttgggaggccgaggtgggcagatcacctgagggcagagttcgagacaagcctgaccaacatggagaaaccccgtctctactaaaaatacaaaaattagccaggcatggtggtgggcacctgtaattcccagctacatgggaggctgaggcaggagaatcgcttgaacccgggaggcggaggtttcggtgagccgagatcacgccattgcactccagcctaggcaacaagagcaaaactctgtctcaaaaaacaaaaaacaaaaaaaaaaaagaaaaagaaaattatggtaacccaaagcaagtggcctgtctctagcagggatcacaaagtagcaaagaacaaaagaaactaaggactagtttcttggaaatataagcctcttagaaccatattccaacaggctaaatcttaagtctttttgttggtttaaataagtaaagtgaatctccaagcaatactggctattaattaagccttacttctgcttccttaggcccagatggtggggaaatggcagttagcagcagttacctggctcctcctctctcagaacattgggaggctgaagcaaggggttcacgagtactcctccccttcagtcaattcttttctacatagccgtgtccttcctttcagtctaagggtatcccagtctcagctgtacattaaagagaaggagtaggagaggtgtcaggatacagtggatgaagacaggctgagccaaagttctaagcccaggcccctttacttgctcacctttgacttttggcctctccagcagggccactaggtctgttgtgaaggtcgtggaccaactctagggatgctgctcatattataaccatcttagatttgtacagtcattgagttaattttcaacagatgatagtaaagtgttttaaagggtgtctttttctaattcactcaaaggccccaaatgggctctcatcagccctgtattctgagcctaatttatcaactggatacagtccacatctatctatgtagttggccagagaaccaactgaaatagtgagtgtaaagcaccttgaaaactaacatggtttggagattatatttcccagggttctgtttgtgattgtctaaatttgagggattgctatgtgaaaggtaaaacaagtttcagtctgcaagtgttttatctccctttgaaaatagacacaaaagctagcattcagatagtgcatatcttctcactcaaaatccaccaggattcaaaaagtaactgtgtactcatcaacaggacttaaaagaatgttccaatttctgagagttgcttcaccaataaagtagttgaatttgttataaaatagttataccttctcttctctgcctaagtctttagataaaataagcaaatggaaggcaaaccctgccttgtcctcatccctaccactgaccattaggaattgggtttgctccagtggacaggtctgagggtaggctaataagaagtgaagaaaattgtaggccaggcacggtggctcatgcctgtaatcccagcactttgggaggccgaggcaagcaaatcacctgaggtcaggcgttcgagaccagactggccaacatggcgaaaccctgtctctactaaaaatacaaaaattagccaggtgtggtggcaagcaccctgtaatcccagctactcgggaggctgagacaggagaatcacttgaacccaggaggcggaggttgcggtgagccaagatggtgccactacactcaagcctaggcaacagagtgagactccgcctcaaaaaaaaaaagaaagaaagaaaattgtaaattttttaaacccagcccacataagtcattctgcaatgcaacgcacattcaagaaataattatgagaggaggagccaagatggccgaataggaacagctccggtctacagctcccagcgtgagcgacgcagaagacgggtgatttctgcatttccatctgaggtaccgggttcatctcactagggagtgccagacagtgggcgcaggccagtgtgtgcgcgcactgtgcgcgagccgaagcagggcgaggcattgcctcacctgggaagcacaaggggtcagggagttccctttccgagtcaaagaaaggggtgacggatgcacctggaaaatcgggtcactcccacccgaatattgcgcttttcagaccggcttaagaaacggcgcaccacgagactatatcccacacctggctcagagggtcctacgcccacggaatctcgctgattgctagcacagcagtctgagatcaaactgcaaggcggcaacgaggctgggggaggggcgcccgccattgcccaggcttgcttaggtaaacaaagcagccgggaagctcgaactgggtggagcccaccacagctcaaggaggcctgcctgcctctgtaggctccacctctgggggcagggcacagacaaacaaaaagacagcagtaacctctgcagacttaagtgtccctgtctgacagctttgaagagagcagtggttctcccagcacgcagctggagatctgagaacgggcagactgcctcctcaagtgggtccctgacccctgacccccgagcagcctaactgggaggcaccccccagcaggggcacactgacacctcacacggcagggtattccaacagacctgcagctgagggtcctgtctgttagaaggaaaactaacaaccagaaaggacatctacaccgaaaacccatctgt

SEQ ID NO: 588808 - DNA, 4001 bp, Homo sapiens
ccctgatcctagcttgcatcttccctgctgggtacctgggctcatggagtcattctggcctctccccttcctgtgctgctggctgccaccttgcagctgaagggccactgggccctggggattggaggagcggagggtctgccctgaggtcctacctccttgcatgcctggatcgcgatgtattcagcaaagatcttcttggccttggatgccatcttggactgtgacttgaccttcttgaagtcctcacaagccaaccagaactccagattctcctcactgaactcagtgcgaaggaaggcttggaacactgctaacccgtctgtgaggagaacggatcctggggtaagaggcaaactcagcctctcctgcccttaagatgcctcagcttacccctacaggactttaaagatgggcgtgctgggagctgagtacaatgcccgtccccgacagccaggagccctgggatgtggccccagccctgccactgcctctttcagggtctcagtggggtctccccctctctatgcctcagtgtcttcatctgtgaaatggggactatcgattctgtctcccggagccctgggaggagccgatgggaccctgcccatgagatggcaggcacatttggcgccgtgaaagccctcagtacgtagaaatgtttattcttattctgggaatatggatctgagcacacaggtcccacgggcctccggcaggcagtgccagctcacatggacggggaggggctggcagaagctggctccaaggccagaccaagggcctcagcttgggctcagcccctccgcaacagcaaggacaccctgacggccgaggagagggaaggcggcctctctagcaccagctacacagggtctggatgggggcgaaggggagagggagagagggcacagggagtgggcaggcaggcccaacttacatttgtgaaccagcagcttctccaaggactcgccccacttgagggcttcctctgaggtgggcctgaggggtgagggaggaaacacagtgagggcactgagaggcttgggaaccttgggggaagctgggccaggcggcctttgtttactgccctgggcccagtctgcagctgagcccagctggggcgcccaggaaggaggcccaccctctttcccggggccagggtcccttccagcccccatctccaccccacctagccttccccctagggcagctgctccctgtgagggtagctgcttgccaggtacccagctccctctgtgaaagcctgtctcccccagagctggatcaagccggcaagccccttcccctcaaccctaccactcagtcctactccccggggagccagtgagttccccaaagggtcccagggtgccagggaggacctacttgaatgacttcatcattttgtctgccttgcccgcgggaggggctccaggggactcattccgccgtctgaagatccccagcttgttcttcatgtccttggctctggggacagaagcagaaaagagggttgctcagcctggcccactcgcccctgcaaatccagagtcgggagagctgggtcgagggcacctactccttcatcgtgtgtcgcctctgcaggttcccgttgcgagtgaggtacatgcctcggagcatctctgtagggccccccaccttggggccgcagattggtctgtaggaggcaccactctggctcctgtcccccaccccgcgtcctgggcagcgggcagcaacggtgcaggctgcagccacacacgctctctggaatcctggcctgatgactggactcccaggcacaagccggggctgggactcagacaggaggagccaggaaatgggagggaccaggagggggagcggaaaaaaaaattccttctggccaaccctgagagggagccgtgaaaggggcatgtgtctgcaagggacagcctctggggccgccccggcaggaagccagtcccagctatttgtgactggcctcctcgttaccatggcagcagggagacagtggtggggggtgggggacaagtcagcaaattgctgaaagggaaggagggagccaggggaggcactgcccaccaccggggtggcaggactggctatttttagccaagaaccatttttagccttgccggtccccaaggaggcagcagaattcagcactgggtgaaactgctggcaagaaaggagttaaatgcctcttgctcatgttcgcccctcttttccctagaccccctgtacagggcacctcccagagaatggctcctgccagccggcctctcagcctcagtcacctgcattggcgacatccagtcatgaatatacagcaggaccccaacatcttagtagttttaagcctgaataacttcagaagtacaagtcctataaacttacaaaaacaccattttaaagtttaattatttaatgttgtgtgcatggttttgtgattttcgaataataaatgtttcactttaagttttggtctccatcctcccaaagatggaaaatgctgactcaaaccaaaaatgaaaatgaaaaattgattattcaaaaatcacataactaaagacgtgcaaaagaaatttaataattaaactttcaagggggtttggtaagtttgaagcatttatacttctgatgctattcaagcttaaaatggcactaagacctagacaccctgtctaatgaaggagagtcctgcaggggaggctgatcccaggctctggagctagtcttgggttcaaatcccagctccagcagttaccagctgtgtgccctttgacacgtttcctgatctctcaagtttcctatcaaggttttttctctgtcaagctgtttcctcaaacagaagccagcaggccaggtctccaggtcccaaccccaccactttcttgccatgtaacttagcctctttgcacagtagtttattcacgtgtaaaataagggtaaggtcaataagaaagaacagaacggaaaataaaagtagtggtaaagattaaattagattacatatgaaatacacacagaacagtgcggggcataataaacattaatggttattcttattattaccgtagatgttctaagactcttcgtctaagcttttaagagtatgaccttcagaggccaggcatggtggctcatgtctgtaatcccagcactttgggaggccgaggcgggaagatcacttgaggccaggagtttgagaacagcctggccaacatggcaaaacccccatctctactaaaagtacaaaaaaaatttgctgggtgtgatggcacacacctgtaatcgcagctacttgggaggctgagggacaagaactgcttgaacttgggaggcggaggttgcagcaagccaagatcgcactccagcctgggtgacagaaggagactctgtctccaaaaaaaaaaagtgtgggcttcaggcaattcaaaaggcagcacctacattgaaaggaggctagacagggctgctccagcacccgggatgcctgccctctgcgccacacactgcttccctacacctcccacttccagcaccacattcaacagtcctggcaccccctggatcctctctcatcctacaaaaggttaagtgaagatggttggtgcaagggactgttttggtttatgcatttcaccttgctaagaaaatgcaattggctgtggagtaagagaagccaacagttgctgcagaaagctggagaggtcaaggcagctggggtgaggaaggctttctagggtagtggaccccacccacggtcaaggccagagaagagggttgcaggaggctcctccctatagcccaattcctgcctagtggtgggtgctacaggacctggtggggaggggcttcctctggaggtgtcactgtgcatgcaccccactgcctcctccctatacctcccccgagtctccagggtcttaggcctgggggtagaagaagacctgagaacccacacacacatctttttcattgacacctctaac

SEQ ID NO: 588809 - DNA, 4001 bp, Homo sapiens
catatgtttatgcttctcttatgggggaataaagtggtttacaggcttctggtcaattcataggtcatattgtttacttttatttaaaattaagttaggtctgcctttttaaaggtaagaaaagttaaattttagacgaaagtctaaatttgttacattcaaaaggaattatgtattaaattcaaaagacaatttaaattcaagttctatttttttctgcatgtgctttaaagttgagttatatacacctaaacaaattaaaaattattcaactggcatatacattgtaaacgaatatctcatttaggaaccagatgatactttatatatatttacacatatgtttatatatatacacacacacatacatacatatatattcaaaatacaatcaggcactagacaaaatagtcatattgttggtattacgattttataagtttgttttgttctgatttgcatttgaaaattagatcagccaaaacttgatggcaaatagtctgatttacagcccaactatgacagtcaaaggagacaccagaattacccgtcactaaatcccatcaccagtattaccagggaagtgggtgaggactgtcaagggcattacaggtaatggaacagcaacacacaaagatttggggattttaacaaactaaaaccagtatttcacgaacacctaataaggacaagatcacaacctatccccacatggtcaaattaacttggaaaggagaaaaacttcactctgacatcgattggtactgccttctttggggaggaaaaaaagcatttttatactctgaactctgtcgttctcatagacaaagttatagcagtgtttgcagagagtagggagtatcccatccaccacttatttctttctcatatctactcagtaattcaatacaagaaagaaaaagataaccaggacttaaagcaaaaacagaattcagttccatgctcctcccaagccttattatttccaggtgttataactgggagttccgcggacagatttgagttctacttccgctcctttaaccccctattccgaagagtccaagagcagcagcaaagaaaaagaccaactcgaaagtggggaagggatgttggggttaaagaggggagttaaataaccagacctttagtgaagaataaagaattcaggctgtagtttgtagaaataagttattacaggcctgtaaagtctggcgctgggtaaagcccaagaggctttccctaactccaaaacggcgacctttaaagtaagggagggttggggcaccacagcggccggatttctaattgtggaaagtttaaacaaatttgtccctcggggaatgggggaagggagagaagaacaagtctgggctcggccggggagcgtgcggagtctgcacgccgcggccgtcggtccaacgcggggaggctcagggattttcggcagcagcgacttcatccaccccggaccgccggctggaggacgtgcctgcagccggcgggtacctgcggccaattcggtggaacgaggacgcggactgcgaaggcaggtgggtctggcacgaaggggcaggagtcctaggctctgggtggaagttgggggtgggacggcgccgggaggccggggaggcagcggcgaaaggcggcgggcggctctacttactcggctgtaccagatgctgaggcgggccgcggccagcacggcgaagaaagccctctgcgggtcggactgaacgtggaaaggcgcctcggccgggctccccagagggcacagcagcctcttgggccagccgctcagaaaatacatggtccgtgcggagcccccggcgcccccagttgcgtccgtcacactcagcggccccgggctggtcgcccacctcccacaccgccaccggccgagtcggcggcggcggcggcggcagctcggggcatctgcccgctggcctggccgggccgggccgacgcaaggctgcgcgacgaaggcacccccaagctgacggggccgagtgtgggggagggaaggggagggagagtagggacacagagagggcgggaggagcgcggaggcccgccccgaccccgccccttcctcaggccgcgcgggcgtcaccacgccgcgccgcgtgggtcgggccggggagggcccgcgcgcgcgctctggagactcctgcggtctccctagctgtttcttgaagctctgcataagcctcgcccgcggccgccgggttgcgtccgcacttctgcgcgctggcccctcccttgctcctctccctagcagtctccagggttttaccgggaggacctaggcaacggcctgagactccgaggcaagtggggcgagtctagggataacgcagcagcaaggctactgggccggtggaacacgccctggcctggccaaattggacctcccttccggattggcggggtctcggtgggggcgggccggttgccggggggagctggagtcacgtgacggccggcgcggtttcccactttgggctgccggccgctgtggctgtggtgggcggtaggggcttttaccgtgtgagctcctttaatgccggggtctgcagtgagagctggtgatgaagctcctgccggtgtggagcttacatccctaagggagcgtttatttaatcagtaaataaaccactcaccatgaaagtattgagttctgtctcctgcctttcaggagttctaaatctatgtctttgaaatccatttccattcgtctcagccttaccagccataactttagatgagaggaggctatctctttcgtgctgcaaaaggcttggacttagttttagaactggaagggactggtgatagcgtaggtccatatttagcttttggaccccaggtatcaccttagctgtaactttcaacggattgacccagtggtaacgtctgaatagaaggagggttgaggggatatggtgtggaatgggggaaggaggagtctgaaatagaagaaagatttgcttctcattgtctaccttttttagtacagtttgaatttttccatatgtttgtattactttttcaattaaaaagccaggtttaaaaaatgaccccacattaaaaagtagcaacgtaggcggggtgctggggctcacgcctgtaatcccagcattttgggaggccgaggcgggcagatcactttaggtaagcagttcgagaccagcctggccaacatcgtgaaacccccgtcttactgaaaatacaaaaattagctgggcgtggtggcaggtgcctgtaatcccagttcctcaggaggctaaggcaggagaatcgcttgaacctgggaggcggaagttgcagcaaaccaagatccctccactgcactccagcctgggcaacagagtgagactgtctcaaaaaaaaaaaaaaaagtagcaacataaacagaaaaaaggaaacaaagaaacttaattcatattagatatagcattgtagctggtattcataaccaaatatgtaactttctgtaatttttctaaacattcactgcattccctggaaggtgatgatagaatcctgtattcctcaaatggaggttgaaactgcctcaccactcaccagcctgttgcgatcagattgtctccttggcgtctaccctcccccagtccaacacagcagcctggaacatagtaagcatagtaagctggcagtatttgtcagacaaaccgtggaggaaaccctgatccagctgagctacaccattagacaaagaggcccagagaggtttcttaacttgccaatttcaaattgtagaataacaaagttgcatcatactttcatcttagattcagttatgcacttggcagaaagaggaaatgaaaatgttctagtgcagcaattttgctggcagtgttactgaatgtttgtcccagctgtctctcagagagtctttgttctcatgtgtctcaagtttgtcatactgtgctcatgggcaatttaaggaacttctaagcaatttttattgcactcaa

SEQ ID NO: 588810 - DNA, 4001 bp, Homo sapiens
ttagaaataaactaaatatccaccaaagaatctttaagtttatgtggcagatttatgacaaaaatactacacaggaatttcaaattatgttttgggataataacaatgtgagaaactgctcaaagtataatggtgagtgaaaatgcaaaagatatatacatatacctatccaaatgttaacatttctttccacttacttgtttaatataatttcattttctcataaaattcacatatacttttcaaagtccttaatatctacgagtgcttctcatttttcacgctgcattaatgtacatttgtctttaatatgagcattactacttttatagtcagaaaatgtggaataataaagcaaatgcaatgcaatccggtcttctctactttttatcactaaattcctagacgttgtggtatttttgtactaatgttatacaaaagtcatgtaaaaactgccattaaataaatcaaactctaacaatgtagaaaagtaaataactttagaagcatactttaaatctcataaaagagaagtaaatgtatttctgttagagtcatttatatatagtatatgcatatagcctataaaatttagttgcggtttatcataaattacatgtcatactaatacaaaacacttagtatttgcaactgcggttactttctctgaatttaatatgacccgttacacttcttagactagtatatacctccatgagtttccactgctactttataaatactaaaatatttttaaaagccatttcagattgagctgtactcaactctaagagcttgcctttaaagcaaacccactgcagcttccaaatgcttgaaagcatcagtagggtcttcagctatgatggtctgaacggcctgctttccttgtctctggtcctcttgagtttctcctaaaggcattcaagcctttcctttctcttccatcccctgcctcacaaatgaacttcaatacccagatcaaagaagcgggaggtcagactctttcctttgggattttctgtttgtttattttaaagaacgtttccaatggcaaaggccacagcccaacttctggactaggagagtcattaagtgtaaggcccttcctgtcttcccatcacgggaccctcacagagacctcagagtgttgccccgtcctacaggcgcgcaaacaggcttgataactagcgcgccgcctcagtgtttgtcccctctcctctctatccgagaagccctgttcaggtgcccccaccagcacgcccgctgtctggccgcctggctttcctgtggggtgcaggagtgcgcccggcctcctgcgggtctccgggcggcgtcacctcctctgaggcttcccctccctttccaccccgtcgctctgactgccttacggaaagggcaccaaggaactctcgggtgaagcagcttcctgttctcagtgctttccctccgtccggtgagattcccagtgagactgtttgaataaaatcacctggcaaaggaaaagcccaaactttagggaccagccacggctgagtaggggctgagcggtggcagccaatgagatctcgagtcggacgtgcaggccgccgttccaattgggcggccgccccagagtaaccaatgggaagcgcgggaaggccgggagggggcgggagctctcacctgccactggtctaggtgtctgaggagcatcttcctggctcagagaccttttgctccaggtgctcatgccgcaaatggcaatctgcgcgcgaactaattcgcggccgcataatttaataacatcgtccttccatttggccgcgactgctctggaaaattggttcagtagtaaacagaattctagcaggtggaacaagaacaggcgaggcatcctgggcctggtctctcctggaggtctgggtgttgcagcctttcaggactgcggctgctgtggcctacacacctgggcctgtgtgcctgtcccgggctttaggctgctttccctacccggctcaaccagtctttagtatgggctatcactcagcttttaaggcaaggttgccagctccacccctttcccacacccctccacagaattttctccttcagctcttgttctgcctctccgcccttccttcatttgcccattcctctgtccttggcccttttacagttttgtttttcgctcttttgttaccctgaaacaactttgtatacttaggtaaagttattttagatatgaagcctttctttttacatacacagaaataaaattgagatcgccaatattcttacaacccagttttccagagtgaacatttgccaaaaacccttctaacctaaataggattatagattaccttataaattggattaattagtataatgttgggcatatcaatccataaaaatataatggatgaatgaataaattgttgatgagagggaaaactgatgacttttaatctgaatccaggtaaaaagattaaaatccccagtaacatcattttaggcttgtgcagtaatgtctttaatttacaaaacaatttctccattggactttccttccactcctgtgggagaagtttgattgtaactagttgtctaaatattttaatttaaaattctagtctatgtctctggagactggagaacacaccacacacacagagagagagaaagagagagagaaaagaagaagagaaagaagaaggggaaaaaaagcagtggacatcccacattcccagaaataatattttgataacaaattacagcacaaggatatgttcatttgtttactgtattttgtgtttgctgcacctggttagaggtgattctttttttattaccaccacctaatttagcattttaaagatccacacagttctagataatatggttagtagacgacccttctacctgtaaatttttagtacaaataggttcatttttaaaaataacttacttgcttgtgttcataatatactcagattagttcagctccatcagataaactggagacatgcaggacgttatggtagctttgaaataaaataataacaatctcttagttacaaacataactatggaatcaagtaattctaatttctagattgctggtgatttcagtaggcccacttaacattggtcaaatgccaagcaatgtgtaattcttcaaaaaatacctgaccaaagctatgagatggttagaggcaattaatgattttaaatggattttcactaaaacacacagtttgagaaaggcctctcaaaactgaggtttgaaaatattttcgtgggttaacagtccttgtaaaaacaatccacgtgctaggctgtactccaaattaattgctcattaaaaatgtaaatttccagagttttttgtttgtttttgggtgatttttttgagacagaatttggctcttgtcacccaggctggagtgcaatggtgcaatttcggctcactgcaacctccacctcccagattcaagcgattctcttgcctcagcctcccaagtagctgggattacaggcatgtaccaccacacccggctaatttttgtatttttggtggagactgggtttcaccatgttggataggctggtctcgaactcctgacctcaggtgatccacctgcctcggcctcccaaagtgtccagggatgttttgaaattttatgttgcctacatggttttacagagtccttaaaactgtccagtacagtggccacttttccattttacagaaagaagaaacagattgagagttgttcagggtaattttggccagcacatatgccagatgtgggcttaccctactgctaaggatcacaggcaaatgcaagattcacagtctttacaggcacaactaaaaggcatttcatgtcctttaaacaaaaaggaaacctttttaaggagaaacaacaaatatgtccatgcatacagctgtcacatgctggaggtggggttccaacccatgtctactggattcttctacagtaatgagagaggacttt

SEQ ID NO: 588811 - DNA, 4001 bp, Homo sapiens
aaaaatactttgtaatctcatgtctcttcaaaggaaataaaaatgtagccatatctatatacaaatgtgcttaatgaagtattttcagcaacaatttagaaataaactaaatatccaccaaagaatccttaagtgtatgtggcagatttatgacaaaaaatactacacaggaatttcaaattgtgttttgggataataacaatgtgagaaactgctcaaagtataatggtgagtgaaaatgcaaaagatatatacatatacctatccaaatgttaacatttctttccacttacttgtttaatataatttcattttctcataaaattcacatatacttttcaaagtccttaatatctacgagtgcttctcatttttcacgctgcattaatgtacatttgtctttaatatgagcattactacttttatagtcagaaaatgtggaataataaagcaaatgcaatgcaatccggtcttctctactttttatcactaaattcctagacgttgtggtatttttgtactaatgttatacaaaagtcatgtaaaaactgccattaaataaatcaaactctaacaatgtagaaaagtaaataactttagaagcatactttaaatctcataaaagagaagtaaatgtatttctgttagagtcatttatatatagtatatgcatatagcctataaaatttagttgcggtttatcataaattacatgtcatactaatacaaaacacttagtatttgcaactgcggttactttctctgaatttaatatgacccgttacacttcttagactagtatatacctccatgagtttccactgctactttataaatactaaaatatttttaaaagccatttcagattgagctgtactcaactctaagagcttgcctttaaagcaaacccactgcagcttccaaatgcttgaaagcatcagtagggtcttcagctatgatggtctgaacggcctgctttccttgtctctggtcctcttgagtttctcctaaaggcattcaagcctttcctttctcttccatcccctgcctcacaaatgaacttcaatacccagatcaaagaagcgggaggtcagactctttcctttgggattttctgtttgtttattttaaagaacgtttccaatggcaaaggccacagcccaacttctggactaggagagtcattaagtgtaaggcccttcctgtcttcccatcacgggaccctcacagagacctcagagtgttgccccgtcctacaggcgcgcaaacaggcttgataactagcgcgccgcctcagtgtttgtcccctctcctctctatccgagaagccctgttcaggtgcccccaccagcacgcccgctgtctggccgcctggctttcctgtggggtgcaggagtgcgcccggcctcctgcgggtctccgggcggcgtcacctcctctgaggcttcccctccctttccaccccgtcgctctgactgccttacggaaagggcaccaaggaactctcgggtgaagcagcttcctgttctcagtgctttccctccgtccggtgagattcccagtgagactgtttgaataaaatcacctggcaaaggaaaagcccaaactttagggaccagccacggctgagtaggggctgagcggtggcagccaatgagatctcgagtcggacgtgcaggccgccgttccaattgggcggccgccccagagtaaccaatgggaagcgcgggaaggccgggagggggcgggagctctcacctgccactggtctaggtgtctgaggagcatcttcctggctcagagaccttttgctccaggtgctcatgccgcaaatggcaatctgcgcgcgaactaattcgcggccgcataatttaataacttcctccatccatgagtccgcgactgctctggaaaattggttcagtagtaaacagactcctagcaggtggaaaaaaaacaggcgaggcatcctgggcctggtctctcctggaggtcgggacgttgcagcctttcaggactgcagctgctgtggcctacacacctgggcctgtgtgcctgtcccgggctttaggctgctttccctacccggctcaagcggtcttttgtatcccttgggctatcactcagcttttaaggcaagggtgccagctccacccctttcccacacccctccacagaattttccccctcagctcttggtctccctctctgcctttccttcatttgcccatccctctgtccttggcccttttacagttgtgttcttctcattcattaccctcaaacaatttagtatactgaggtaaagtcattttagatatgaagcctttccttttacacacacagaaacaaatttgagatcacccatattcttacaactcagttttctagagtgaacatttgccaaaaaacccttctaacctaaataagattatagattatcttgtaaattgggttaattagtatagtgttgggtatatcaatccataaaaatataaaaatagaatggatgaataaataaattgttgatgacagggaaaactgatgacttttaatctgaatgcaggtaaaaacattaaaatccccagtaacatcatgttaggcttgtgcagtaatgtctttaatttacaaaacaatttctccattgcactttccttccactcttggggataaatttgattgtaactagttatctgaacattttaatttaaaattctaatctacatctctggagactggagaacataccacacacacacacacacacacacacacacacacacacacacacagagagagagagagagagagagagaagaaaaaaaagcagtggaaatcccacaatcccacaaagaatattttggtaacaaattacagcacaaagatatgtttgtttgtttactgtattttgtgtttgctgcacctggtaagaggtgattttttaccatcatttaatttaactttctaaagatccacactgttctaggtaatatggttagtagacaacccttctacctgtaaatttttagtacaagtaggttcattttttaaaataacttacttgcttgtgttcataatatactcagattagttcagctccatcagataaactggagacatgcaggacattagggtagctttgaaataaaagaataacaatctcttagttacaaacataactatggaatcaaataattctaatttctagattgctggtgatgtcagtaggcccacttagcattggtcaaatgccaagcaatgtgtaattcttcaaaaaatacctgaccaagactatgagatggtcagatgcaatcaatgcttttaaatgagttttcattaaaacacgcagtttgagagaggcctctcaaaactgaggtttgaaaacatttttgtgggttgacagtccttgtaaaaacaatccatgtgcaaggctgtactccaaagtaattggtcgttaaaaatgtaaatttccagggatttctttgtttttgttttttgttttttttttttttttttaacagaatttggctcttgtcgccaggctggagtgcaatggtgtgatctcagctcactgcaacctccacctcccaggttcaagcaattctcctgcctcagcctctgaagtagctgggattacaggtgtgcaccaccacacctggctaatttttgtatttttattagagactgggtttcaccatgttggacaggctggtctgaaactcctgacctcaggtgatgcacccaccttggcctcccaaagtgtccagggatattttgattttttatgttgcctacatggttttatagagtccttaaaactgtccagtacaatgcccgctttcccattttacagaaagaagaaacagattgagagttgtcatgcacttattcagggtaattttggccagcacatatgccagatgtgggcttaccctactgctaaggatcacaggcaaatgcaagattcacagtctttacaggcacaactaaaaggcatttca

SEQ ID NO: 588812 - DNA, 4001 bp, Homo sapiens
tggacaatgaaactgggaggaagaggtttttttttttgtttttgtttttgtttttgagacagggtctcgctctgtcgcccaggctggagtgcagtggcgcgatctcggctcactgcaagatcagccttccgggttcacgccattctcctgcctcggcctcctgagtagctgggactacaggctcctgcaaccacacccggctaatttttttttttgtctttttagtagagacggggtttcacaatgttagccaggatggtctcgatctcctgaccttgtggtccgcccgcctcggcctcccaaagtgctgggattacaggcgtgagccaccgtgcccggccggaagaggttcttatatagggctgcttacttgtgattcccactcatcattccttatcaagaaaatgatgactgcaacataaatcctaatttgaaagaaagcacagcatcatcattaccgtaccgctatttgtgcatattagtgtcagtgacatgtctcaggttttaaatgacaaactcaattaaatgttgcaaatactaactggcggattaaatctctataatccaagtatcctaagcccctacataaactcatcagttttgaatatttaataaaattctgaactttgtgttttagaactgaaatgcgagttaagttttacctacccaacaagactatacactcttcatggtggggaccatttaaaaaattatattatcacttaaagagaacttttataaattccacaatcccggacattatgttctaacagcatgtgttaacgtatcctcccagaatgtaaatactggtgtttgtcatgaaatcctcagtgcgccctaacaagagttttcctctaatcagtcaagtaaaagatgctgggtggatgcaatcatggccatttaaaagaatgctggtatatatgttttgcaaattacccaagaaggaaacattataacaggaatgaatcagcacaaattcatcaacactaaaatatatgcatgtattcggccaatggtggatttcgctttatgtgcagattatgacacctttatgcttcaaaatgagtttgggattgtgggcggaggctggaaggttgacgagtaaggatgtggaaagcgggtactaccagggctggagatttcccagggctgtcaccgattgaaagtgaccttatgtgccttaacaaaggaagtcatgaaagcttggcacaggagccttaaaagtaaggaaccgaatacaatgcaagtgtgcgctgaacccgctagaacaggagcacgtttgagggcaagggtttttgtctgttttcatcactgccacaaggcaggcgctttgaatggaacgtggaggtctgcaacgtattcagcgatacgcattcattttaggagacaagggcaatacatattgcctaaaaattttatcggaataaactacagcgacgacactacaaaatacttccatctcaggtcccattacccaagaggaaagtctcagaaccgagagccctgtgaaaccgcctgtgccctctcggcgagaagttctccagtactcccaggctcgccccgcgtttccccggctcccgccccggcgcaaggcaggccgagaaccgccagctgcgcccccgggcccggccttgactgacgggcgccccggaccattacaaacaacgggtttccgaagcgtgggcccggcccagcggacgcagacggcccgcacttaccgcgccgcagctcgtcccacagcccacagaccacagcccggggcggggtaaggggcttcgggcacgagtgtgggctgtgaaaacacgggcataagtctgggccgagcaccgacctgggcgtcccgcattttcctcgcgcaacatcggtccctgggcagcgcaactgtaaggacaggaaccgccgcggcgcgctcccagttccttttttacctcttcccgcccgatttgccgcgcgctcgcgcccctcctccaaccccaaaggactccttcggggctggaaaacgccccttccccgccccctccctgtgcgcgtgaactaggcagttgttagatctcgcgagaggttcgccccctagccgcccctccccccagctagtgagtgcgcgaacgagaaaggaggagggcgctccaggcgacagcactgcagacgccattatcctctgtttctctgctgcaccgacctcgacgtcttgcctgtgtcccacttgttcgcggcctataggtaattggagttattggagcttgggtattgctgattcgggtaagggttggggctccctgaaaggctgcgtttacttttcccaagcccgggttttctcgagcccttagtggcctcccagcccgaagggaggcgctggcgggaggcggggttgtcgcctcctccgtcgccttgattgacgtggcctcgggccaatcgcttcgccctcgcaccatcgctgaagccctggcagccaatagggcgcgacggcggggaggacgcgagaaggcgggggaggggagcctgcgctcgttttctgtctagctccgaccggctgaggcggcgcggcagcggagggacggcagtctcgcgcggtgaggagccgggttgggggagcggctcgtggaggtgagggtcggagcccagtttttccgcttgagggaggcgtcctgggagccgctttggtgtttggccgcttctccgagtgggaacgttgcccggtgtcccctcccccacctccgccatttccctgagcgtgtatccgcagtccgcgttgtggtcctagagacttggggattcgtgaggcatgtgcctctaggatgagctggagctatgtggcactgggaactagggacctcgtggaggaaaggaggccggtgcggggagaaggtcgcgccgccgctctctttgtgtgagccccgcctcaccttgggtctcccggcccggggtcggagctggagcggcggggatggaacggtcagggctgcctcgatggctttgtctcgggcagtggggggaggatgcgggggatgagacctcgggaccgcgtggtgggtgggggagggggtcggcgctcggctccgcctagtagcacgtagtcgccattacgcgggccgccatttcctgtcggatccgggtgaggagaggtgcggtgcttctgctgtcgactttcgctttttcccgtcctgttacccggctgtttttgatctcggtgccgggaggcggggaggggagggcgcgttggcgctcggccagtggagcacatacttagcggatttttgaggcctggggactagtgactgcaggacccgaagggtgaacggcaagcggcaacgttattcttacagataagccctgctgtttttgcttaaactttcttatccaactcttctcccaccacacctcagaaattgcgtgctgggccggaaggatgtcgtttcagttgtcgttaggagagcaataagtcgaccaacggtatgggagaatgggaggcataaatgtgcctcgcttgttggctctttgctgtctagccaaccttctagtagaggccgcttgtcaactcctagtcccgacaagagggaagcttaaaaaggctgtttgtagtcctatcgaccgttttggcacgtagacactttagttttcgtgttacaggcatgattgttgtgttgtactcccttaagcctaatttaaaataatccgctagtgactgttagttttcaagggctccatttgtttcgctgattaataatagactggtattgtggtagtttgggtctggtcctatattagatttttggatttatccctccggtagattgttctggttgttggatgtgttcgcaattgccgttgtatttgtaaactttagagatgtcacataagatcgcttcaagcatgagtcgaaagaaataggaaagcaattggaagttttaatataaaattagttttcccagtgaataagatgcattgtaacttttcataaatgtatgctttgtggatgacatttatcttttcagggttttggg

SEQ ID NO: 588813 - DNA, 4001 bp, Homo sapiens
tggcactcagcaccagcccagtaaatggtcgtggaatgaataagtgaatgaattaatgaatacagaacacttttactgcaaccagtggcaagacattcaaagagaaacaaacacacatttacccacagaattgaagctcacttcccaattttttttttttttttagcaacccatagtaaaagagcaactcaaaaaaatatgcactgattttgaagcagctccagtgagaaatgcaacttgctatttgggctagtcaggttcctggataccactgtgcagccctttggcacaacttgctgtggagctctgtggtcagaaccgcttctctgcccttccatgacgccacactcacacccggaggtcgctccacatctcccagtccttcaagcttttcgtttttttgtttttttttaaaattgttcccagaagcaaacacatggcctgaacaatccctggattgtaaaataaacaacactacaaaggaagacaataccaaatgaggctccgtagtcaccatacccagcagcaaccgaaaaaggtttggtttcttgtctgggaacagcactcaccccacaccccaaaggaactgcttggtccaaaagatggagaatatgagcaacagagtgacactgaggatgacggccatcaggtaggcaaagatgcggaactgagggttgcggaaacactccctcaaagagtggtggctggggatgaggatgggcgtagacacggtggcagaggccgtgtctgggggcggcccagtctggcccccaggctgggggccaaggtccagcgtgtagacttgaggctggcgcaggaagtagcggctcttgggctggtccttgaggcacagctgatggccttccaggatgacatggtggggctccaggcggagcagggcgagcatggcagtgtccgtgggcaagtcagtgacaggctgccctgaggccagcactgtgggctggcgacagagtgggcacagcaggcggcgccgggctggagtcacaaggctgaggtgggccagacattccacgcagaaggagtggcagcaatccagcattttgggggtatggaacgtgttgttgaaggggttccagcagacggggcactcagcctcaagctcccggccctgctgctcagccatcctcagccacacacggggaggcttcgcgggagacgtcctggcagaagggggaaaggagcaaaggaacagccatgaagtcccatccttgtgcttggcctggggcaaagtgttctgtgggtgttgaaaggtgtaatcaccacgttttacttaggttcaaaagcgttttgttcttgatcaccagttcctaacccatcgagttgagtcaaatgctcctacagcctcccctctgtcaaggtgaaggcctgggccacccctaccaagagcccccaagagagccggcattggagcagatgtcgccctgggctttggagctggacgcaaatgctccttatggtcattgtctgtgcccttggctgccctgaatccagggagctgggggtaagctgcagtctgcgggttttgctacaggacaaatgtttccttccctgctacctcaaatccctgactagcgcagagatgggttttgtgaattccctggtctgtccctcctatggggacaaatgccagccctctttccctcctccccttgagctagagggccaaccctccacatcctactcacccagtccttggcctggcaaggaagcccctggaaaggcctttctccttacctggaagccttgcagaagcttccctgccccagtccccagatcagcccttccagagcctcttccccttccagagcctcttccccttccagagcctcttccccatcctctgcctaccctggctcctcctccctccctttgtcctgggaaaccttcagggcacgcacctgggcttctgtgggctccagggtggtcaggcagactactctggagggcctgaggctccagttgctccctcccctgaatcggcaaagctttgggagactgccttcttgccaccaacccaggggcctgtctccatggcagcatgcacgcagcacctggggctgccaggtggcccagtcggcagcctcttgagcacacctgcttggagccaaggccagagagcttcctggggggtggggtggggaggaagatgggggacctgagttccccccagggcatggcaactaattgaacctggaagccaagcacctgtgagattgtgggcagtcccttcaacacctggagtccctggtctggaaaggtagggtggcaatttcgtctttgtagatgtgaagagggtaactgagtcttctgggcttcctctctctggggccctcatttctcttcgaaagtggctggaacctcctccttgcacaaaggggctgcctgctcagcactttggttgctgtgaaagtcacctacttcgaagcttaagagctccgactatcagattcagtccagtcacccgctgatcttttaatgtgcctaagtaactgcaatcagcgtgtacaaacctcgctgccttctgctttgttcttagcacacagctggtcagccttctgagatcttagagctggccatcccaccaaccttagggagttaaagcggggagttggagggaggcgcactccagcccagcttctccgtttcaaccagaaatacttggcttttctctgtttctcatatgggtcattcgaataatttgaagagttgatctgctggggaaaagaaaaagtttaaaaaccaattctccatctgaactactcactttgcagatgagagacaagaagtgactcacccaaagtcacccagctagttaatggtgacatgggacccatgtcttcagactcatggttttcgtaaagacagaaggctgcatccatgccgtccccctactcagtgcgtgttactagctagataataagtgtttgcatgtgatcaggaatccttcacggccagaagactcatggtagaaatccaggaactgtggaagaggggatctgggggaagggagtctccctagagcccctgatatgacatcatctaccccgactgagccgatgtctgaagcaaaacctgcttatactctcggacctgtggcttcctggttttcttctagacctctggcactgctccaaacagggaaggaggaaatgaagatatgcagagggagatggagccctaagcgaaactagggtagtttagcagggctctgcaccagtgctttattctgcagtccattcatccactcggacattattgagtgcttactctagcccaggtgctgtgcaaggtattatggtgaacaaaatagacattgtctttgacctcatgacatttagagtgtagtgaggcaaaaagacatttaatgaataatgggcaataaataaatacacaattttaatggttgttaataaagggcaaaaaggaaaatgggcttcgggtgcttggtggctgctcccaatgagaccaccagagaaggtttctgcaaagagatgacagaagagctgagaccaaagtatataggaatccagccacgcacagtggaggaagagcgttgcaggcccagggaacagcatgtgtggccccgaggtgagaaaagctcttccaatttgagaaagtgaaaggagcccagggtgatcaaggtgtggtgaccggagtaggcaaggtgggagggtatagtactcgggacctgtgaactcaggagctcatctggattttattccaggggtgagcggtagggtaaggtacctgatcctatttccatttttaaaacaccattctagctgcagagcagaggacaggctgagagggataagatcgggaagggaacacccgttcgggctgcagcagtgtggctcaggcgtgtgatggtggtgcaggttaggcagtggcagaggagataaaaggggatgggataagtgatatctttggggacagaatcaaagccacttcccaagaagcagtggagttctagggatcca

SEQ ID NO: 588814 - DNA, 4001 bp, Homo sapiens
aatgaaaaataaatgtgtatcttcccactgctaaatacctatagttaatgttgtatcaggcaccaccttcccagattctcgaaagaatataagtacaccttgaaaacaaagaacaactatcaatctacctctcctctagaactgactaccacatcattttacctactttcagcctgttttatttccctcttcttttcaaatagcttccccatactccagaaagcttccatgaatttttagtttcaagttgcaactgacagaagacaagcacactttcatggcactgtttcctcataccgttgaagagacacctcctagcttaattgtttccactgtggtccctgaatcttcaacagctgccttcttctcaggaggcatggaggtgccaggttctccagctgctcttttatttccaattcctgacattttggcagaagaagacagtcgttttcctgatagaaaaaaaggcagaaactgacataatatatgtaagcaaagcaacaatagagtaaaacaatagagtaaaaactagcaacttttctggccaaccctttaacctggatccattaattccacaaccatctccatatttctctttgaggaaaaaaaaaaaaaattaaattgtagagtaaaagtcaaggcgggccgggcgcggtggctcatgtctgtaatcccagcactttgggaggccgaggcgggcggatcaagaggtcagaagatcgagaccatcctgcctaacacggtgaaaccccgtctctactaaaaatacaaaaaattagccaggcgtggtggcgggcgccggtagtcccagctactcgggaggctaaggcaggagaatcacttgaacccgggaggcggagcttgcagtgagccgagatcgcaccacagcactccagcctgggcaacagagcgggactccgtctcaaaaaaaaaaaaaaaagaaagtcaaggctaaatttacatgactataaatttctaaataggatggtgataagaatggtgataagaaatgagacaatgggcaaagggtgaagagaccaaaaataaagttctggaatctctcttcctgtaatgccaaaatcagaaaagggcagtttgattatgccagaagttaatactacagtgttgaaagaatcacagagctgaaagagatctgtgaaatgcctactaaagtcattagtactagacaagtcagttatcatctctaagcctcagtttcctaacccaggaataaataaccacagtatatacttcctatgcttattataaaataaaatggatgatataattatagaaagaatttggcacaaagccgaacacaaagtaagcactcagaaaccccagctcttctttaacgtttgcagtgttttccctatttccaaacgctctctccactgttttatgcaaccctacgttagttagacctgggtgcgaatttcagttctgcctgttagaggccgtgttgctttgaaacagtgaattcgccaagagcttcagtttcctcaactgcacaatattaacgaatatatttttcgtctgccctgcctacctcccagggtgctcaaaggaggcggaatggatgctaaagcactttggctacttcaggaaacaacgcagccatcaccgagactaacaagactactctgcttccaattcaagctccaggagaggactatcgctggcaacaacctcagtaggacctcgcctggagagagaagacacagaagcagaacaaggctgcaatccaactcgctaaaagccaaagacctcagcctcagcgtggataattgcaggcccaggagactgacggccccaaaactggagagggtggagactcctgaggcctggcacagtcctgttgggccctaagcgtgatctaacctaagttctttgaactggcgccgcgcgggaacagaactcgcagcagttactcaccaaggcccgtgcagagattccagctctcacccctgacccgcggcggagacaaggcagaacttccgggaggcggggccacggagaggaaaaagggaaagaaaaaaggaagtggcttcaacccagcccataggactatgagaccccgccgggcggaagtgacgtacggagagggcacgagaagcttgagcaagcgccgcctccctagcaacgctgggcaagcgcgggaccctctcctggctacgacctctaagagtactcgggcctcgctgatgcctgacggagagcccttggcttttgttgacttgttgacctttgctactgcgatctggtctttctgcggggataaagttcctcattctgttgcttgtcattggggttgccatcactcgttcagacggccgattggctgacggtcccgtcaatctccggggacatgactagcctcagacacctcagaaaattgttcgttggtacccctacgtgctgaaatgaagagttctggagagaatctgagggatttgaggaatttcagatgttggggattttttcccccgcacagggagcggtattctgccctgtctacacattagaatcacttggcctggacaaaagcttttttaaaaaagcgttcccctcatctcctccccccaaaccccgcatttccatccactagattctaatgcgtaagcaggagtgacaactactgcccttgtgcttttttgggaacaagaaattgtccagggaaaagataaacgccaatcagtctctgatctcagtactagtctattttaagctaattaagcattgatttttttttttaagtttatgacaaactgctattttccattcagttaaactaaatgcgttttaatgataggacggtaattaatctaacctattaatgaaaagctgtatgtctcgcagaactatgataaactacctaatgacgtcagctaagggtctagaaatggaagaatgatcgctatatcttttttaaaaaatagaatttaggcatcttgggaaaaaaagaagctaatctacactggatttctgttagtgtgaagacttttgtccctgtacctgctagggcttacctgtaaatgaagtaagatggtcaacaccagggaaacaagtgttcctggtgcctggcagtggaacaccttgactatcttggaaagaattaactggccccaagtggacttcacatttcattccgtgaagtgggagcctgagaacatgtgagtggggacacacctgccgaaaagcattgtatgagacaatgacactcattctctcatcttctttggttcctctactcttagcaagcctttcattcatagaactactgaatggcaagtaatggtttttctagcccagaaaactagaggttcacagactgcatttagccaacagttatgctttgtttattttagacagtattggctgtcctgcgtggttaaaaacaagaacaaaaatgaacttagttgccaacatttaaaatatggctattttacataaaaatccaaattatcagtttctctaaaaaatgttgatgatcttgcaacagaagggttatatttttgcatggtcacattgcttagagcaaagtagtggcttcttctttttttttttttttctttttttcgagacagagtcttactctgtcacccaggctggagtgcagtggcacaatctcggctcactgcaaactccacctcacaggttcaagcaattcccatgcctcagcctcccaagtgggtgggatcacaggcacacgccaccacacctggctaatttttgtatttttagtagagatggggtttcgccatgttggctaggccggtctcaaactcctgacctcggacgatccatccacctcagcctcccaaagtgctgagattacaggcctgagccacagctactggcaatgagccaccacgcttggcgtggctctcttttattaatagatcatgttattcttgtttaccataatccccactaatctttactggttccttagcactagtatagtttaatttgagtatcatcacttgtgtgttacattg

SEQ ID NO: 588815 - DNA, 4001 bp, Homo sapiens
gaacgtgaagcagctttcaataaaccagctcctggggatgccattgttactacttgtctttgttaccccatcttcaccatctgggcgggctttttttttttttttttttttttgagacagagcgtcacttagtcactcaggctagagtgcagtggcacgatctctgctcactgcaacctccacctcccgagttcaagcaattcttttgcctcaccctcctgaatagctgggattacagacatgcaccaccacacctggataattttttttgtatttttagtagagaagaggtttcaccacgttggccagcctggttttgaactcctgacctcaggtgatccatccgccttggcctcccaaagtgctgggattacaggcgtgagacaccgcacccagcctggggcgggctcttcctcccacccaagtggtccaggtgccagacaggaggcgctgggtccttattcccctaccaccatttcagccagtctttgtccctaactcctgcacatgcccaaaggctactcccacacaaccctggaagacccaggtgggtgctcaggtccagatgggcaccaggagggaaatcaactgagttgtcccccacacaggcacccccacaccattgaaaatgtcctctctgcccagctggggtgtctctgcacacccaccaggtagtcctgccaggcgcacacaagcagcccactctgtacgtgtgggggtttgcaccgacacagcccacccggccctcctgagctgcatgcacagcccagcctggcccccagtgcgcagggcaggcccaacccgagcagcgctgggcctctctctggcagctccaagctgggccctctctgggttgcagccctgggtgcccaccctaggcccaggcctgagcacagcccacaggagcaagcttcagtccaggaacaggtgcaaactttggcaaagagttttaatggcaaagttggctgcagcgacaatgccactcggggtggggccggaagccatggtggggaaggaagggtcagcgggcggcagggcagggccgggtccctgaagaagcagcgagcgaggctcagcgggcagtggcgggcaggcaggcgctactacatgatggagcaggcggacagtgggttccgcacgtggcaggtgcacgcggccccacagtactgccggaaggtctggtagcagctgccctcgggctcagccccccactgacccccggatggggccgtcagcgcctcaggcggcaggcggctcaggatggacgtgttgacagccagcgcggccaggccgtagtcggtgaagagcacagtctcacggcggcaggtggggcaggagatgaacttgtacttggggcaggactcgtagagaatctgcaggcactgctcacacacagagtgcaggcaggacagcacgcggggcctccgctgggtgacattgtaggagtgcccacaggtggggcactccaggggctcgcctgccgccgccgaagaagccgccgaggccgaggggccaggccgaatcacgtactgattcacaatgacctcatcctctggggccacgcggggaaagcccagctccgagcttcccttacggggccgccgtggcagtggcggggtatggggtgccccttccaaggcaggcatgtcccccccacaggcctggttgacaatgatctctgtgtctgagggccaggcacgcttgggtgccagagttggggtgggccggggagcaggcgggaagcagggggcagccggtagctcagggaacttttcagggtggacaatcttcatggcctccatcttgaggatgacatggggacccttcaggcaggacatgaggaggcccggccagccactgcccgcctcgggcccggggtcagagggcatccggctgtctccagtcagactggatgttcgggtgggtgggggcgttgtgtggggctggggggcaggtgacagggcagcatcctggtcccgccaggcctggggggggccccggacggcccgtggactcctagggacagccggcgagagttgggggtgcagggccccccccagtggccacagtggcttctctggtccagtcctgggaggaggaggaaggggtgggggagggggaggcaggcgggggcagggaggggtgggaggctgccctgggctgggggtctggcccagggtctcacccagggtctctggctgctgaggctggcgagggggcgcggggggggctccccctgcagccgaggtcagcaggccgcgggccgggacatcggggcaggcaggggctgggtgggccccatggctccaggacagggcgcccagggaaggcagctagccgaagcgctggctgcaggaggaccggggcggcaggctccgcggcaggagcagaggcgaggcctgggccaggcctgagctgcaggtgagagacggcatgagggcagtgccccggccacccccaccctagccctcgccctgcacaaaggaccgggcgcccgacctctgaccctgacctcagccgtgggatcccgacctccgcgggcctcagaacccaaccccctccccggtccccgcctccaaggccagacgcaccttcccgagggccgacccccgtcgcgtggggaggggcgctgagtccgcccccggcccccgccccctgcgctcacctgccccagcctggcgtcccggccgcgcgccgccgccgcagaggttgtctcaaaggcaggcccggacgcggcgcccgcgcctcggcccggcagctcggggggctccggcggctccggcggcggccgcagcgacctcaggcgatggcggggcccgggcggcaccgaggggcgcgggcgcgggcgtggggcgcggggcgcgggtttcggcacggcggcgacggcggcaggtgcgtgcggagcgtggcgcgctctgcggcggaggcgcggggaccgcagtgcgcgcggcgcccgcccgcgcccgcagcgccaccccccgtctggggacccgcgcggggtccgcggggcggggccagcctcccggccgcccctcggtccgctcccggcgtcgctctcgcccgcggactgcgtggggggcaggacccccgcgtcgcccccagttctctccaggctgatcctgggtcctggtcaagcccccgcccccccagattcaggaggagaatccggctgttctcctccctcacagtaggaggcctcaggactctggagtgagagggaggggacctgcgcggaggatcccaggggagctggttccagggcccaccggtgccttcccccgtccccggccccccgccccatgggaaggccccgagtcctccagctccgcctgtgcccggtgccgtagctcagatagatcgctgtgactctaaggggcaagagcggggcgggcggagcggatcagaaggccgaggccggtggacggacgggtccggtgggagtgcgcgaaggacaggctggcagcccagtgcggggtggaggcggccctgaggaccgcacctgcccggacagggtggcccctggcactccagcgcgcaggcccgggcctctccgcttcctcacccggggcttccctgccctcctgggtccgccttctgcctgtggagccctcgggcttgctggtcaccgtgaggcaggggaccagggcttcgagggcctccgctgccacgctgtgaccagctctggccccgcacctggccctggacatcctggcctccttcagctcctctctccgctggactggccagaccgcacctgctctaggcagagccccagggcctgcagagtgctgagcccagaggggacggtgccgctggtgcgggagctcgcgtgggcaaaacaggctggaggagcagccctgcgcatagggtctggcttggcccctctgtggggcctcgggcgagtgtcactcagaagagcaatagggagaggtgtgcgggtgacaggggcgctgctggaggggtccttacggggccctggcaagatggtggggcaactgagg

SEQ ID NO: 588816 - DNA, 4001 bp, Homo sapiens
cttgccaccctcccggtacaccccggggacgtctgtgggagaggggagacctgctctgggcagcccgccaggcatagccagaccggccctgcccctccagcctgcagcccaggcccccgggacgccttcgcatcctcttgggagccatcctttgcgctgcgtctaggcccaagccaggcttgccgcccactcagacagcagtgtcctcaccaggcacatccggtcgggctagtctggggtctggtaattgtggccaggacaggtgggaggtcaccagcctcctgcggagcctcccagcccccaaccttaggctgtggcctgggatgttcacggctgggatgacaccaccctgctgggccacacgaagctgcgtataggatgctactgccaggttgttctgagtgggctgaacccatgatggtgtgtggtcaggggttccaaggcaggcatttcccctgcaggggtgggaatggccagagttcagacctcggggctgcctaggggtgggcagcagaggctgccacagccccagcagcagtatctgggctgggggaagtggggctggggtcccagggcagggcacagcccagctggctgccgagtgatggcgctgcctttgagggaggtgaggggcaggggttctagtcttgccggctcccgctcagccttgaccgccaggaaagcagccaggtccaggtctagcatggccacccctccgcgaggcgtgggcgtgctctgacggcactgcggacaggggatccagcgctgctcgggcgccggtgtgtccagccgccgcacacacgcctggcagaaggtgtgtccacagtagaggcggcggggcaggtgcccggagaggtcataggccgagcagcagatgatgcagtctgtcctctcctccgggggcccccctcctccgaggcctgggggccctccggctgcagcatcctgccagagggaagccagcggtggacagcctgcctcgaggaccttccgcctggatggggtgctggccccaggagcccaccccagaggtcaggcgctgggtctgtgggggtggtgcgtgcagacctgggagggagcgtggcaccgggcacaggcagaaccagggtctgcacacttctggttcatgtgggcaccagccgggcagcctcctgttcccgcagcaccaccctggcccagctccaggcccccaccctcctggccgacctgagcccaggcctcttacctgcatgggctctgctgggcagctatgcacagccacggggtggccggagaagggagtgggggacccagggcgccctgcggctccctcctgggttgcattactggccttgcacgggagtcaggagagaggcaggtggccagctgtggcgggcgtgggctcccgtttcagccacaaagccttgaaactagatctaacggcaccacccacttgcaagagataaggtgccccccgccccctgcccaccccctcctgtccagacccagccagcttctgctaacaccttatccaggctggccttggggtccatttccccactcttagggcttctcagcacgctcacacccttcgccacactcaaaacctccctcacctctcccctcccccaccctccccctccccctcccctccccttccctccgctccctcactcttaccctctccttcccttaacctcccctccatactggaatgttttcctgccttggcctctgctcacatctcctcctctaggaagcctgccagggttccctcctggctcagagccttctgcagactttgccactgtgcttgtctgtggatctgtgtggcttctcagcctcaccttgatgccggctggacggcagagggctgcaccagtccacatggactccaggtggcgcaccagctccgtgtctggggatccccgctcccagctcgggaccccagacagtgccagacgcctccttggtgggcagctcctggctgctctgcccgtctgcagcctccaggccaccctgggaggcccaggttccgggaggtatgatcagtgtgtccacaccagactgcaggcagagcagagttgagggaccaagaagggttgggacaggtgggcaggaccccagaaccactcacagccccgctgggtggaagcaaatggcccctcctcacccctgcccaccttcttggcagtctgcccccaggactggtcagacaagttctcgtggctggcctgggtgtggtcaccctctggtgggggccagcaacggggcaaggcggggagcctggcacgctaagtcctggcacagggtcagggcagtgacccatctgtcccacgcctggagacctctgcatgccacgcgcctgccctgccctgctgtggagctggtcaccatgcgtcagggaagggctggcatggcgtgaggacccgtctgtcctgcgtggccagctcggctgccacctcctcgccttgtctctgccctgcccggaacaccagggcgccccaagctggcctcaatgctcactccctgcctggcatcctggcttacagtggtgaggcagtacctgcgcagagcagcctagcgcctggtgctcagccccagagaggcccccaccctgctcagcagaccaggagacggcccagcacccacggccccagcctcctcctgcctcatcctcaaggcctggtccaggccacctcctcccggaagcccaggccccgaggcaggacaggaggtgtgcaggaattagatatttcctgggaaactagaaaaacatcccagctgaggttgggaggtgaatcaccagtgggcagggcgtggtcctggctgtctgggctctcctgtcccaaccttccactccctgaaacctgcagcacctgctgcacccaccaccctcttgtcgacacgctccttctcttggaggcctttcctggggtccccccagttccatgcgctgtatcctcctgctgtccgacccatggactgaccccagctcacagtctcagtctcggccccagggagcgcaggtcagctcaaatccagacctggctcagctagggctgtggacacgctgcaagccctcgtgcagtctctgggcagacccgggacttgcaggccaggggaaagtgtggacgtcatgaggcagtggcatccctgtccttgcagtgtccacagtgactgtgtgtgtgtgttctcgggtccacataaaggggcagatgccctgtgtccagctacaaccccctcccaaaggagcctgcagcaaagaagaattgctgggaggaagatcaccctgctttattgcctgggccttaaggtaatcaggggtgtccctctccagccaggacctgggattccgtttcaggagctcgggctgaacggccaccttcctggtgggtctgagccccagtgcctggtgtgaaggggcagacgcccatgacaacagccaccccgcatgtcccggcatgtcccggcactgtgtgagccacatttgctgaagtctgggtcctggccctggcagggtgggctgggctaggagatgacacagcagcagcagctgtggcagcggcagaagggggggcagtggcagcagtggcagcaggggcagcagcagcagtggtgggcgatgtcatccccgcgccccgcgggcggagggccagcgtaggtcagtccggcctggcgctgactgctgctgtaggggttgccaggctgctgccaggcctgctggttctggatgggggcagccccctggttacccttggcgcccttgggccctgggacctcggtcggctgcaagaggtgggttggctctggggcacagggccccactggcaggggctgcatctccgaggatgaggaacaggtggaagccacctctaactgctgccccaggtcaggccgcaggtgagcccgggggatgctgatgtgggcatatgggttcttgacgaccatctcttgggggtccatggtccagcctgcaggggtgggcagagaagacagacatgaactcagtggagtgggat

SEQ ID NO: 588817 - DNA, 4001 bp, Homo sapiens
ggcaaacacctgtagtcctagttactcaggaggccaagaaaggaggatcacctgggcccagaagttcgagtccagaagggacaacatagcaaaacccgtttctggaaaaactaaaattaaaaaaaaatttttttaatgaaagatgtaagagttgggaagagactgtgtacatgacccctcttcttcatctgtttattctaaatttctctcattaatttactatatagagttcaagtattaatgctttatctcctctagataacgtcgtattaattaacgtttgctgatgaactagacaagaactatactgttcaaatccatgtttacaatctgttcgctctttccagagaaaaggctgtgagttaagtagagtaaaatggaagtgaaaactgtctgacatgttttcttagcaggaaaaccaaaacaaacacaacgcaacaatcaagactaattaagaactacctttccagcaagatgaattacaaaatggtggtggcctaaaccaaactagaggtagtacagagaaataggtggaataaactagaagacataatcttgaccaataatctttccatactgagcaagtacctaatcatttcagaaacttttatcataagaatttctcacccacactttccactcacagcctcaaaaaaagaaagtgagcacaaacagaaacagcctaggaatgtaacatgaattaaaagcctcatccaatgctgttggcagagagacaacagatctacactctacattatgatgctaacagtcagttatgtctgactatgccatcttgtttactcttcatcaaaaattaggttattttagtagagaaaattctcctcaatattcacccagagtaatacttgacaatttaactataaaaacaagatgggcatataaagcccaacaagtatggaaatacgaactaccttctagaatcacagacgaagtcagaggtggaaaacccacagattatttaagtccaactttttttatattttacagatgagagcctgaggcccacatgacgagtctgtggcagaacttattcaactataggcgctaaggccttcaaatctcttagaaataagtcttacagaaatatcataaaaatcaacttaaaattgaatgaacaatgtatgattagcaggtttgcaaaaggtgaaatataccatattataaatatatataatatattatataataccatattataaataaatatattataaatatatatttataaaccccagagaaaggagtatctgaagtgacacaattcccaggtaaacttccagtcagaaatttcatctttttattccaagtgtgtcccagcttcccacacctgatctgacatctatatgtatgtggtttcgtattatctctacaaaagttctatttcttccattagacggtgttccctgaagataggaacaattttacttcgattccaactgtccctataaaagggaattttttttaaagcctacatacaaggtttgtttgctattgaaaaaaatttacggtaaattttcaagtataacaacactcgcaatcaaggccaaacagaatacagcagacttgcaactctaaggtaacaactgtattatgagctttgtatacatttaagttttcatacgttaagtccaccgcttaagaaaaaagaaatggcaattcatataatggtggcaataattacatgtgtgtgtttctacttacggtagaattagcatacccaacttttactgaataatagcatatatcatttttgcaacacaaagaaaaatactttaccttacaagccatacagacgtaaacaaaaactttatttctttttggacctcaataacctgaaacactcccgtttcaaaaaccaacctctctcacgcttcaaccctgaaaggaagaacttgcatcccctgagaacaaaacgcagcctatccagaaacccacggaagcagaaggacgccagagaggaccctttcgaccgggttccgcgttctcctgggtgacatcatttcacctgcgtctcggcaaaaagggagggagcgagagagcgaggccatctgccgggcagcgggccggcggctccgcgagctgagaccgcgcctcctcgccaccgcgggaacaaagagcgccgggcggccgaggcaaaccttagcccaagactcgggcgcggccccgcaggctctcaacggcccgcagcccgtcccgccctcgcgctgcagccaacggccgcggcggccagtacctgcgaggggaggctccgccctgccgggcagctcccgcggatcctcgctgggccgccgcctcctattgtgactgctcgcccagcccgcggccagctcgccagatccgccgtccgcgggcctcctcacccccggaaccccggctccaacttaggcactgtcactgcgcttccttcctcccggcaccatcacacgggccgcgccaggaaacgacggctgcacgcccagagatgacagagtcgcctaacgcctcggaggctccatcctctccgcccccacgccccaaccgaccgggcctcggccccgtcccgcaacaccgcactaggggcccggcccggccacgcccctccccgccccgccgcgccccgccgcaccccgcctcaccccgcctcggcgatcacagacccgggctccctatgcgccggcgcactggcctccgctgcgcgcgcaggcgactcccctcgccgctaggccgcgacacgcgcggtcctcccacttcttgggtccgggtcgcccgtcccaccccgtcccctcgccagcacaaacctagcgagcccagcgcgccagaccaccggagcgctcctcccttttcccccaggctccgcaccgcgcgccgaaccccctttgtttccaccccgagggggaagggggcggggcggggcggggcggggctgcgcgcggcccggcgcacgactcggaccagttccggcaacagagctccgcgcgcagcaccactgcgcagccccgccccagcccgccccccgctgccctgcggaccgcagggccctgttccaattcctatagattttctcttagtaaattgttgctactgttccgtgcctcctacctacaaaactccgcaatcaaacagtaactgacctcacgtagttcttacagcataaatgcattcacgtggcccgaaaagtaagaatttttattgcagtacacaaaggtgtctctcaatgcagcaagccaacaggttcgaacccaacttgtccgaggcttccttaagtgtgacagttgctcagatgtcgcttggggaggggaaataagaacaaagattgaagccggcttggctcctgtcctgataatcacgatacaagagagaaaataaaaatttccacaaaagcacaatccatacaaggaaaaaatagtaaagtggtatcagacttaaggagagagggcagtcaagaggacatcatggaaggggtggactttttaaagcagaaattagatgtttcccgcaaggatggtgatcatattttagggtggtagagtaaaattattaaggaccagtcaacagaaaactcgggttttcaagttctagttcttttggcattacttaaaccagtctctctttccctctctgggcctcagctgcaaccagtagaaaatgggggaaatcagagtaaatgttgtttcaggaccttctggaccttggacattctctttatgaacaacactatatggtaattatttatgtacacttgtctcccatatcagactgagcacccagactctgttgggactgtgtaaactaaacccaaggcccaagtctagtgccagaaacacaagagaaggtgtttagcaactgctgaatcaaagttccagcaataacatcataggttttggaattccaggacaaacaaagagaagctggaaagaggtattaggtccctatgaacatatccaccccaaacccatactcgaattatgtaacccagttaaccagctggctggctctctccc

SEQ ID NO: 588818 - DNA, 4001 bp, Homo sapiens
cacccacactttccactcacagcctcaaaaaaagaaagtgagcacaaacagaaacagcctaggaatgtaacatgaattaaaagcctcatccaatgctgttggcagagagacaacagatctacactctacattatgatgctaacagtcagttatgtctgactatgccatcttgtttactcttcatcaaaaattaggttattttagtagagaaaattctcctcaatattcacccagagtaatacttgacaatttaactataaaaacaagatgggcatataaagcccaacaagtatggaaatacgaactaccttctagaatcacagacgaagtcagaggtggaaaacccacagattatttaagtccaactttttttatattttacagatgagagcctgaggcccacatgacgagtctgtggcagaacttattcaactataggcgctaaggccttcaaatctcttagaaataagtcttacagaaatatcataaaaatcaacttaaaattgaatgaacaatgtatgattagcaggtttgcaaaaggtgaaatataccatattataaatatatataatatattatataataccatattataaataaatatattataaatatatatttataaaccccagagaaaggagtatctgaagtgacacaattcccaggtaaacttccagtcagaaatttcatctttttattccaagtgtgtcccagcttcccacacctgatctgacatctatatgtatgtggtttcgtattatctctacaaaagttctatttcttccattagacggtgttccctgaagataggaacaattttacttcgattccaactgtccctataaaagggaattttttttaaagcctacatacaaggtttgtttgctattgaaaaaaatttacggtaaattttcaagtataacaacactcgcaatcaaggccaaacagaatacagcagacttgcaactctaaggtaacaactgtattatgagctttgtatacatttaagttttcatacgttaagtccaccgcttaagaaaaaagaaatggcaattcatataatggtggcaataattacatgtgtgtgtttctacttacggtagaattagcatacccaacttttactgaataatagcatatatcatttttgcaacacaaagaaaaatactttaccttacaagccatacagacgtaaacaaaaactttatttctttttggacctcaataacctgaaacactcccgtttcaaaaaccaacctctctcacgcttcaaccctgaaaggaagaacttgcatcccctgagaacaaaacgcagcctatccagaaacccacggaagcagaaggacgccagagaggaccctttcgaccgggttccgcgttctcctgggtgacatcatttcacctgcgtctcggcaaaaagggagggagcgagagagcgaggccatctgccgggcagcgggccggcggctccgcgagctgagaccgcgcctcctcgccaccgcgggaacaaagagcgccgggcggccgaggcaaaccttagcccaagactcgggcgcggccccgcaggctctcaacggcccgcagcccgtcccgccctcgcgctgcagccaacggccgcggcggccagtacctgcgaggggaggctccgccctgccgggcagctcccgcggatcctcgctgggccgccgcctcctattgtgactgctcgcccagcccgcggccagctcgccagatccgccgtccgcgggcctcctcacccccggaaccccggctccaacttaggcactgtcactgcgcttccttcctcccggcaccatcacacgggccgcgccaggaaacgacggctgcacgcccagagatgacagagtcgcctaacgcctcggaggctccatcctctccgcccccacgccccaaccgaccgggcctcggccccgtcccgcaacaccgcactaggggcccggcccggccacgcccctccccgccccgccgcgccccgccgcaccccgcctcaccccgcctcggcgatcacagacccgggctccctatgcgccggcgcactggcctccgctgcgcgcgcaggcgactcccctcgccgctaggccgcgacacgcgcggtcctcccacttcttgggtccgggtcgcccgtcccaccccgtcccctcgccagcacaaacctagcgagcccagcgcgccagaccaccggagcgctcctcccttttcccccaggctccgcaccgcgcgccgaaccccctttgtttccaccccgagggggaagggggcggggcggggcggggcggggctgcgcgcggcccggcgcacgactcggaccagttccggcaacagagctccgcgcgcagcaccactgcgcagccccgccccagcccgccccccgctgccctgcggaccgcagggccctgttccaattcctatagattttctcttagtaaattgttgctactgttccgtgcctcctacctacaaaactccgcaatcaaacagtaactgacctcacgtagttcttacagcataaatgcattcacgtggcccgaaaagtaagaatttttattgcagtacacaaaggtgtctctcaatgcagcaagccaacaggttcgaacccaacttgtccgaggcttccttaagtgtgacagttgctcagatgtcgcttggggaggggaaataagaacaaagattgaagccggcttggctcctgtcctgataatcacgatacaagagagaaaataaaaatttccacaaaagcacaatccatacaaggaaaaaatagtaaagtggtatcagacttaaggagagagggcagtcaagaggacatcatggaaggggtggactttttaaagcagaaattagatgtttcccgcaaggatggtgatcatattttagggtggtagagtaaaattattaaggaccagtcaacagaaaactcgggttttcaagttctagttcttttggcattacttaaaccagtctctctttccctctctgggcctcagctgcaaccagtagaaaatgggggaaatcagagtaaatgttgtttcaggaccttctggaccttggacattctctttatgaacaacactatatggtaattatttatgtacacttgtctcccatatcagactgagcacccagactctgttgggactgtgtaaactaaacccaaggcccaagtctagtgccagaaacacaagagaaggtgtttagcaactgctgaatcaaagttccagcaataacatcataggttttggaattccaggacaaacaaagagaagctggaaagaggtattaggtccctatgaacatatccaccccaaacccatactcgaattatgtaacccagttaaccagctggctggctctctcccaaagcagccagtttggagatgatcacatctaaacttgttttttttgtttgtttgtttcacttcaaggtaaagtgccaaccatacctttaagtttatccaatgtatcctattttctatcctctgtatccctcacaaatcgcaatctactgtggattcgccttccaattacagatcttccaccagaatctaagcttaaaaaaaaaaaaaaaaatcctccctacagaacgcagaccaccctgaagtagcttttcctccaagcttggataggactatgtgaagagaggggaaaggggagaagaacatcaggaaaggaaagggaagttacatttgggagctatctaactgtaagagaggcagattcctcaagtgctgaactcagcagcaaaaatctattacagtcctccagcattcctcacctctaagcttcagcaaatccctctgagcttcagccaaccttttgtgaggcaagcttcctgaaacctctcaaatggttacgatcttcaacaatgctgtcacaaccccaggttggatagttttaaatttcttcttctttttttattttttttgtattttgagacacggtgctctgtcgcccaggctggagtgcaatggctggatcacatc

SEQ ID NO: 588819 - DNA, 4001 bp, Homo sapiens
ataaagcccaacaagtatggaaatacgaactaccttctagaatcacagacgaagtcagaggtggaaaacccacagattatttaagtccaactttttttatattttacagatgagagcctgaggcccacatgacgagtctgtggcagaacttattcaactataggcgctaaggccttcaaatctcttagaaataagtcttacagaaatatcataaaaatcaacttaaaattgaatgaacaatgtatgattagcaggtttgcaaaaggtgaaatataccatattataaatatatataatatattatataataccatattataaataaatatattataaatatatatttataaaccccagagaaaggagtatctgaagtgacacaattcccaggtaaacttccagtcagaaatttcatctttttattccaagtgtgtcccagcttcccacacctgatctgacatctatatgtatgtggtttcgtattatctctacaaaagttctatttcttccattagacggtgttccctgaagataggaacaattttacttcgattccaactgtccctataaaagggaattttttttaaagcctacatacaaggtttgtttgctattgaaaaaaatttacggtaaattttcaagtataacaacactcgcaatcaaggccaaacagaatacagcagacttgcaactctaaggtaacaactgtattatgagctttgtatacatttaagttttcatacgttaagtccaccgcttaagaaaaaagaaatggcaattcatataatggtggcaataattacatgtgtgtgtttctacttacggtagaattagcatacccaacttttactgaataatagcatatatcatttttgcaacacaaagaaaaatactttaccttacaagccatacagacgtaaacaaaaactttatttctttttggacctcaataacctgaaacactcccgtttcaaaaaccaacctctctcacgcttcaaccctgaaaggaagaacttgcatcccctgagaacaaaacgcagcctatccagaaacccacggaagcagaaggacgccagagaggaccctttcgaccgggttccgcgttctcctgggtgacatcatttcacctgcgtctcggcaaaaagggagggagcgagagagcgaggccatctgccgggcagcgggccggcggctccgcgagctgagaccgcgcctcctcgccaccgcgggaacaaagagcgccgggcggccgaggcaaaccttagcccaagactcgggcgcggccccgcaggctctcaacggcccgcagcccgtcccgccctcgcgctgcagccaacggccgcggcggccagtacctgcgaggggaggctccgccctgccgggcagctcccgcggatcctcgctgggccgccgcctcctattgtgactgctcgcccagcccgcggccagctcgccagatccgccgtccgcgggcctcctcacccccggaaccccggctccaacttaggcactgtcactgcgcttccttcctcccggcaccatcacacgggccgcgccaggaaacgacggctgcacgcccagagatgacagagtcgcctaacgcctcggaggctccatcctctccgcccccacgccccaaccgaccgggcctcggccccgtcccgcaacaccgcactaggggcccggcccggccacgcccctccccgccccgccgcgccccgccgcaccccgcctcaccccgcctcggcgatcacagacccgggctccctatgcgccggcgcactggcctccgctgcgcgcgcaggcgactcccctcgccgctaggccgcgacacgcgcggtcctcccacttcttgggtccgggtcgcccgtcccaccccgtcccctcgccagcacaaacctagcgagcccagcgcgccagaccaccggagcgctcctcccttttcccccaggctccgcaccgcgcgccgaaccccctttgtttccaccccgagggggaagggggcggggcggggcggggcggggctgcgcgcggcccggcgcacgactcggaccagttccggcaacagagctccgcgcgcagcaccactgcgcagccccgccccagcccgccccccgctgccctgcggaccgcagggccctgttccaattcctatagattttctcttagtaaattgttgctactgttccgtgcctcctacctacaaaactccgcaatcaaacagtaactgacctcacgtagttcttacagcataaatgcattcacgtggcccgaaaagtaagaatttttattgcagtacacaaaggtgtctctcaatgcagcaagccaacaggttcgaacccaacttgtccgaggcttccttaagtgtgacagttgctcagatgtcgcttggggaggggaaataagaacaaagattgaagccggcttggctcctgtcctgataatcacgatacaagagagaaaataaaaatttccacaaaagcacaatccatacaaggaaaaaatagtaaagtggtatcagacttaaggagagagggcagtcaagaggacatcatggaaggggtggactttttaaagcagaaattagatgtttcccgcaaggatggtgatcatattttagggtggtagagtaaaattattaaggaccagtcaacagaaaactcgggttttcaagttctagttcttttggcattacttaaaccagtctctctttccctctctgggcctcagctgcaaccagtagaaaatgggggaaatcagagtaaatgttgtttcaggaccttctggaccttggacattctctttatgaacaacactatatggtaattatttatgtacacttgtctcccatatcagactgagcacccagactctgttgggactgtgtaaactaaacccaaggcccaagtctagtgccagaaacacaagagaaggtgtttagcaactgctgaatcaaagttccagcaataacatcataggttttggaattccaggacaaacaaagagaagctggaaagaggtattaggtccctatgaacatatccaccccaaacccatactcgaattatgtaacccagttaaccagctggctggctctctcccaaagcagccagtttggagatgatcacatctaaacttgttttttttgtttgtttgtttcacttcaaggtaaagtgccaaccatacctttaagtttatccaatgtatcctattttctatcctctgtatccctcacaaatcgcaatctactgtggattcgccttccaattacagatcttccaccagaatctaagcttaaaaaaaaaaaaaaaaatcctccctacagaacgcagaccaccctgaagtagcttttcctccaagcttggataggactatgtgaagagaggggaaaggggagaagaacatcaggaaaggaaagggaagttacatttgggagctatctaactgtaagagaggcagattcctcaagtgctgaactcagcagcaaaaatctattacagtcctccagcattcctcacctctaagcttcagcaaatccctctgagcttcagccaaccttttgtgaggcaagcttcctgaaacctctcaaatggttacgatcttcaacaatgctgtcacaaccccaggttggatagttttaaatttcttcttctttttttattttttttgtattttgagacacggtgctctgtcgcccaggctggagtgcaatggctggatcacatctcactgcagtctcaaactcctgggctcaggcaatccaggctaaatttttaattttctgtagaggcaggtctcactatgttgcccaggctggtctctaactcctgggctcaagcagtcctcccatattggcctcccagaatgctgggattacaggtgtgaactaccatgcacagcctctaatttatttcttaaccagaaaatcttaagccatgcaagtaaacacccaaagagcaggcaggcttttaaagtggtgggccacctttgacacctaatgt

SEQ ID NO: 588820 - DNA, 4001 bp, Homo sapiens
catgctttcctcatcacccatctaaaaacccccaccacagcaccgcccctcaaaggctgcgctcaaccctcatggtctgcaaggcagagtttttgtaggacaattaaccgcagggtgaacagcaaaagccgcccaacagcacgtccagcaacgtgtttaagccgcctccccgccacccctctcccccagcaaagggatctcctgggagattcttgggggaggggttgcagaaatcgacagaggtcttgagtgatggataccaacttagaatgtggtctacttattttattgtgcactctgagcggtttatgctttaatgcacagtgagataaacgcaagctcccttcccaaatcaagtaattaggaatgtctgacgtaatcaacatctgcttaaactaaaacccccccccaggaaagactgtgcagcctttctgactcgcgtaccttgggccggctagggcggcaggccaggatacctggagcgcgcagctcccagcaggacgcaggaaaagcagagcgtctcccagcctgcgactgtcccgattctcaccttcctgcaggagtgcagggatgggggatactgaagcccatttactagtaagaagtgtctcacacattccgggggcttcaggcgaaccccataggtctctggcgctcctgggcctgaaggccccgcccgccctcctccacccccgcagggtgccgagaatccggcccgaggcgcgcgggcgggaggtgctcccggagtctgcaccgccagagctaacgccgcctcctccaggcaacctaggcaggtcccaagctgcacttccgaacctccccgccgttcctctgcgccccggatccaagcagccgaaaccgcgcagggactcgggggaagtggggccccgggaggaaacccacctaggagccgggccccgcccctcccgccgccagcctcctacaggtcccgggggtccccccggcgcggccagaaggcggccgcgccccagccgctcagggacccgcgatcccagtcacaaaccatttcaatccagatcacacaccacttcggccaccccagagcggtgggggagaggaggtttcagggaccaacaaaagggatgccaaagagcccgtttccatcaagcggcccgcgggctgggaaagtcaggacccgggagccgccggcgcccccacccccgccgcaagagccgcttctccggggccacgtccaccccaggattctgccaggcatcaggccgccctgggggtggggggacgctccgagacagacgggggacactcggggccgtgtgcccttgaaggaggaagacctcggggaggaagcccgggtcctgggaccctcggggcacatctgcggactcgggtcccgggcccagggcgggtactcacattcacactcgcactcccactcgcgaccctcgggaagcgccaccgagaggctcccagccgccgccgcccgcccccagactctggaaacacttaggcgtccccagagcgcggcttattgtaaccagcccgagggggtccggggtgcgggccgggagcggcgtcgggcgagatgcgaatggccctgcctggcgcccctcgttcaggagcatgggcgccggcgcagcggccgggagcatagtggcggcggaagggctggccaagcgagccgtgagctaccgtctgcgcacaagccggaacgccagatcctacctgaagtccgggacactgagagcagaagcgcggcggccgcccagacggccgggatgcacagcagcggccgccgcgggagcgccgagccccgggccatgccgcaggcagtgggggccgggaagccctcagagcttcgggccggggcgcggggtcgggcgccaccacccctttctacgatgcgtccgctcctccttctccctggcgcttcgcaaacgggtccacttcgaggacctcgtcgtcgtcctcttctccggcccggatgcgccgctcggctccggccacggcaagggctggctggggaggttccttggcgcgggctggggcgtcccgccggccgccaggacgagcgcggggggcggaccgcgggcgagcgcgcaggaggcagggtccccgctcgcccgccccgatgggcagagcgaggcttgcgccggcgccccctgccgggggaacgcgcgggcggcgggcgggacccaaggagctggggctgcagctggggccccggacctgcctcctgcgcccgccctcgggcctgcgcctcggaacgcttgaacacaaaggtggcgccttgggggcgtcagccggagttcggcgggtctgcccacgcaggagaggcgcccagagcgggtgcccccgactttcgggggcgacacacccggggatctaggtcacaaatcagtaactccaggctgcactgcgcaccgggacaaatctgagagccacccagccccagacaccagcggtgaggcaggaagaggagaagcgaaagttgcaaaaggaaatgttcaggaaaacaaacaggccgccttggcaccggcgccctcccaggtcggtggggacaagcgcgtcccccgaaatgctcaaaactgccaggggtcgagctgcgtggagggagccctcgggagcgcgatgctatccgaagccaccgcggcttttggtttactgttaaaagcaaattgtataattttacccattaaaggcagaacactatttgttctctgcagaggcccagaatgtgcagaatttgcttcacttattagagacattttgaacggaattcaaatagcatgttttcttgcttattcttggttttgctcagcacatgcaaatgtctttgtttttcctcttagaggaaggaattggattctccagcatctcagttgcttgttccatgagattgatcttttaactgattatccagcagtttgtttggtgtttttgctggagtaccaagctctgttaattggagggcattagggagagccctggccttgggtgccagacgtgaggcctcagacgtggccagaaataaaaactctcttgctatggtctgcggacaaaatgactaagccagctctagcttgttacctctgttaaaagtatttaggcgtccggctatctctacccaatttgtgtagggaaatatctcacgcagttctcattcccaggagctgctgtaaatccagtaggagaatgggagaagatcctagcccctcctcaactggatggcaaaattattaccaaacttcttagacgggctcaggctgttcctctgcccaggctggtgcgggtctgaacgggggggctgctctccccagtggttagaggactgccaggggtttatctttggggttttcctccctttagcttcccttagaatccttaaggatgcttttagagtaatgttttaagagtaggtgctgaagcacttagttccacacccctctcttctggatctagggaaaacccaacaggggctgcagagaagggtcttgaacctgccctggaaaacccctccctcagcaatgctgtgtcctttccgtggtgctgtgcagctcggagaaggtggtcccagcacctttgctttccacttcacacagcgtgagcatgtggctccagaaccatttcatcagcagccctgccatttatttttgtgtgaccttcaggaaaatgacctcatcatgcccccatctgtgtgttattttcacatgactgaggccccacaaacccaactcaaaggtttaaacagcaacatatattttgctgacagtttcttgggtggagtcagaaatgtgggttatattgcatatgatttcttaaaagccttttaaagctttcttttttggcatttctctctcactctctccttccctttctgtaggttctgaactgaaggataaacaaaaaaagcaaagttggaaggatgaaaatacaagctttctcagtggttaagagaatatggcttacgtccaaggccaaattggagcaacatattcctttccatctgtattagtcatcaa

SEQ ID NO: 588821 - DNA, 4001 bp, Homo sapiens
tctaggggcgtagggggactgggtgggagaggatcactttcagtggaaggaggagaccagtgattgcatcccaactctcccaagtgctccctgcctagaccacctctctccgggtctgggatgcaagaaggtctggagctggccgttactaactttctgttgtcaagacccaggggtacgtgcgaaggatagagaagagcccccgattaaccgctgtgtggccaggaagagggactgggagtgggggtgggtgcccagagcttgcacagatccccatgtcaagcggacacccgcctggctcttcagtaaaagagtgaagaaaggccgagcacagcgcgaaggaaacctgaggtctccggcaaggcaggagaggagaccaagtgactccccgaaacccaccctccagcccttcgagaggcccagagtccagccggagcaagcgtaacgctacagtccctggcgcgcatccctgcagaccccagctcgccccggggtcccgccgccgccgccgccaccgcctgcgactgcgagggtcctggcccgagggtgcaccagcacctccttccactaccggccctttatctgacaaaagagccggagcccatgactctccgactgtgagcagtgtggcctttccaagcctccagaactttctcattacaacttttccggggtcgcactactccctgggccgcgcgggctcgggcacgaggacctggccagggcgcagcgccggcacgaaggcgcgcgccgcagaactgtttcctcagccgcgtgccggggaactaactgtttcctcagccgcgtccagcctcgcagcactgctcttctgcttgctactccagcgaagggacatgcctgctggccaggacgcttagtgggcctcgtaacctggcgagtgtgtgcccgcgcgtgtccaccctgcccccggccggtgcgccccgcgcgcccaaacccggccggcgaccactgcgcgccgggcgcttccaaactgctcctgtccagaggcatccctctttcggctttctccatcccgcgtccgcttccgcacccgagagcgacaagcaaaaaagattcagtgcaactcaaggactggtaagaaccaactagcctgtctcccctctccaaaaaagcgccctcccgcgtccctccagaactcccgaaagacatcaacaccttcccgcaactttctacgcccaggccatttgcagccccacctgcgagagcgaattcggggaactgcgcctgggcaacctctttccctttctgctgggtgccctcccctcccccatctccccgtctggctggagttggccggactcggggagcctcggtgcccgcagactcgcttacctcgcatggtgtggccgctctcccgctccgcgtagtcatgaagctgctcccagcccgaaccccggagagcccaaaaatcccgctcagcacgagtgaagaaggtggtcggcgaagagctgctctgccgagaaaaccatccctttaggcggacgccgtggctgcagggtgacgtttgccgccgccgccgctatgttaacagttttgatgttggtggtgactgttttgatgattgtttgtttgtttgtttgttttcaggaagggtgaaaaaaaaatgttctggctgtctggtgcctgggttttgttttggttttgtttttctttttctttctctccaatgtgcttgctttttaaaaaatgccaccgcctccggctcagaagatttcttttgtgatcacttggactgaggaggaggaggaagggcagcagcaggaggaggagttggtggtggttttgttagttacaaagaagagggagaaggaacaagggggaaaaaaggaaacagaaagaaaagaaagaaaggcggtgtggatggcagagcatgtgcgttttcacatgacatctgtgcctgttagcggatccacaatgtgaattttcactgttcagttacagggaggaagggagcagcgagagagaaagagaggggagagatggagagagagcgctgagaggggcttatacgcgagggcgggcttggccgcgacttccaggccccgcctgctgtcagcgcagccgccaatcagagcccagcagcgcctggagaggctgggaccgcggggaggggacgtggtggaggcggggggtggggcgggggctggggaccagggagtccgaggtggccggggctgcgacggggaattcgagactgtccgaactgggcagagaagaagggccgaccgggagagtcgggcagatccgcaggtgacaggcacttccgactccagcagagaaggggacactgatcacggaaaaccttcggaggcaagagacgcggggctccccgggtttcacgttcggtccctgtctcgcaacccccgcgggcccggcagagttagttttgaatttatggcagcgctttgccgagcgctatttgggtaaacttcggtctccggcgggggtttccgtgggcaggtggtttgggtgttggtggtagaataatgcaaacccactttcatcacttttagcacaactaaaatgcagtcccatggaagtagctgtccccttcctttaaaaacgtccgtcagatgctccctgaccctcttctaaaaaaaaaaaaaaaagaaagaaagaaagaaaaaaacgtgtatatgttcttttgtctgggaaattgatttttattagcatttggagactcccctggcgatggactacaggactgaaggagaacagctcaaattggcggtgtagccaccttactaattcaagagaaatggctgttgctagaaggtgtgattgcagggtgctctttagaaaggttttagaaggaagacattgttaactttagttagaggcgattggtaactgaacatagataaacttacttgtattccttaggtgaaaattgtcatctatgaccatttatttgtattttgataaaaatctaatacatatatccaaactgttcctttgcaagtttttccaactcagttgacaaaataagcatatagatgattacatctacttccttcccaatagtagggaacttcttaaatacttgagttaattgaacaccctaaaagattgggaggtgaaaatatttgcctcattcactcagtcttgaggctgggagatgtctactcattagcatacctgttggcacagcaggcctcatcatcatttaagtatccaaataatttgatttttgactggtatttattcatgatatgtcatgtaacacaaagtacaatgtagaattggcagttatttagttaattaggtcgctctacactgccaagtagttttttccttcctgattaaatgaaaaatgaattatctgctgaattttcaccagtattaaattgacgtagccctgctatatgccatcccatttgcaaaccaatgtgtaatttaggaaaattttagtattaagagtgaaagttgattgagtcattaattaaatgaaatgaacaaaaggaagttactgtttagaatagttattcctttataaatatctttctcctagatttgtaattgacacagtagttaatcttttaagataatatttaaggctccctggttttatcatttttaatcaagtaaaatatattcatcataactatgttaaagctgtacaaagttatgcctaatttagttgcttcattaaaaattactgaatataaaatagtcaagaaacaaattgtgactatatcattttaattttgttgcttcaagcagagacacaagaatattgaaaattccaaaggctttgtaaacattgtctaattattattgttgttgttatcattttagatttctatttctctttagagtgaacaggaatttcaaaatccaaaaatttaaacatttatgtaattttaactttctaaacatttattgaattctgaatttttttttaatgctgcaatatctgtaatccttgaaaaaggtagtcaacacgtgtataaaaagtatttacccccccatacattttt

SEQ ID NO: 588822 - DNA, 4001 bp, Homo sapiens
tcatggccacacactgtccaagtctttgccctaggtccgtactcttgacaaagcctccccaacaaggtgaaatcactctcggctcaccactggtggcagaaatactcttcaggaatcccagagggttgctacctgtccccccaccctcctctcccgaaaccaagcacaagcaaatacctgggcctgtctgttctgaatggtcagtttcactgtaatcctcaggcccttccagtcacccgttgccttggcaatgtcatcaccaactttttttggagactagaaataaaggcatgtaatcaacatggtgtccagaggtgaaccacagccttgaaacctgcccaccacttctcacttggcaacaaaggaagctatctcaagtacctaagggcaccttctcaatcagagcacagctatcaccatagcataaattgggggttggggttcttgtccagaactgtaaactgcagacttggccacaatgtaacctagaccccctcctaagtgcccatgtgcttaaggagggggattttcagccctgctgacattagaatcacctaaggagctttcaaaatactaggctcccatgtcagaccacccacgtccatcttcctggatggaggtctgattatttgctactctgaagttctcctcctctagtaatccttagcctcaacaggaggctaagtgtcccttaagtgccagctaacggccaaggaagaatagttaagatacaggttaaaaaagaccaatggggaagagcatttggggcaggggagcactgtgcaaggattaaataaaggcctaatgaaattcagagaaatccaagaggacagaatgacggggaagccagcagttgctcagcaggcatgagacacagcctgccacattaactgctaggtttacatctacaacacagctggaaacgctcactggatcttcacccacaccccgtttaatctcccaacaacgccatgcccacttcctgacgaggaaatacagatgttggctgcccaatgtctctaagccagtcctaacttcaaaactcccccttgggcccacccctcaggtacactaaagcagcagtggagacacatggagctaattacaatttaaaggcaccaggttcgatttttcacacacgaccttcctaaggtacctagtacttgttcagtggctcaggcctactgagggtgacagtccaagccacgagggcacctctggcacaggcgtgactccacgagccggcgcttaaagtgaaacaaatgtgaaaaaaatgccccttggaggggataacgtaccagacccagggggccgatcttgggggccagggcagaagtggcaccgacttcacctccggtgcacctcaggtatactgggggaaaagaagagttagtgtctgtgcagagggagccccgagccacagccctctcagcgtctttccggggttggacacgccaccctctgcctcttctcgaaacagcacagagcgcgaggcgggccacccgctcctccctcgggtgtgggcagctccgaaactcacaccggggaggcgtggagagagccccgtcgcccgctaacccaggccaatggggcgaaacgcccggagacaagccttaccctagggcgtgcgggctcccaagccgccacaggtggtccagtcctccctccccacctacacgtgaagaagctaaggcccagaaaggctgaggcttggccggggcggcgcaacaccgggaaggtctctgggaggcagcggctttaagagccccatacggggaaagctttgcacgcgcggcagggccgagggatgctccatcccgcagccccggccacaaccagagcacgcaccgactttgatctcgttggggtcgaacttcggcggcatggtggaggcggctggtgtcggatgaacccggattcgggacgaccgaaggaagttgcaccttggcctcctccgagccgaaagccgagaggccggaaatcgcgcggacaagccagatataggcaggaaaacgcggctatcgcgagaactgtcgtcactgcccggccttccagagacgcccttgtcgccatgtttgttgtgggcaggcgcctgaggctgacggctggcaagcagggcaccgcggtgcgctgaagctagagattccgaaagggggttcgggtagttcgctccggagaagtctgagaagggtggctccggtgatcccagccctagctgtttcccatattcctttatcgtgagtgtcaccccggtccccgtcacccaatcccagagccccgcccctcccctgaggggtccgtagtcccattccgagaccccagtaccgcggcgacccctgctccctcgagcacttgttgtgtgcactttagttatcaaaacagtctatgtggaaatccagtcccgctcttcattcggagagtccgcgattcctagagcctcagacttcgtcatcccggtctgcgtgactttatgagattctgagtttctgttcccagcacctgcctttgaaggagaccagactccggctccgcccggcccgtgccgggtggtctgcggccccgagtccgtgaccaagccctccgagtgatcggcctgccctcgggtgcacccgcgggtcccaacgtgggggatccctccatccgcaaagccaggtcagccactgcccaccccaccccaggaaatatgggtgtggccctccccccgcatctaggctggacgtcggagagggagggacaggcatgtggggcagcctggaaagaactgatcttcggggaggggtgggagagcgatggtggttgggaggaagtggggagggctgcacatcaggaagggggtgcaagagggttagtgattggggagcagaagggtaagtgctggtcatcagggacggatgggggagggctgttttcaaaccattccccatccttgcaggcaggtggggtgacaagagggcctgaactggctctgcaggcctggctgcctccccagacagccccgcccccgtgggtgcagagctgccatctttgcccatccctctgaggactgggtgtatgtcttcttcaactgcatctcctcccatgactatcttctccctagctcctctagcgggccctgaatcaatgttgcttgcatgtgggttgctttgtggctaacatttattgagcgctcatgtgccaggtactgtactaggggcttgacatacatgaagtcgctggatcctcatagaagccagtgttggtagcatggttactcacactttacagatgaggaaactgaggctctgagaggtgaaccaaggtgacctctgcagttgtgggtggcagatttcggattcaaacccagttctcttttcatcccaaagcctgtgctgctcaccatgcacttccctgggtgattgcctcctggctcattgccatcccttatccagctctggtatttacagacactgtgcaggccctgggcaggcagtgagcacctggctctgagttcaggacagtgtacttcgtgtgtgccaagttatgtgagcaccaagcagtcgggcaaatcccataggtcaggacttgagagaccacggttccaggctgcaatccaggctgtacagccaggccactgaacttaataagcatctacttcttcactttatttatttatttattattattttctgagacagagactccctctgtcacccaggctggagtgcagtggcatgatcttggctcactgcaacctctgcctcctgggttcaagcaattctcgttcctcagccttccaagtggctgggactacaggcgcatatcaccacgcccagcttctttgtgtatttttagtagagacggggtttgaccatgttacccaggctggtctcgaactcctgggctcaagtgacccacctgtcttggcctcccaaagtgctgggattacaggcatgagccaccacacccggcgtgtttcttcactttaaaaagggttatggtgagaacaaaatggaataataacg

SEQ ID NO: 588823 - DNA, 4001 bp, Homo sapiens
aagccccaatgaattcttgacatctgcagcctgaggaagtggtctgcagagccacgtgccagtgcaagacactggtagaagagtgagcccagcaacaaattgggaaggctaaccactctcagcccacgcaccaagaaaaacctctttaccatgtccccggccagggacggctagcacttggcttcctgcagccaaccctccctatgtccaggcagactcaccttgtagaatttcctgaggttttctttctgagtctggttaataactgtgagaacacgggcaatggatttccggacgactcggctacaaaacagagatgtcagtgaagatagggaagacacatagcactacccaagactcaggactcacacatagggcagcaatagctgcagcctcccccatcaacccatccatattcactcaggaggaaggcgttctgggagtgaggtctgaggagggaagagaggggcatgggagagacagcagaggctttatgaggaagtgcaggctggataaatgaggcagatcagaaaaagaccttcaatcccagaacacgaatttatcctgagggctaagacccaaccaatgccaatttcaatgagctgatgggaaggaatcatgccacaaaccaggcaatcaggctagcttagggaactgcaggagagagaaacaagacatttgcaaagtggagtcactacaagccaggagactgaagcaaacaacgagccagggagaagttatttgtagtcatgtcaggatgagggagtcacctagtagacagctggtcaacatggtttttgaggattcagtgtgcaactgtgcttgtccaatcctcccacccctgcctctactaaggttgtttgggggcaaagagggcaaccaccattttttttttttggagacagggtctcacctgtcaaccagactgaagagcagtggccccatcatagcctcccaactcctgggctcaagtgatcctcctgcctcagcctccagagtagctgggactacaggcctgtaccaccacacccatctaatttttttttgagaagtggactttgtacccaggttgatgaactccaaacccatgttcctttcacaagtctcccgcactcttagccatgtaaaataacttacgctgccactccagggtgcaagccacccacctgccaagggggttaaaaactcaagtgttggtgggaagcggaaggaaggggtccgggtaggctttgaaggcagcattaagatgggtctccggggatgcattccaggcacaaggaccgcaaggtcaaggcaggtaagaggctaagcacacaacgggtctcccatgcgcgccaggatgcacggagtgggcatctaagcggccagctccttaagccaactttgaaatcctccgacgatcccgatgcacacgtgctccccacccacgagggctgtgatccggccgcctcacttacatcttagagagcttggaggccgcaccgcctgtcactttggcgacgcgcagctgggacagctccaccttcaggtcgtccagctgtttcagcagctcctccttcttcttcccgcgaagatctcgagccttgatcttggcctgcgcgcaagagagagtgtgcctcagccaggccgcggggccatatccccttcacctgcgtggccagcccccaaaggcgcgcgactcgccatcgactacgagtgcgccggagccccaaccagggctcaggacagtctccctcgccggccgtgccttgggcagagtaacccaggcccgggccgcgcgcctctcccggcgccaagcgaagaggcgggttgtggtggcgccagaccattctgcgcggcgccccacaggcctaggtggcagatagaatccgcgggctcagcccgcaccgccttccccaacccccgcgcctcacagcgctcggatggcgcccgattccgcagctctcaccattgctgcacaagccgccaacgccgccgcccgctccgagggaaagaggaagtaggcggggctgacctccgcaactactgccgggtggcggcgggcgcggccaatggcgccgcagcgggggagccccggctccgcctcatctcccccgcccccgaggaacgccgtggtactgcccgccccgcctggtagggccggagccccgccttgtagtgctcgcctcattcacggcacccctgatagcgaggtcggcgtcacggtgtaggcgcgcagttggggaaaccgaggcccaacgtgggcggcagctaccagagatggcacacggaggactcaaattcgtccattcagtcattcgttcattcattccttcgggaaaccttgcagatctcccaatctgggcaactctgagctgggcgccagtagtctgggggtgctgacgggaggaggggccagagttttcaaagacgattaaccgaggctcacgtcgcggaggaatttaaagcgcgagatggacgggaggggcgggctcaggcagttataatccaactccataaaggttctggggaggcagtatatggaactgcaaagagcatttacacctttttttttttttttttttttgagacagagcttcattctgtcgcccagggtgccaggctggagtgcagtgtcgcgatctcggcttactgcaacctccgcctcccgggttcagcgattctcctgccccagcctcccgagtagctgagtagctgggattacaggcatgcaccaccacgcctggctaattttttgtatttttagtagagacggggtttcgccatgttgcccaggctgatcttgaactcctcagctcaggtgatcccctcgcctcggcctcccaaagtgctgggattacaggcgtgagccaccacgcctggccccagcctttatttattttttttattttttaattttttttttcagacagggtctcgctctgtcaccctggctggaaggcatggcgcgctctccgcccaccaaaacctccgcttcccgggttcaagcagccctcccacctcagtctcccgagtagctgaaactacaggcacaagccaccaggcctggctaatttgtttattttttgtagagctgttgcccagggtggtctcctgggctcaagcaatccgccctcctcggcctcccagagtgcctaggattacaggggttagccacctcgcctggccatacagccttttttatttttattttattttttatatattttttgagatggagtctggctctgtcgcctaggctggagtgcagtggcgcgatctcggctcactgcaacctccacctcccgggttcaagagattctcctgccttggcctccccagtaactgggactacaggtgtgtgccactacacccagctaaatttttgtatttttagtagagacaaggtttagccaggctggtctcaaacccctgacctcaagtgatccacccgcctcagcctcccaaaatactgggattacaggtgtgagccactgcgcccggctagtacagccttttttaaagtgaacctgaccaggtttcaaattcttgctctgctgccaaggtagtagttgagactcttgggaaatctcttcccctttcttgagtctcagtttgctcacatgtgaaatgaggcatttatgagaattagaggagatatctgtaaagctgttaacccgaaatctgacgcataacaatggctcaaaatatcattggtgttcatgttcccagaggaaggaacacttcagtagagcccggaaagtgaaacgggaattcacaaggcagggcatgtttaggctttctgattaatgtctgccaaccagtaggcattaatcagcactccagtgccactcccttgcccttaataaagacatgccacctcttagagttatggttgaagccagattgtcctcttgttactaccagctgtaaccacccacaaggagacttctcccatctcctatgagtagcaacctctgtgcaatcctttccttagccccaaacaggctgaaataaaatga

SEQ ID NO: 588824 - DNA, 4001 bp, Homo sapiens
cactcacagggcctgctctagtcacaagaagctgctgggctcagctgctgactcagtgttaaaaagctcggttttactcttcacagtaatttcaggccaagaaattttacatcactgcaacagcccgcccccagtgttcaccctaaggtggggcctactcacctgctcgaaggacaggtggtctcttcgttgggacgtcccctttgccagcagccttcttctcggcccgggccaacagtctctgcttcttctcttgctttgtctctggtctgtacttgtgggccagcttaagcagctgagtagctggaaaaacactcttcagtttaggcttggagtcaaggttctaatccttgtcacttaacacttaataacaaatgctggactgcggtcctgctatatgactataatttaatgacaactgcagttcaagaagcctaagaccatccccctcatgttctggatgaaataaggaatccttgcctgagaaactcctttccacgccacagaacctcacctgtttggcggtccagggcctgggtgaactggttaatcgcaggaggcactttcagccgcttatagaggatggctctctgccgctgcaacctgatatagcggggccatttcacaaagcgggtgaggtctcttttgggctggatgtcctgtcctgagaagtaaagggtgacaccgagtgaggctcaaattccatgtcaagttcatgtctggggccactaggaagggtgttggtgcatcagcgatcttggtggtttaaaatgtcatcaccatctctcagatagcaaatattcttttacatcatctgcacacaaacacctgagaacaaagagcacgatgcttttcctcatctaacaagaagccaaggtgccacgaagtacagcagaattgcagtcctagtacctcgctgcgacactgctactgtacttgtttccagatggctaagctgaattcaaggccactaccatattgagctgaatgctcgctcagcaactcccaatgaaagcaagaagcatgtatcattgcccccgtctctaagagacacaaattaaggactgcgaccactttacacccactaaaacctacaagatacaacacaacccaattaccaccttcccttgagaaaaacatagaccgttttcattctgccgtttgttacttaccaatgccaaaattcttaggccttttctcaaacaggggattcaccactttcttagcctcctgcttcttcacgacagctggggccggagccaccttctttcccttggccttctttcctttcggctgggcagaaagaaaacgtcagttaaaccgccgcctccactcgcttcgtcgggggtagggctcaggctggctcctccaaaacaagggacgctgacagcacctgcctgaactaagctggcgagcagctttctgcaaccccccagcaccacccctcgacaggagcatctcacattcagccgcacaagcatgcagccccgggaaccccgagtggccagagcaaggctaagcccgagaccacgctctcttcgcgtcgcccacccaggagacaccccggactcatgactcctctgagtcgcggccccacaggctctagaagcaacaggggcgggctcagaactcgtcgctcacaaggcctctggagcggcccccagcaagcccgagagacgctagggctccgagccccgcactgcggtgctccaggcctgcgacacccagccctgcgacaccgggaacaacgcattccgctctcggccgcccggggctctagtccatctcaatgtctccgtgccacaccaagtggggctctaatccacctcggtgtctccgtgccacaccgagtggggctctcctagcgccaggaggagcaggaggccctccgaggccgcgcctggaggaggatggcagcggatacagccggaacctggctatagtgccacggaactacagctcactcaccatcttgggcggcgggaggagagagaaaggaaagggaattgtgggtaatatgtatgcggcctcggagatcgcgagagttgataccggcacgggatttcggatttaaagcaacagcattcctataaagctaaaaatcgaggcggggccgagaggctgcggcggctgactaggttttcggaccgcggcgcggcggggaagagagactgcggcgggagggccaggccgtgggagagacgcgggaaagtgcgggtcgcagaggcacttgaccaccccgccctaggccgacccggcggacgcggcgtctggtgtgcgggcgctggggcgggtatgagggtgtggtggggggtggggatggagggggggtgggtgtgtgggcgggagtgggggtgggtgggtgcgtaggcgctggggtcggagatcccctttcctgcgtgtgacttatttcccacaccccgccaaaaatgggcacaaacaatgcgagtgcgtccaggagtccgctcggtcgtgcgccagactccgaacctagggggccccgggccctccctgagcaccgcgcgcaaaggcccggccccagggccaggcaactccagcgccgaggccgtccagtgcggctggagggcagaggccgagaggcgcggcgcggaacttgagccccttgtcccggcgcaccggggaaccatgagggatgttaagcgagggagtggaattaccccccttttttttttcttttggagacgtagtctccccctgtcgcccaggctggagtgcagtggcgcgatctcggctcactgcgacctgtgcttcccgggttcaagcgattctcctgcctcagcctcccgagtagctgggattacaggcgcctgccatcacgcccggctaatttttgtatttttagtagagttggggtttcaccatgttggtcaggctagtctcaaactcctgacctcaggtgatccctgcctcggcctcccaaagtgctgggattacaggcgtgagccaccgcgcccggttggaatgaccactttttaggacctcttccctgccgcgcagagactggagggagcggggcccgcagtgcagggatgaggtctggagcggggcagcctgagtgggagtggaaggaaagcgtggatgtaggcggtgcagaggggtcgaattggaaggactcttcggatgggagggcgtggcgaaggtggcggcgggctaagaagttaagccaagggctggggacggggagctggtgttgagtttgcagggctccctgggacacgctgtgggcctggacgtgaagtctggactggagccctggacagggcttggagggctggccaggagttccaggatgagcttgctctggcaaaggcggggccagtcctggcaccccctgcggtgtctgctgatggaatgagttcatctgtgtttcagtgattgactttatttggcagaaagggaatccccagaaatctgcgtgttctgctaaggttggggcatagagggtggctggggtagactctgcctgcactcagaggtctgtgctgcactctaggtcccaggtctccccgctgcgctgcttgaggctcggccatggcccagcagagagccctgccccagagcaaggagacgctgctgcagtcctacaacaagcggctgaaggacgacattaagtccatcatggacaacttcaccgagatcatcaagaccgccaaggtgggggtggggtggcccaccaaggggagcagagtctgagaaggggtggagacaggagaggccaggggctgagcagcgcgagtgaatagtgttctaggcaggaagcacccagtgcacagggagctggtcagtagataagcaaaccaaataatggcacgtccagcccttactaacagtatggatttggatggagatttcactttttagtgcctcagtttctcctgcatggtggggtccttgtgatgactggtgagtttatctgtgtaaaacagttacctcggggcctggcacacagccaatgagcaggagaaaagcagactgagggg

SEQ ID NO: 588825 - DNA, 4001 bp, Homo sapiens
atcgtattcctgttttatggataagaccactaaggcacagagcagtaacttgctaataagtggcagaccaggattgaaacccaggcaggttggtaccagagtccatgctcacaaccactatactatactgtatgctgcagatggagagaaatgtctgacctggcagtgttcctaaaccaggccaaagcaggggcaaataactatccagggaattagatatattcagtactgactgaggcttcttgtagacactatattctcccagcaccggcctgagcctactactcttcctctgtcttcacccgatcagccccccggggtaagggcggggactcccatttctttaatcccactccacatagcaggctgagtagaggctcatcaaataggtagaaactttatttcctaaatccctccctggacctctttcagaaggcagttcaaatgcactgtaggtagaaggcagaggaagcccttatttagcaatgcagaacttggcagaggccccacatctgtcattcttcacagcagtcccttcccacatgctagagggaaggggaagcatgatagggaggtccacttttgtggactcaaaccttgatggggatgttgagcagtcacaacgcttctcagaaaaggcacaagcaccccagacattcaggcccggagaacaggctggctcagcaggtcttcacgatcgggtgtctcgagcccttcttcgggaacgagggccacagctggagctgggcatggaacccaggccagggggtgctcctgggggttggtaaccacactcattggggtccagggggtcccggctgagcagcacccacactgcaggcacatggcggcgcactgtgagggggtctagccctgtgtcaggtgaggctgggacccagctgtcctcagtctgaaggaaacgtagcttggtgagctggtgcaggcctgggacccgccgcttgacaatctcagcgcagctgacagcctttcctgcagccctgccagaacctgagaacactacatgccgagcactgccgccctccaaccgacccagagccaaccccagcaggttgcgaattttgctgccatctcggacccgcatctcaagggtatcaggaggtagctggggcattggggaaggcgctgggagctctacagagccagctttccggtagtgctccatcctgcttgctgtcttgtctgtgactctcgctgcccactgcagggaagcatcaggtaagtgctaagcaatgtgccccaagtcactgtccaccatcccctatctccatccaggatatggccctgctccccgttccagacttcccagaaacaggatcatgtccccttgtccttagcatctcgtgacaaggtccatgcctgccgcagtctgggaaagggctgtaccccatacaccccgttcctctacaagggccataacacccccacctccaatcctggagtccaagaggcaggatcacattccccaaacactgagctctttgggaaagtgccaggccccctcatcctaaactctccaggactggggcttagccccccttatcctgggctccttggaacagggcctggaaccctcaccccagactaataccaatagagagcgctcctcacttggggctctacaaggacagggacaaggcccttcgccccaggccccccgggaaacagccaagaacccttatccagtgctgcccccaaacagaacggatcccctctcccagagattaccaaggtcaatctatatcaacccaggtcactcagaaactcgggggcagaggctcgactcggagggctgctcaggacattccaagacagccttggccgtttccatagccacggtctcttccagggtcttgccggccgctgcagccaagccacaggcgtcccccaaccctacgagcgcccctctgcccgcccggttccggctctcaccgaagccgcctcacgcacgatccggagccaagatggcgcgcgggcccggagcgcactaaggccgcggggccgcgcacgccccgagggggcggggcgtgaggggcggggcgtgagggacgggccccgaggcatctccgccgcggaaacaacccgctggccagagcgccccggaccagtcccagcggggatgggaacacgagcgcagcctccgctgttacgccccggagggaggcaggacagttccctgcggtagaaaggagcggccgtcggggaagtcctgcgtctgaaggagggggatctggcccttagaagatgggagggctggcgttagctgttgagcaaacggggagctgtgggtttcaccgtgggtgcgaacaaaggcttcagtttgtagtggctgctgttgcatgggcgagagccttagttaccgacttctgagcttcgacctcatcctgtgggcgctggcggaccacgggggttttccgggttttccaggggccagtcgaaccagatcttgtgcagggagccgaggagggagtggtggggaaatcgggccacagcccctgacgacacctgccgcggagtctgggggctgagggggcgggggtgcccacggagcctagtatggtgcctggcgtatgaccggcgctcaatatttgttaaatgatttgttacattaatgaaccagagaaatcgcggtgggaatggaaaaaagattaagttgggagatactagtaggttcagtgacgagttggccactgtttggacggagaagtaggaaattccgatctagggtgactcccaggtttcagatcggtttggacacgctgaatttgaggtgccggagaggtcgcaaaggcggggcggccaatgggccgttggaaaaagggtctggagccagagcactccctgagaccacaagggggcagcaaacatttggtggactacggtgccaatctgtttctcaacatgcttgccccagcgcccctacttcccaacttcccctccccaggaccaaaacttcctgcatccaaacctcttaggctgcccttctcggctcgtggcagcaggtaggctcccaagagagaaatttaaaggcctttgcacatgctgctcccttggctctgaaagtccctggatatcacttaccaggtcccttcagtcccttttttcttctgtgtccacctgataggactgcccttttcctttactgtctatcctgctagcccgtgcagggcagggattagccctatctactcccatcatctgacatttggaggtctcttattggtaaatgtgggataaatggatacataaaggaatatcctattcacataatcaaatgagagccttcattttgagagctctacacctgccagaaagccagaccaggatgagtttagttcccagtcaaacgattaggcaggctgacacctctgccccctaccacctccatcctagaccaagaagccagcacactcctccagtcatctctatggtttattgtcactgaaataagaacactgattggggggagggtgggtgttgcaaattgcaaacctcaggtaacctgacctccaactttagagcccagagtacagagaggtgggccttgaagccaataaatacaaagcttcctctgccttgtaacaaaggcaggttggcatagggccctggagcctgactgcccaggcccactttgggatggggagcagctatcactcctctgctggcttcacttgcgtggcggcctctagctggcaaagtagctcatcccactgcacgaattgcttggagagaagcattgtctggttgtaggtcaaggtgagaataggaatctgagtgaggaagttcatggaaagtggggaacaggcaaacataggtgggtaggataggatgagagagagctagaggtggaacaaaaggacagggcttagggacagcacccattagggtcctagttgagcagaaaggatacagtcttgttgtattcctccaggagagccttggactcctcagtgatttccacacactggtcctgtagggccaaa

SEQ ID NO: 588826 - DNA, 4001 bp, Homo sapiens
ttttctgtaaaaactccaagtgaatagtgctaaggccttccaaaggcacatatttatcttctgatatgcacacaaaatgatagacaaattaccaaaattaagcaagccctaattgcataatccctcctaccttctttatttaagggctttcttacaacatactggcggacatcatcttctttagagagattgaaaagtttgcggattctgctagctcttttggggcccaggcggcgaggcactgtagtatcagtcagtccaggaatatccttctctccttagaagaaacagttgaagagattttaattcaacaacttccttaagaatcctaaatcagaatgtttaatgttgaattgatggtagagaaacaaatccattggtctgtaagtctggatactgcaaatgaataagcatttggacaactggctttaaatcaatttcaacgaaaattgaacacaagtaaccctcacctttttttacaataaccaagttgagaacgctcagatttgcatccacaatgcaaccacgaactgattttctctttctttctccagttctccttggtctgtaacaggaatgccccttactcagtagcaggcggacacggccatgggtcaagacaccctgcttcatggggaaaccttgtttgtcgttcccaccactgattcggaccacataaccctgcaagagcatacaatgaatgacacatttactatttctattccaaaattatacagtacaggattgtgacctctgtgaacacacctatatgagaaagtataattatgaaaaccaatttgaacttaagcacgttttctctgttcagtgagttttgtctatattcccaacttgtcaagttcaattatcaaatgtctttcaagtcgcatttctaaccgatgttttattagagataacagcactaagaagataaaatatcaaacagcaacaaacaaatcagatacaaccctttttggcactttggggattatgaggacagctatgtgacatattgccaaatgcatgatgcagggcaagaattatgttgatgtaaactttacgtatattttatggcttactctacgtccccccctccaaggtaatacctctaactttataaagtggcattcggaagcaacttaccaaaggtcagaagccagaacccggagtctgaaccccattccaaataccagttaccaatggcgtttaccgtctctgacttaaatacctgcaacaatttgtcaacttttaccttccattcttcacccagagcgtcagcagcaacttctgtggccatacgcttctcatagaaagtacgaagtttgcgttcatcgtccacttcaatgagtttctggcagccagtggctgggaaggagatgttcagctaaggattaaaaggggggaaatagtttacgaaactatctatacaggtaattgtagagccatctacaaagttaattccactgcaaaaagcctttcatgttgcctccacacaagcaggaaatataagatgccgactgtactcactaaaagcacgtgaaagcagagtagcagtcaagaagcgccgcactcagcaggacgttttcccctcaagccccgcggaatgactctgggggcgagggcactccgcagccgttcaccctcccgaagcaagaaagccggggtcaagagccgcaccacaggcctgccgcaaactgggcaacacgccgcatccgtcccggctgggcgcggggacgccaccatggcgctcccggcccgccgcggctccagccgcaatcgcctgccatccgttcggccaaaaagctccatgccccagaaaggcgagccttctcctacttgagacccttctccacctaaagccaggatcctggagtgctggaactgaggcaatgccgcgttctgggactcgattcacgttccccaaacccagtctaacactcgccaccatcacctaccttcatcttgaagcagctgaacgcctccgaggcgccacggaaaagagggccaacttccgcttagcgcaggtcacataggcgctttcagttctcgcgagatgagcagaagtacgggatagcggaagtgagcatgggtgggcggtacttccgggcgagattaatcagggcctgggaggtaaagtcggttgggtgtgggtctgaggttgtgccagtggtggtagtctggtaaggcaaacccgcgtgtaattctgagggctaaccccttccctgtctagtcttttccacgctgcctgggttttggagctgggcgccagcggagccccacttctgtcccaggcactttgcatctgacggtaccaaaataggagggcaaggccgggcgcggtggctcacgcctgtaatcccagcactttgggaggccgaggcgggcggatcatcttaggtcaggagttcgagaccagcctggccaacatggcgaaactccgtctctaataaaaataggtaaaatagccaaaaataggtaaaatagccaggcgtggtggggggcgactgtagtcccagttactagggaggctgaggcacgacaatcgcttgagcccaagaggcggaggttgcaatgagtccagatcgcaccactgcactgcagcccaggcgacagagagagactccgcctcaaaaaagttcgagttcgagaccaagtaaacaagaataatttttactatctaaaactatcacataccatctccccactttagtgtcacaaaggtttgagtttaggactgttttacattcgaagttgaacgattctactgaatcctctttgatcatctcacattaattcatggaatcttggtgaaatgatgctttttaaaatctgagtactgtgtgtcatttttttgttgaggtgaaattgacataactagtcattttaaagtgaacaattcagtggcatttagtacattcacaatgctgtacaaccaccatctctatcgatacagttccaaaacattttcatcatcctaaaagaaaaccctgtaccctgttaaagcagttgctgccccttccccatttcgaccaggcctggcaaccaccaatctgtgttctgtctcagtggatgtacctacttcataaaaatggaatcatacaatattgaccttttgtatctgtcttctaatcttttgagtcgtagcatgtatcagtacttcactgcttttatggctcaatattctagtgtagatatagactgcagtttgtttatccattcctccataaatagacatttgggttgtttctgccttttaactactgtaaatagttcttctatgtttgagtacttgttttaaattattttaggtatatacctaagagtgaaattgctgggtcatatagtagttctattctcaactcagggagaaactgaaactgtattccaaagcagctgaaccattttacattcccaccggcaatgtatgaggaccgcactttatcaaaatcatggccaacacttgttatttttttaattttttaaaaatttattgtagggacagggtctcgctttgttgctcaaagtgagatcctgttggtctggaactcttggcctccagcatcctcctgtctcagcctctggagtagctgagactcattgtggttttgatttgcatttccctaatgactaatgatgttgagcatgttttaatgtgtttgttggccatttgtatatcttctttagagaaaagtctgtacaagctcttagctccccctgttatttttattgaagtagtgggagtaaattaatgtgaggcaaagagaaagtctagaactatgggctagttttttttgtttgtttttccttttaaaaatattttagggtggccaaatgcagtggctcacaccagtaatccagacgctttaggacgctgagatgggaggatctcttgaggccaggagtttgagatcagcctgggcaaacatagtgtcaccctgtctcatttaaaaaaaaattttaatgcgtttttaattgtgggtaaaaaacatataacacaaaatgta

SEQ ID NO: 588827 - DNA, 4001 bp, Homo sapiens
atcctcccacttcagccttccaaagtgctggaattacaggtgtgagccaccacgactggctataaagtagtattctgacccacattttaccaatgaggaaacaagtgtaatgaaattaagtatttgcccatgttcacagagctagtaagtgaagggaccagaatactaactcaggtggtctagcttcagtccatagcataagcgcttctacagctgttaccaaacatcactaaagtgctgggggctaaattcacagaatcaaatttgccagtcaagcaatacttgtgggcagtcagaatttttagatttgcatattaagcactttcaagttatttcaaataaggacatgttttaaattgctaacacgtttattcatgaatgaagccaagaagaatttataaatgcattttaataccttgctgataaaatagtaacattccgtctttgcaatctgatacggaatacaggaagatactggtaaaggctttgatgtgcatatctatcataaccaggtaatgagaacacacacgaaccacctactttagtgttacaccataccaacttctcagaaaggtcagcttcaagctctactgggtagctgagtaaatagcgtccaatgtttaaagactggggaagcggggagaaagatgaaaggagtaagcagcacacacttcaaagcccacttttaagcacacgacattatgaatattaaaaataaaggatgcaaacaaaaaaggcaattcagcattttcagaaagagcatttggcaatattcaacgcataaggagactgtgcttggggccatccactctctccagcttctcaaagtgtttccgggcattgcgaatgttgatcagagtggccgcagaagggatcgacggatctgacatgaccaccatcacgtacgtatttgaggtgaagatgtcgatgaaagcagcgaagttggaattcctaacttccatgctctggaaggaagcggccaatttactgcagctcagcttgaactgtttgatgatgttgctgatcttctcaaaccggtggacgtcgcgctgctctttgcactggtagtgggaaataaccaagaatgtagctctttcgaacagcagaacttcatcggcctcaatgatttgggcaaaattcctgaggttcatctccagctgctgaacgttgggaatcagctggtagacgatgctggaccaggctttgtagagcgtctcatcccagatggacgttcgaaaacaagcacactccagcgggcgagacagacgcctcaggtcttcctctcgctctttaaaaatcaggtcacgctgatcctcctgaaccagatccattttgtgcaccaggcagaagattttggcgtcaggagagttctggaggatggcctccagacacgactggtaataatgcatgtccttttccagttcgcggctctccacgtcaaacacgtaaatcaaaacttccacgttacggaagatattgtctcgctggctggtgaagtaattttccatgaaggtgtcctgaccgccacagtcccacaggttcagcaccaggttccctaggaatcggacgtgggagtgttccacgtcaatggtggcccccaggcgccgggtgtcgcgagcaatgtaattggcgaagattatcgacctcatgctggtcttccccgacccgctcttccccatcagcagcacctttttcttcatggctgtatttggcatcacccgccggggcaccgcggactgggcctgagggcgcggcctacacgcagcgccgagggaggggtcgggggctgccggggactcgcaggccgcgcctcgctccgctccgccgcgcagctgggcaggcaggagagtcgagagcgcgaacccggggctggagaggccgcggacgggctggctcttactcagatgggagcgcccgcggctgtcagtggcaacggctcgggagatacgctcgctttccgggagggagccgctgcgtccccgccaccacccacttccggcggcgatctcgcgagagctccctcgctccgccctccgtgcccgacgagccttgaaaagccgctgctctaatgaaacctaaccggggcggcgtgagccctaagatggaagggaagctcgaggacttcggtcttttgttctgttgcagctgggtttgctgttgctaggggtacgtgtgtggttggccgggggaaatgctgccctctcgtggccaaaaaaagccccaaccgccaccaccaccgcaactggctttaggagcgaggtgtgtcgggccggtttccgcaggggcagccgactggtgaagtggagggaaagcctaacttcccagtccgcttaggcctccccagcttgcccggcccagtgagtacaagggcagggcagatggagactgtgcaggcgcggaaagtgagacttgtaggcaagcgattgcctgttgctgcgcagctaggtaatagcaagtccctcctaggagacatcctggcttccagtgggtgcttttaattcctttctcacatctgcttttccgtaatctcagactttagaatttataattagaattccaaagctcgaggaaatgataatgtggaatcccaggcattagttccatcctcacagtaaccctgtgaattaataaccctattttcaagttagggaatcaaaggttagagaggttaagtcacttgaccaagttacacagatactaaatgatgaaatggaatttggttttagacaatcttgctgcggtctatttgcctaacaataggctaccctgtgcccctctcaaagcataatatgattctgctcttggtcttcaagtagatgagtgaatcagtgtcgccagtatcgttcatacagaatgaatgagagtcatcaggatactgaagcctctgtatctaccttaaagtcctttttttttcttttgagacggagtctcactctgttgcccaggctggagtgcagtggcgcgatctcagctcactgcaacctacgcctcctgagttcaagcgattctcctgcctcagtcccccaaatagctgggattgtgggcacctgccaccacgcccggctaatttttgtatttttagtggagacggggtttcactatgttggccaggctggtctggaactcaagccagccacctgcctcggcctcctaaagtgtgggattacaggcgtgagccaccgtgcctggcctaaagcccttatcaaagtgtatactgtactgtacaaattcaggtattccattctttcatttattcaaaaaatattttaattcctactgttaacgtgtgcagtaaaagaagttcaaaaatggcctttgctgtagtttatggaaatcatagagtgaaattccataatacaatatagtatgtggaaaatctcctctcaatgtattcagtttcatctccttggtgctacctcttctggagccttcttatctgatcgcctttcaccaccattctggggtttcccttccccgttctttcgagttgggtattctttttcctgatttcacatcttctcatttttggctcatttggtggaacacatgttccaatagtttccagataaaaagtatgaggagagtaaaaatttcaagagattggatgtctgaaaatttctttgtttttaccctcacacttgattggttggacataatttttcctcagagtcttggaggcattgctctgttgctccatcgtcttttagcagccagtagtctgatgcctgcttcttggttttgatctattctttcctctctaaaaacatattcgaaattttcttattctagtgttctgaaacttaatgataattggcattgttgagcccaaatttgcattgtactggactctccaatgtgtcttttaatttggaaaccatgcccttgaattctaaacaatgttcttgaattgtttgatgatgtatttcctctattctgtcatgtgaatactcctaaggtctggatatcacattttacggagtctcctctaatgtatttttttt

SEQ ID NO: 588828 - DNA, 4001 bp, Homo sapiens
taacacttgccaatcccacctcctgccccagttcccagccctcatctccctgccccattcatggtctcaaggctcattattccctgctcttgtggttcacattcctagacacttcctgggaacaaatacactcccataactatccagcatattccttaaccatatagttgcacaacatggcactactgtctcctattatcctatgtttttgaaccctctaccaaggtggttattagaaatgggaatttttttacaattattttttacagacagagtctagctttgttgcttaggctacagtgcagtgatgcgatcatagctcactgcaccttgaactcctgggctcaagtgatcctcccacccagcctccttagtagctgggactacaggtgcacaccacaatgcctggctaatttttaaattttttgtagagacagggtttcaccatgttgcccaggctggtctcaactcctaggctcaagtgatcctcccatcccagcctctcaaagtgctgggattacaggtgtggaaatgggaatttagggaactctttctacctgctcagcaatggagcaactctgggcgggaaaaccccagaaagaaggtttcctctagctttggtcatcagtgtctttctgccagtcatagaaccccttccctcttttttggccttctgaataaagatggggaacacaatggtcttcaattgctcttctctagcaatctgaccttgacttgagatcctgataaggtgcctctgtaggactgataacgcttttcctgactggtcctctcctgggtaggatcaaagggaggagggcaggagggtagatttgggagtgttagcttatgcttaggtctcttcttgaaggcttactgtaacagatcaggtgccctaggcattacaatgactgtccctgcccctgccagacactgtggggcaccctggtcaatgttttcttactccacccttacctggagcctggtggctcccatagcaccagaagatatggtatgtgtgtctatgtgcatgtatagctatgtgcatgcatgcatgcatgtatgtatgtatgtgtgtgtgtggagagaaaggtttcccagccctcctcttgaaagctgcgaggatccttgcatgttctccatcataaacttacagtagctgtaggggtgtctcctcctattaagcctttgtttctagatctgactcccccatccctgacccatactagaagcttcattagaaatgcccaaaaaggaaggatgagatctgcttcttgacaaaatagcataaatggcattagcccaagccttggcttttccccatctctgcaccatagcccaaatgtatgcaatgagcttgtctaatgcttgtgcttccgcatgttcccccctttatccccccccgcaccgcccccctctcccttttggaaagacaaagccaaccctcagaagccagggcccaaatgtgctgatcggtatcctagcatctctgccctgcccctcccccagctccctgagccatacctctgtcaggagccttgagctggacccctgatgcgtctgtcccttttgcactccgaccaagctctaccgcgacagttccagctgagacactgttccacgggatcacacaggggaactgggccgatttcctaagatctgatttctgctaatacaatggcatcgttgctaatgcagggaggctgcgcaatcccagccccagtctccgtgctgctgccgcggctgctggtgctgcggtgacgttgctgctaagggaagggggaagggaaaggagcaggcaggcccacagcacagccactcagcctccctcccttccagcccctgtgggccctttagcctagggaagggggagggtagagaaaggagccagccacagagggcagtcagtgctggaagatggagcactcttaagacagcaaaggaaaaatggggagagttgtgtctagctcctcttttgtccttaggcatctcagggaagatgtctgggcagagccttggagcttccttccttccttccttctttaggctcctcctttcatatcttaaccagaaacctctccctcctctttttgcccattgtgaatgactctgttttccagctttttcctctaaccaggattccagactagcctcagggtggggcagtcagcctgggaggggattcctgaagcccagaagggaggctgcagggaccagtcaccattctgccagcagtaactcgaactcagtcctggtggatggcccacgagtcttagcactggccttcctagagagacggggcggtagacaggcttctgtacactgggtggtggtaagtcttaaggaccatggaggctgcaggccctcttcctaacacggtattcaattcagttccctgggtcttcagaggtctactcgctgtggctgaagtagaactggcccctctcacatacatcagttctcggtcagtgctcagctgggtccagctgggtttgtgtgaaggcagaatccctctagccaggctgagaggccaggaagcttatctccccagggaaaggaaggcagggaacagggagtggtctctcctaggccacagaaaaatctcagttctgcctggagacctacagagtcctctgctccttccctgctccagcctcctcaggttctgggccaattctgtgggaataaggaaaaaagggagaaactgcagctagagccagttgtacaggaagtagcggtgaggtctccgtccactttgtgccactgctccctgctgctacgcttgaacacagagatagtcttaagcagggcttggtccccaaacactagccctgcctagggttcctcccaaggtgactactatctggactccacagcctgcccttggatttcaggtccttagaaagaagcctttggagaaaccactggccaagaccataacagctatccctcaggatccagaagagatgtaacttttcttttcctttcttgtttctcctattccctgtgacacccatgtgtccactgacaccatgctgagctgagtcaattgtagagagaagaacaaaaacacacaaagacacaaagacccatctccagccttgacttgtttgagcagccatggccccttgatcctataaagcaagaaacagtgaggaaaggaaggaaggagggaggctgctgttcatagccaaccattagcggtcatctcaaggaggctgaaaggtgaggaaatggtgtcactatgctttcctctcgcctagctgataccacaaagcggggttggataagcatctgtaggttagggcagagtgaatcttcatgaccaagcgtttggagttcgagcctcttaccatgagagctctgggcccagggtctttgactctgaaatttctgcgaggctaagtcatgcattgtgctggacagccagtgcttccagttgcctatggaaggtggcagctctcagacctctagtgcttggcttaattcactacatcacagacaaccttgccacttacttcctaaccactactgccaaagatctagggttttgaggaaagatcaaattattttccagccagaaacaaaacacaaatactgttacattataaacctcggccacctaactagtctccccacttgcaatttactttttagtactaccagattcatctccctaaagcaccacctttcttcaacatgccactcctcctgccccttttaatggtttctcattacccagagaatcaagttgagcctcctcattttggctttagaggtcatccatctcggctgtctattcttttttttttttttttttttttgagtttcactcttgtcatccaggctggagtgcagtggcgcgatcttggctcactgcaacctctgtctcccaggatcaagtgattctcctgtctcagcctcccgagtagctgggattacaggcacctgccaccatgccccggctaagttttttacttttagaagagacggggttttgc

SEQ ID NO: 588829 - DNA, 4001 bp, Homo sapiens
cacccaggctggagtgcagtggcatgatctcagctcactgcaacatctgcctcccaggttcaaggggttctcctgcctcagcctcctgagttgctgggacttcagcctcctgagttgctgggactacatgtgcacaccaccatgcccggtaatttttgtatttttagtagagatggggtttcaccatgttggccaggctgatcttgaacttctgacctctagtgatccgcccacctgggcctcccaaagtgccgggattacaggctgagccactgtgcctggcctgatccaagactttataaagacatgtaagagggtgggagacagaaagcggaaaaggatacatcaaaactagcaatggatgaatgagaacatgtccagcctccagttaaggcaactgtggcttcaaaaaggaatcttaaataccagcacagaaatcagagggatcctaacctggctcaaaacagaagagaaacagtggctggccatacagcaggacgggcataactaacagaataccaggtatactgtttggatctgctcttccttccattaagccatccaccactgcttaatatctaaggagccggctaagaaaatccagtcactacttttatttgctaatactttgagccccagttacaataatgccactactaattaggtaactactttctaccttatcaactcctacagctttccagccattgtttcatccctcagcgataccacctgcttccgcgtggaacccaaacccccaggaaactaaatctgctcaggtcacccacctaggaataaataaaaacaggtttcaggccctttgtcctttgtaaattccgccttttttttttttttaaggcctgtgttctttatcacggacactgttcacatagtggtaatccttgcctgactcagatctacttgttcctgcgtttcattcctccgctgctcaattacttgttcaaaacgcaaaggacaactggtagtgaagaccctccaccagcaacactaccatgtgccaggcaccgtgctggggaccggggatacaaagatgagtagtgtaccgtccttgcccccaggacagttccccgtgtccgcagggccggcctggagggccacagccaactgtgggcaacaggatcaccgtgcccttcgcggcaagtgagtgcagtagtaggggacggttactgccaagccaaaggttttctccaggtaaaactggatgacagagagacagagactgaagcaacgccggcgccgggcggataataaagggaggcaggggctaaaagggtggagggagcagaggacccggccgggaactggcagtagggaggcccccgctgcagtcgccggcctgggtgccgggcggccacgcttccccaaagccgtcacagggacttggggtaccaaggtgactactgggcgcgagtcgttttgtggggggagggtgtccccaagggggcagtttgaggagacggttggggatgcatctggggtggcgcccaaagggacggtgggtgctgggtgtttgaaggtccggtggacgcagagctgaagggtcaggagaaggccaagggtcagaagggctggggacgaggtctgcccagggggtcggggcggacgcagagggcgggtgcagccgagggggaagggctgaagggaagggcaggcgctgaaggcacataggtgggaagacaggccctcccctaagggagaccttggaacgcggggcagtgggtctgtgggaccctgcccgcctccggagaggcgttcctacctcgtttctcgcctcagcctcgtccttccgcgccggcggcggcggcggcggcggcgtgtctcgccctccaggggtcgcgttgcaggctagaggcgccggcggcccctccctccgggcgggttggaaaggccggcccctgtcggcgtggcgcgatggtccgatctgggttgccctcaggccgcccctccgggcggcgcgttggttcggtccgcccggcctaaggtgctcgccccctccccggctcccgcagcgatgggcgcagccgagtcacgcgcagagctttcccgctaagggagcggagaggcttccgccgtggcccaatcttctgcggcccgcgcccgcccccgcggggtggtgcctggcgacgcgcggctcccgggtgctggaacccagggaaaccttccgcgggcctccagggccggtgggtgtgagtcccagcttcgcctgaggcggcggttctcaacgctggcttcccagtagaacctagtgtggaaactaaccaaacaacagaaggagggctgacctcacactggaccgactcagaaccactggggtggagtggggtggggtgaggtggggttggcctccagtgcatagccagggttcggaacccctgatgaaacgtagaacccatgcgccccctgcccttcagggccggatgtgtgggggacatggaagatgcctgtgtgtgactcctgctgtttacagccagagggggatggggcaggcagtcctgcaaatgttatgggaaacccactgtattagtccgttctgacactgctatgaagaaatactatgaaggaaagaggtctgactcacagttccgcattgttggcgaggcctcaggaagcttataatcatggcaaaaggcaaagaagtagccatccttttcgcagggtggcaggacagagtgagtgcaggcaagggaaatgccagacgcttataaaatcatcagatcttgtgggactcactcactgtcacgagaagggcgcaggggaaaccagccccatcatccaattacctccacctgttcccgcccttgacacagggggattatgggaattacaattcaagatgagattttgggtggggacacagccaaactgttacaggtagttaggcatgagcggggcaggagagggttctcccctgctacccactagggatgttgggtgatggttctgaggcaggagaatagggactggaggcagggaacctaagactggttcatgccaacttcctggaactaaattgaaaggaaaaccctaactttccacacctaagtaacaaaccccccacccaacttttctgcccagcagatgggaaattggctatctgcaaccaattagactgactgcagccgagtctaactttgcatagaagtataactttgtaacttcaccctagcctctgattggttgcttcttgcaaccaatcagatgtttgcacaggtgtgcgacctttgtaacttcacttcagcctctgcttggctgctttctgcaaccaatcagactgattgcaggctacgaattcatttacatgaggtgagcatgaagtggcgggtaacttctagggggtatttggacccaagaagattctgtttcctggcccttgagccgctgctccggctgctcccacactgtggagtgtgctttcgttttcaatacatccctgctttccttcttttgttccttcattctttctttgctttgctgggcgttttgtccaattctttgttcaaaacgccaagaacctggacaacttgcagtcagaccctctaccagtgacagttccataattacctcattgcttctttaaaaaggataattcggctgggccagggagaggccatttcctgatggtccacacatgttaacatcaaaatgctaattgaatgcaggcctcagggagaagcaactttctgggcatgcgtgttaagagacaaaaatggtgacgtatgatctcctgggggcaccctccaccggaaaacgggaaggaaagcactgcgcattcgggaagcccactctaagggaagaatcatgggaaagaggccagcctgtaaaagtcctaggatcttggttaggcacttgaccttctctctttaaccttcacgtgcccgcttgggtttcttccaagcgcaccttcctttctttcctgttctaaggcctttttaaataaacttccattcctactctggaacttgccttggtctctttttctg

SEQ ID NO: 588830 - DNA, 4001 bp, Homo sapiens
aggccagctgcatccctggacccagcccccagcccaggccgggcaacctggccacgcactcccatacgcctgcctcttcaaagcctctgcagctccaagatctccctccccagggtccccctctccagggcctccctcaaccctcccagcccatgtctgtccttcctcaaatcagtgcccaccgcaggctctgacagcagcaactggggctcagagaaggaaaaccccttgtccgggtcacagagctggcctgaggccccaccgggttcagactcagtctctgactgggccctgcacctcctgcccgctggggccacatttccccagtacagtgaggggcaccccctgaaccctcagctgctgggaggggttcccgggggctctgctgtctctactgcagattgacagggggggatccggccatgggtagaaggtgccgtctgcctgcagctcaaagccccttacctcaggacgggcagccctggattctggaggaggcctttcctctggcctcagacctcggccagacccaggtgccggggaactggaaaggtgcttcatgaggctcggtggccagctgcactccccacctggcccaggagctgggacaagccacagccaggtgtcgtggggcagcaataggagggccaaggcctggccacagaggcagccacagagagcagggaccccatggcactaggtcaccaacccttcccaagtccagtccctggacaccccaaccatcacaccgaggggcccgtcctgtctacctcccagcctgcagcctcctcccagggggggccgcccacctgacaggcggcatctgctccttgcaaccactgggtcatgggaggctcctcacttctcatggccaccccagcccctatccgaccccaggcgaagtccccagccctgatctggcccctggctcctgacccaggttctccaggagaacccgggcaggaccccaccctacccctgcccccaggccaagccacgggcaggccagcctcagcacgccagctcacagtgccccggccacccccactcccatcctgggatcggcgtgactcacggggccggcacgccacctccggcctacaccgcggggggccacccccaacacacgcacctgccctgacttgccgctggtggacggtggcagtgccaaggccacacttggccctcaggcggcacgactgaccacgacaacagaggggctgcaggggagagggcaggaagattgtgctcaggcagggggcacagaaaagggagcccctgctgggcttcagtccctaatcctgaagctccgacagccccgaggcctccaccaacccccaggggagcaggctgggaggccagagtctcagacccagagaccagcaggcctccaggctctgccatactggagagggggctggagccgccaaggccagatcccagggccactgcccctcccacacaaggccccagggttggagctggggaagactgagctccatccttaggggcagctgggcccaggtccctacagaccacaggcacagaggggctgagctggacccacgaacccgcccaggctgggcctcaggttttctcatccgcatactggggctgtcctgctacctcccaggaccgcagggtggggtcagagaggggctggagcaggagggtgagaccctgcggctgtcagggagcacaggagcatcacccaaggcctggagcaagccccccatgaggccgagccaccaagaccctgggccacggccactggcagtgcctgccacagacggtcagtgatgggcagcgactcggtcctgggggccctcctccacttcccggacacagacacagatgcctggatggccaggaagtgaagggaggccccatctcagggtgccccagaagcagctcaccacaggacagccagcctcccctcccactgtctgtcacggagcccccagccctccttcatccccaccccatgcacagggcatctgtgccctcggcaacagctgttgctgatggggcaggcccgagccccgccctcagggagcccacagggatcaggaaaggcccagttaagcacggacaagcaggtccaaccgagaacagcataattccgggtcctgctgtgcagaggaggtgtggtggggaggagctataaggctggaggagccgggtggccccacaggctgggctgcatcccaggagctcagctggcaggcaagtgacccagcaggagctgcatttgctgactgacaaatgggtggcggctgaggtccacccccaccctcaaggagggaaggcaagagacgtgtgttcccacccgaggacagcagcaggacctctcttccgggcacaggatgaagcaggacaatctgacttgaggaaacaaaacaaagtcacagccaaggatggtctggctcctgccctccaggctccagaggccgctcctgaagctgccgggactcctgcaggcacccctacaaggctggggtgcttcacagcctggggtctgcgggggcagcctccctcggcaaaccccaactccaggctgcctttgggagcaaccggacggcacgcgctgcccagggtcagagctccctacccacccctcctgtgactctgagcggccgacccagcctaatggccacagtcctgaggctggcaggggcagggagggccaccacttcggtaccttccccaggtactgctccttggggacaggtgacaggggccacagcctattccctcggcacccaggaccctgcctctaagcaaataaaccaacaagcatccacatttgcctccaggccacaggacccttcgggaccaggccagctctgttcaccagctgcgttctggaggcagatggccacagccctcttgggtggcaagggttaaaccacacagtggtaaggaccccgcacacaggcgctggccggcacacacgccttcaggtggcggcagcaaggcagcaacaccagcaccggcctggctccccagcgctgacccagcagacagagaactcgcctctctgcctaggatgacagcatccagccagggactcatctcccaggaagcagccggggtggcctggcacttccagagctctgtgccttgcctgtgccctctgccccggccctgcccagaaccctgggtggctgccagcttcctgccgagctagctcctcgtcgccagccacagtcatcgtgaaacctgctcgccacccagggcaccactgtgcccccatggccaccactccaggaggacagcacaggggccaggcctgggtgtggccgacgctgagctgcacataacctgccccagctcggcccttccgcacacacctggattctcacagcccctccaaggggggcagagcaggagggtccccactcagcaccccatcagctcacgcaacgtcccccatactggttctgatggaggtgggtgtggaggggggcagcgagatggcttcctggggacagaagctggtctgcagagcacgagggtatgacagatcaaaacgcacacacagacggtggaaatcgggcagcagctggaagtcagaataaaaatgttacatctctgcaagagtagagtgctcctccctgacccccacatccaaactgacctctgttttcataaaggccaacaagagacagaagtggtcccggagagggaagttgggaaaacggatatctccgaggggtcgcgggagctgggggtgtgggtgtgctggctgcagggcacacacacacggagacttcacccagctgtgcaggaaggacacgcatgccttcccgagcggtgatgccagcacacgcagggctgagttctaaggagggcccagccccacaactgtgctggacactggggacccctcccatgctctgggcctcccatgctccaggcctcccatgctctgggccacctgcccttggtcaggcagtgatggggacaacgccatcgccttccatgtgggacagcatgtg

SEQ ID NO: 588831 - DNA, 4001 bp, Homo sapiens
gctgcccccatgctgaccttgccatcagcagccacctcctctccggaagcctcaggctgccctgtgccccaccccacccaacactcactgtcccacagacgtgagaaccctggaatggcctcgcggagccctgggagtggggcatggcccaggcacctgcctccctgcaccctggccttgggtcctgcttggcccacaggagggtgatttggggaggcctccagaccctgcaatggcctgacaaccctgtcccaccagcccctggcccccacagcagcggtacctgaggagcggtccccgcagatggcgcagatgtgcttggtgaaggaagccatgtttcctgaggggtgggcggggaccttgaggacgccattgaggcccagggggggcttgatgtcctcgctgctgctgacggggttcataggtgagctgagctggggggggcaaccacagcagtcagcggggtgtacaccaggtttgtccctatgtcccccacggccctgcagcaaggatggcgcagctgtacccccaacttcacacacagacaccgaggctagagagggccgtgccccccacccgccacgctgctccggagcagcggggccactgtgcttgctcagcaaggccagcagaggctgtggcaacctcaggactcgcccgcagcagaccccaggcctctgtggaaaaggaccttcaacaccccccccaacacatgggcggtccctgcttgcaaccccctgcccgctgcccacctaaatgagagctgcctctcattactgagcccctggcagtgcccagccccgctgggtgcccccggacactccatgaggcaggcactctggggggtcccaacccacacatgaggacgccgaagcccagttcccaggacggaggagggctggggacccccccaagaaccacacatacaccccacaacaccgcagggcaggggccctggtcacgtgacccaggagaggggagtggacacccccgggcatcgggtggcacgacaccactggcctctctgcacacccctccgccccacccgccggcccgcacgctgccgcccgggcaagcgtgggaaactcacccggtcaccctggcaacagctgcagcgtgcagtgacacagcagttttggttccgctgcctccacccagctctgcagtcagcgccgaggacccacaggcgcttcccgctgcagcctgccagccagcctggctgcgcagggcggtaagcgcttggccaggcagcccccagcctccacttctgcaaacccctgccgccgcttgtgcgcaggaagctcccctccttccttcctcaggcctccaaatcccatccccccttctcacgggacaggaagagtttgaggctcaatgcaagcaaagcagaaaccaccgcaaagcctcctttcacatggacctcggtgcctggaatgagtcttccagccccagcttgttctggcttctaggttcttcctcgatctgcccaggtgggctgtgaggctttacaaggatgcttggtccctgcaggactcaggtgggctgcgagaggccaggaggtcccccgtgacaactcagcacagtgggggtgccatgaagctcccactggagaagcgggtggccactgtgtgactcaccaaatgcccagtgttcatgtccacaggcagcaggtgcgcttctcagagaagggagggaactgaaggggcaagagaaagccccagacgtctgcagaggggtgcggtgcctgggctttgcacccacacttgacactccctgcatgggaaaccctgggtgtcccagatgcagaggctgcggctcagggaggtcaggggctggccaaggtcacacatgatcccccacgctgcagaaggcgaaagtgaagcccctggagggacagagctcgtccaaactaagtgcccagctggccctgccccgtgctgggctccgggaggcaccaggggacaaggccctgcccagccctccagggctcgctggtctagtggctgtctcgcttggaggcactggaggccccagaggcggatccctggctccggattctgcctgcctcctacgttctcgtgtgacattcggaaaatgatttaatcactgtgagcctgagtttcctcgtcggcaaaactggaaccatgttagtgcctacttcttttctcttttttttttttttttttttccgaaacagggtctcactctgttgcccaggctggaggacagtggcacaatcacagtcactgcagcctcaaacttccaggcccaattgatcctcctgcttcagcctcctgagtagctgggattacaagtccatgccactgcactcagctattttttttttttctagtggtggggtctcaactatgttgcccaggcttgtctccaactcctaggctcaagcaatcctcccgcctcggcctcccaaagtgctgggattacaggcgttgagccaccatgcccagccagtgcctctaagagctgattaagtgtaactgagtcgctccatgtgccagggctcagagcagagctcgcagacaactcactgtcttacagggaggccggtggctgcagtgagcactcaagcttcctggaggagatgggccagggcctgggaggaagaaaggggtgtcccaggcacaggggcccccaagccagtgttcagaggtggggaagcaaagggcttgtttgaaaaaaggaaagaagtaggtacagccagggcggggatcaggtcagagcaggggcagcaaaggcatccacaagcaggaagtgtcgggcaccctcgctttgtgccctagcactggggaggcaccgaggcgtgtgagcaggagccccttgggccagaggctggaggagcacaggccatgactctgcaggtccaggttgctcggaagcacaaaggaaaggaactcacgcacttcctctttctaggctgtcccaaaccacctcgggtgggtagggatccacctgctgcctcccggccctccatgtgcagtcccttgggcctagcacctgccctgggtaaactgagggagcaccagagcagccctggccgggaaagggactccaggcaggacagaatggcagacggtccccctccctctcagtgtcagggccaagccagctcccgcgctgaacttagcctgcatccctggctcccccagacctcagtgatatcagagggtctggctagcccagtgagcccagggcccggtgagcctctgcacatctgagaagagtggagcccgggctgaggtgcccatccaggctgcaggccctggggccacccaccttgcttctttgggctcacctggaggacggtccaggctacagaagcaaggctgtgccaggatggggaggccaggcgggcgttcttccgcccttccagccccaggctgctgggcctcgggttggctcacagcccccggagcacagcacagggccgccccgggggtctgccttggtctgtccctcccccagtgggctccacagccccccagctatccagggtctcctcccacactccctgctcccgctcccaggagagccaggctgccattgttgcttcgctggagcctcaggactccacgcgtggccagggtgggggccatcgcatttcccctttcagatccttggcacttatttcagttcccgccgcctcgatgccccacccaggtctcctgcccgtctcttggctctctcctcacacccaccacacccttccttcctgagcccctgaagggtctctccaccagccccgacttgggaaaggcccactctgcgccaggagcaggcccctggaccttgctggacctcatctgtccatcgaggcaggagcaaaccagctcctctgcacactcccctccgacctcagtccctggcgggtaggcgcctgtgctgccctgcttccgaccccgtgaagcccgctcagcctcgcgtccacactccctgtgcacacatcacagccccacaggccctgggcaggccctcccaccagg

SEQ ID NO: 588832 - DNA, 4001 bp, Homo sapiens
gtgcccagggagatccctggggcagtggctcggaggcacgacctctcctcctcacagggactccagcaagccaccatggcgactgggcaccccttgctccctcgccctacatccaccaactccgtggactatccctgtcccacccggagcattagaaacagggacctgttcggttctcagtactcagctgaagtgcaaccagccaggcccctgccacgtccaggggccagacactgagctgagcattcttgttccagaggaatcgtctgggagagcctagctctgtgtgtgtggatgtgtgtgtgcacatgtgtgagtgcaaagctttaacagggaaaggcagccccagcccactccacactgcactcggtcacagacagcgcagcattccctcctgcctcacactcagcagtaccacgagctgggggtgctaatcccaaatccaccaccttgtatcctgggggctcagcctctcccagccagttttctcatctgcaaaatgggcatgagcgcccacccctggaggctgagccctggagctcattcaaggcctcgagcccaccactccatcatgacagaggcagggagtaagcgttaggtctgacaaacctggaacccaccgcctgccccggtcacggggcagcacacctgcctgtgagtagcagaggtactcagactctcaccctcacatccaggaggggctaggtccatgctggctccccttgatgccccatctcactaaacatccctgcagctacattggcttctgagcacctcctggggtggccaagctgcaccccaggctgcagggagggtgggcaggaggggctacggatggcgggggcttcattcataatcagctgtttcgatttccattcagcacaaatccttcacccggcctgacagcctggctgccgtcccaccaccaaattaatatccttcccggagctaatttataaagtctcccccttctcactagcttccaaacccttgggagggcaatgggtgggggccccagccatgccctctcccccttctcggtaggtctgggcctggagttggcgggcagtctgggataggaagctaccgggcgggatggcaggaggaggagggaaactgaccctacgcgcctctgcgctgtcctgctcacaaatggagagccagcctgggagaacacccgggggtgccagagtgaggggccccatttctggaatggggccttcccaggtctgacgttctgttcatacagccccgggggaccctgcccacccgggcgtgggctgctttggggataacagggtcccagtctgtttcctgggcggacacacacccaagggccagcggcctgctagaagccgcagcccgacgggcgggcggcgcagaggccgctcggggcccagcgcgccgtcccggtccccaggccagggaggccggagccgcggagcgcagaagttgctcctcccgctccggccgggttcctgtgcggcgcggctgcagctgggcgccggggcgcaggcggccgccggtgagcgggagacccctcctcgtcccgggcgaacctgccacccgccccccggccccgccgcccgcccgctgcccagccccgccccggccccgcgaaaagttgccccgggtcgaccctccccgggcccggcgcccgaactcacgcgaaggtcggcgaggggtccgagcggggcccgggccggcgaccccccgcgcgcgccgccaacgcgcccccggccccctcccgcccgccggcccccggcccccggccccgtccccgcccggcccggcgagcactcaccgagcggcaggaaatgtttggtgtccatgtctgcgactaactcatgcccggccggcggcgcaggcagcgggcggcgggcgcggcggcccccggcgcggccggcccgggcccgggcggcggggagccggcggctgcggtggcggcggcggcgcgcggaggccgcggcgcggcgagttgttgcaaaagtcgcccaacaatgtaaactacttgtgtctgcgcgccgccgccgcgcgcgcccggcccgcgcccccgccgccgcgcgcccgcgccccgctccgaccgcggcgctgcggcgccggcgggggggtggcggggggcccgcgacgggcgctgactcggcgcagcgccgccgccaccgctcggcccgcgccccgcccgcccagccccgcccggagcgcgcccccctccgccgccgccgccccgcgatcgccgcccgcccggccgccgagttgagagcgccgtgcaaacttgcgagttcgcctccgccaggggttcccgggagccgcgaggaggcggcgtgggagggggcggggcgcagagggagcggggcgggggcgggggcgggagcagaactccctccccgggcccgccacacactcgcgcacacacacacttgcgcgcaagggcccggaggaggcggagagccgggccgggagcccagcggccgggccattgtctgcgcggccacacaaagcggccgggcggtggccgcgaggggaccccggcccgggccaggcaagcgcagagccgggcgggatggccgcggcacccatacctcgcaccccgccgcggcggacacgtggggaaactgaggcccgggagtggcgatgtgccccaacggcagaggacaagctcctcgtccggggaaggtttcgtcttccggacgctacccccggtccaccccacactttcacgccctacccccacggagagacccacgagcccaccgggaacgaggaggggtgcgcgcttcgcctcctcatcgacccgcactcctgggacccctcttcaaaggcaccaggctgggcaggcgctgcccggagttggacacagactttgtggccggtggctatttttataccctgggtagttctctgcctgacttttaaattcacgatttgtttgaaaacgaaaggaagcactcctgccccgggacagctcgggccgcctccgccgcgcgccgcccgccgcccgccgtctcgggcggctggaattcggatttgggtgtgagctacctgcgcgccgccaagcccagccttcctgagcaggcgccgaggcgccccgccgcgccctccctccgcacccccaccgcgagcttgctgaccacctagacctaagggcccgggctgcgaggcacagggactgaccattcacgcaggctgcgcgtggtggcccgggtcaggggacgctaatggggagggaggtgaggaggtgatgaccgcgtgtggacagccatgacacggcccaaagataacagcccgagaccagagaggtgtcctgctgcctgggtgcccctcaagtcgggccacccggagctgggttccacgagggctccggtggcctgttccggtgggaggtcttggttccacttgggacagaagtgccctggttgggcagcccacccccagcacagccagagcccaaggcagccctctccccctccccctcttcactgacccctgggcccctaccaaaggccaccccgtccccctattcacacaccctgtccaacaggcagcctgccccactccctccgggatgagggccactgttgacacctggtcctcacccactgtggttacagccacaacagacccacttccccactgcacatggcatgccggcccaacccactgcccttctaaaactgagttcctcctgccagggaggggggcggcaaacaaaggataggactgagaaagagcccccgtaagcaccaacatacactgcaaaagtgccatgtgcccgccgcgttccaggcctgtctctgtgactgcttgggcccctcctgactgtactcaggttggggggttgggggggagtcccagatagacaaggcctgggccagattgcaggtccacctcctaccaaccgtgtggcctagctgggtcacttccctccttgtatctcagttttctcatctgtaaagtgggaacaaccactccctcctcactgagtcactgagatgactaagtga

SEQ ID NO: 588833 - DNA, 4001 bp, Homo sapiens
tggcagttaaagggttctacagcagggcaacctcagatttttcaagattgtggcatgctcaaattctcctttttttggtaataaaaatatacctacagtatataataaaaatatacatacagcacaggcattgaggaagatgaaagagataccatgaaatcaagttaatgtcataatttccagaaagaggaaaccagttcctgaattttgagaaataagatccttcggccactatgtgaagtttcttctataggaaactgtagtctctaccctttgtatatggtagaaaatcagagactcatgcatttgaataaaaatcacaatgataaagggagaaatggcactttcaaagatgaaaactggttgagaaatcattctctctaaatcttagggggaggctcttaagggctagcttcagtttgtatctctggtgttaggtgatggaagtgatttcagaggcccaaagtgagtgcttactggtttgctaatgaaaaaagcctgacgtgcggttcttcttctatggcaacaaagttattcaacctagcattaaggtctgcatccatgaaataatactttacagatatgaacacttccacaactcctcaagcgcacacacacacacacacacacatgccccgcaccatcaccacctcctcaaccaacaccagccctgggcatggccagctatccttgttagtcatgtatctgcagagcataatccttcccttgtactttctaggaattatatttttcttaactatgcctgcaagattttcatctatgaataaaaaacattgaaaagataaattatgaatatgtggttatatacaaagtctgtgacttctaatgtccagattttagaatgatgcctaattctggaggtctcagaggtccaagtgggagtgggtaccatgaatgggggggcctccatttaaaagtaaccttctaaagagctctctgttcctgtagctcccctttccttattggaagggtcaaaacgaagtgtgttcccttaaaaatccaacaagaagttcctctcttatatccaaatataaaaacaccacaaagaaatataccattgggagtgtccaaagccagaaagtcagaggaagagagagagagagagagagagagagactgactattgggagactcaaaaagcccaaagccccttctctagctgttatctcagttacgaacacaacgtactgattttccgtgggaacctcattattgcactgtggggacttcgtcttccagcaccgattctgacggccctaattgccttgtttgagaaatgttaggaaaaaactaattttccggcgaatattgtttaaaagaatgattttcccaggctaacgaccacaaccctctcccacgtccagcatccccaggccctggcactgtggaagcctaacttgttaattgtccaaggaaaacgactgatggaacttctccacgaacagcctctccactttcatccaggtattcagctccagcccgttgtaaacgctccgggtgcggtggaaaaggcctcctccctgttcctgcagcggctctgggggaggggtgctgatgtggagcgctccggccgccgtggcgcgcccaagtccccgtcgcgcccgggatcggtggggattttgttggaaaggtgggtccttcggcccccagccccccaccctggttccgcgccccgcccgggcccgcctctcacctccgtcggctgagggcgctggggccaccggcatcctagcgggtggcgcgcggcggtgccggggcgcccggtcctgcgctcgaatgccagatgggctgggaggcccggcagtctcagcgctcgcgacgtcgttcccgggcctggggtcctgctcggtcgcgtcctgcagccgccttctggtccctgagtccctgttgcccgtccccggaaccggcttcctcggcctctgcccgagcgagtcagagactaaacttttccagcggcccgccggggcgggacccgcgctccgcccctcccctcgccgcccccgactcccgcccctctccccgcccccctctccccgtcccccgcccgcgaacccggcactcctccagctccccacctcccgctcaagccgcctggtctccgtgcgccccgcccgcccctagcctggaccccttctccccgaccctaccaatcccctagggtccggctcgcccttcggcccctgttcccaggccggcctccagaccttgtcctcatcgggcgagctccaggtgcagaaaccgggcgcccagagacccagcgggaacaggcttggaaccaggtccgaggtctgggcttgggcgggcgcctgtcgccctgacagcgagggtttgtttgggccgattcttaataggaggattaatactatcattatcgttgtccagatcctgaccatttcttttgtaactggccgagcaccggcttgggcttgcaggtgggcgcctggcgccggacagcgtttttgtttgggcttcttccttttccgcgcgggtcccctccggcgcctgcctggtccctctccgcgctctacccccaggcacgcagagacttgggctccaggcgggggcagcactctcccccagcctctgctggtgcaccagagcccactccggcacagagcagcgcccctcctagaccggcagccagcagatctcagccgacccccatgcgacccccttcctcacgcggatttgccccttttgtgtggcaaaaataataataataataataaatccatatgaaggcttcaaacagaattccgagagaaggaactgccaaattttcaatcaatgccaaaggccatgattgagcgaacacagaaacaactgtagaagcttggggagaaaggagaaaattaaagaaaaaggaggaggaggaaaaggagagaggagagaagcgggaggaagaagacgaaaaagcaaggagaggcctgttatccgaccgtgcattcctgggccggcaggattgggccgcaggggccgctgcagagagttgagtttgtgcaaaggccgctcgttactttctgtcttttgccctcttgcctccagaggatcagcccagcgcatccttctcttggagcagggtgcatacgcttatttggggtgcagtttgagcggtgaagggcaccaagagtggaagtcggcggcactcctgttccctgcagagaaacgcaagccctcagcaattgagctgaaggaggcaagtgactctgcctgctgaggctgccagccctagaggctctggcccccgggagctggggtacttcccagcgttttcgcctaagccacttcgcctgtgctactgtggagtcttccggcactgtagccttccaacttgttcaaagtgcctggtgcacggctctgagaagccacttctgtcccaagtttcatgtgggcctgaatgtgcttccctttgttggactcctacagcatcaagtcaagaaaagaaggaaacatgctcctttggcattggtcacaaccaggataacaatacagcatactgtggccactgtgtctatattaccaaagtggtcagtaggttcatcacacctctgttcaattagttgcttcccgtgatgaaaaatttactgctaggatactggctgagggttgttttaaggggcacccaagtctccgttcctagagaaagtcagttaccctgatataacagagcaaccttgaggcgtggtgatgcctccaaaactagtctgcggaatcggagcccagaagccctgaggagtaatgtggctctcatgctttatggcaggtttccctaagagagacccaggatctgacccatggcatcactgaaattcctctttcagtgaggctccgtttgcctaaagatccctgtcctcagtgggtctccccacacacgggcctctcactcacccactgccccacccccatctgctgccctcttcctgggccttaaagctcagacactagactctgacaaggagccctccatgccccggtagaga

SEQ ID NO: 588834 - DNA, 4001 bp, Homo sapiens
atttgacaccccaaaagccagctgtgtcaatcaaatatgtcacgccatttgtctggccctccgtttgcctgtgagagggtgacagctacagccctagccatgtggccttcagggagatgtggtacgtgagccagtgccgcatggggcatcagagcagagcaggggtggaccacaggcttaggcctccaaaccccaggcccggccacagcgtgcaatcccatggctgatttcaaactgcatggccacatggatgacgctgaccctgcatttggagccagataccctctgaaggttccctcaccatagaactaggggtcccccagcctggtgtggctgctggatcagatcaccagggaggccagggccgccgtggctccaaacaccagctgtagggctggagaatatggctgaggtgggggagcagtacagggagggtggcagagcagcaggcagcacagggaccggcaggagccaccggtgggcaggcctcccctggcagaacgggtgcacaggccgaatgggctgtggggcctggggcccctctgggagcttggccccccaaccccagccataatacaggtcctgttcccaaggcaggcactgggttgggggagacaggggaccattcagcaatctcccatcactgccaactggaccggaaggcaggagaggagtgtgccagccatccccagggactacggcctatgtccctccatggcatctgccatagtacagccccactggggtgcaggagatccacccacgcccctgcccatcttggcaacagggccaggtcctcttgggccaccagcagcagcccccgcctgcctaggcctcagtggggtcagtgggcccagcccccctggctaagctgtcacactgagaagggggaccctttctttgagaaggaagcacttctgcctgagcagccacagacaggaggctgagggcccaggtgtccccaggtgcggaaagggtattggagatggagagcccaagctcaggcttggtacaggttgggctcccggtgggttttctgagtcacctgccaccccccggccctggtggccttatgctgtggcaggagagggtctggcttgcctccctaagcaagcccctgggctcaccgcgacaagcatgaagccctttccctccagacccgccgaggcgccctccaggatccggagtccacgaagagccgctccccggtcccgtcccttgtgggaaatgcacgggcagcagctgtgggactgcggtttctggcccgggcccgggagagctacgagggtgcccgggggccgtccggaactcacctgcgtccgcgctggagctcggttccagcgccgcgctctgggaccgctcgggctccgcggggcagggcgccgcctcagccggggcgcacagctgctccgggctgcgggcggcggcgctgggaccggccagaggggcgcgcacgcccaggggcaggggcttcctctccaggaccgtccgcggctcgtcggccggagcgaacaccaggcgctgcggcggcggcggcggctgatccccgggccgggccggggcgcgcgtggggtcccgggggccgccgtcggcgctcagcagggaggtgcgcaggccggccacgaagcgctcgaaggtcaggtagccgctggccggggccacctggcgcaagccctccagcaccccgcggggcagctcccgcgcgtcggtgccctgccagcgggactcgatctcgcgcaggtgcacgcagccgcgccgccggtcgtccaggatgtcgaacagggtgcgcaggctctgcaggaaggcgcgcggcagcccctccgtgctgggcgcgggtgcggggggaggcacgcggccccgctcggccatggcggccccggccatgggcgcccgggatcggtcccctcgtccacccgcgtgcgtcccagcgcggccccacggaggggccggcccggcgagctcagcccacggcgacaatagcgactacttttgaatggggccctcctcgcggcgtcagccctcattaacatgcgccgcggccattggccgagcccgtcccatctgctctctgataggctgagaggaggtttgattttttttttttttttcttgccgagtggccctgggaggcgcgcggaggccctgggcaggcggaaccggatcccccagctcctgctccactctggcctcgcagaccttcctttctgccccgccccagccccaccaaacctcctgccgcggccaggcgctttctcggatccagctgtggctggctgccccggccacctctccaaggggcggggcctggcaccctacaaaaaaacctgtctccaggtagcctcgtggggtaagaatgggggggggcaccccctccaaagatcccacttttcccctctagttccctggccgcaagcacaggtgaccctgcggcccccttctcttccaccaggagggccccaagaggatcgtaggctccagccagctgggcgcttcccactcacagaggcctttctgtccccactgctgctggctcctcctctggtccctcgggacagtctggcctggcctgcctgctgcagaacaaagccactttctcctgtgtccccagatccccatctagtgaccagctccctctgcctcttgctctcctctcctccttcccctggctggacacctcctccagctgctctcctggctcccgcagccctgtccccctgcctctgctgtgtttccagctgggatctggtcactctgtcttcatttggtctgtccacatgggaggtgagaccaggccttagcctgggttctagccctgggagcccatctcagggctggccagtagtaccctctaggttccagggaggtgttcagggtgcaaacaccctccccagacaggcccccaatccgagacttgccttggccctctgcgggtctcccaccctccctcctgggcaggcctcagctggcatacctacctgggtctctgtcctcaggcctgagccactggtgcctgtgtctcaagctgtagaggcatcttcccaggccagggagtatcctgggtccacttctcttctgggtcactcactctaagtgggactccttcatcgtagggaatgctggaaggacataagaagctctgagcctggagcagcccatcagagcttggtcctgtaagccagcttcccctttaatggctggtctgctcaaaaacccagcacgaggccgaggcgggaggatcacttgagctggggagttcaagaccagcctgggcaacataaggcaaccctatttctacaaaaagtttaaaaaattagccaggcgtggtggtgcatgcctgtggtcccaggtatttgggaggctgaggtgggaggatcccttgaacccaagaggttgaggctgcagtgagctgtgattgagccactgctctccatcctgggtgacagagcgagatcttgtctcaaaaacaaaacaaaacaaaacaaaccagcacaacacgcaagcccccgcccccccatccccacacctaccctgcttccagcacacccctcaccgccagtgccaggcctggggtccctgcactccctcacttccaggcccctgtgcctggtggctcttctaccaggaaggcccttcccctctgctccaggctgaccgcactacatccttcagaactctgctctggccccagtccccttccccctgaagcctagttagataaaacacaggggacagctttctcctggcccagggggccctggctatttgcaagcaggacagggctccttctaggcctggcattggcctggcccacagtgggtgctctgtgaatggcactggggagccgtatccagtgaaatcatatgggaaacaccatccttgagtgggcaccaagccaggctgaggcctaagggatggggaagggctgggaacagctcagtggtatggcaggggaggccagtgtggatgtggagtcggtggccagcagtgagcaaggctgctgc

SEQ ID NO: 588835 - DNA, 4001 bp, Homo sapiens
tcatgtttaaattctgttttgttgttgttgttgttgtttgtttgtttgtttgttttgagaaagagtcccactctgtcttccaggctggagtgcagtggcatgatcttggctcactgcaacctctgcctcctgggttcaagcgattctcccacctcagcctctcgagtagctgggattataggtgcatgccaccatgcctggctaatttttgtatctttagtagagacagggtttcaccatgttggccaggctggtctcgaactcctgacctcaggtgatccgcctgcctcggcctcccaaagtgctgggattacaggcatgagccactgtgcccagcctaaattctttaaactaagaagttaagaacggaggtctcacaacagccctcaatggaagggtggggtggtgtcctgcccagtgtggacctccactgcccttttctgggatctgcaggaaaagtgaaagggatgtggctgtgatccaagatgtgaagtgctgtgccacctacgtcagtatgaatgactgatataattatctaagaaagtcagcatcctttttcaagagtggaccatagctatgcacgttcgttcactctcattgaacacctatagacacatgataatgtctctacttcacagcgggggagtctgacacacggagaggctccctgaggtgaccagggtcatagggcctccatgtggcagtgccagggactctctcctgccccctcttctgaccatcccagggggactcaggacccactgccacactctgtcccacctgaactgtgggcactgcccaagccctgacgaagcccagaaccctgtcctaggcacagtgggggatgtgagggggatcccagctctcaggctggtcagggctgccccccatctcctgccccagtgccccatcccaagggagggagcagggagtctgattgcagcggcgtaggggagtgaggaggtgttggagcttgtcctcagcctctcagccctcagtgtgtcagcccgcctggctcctgcctgcagaggtggccccggacaaggaggcatgcctcctgcatgtgtctgtacataccttcagtccttgaaggtccacagtcttccaggagcccccaaaagtggtgccccaccaggggaaagccagcttgagtggcaccgaggaaggccctccaaggctgaacacccccaccccaccacccaccacccaccacggtgccgcatggcacagcacacctggtcagctgtgggcaaaagcctccctcctccttccgactgtgcccaaaaagcgacagctgctggcgccggaggctgccacgtgccccttcaccacctgcctggtcagtcagggctcttctgactgtcagactgggggctggcagcggccccagcggggacagcccagagcccctcctgcctgccacctccctggaaacagctgcctccacattaacccactctcttgccccctccaactctgtctcgtacctgagtcagcttcccaggagtgagggctgaggacagccctgggcttgggatcagacagatgggtgggggttttgtcacaggactggggcctcgagcaacaacttaacctcactgcaaagcagaggacccaggaacgccctcctcctcccaggctcagggggtggtgggggtcaagcgaggagagcgcctggcaccttcgcctggtgagggtaggcagacttgtggggaggagcggcagggggcggggaggcagctgcccatatggtgaaccctggtcctgctcatgcagctggatggtccctgcagccagaggcagagggagatcccagccagatctgaccaggcccagccccgcccacataggggaggccccagcctcgtccctccctgggggtgtacctccaagtacctcttgtcagctgcagtgcccctcggccctaagagtgcttggcccagcagaggtgccttcaccttcttgcttcccaagcagtggcctggccggaactccaggcctcccccgccccccaccctcgctgccagccccatgtctccgcccaggatctgggcggagcgtaccgcccaccactgcggcttctaggccagcttagttggggcttctaggccagccctgtgggcagctccctctgagggcggcagagcagggttgtgaaccccatgccccattacccgtaggcgacctggcagtcacccttccgctccaaccctcatttcctcgtctctgaaacaggcgcctcagggttgctgcagtagacccaggcaccacctgcctgctggagccgcccgagctccccgcgcccagaaggagctatgcacaggcagggtgggcaggaaaggtggggtcagcagcagcttgggccaggggcccgtccactgcagggaggctcctttggtgaggtcatctcagcacatgccccagtttgctcacccccagggacaggatgctcactgccttcagaggcgagtgagaaggcctgggtcagcttcccagggacagggtctcctggtctgtctgcgtcctgctttcccgagctcccagacccctctggtgtttggggagatgcccccaagccactggctactgcacagcacgtagcccccagggcagggattccagcctccattgactgttggggacagcagtgcccagggagggggccacacagcaagctggtggaggaggcagaccggatgctgcagcctgactctgggctggggcaagttaccccttcccagacagaagtagacacccagaggaggggtgtggaggaaacccagaaagaatacacctctggatgcccaaagaatcagaacaggtgctgatggaaagtcacatctcctcctcgcgctggatcaaagacggggcatttcaatggcagtctgttaatattgtaatgatgccagctgccaataccggaagcgatcgtatagtaaactgctgtaattaataccaatcaaatcattgtgttcttattcacaccgaggatgtccgactgtcttgttgccagcttgtctatcctctacatttactgaatgcccaatgtgtacaaagcactgctgggaaacctatagtgacatctaagacccagcccctgccctcgaggggctcagggtccacgaagcagacagatccagggagagacacgacaccacaaggctggcttccttccagcagggaatccaggaggacctcttagaggagggggcctgggctctgggcctgaccacgtgctgacaccattctcagtccctgcctcaaaggcaaagggcccactggcttaggcccctggctgcccagtggaaagctggccccgccagtttgaggcttacctggggtggtgtgggggtcctggggcagaggacctcctctttggatggtgtggcttgcccagtggcctgagctagggctgtgctcacccaacagggtgacgaatgagctcaagagggcaaggaaggagtgtggcccaagttctcccaggagtcctggacgtgcaagtgcatgggagaaaaacgcagcagtcaccacagctccagggcagtggccgggtagcccacacttctcctgtccctgcactcaaagacaagttgcaactgttgcaaaactgttacaagccaagagggcagcacaatgaacctgcactttggacaaggggtggtggctgggggccggtcccggcctgttagctgtctgttagtatcgtaggattttcatccggcagggcctgttagcacccagctccggtctgggagaggtggaaaggctgtctccccccagggactagtagtcacagctctggagaggccaggctccggacaaggaggccaagacagggtcctgtacgatctcgggctggtcttatcacctctccctttgctgagacttagttttcccatcttggaacaggaggctggaagccctgccatgtcagtttcacagaagccttgtaaatttccctgagtaaatttccttcagtcctgctctagatcacaccaaca

SEQ ID NO: 588836 - DNA, 4001 bp, Homo sapiens
ctgcaaagcagaggacccaggaacgccctcctcctcccaggctcagggggtggtgggggtcaagcgaggagagcgcctggcaccttcgcctggtgagggtaggcagacttgtggggaggagcggcagggggcggggaggcagctgcccatatggtgaaccctggtcctgctcatgcagctggatggtccctgcagccagaggcagagggagatcccagccagatctgaccaggcccagccccgcccacataggggaggccccagcctcgtccctccctgggggtgtacctccaagtacctcttgtcagctgcagtgcccctcggccctaagagtgcttggcccagcagaggtgccttcaccttcttgcttcccaagcagtggcctggccggaactccaggcctcccccgccccccaccctcgctgccagccccatgtctccgcccaggatctgggcggagcgtaccgcccaccactgcggcttctaggccagcttagttggggcttctaggccagccctgtgggcagctccctctgagggcggcagagcagggttgtgaaccccatgccccattacccgtaggcgacctggcagtcacccttccgctccaaccctcatttcctcgtctctgaaacaggcgcctcagggttgctgcagtagacccaggcaccacctgcctgctggagccgcccgagctccccgcgcccagaaggagctatgcacaggcagggtgggcaggaaaggtggggtcagcagcagcttgggccaggggcccgtccactgcagggaggctcctttggtgaggtcatctcagcacatgccccagtttgctcacccccagggacaggatgctcactgccttcagaggcgagtgagaaggcctgggtcagcttcccagggacagggtctcctggtctgtctgcgtcctgctttcccgagctcccagacccctctggtgtttggggagatgcccccaagccactggctactgcacagcacgtagcccccagggcagggattccagcctccattgactgttggggacagcagtgcccagggagggggccacacagcaagctggtggaggaggcagaccggatgctgcagcctgactctgggctggggcaagttaccccttcccagacagaagtagacacccagaggaggggtgtggaggaaacccagaaagaatacacctctggatgcccaaagaatcagaacaggtgctgatggaaagtcacatctcctcctcgcgctggatcaaagacggggcatttcaatggcagtctgttaatattgtaatgatgccagctgccaataccggaagcgatcgtatagtaaactgctgtaattaataccaatcaaatcattgtgttcttattcacaccgaggatgtccgactgtcttgttgccagcttgtctatcctctacatttactgaatgcccaatgtgtacaaagcactgctgggaaacctatagtgacatctaagacccagcccctgccctcgaggggctcagggtccacgaagcagacagatccagggagagacacgacaccacaaggctggcttccttccagcagggaatccaggaggacctcttagaggagggggcctgggctctgggcctgaccacgtgctgacaccattctcagtccctgcctcaaaggcaaagggcccactggcttaggcccctggctgcccagtggaaagctggccccgccagtttgaggcttacctggggtggtgtgggggtcctggggcagaggacctcctctttggatggtgtggcttgcccagtggcctgagctagggctgtgctcacccaacagggtgacgaatgagctcaagagggcaaggaaggagtgtggcccaagttctcccaggagtcctggacgtgcaagtgcatgggagaaaaacgcagcagtcaccacagctccagggcagtggccgggtagcccacacttctcctgtccctgcactcaaagacaagttgcaactgttgcaaaactgttacaagccaagagggcagcacaatgaacctgcactttggacaaggggtggtggctgggggccggtcccggcctgttagctgtctgttagtatcgtaggattttcatccggcagggcctgttagcacccagctccggtctgggagaggtggaaaggctgtctccccccagggactagtagtcacagctctggagaggccaggctccggacaaggaggccaagacagggtcctgtacgatctcgggctggtcttatcacctctccctttgctgagacttagttttcccatcttggaacaggaggctggaagccctgccatgtcagtttcacagaagccttgtaaatttccctgagtaaatttccttcagtcctgctctagatcacaccaacagaggggctgccacctcaaagaagtcaccccaccagggataaaatctacttgatcacggtgcatgatctttttaatgtgctgttgaatttggtttgctaattttttttttttttagacggagtcttgctctgtcgcccatgctggagtgcggtggcacgatctcggctcactgcaacctccgccttcccggttcaagcgattctcctccctcagcctcccaagtagctgggattacaggcacgcaccaccgtgcccagctaattttttgtatttttagtagagacggggtttgaccatgaatggccaagctggtttcgaactcctgaccttaagtgatccccccacctcgtcctcccaaagcgttaggattacaggtgtgagccaccgcgcccagctggtttgctaatattttgagaggattgttgcatctatgttcatcaaggatatcggtctataattttctttcttgtaatgttatctggctttggtatcagggtaatgctggtctcgtaaaatgagtatgactctatgtttagtgcactctgaagaaaactgtggtgcaaatcaaagtcacagttgactctacattcaggagtgaggggctgcctccaggttcactgccctccccagcctccccgccaccgctccagtggggactgtggtagacttgttcctctgccctcatggcctggacatacctgagccaaccccaagactcttcctctggctcaggctggccctctctgcaggcccccaccagcccttggccccgacttgctggccaggcttccaggacagagagaggtgcctgcaggctgccctctgacggggcagaagtccagggaggaagaagcggaggcgttgggggaggaggctcctccaccgagctctgcgtgcagccctgtgaaagaggacatgagcaacagcatcccaacccaaactataagagccaacatcaccactgaccaggaggaaggcagtgccccagtcacctctgagggcctcctgggagtcaggcagcgtgctaaaggcttcacacgtgtcatctcaaatgagacagcaacaactgctacccatcgtggagatgggaaaactgagggagaacacagccaacaggtgccagacccaggtgattcatgggccagggaaatttccagaacaattttcaagggctgaatttacactgccaagattttattttttcaataagaacctgaaaaagaaaactaccactgaatatccccgtgatttcatgaagacagaatgttttctatcctctgtcaaagtagaagagatgccctcccagggtaagggtggtccttcctgagaagcaggtggctgcccccatctgcctgacaccgatgcacagaggcaggtggaaattgctccaggcctgaagccatctgggcacaggcattcccaggaatgagctgctgaagtgacccccacctggcagttgtggcctggggccgttgtgggctcgggctcctgagggccggaatgcagatcctcattccccggagcaccctctccactccatggcctaacactgtttgtgagtgaaagaaacatggtggatggaatccgcggtggaatcc

SEQ ID NO: 588837 - DNA, 4001 bp, Homo sapiens
tggactacttaaactctttgcttctattttcctaaggttcaaccattcgagttaactacacagtgtccaacgacaaaagataaagcaataagaaaacctactttcaattgcatatttattagcagcattatggtataacagttaagagcttaagctctggagtcagactgtctggattcaaatcctggttttatcttttactagatgcatgattttgggtaaatatttggcctctctgtgtcgcagttccctcttctgtaaaatagtgacactacatattctcttagggttctttgaggattacaggagaagatacacatagagcattcgtacacagtacttggcacatagtagatgctcaataaaattagtttattttttgaggcagggtcttgctgtgttccccacactggagtgcagtggcatgatcacggctcactgcatcactgcagccttgacttcctgggctcaagcaatcctcccacctcagcctcttgagaagctgggactacaggtccacaacacccgctcagctagttggtttttgtttttttaattttttgtttttgtgggtacatagtaggtgtatatatttatgggaccggctagtttttcaattttttgtagagacggagtcttgctctgttgcccagactggtcttgaactcccaggctcaaatgatcctcctgcctcagcctcccaaagagctgggattgaaggcatgagccaccccagccaagatgagctttttaaacagagatgctggagaaaatgaaattatggctaaggttaaaaaaaaaaatagctgagatccttacacaacatcaaaaagtaaaaaagtaggatttctcaagatttcccacattatcttagataccaagaaaaaaaaaatcgactgtagaggtagtaatttgaagtcctcaaaagaaaaatcatgcatgtggttatattcttttaaaagggggataaataagaaacttcatctactgacagtatacaattatgcagtacggcacaggtgcagccaagcaaaaagaaaaacatgaagcaaaataggaaggcactgccttacctgcttctccgttttcgaggcggtttctccactgtgccagtcagtctgcagaccaaacaaataagacggtaactaaaagtaacatacaagaaaacatctcccggcgctaccgtgccagtcaagaactaaatagaccaccctctgggaccacaggctcgccaagcccagatctgaccttacaaacgcctcatgccctgtttcccctatttaccaagacctagcattcctgggactcaccgttcccccaattccccctgagctcaaaccttcctggtccctcaccccatcctcgacccctgctcgtcacagcccagctccccaaaatcacccacctccacctactcattgtctgcctcgtcacccccgcaagcccccctagcctcccctttcctgtgcccacccgttcccgaccgtgcactgccccctccacgccccgcctctccgggcccggcgacccccgcattccacggcccctccgggggcgcgcccgccttgcccctcccggccccgcgccgccagcctcacccctcggcgccccttccctcacacgcccctctcacctggcctcgaggaggcgatcgcgcccagcccgcgccgccgcctgcaggcgcccccaaggtccccccagcctgcaccccccgcccctccggtctctgcgccccgaatgctccaccgccccgagccgctgcccctgggcccgctccctggcccccaccccatccccaaccccggcctccacccagcccccgcacctgggggccaggcgactccgcggctgctggggctgccgggctcctctgaccatccggctcctgctccgccgcgggagctgctccggcggccgcagggctcgctcgggaagctgaggcggcggaggctggagtaggcggagaggcgggaggagggcctcgcgcctctgccaggcttgccgcggggcccgcctcctccgcgcctctcctcggctcccattggctagagcagtagtgtggacggaaatctgtcagtcgattggacgctcggcccgtcacatcccgcgctgcccacccagaggtttggttgagactgcaggtggcggcggaggtgccttagagattgctagcagggccggaggagaccctagcgccaccatgcgtctaaaagtaggaactgcacccccggctccagacacctgccccaggttctcctggctctgcgtcctgcataccacacacctgctggcgcccctccacctctgcaccacgccaggaccgaaaacaagccctgaaatctcccaatttcttctagcaggtgagacagtgaggcaactctcacaaacgtgtttccttttaagccacctcgaatgcgatccttgtccctacatcttgctgaaattgtctcacagctcacagctacccctcaaaaaggacccagccagaaaactctaagaatccaccaaaataaagcatggtttggatgctcaatcctctgcagaaaagctcactagcttgggtgcaggcttttaagaaagtaagatttttttttaattaccatgaaagaaaaatcagcactacaaacagaaccaatgccatactaaaagcaacgtgttccattttgaaaggcctggacaaatttgatccctgaatggaagctgaccatcctgattgtgtgaccattgcaagttctacaccaattaatcaattttaaaataaattgtactgtattttttgacaaacaggcatgcaaaactgcctttcataagcatagttacccttcttctgctttaacaaagccatccttgaaaataagactcagctcattaacgtattataaaattcttgaaggtgggaaggcctctctaaatctctactcctgtgtgaacttgtttggtatattctcagcatctgttcagagttgggaggaggcataaaactttctcttaagtcacttccattttattagaacatcttttatgcctcaataatatgacagcgtcgagtagtacatgtcaacattggggtggggaaaatctctcattgatctccataagcggcaaaaattaggatactagtttttcacaaaaccaaatgtatttggtgtaaagagttgtcttttcttctgagatggtcctacctacatctttaatggtaaaatgactttccatttatgaagtaatactgacggtaaattgtagtaggaattgaaaaattgctttgaaaaaatgtcaaatctctgttggtcccccaaattagtatttcacgtaatcctaaagtcacagaaccacaaatcacctcaatctcaactaacagtttccacccatattatcaagccagagagaggaaagaactcgagaataatttgtgtcagacgaagggggatcatcaactcactagggaagtaatcttgaaatacatttattatattccttattaaaaatccattgcctgctttttagcatcttccataattgaccaatcctcactgatatatggcagatattgtcaataaaacaggacctattcatttcttacgccttcccaaaaaggatcctcgagtcttcacattgtgtccaagtgatctctgcttattttaactctgtaagacatacaaatcccatcattccagtccacacttaattcacacttcctctttatcttccccaattactccatcctacatcaaacatttccttgtccagatgtgttgtacttacaaaatctacactatgttagcaattatacattgccttggattattcttcccaactacaatgaatttgaacaaatggcctatgagtatgagcccttaataaaaggcagctttggaccagatactgggtgctttgtgtgtgctatttttaatagtgagattaaccctgcctgatattctcttattttagacacagaaacttaagattcagaaaattcaatctgttcagggtcacacaactac

SEQ ID NO: 588838 - DNA, 4001 bp, Homo sapiens
ctcaggtgctgcaacgctggggacccagtgccccctgaccctcttcccgactttcctacctaggtagcctaaataacgcccacttttcccttctccctcttgccaccgccttcccaccctccggggacttaagcagccacactcgaccctcccagctgtgagccccatgtaaagctggctcctgtggccccagccccccaggtggggcttccccgctccctgatgtcacctcgctgctactctaggatcaagactgaacccttgaaatcccacccccacctgctcttttgggctccagctacaccacatagccagtcacattgacagtcccaccagacacgtgcctggcactgtgttggatggagacaagaagaaaaggttgctgaactactctacctccaaaatgtgtcccgtgggctcctgacgggctctgcttagaacatttcccctttccatagccaaaatctgcaaagaaacaatgtcacccaccatgctggcaggaagtctttatgacctcacatttggtttttttcttttgcacatggagtctccactgcagtggttctcacagtctagagaactttttttttttttttgagacggagtcttgctctgtcgcccaagctggagtgcagtggtgcgatctcggctccctgcaagctccgcctcctgggttcacgccattctcctgcctcatcctcccgagtagctgggactacaggcacctgccaccacgcccggctaatttttttgtattttttgtagagacgggttttcaccctgttagccaggatggtctcaatctcctgacctcatgatccgcctgcctcggcctcccaaagtgctgggattacaggcgtaagccactgcgcccggtcagccgagaaaactttaaaaaaaacacaagctcccagacttgtgaccctggagatggcctgacttgcagactggccctggtgtccgtggtctgaaagcggctcctcagcagattttgaagcccagccggggcaagcgcgtcctcttgtcttgtgacaacccccgaatgtcctcagatcctggcataaccacacaaacactcctgcacaccccgggcacccagcagcacttctgcttgggtagaacgaggacgaaccagatctggccactgcccggctgtggaggcagatggaatgctccagctcggtttccaatcactgcccactaggtgaaggcaccccgactccagccccacgaggaaagcgggcgggctcctgtgctccccgggcactaaccatcctgtactggaactgtctgtcttgggggaggtctccccgcaaccagactgtgagctcctagcaggggactccgcctttgaattccgagtgcctggcacgcagtgagcgctctgcacattgatgggtcaatggacgagctcgtgctgcagcggaggtgccacacgtggcgcgggaactggaagcgtccccggggccggcgccctcgtctctcacctgtgtctcccacggaagccagcaccgggctgggcacatagcacataaaggccggccgaatgccgaagaagggggagtccaggtccctgccatgggggcgctcacaatttagctgggggagacaagaccggcgctcatagaacgctggagctggaagcaacgacaacagcgactttactgcgtgccggggcggccgccgcccacctggaccgctggactcggcccctgccccgctcaccgtcgggaatggcgaggctccgggctcgggacagcggggtggcgcccgggcggcgctggtagcccgacatcgccgccggcccggcggggcacgacctgcctagcccggcagcggcggctccatggccccggctccgcccgtgccgcggcccgcgtcgcccgcccccgtcgcccgcccccgtcgcccgccgctcggccgcccccgcgcctccgagcctctcgccgctgcttccgctccgagcaccgaaagcgcgtgcctgaacgccttgggccgtcggcgagggggaggggaagccgtgggcggaagcggaagtgacgactgaagcggggcggagacgcaagatggcggctgtggtgctggcggcgacgcggttgctgcggggctcgggttcttggggctgttcgcggctgaggtgagccaaaggcgaaccaggcttcggcctggggcgggggcggctcgagtctttctggacgctccgtcttcggtttctacaggtgacatggcgcccgtgggacgggctcgcacttcgggacactggtgtccccgaggcgacgggggccctgccttgctttgcgcctcgagcccggggacgcagtcccatctgtctctcctctccccggctgctgggtcctctccccccctcacttcccgggtcgacgggccttctccgaggccatgcctcatatttgcccccgcgcttcacctaccgcgtgctccttcaggaggctgagccggtgggggcccagctctgttagacccgcagggttctgacaccagggtccaggctctcggttgctgcggtctgtccgttgatctctgacgtttaagaaccctttccgtacccaccgctcctcccacccaagtgaccgggcctgcctttccccacgctggaactttgttccgacagcacaggcgtcgcccctccccacacaacgagcgccgtttcaggggtgcggaggtgctgcctccaggagatggatacaggctggagcgtaaacaaaatatcggcagtcgcgtaaatgctttggagtaaacaagcagcctttcatgatagaaaatagcaggaaagactagactggtgagggatagtcctccatcagggtgacatttaagggaagagctgaagaatgaaagaaggggtaggcatgggcaaagggcaagccctggaacggtgaagaagctttggggttgatgagtcaaatgtgttccaggaattgacaagaatcagtgtgaccaggacctatgggagtgtgggggttcaagagatgagtttggagagggagacagaggccaagtcacaccccgccttcggaccaggttaataagggatatggcttttatccaagacttcggtggtgctgttggagggcagagctgttaagtgctttatgtgtacaaactgcacttagagtgagttactgttaataagccctgtttttacagagatagcaactaagacccaaaggacggaaccagcttgctccaggtcccgtggctgagcctttgttgtcagcctctgctttgtcttccaaagtctgtagaaataagtcctgtagaaaggcagatgctcacttttaacccagacaaaacataactaaccgcacctaacaggtcatcacaggtttgttgtctcaagcctgttgtaactgggccgctttctctgttttaggtttggacctcctgcgtacagacggtttagtagtggtggtgcctatcccaacatccccctctcttctcccttacctggagtacccaagcctgtttttgctacagttgatggacaggaaaagtttgaaaccaaagtaaccacattggataatgggcttcgcgtggcatctcagaataagtttggacagttttgtacagtaggaagtaagtactgttgtgttgtcgtgggtggtcccgcagttttaacatgcacatgctttagttgactgttagttgtaattagcatgccaattatgaattgtaccctgagtggaaacaaagtgtacgatttcataaatgttgagctacacatatacctgtgaaaccatcagcacaatcaccctcatgtaattaaatctgattatcatgtcatattgacatcttaaaatgtttctcttgattaaatcttattttgaatatctgatgtaacctgtcaattttctttttactactagttcttatcaattcaggatcgagatatgaagcgaaataccttagtggaattgctcactttttggaaaaattggcattttcggtcagtacccagttttgtaattttttagactata

SEQ ID NO: 588839 - DNA, 4001 bp, Homo sapiens
ctgtgggatgcttgacacaaagacatgatcaactccaactcttctaagttagaatcgcaaccacatacagttagatgttgaagaggaagccagcgacagaggaggccagcagcctaacactgatgaaaatgacgaagaccctggtattcatgaaagatgcttacagaagaagaaatcacattaacatttacccactaccatgacctcttgctggatttggcaaaaaaagacaaagaaaaagaaaaaaaaagtgcccactgcctcaaagaaaactttaagtacaattttgagactcactgtagtaaccactattaacagtaaacgaggaacaaggaacaagaaagacacgctattttgcctcttgtctacaagataccagcacctgaaacttaagaaaggggatgaggaaaaaacgcagggaggctgcattgtgctgaaacttgcaaaagtatcacttctaggaagaaccgtctgcggttccgtttgcttcgtattgccacatgggggatgggaaatacctctttggttaacatcggcatcacacatgtaaaacaaaatcttaatatacaatccacacccaacttacaagccatttaaaagtgttcttaagcggcaaaaactgactttaaatggctctgatgtttctgaaggctctactgtaacacttccatcacaaaggggcgagccggatcacacacactcctctaaccctcggcctctgttgcaacatcctgatcgcccaatcaagaaattacaaacaaacaactctgctctttggttcaaatgtaaatgtgtctcttcaccagcatcgctaaggaagccttctagccggtgaggacaagacacgctcatttgaaaagttaagagtcttacgaggggtgcctgggggtccagcctcccgccccgggaaccggcgtcaccgcagcccagccgggtccacgtcagtccctcgagtcccacggcggcccgcgccgcgtccggccttccgctctggcccgggggcccggacgtctgtcccctcgaccggccccggcgggacccgagatgcaccgcccgctcggggctgggcccagccgcctcctctcctccgcgccccgacctccacggcctggctccgccggccggcctccgccttcctcctcccgcgctcgccccctcacccgcgctcgccccctcacccgcgcggctgagaccgatccctcaggagccgcgggcgaaagcccacccgacgctggcgacgagcacagacacctcagccgccgcagccatcttggcacatccggctcgggtctccgcggccgccgcgccgccgacgtgtccggcttacgacatcagcgcgcgccccgcccctggccccgcccctcggctcgtcggcccagacgcgttctctttcagcccttcacagcccatccctcggccccgcccctcgccggcgtccgtcctccccgcctcatccctctgtcccgccccctctgcccccgcccctcgccggcgtccgttcttccccgcctcattctttcgtcccgccccccgcccgtcttccacgccttatcctgtagttcccgctccccttggccccgcccctcttccgtcgttcctcgcctcattctttcgtcccgcccccttagccccgcccgtcgtccgtctttctccgcctcatcctgtcgttcccgcccctttggccccgcccctcggccgtccttccccgcccgtggccccgcccccctccggcgtccgtctgccgcctcaccgcttggccccgcccctcgccacctgcccggccaggcgcgccggggccgtcccagtacgtcgccctgtttacgctggctctttctcccagtcttttttcgttttaagatgtgagaagagatgggattcttcaatcaaggccacaagcgggaaatcagtctgcaggaccgatgccagcaggctcacgcaccgagaacggctactccgcccagctgagaagcgcggggccctgacgcgggcgcgctcctcgcattcttccgttgggctgggaggctggagggcaggcggcggcggccgcgcatgcgccgggagcggccggagctgcgggacgcggagggccgactgcgcctgcgcgctggttgcctggttacggcgtggccgcgggcaccgagcggcgccggaagttggtcgatggctgccgccagtccctggccagcgtcctggggtttccccgacgcatcctctactgtcccttcgctctgcacagaggcccgggcagggaggggcggcccggccaccgcgcggagccgggtgtccgccgactcgcaagggggacgcgcgggctcctcgtccccaagctccgccctgcgcctttgctgcgccgggccctcccaggcccaccctggccccagccctgctgtcctcccggggaggtgcggcctactcggttcgttcccccggccgccagccccacaggggcgctggggtcccagccttggctgagtgcacgtcggtggcgagtgggcccgggcgctcgggcggccagagcgacccagcggaggggtgaggcgggtaggcgctcctgtgcctgccacggccaggccaggcagcatccacgccctcccgcggaagatcgcagggaacaggtgggcactatcctctgtgccctcatttttcggaggagccgagggaggctgagcggttgaggaagcggccagccatgccgggcccactcacctgcacacctgcctggcaagggcagggaagagccgcggccttcctctgctgctccttccagagggcaggcgccgtggtgggggtgcccgcccgatggcatcgcgggaggctgagctcccagcagcggctgaggtcctccctgggtgggagccacccttgtccccagctgggccggcggctggtgagggagggggtgatatccgtgccacgccagcagggccgcaggcggtgcagggagagcttcagtccggctgacgtggcaccagggccaatctgctcagctaacatttgcctttcaggagtcagattcctgacctgtttgaacagagttagggagcacgtggtagggcccagccccagccccgctgcccccatctgcttcttcccagtggtcgaggcgctctgcaccctccgcggaaggaggtgtcattgtttgccctttccaaagagggggatgcagaggtggatgctgcctctcaggcgtggggctcgccttttgccgctcgcgagttcaaagaacccaagagccaggagcccagggctcgaccctctagggtcctccgaaaccctgtggtcccaccggggtgggcactaagctatgggagagaccatagctgcagaaaccaaccctgccctaggcataaaatgcaaggtctctggacctcagggcagggatgttagacagcggcttctgttggctcctaggggtgtgaatcaccacatcacctgcagggggcgcggctgtctttcttccccctcttctccctaatcctgagtgcacggagacagctctcagcagtttgtagcctgatgtggagtggagggttcctgcaccctacacccgagcccatccagcctctgggccatagacccttccgttgaaggcccagcctgcccctgagacgctgtgtgccctttttcaacttccttagtctctgagcatcaggtcttcatctctaagatagagcaagatgagcacctaaacgtttcagggctgaaatggggttgccaggacaacaagcatggcaggggcgaatggggacatcaggtgactgactgcgagccagcagaggcctccacccagtgctgggaggtgtcccgccggtggtggccatcactattcctggtggggctttgctgcttttgcctgcagcatccgctggtttctccattctccaagtctctgcccctgctcacacctggaggctggacacaagtgtcaccacttccctgaacccccctaggtgggctggaatcagcatctggtgcaaagctctgtgaccactgctgtacca

SEQ ID NO: 588840 - DNA, 4001 bp, Homo sapiens
tttttctctactcaccaggagaaaaacaatgcaactgcctatcacctatgtcaccactacagggaattttattctttttttttttttttttttttttgagacggagtcttgctctttcacccaggctggagtgcagtggcgcgatctcggctcactgcaggctccgccccccggggttcacgccattctcctgcctcagcctccagcgtagctgggactacaggcgcccgccacctcgcccggctaatttttttttgtattttcagtagagacggggtttcaccgtgttagccaggatggtctcgatctcctgacctcgtgatccgcccgcctcagcctcccagagtgctgggattacaggcatgagccaccgcgcccggcccagggaattttattctgtaacctcaagtcatctaattcttttattgttccaaagaggccagctgatcttgaaaatgcagtattcataaacctagctagtcagttaaactgccttgtaaccatgtggatacctaagcaaaactctttttagtacagttctggctacagaactgaggcatttaaaatgcatgcacacccctctcctcttgctgccactggcttcatattttaagtgaggaaaacaatagtgtgccaggaagcccctgagtttacctactgcctacagtctccctcacggtggctgctagtgacgccctgtcagactgtgggatgcttgacacaaagacatgatcaactccaactcttctaagttagaatcgcaaccacatacagttagatgttgaagaggaagccagcgacagaggaggccagcagcctaacactgatgaaaatgacgaagaccctggtattcatgaaagatgcttacagaagaagaaatcacattaacatttacccactaccatgacctcttgctggatttggcaaaaaaagacaaagaaaaagaaaaaaaaagtgcccactgcctcaaagaaaactttaagtacaattttgagactcactgtagtaaccactattaacagtaaacgaggaacaaggaacaagaaagacacgctattttgcctcttgtctacaagataccagcacctgaaacttaagaaaggggatgaggaaaaaacgcagggaggctgcattgtgctgaaacttgcaaaagtatcacttctaggaagaaccgtctgcggttccgtttgcttcgtattgccacatgggggatgggaaatacctctttggttaacatcggcatcacacatgtaaaacaaaatcttaatatacaatccacacccaacttacaagccatttaaaagtgttcttaagcggcaaaaactgactttaaatggctctgatgtttctgaaggctctactgtaacacttccatcacaaaggggcgagccggatcacacacactcctctaaccctcggcctctgttgcaacatcctgatcgcccaatcaagaaattacaaacaaacaactctgctctttggttcaaatgtaaatgtgtctcttcaccagcatcgctaaggaagccttctagccggtgaggacaagacacgctcatttgaaaagttaagagtcttacgaggggtgcctgggggtccagcctcccgccccgggaaccggcgtcaccgcagcccagccgggtccacgtcagtccctcgagtcccacggcggcccgcgccgcgtccggccttccgctctggcccgggggcccggacgtctgtcccctcgaccggccccggcgggacccgagatgcaccgcccgctcggggctgggcccagccgcctcctctcctccgcgccccgacctccacggcctggctccgccggccggcctccgccttcctcctcccgcgctcgccccctcacccgcgctcgccccctcacccgcgcggctgagaccgatccctcaggagccgcgggcgaaagcccacccgacgctggcgacgagcacagacacctcagccgccgcagccatcttggcacatccggctcgggtctccgcggccgccgcgccgccgacgtgtccggcttacgacatcagcgcgcgccccgcccctggccccgcccctcggctcgtcggcccagacgcgttctctttcagcccttcacagcccatccctcggccccgcccctcgccggcgtccgtcctccccgcctcatccctctgtcccgccccctctgcccccgcccctcgccggcgtccgttcttccccgcctcattctttcgtcccgccccccgcccgtcttccacgccttatcctgtagttcccgctccccttggccccgcccctcttccgtcgttcctcgcctcattctttcgtcccgcccccttagccccgcccgtcgtccgtctttctccgcctcatcctgtcgttcccgcccctttggccccgcccctcggccgtccttccccgcccgtggccccgcccccctccggcgtccgtctgccgcctcaccgcttggccccgcccctcgccacctgcccggccaggcgcgccggggccgtcccagtacgtcgccctgtttacgctggctctttctcccagtcttttttcgttttaagatgtgagaagagatgggattcttcaatcaaggccacaagcgggaaatcagtctgcaggaccgatgccagcaggctcacgcaccgagaacggctactccgcccagctgagaagcgcggggccctgacgcgggcgcgctcctcgcattcttccgttgggctgggaggctggagggcaggcggcggcggccgcgcatgcgccgggagcggccggagctgcgggacgcggagggccgactgcgcctgcgcgctggttgcctggttacggcgtggccgcgggcaccgagcggcgccggaagttggtcgatggctgccgccagtccctggccagcgtcctggggtttccccgacgcatcctctactgtcccttcgctctgcacagaggcccgggcagggaggggcggcccggccaccgcgcggagccgggtgtccgccgactcgcaagggggacgcgcgggctcctcgtccccaagctccgccctgcgcctttgctgcgccgggccctcccaggcccaccctggccccagccctgctgtcctcccggggaggtgcggcctactcggttcgttcccccggccgccagccccacaggggcgctggggtcccagccttggctgagtgcacgtcggtggcgagtgggcccgggcgctcgggcggccagagcgacccagcggaggggtgaggcgggtaggcgctcctgtgcctgccacggccaggccaggcagcatccacgccctcccgcggaagatcgcagggaacaggtgggcactatcctctgtgccctcatttttcggaggagccgagggaggctgagcggttgaggaagcggccagccatgccgggcccactcacctgcacacctgcctggcaagggcagggaagagccgcggccttcctctgctgctccttccagagggcaggcgccgtggtgggggtgcccgcccgatggcatcgcgggaggctgagctcccagcagcggctgaggtcctccctgggtgggagccacccttgtccccagctgggccggcggctggtgagggagggggtgatatccgtgccacgccagcagggccgcaggcggtgcagggagagcttcagtccggctgacgtggcaccagggccaatctgctcagctaacatttgcctttcaggagtcagattcctgacctgtttgaacagagttagggagcacgtggtagggcccagccccagccccgctgcccccatctgcttcttcccagtggtcgaggcgctctgcaccctccgcggaaggaggtgtcattgtttgccctttccaaagagggggatgcagaggtggatgctgcctctcaggcgtggggctcgccttttgccgctcgcgagttcaaagaacccaagagccaggagcccagggctcgaccctctagggtcctccgaaaccctgtggtcccaccggggtgggca

SEQ ID NO: 588841 - DNA, 4001 bp, Homo sapiens
atgacagggaactcaaaatcattcaggataattttacatttctgccagttctattagaatgtctttgttctgatgtgaaatatttcatgtaagttcaaatcatcagttttagatttacctgttgcagccagaaaatgtcacatccctcttcacatccttcagaagtttccatgcatgtgttcaagattttttcctccctagataaaaccccactagttccttcaaaaatcccaaaacaacttggttgcttgattccttccttcagtcattatttattgtgtcatgccttatggtgggtacctgggatagaaatgacttgagcaggttctctgttaaagtctaatgaaggagataaatatggaaacatcactggtcttataatgatatgaacaaaatgctatgggggcaaaagggaaaactagtagctactgctgcttacagacagagaaggcctcaagaggaaataacccctgagcttagtcttggaaaataagtagaaatttgccttgagatgagggagaaagtttgtgaattcagaaaacagtaatgggttcacgagtgctggatcataggacagcaaagaaagattaggctgaaggccgggcgcagtggctcacgcctgtaattccagcacttttggaggcagagacggaggatcacaaggtcaggagatcgagaccatcctggctaacatggtgaaaccccgtctctactaaaaatacaaaaaattagctgggtgtggtggcacgtgcctgcagtctcagctactcaggaggctgaggcaggagaattgcttgaactctggaggcaaaggctgtagtgagccgagatcgtgccactgcactccagcctgggcgacagagtgagattccatcccaaaaaaaaaaaaaggaaaaagaaaggttaggctgaaatgaccactaagagctttggtatccccccggttttttttttttgtttgtttgttttttttagttcagcaacaagtaacagaaactacgcagaagagtaacagcagagcgaacgatggactggaaagcaaacagcctgaagaaaagggttaagtagcaaatgcaaagcagtagaaagggaaaaggaaagagcttatgagaaagctttcaagcagagtttaaagtctggcatatgactagagagagaaagagcataagaaaaatccaagatgacgctgacgtttctggctctgagtaaatgagtgtacaacagtgccatatggaagtaaggagatataattgagagtgagagagctgagctgaaaagagactaagttttgtgtaggacgagttatctgtaggacagattgcttatggggccgccagatggaaatgtgagtgcaaacctcaggtccagagacaccagtttaatgacatcggttttctcaaagttatctctgactctattccagtttgttaactttccttttttaagagtagtgccctaaactgagcaacgagaaaaaaaatgtcgccttcctcccaaaaggcctttaactactcccacggccacgtcactagaagctcattttgcctttgtcaatcttcacatgctagggtctccaccccagaatcagcgaggttctgggtcctatctccgagtctggaagcgaacgaactgcagggttccttacctctgccggacagtggatcccgccgcccgggcggccactgctttgctgggagagcgccctgaggatcccacgttagtgccactgggggtcggaccaggctgtagagggagacaagcagacagacgggtgagcgcggcaggcctgccccagaaccccggcctagacacccacacccgaggctgggggaagcaagggagctacagaggaaaagcacggcgcaaagcaggaggagtcagggcttctgggagaggcggggatcatggaagggccgccataccatattggagatgagggtggcaaggcgctgacgcggacggatagaaagttacggagcccccgaaagaccggcagctggcgagactgactcaggccccgcccccggacttgcaggcaaggtcctctctgaccccagggacgcctgggtcgtctcacgatatgcctgtagacagtctgctacagacaacttagttacctgctgtatgggaagtagagacctccggcctccttcctttggatcacaacgtccttcagaaagtccaatccctaccgaaggaaaaatataaccggggtcagacaagatattttctcaggcagttactagaccctcacagatttgcgctgatgtggcctaactgacgcacgtacggcagggcggggtcggcccgcagtggccagctgggagctacgagcgcggagcttgcgcagaagacccccatcagggtgcggggtgcagttgcggctccagggccatggcggaggagcagggccgggaacgggactcggttcccaagccgtcggtgctgttcctccacccagacctgggcgtgggcggcgctgagcggctggtgttggacgcggcgctggcgctgcaggcgcgcgggtgtagcgtgaagatctggacagcgcactacgacccgggccactgtttcgccgagagccgcgagctaccggtgcgctgtgccggggactggctgccgcgaggcctgggctggggcggccgcggcgccgccgtctgcgcctacgtgcgcatggttttcctggcgctctacgtgctgttcctcgccgacgaggagttcgacgtggtagtgtgcgaccaggtgaggcggccgcggggccggctgcgcgagtgcggacctcgccgtggagggcggccgcgggcatgacccctgagagaagaccttccctgtctgcggttcgcaaagatcggaactgacatggagaagtcagggttgtgagcgagcctgtggttctctaactttagtgtgggcccatttaaagttgcagattgctggggttccatcctccaggaagttttcatccaggtgccctgaggtggggcccagacatctgcattttaactgggtcatagggtgattccgaggtagatagtctttggggctctgagaaacgctggtattagaagtcagcttcagtcaccttttactaatgagtaactcgcgtgttgtcttcccgcttacctgttatttttgttgactctcctttcaggccatttgcatcccactgtccttgtgttcggagccaggccacaccgtcctcagcagtgtcatgtgttaaaaacgccaagctgaatatatcatgcccctattaaaacttgtacatggctccccattggtttttggagaaaagttcaagctttttaccttggtaaataatgtccacctggatctgccctgtagctattcttgactctttccttcgtgcatttttccccatcctaaaaaagatgactttaaaaagtaacatttactcgattaaaaatttagtagtatagaaggatgtaacctaaaagccccgtcctattctactccctgaagatagccaccgttaagtttctcttgtattttttcagaagttgtggtgacaccagcctgtgtcttttcataggtatatctatatcttcttattggtacataattggtattatgacatacctactattaggcatctttttcagcaaaaatttatttatttatttatttattttgaaacggagtcttgctctgtctcccaggctggagtgcagtggcgcgatctcggctcactgcaacctccgcctccagagtagctgggagtacaggtgcgcgccccacgcccggctaattttttctatttttagtagagatggggtttcaccatgttggccaggctggtctcgaactcctgacctcgcgatccgcccacctcggcctcccaaagtgctgggattacaggcatgagccactgcgcccagccgggacattcttatgtatcaatattagagattcacttcattcttcatagtggccagaaaatccacttttgtttaagtgtgtcataattaaacattctccttaaa

SEQ ID NO: 588842 - DNA, 4001 bp, Homo sapiens
ggtcctttctttgcccttccctccacatttcatctcccattagatatatgatatatttttaaaccatatgaacaaatgaaccttgaaacgggatttttttttttttttttttttttttgagacagagtctcactctgtcagccaggcttgagtgtagtggtgctatcttggcccactgcaacctctgcctcccaggttcaaaggattctgctgccccagtctcccgaatacctgggattacaggtgtccgccaccatacctgattaatttttgtatttttgtggagacggagtttcaccatgttggtcacactggtcttgaactcctgacctcaggtgatccacccacctcggcctcccaaagtgctgggattacaggcgtgagccacagcgcctggcctgaaactgcatttcttattaacaaatgcaatgcagtctctactatttctttgccgaaaataacaatgagtatgaagaaaaaaaaggggagttaaagcttctgtttttggcacaggatacagttaagttgtgctactggctcagactcttcttggttgaagagcattctctcatcatctgcagaactttagtgcagtaactgctgagtatttgaaagtctaatcaccattaaatccaaaatgtaagcccctaggtaagacttttagaaagatacatactctgtcactggtggttcctgaacaaacggatagtatgtggctgcagagctggggaagacacatgcttctgaggactctaaccatgccacattgagcccggcaaatctggggacaaatggtttgacatctgctgataacttgatgccctgaggaaaaatatgaggttttggccacaaacattcagagatcaagcaaatataaacaaacaaaaagacccaagaggtgttcctaatagccccagaaatgttcccgatgttgtttaaaaacttctgcctcgtaaagacaagaacctgcttgctaacgatttctccccaatgcttttttttttgtagaaaaggcagtagttcaaacattaaaagtgaaaaatgacaacgaattcaagtggaaataaaacaacacagattatatagtttagatcttggaataagggtgtttttaccacagattcacttagaaataatagaactgcacacagtacaactactgcagtcaaatacacgtggactgtttaactacagcacccaaaacacactgcagacgtttatttccattacattttcttgaaaaagttgcacaaaagcatatgcattttactcatgaaccactaagtcttgctttattgaaataccaaaccttgctttgctagaaaatattatcaccacgagcctttgaaatttcaattcactaagatttctttctttagtttttagtgacgtagtaagagatttactttcaccgagaattttatgggtctaaaaatgatgcaagcgatcgccagggctccatctagtggtaatgctgagtacgtagagcggagaatgacgttcagaaaaacgcaggatcctttaaaacaatctatccgttcccaagagcgcgggaagctcgccagagtccccccgccccgactgcggggagcgccgggctgggccgcagtcactgcgctgggtgacatcgcaccacagacgcggcgctaactgtgggcggggtctgtagccgctgaccgccaccccaaggcggacccgaggcggggcgcgaagatcgcggccacccggtagggcgctcccgtgccgtcaccagcatccgacccacgcccgctggaccagccccgtcaccgcccggccgagcccccagtgcgaggcaggcggacggactgaggctgccgagagagcccccgtcggcccttacctcgctttcgggctcccgcggcccctccgacgccatgccgcgaggcgcggaggaggccgcgtcacggaggccagcagcgggccgtcggcttgccggacagacaaagcgtttccgcccccgcaggcgacgccaggaagtgcgtcacagcaaagcgacagagcccgccctttcttccggccggaagtacgcggcggcggcactggacctgcgcgggcagcacgtggaggcagtggggcgcttgcggaaaatggggacccccaggagtcctctgggctggggacccaccgtagcttgcgggagtcttggatctgccttttagtgctgggatatcggagatagtctccaccaaggcagtagcgactataaacaagagttaggccgtgatttacttttctcccctgggcctcacgagtctagcgttaggacgggatggggtagtctggaaaggcctctcgctgaggtgacctttgagcagtcacctgaagagaaagatttactaataaggaaactgaggaggccgagattactctcacccccgccactgcatttccctaaaatttccccaagattggtgacttacaggaattgcataccctgtaggtcctacaaacctggaaagcctacaagactcttgatggtatcctaaatttccagaaaccttaagtttggaagtagccacagaaaataatttaaaaatcgctcggtttctttcaaaaattaaaaaaagtgctaagatatggtcaagagatggaatagtataattttcacgagaaaaaaaaagttctacacagagcaaattcgttaaatattgagagaaatgtataaagtgcggcagggataggaggttgaccaaaagtacagggaagaatgcagagtggatttcaatagatggaggaggaactttcctctcactcaaaggcttggaggaaagtgcaagtggatttaaggaacagaaaatgtcagcaaaacaggctatttgaggaatggggattaggttgaggcaaattgtaggtttcctctgtcccttgcacagacgttaactctaccattgaatacgaagtatttcaagcaagtaaggcaggtgcagctccagttttttcagatttctgtcctggtgggtctcagttcactacacagcctctagcagaagtgatccttagggtctggtctggcaggaatttatgctggaagtttaggggtagctgtcgccttcctttcagcactattgggtctacccggaagtgtaatgaagtttacttgattttgtcatgtttctgttggttaccctggacacaacctatggtagtggcagtagattttaggatgctgctaatcacaaccttcaaaatttattgccctcatgtgtaaagacaccctttcttaaccaatggacctgatgtatgctggctgctcatttaagatgtttctatagcatagcaattaattagaataactccaaaacactttcctagcagctaaaaaggcaaaggtgttttacagtgtttttgaacttttaaaaatgtggtgatactttataggaaacattatccctactttggaaatgtagaagaggataaaaaagaggtttctcccaagaccaccagtggccagtgaagtagcccagatagtattaatttgggctttcctgttctagacaattctccaggaattcaagaggtaaaatctactttggctttagtttaaacatatccctggtaattaatttcttcattaagtgaattaaatggtatccagatcataccgcactattttaaactcatttaacatcatctttaaggtaagttaacttcctcagagctaaaactataacactgaaatcaatttcaatagtcacaaatttcaatagtcacaaattaagaaaatatacctcaaaaacttgaaacagtgataaatgcaacatacaaactttattgaacaaaagtaaactgtttcagtaaactcaaacaggcacttaagagaaaaactgactggaagaacttttatcttaaacatcttacagtaacctacttgcagttgcatttaactgagctctgttgctgtgaagaatacagctcatgcacaggtatggatgaaagatttgtacatttctcaagtattcactgaatactaccttatatac

SEQ ID NO: 588843 - DNA, 4001 bp, Homo sapiens
aactacacctgatgcaaatcttaaaaacagatctacaaataaatctacacaattatgtgaaagattaatactttttttgtctaaattcagctgcaagaggaagccattttgtaaacctagagaatgaatcctgagaaggaaaaagaaaatgtaaggaaaaatgtaagccttctttcaactcaaatttagaagaacttaagcctgaaatgtgtaaaattcatctccatattaacagatataaagtaaaaaggtggaaagcaaaagtcaacaatttccaaaaaattatccacacagaggcagctatggttgctagtcccctccccttcgctcaacaagattttaaaatgttaaccttaaaaaggaggagtacgtttatttggtcctttctttgcccttccctccacatttcatctcccattagatatatgatatatttttaaaccatatgaacaaatgaaccttgaaacgggatttttttttttttttttttttttttgagacagagtctcactctgtcagccaggcttgagtgtagtggtgctatcttggcccactgcaacctctgcctcccaggttcaaaggattctgctgccccagtctcccgaatacctgggattacaggtgtccgccaccatacctgattaatttttgtatttttgtggagacggagtttcaccatgttggtcacactggtcttgaactcctgacctcaggtgatccacccacctcggcctcccaaagtgctgggattacaggcgtgagccacagcgcctggcctgaaactgcatttcttattaacaaatgcaatgcagtctctactatttctttgccgaaaataacaatgagtatgaagaaaaaaaaggggagttaaagcttctgtttttggcacaggatacagttaagttgtgctactggctcagactcttcttggttgaagagcattctctcatcatctgcagaactttagtgcagtaactgctgagtatttgaaagtctaatcaccattaaatccaaaatgtaagcccctaggtaagacttttagaaagatacatactctgtcactggtggttcctgaacaaacggatagtatgtggctgcagagctggggaagacacatgcttctgaggactctaaccatgccacattgagcccggcaaatctggggacaaatggtttgacatctgctgataacttgatgccctgaggaaaaatatgaggttttggccacaaacattcagagatcaagcaaatataaacaaacaaaaagacccaagaggtgttcctaatagccccagaaatgttcccgatgttgtttaaaaacttctgcctcgtaaagacaagaacctgcttgctaacgatttctccccaatgcttttttttttgtagaaaaggcagtagttcaaacattaaaagtgaaaaatgacaacgaattcaagtggaaataaaacaacacagattatatagtttagatcttggaataagggtgtttttaccacagattcacttagaaataatagaactgcacacagtacaactactgcagtcaaatacacgtggactgtttaactacagcacccaaaacacactgcagacgtttatttccattacattttcttgaaaaagttgcacaaaagcatatgcattttactcatgaaccactaagtcttgctttattgaaataccaaaccttgctttgctagaaaatattatcaccacgagcctttgaaatttcaattcactaagatttctttctttagtttttagtgacgtagtaagagatttactttcaccgagaattttatgggtctaaaaatgatgcaagcgatcgccagggctccatctagtggtaatgctgagtacgtagagcggagaatgacgttcagaaaaacgcaggatcctttaaaacaatctatccgttcccaagagcgcgggaagctcgccagagtccccccgccccgactgcggggagcgccgggctgggccgcagtcactgcgctgggtgacatcgcaccacagacgcggcgctaactgtgggcggggtctgtagccgctgaccgccaccccaaggcggacccgaggcggggcgcgaagatcgcggccacccggtagggcgctcccgtgccgtcaccagcatccgacccacgcccgctggaccagccccgtcaccgcccggccgagcccccagtgcgaggcaggcggacggactgaggctgccgagagagcccccgtcggcccttacctcgctttcgggctcccgcggcccctccgacgccatgccgcgaggcgcggaggaggccgcgtcacggaggccagcagcgggccgtcggcttgccggacagacaaagcgtttccgcccccgcaggcgacgccaggaagtgcgtcacagcaaagcgacagagcccgccctttcttccggccggaagtacgcggcggcggcactggacctgcgcgggcagcacgtggaggcagtggggcgcttgcggaaaatggggacccccaggagtcctctgggctggggacccaccgtagcttgcgggagtcttggatctgccttttagtgctgggatatcggagatagtctccaccaaggcagtagcgactataaacaagagttaggccgtgatttacttttctcccctgggcctcacgagtctagcgttaggacgggatggggtagtctggaaaggcctctcgctgaggtgacctttgagcagtcacctgaagagaaagatttactaataaggaaactgaggaggccgagattactctcacccccgccactgcatttccctaaaatttccccaagattggtgacttacaggaattgcataccctgtaggtcctacaaacctggaaagcctacaagactcttgatggtatcctaaatttccagaaaccttaagtttggaagtagccacagaaaataatttaaaaatcgctcggtttctttcaaaaattaaaaaaagtgctaagatatggtcaagagatggaatagtataattttcacgagaaaaaaaaagttctacacagagcaaattcgttaaatattgagagaaatgtataaagtgcggcagggataggaggttgaccaaaagtacagggaagaatgcagagtggatttcaatagatggaggaggaactttcctctcactcaaaggcttggaggaaagtgcaagtggatttaaggaacagaaaatgtcagcaaaacaggctatttgaggaatggggattaggttgaggcaaattgtaggtttcctctgtcccttgcacagacgttaactctaccattgaatacgaagtatttcaagcaagtaaggcaggtgcagctccagttttttcagatttctgtcctggtgggtctcagttcactacacagcctctagcagaagtgatccttagggtctggtctggcaggaatttatgctggaagtttaggggtagctgtcgccttcctttcagcactattgggtctacccggaagtgtaatgaagtttacttgattttgtcatgtttctgttggttaccctggacacaacctatggtagtggcagtagattttaggatgctgctaatcacaaccttcaaaatttattgccctcatgtgtaaagacaccctttcttaaccaatggacctgatgtatgctggctgctcatttaagatgtttctatagcatagcaattaattagaataactccaaaacactttcctagcagctaaaaaggcaaaggtgttttacagtgtttttgaacttttaaaaatgtggtgatactttataggaaacattatccctactttggaaatgtagaagaggataaaaaagaggtttctcccaagaccaccagtggccagtgaagtagcccagatagtattaatttgggctttcctgttctagacaattctccaggaattcaagaggtaaaatctactttggctttagtttaaacatatccctggtaattaatttcttcattaagtgaattaaatggtatccagatcatac

SEQ ID NO: 588844 - DNA, 4001 bp, Homo sapiens
ttcagaaaggcaggttgtttatggcatttacccagcacaatgaaagcgttcactctttgctttctgtcttcattttctgagcaataaaaatgccattaaaataatggaaaagttagtcagcacatcttacttcctgttcacactaaatatccaacaagtattcttgtagaaacactccttaaaagcaaaggccccaccaacagagagaaaaactcgcataaaaaagatagaaggcacctttcctgtttcccctctgagtcaacatgaagttattttacgaagcagagagtttccactgtactcttatttctacagcttcccacaaaggcaaaaagcagctgtggtttccattttcctgctgataaagccctgctgaaatatatcctggagaaggtgaaagcctgccagccctgtctccgcccaccagggccaccagctcagcccgcgcagtatttcaattgccttcttgtgtgctgtaacaggttgaagagatgcaatcttgtttgcaaaaagggtctttctagatgtaagaatctcaggatgagatctccctgggttatctgagtgggccctaaatccagggacaagtgcccttatagatacactcagagggaaagacagacgcagacgccatgtgatgttggagcagagactggagcaatgtgtcacaagccaagggacactggggccacacaagagggaagaagcaggacggaggcccccctagagcctcaggggagtgtggccctgctgacaccttgatttttacttctgacctccagaactgggagaataagtttctgttgttggaaaccacccagtgtgtggtactttttatggcagctaccagacattcatccctatgtcccctgtgcgcctatgaaaagggattgtttccttcatggttcatttacagagaaagcaagaaagcccccaatacacagactatgaaaatgtgcggaatgagatgaaatgaatcatcctcactgcacccttgttaggggtctgcctcttgttcacactccactctcccacccaaaacctgagtcctatggccccctcatcctccaccccaccccaccccaccccaaggcccttccttccccctccttgggcagccaccgcttttgttcctgtcactgctgctgtgttgcatgttaccctgaactcagcagcctgcaacatgttactacactcccaattctgtgggtgaggagcctcagcgggccccagcttcagtcagctcatctctgctccaatgtccaaggacaccaaagctgacacacctaattaccaagggctacagctacagtccttggaaggcctgtcccctcacttatcagggccctgagtggaggggactgaataccagggctgcccactggagctcccatggctgcctgtggagcttgggtttcctcacagcatggctgccaaagggccaactccttccttggcatcacagggctcccagagccagcatcctggtgaacaatggggaagccacattgggggtcactcagcctcacacccaccacattccaccaatcaaggcagtcaggaagtaacccagatccacagcaaggggacagacaccctgcatctcagtggcagcaatggcgagattggccaccatgttttaaaaactacagcttttcgcccagctcagccaccagctgtttccgatttgctctgagttctaactcagtgtttgttacttcaacacctcagccccgtcctcgttgggcagcctcaccctcaagatcccctcaaagcccctgtatcccctattgtgtccggaattggtgggttcttggtctcactgacttcaagaatgaagccgtggaccctcgcggtgagtgttacagctcttacggtggcgcgtctggagtctgtcccttctgatgttcagatgtgttcagagtttcttccttctggtgggttcgtggtctcgctggctcgggagtgaagctgcagaccttcacggtgagtgttacagctcttaaggcagcgcgtctggagttgttcgttcctcccggtgggctcgtggtctcgctgggctcaggagtgaagctgcagatcttcgcggtgagtgttacagctcataaaagcagcgtggacccaaagagctagcagtagcaagagcgaaagaacaaagcttccacagtgtggaaggggacccgagcgggttgccaatgctggctcgggcagcctgcttttattctcttatctggccccacccacatcctgctgattggtagagccgagtggcctgttttgtcagggcgctgattggtgcgtttacaatccctgagctagatagaaaggttctccacgtccccatcagattagttagatacagagtttccacacacaggttctccaaggccccaccagagcagctagatacagagtgtcgattggtgcactcacaaaccttgagctaaacacagggtgctgattggtgtatttacaatccctgagctagatataaaggttctccacgtcctcaccagagcagctagatacagagtgtcgattggtgcactcacaaaccttgagctaaacacagggtgctgattggtgtatttacaatccctgagctagatataaagactctccacgtccccaccagactcaggagcccagctggtttcacctagtggatcccgcaccggggctgcaggtggagctgcctgccagtcctgtgccgtgcgctcgcattcctcagcccttgggtggtcgatgggactgggcgccgtggagcagggggtggctctcgtcggggaggctcgggccgcacaggagcccatggagtgggtgggaggctcaggcatggcgggctgcaggtcccgagccctgccccgtgggaaggcagtcaaggcccggtgagaaatcgagcacagcgccggtgggccagcactgctgggggactcagtacaccctccgcagccactggcccgggtgctaagtcccccattgcccggggccagaagggctggctggctgctccgagtgcggggcccaccaagcccacgcccacccggaactccagctggcccgcaagtgccgcacacagcccctgttcccgctcctgcctctccctccacacctccctacaaactgggggagtgggctccggccttggccagcccagaaaggggctcccacagtgcagtgggggactgaagtgctcctcaaatgccgccaaagtgggagcccaggcaggggaggtgccgagagcaagcgagggctctgaggactgctagcacgctgtcacctctcactatcagtacatacacacatccttctcccgctaaaagtaacacgtcttgtccattctcctccaacccccaacctctcactgccatcccagaacctgggacacactaggcaggcactgcatgctctccgaggggtagatggcagcagattgagtggaccctgtgcagccagagacagaaactgtgaagctgaaaaacaccatgttaggaatgacagggacgtgcccacctggccttggtgagcaggtggcggtggggtgggatgcacagaggggacagctggagagacccccgagggtccagcgagggaggcggggcccatcagcaagcaacaggagctggttcaggggccccttctcagaggagagggttcacagcaggactggaaacagggtgccacgtgggaggtctgagacaaaattaaaccacaggtgccaccacggagacaagacctgccccaggaagtggagccataagaactggagggcccttggtgtcctgaaaggacaataaaaggctaaaacacagcctgtgtgcaaggatgttcaaaatatcattcctaacagcctcaaactggaagccgagagggcagcagacacccgtggcggatataaatgtgcctaaattgtggcagacacacacaccggaatacgtggtggcaaggcaagagaagaagaccctgggtgagctcaagccaaatgtcacagacggatgctg

SEQ ID NO: 588845 - DNA, 4001 bp, Homo sapiens
acagaccaaaaaatctccagagcctggaacatctcccccgccacagacacatacacatctctttgagcctcctgttctgatctgtaaaattgggatgtccacagcatacggctgtgaggatagagaagtgcttggcacagcttctggcatgccatcagtgcctactaagcagcaggagctgttctttgggtttagatgaaccccctcacacctttccatcccttccagtcctgttaatgctcccaggaagctcactggaaggaaactaggaagactcacccacattttgctgcgcacaaatgcactctagagcactgatgatgtgctaggcgctgtctagtgctccccttagatttcagactcacagcaagcctggagatcagtactgtggatcccattttatagaagagaaaacaagcacaagttgttttatgtggctcacccagcaaggtaggtttcaagctgggcaggaggtctctgcatcccatgtggaggaaaagggactgagacccagtaaaagtgccaacaggtccacactgagccctgaggtaggactcctcctcagtgcttcttccataagagttgcctgccctcagccaatcaaagcttcccgtttccttgcaggccctgggcctatccacacccagcccaggaaggctccaccacaaccctcccctatgagccagacctagtcaccagaacagtcaactctctatccagctccagctacgtctcccaaaatgcagccctcacctctaagtttaatggggggaagggcaggcatgaaactgctggttacaatgtaatgacaagagggtgaggcagcatgactctgggactcctaactcccaagtgttggggctcacagattgcccacaggaagtgactttccagcagagagctggaggtggtgcacaggtaaggagaggaaagggcaagtgggtgtctaggccccgagatcagagggtagagtcccaagaggtcaaggtgaagggtaccaccttgagggaggcctccaggtggggagtctcagaagtgtgaaccaggagaggtcggcggggaccgggttggcgggccagagaagtttctgagcacctggaggacgcggggaggcaagggaggggtttaagccggggagtgggccacgtgattggctatgctcaggctgaaggggaggaggaggaagctggaagccaagatgaggaggtggcagagattcaggccagagttgtgggccgccgtcggcagcaagaacagagagagaggtggacagatctgagagatactgaggtagaaccaccaggaatcggggatttggctggatgtggaggggtgaaggaggggcctcaggctggctggcagtgccccttgccaagaaagggagccccagaggaggaagtttgggggctggggagacaagctcaggggtcagtgttgagttgggggcagggatgagctcccgtgcactcccgttctcccagtctagtcccttctggttcttcacgcaaacttaatccaccatcccaggtttaaaaccctttgggggtgcttaggggtcacatctcaagagggattggggggtaaaaatcagagagtcaatccttgcaaatcccttaaatctccaataaaacttagcgcagaaacgtacctcccttcttcggcaagcctgcagaggccgatgtctcctccggtcccagagcaggaggtggtcttggtttcttcttttgaggcgggagtggagactggcgtttaggggccatgctgttagggaagtcccagaaccagaccacgagtctcctcgcccgtccggaagcaggctgaacactgagactgccccaggtgccagcggcttaaatctgcactggagccgccctgcctggaagggatatttacatgacagtgggacacacaccccggccccctcccccagcctcatcccacccaccctccaatcaggagaaatttcttttagttgctctctgcctcgctctgcaggggcactcttggctttgggggagggggcaagttcttccttgaggagaggatccctgtgctttctagacctcctggtttcacgtgaaacccccgcagcctatcccccagttcgttcccaaacccccaggtagacaggcctgcccctactgagaacttatcctcttttttttttcctttggcctccaaaagatttaaacacgtgctgttgcctcacctaagcttggaacattcctcagtaaaccacacccccactgcccggtttcgctaactccttcctgacctcccttgtctctgcttgaagggatagattaatgttgaaaaaaagatttcccaatcaagaattacaaaggaattagatgcctgctttaaaaaaaaaaaaaagaagaaagaaagaattacagagaaagagggaaaagcaggaaactttggagacttggagtatttattcattcttcacttgtttcagaaagggatacaagttaagagaagagggtttattttagctgggcgtggtggtgggcacctgtaatcccagctacttgggaggctgaggcaggagaatcgcttgaacctgggaggtggaggttgcagtgagccgagatcgtgccactgcactccagcctaggcgacagagcgggaccctgtctcaaaaaaagacttttttttttttttaagacaaggtcccagccgggcgcagtgactcaagcctgtaatcccagcactttgggaggctgaggcaggcggatcacgaggtcaggaaatcgagaccatcctggctaacatggtgaaaccccgtctctactaaaaatacaaaaaaatcagccgagcgtggaggtgggcacctgtagtcccagctactcacgaggctgaggcaggagaatggtgtgaacccgggaggcggagcttgcagtgagctgagatcgcaacactgcactccagcctgggcgacagagcgagactccgtctcaaaaaaaaaaaaaaaaaaaaagacaaggtcccatcctgtctctgaggctcaagtacattagtgatcatggctcacggcagcctcaacttcccaggctcaggtgatcctcccacctcagcctcctgagtagctgggactacagacgtcaccaccatgcctggctaattttttgtatttttagtaggcacagggtttggccatgttgcccaggctggtctccaactcctggtcccaagccaactgcccacctcagcctcccaaagtgctagtattacaggcataagccaccacaccagaccagaagaatttttactatttatttatttatagaaagagtctcactctgggccaggtgcggtggctcatgcctgtaatcgcagcactttgggaggctgatgcgggtggatcacgaggtcaggagatcgagatcgtcctggctaacacggtgaagccccacctctactaaaaatacaaaaaattagccgggcgtggttgcaggcacctgtagtcccagctactcgggaggctgaggcaggagaatggccagaacccaggaggcggagatcgcagtgagtggagattgcgccagcctgagcgacagagcgagactgtcaaaaaaaaaaaaaaaagtctcactctgtcatccaggctggagtgctgtggcataatctttggctcactgcaacctccacctcccagtttcaagcaattctcctgtctcagcctcctgagtagctggggttacaggcaccgccactaggcgtgactaatttttgtattttaagtagagatgggttttcaccacgttggccaggctggtcttgaactcctgaccttaagtgatcctcctgcttcagcctccaaagtgctgggattacaggtgtgagccaccgcacccaacctagaagaatttttagaaagccgcttgtctgggggtcacaaaggccactgttattgggggtctgttagggcataaaaatgagtaaggcaaaaaacaaaagcacaacagctaatagaaggtagattggtacaactaagg

SEQ ID NO: 588846 - DNA, 4001 bp, Homo sapiens
ccactgtgcctagcataaactaaactttgttgcaagtgacagaaccaagattctaaaccaagtagcaattgacaaagcccttaccttaaaacagtttttctatttttattgttgttattattatgagacagggtctctctctgtcgcccagaaccatggctcactgcagccttgacctcctgggctctggggattcttacacctcagccttctgagtagctgggaccacaggcaagcaccactgccaccttgcctggctaattttgtttttatcttttgtagagaggaggtatcaccatgttgcccaggctggtctcaaactcctgagctcaaaccatccttcagcctcagccttccagagctctgggattacaagagttagccatcgcaccctgcctcagtttttttaatgtgaccaacagtcagaagtacttttgacatcatgacctagcacacacaaaccaaaacttacccttaccaagggtgatgtgattctaatttcctatttaaaatgcaggtcacaccccaccaaattgatttcacgacccgctcctgggctgagtctgtctgagaacactatgccaagggctggctgcttccatcctcaaagcctgacccatagggtcactcctgacccacaatgtctcctaagtgccttatctgcctgtttcccaagcacctgcaggggtcccagggaaccctgtaatgccttctgatgggggagtgggctttcaggttccctttctggcctcccaaccctccctgccacctccctgcccctcttttcctgcccttccccacacagtgcttctcaagataaatatgagcacactaggaagttgaagagaaagagaaagcaaaagggccaggggtgtgagtaaacacaggcgagccgggggcacactgagaggttattcacccactcttaggactctgctctctccccgtctccaacaccagaagctctgcattctctcttcttggcctctcccctcactcagaattcctcccttgcctctctcctctcctcctggcccctctggttgtttttttttttgttgttgttgttgttgttcttgtcgcccaggctggagtgcaatggcacgaactcggctcattgcaacctccgcctccggagttcaagcaattctcctgccttagccccccaagtagctgggattacaggcatgcatcgtcacgcctggctaactgtctttggtagagatggggtttagccatgttggccaggctggtcttgaacttctgacctcaggtgatctgcccacctcggcctcccaaagtgctgggattacaggcgtcagccaccgcgcccggcccccggctccctttgaagaggacagaaccccaccgccagaaagactggaacagagagaggctggcattcccccacagtgctgcagtgtcccaagcacagaccaaaaaatctccagagcctggaacatctcccccgccacagacacatacacatctctttgagcctcctgttctgatctgtaaaattgggatgtccacagcatacggctgtgaggatagagaagtgcttggcacagcttctggcatgccatcagtgcctactaagcagcaggagctgttctttgggtttagatgaaccccctcacacctttccatcccttccagtcctgttaatgctcccaggaagctcactggaaggaaactaggaagactcacccacattttgctgcgcacaaatgcactctagagcactgatgatgtgctaggcgctgtctagtgctccccttagatttcagactcacagcaagcctggagatcagtactgtggatcccattttatagaagagaaaacaagcacaagttgttttatgtggctcacccagcaaggtaggtttcaagctgggcaggaggtctctgcatcccatgtggaggaaaagggactgagacccagtaaaagtgccaacaggtccacactgagccctgaggtaggactcctcctcagtgcttcttccataagagttgcctgccctcagccaatcaaagcttcccgtttccttgcaggccctgggcctatccacacccagcccaggaaggctccaccacaaccctcccctatgagccagacctagtcaccagaacagtcaactctctatccagctccagctacgtctcccaaaatgcagccctcacctctaagtttaatggggggaagggcaggcatgaaactgctggttacaatgtaatgacaagagggtgaggcagcatgactctgggactcctaactcccaagtgttggggctcacagattgcccacaggaagtgactttccagcagagagctggaggtggtgcacaggtaaggagaggaaagggcaagtgggtgtctaggccccgagatcagagggtagagtcccaagaggtcaaggtgaagggtaccaccttgagggaggcctccaggtggggagtctcagaagtgtgaaccaggagaggtcggcggggaccgggttggcgggccagagaagtttctgagcacctggaggacgcggggaggcaagggaggggtttaagccggggagtgggccacgtgattggctatgctcaggctgaaggggaggaggaggaagctggaagccaagatgaggaggtggcagagattcaggccagagttgtgggccgccgtcggcagcaagaacagagagagaggtggacagatctgagagatactgaggtagaaccaccaggaatcggggatttggctggatgtggaggggtgaaggaggggcctcaggctggctggcagtgccccttgccaagaaagggagccccagaggaggaagtttgggggctggggagacaagctcaggggtcagtgttgagttgggggcagggatgagctcccgtgcactcccgttctcccagtctagtcccttctggttcttcacgcaaacttaatccaccatcccaggtttaaaaccctttgggggtgcttaggggtcacatctcaagagggattggggggtaaaaatcagagagtcaatccttgcaaatcccttaaatctccaataaaacttagcgcagaaacgtacctcccttcttcggcaagcctgcagaggccgatgtctcctccggtcccagagcaggaggtggtcttggtttcttcttttgaggcgggagtggagactggcgtttaggggccatgctgttagggaagtcccagaaccagaccacgagtctcctcgcccgtccggaagcaggctgaacactgagactgccccaggtgccagcggcttaaatctgcactggagccgccctgcctggaagggatatttacatgacagtgggacacacaccccggccccctcccccagcctcatcccacccaccctccaatcaggagaaatttcttttagttgctctctgcctcgctctgcaggggcactcttggctttgggggagggggcaagttcttccttgaggagaggatccctgtgctttctagacctcctggtttcacgtgaaacccccgcagcctatcccccagttcgttcccaaacccccaggtagacaggcctgcccctactgagaacttatcctcttttttttttcctttggcctccaaaagatttaaacacgtgctgttgcctcacctaagcttggaacattcctcagtaaaccacacccccactgcccggtttcgctaactccttcctgacctcccttgtctctgcttgaagggatagattaatgttgaaaaaaagatttcccaatcaagaattacaaaggaattagatgcctgctttaaaaaaaaaaaaaagaagaaagaaagaattacagagaaagagggaaaagcaggaaactttggagacttggagtatttattcattcttcacttgtttcagaaagggatacaagttaagagaagagggtttattttagctgggcgtggtggtgggcacctgtaatcccagctacttgggaggctgaggcaggagaatcgcttgaacctgg

SEQ ID NO: 588847 - DNA, 4001 bp, Homo sapiens
tacccaaaaatttgggattttggcgatcaattctgacctcttctgaaaaaatggttggcggagtttgttatatttctgttctactttcaaaatctcctcactggcttgttcattaagtctgaagcaaatgaaaagagatgttgacaatgatagtatttaacaaattaaaaaattggttgagattacagagtgtatttacttactagcttgagtcatgcaaaataaccaaattataataaccattatcacctaatttagacactcaaaactaagatggcaattttgtctgatttatcaataaacactgagtaataatgactgttaagagtgcccaaactcaacactctggtaacgtgtgtatttacttcgcccactccatttccagtccaatttcaattgtttccctcaagcgcgatttctaaataaagtggctaatccataacaaagttgtaaggcaagttagagcaaccactgatgccacactgctaaaccatcagaagacctacactgcaattcagacaattttcagtctttgaaagcaaacccaaaccttgtaaggtcaatgcactttcaaaaacttctgtacaatcacttcaccaaaaaacactgaatctacataagtatttccaaccaagttagaatcatttcccctttgacagtggatagatttgaccatagcttcgataattaccgggctattagacacatctcagaaaatttctccgaagtatattaagaaaaatgttacctgtctatttcattttgtacttcatcaatgtgttcaatcgcttcttgctgttctttttctgcaaaaaaggagcaaaaaacttaattctaagataaatttacctagttttccagatgttaatactataatattccaaaagccattaaaacaaaaacaaaaacgcctagtacaaaggcaagcgttccacatgttcatgcttgtagctgactaatttctttttaattaattaaaagaccatttacaagtcatgctgtctgctggtttactcagaaattggttttctatagcgcctttttaaagagtttcactacaacagaccgatcattaaggtttctactatgaaagacacagaataaccttattcagaagtcttcacgtttattatttcacattatacacttgcaagagaacagtagcagctgctaactagaatatggaaactaaacccatgacaatgatacaaattaggccaccactaccacctatcaaggtaaaaccacctttcatagaaagttgacgactctgctattacgatgaagataccaggcacgcctacaaagactggaaagtcacggggcaccatcctacaccctggccttcgccttctcagaacatgaacccctccaacccaattcaggcgggcagacctcagatgcggccccacacgactttggagcacttactgggagcaactatgagatcggaaagcagtgaggcacagaagggagaggaagaaaagggggtgtgctctggaataggtgcccttttgtcctgtaaagactacaaaccccctacaaagctaagtgggtgtgaaagggccagatcgcgcggttcatttccggtaaccatcccggattggcagcccccctgccgagagcctcctaggcagaggccagctttcttagccatttccaagacccccgatacactggtcgcggcgccaggtttctccgcacgctggcgcgacggggcggccgccccacgtggggagtgcgcccgggctggccagagcatcctcccggccggccaaggcccagcgcgcggccgcccgcgtgttccccgcgcccccaccccacccgagctccaggcagaagccccgccggggccagcctctgggcgggggtgccgggggcgccgccgcgggccgggcgcgaagcggaaccgcgcgggaggtcgggcgcggggccgcgtccggccgcaccatgtggcggcggcggcggctgatgggagcgaggcatcatggcggagcacaataaagagaggcttctcgggagggagggagggggaggagagcgagggaggggggagaggaagggggggtctcctccgcccgcgccgagcaggccgcagcgcccccgcctcgcagcgcggccgccgcggcgcgggccacccaggcccccagcccagccgcgcacaaaaaagggcgccgagtccgcgggcccccgcccggccgcgccgcgcccccccgcccggcgccccccgcgcgcgccccgggccccgccggcggcctgcgggccggggcgggcggcgaagatggcggcgcgggccggcccccgggctcgctgctctcacctgaggtctcgtcggccccgtcgtggttggagttgagctcctttttactgactttggccgccggcgccgacatggtgctgctccgcggtcggggggggagcggggagggggagagaagggaaggcgaagggggcgggcaagcggcttcccctcacgccacacgcgcgggcgcccgctcggtccggccgcctcctcccggcgctcgctcgctctccctccccctcgctcgctcgcgcgcgctaccctcgcggcctgacgccgagggacgggctggggcggcgtgccgggccccggcccgggctcctgttcgcggaggggaggcggaggcggcggcggcgggcggctcggctccctcactcgcgctcggcgatccagccagctcgctgctcgctctcccgagccgcctcctcctccacctcctcctacggcgaggggcgggcgcagggcgcaggcgcgccaggccccgcgcggatgctccgcctccggccggggaggctcgcgccgcggcgccattggcctgggcggcgggatgagggggcggagtcgcggcgcggagacacagggcccggcgagaggtgggaggaaggcgcgcggcgacgcacggccgccccccgcgccgcgtcccctcccccgctctcccctctccggcccgacccaggacactggcgcgcggcaggccggtgggcggggcgtcgcacggaggcgcgggtgcccccggccggcgcgtcacgtggtgagcgagcggcttccctgctccgcggggcaccgggagcggggcgcccaccaccccgaaagtgcaggcccggcctcgtatgggggccccgaattccgcccggcctctcggcgccttccacttcgtggagaaagcagggggcaccccattctggatgccagatggggaactgccgatcggactcaaactcgggctcgtgtgcgaagccccaggctgtgtaatccgcgcgcagggccattcctgggttttagtccaagccctgcccagcaagcttgtacccttgagcaagtcacccttcctctctgaacccgtttctgttatgaaatgataaaggttacgacactgaagccacattaaactcgaagtcctgtgaaggcagggaggtaccacattagtccgcggtgcccagcgcccgcaagaatcatactgagcgttaagtgccagtttcagcagcgcatggcacggttatctcaccgaggcctcacaacagccccaagcgataggcggtgttctgttcatagagatgaaaggggccaacaagttctacttgagaggcaaagttctgaaccactaaggagggccaaagcattttgtttaaataatacttttcaagtaatgcggatgccccacattctgtccctccagcaccccaagacatgaaccataaaaagccagaaaaaccctgattagtagcatttgtttgtttgttttgagacgggagtcttgctctgtcccccaggctggagtgcagtggcgcaatcttggctcactgcaagctctgcctctcgggttcaagcaattctcctgcctcggcctcccgagtagctggggctacaggcacgtgccaccatgcccggctaatttttgtatttttagtagagatggagtttcaccaccttggccaggctggtctactgacctggggtgatccactcacctcgtcctccc

SEQ ID NO: 588848 - DNA, 4001 bp, Homo sapiens
tacctgtctatttcattttgtacttcatcaatgtgttcaatcgcttcttgctgttctttttctgcaaaaaaggagcaaaaaacttaattctaagataaatttacctagttttccagatgttaatactataatattccaaaagccattaaaacaaaaacaaaaacgcctagtacaaaggcaagcgttccacatgttcatgcttgtagctgactaatttctttttaattaattaaaagaccatttacaagtcatgctgtctgctggtttactcagaaattggttttctatagcgcctttttaaagagtttcactacaacagaccgatcattaaggtttctactatgaaagacacagaataaccttattcagaagtcttcacgtttattatttcacattatacacttgcaagagaacagtagcagctgctaactagaatatggaaactaaacccatgacaatgatacaaattaggccaccactaccacctatcaaggtaaaaccacctttcatagaaagttgacgactctgctattacgatgaagataccaggcacgcctacaaagactggaaagtcacggggcaccatcctacaccctggccttcgccttctcagaacatgaacccctccaacccaattcaggcgggcagacctcagatgcggccccacacgactttggagcacttactgggagcaactatgagatcggaaagcagtgaggcacagaagggagaggaagaaaagggggtgtgctctggaataggtgcccttttgtcctgtaaagactacaaaccccctacaaagctaagtgggtgtgaaagggccagatcgcgcggttcatttccggtaaccatcccggattggcagcccccctgccgagagcctcctaggcagaggccagctttcttagccatttccaagacccccgatacactggtcgcggcgccaggtttctccgcacgctggcgcgacggggcggccgccccacgtggggagtgcgcccgggctggccagagcatcctcccggccggccaaggcccagcgcgcggccgcccgcgtgttccccgcgcccccaccccacccgagctccaggcagaagccccgccggggccagcctctgggcgggggtgccgggggcgccgccgcgggccgggcgcgaagcggaaccgcgcgggaggtcgggcgcggggccgcgtccggccgcaccatgtggcggcggcggcggctgatgggagcgaggcatcatggcggagcacaataaagagaggcttctcgggagggagggagggggaggagagcgagggaggggggagaggaagggggggtctcctccgcccgcgccgagcaggccgcagcgcccccgcctcgcagcgcggccgccgcggcgcgggccacccaggcccccagcccagccgcgcacaaaaaagggcgccgagtccgcgggcccccgcccggccgcgccgcgcccccccgcccggcgccccccgcgcgcgccccgggccccgccggcggcctgcgggccggggcgggcggcgaagatggcggcgcgggccggcccccgggctcgctgctctcacctgaggtctcgtcggccccgtcgtggttggagttgagctcctttttactgactttggccgccggcgccgacatggtgctgctccgcggtcggggggggagcggggagggggagagaagggaaggcgaagggggcgggcaagcggcttcccctcacgccacacgcgcgggcgcccgctcggtccggccgcctcctcccggcgctcgctcgctctccctccccctcgctcgctcgcgcgcgctaccctcgcggcctgacgccgagggacgggctggggcggcgtgccgggccccggcccgggctcctgttcgcggaggggaggcggaggcggcggcggcgggcggctcggctccctcactcgcgctcggcgatccagccagctcgctgctcgctctcccgagccgcctcctcctccacctcctcctacggcgaggggcgggcgcagggcgcaggcgcgccaggccccgcgcggatgctccgcctccggccggggaggctcgcgccgcggcgccattggcctgggcggcgggatgagggggcggagtcgcggcgcggagacacagggcccggcgagaggtgggaggaaggcgcgcggcgacgcacggccgccccccgcgccgcgtcccctcccccgctctcccctctccggcccgacccaggacactggcgcgcggcaggccggtgggcggggcgtcgcacggaggcgcgggtgcccccggccggcgcgtcacgtggtgagcgagcggcttccctgctccgcggggcaccgggagcggggcgcccaccaccccgaaagtgcaggcccggcctcgtatgggggccccgaattccgcccggcctctcggcgccttccacttcgtggagaaagcagggggcaccccattctggatgccagatggggaactgccgatcggactcaaactcgggctcgtgtgcgaagccccaggctgtgtaatccgcgcgcagggccattcctgggttttagtccaagccctgcccagcaagcttgtacccttgagcaagtcacccttcctctctgaacccgtttctgttatgaaatgataaaggttacgacactgaagccacattaaactcgaagtcctgtgaaggcagggaggtaccacattagtccgcggtgcccagcgcccgcaagaatcatactgagcgttaagtgccagtttcagcagcgcatggcacggttatctcaccgaggcctcacaacagccccaagcgataggcggtgttctgttcatagagatgaaaggggccaacaagttctacttgagaggcaaagttctgaaccactaaggagggccaaagcattttgtttaaataatacttttcaagtaatgcggatgccccacattctgtccctccagcaccccaagacatgaaccataaaaagccagaaaaaccctgattagtagcatttgtttgtttgttttgagacgggagtcttgctctgtcccccaggctggagtgcagtggcgcaatcttggctcactgcaagctctgcctctcgggttcaagcaattctcctgcctcggcctcccgagtagctggggctacaggcacgtgccaccatgcccggctaatttttgtatttttagtagagatggagtttcaccaccttggccaggctggtctactgacctggggtgatccactcacctcgtcctcccaaagtgctgggattacaggcgggagccactgcgcccggccagtaccatttgttgattttagtgatacgctggccaatttcaaatcctggccatgcaatagctcactcctgttatcccaacactttgggaggccaaggcaggaggatcgcttgggcccaggaattccaggcttcaatgagccccaatgcagccactgcactgaagcctgagtgacagagcaagaccctatctctaaaacaaaaacaaaaaaatacctgaaatctctctttggacatttttaaccagaacttggggttggaattctgccttccagaactcacactttaccattggctctttttttttttttttttttttggtgggggaggggaccaagtctcattctgtcttccaggctggagtgcagtggtgccatctcagctcactgcaacctccgcctcccgggttcaagtgattctcctgcctcagcatcctgagttgctaggattacagatgtgagtcaccacgccctgctaatttttgtattttttggtagagacaggttttcaccatgttggccagactggtctcaaactcctgacctcaggtgatccacctgcctctgcctcccaaagtgctgagattacaggcatgagccactgagctcggcccactatcagctcttaaagctcaagcagcatctttcatgttcaagacagtgcacggtgagtgtcttagcctcccgagtatctgggattacaggcgc

SEQ ID NO: 588849 - DNA, 4001 bp, Homo sapiens
cttagttcagtacattttcatcatttgcctggattactgaagaagcctaaatgatctatttcttctttgatcgccatcaattcctcctccaaaatgctgccagaggccaaagccccaaactggacttcgaaagcacaaatgactcctcctccaatgttgggataaaattcaaattgctgagctcaacacacacaaggcccgcgatgatccagcttccacatcatctctttcctccacacttacctcccttgacttgctcttcctaaaaccattcatggtgactggtattccctgcctttatggaagctcttccactggccttggaaacccaccctcctacctctgcccggtacttaactgtgaatacacatcagacttacctcaggaacttaaaaaaaaaagtagaaaagatcctatggataaaattgtttcccttttaaagaactccactaagattcgaagagaaagctggatttgagaacaaccagtgtgcaagctcttcctgagtgtcatcacgtctggggggggggcctgtccgacccgtcctctcttccagtctatctctgatgaccttcttctctgtccctttaggactctgcacatgtttccatcattgcacttaccttggtgctctgaactcctgctaaaaaaaaaaattattacctggacaaatggcctacagaaaagtgatcgtctcagctgggcttagttgtgaacaaacacggatttgcattcatatatgcccagactctggccccaaaagaacatttctgaaattaaaaaacaaaaaacgaaattggtaagtggcatttatactctatatcccatctgagcctggtatcgatcctattacagacagatactgctggctgatgaggaagcccagataggttagacaacttggctgtggacttccaggaaacagcagaactgcaattctgactcccagttccacaaggggctgtccccactcacggggacagctaggcaccgagccaaaaatcccccaagttattagcccgcgcaggtaacatcaatcctaggatcctcagctgtgtcacttatcaaataccacactcggccttctccttgtggagctcttttccctcaaggcagtcacccccgtttcacttgggtcgtgcaaattgctgggcacatccttagatccccagaagttggggaggacggacaaagtcctgtggccagcagcaaaagctccagcccctccaagtgggagaaacagactctcctccaaacgaagggaccggccgggcgcggcggctcggaggatccctggagcagctgagctcagcctgggaaacacagccaggccctgtctctgcaacacattttgtttttaattagccgggcgtggtgacgcgcgcctatggtcccagttactcggggggatgaggcggaaggatcgctggagcccaggaagacgaggttgctgcgagccgtgactgttccactgcacttcagcctgggtgacagagcgagaccccgtctcaaaaaaaaaaaaaaaagaaaaaagaaaaaaaaacaaagggagggactccaggcgagaggcagacgagcgtgtggagggaaccgacactttccaccccgagacctcccgctcagccccaaggaaactacgcagtatccacaccaaaaacagctcacacgagaccgcagtgtagacaacggaaggacagggggtcgcagcggccgggtccagcgcgcaggaaggcaacaggcggccgccagccgtcgaggggtgctcccgcccccgcaccgagggaagcggccgagcccgcgccgactcttcccccatccgcccaccgggacctaggcgccgcgatggttccccgaagcggccctgcaagcacaagccgcgcctgcgctcacgcccgcccgacctacggcctccagcccgccgctaccctcaccgctctctggctggcgtcggcctctagcccacctccataccgggccccgctctaggccaccagcggaagtgcgggcccgcagccgcagctaccaaccagctgttgccgcgaggtaggccccgcccccgcgctgagtcggccggccgcaggccccgccccggccgctgctttctggttttggtgccccccagggggcggggcatgggaagagcggccgcggtgcaccgcccacgccgggcgctggcgtcacgtccgggcagctggggcccgaccaatcccgagtccccgtcagggtggacggggagagtttgccgcggaaccttgacctcggccccgcccggggcttcctgcgggtggggcggctccgggatgagctctgctgcgggtggggtcagcccttacccgctggccatttccgttccctcttttttcttcttttttccacgcctcaggtgtctcagcggatgtactacggtgacgaagtaatttttctctttagatttcctttaaagacctgaaatgtaaattacataaacgtgtaatttcggaggaatatgtgtatatcctttatattacaagaaagggagaccttaggtcttgcgaacaatgcgcgcgatgcgcaacacagcagagtaaatccctcgctggtgcggtggctcccgcttctaatcccaccactttgggaggcccaggcgggaggctcgcttgagcccggagttcagagaccagcctgtgcaacatagcgagacacccgtatgtacaaaaaaaaattaaaactcagccaccgaggccgggcgcggtggctcacgcctgtaatcccagcactttgggaggccgaggcgggtggatcacctgaggtcaggagttcgagaccagcctgaccaacatggtgaaactccgtctctactaaaaataaaaagattacctgggcgtggtggcgggtgcctgtaatcccagctactcaggaggctgaggcatgagaatggcttgaacccgggaggcagaggttgcagtgagccgagatcgcaccactgcactccagcctgggcaaaggagcgagactctctctccggaaaaaaaaaaaaaaaaaaaaaaattagcacctgtgggcccagcttgttgggaggctgaggcagggggtggatatccattgagaccgggagatcgagactgcagtgagccgtgactgtgccactacactccaggctggggaacaaagcaagaccctgtctcagaaaagtctataaataaataaaaatgagtaaaatccactggaaagcctatccccccccttttttgtttttgagatggagtcgcgctctgtcacccaagctgaagtgcagtggcgcagtctcggctcactgcaacctccgcctcctgggttcaaatgattctcctgcatcagcctcccgagtagctgggagtacaggcgtgtgccacacgcccggctaatgttcatgtttttagtagagatggggtttcaccatgttggccaggatggtctcaaactccaacctcaagtgatccgccccgcctcgacctcccaaagtgctgggattacaagcgtgatccaccgcacccggcccctacccccttttagtaacgcctactactgaccacgatgatgcagcgtcaccgtcttacagttaatagaggagacagggaaattaaacaattagtagtggtgactcaggcgataaaaaaagaggctgagatgggccagcttgggaaaagtgggtcagatacagccttaccgaggagaaccctggcccgaggatgaggagcaagcccaggggaacactgcgggaaaggcccaaggcgaaggaagattctagcaagggggcgtggcttgttggaagggcgtggtggccgttatgcaaatttaaccgtctaaggagcagcacgcgttgaccgttattttcctcttttctacttcttcatcctgtcaaatattttgaacatattttgttttatcatataacactaatataccaacacagcctttataccaccacagtcataaaatataatttttttttttttttgagacgagtctcgctctgtcgccca

SEQ ID NO: 588850 - DNA, 4001 bp, Homo sapiens
atgtggtgtagggggctaggggagggatagcattaggaaaaatacctaatgtagatcatgggttgatgggtgcagcaaaccaccatggcatgtatatacctatgtaacaaacctgcacattctgcacatgaacgtgttaccccagaacttaaagtatataaaaataaaaaaaagaaaaaaaaagtaatgtgacccagggcaagtcactgcacttctctggacctcaagtttcccatctgtaaacgggcacaagaaggctctccctacccagtgatgagggagaaaatcaaatacctctcatgtaaagaatgcctctcctccagtgtctagcagccagcacggggtctgcacacagtaggcactcaatatgttatttatgattattattattactatcattgttatttcaaaactgcattttctttttttttcttttttcccgggctggagtgcagtggcgcaaatctcagctcactgcaacctccgcctcctgggttcaagcgattctcctgcctcagcttcctgagtagctgggattacaggcacgcaccaccacttctggctaattttttgtatttttagtagagatggggtttcaccatgttggccagactggtcctgcattcctgacctcaggtgatccacccgccttggcatcccaaagtgctgggattacaagcatgagccaccgtgcccggccaaaactgcatttcaatgttcccagtacccaggataaatgaagctttggataaatctgagctgtgcccattatctgtgataaagaactgagtcatcctctcctgctccctgcttccagcgccagcacacagtaggtgcacaaagattgggtgggattggaaagctgcatcctttacatggagacactgttggggccccgtccagctggcaagtgagtggggtcagatgatatcaaatattgggttgccctgagtttggggccaggaaagaataatggctggtgtaggaagaaggtgctgagaatgaaactggatccaaatgctgcctcgactccgagaacctcccctcctgggaatacacagtgaggtctggctcctaacaaggcttgaggaagggctctgcccacccgtaatggagcaggctctgagaccttcagtgtcctctgaccaacccctggccagcccctcctaccttcacatagtcgctgccagcctctggctctccagcagccctggaaggagaaaagacaagtgagcatccccagccctgcttggctccccagctgccggtctcttgcctgcctgcctggggccagcacctggcccttaggaccccagcaggatcaccctgaaggcaggagggggcacttatcagctggcctggctcctccactttccagctgtgcacccctaggcaagtcccttcacctctctgagcctgcatttcgtatctgtaaatcaggaataatgacagcctctgcctaatggcattgactcaaggacccagggcgtgatgaacattacatgcttattatggagtctgcttcccaaaccactttcttcactggactccagacaccacgcctccctggttttcttcttcttctgtctgccttccctaccccctcctcccaccccacccccatcatccctgactctaaacactggagggccccaagtggggatcagcccgtcctcttaccctgcactcacttcctagggtagagtgacccagtcacggccactgcccagctgactgcggagccactgccggtgctagagggctacagaattgattctgcccccagggtggagagcctggagaggccagaggccagagacggctgtttttccttccttcctcctgagggccaccgtgaaccactccccccaccgcatggccttaaatgctacccctaccctcaggcagcctggacctgcccctccaaccccagacttggaaacccaactacctcctggacgcctccccttggatatctgaaggccatctacaacttgtgtatccaaagcagaactgtggctcctccctgccccctccccatcttccccgtctcagctgatgtcagtttcctctttcctgcagctttggccaaaaaccctgtggtcctttgtgccccgtcttccattcagctccacgcccagtccaccaggaaatcctgccgctccgccgtcagaatcctctccgcatgtccaccccgtccccaaagtggggccaccctcgtgtctccagtggagcagaggagccttccctcgggctccgtgtccactgccacccacagtcagcttctgccccaaggccagaaggcacctaagcttacaacctaagcatttgatggcaaacgaaccatcctcagcccttcagcggctcccatctctagaagaacaaaatctaaactcctctccatggccatgcaatttatcatccaaaccagaacttttcttcctttgtgagagtaaagacggtaccatgattatgccagaaaaacaggcataaattggctcatctgttctccaacccacaaggccctgtgtggcctgctggtacccgacagccaccctgccgaccctccaggctgtctcccttgcacctcatgtcccttattctgcctctgccccaccctccttggcaacttgttccggccacagggccttcgcacttgctgttccctctgcctggaatgctcttccccaagggcttcatgaagcttgtccctcctccctctttattcagggctttgcttaatgtcacctcttcggagaagccttccctgacctccccaccttgaatagtccctcattccttcactctgtgttcccaaccctactttattttcaatttttgcaatttctgcctgaaatggccacttcatatttatttattgacttaattatctgatgcccttatgaaagtgttgactttgtctaaatcaccactgagacccagtccccaacacagtgcctgcaggagctcaagaaatattgcttaaagaaaaattagccgggcgtggcagtgaacgcctgtaatcctggctacttgggacgctgaggcaggagaatcacttgaacccaagaagaagaggttgaaagaaagaaatattgcttaaagggatgcatgaatagtaaagagccaattttaattgttgatcgctgtcatcattaattttgttaggctgggtccaggttctctggttaagaaaggcctcagccttcccatctgcaaaatggggaggggagtcaaatattggacctcctcctcaaatacaggagcctagtatttacaaacaaaagaaagctgagataaaaaataaaattgtgagttcccccagtcctaaagccaaaagctcctccttaagacgttgtctgatagccctccctgttctaacatactagggttcttcatcgctaatcttctctcctagaaagccctagctggtaactaaccacagtccctcaagctacagcccagcaacagtaggcttttgggttctctctgtccagcagcagtgggagtgaggtagagtagggacccctcccccagccacctccgcccactcttcccgggtgaggcatcccatcccaacatttcctgctattcaggcccggaaatcctcccactgctgggaacagattggccaggacactggatcaacccagcgcttcctcctgcttcctgtacttcccctcgggctctgggacaggggcagagccttggagacagggtgcctgcacaagagatcaggcctgactagggtggccagagcctataggggtgctcagggcagaggaccagctcagggaagctgaggctctggggccactctttcaccccatggcctcaccatggggtggcgctacaacactctgacatgtccaagacacaatcaccatgtccagttacaatccgctgccatcacttgcctggactatcaccaccacctcccactggcttccctgcctccatctgtgtccctgagacctattctccccgcacagcagccacag

SEQ ID NO: 588851 - DNA, 4001 bp, Homo sapiens
tgtggttttcaccattaagagtatgtggtgtagggggctaggggagggatagcattaggaaaaatacctaatgtagatcatgggttgatgggtgcagcaaaccaccatggcatgtatatacctatgtaacaaacctgcacattctgcacatgaacgtgttaccccagaacttaaagtatataaaaataaaaaaaagaaaaaaaaagtaatgtgacccagggcaagtcactgcacttctctggacctcaagtttcccatctgtaaacgggcacaagaaggctctccctacccagtgatgagggagaaaatcaaatacctctcatgtaaagaatgcctctcctccagtgtctagcagccagcacggggtctgcacacagtaggcactcaatatgttatttatgattattattattactatcattgttatttcaaaactgcattttctttttttttcttttttcccgggctggagtgcagtggcgcaaatctcagctcactgcaacctccgcctcctgggttcaagcgattctcctgcctcagcttcctgagtagctgggattacaggcacgcaccaccacttctggctaattttttgtatttttagtagagatggggtttcaccatgttggccagactggtcctgcattcctgacctcaggtgatccacccgccttggcatcccaaagtgctgggattacaagcatgagccaccgtgcccggccaaaactgcatttcaatgttcccagtacccaggataaatgaagctttggataaatctgagctgtgcccattatctgtgataaagaactgagtcatcctctcctgctccctgcttccagcgccagcacacagtaggtgcacaaagattgggtgggattggaaagctgcatcctttacatggagacactgttggggccccgtccagctggcaagtgagtggggtcagatgatatcaaatattgggttgccctgagtttggggccaggaaagaataatggctggtgtaggaagaaggtgctgagaatgaaactggatccaaatgctgcctcgactccgagaacctcccctcctgggaatacacagtgaggtctggctcctaacaaggcttgaggaagggctctgcccacccgtaatggagcaggctctgagaccttcagtgtcctctgaccaacccctggccagcccctcctaccttcacatagtcgctgccagcctctggctctccagcagccctggaaggagaaaagacaagtgagcatccccagccctgcttggctccccagctgccggtctcttgcctgcctgcctggggccagcacctggcccttaggaccccagcaggatcaccctgaaggcaggagggggcacttatcagctggcctggctcctccactttccagctgtgcacccctaggcaagtcccttcacctctctgagcctgcatttcgtatctgtaaatcaggaataatgacagcctctgcctaatggcattgactcaaggacccagggcgtgatgaacattacatgcttattatggagtctgcttcccaaaccactttcttcactggactccagacaccacgcctccctggttttcttcttcttctgtctgccttccctaccccctcctcccaccccacccccatcatccctgactctaaacactggagggccccaagtggggatcagcccgtcctcttaccctgcactcacttcctagggtagagtgacccagtcacggccactgcccagctgactgcggagccactgccggtgctagagggctacagaattgattctgcccccagggtggagagcctggagaggccagaggccagagacggctgtttttccttccttcctcctgagggccaccgtgaaccactccccccaccgcatggccttaaatgctacccctaccctcaggcagcctggacctgcccctccaaccccagacttggaaacccaactacctcctggacgcctccccttggatatctgaaggccatctacaacttgtgtatccaaagcagaactgtggctcctccctgccccctccccatcttccccgtctcagctgatgtcagtttcctctttcctgcagctttggccaaaaaccctgtggtcctttgtgccccgtcttccattcagctccacgcccagtccaccaggaaatcctgccgctccgccgtcagaatcctctccgcatgtccaccccgtccccaaagtggggccaccctcgtgtctccagtggagcagaggagccttccctcgggctccgtgtccactgccacccacagtcagcttctgccccaaggccagaaggcacctaagcttacaacctaagcatttgatggcaaacgaaccatcctcagcccttcagcggctcccatctctagaagaacaaaatctaaactcctctccatggccatgcaatttatcatccaaaccagaacttttcttcctttgtgagagtaaagacggtaccatgattatgccagaaaaacaggcataaattggctcatctgttctccaacccacaaggccctgtgtggcctgctggtacccgacagccaccctgccgaccctccaggctgtctcccttgcacctcatgtcccttattctgcctctgccccaccctccttggcaacttgttccggccacagggccttcgcacttgctgttccctctgcctggaatgctcttccccaagggcttcatgaagcttgtccctcctccctctttattcagggctttgcttaatgtcacctcttcggagaagccttccctgacctccccaccttgaatagtccctcattccttcactctgtgttcccaaccctactttattttcaatttttgcaatttctgcctgaaatggccacttcatatttatttattgacttaattatctgatgcccttatgaaagtgttgactttgtctaaatcaccactgagacccagtccccaacacagtgcctgcaggagctcaagaaatattgcttaaagaaaaattagccgggcgtggcagtgaacgcctgtaatcctggctacttgggacgctgaggcaggagaatcacttgaacccaagaagaagaggttgaaagaaagaaatattgcttaaagggatgcatgaatagtaaagagccaattttaattgttgatcgctgtcatcattaattttgttaggctgggtccaggttctctggttaagaaaggcctcagccttcccatctgcaaaatggggaggggagtcaaatattggacctcctcctcaaatacaggagcctagtatttacaaacaaaagaaagctgagataaaaaataaaattgtgagttcccccagtcctaaagccaaaagctcctccttaagacgttgtctgatagccctccctgttctaacatactagggttcttcatcgctaatcttctctcctagaaagccctagctggtaactaaccacagtccctcaagctacagcccagcaacagtaggcttttgggttctctctgtccagcagcagtgggagtgaggtagagtagggacccctcccccagccacctccgcccactcttcccgggtgaggcatcccatcccaacatttcctgctattcaggcccggaaatcctcccactgctgggaacagattggccaggacactggatcaacccagcgcttcctcctgcttcctgtacttcccctcgggctctgggacaggggcagagccttggagacagggtgcctgcacaagagatcaggcctgactagggtggccagagcctataggggtgctcagggcagaggaccagctcagggaagctgaggctctggggccactctttcaccccatggcctcaccatggggtggcgctacaacactctgacatgtccaagacacaatcaccatgtccagttacaatccgctgccatcacttgcctggactatcaccaccacctcccactggcttccctgcctccatctgtgtccctgagacctat

SEQ ID NO: 588852 - DNA, 4001 bp, Homo sapiens
cagggcggaggggtcagagaggactcctggccgagatcctagaaggatgattgggacatgctctgagtgggcaaggctggggcaggagcagcttggtggtggacccatgaaaatttggaccttgaggagcctgcagggctctggggacagatggtgggagtgggcggtttgcacaggtgctcaggagaaaggcggggcctgggagtgggaattctgcacatcctccggccgtggtagaaaccgatgcccccgaagggcagagaggcccagggctgggctaggatctgggccttctcagacacctacacttctccaaggggtcccctacttctgggggtccctggtctctctccctctcactctgcggtgctcacaccaggctagtcctctttcctcatatcacaccaaaccctggaaaggggagagtgggcgtcacagggaaaaagggaaccaagacctcagccttctggcgtcctccttgacaaagggcatgcgattgagaccttcccccagttccacagctggagctagagggacgtgggcaaaggagggaggaggctggatgttgaagaaccgccccaaggctgccactgtgtgaccttgagccagtcacttcccctctctgggcctgggcagcctcatccgttaaaggggctgggagactgggctccccttttccagcttaatcactggtcacggagagtttggggggaccaacttggtcctcccacacacctgagggtgaggaatcctagggtccctgtgccttgatctcacctcgacctgggagcccccagttccctagagttgggggtgctggggtgcgaatgcagcatccctgcgctcggcgccctgctattggccagagatgatctcaccgcctcccggcctgcgcgcgcctgattggccggtgcggggatgctgcgctccgccgccggcggggcagtccttcaggcgggctccgcgagcgtgtgtgagcctgggggagcgaagagccgacgcgcctggcatctcccagggggctcagggggcaggagcgcggagacccccggacagggtcttaaccccttcccgccagcccgagcccagcatcccctccagctcccctcggcgtcccaaccccaagcaaagccatccccaaaggatgctccgcagagaggcggggtccgggtcctcccctccacccccttccgtttaaccctctcaccgccgcggcgccgtcctgcactgcccggccagctgggctgggagagacccgcgccccaggcatgtccaagcccacctagagggcgggagggtggcgggcgctctggccccaaccctggcatccgaagcatcccccgcgtttcctgctcctcactcagtcttcagatcccagtccggcgcccccggtacaatggggagccagggtgcccaggtcagccgcaagggccagcgtaccaggcggaggaccggcaggacgccggagaccccatctcccagtcccccctgccccagctctctccctcctgcggaggaggcagaaacggaccggcatctaccgcagcccagagtcccaggagtggccgccgaaccctcaccccgcggagcgcctgggcgcccagaggtgaggctggggtgaccccgccccctccccgggtcggccgggcccagcccagcccgaccctgccgggcgccgctgagctgcagctccccggctggctctagggccccgggcggagcggccgggggtcccagcccggcgcgcgtggcgggggccgagccgccccctcacctgcacctgcacgaaggagccgcggtagaagcagcaggcggcggccgacagggcactccacaggctgcaccgctcggtcatggtggggccaggctgccggggccgggacggtgtgggggggcggtggccggcggggcaggggcgcagggaccaaccggctaggcaccggctgcgcgtgcctctcagcggcgcgattacctcatcgccttgtcgggggaggagcggggaggcggggcggggagaccccaccctccagccggccaggggaggggagggggccattgttcctccctccgcccgccccccgctcccagcccctcgccccccgccctccagttccgcgcgctcgggctgcctggagctgcgggcgcggagcggaggacctgccaaggagggtattaccgggggcagcgggatcgggtggggacccatgggccagcgaggggaggttctgcctcccccactcgccgcacctctaacagaccgggagcgggcagagactttgaattaaatcatatctaaaactggaaaaatccgtatatgtgctggaccaaattctctgtggcctcaggaaatctcccagagcccaggatttctcatccctggtttggaatcagagactctgctgggaatcgaggatgttcactgacaagactctgggggtgcagagagccagtaaagcccagtggttagaggggcagcctggattcaactgtcccctaactactggtgcgcccactcccaccagctctttccctgggatctacgactcacttgtggaaaatgcacctgtcaaacgcagctaaagcctgtgctgacctcacagaactcttctgagctttcgctgagctggtgcatgtaagttgccaggcatgaagtaagcgctcaataagtgcacgctattattttcaagcttcctgtcttagaaactggactttttggcctggcatggtggctcacgcctgtaatcccacgccctgggagaccggggcaagtgcatcacttgaggccaggagttcaagaccagtctggccaacatggtgaaaccctgtctctactaaaaacacaaaaaaattagccgggtgtggtggcgcatgcctgcaatcccagctactcaggaggctgaggcatgagaatcgcttgaacccaggaggcggaggttgcagtgagccaagattgtaccactgcactccagcccgggtgatggagcaagactctgtctcaaaaagaaaaagaaaaagaaactggactttttgtctcagaaccataggctcttcaatgcaaagggagccattgctgattccccatcagtcaggcctcaggtccaaatccttctgacaggctgtgtgaccgcaggtgggtgagtccacctctctgggcctcagttgtttgtttgttttctgtaaatacatctgaagctctgggcatgcagcctggaattttatggtcttggaatttaagaatccttgccttagaatcaaaggatgcacaaaatagtttgagaactctgaagttctggaagctgactcctcaaagatgagtatctcaaggtaggagggggcttttttttttttttttttttttgagatggagtctcgctctgtcacccaggctggagtgcagtggcaatatctcggctcaatgtaagctccgcctcccgcgttcatgccattctcctgcctcagcctctccgagtagctgggactacaggcgcctgccaccatgcccgctaattttttgtatttttagtagagacagggtttcaccgtggtctcgatctcctgacctcgtgatccgcccacctcggcctcccaaagtgctggcattacaagcatgagcctccacgcctggcctgttcttgtttttttgagacagagttttgttcttgttgcccaggctgaagtggagttgagtgatcttggctcactgcaatctcggccgcctgggctcaagcaattctcctgcctcagcttcccgagtagctgggattacaagtgacaagtgcctgccaccatgcttggctaattttttttttttttttttttatagagatggggtttcaccatgttggccaggctggtcttgacctcttgacctcaagtgatctgcccgcattacacgcataagccaccgtgcccagcctaggagggggcttttggaacccaactattgattccttttaaccctcatttgatttttttttttttttgagaggcagggtatccct

SEQ ID NO: 588853 - DNA, 4001 bp, Homo sapiens
gccattgattcatgtgggggagcagggcggaggggtcagagaggactcctggccgagatcctagaaggatgattgggacatgctctgagtgggcaaggctggggcaggagcagcttggtggtggacccatgaaaatttggaccttgaggagcctgcagggctctggggacagatggtgggagtgggcggtttgcacaggtgctcaggagaaaggcggggcctgggagtgggaattctgcacatcctccggccgtggtagaaaccgatgcccccgaagggcagagaggcccagggctgggctaggatctgggccttctcagacacctacacttctccaaggggtcccctacttctgggggtccctggtctctctccctctcactctgcggtgctcacaccaggctagtcctctttcctcatatcacaccaaaccctggaaaggggagagtgggcgtcacagggaaaaagggaaccaagacctcagccttctggcgtcctccttgacaaagggcatgcgattgagaccttcccccagttccacagctggagctagagggacgtgggcaaaggagggaggaggctggatgttgaagaaccgccccaaggctgccactgtgtgaccttgagccagtcacttcccctctctgggcctgggcagcctcatccgttaaaggggctgggagactgggctccccttttccagcttaatcactggtcacggagagtttggggggaccaacttggtcctcccacacacctgagggtgaggaatcctagggtccctgtgccttgatctcacctcgacctgggagcccccagttccctagagttgggggtgctggggtgcgaatgcagcatccctgcgctcggcgccctgctattggccagagatgatctcaccgcctcccggcctgcgcgcgcctgattggccggtgcggggatgctgcgctccgccgccggcggggcagtccttcaggcgggctccgcgagcgtgtgtgagcctgggggagcgaagagccgacgcgcctggcatctcccagggggctcagggggcaggagcgcggagacccccggacagggtcttaaccccttcccgccagcccgagcccagcatcccctccagctcccctcggcgtcccaaccccaagcaaagccatccccaaaggatgctccgcagagaggcggggtccgggtcctcccctccacccccttccgtttaaccctctcaccgccgcggcgccgtcctgcactgcccggccagctgggctgggagagacccgcgccccaggcatgtccaagcccacctagagggcgggagggtggcgggcgctctggccccaaccctggcatccgaagcatcccccgcgtttcctgctcctcactcagtcttcagatcccagtccggcgcccccggtacaatggggagccagggtgcccaggtcagccgcaagggccagcgtaccaggcggaggaccggcaggacgccggagaccccatctcccagtcccccctgccccagctctctccctcctgcggaggaggcagaaacggaccggcatctaccgcagcccagagtcccaggagtggccgccgaaccctcaccccgcggagcgcctgggcgcccagaggtgaggctggggtgaccccgccccctccccgggtcggccgggcccagcccagcccgaccctgccgggcgccgctgagctgcagctccccggctggctctagggccccgggcggagcggccgggggtcccagcccggcgcgcgtggcgggggccgagccgccccctcacctgcacctgcacgaaggagccgcggtagaagcagcaggcggcggccgacagggcactccacaggctgcaccgctcggtcatggtggggccaggctgccggggccgggacggtgtgggggggcggtggccggcggggcaggggcgcagggaccaaccggctaggcaccggctgcgcgtgcctctcagcggcgcgattacctcatcgccttgtcgggggaggagcggggaggcggggcggggagaccccaccctccagccggccaggggaggggagggggccattgttcctccctccgcccgccccccgctcccagcccctcgccccccgccctccagttccgcgcgctcgggctgcctggagctgcgggcgcggagcggaggacctgccaaggagggtattaccgggggcagcgggatcgggtggggacccatgggccagcgaggggaggttctgcctcccccactcgccgcacctctaacagaccgggagcgggcagagactttgaattaaatcatatctaaaactggaaaaatccgtatatgtgctggaccaaattctctgtggcctcaggaaatctcccagagcccaggatttctcatccctggtttggaatcagagactctgctgggaatcgaggatgttcactgacaagactctgggggtgcagagagccagtaaagcccagtggttagaggggcagcctggattcaactgtcccctaactactggtgcgcccactcccaccagctctttccctgggatctacgactcacttgtggaaaatgcacctgtcaaacgcagctaaagcctgtgctgacctcacagaactcttctgagctttcgctgagctggtgcatgtaagttgccaggcatgaagtaagcgctcaataagtgcacgctattattttcaagcttcctgtcttagaaactggactttttggcctggcatggtggctcacgcctgtaatcccacgccctgggagaccggggcaagtgcatcacttgaggccaggagttcaagaccagtctggccaacatggtgaaaccctgtctctactaaaaacacaaaaaaattagccgggtgtggtggcgcatgcctgcaatcccagctactcaggaggctgaggcatgagaatcgcttgaacccaggaggcggaggttgcagtgagccaagattgtaccactgcactccagcccgggtgatggagcaagactctgtctcaaaaagaaaaagaaaaagaaactggactttttgtctcagaaccataggctcttcaatgcaaagggagccattgctgattccccatcagtcaggcctcaggtccaaatccttctgacaggctgtgtgaccgcaggtgggtgagtccacctctctgggcctcagttgtttgtttgttttctgtaaatacatctgaagctctgggcatgcagcctggaattttatggtcttggaatttaagaatccttgccttagaatcaaaggatgcacaaaatagtttgagaactctgaagttctggaagctgactcctcaaagatgagtatctcaaggtaggagggggcttttttttttttttttttttttgagatggagtctcgctctgtcacccaggctggagtgcagtggcaatatctcggctcaatgtaagctccgcctcccgcgttcatgccattctcctgcctcagcctctccgagtagctgggactacaggcgcctgccaccatgcccgctaattttttgtatttttagtagagacagggtttcaccgtggtctcgatctcctgacctcgtgatccgcccacctcggcctcccaaagtgctggcattacaagcatgagcctccacgcctggcctgttcttgtttttttgagacagagttttgttcttgttgcccaggctgaagtggagttgagtgatcttggctcactgcaatctcggccgcctgggctcaagcaattctcctgcctcagcttcccgagtagctgggattacaagtgacaagtgcctgccaccatgcttggctaattttttttttttttttttttatagagatggggtttcaccatgttggccaggctggtcttgacctcttgacctcaagtgatctgcccgcattacacgcataagccaccgtgcccagcctaggagggggcttttggaacccaactattgattccttttaaccctcatttgattttttttttt

SEQ ID NO: 588854 - DNA, 4001 bp, Homo sapiens
cggtggctcacgcctgtaatcccagcattttgggaggctgaggcgggcagatcacctgaggtcaggagttcgagatcagcctgaccaacatggagaaactacggctctactaaaaacacacacacacacacacaaaattagccaggcgtggtggcgcatgcctgtaatcccagctactcgggaggctgaggcagaagaattgcttgaacccaggaggcggaggttgcggtcagccgagatcacaccattgcaccccagcctgggcaacaagagcaaaactccatctcgaaaaaaaaaaaaaaaagaaataaagaaaaaacaaaagaaaaactttgagatttttacttgcaggaggggaaatgtgacctagtggtttagagcttgggcttagtcaggcctgggatcaaatagtgaggcctgacacccaatttctctgtgaccccaggagagtcccttcccctctctgagtctcagtctcctcactggcaaaatggagcaagtagaggctcccacctcacaccccagtctagtgttgagctagacaacacctgtcaggtgcttgctggttgtcagctggtgatcatgcctggtgggaccctcgcctgacaattccagtgtgggtaggcgtggggtagggagtgctggggcttcctgtccctctctaggcctctgcttcctcctctgtaggatggattgaggagggagggtgcctctctgggacctgcagaagactgaaggtccttgggaggtagggggcaggctaggctggtgctttccttttttagccaggggagctaaaggtccctcctccctccttcctcttcatccccatgatctcagcagggaacaggacaccaggaaacccctgcagcctcacctcttccccttccttcctcctgctccaggtgcaccctgtctccccggggtgggggagggacactgtctccccagcttaggcctgggatggcctcctctagacactcaggaacagggcccccgaacttgctcactggcatttcccaaatgtcctccccaaactgaatggatcctcagagaccatctcaggcccatctgggctactggggagactaaggaccagaatggggcagggctagtctgagatctcatgggccaggctgctcccctgactccagggcacagggttgaggttcagggacttctggaaggaatgttcaacagtccctggagggcagatggagcactgggtcccggggcaccagaagggggctcaatctggtctgctaaccccatcctcctcgggacactccagatgctggaggagaagagtctcttcatttccttggtcagctcctggctaagcatgatgccagaggcactgttaggcccaccagggctctgtccacaggggaagaaggcttgggctgggtcctggacttgccattctcaaggtttctcaagaccacctttctcagcggccctggccctgctggagaggaatgtgctgcccaggtgttaagagcatgggccaggaagctgggtttaaaccctggttctgacgctcactggctgtgtcaaactcggcaggcaaatctttctttcctcatctataaaatgggggtgatagtagtacctccctcctggggctgttgtgtagagtagataagcagatgcctgacctgcggtgacaaagttacacccaaagaaaactggcttagaaaagtccctgatgctaaccccgcccccaaatttgtcagctgccccaggggtgcagatttcctccttcgacctctcctgctccccgctggccctccccaggcccagctcggtcactcaccctcgggaccccagcgcggggcaccttcggcccacagcagtcatgcttcccccgctgtcgccgccggcaacccggggacctcctaaacccagcggctcctgcctttctcgggccactgagctgcagagctcagtgccggactccgggggcggagactgacctgtagaccacgcccccagacacgcccctgcgctccttgcccggccccactccaccgcctactccaccggcagggaaggacgctctccgcctcgaacacggccctccgcctgcggtctcgctccgccccctccccatcagtcagtgtcgggaaggcctcgccccctagcacacccctccgcctcgcccgcccggctccaacgctcgcttccccagcagctctccgcgcagcctggggtaggccacgcccctagacacgccctcaactccgcctcgcctcgccccaccccgccccgccccgctcccgcgaaactcggcttccctgggtgggaggggccaggctcctggtgcagtctcataccttggggtgtcttagaacgccccaggacccatcatcaggccctctcagctacatacaatccttggtcctttactcccgaatgaggacgaatgtaggaggggatgacagaaggcagccggggatggtggaaaaacatgagttctactaatcgtaaatacagcattcccatttactgagtgcagcatgccagccactgtgttgagattttacaggtatgttattcttgaatcctcaccacaacccgaccaggtagatgctattgttacgtccatttatcagatgagaaactgaggctccaagagaggaagagatttgtccagtcatgcagccagtaagaggcagaatctggactggattcactctacccctttacatggtcctcctcactgatcaggggtctaggcaattacagctcagagacagaggctgtgcttggtgtctcaggaaaaagctgctcaagaaagttaccagaaaaaaacaaaagaaagaaaggtcccagaactctggccctacaattacttttgctcaggtggcttttttttttttttttttttgagttggagtctcgctttgtcgcccaggctggagtgtgcaatggcgcgatcttgggtcactgcaacctctgcctcccaggttcaagcaattctgatgcctcagcctcctcagtagctgggattacaggtgcccgccgccacacccggctaatttttgtatttttagtagagatagggcttcaccatgttggtcaggctggtctctttggccaggctggtctcgaactcctgaccttgtgatctgcctacctcggccacccaaagtgttgggattacaggcgtgagccactgcgcccggccagctgactttttttctttatttcaacaggcacatgtgactggtgtggttgagacaaaggttctaaggattgaaaagccggggactcctttggctgggattgaggggtctcccggggtgtgaaaggcatggccctaggattgagaaggtggtgagtctaatgtggtacataagtgtgcagcctctggaagcaagcagattcctgctcaaatcccagttctgtgtaaccttggctgagtctcagtttcccaatctgtaagtggggctaataattgaatcttttttttttttttcaagactgagtcttgctctgttgcccagtctggagtacagtggtgtgatctcagctcactgcaacctccatctcccaagttcaagcaattctcgtgcctccacctcctgagtaactgggactacaggcacgcaccaccacgccctgctagtttttgtatttttagtagagacggggttttaccatgttagccaggctgttttcaaactcctagcctcccaaaatactgggattacaggcatgagccactgcacccagccttaatgattgaatcttctatggagttttcagtgagatacttgttttgatacccagtaaaaatgcttactaaatgggagctattgtcctatcatcacaatttgtatttttacatgaactcaactcaccctataaccaaattaagctgacaaatggttttctagactaggtggaggtattgtccagcagaactaatggtgatgatttgcgtgagggggttcagggcaggggtctagtgactgggtttaggacccatccagcag

SEQ ID NO: 588855 - DNA, 4001 bp, Homo sapiens
ggacacaggcccagggctcagcacagctgggtcagtgctcaggggtttgcttcccagccctgccggccctatttggttattgccttggtctcctgagaaacgtgtcggcaaatgtggccgctctgctgcatgcggtgggggtggaaattgaatcagtggccagagggaggacccccaactgccttctttctcagcaccactggttttgcctcctgggcaccagacgtttggaggagatagtgggggctgggagggaaactgaggcccagagtccagggtctgggattgggccctgctcaatagcccgtgtgacctcaagcaagtctctgggcctcagcgttgccatctgggaaatgcagtcataatcgcctcagcattgccatctgggaaatgcagtcacaatcactgccctttacgccacatgtcccccaccctggtggggtcagatcaaaggaatcaggagacagaaaaagtttgctgggactgggaaggacagacacaggaaaacagagcagtgggcaagtgtggcccctcaccgtggagcctgattctagtacctctgtgctctttccccacccaagtattgggtcccagcctcactgctgttgggaatgtgagacagcatcccatgacacccccatccccctgccgccccagtaactccccacctgggatcccatgatgcccccatccccctgccgccccagtaactccccacctgggatcccatgatgcccccatccccctgctgccccagtaactccccacctgggatcccatgacgcccccatccctctgctgccccagtaactccccacctgagatcccatgtgagcccaggcctgcgggcaggggatggagtgtgcgaatgcctcccctgcccggccgcaaggtcagagacagccagagacacagtggactgcagagatcgagagacgcggtggggagacaaagagacggataaagagaagcacagagatggagaacgaagtcagtcagagagacagagatgctgggccagagtgacagccagaaagccacgggatgcccagaagcagagacgtctgcagagagacagtgatggacaaagagaaacagaaacaaggcgggaaacaggaggatcgcttgagcccaggagatcgagaccagcctgggcaacaaagtgagaacccaccccggtctctaaaaaaaaaaaaaaatcagttttattttactttatttatttacttattttttgagatgcagtctcgctgtgtcgcccagactggagtgcagtggtgcaatctctgctcactgctatctccacctcctgggttcaagcgtttcttctgcctcagcctcctgagtagctgggattacaggtgcgtgtcaccatacccagctaattttttgtatttttagtagagaggggtttcaccatgttggccaggctggtctcgaactcctgacctcaggtgatccaccagcctcggcctcccaaagtgctgggattacaggcgtgagccaccactgcacctggccaaaaaaaaaaaaaaagatttaattgtgcctggagtcctagctacttgcctagcttcttaggaggctgaggtgggaggatcacttgagcctgggaagtcaaggctgcagtgagccgagattgtgccactgcactccagcctgggtgacagagacgctggtgtccaaaagcaaaaaacaaaaaaagaaaaagagtgagagagagaaaaacagaaatgagacagtgatgaagaaacagatgcagagagaggcccagaggagagccagggatggaggacagtgcagacggcaccccacactcactgaactttttgctggtcttcttggtcccctctgtcatcttggcaaattgtgtgaagcccttggccagcttgcgagtggccactcaaggctcgggacatcaaagttgaggtgcctctcccacctccccttcccctttctcttactcgcttcctctgtgtatttttaaaccagtgaaactcccacagctccaccctccccaccctctccgcagggggcgggggctggggcctctcctagccccagcccctgtgggccgcctccttggcctcagcagcaggggcaggggccagaccgcaagcccctgggacctggaaggtctaaggagcaggccgcaggctctgggaacggagcccagtgggctgggggccgctggggacctgccaacagctgtcagggggcctggccatcaggctgggaaggtgaggggagtcaggcctgtgtgcagggcagttgcttctcagcctctgtacccaggagagggactggcagctgcagatgggagagtgctgtggtcaggcctgtggactctgggccccccagacccaagttccactcttggctggccatttcgccacggtgtgacgtcctccctgtgaaccgggggtactcgcagtgcccacttcatcgggttcagccatgggtgtagggcctggcacagaatcggtgcctaccaaagcacagtcaccactttccaagctatcagggagatgtcatcatgtgttccactgtactcactggacagagatgatgaaaccgaggcacagagaggcagagggatttccccaggtaacacagctggttgctggcccagactgggccacaactctcccttctaggccccttaacccacgggctggtgcctttccaccctacaaacttgccatgtgtgcatgctcaggtgggcagaccgagatgaggaaatgcaacctcccctccacgggtcatcctggacatctgcaaagggtgtcagcagctgctggggctgggggcggggcccaagacccagggctgccaatcccagctacttccacctcccaagcctcagtcacctgatttctagaatggggagaagtgggaggtatgcagccaacctgccaaccagtgggggttcaacattttatcctggaccccaggctggcaacccaggctgtgagaggagtccactgccatctgatagggcacttcctgcatcctccattaacagtaacagccccagggtgggcgcggtggctcacacctgtaatcccagcatcttgggaggccgaggtgggtggatcacctgaggtcaggggtttgagcacagcctggccaacatagtgaaacctcgtctctactaaaaatacattttaaaaaattagccgggtgtggtggtgtgcaactgcattcccagctactcgggaggctgaggcaggagaattgaaccagggaggcggaggttgcagtgagccgagatcgcgccactgcactccagcctggcgaaagagggagaccctatctcaaaaaaaaaaaaaaaaaagcagaggcagacactggacagactgacaaccaagtgtcctaactccctggctggtgtcccctagcggaagatagaaagtaggtccgcggcttctgtcccaggatggggttgcagtgtgacttgggttagctgccaaggctatgctgcttcctggccaggcctgctcccgacttgctgtgtgatctcgcacaagacactttgcctctctgggccacagtttcctcatctgttaaatagagccacagcagctccccctccatggggttgttgggagggtgagagaagcaaacactggtccaagccagcacaccgtgggcctccgcgagccctggctgtggttgctgagagatggacacagataaggggcagattggcacaggacagggaatcctgacagggacaggcaggcacaaggcacaagacctgggaatctcagccacagagatgctgtgttgctgcggcagaggcgcctcgtcagtgctggggcctgtctgctcttggcccgggcgccagggcagtttctggcacccctaggagaatgaatagggctcagtgtggtggctccgctgagctcagagccccctttgtgctgcctggagtggccgttaggagtgcgaccgaggacctgccggtgggtggctgtcctgcaggagctcttcagctt

SEQ ID NO: 588856 - DNA, 4001 bp, Homo sapiens
caggattcaaaccttagcctttcccactccaaagccaagactcttaattgcctttgagggcactaagctttgcaaaagaaatctttagaatccaagtggaaaaaagatgtgttggtaaacgcagtgctgagatatgctatagagaagtgaccagtagagcaatcaaaaaggttagtaatatcgaagaagtcctgccacagaattcctgggcagcacatatgcttggttctgtaaacctgaaagaacttgcagtataaagttattagaagccttccaaactacatcaacaaacaaatcacttactttcataaacatgtctggcagagaggtcacagataactccaattataatagaaaagcaaaaataattacattaagaaacatttttacagaaatagtcttacttttcttgatttcctaagttgacaggtataattgattctataaaggcaagaatgtgtgatgaagatgatgcagatgcgtgcaaacacacacacgacgggaattacatgctgcatctgtcaccctaagttaaccaaggttctgtaaaacacaaccctcaccttttctggatgtggttcataacaaggctgccactgtggtagcctaggaaaaacctcactacttccgagaaattatgagaaagctcgttaattaaggctaacctatgaaaaactatttaacaccaaatcatgaaaaacatttcgcggtaagtcatcaaaatccttaaagatcccataaatttgaacctatttcagaaggataaaaaagtagtaatcacacacattatgtaagaaataggtcacagcgtaagtattcgcttacttgcccctatgtaaaattctttgagtccaatgattttaattattagaatctaaattaatcagttttattacagtcacagcttattaaccccataaagaaaaatgggcacatccaagatgccaaagatttattaaaaacaatttaaaatacatgatgattttaagtcttcaacaatttggttgttttagggaaatatttaagacccgcagactgtttgtcatgccctggcctcaaaggagtttcacgaccgagttctccaggtaaaagttaatgtatgcgggtccctaaaggaagaccccagccttccattcccctggagcctgcgggcggcggggaaggagggttctgacaacagggtaagggagaggagcgcaaaccgccggcctccgccccgccacccccagtgcggccaccgctcatgccaacacatcccgggaaagccgggtgcaccgactccgcaaggtcacccgtgaagaggcgactttacataatctcccaccgcgccgccaaggcacctgcgcgccgcggcagcagtgcagccgcggtccccttcctgcagcacgggcgcgagatgatgcgggggcggcgagcagcgctaccaggcaggacgccggggacccgcgggaaggcagcgcgcaccaagccgggggcgggggaccgagggtggacgcccagaccggggatgccccgagccgccgccttggcttgcgaggcggggcgcggccggcgcgggcgaggctcggtgccgaactccccaagctgccgccggacggccagcgccgagcgcgcccctcgcagcttcgccccggactgccccgggacgcacctgccgcgcgccttacctgagtggctttatggaactgcttcttgaggccggccaccgacatggtgcaggaggccgcgctggcggctgctgtgcgggagggaggaggcggagggggactggagggccgagcggggcggcgcgctcccctggccgcctctggtcgtgccgccgccggggctatgggcgcgagggcgcggagcctagcgggacacgggctcttgcggagaaacactctgacgtcaagggcgggtgatgcggcctcttaaaggggacgcgggaagccccgccccaagcgcgggaacgcccaggcaggtgctgtggcgcgcggtacctggatgctggcgccaactgcggggatgtggctcagcggcacccgctggcggatccctagtcagcgggccgaggacgtcctcctgtcccggggttggtgttcctgcccccgggggctgcggacgggtcgctgcagattggcagcccaggcacccgcaggactcaggtgacttgctgggcttccaggtagccgcggcggcgctgcctgcagacggccctcctgccctttgagcctggcgtctctgcgccgcagcctgaaaaagactggccttctatctgggctaatgaataagtcattgctccttctatgccttgccctgactggtgggtcacagaaaacatttctctgccctggtttcaatatcccttaagcccatcttaccttagggaaagtcacacacgcgttttcccccttgtctgatacaatttaatgacttaaaaagaagaacaggaacccttaagcctggacggataaatagaattgaagtcttactacaaaactagcgttcaatcctctggttacagaaatgaaaaagcccaaatgtgatcttgttgttatgcttgtggatttagggtttccggtccgataaaaatcaaaatataatgtgaaaaagcatgatactaagttatatacagatgcttcatatgtaaccaaggaggtatggctggctaaagtgaaactaatagatgacttgggagcagagcagcactaaatgccttctgtgctctggtacttaaccaagtctggtttttctaggactgaggaggtggtcagaaagaacttagacgctgtccccgtatgtggaccaaagtgataagaaggagaagccaagatgggagaaattgccaaggatgtgtagagactgcaaggccaaatgggagtcctagaaatactttttctgtctccgcaactcctgcagcctgataggagccacagacccatccccactcttctaggcactgcggcttgggcacagggtgaacacctgctacaaaagggtcctccatccgtagagctaccagtcatggtccttcttgataatgtgaactgacacacacaaaggcagagtcaagcagtggtgggcactggagcagtagagcgcatggactagggacgcaggctgcaaagggaggcagatgaaaggagctattctccagtgtggtagcccttaccactgttcatatacctttccctacatggcagaattgcactttccaaacctcttgttaagtggaggcatggttacaagttttgactagaggtttaagaggaaaagtgactgtcacttctgcagcagcaatatgagatgtatgagatgccgcaaagctttcttttcctcggccgcaatattctagaaagctgtggtctgtcagccagtatccagagtgagactaaagcagtgcagagtccccacctgacgttcaatgggcatgtagcatcagtgagaaacctgagtaattttaatccactgaggctccggttgttaggaataaacttttttctctatgtttccaatttttaaaaaggctacccattacttgcataatagaaaaaaaagtattttatagttaatttttactaccaggtccctgatctgaacaataaagcattttcataagacagggctttgttgaagctgccaaaagatagagcaattgatctacaaagtggaagggcctgggatggataggagctctgctctctaacagtgaaaggtgtgaaatgggggcctgaattgcctccttggaactttgaatacttaactgagccctacattataaaaaaggcagtttctatctttccctggttcttcatccaccaacctggaagtctcatgctgcttaacttcaaagaaactaccttgggagaaaaaaactacttaagggcattacattaaatcctttggaaaccattgatttagtcgcccaggcatcctctgcacctcatcttatatggtttggctgtgtccccacccaaatctcatcttgaattgtaactctcacaattcccacgtgtcgt

SEQ ID NO: 588857 - DNA, 4001 bp, Homo sapiens
gagcccctctgtggcctctcctgccaggtcacatttcaggcctctctatcccctggcctgccactctgccccaatcctgccaagaggaaggggtttggtgctggagtccgaggctgctcccgggaaaatggcagcagtggggtgggcgtgcagagcagagaaagcctctatttataaagctctcagctccctccctcccaccccgaggctggggcctgactgctggctcccactccagtaacagtgaccctgtggggcagctcccaccaagcggagccacacctaggccctgccctgcctaggtcctgagagccctggccaggtcaggcagcagggccccagccctagcagggaactggcagatcaggttcttcccagatgtgggagatagtgtggttgccataccaacagcagagtgggttcccccctcccagatggactggggccgtccaatccgaggggctctgggatcctggcatctccactagggctggggctgcccaccagacttggaacacattaagcagtgaattctcgctgggatgctaatcctcagcgggacacagcaccttctagtaaacatgactacatgggttgctggctgggtgtgggctcctggggaggggagtgcccgggttgggggtggggagagaactgtactcaacagaaacaacaacgatgacaacgacaacgacaaagacaagactacaggacctgctcccagaaccctgggatgggccagccccgggcctgcggaatcccactgaatcccataaccacggtgttacaccagatttacagaaggggagggcggggctctgagagaagtgacttgtccaaggtcacatgctgcacaggtgcaatattaaccactttgacaccaataatgagcttgcctttggtgagcacacatatgcagagtcccacagaatcctcgcatctgtcctgggaggcaggaatactgatcccatttttcagactgagaaactgaggcccagtgagatgaaggcccctcccccaaggtcacaggagggcacattcccacccacacctgaccctaggtcttcccatgatgttgagttgcctgttactctctgcccctaaacggataggacttcttccaatctcagcatcgtgggcctggacagcttcccagccagaccccagccctctctccatcccccaggcccagggaccaaggaaacagacctcccgtggagcagaaaagaaacaactcctggcttccggcctgactatccaaacgtgtgaaatggccatgagggactcatggcaccagccgcccattgcacaggtgcggagactgaggctcggagaaggggttgtggtggacgcatgagtccctgggcctgggacccaggtcgctaaatgccccgccaggcgccagtcactgctggacaagggcagggaggtagcacccagccggtgcctcctcccctcctcagccaggcaggcgccaggggagcagggtaacccaaccagcccaaagggtgggcaccggtgcctcgccccaggcagcagggccaaggcccggctcgggccgcacgggctctttccctcttccggtcagcaagggctcaggggggcagaggtgtgccgcggcggggacgagggcagcagcccgggagggctttcccgcgtccccaggcgtctgccgcagggtgctccccgcccgccgcacatccgggcccccggcgcacggcgcgacgccaggcctcacctgcaccgcccgggtgaagaagatgcccgcgtccgacgccagcttcttcatgttgaagtccatggcgtgcccgcacggccgccgcgcacggcccgagcgcagccggcagcccccggcccagccgccgccgccaaccgcaccccgcccacctgctgcggggcaccagccctccgcgcacccgcctgccggcctgcccgcctgcccgcccgccgcagccgccgagccagcccgagcgcgcagggcggggcgcggaggccgcgggtcggagccagaggggcgggggcggagctggcggtgccggggcgggacgggacggcagtggggcggagctagaggggcgggggccgggctggttggcggaagccgggcggagtcggagggggcgggactggcgggacaggggcggagcgagagggcagtggggcggagctacatgggtgggggcgaggccttggcgcggccagagcgggggttggtctggggagcaggttgtgctgggcagggctcgctgctgggcagtgctcgctgctgcccccatgcgcctgccgccgcggattgggccggcctctttttttccttttactaaaattattaaaactggaacacatgtgctcttagatgattgcaggtacacgccataattacatattatttgccatcttaccaatgcttttcaaaagttttaattgataaatatatatttacggcctacaaggtgatgaaattgtggaatgatgaaatcaagttaattgacatatccatcacctcacctactttttttgtggttagaacatttcaaatgtactcttttagcaattttgaaatatgcaatactttttttttttttttgtagacagagtcttgctctgtcgcccaggctggagtgcagtggcgcgatctcggctcactgcagcctccacctgccgggctcaagcgattctcctgcttcattcagcctcccgagtagctgggactacaggcgcccaccaacatgccccgctaattttttgtactttaggagagacaaggttttgccatgttgcccagggtggtcttgaactcctgatctcaggcaatctgcctgcctcagtctcccaaagtcactaagtgactgagtagtcaccaatatgtgcaacagatctctaaaatgggcctctcttgctttctcctcccaccacccaggcctgctgcctctcccctgtttgtgcctcttcatctccgctctttattcacaccccctccctcccattcccatttcttccactctgtttcccttgggtttcctcccgttactcctcctctctgacctctcctcctctcttctgccctgaccttggtgactgagccggagtcaggcttgggacttgccctccaccgctggaacagctgtttgtcagcctgggaggccctgtggcttccccaaattggaggagggttggggtggcggtcacgggaagggagggggttctggagctggggcctggagccccctgtgtggtgagaggaggagatcaaaggttgggtgactgtcagggtggagagaatgagctgccctgggagcacagatgtgtgataaccttgaaaccagctcctcacagccccaggcaaggagatgacctacaggtgctcctgaccccaaatgccttcccttggggctcagatagaggctttgtactggtcttcacctctccttgctgtctacctctaggtttcctctttttttttttttttctttttgagatggagtctcgctctttcacccaggctggaatgcagtggcaccatctcagctcactgcagccaccgcctcccggggtctaagcgattctcctgcctcaccctccacagtagctgggattacaggcatgtgccaccacgcccggctgatttttgtatttttagtagagacggggtttcaccatgttggtcaggctggtcttgaactcctgacctcgtgatccacctgcctccgcctcccaaagtgctgggattacaggtgtgagccaccacgcccggcctaggtttcacctttgaacccagtggagagctctgttcccaagctgtaccctcttctatctggctttgttcatctttctatacttaccccagtttctgtcacctatcccagcatggctctgcagggtgagcctcaagtcacctgggggcttgttcaaaatccagaccctgttccctctcccagccctggttctgggtcaacaagtcaatggctctaacattaaatcacctgggagctttcaaaact

SEQ ID NO: 588858 - DNA, 4001 bp, Homo sapiens
ggaggggtggggtctccttccagccgggcctgataggctgaccccctcccgcgcgcagcgggaggaactgacgggttcgatgaggagcgctcttgcaggcagcgcatttcaaccggaaaagcacgcgtggaggttcccggagcagctccggtaccaggcagcccggatttggaaacctagagctgggggtggggcagggcagggccgggcagggcagccgcgagagatttacatatacacgctggagacagccggtccggatctgccaccaagaaagctgtgtaatattgggcgagtcccttccttgctctggacctcagtttcccacctacagcgtgagcggagggtggaggctgggataaggggtgtcaggagtcaaagctcttcgaagtcctagacagctctgactctgactttactccttggcagccagaaggactgactgggtccgtcttcctggggcaaggctgggccgggcgctctcgctcagaggggacgttctggaagcagcggcgaaagaggtggggtcaggaggccgccggtcccaggaaaagggcgcgggaggaggcagaagcgggaagcagcacgccagccccgacccagggtcctaggccgaagctgaagtagagactcaacaccagagcggcgggtgcctcggtttccccgtgcgcaccgtggctctggaacctcgggaagaggccaaggggcaccttaccttgtccttcttgccggccccgctctcctccgcggctgaggcggcgcacttgttgagcagtttcttgcctccgcaggccgtcgggctccaggtgcggccgcccgcgcaggcgccccccagggggtccccggccccaccgcccgcggcgctctccactttgatgaggcggtgcttgggggagatgtagcgcacctcggccggcgtggcgggccgccgctcgctgctgctgcggtagagatgcggagagccggaggacgaggacgaggacgcggcggcccccgcgcccgaggaggcgcagcaacagcccgcggcgcccgacgcggacgaggccgagaaggcgcgctggaccccgcctggctccccgctgccgccgcagtagtccaggcggcacatggcgcgcagtttgcgcagcgacgagccaggcccgttgtaggggtcctcgaagtctcgctccttctgcgcgcggtaggcgcggatgaggtcgctggtgctgccgctgtcgtcgggcagcgagcccgaagaggctgagaagcaggaggcggtggccggaccgcaggacgccgaggcggcggaggaggcctgcggcacggcctgggggggctgcgaaggccgctcgcctcggcgccgctgctcgcggtagtctggccgcggcggctgcggggggctcttggtcttgctgttgcccaagctgaagtacttgtttagccacttggccatggcgagaggccgcctagggccgcggcgcgggagcccggtccgccgccgcggccattcggggggcagcgctgcggcgcaggtccctcggcgccccggccccggcggggggcgtccggggcgcccgctcccgacgccaagttcaagttcttgccgccgccgcctcctgccggcagctctctggctccggcggctgcaacacctccctccgcctagcgccgcccaagctaggaatctcgcgcccctcgtgggcgcgtctcatggggtcccggcccacgcccgggggagagcggaaggtccgagcgctccacgccgcggaccctttggccgtacgcccctcgccgtggatcgcgctcctgccccgtcggagccgcagcctccgccttggccgggatccgcggctgccgcgggaacttctcggcgtcctcggctcccttcttccttcctgcgagcgctggggagagctcggccccgcagcggaggagaatgcggccgggagagacagcgagcgacggaggaaggcagccggcgcccgccggagcccgcgcgcccgtgcccgtcccggcggcgcctgtcgctgccactgccgccgcctcccgagccgccgcgtgtgtgacactcaggccgccagagcccgccccgcgccgccgccccgcccccccggagcccgctcgcgcgccccgccccccgcccgctcccgcagacccagcaccgcccatccccgcgagcctggccccgggccgcggcccaagccccgcccccctcgcgcccggggccggggtgggcgcacctctccgctcctgcacacgccacctcccgcggctgccctggcgccagcaccagggtcttgccccagggcgctggggtcccgccgcgcagccggctccacctagcttgcagctcgccgccgcctcgggcgagaggttgcctggcggagcctgctacgcgcagaggccaaacctttccgcagtcccccgggaccccgcgcgttgttcactccagggatccccctgtcggggttgaggagggagagtggattaacacggaacctgtctagtttacagcgtggcccgtgtggaggaaatgcagtgcctagtgcccttagggacagagtggctgtccctcttccttaaagggacagactccggttcagccccgtgcgccaggtcttcggaggaatctttatgctaatgagtgtattagcagtccagatgacggatgtggtcgggataggcggtgggagccgggcccagcaccaatccgagagcaaggctaggggaggtcggaatgtttgcttaccttttcacctctgaggaagtcgaggctttagccctgttcgctgccagccggcggggagcaagttgtgggaacatttaatgccttatgttgtaggagctggcaaggatccatttaatacaggacctcggccgggtgcggtgtctcacgcctgtaatcccagcactttgggaggccgaggcgggtggatcacgaggtcaggagtttaataccagcctggccaagatggtgaaaccccgtctctactaaaaatacaaaaattagccgggtgtggtggcgggtacctgtaatcccagcagctactcggaaggctgaggcagagaattgcttgaacctgggaggcagaggttgcagtgagccgagatcacaccacttcactccagcctgggcgacagagggagattccgtctcaaaaaataaatacaggacctcattttacagatggagaaactgaggcccagaggaaagtcacacaggtggacttggatgccagttcctaagtcgggtggcaccataattatgtcttttccaagagtctcttctttgcgatttcagatcatcctttgattattaaccaaaattgaggaaacagtcccagggagtggcctgatttggtcagtgtaacttttcctgggatctgcacccaggggaggtggcatgctccctgttgagagggaaatgctgcctaaagatgaagtagctgccactagggcctggtgctgctttgaatttgcctgggcaaccctcaaaatgtgacttaactctaagatgtgggcacctgagagctgagaaattctctaagaatgttgatttactaaaacaatagcccaaatcaataatctgcatttgctgtctgtctgttatagatgtgctttgggggagtctgtttttcccatatcctgtagtaacagtgggaactgtgagggcagacagcaaggccaggggctcttttgatcacatcatagttctggccacgctggaagtagaggtcaaactcagatttcaatctgagacatttggacagggaaggcctgagagctgttactgcttcctctctgtaacccacccagactcatgcctgaggccacagcacagaagtgatagaagcaggacttgaactcggtcttatcctgaagctgacctctgtctgctcagccatacacagtggtaaagtgaaattgacttcaaatttgttattccagaatcaagctatttgccctttccctccttggtcagacaaaactgtcatcctctgtggccagttgaattttccaaa

SEQ ID NO: 588859 - DNA, 4001 bp, Homo sapiens
gaagaagccctcttttaacaacaatggccacattcatctgtaagtactttttatatagttaaaggcaatccacaaagttaagtatttctgttaatattttggttccgaaattaccagacactgcattttacctgaggatgtgttctatttaatttttacactggaatctgcagccaatatttacggaacagacatcctgggggtttctcagtgttattgaggacacggtggggatagagtttgtgtctcatttctttctcaatacaaagccatgccttggagtggcaggattgaaatactgcaacttccatccttaacccctgtctgctcggctgtggaggctgttaaagctctgagctgcccaaccggcagaaggaaataaccgcgtggcagattacttgaactgtgctgagcatttttccttaaatatcataacatgcttgcataagggtggaattttattgactacatcgtgattttatcatctttgtgttggaggaaaaaactcctttccagcctgtggctccaagcgcagcgccctagttcccttttagcacatttaaatggaagactacagtcaccagaaaaatagtcccagaattctcattccgctgctgtaaaccagaacctttccttagggaatgaaagacaaaccccaagaaaacctggactgggtgagaaagtaaagcccgtcgaagagaaagcagcacagcatttggcctgctctgcaaggagctgggaattcttgctgcggggggcaacaagatacccaccctcccgccggggaagacacagcaggagtagggccgccactccgtgcatctctcctcccgggggctgcccagctctccccagcgcgtttcctagatactaggcaggccggacccccgctgcccagggttgggcgcccatgacactggtcagacatctggtaagccaggtggcaaaggcgtgccaaaaaagtggagcctagggaaaaccgggacggagcgggccacccgagtggtaaaccttttcccaatggatgcgggaaaagcgcatttgtagttccctcctcaccgctgtcaagcgagctgattgctaaggagtgcgcatttgcttgcctctaacgtgacagtcgcgggagcgccccgcaccccgggcttcagggaatgaaggagtctgccccgaactggccccagaacccccagcccccagggcggcccgcgcccgcacccaccttgaccacgtaggtgactccgggccccagcacctggtcgctggcgtgcggcgccccccgagggggcctgggcagcggctcgtcgccgggccggcccttcctggcggcgctcatggccggggcgcggggcgccgagggcgcactgccgtccggggcggccaggctgggcgcgctgcagctgcccgagagccgcgcgcccgcccgctcccgggcggccgacgacaggccgcggaggcccgagctggagagtttcaggtgggacaccttgtggagcaggtggcccaggctgccgggcccatcgtcgggcgccttgcgcagcgcctcgccggacaccaagtagggagccgccgccggggtcgcgcgcgccgccgaaaccttgcctccgccgccgctcaccgacaggctgtggagaaggtcatcgaccgatgtcaccgagtcattcctgaagcggttatacttggtgcgtggaagcatgcccctccgtgggctcgctgcatccgcccgggcgctgctggtgccggccccggcgcgggctgccgcgcatagcaggcgagccactgtccccggagcgggacggagagtgggggccccgggacagccttctggagaacgagagcagagcaagaggatggtgccctcccaccgttaaaagccagcacagcggcggccgcgcagccccggcccgggagaccgctgcttggggttgcacgtttgctttgcaaaagtcatagttgcctctgatggagcgcccagctgcttggggctgctcacagcaaaagcatgactcactctgagaggagacccttctcaacaaaggctcggtgagcactgcaaatcacttcctgtagcagaagaaaaaaaaggaaaaaaagaagaaaaaaacgacatccacccgctgacagcacactatagccaatcaattctcaaatttcctttttctaccttcccagatatttccttccaacctttgatttttcaccttcccatcccccgcaatctgcatttgtgccaaaggtaaatccaatccagttccttcaaatcgtcaaatgaactttctgaaacccattattctgttaggttttgctcgtccctgctcagcccatctgtgtgagcctgtaaaagtgtctaacagcgatgcgttaaaatgtgacgaaggctttttaagaatcagatcttcagcgaatcctgatgaatcttgacttggaaggcagcaggaatttttaaatagaaaaaaacaaaaaggatattcacccccaggtgactgtaaaataccaatttcctgggttttgctttttcttttcaaattaacagagcagcgatgacaagtgtctttgtggcaatgcagttcctcaaaaaaaaaaaaaaaaaaaaatctgcatatgaacttctgcacagtgccaatcaaggggtcttccctgctcatttacagcagtctttctcagccagggttaagttgaatatccacttccaaaaaagaagagtgcttctttcacgagtggcaacaggctccagaaatccattccaaaaaaggggctgcatttgaagctttaatcctactgaatgtgtttaagctctggaaaaacgcctaagaaatgctacaaatacatttcaatgttccttcagttgctgcttgcaaccctgcagtcaggaaggaaaaaatgcagctgttcttattgcacatcaaatccacaaggaggaaaatatgccttcttttcaggagtcaggctcgggcttgcaagtaaaatgcacaggccttcttcctctcagttaggagagcaaggctttcgctgtccccagaggtctgcccgagactgaagccctctgactcttgacctcagtgggctctgccaggcttcctcatgcattaggatcacctgctccacagtgaaacactcactatcaaagttttcccgcaacttctgagcaagcgaataaattcagctctagcacactctcaggtcaccctgagtcctctcactcccatgaccgaacatgtggggcacgtgaggtcctgagtcttgaaccctgctctatggagcagagtttaatgagcgccactcatggcgggcgagcgggtgaggccaacccctaggacgcaagagcgcagaggagccgcggcgtccccggtacaggaaacgcgtccccacggctcgcctcctgtgccgcagccctagcagaacagctacacggcactcatttgttccctttccctagcttgcatagcaacagcaattgcacaccccatagatgattttgatggttatcagagtcctccccagatctgtagcgaaacagccctatcattcccaaagcgagatcttcattagatgcagacaaaaaccgcaaaatgtgaatgaaatgctgtttgtgtgaatgaaaaggctagcgagcgagccagcgtttctgtgaatgaagcagggccttgcagccggtgccaggcaatcccctgggctccagcggcctcagccaatgagcggccgccccgatgactcattcaacaaaggcttgctcaatagtggaagattccatttcaatcaaaggcgggatcttttatccaacggcagtgtgggaaaaaaaaaaagaaaaagaaaaaaaaacacccagccggattacaaagataccgggaggaagaggccagctgctatggagaggaaaagctagttttacaagggaattcaagatcccttggtcaggtctaagtgtgaagagggtctctcttggaggtgagctgtgcccctaaactttcattcagccgttcatttacatcaaggagcaaccatga

SEQ ID NO: 588860 - DNA, 4001 bp, Homo sapiens
tgcctcaccaggcccgtgtactaccgtctcccctgggggacagggagcacccaagtgaaaagccagctctgccctgcccttccatggctgctgcttccctggcccatggactaactaggggtggggaatggagagggagcttcagaaaaacaaaaagccctacctcactgggctggcccagatggccactcctaaatgttctgtggcatcatctgacccacgtcctctctttggagaagccatggacggctacctcgcttggccatggacccactgtatggaagtctgcactcccaagcctcactcgaatcaagcagaaatttagctaaacctgggctgggcttgtagctaggaaaggggtagttccaggacttgtgaggctttatctgaaaagtgtagctgttcaaccaccatgcctgcgatgcatacacccaacctcaaatatactgggaagtccagtgctctatttcttaagtaaattgtttcactattaaaaaaaaaaaaaaaaaaaaaaggcaggggagcggccgggcgcggtggctcacacctgtaatcccagaactttgggaggccgaggcgggtggatcacgaggtcaggagatcgagaccatcctggctggtatggtgaaaccccgtctctactaaaaatacaaaaaaaattagccgggcgtggtggcgggcgcctgtagtcccagctactcgggaggctgaggcaggagaatggcgtgaacccgggaagcggagcttgcagtgagccgagatcgcgccactgcacgccagcctgggcgactgagcaagactccatctcaaaaaacaaacaaataaaaagataactgtctgtcttgtcttttggggtattgagagcatttctgattacccattgtctccccaacagttgttggaatactgtctgggcaaaattgtgcctgggcagataaaaatcagacatgtttaataggaagttgttatgttttgtttccccttgacagaggaaagcaagagtccctcagctctgccccaaccaatcacctgtggcttatgggagggtggaggaagggaaccatgaggagggcccccccaacacactccttttccatgccatgctccccgcaattgtgggcaccccccgcgtgaagggacccacttctctgacagagccttcttacccacctgggtagaagacctcacttttggtggtgccctctctccactggtggaaggtgccagagatgatggtatccgagatctcagcccagtagcgccctgagtgacaatcgcacatgacactatcagggtattcgcgccattgcatggcccagccaaacatcagaaaggagggcatgggcccctttacaaccccagcctcccagtctggcccgccgctagcactgacccgagtggccgcgggagcccaaggcggtgccgaagagcagcacatactcggacagcgaggcgtgcagaaggcacatggcgcccatccagccacccgcattcacgaacacccactgcagctcctcgtcgggcagcacgtggcctgggtgcagccgccgcagctccacgatcagacgagagaaggccagctcgtggtccagccctggcggaggcagaggggcggcggagtcagggctggcaccggtcctaggtccggggatggcgccttcggaaccctaggctccgctcccaggccggccgctcccctccctgccctctgcccgctcaccagcgtactgccgcgccaactgcgctatctcttcgcgctggaagacgaagctctgcgtacccagccagagccagacgacctgggtcagcaccgctgcgacagccaggagcagcgcggcccacgcccaccgccggcccacggcccactgcatcccggcgggcggcctggcacggcgcagctcaggagggagccggggcctgaggctttgcgctcacggcctcggagcccgccggctgcccacgaagcgctcccccgccaccgccgtggtacggctcgccctgaccaatcggagcggcccgggcaccttggcaccgcccttcggttgaaccatttcctcggggggagcacggaggagtggggcggtgccgcgcaagggaggcaagggggcggggccaagtcgcccagcggcagatgtcagggtcttcaggcgaggtctgacctagctagcgccactctacatacggataggtgtggggatagtgagacccagaatggacgggctcgcccgagctcactggctggtgaagcagacgagcccggaagtgaagccttctgggactcaacgattgttaaggcccgcctttaccaggactgaagcggagaggaggcagttcaagctgggagccccagggtgggcattccagaggcggtgacacctgagcagtgtctttaagagctcgcagaaggggcatgccagcccacagggaccagcccctagagcaaaggcctccgaggagagacagcttggggtcttcaggggcctacaattccttctctgttctgcggcacaaaatgtgagaggaggccttgtaaaccagctgagggttatcagcaagggaggaaggggattagattttgccaccgagtggcacaggactgtcgagtggaggggagcaagatgagtcagggagaccatgactgtgggccaggtaagagggaaggtctgtgtcagtggagatggaagaaagaaatgagcttaacaactctggaaatggagttggcagggcttgatctcttcttcctggaatactctttccccctttatcctatccccactttccccttatttggctaacatcctttgcatgtctagtgggcagttgagtgtccaggtctcgaagctcagctccagtctggagatagagctgggagttgtcattcattcagatactttgttggcacttgtatgtgccaagttctgtggtggccattagggatatggctagaaacaatggtcctactccccagcttagagatctcactggagagtctacagaaaacctctaagaatggatgaaatctcacagggagagagaatagagtaagataaggctaaagacagagccctggagagcaccaacagcaaagggtaggcagaggaagaagaaagcaaaaaggaaaagaaacaaaagagaaaagaggtagcattgtgcagtgattaagaaataaactctggagctggactgcctgagttcaaggcctggctcctgctacctactagttgtctgatcttgggcagtttacttaaaatctctgtaacttagttttcttacctgtaaaatggaatggagataagtacctacctcatagtacatatcttcattgtgatgagattagatgggttaatatttataaagcagttagtgcctcacatggtgagaattttatgtgatggttatatatataaaacataaaggaactggaaaaaagtagcctcatacatttttgaccttaaagaaagaaactgaggccgggcgaggtggctcataactgtaatcccaacactttgggaggctgaggcagacggaacacttgagtccaggtattcgagaccagccttggcaacatggtgaaaccccatctctgcaaaaagtacaaaaattagtcaggagtgggggcgcacacctgtagtcccagctactcaggaggccgaagtgggaggatcgcttgagcctgggaagtggaggttgcagttgagccaacagagggagactctgcctcaaaaaaaaaaaaaaaaaaaaaaaaaaaaagggccaggcacagtggcacacacctgtagtcccagcactttgggaggccaaggtgggcaggcagatttcctgagctcagaagttcgagaccaccctgggcaacatggtgaaacctcgtctctactaaaatacaaaaaattagccgggcgtggtggcaggtgcctgtagtcccagctactcgggaggctgaagcagaagaatcgcttgaacccagaaggtggatgttgcaatgagccaagatcgtgccactg

SEQ ID NO: 588861 - DNA, 4001 bp, Homo sapiens
ggaggacttgatgaaggaaccaggctggcaggttgtggaggtgatggcagttatagaggtcaaggggagagtagctcaggactgtgagcttgcagccccagggggaatgcagtggctctgagtgcagatcccaggggtgttctagcagcagcaacagcagctgaggagctgggctctggccctccaccccggtgcccacctctgcactgttgatgccgcagcccctcttggcccctcatccccagctaggcacccccagaaagagctccgtgcagacagcaaagctcacacccccatctgcagggccctttgcaagtcttcagccttctaggtaaaaatctaaacactttttggaaagttttatttgaaaacttggggacaggacagagacagcaggatggagactgtattctcctgctagggttcttaggtcaaaagccaggctcgggtccctcccgtctctaagttccaggtccactccagtctgtggactcctgaggaatatacccacccacccactgtcaggcccttacccctcccccaccgcccacttcctgtgcctgaggagacactgaggcgtgggggtagactatgagggagcgggggtggggaggatctggttaaactccagaagaaggaagtgagaacctgggagtttgggggctaagaggaacagatagaaaaaagaaataaggagggggctactgtctttgcctcctccatcacgaaagctttgccctgagatgtctcccttgaagctcagataggaagtccggggtagatcacatcctgtgacttggcaatggcgcccgtctttgggtgctggttgggaaacagtcatgcccctgctacggggggctggggcagtgcacgccccgctgtgccaggccctccatctcagctggctgcaggctggctgttggcataggcctgatccgggaaggaggcccgggccctgcgggtctgggcacatactgaggcatagagctccggctcggggcccgaggcctgggactttggctcagagtccagcaccacctccgagtacttgacgggggttccaggaccggggatccgaccctgaggaggccgcagctgcaggctggtatagcacatcacctcctctgcagcctggagatgcaaggctgttagaagttcactggaccctcggaaaagcccgaaaagccccccacttccttccctcccccttttctccagccacagttgactcaccctggcagggcctccaagagttggatcctgctggtctggctctgggtcttgagacagccgtcctgggacggggaacaggaatctggtcagcaacttgtccttcctcctgcacgcccccatcccagccacccaggacctggcctctgtgcccctcctctctgccagctccctacctgtctgtagataatgcaggttcccatacagcgggacctcttccacagactctccagagctgcaacgcagagtttaggggatgagtggggacttctcggtaagagagaactctcagtcaacccatccctgttgtccttcacccaccgtccctgccccggatggctcctgctccggcccctggtccactgggacaagtgtgcagccagcgagatgagaaatagcagcgtcacagcccctaagaggacccacagtccccaggcctgggttatggaggggattcctgtggatgtgaaaggaaggggggtgtaacagccccgccccacccccagggcccagcaggtgggacctggggccacatgacccctcccccaccagcccctgccctgcccagctcacccagtgcgagtagatccgtgcagttgtcgcctctgctcatggctgcagatgtgagagtccacaagcacactgctctgagccgagggtcagcctggttcatggcctgacggtttccacagcacttcttactcccatccctcctcaggcccgtaccccgcagctcagcatccccaatactggtggtggcaaagtctctggtttccggggaggaagggggaggggagggatgaaaaaaagaacaaagaccccgccctgtgcctgcacctgcgccactcctgcagctcctgagcttcccccaccctcgctgcccaggccctttgccccccttgagaagagaagcaggcctgtgggtaatgtgccacgggcagttgagtccctgaggactctgagggcggggggtgggggcagaagtggtgtgaagcaggactaacaaggacaggaacaccccttctgctccaggatgcccaccttcctccctgactctggtcccagaagaaagatgtattcctcaatgagtatggtataaagtggaagggtcgggggagcctcctggtacctctgatcccatcacaccctaaggctgatctgagaggatatgtgtttagatgatgcttgttattgtttcattgggggcattataatttgggggacacccccaaacctcccctttcaacccacttcatccaaactgtctgtaagaactgtcactctcaataattaattgcattttaaaactctttgctgtaggactgtcctgggaaactgagccctatcttgcacatgttcacttcagcgggtgtagtacctgccatacctagagctaactccatcacgtgcaaggctattgatgtaggaagagggattttaagttgcaaatataaacctgagaccagaagtcagagatgtgttttgtctagcccatacaacattttttaaaagtttaaaatcagtgcagtggcatgccaacaatagggatggcagaagtcctgccccttgagttgcaggcaataagggggtgcattgtctgtagagaatttaaaaaataaaaatcagtcctcttattatcaccatgttccagaaattctgaaaaaaaaaatcagtgataaaattatcctccctgaaaaatattttatggatctaagttttatattttttttgagacagggtcttactttgtctcccaggttggagtgcagtaacacaatctcagctcactgcagccttgacgatctcccgggctcaagtgatcctcccatctcagccacctaagcagctaggactacaggcatgtgccaccacacccagctaatctagttcattttttgtagagataggtctccctgtgttgccaggctggtctcaactcctgacctcaagcaacctgcccacctcggtctcccaaagtgctggaattacaggcatgagccactgcgcccagcccagatctaacttttaaattgctgtagtggaccaggtgcagtggctcattcctgtaataccagcactttggaggccaaggcagcaggaggattgcttgaggccaggagttcaaaaccagtctgagcaatatagtgagaccctccatctctaccaaaaaacaaacaaaaacagtagacaggcctgatgacacaagcgtgtagtcctagctacttgggagactgaggtgggaggatcacttgagcccaggagttggaggctgcagggagctatgattatgccactgcactccagcctgggcgacagacggagagaccctgtctctacagtagatgcacaaataccattgtcttacaactgcctacagtattcagtatggtaacatgctgtaagcattggggcctaggagcaccaggctataccatgtagcctagatgggtaataggctacaccatctaggtttgtgaaaatacactctatgatgtttgcacaatgacaaaattgcctagtgactcatttctcagaacatatccctgttgttaagcaatgcatggctgtttttatgctgacatgattatatttacaaagttcaaggaaagaaaatattcactgagtttatttcttggcccttattattcattttataattgccattgagaataattttgtcatataaagaatgtttaaatttgttttaattttatttatttatttatctgagatggagtctccctctgtcgctcagaccagaccgcagtggc

SEQ ID NO: 588862 - DNA, 4001 bp, Homo sapiens
tgacttcaacctctgccttctgggttcaagcaattctcctgcctcagcctcccgagtaactggggttataggcatgagccaccttgccctggcatctctcagtcttcaaaaagagatttaacaattaatcctcgactcttatcactaggaaaacaaacaaggccatctcttctctttggcctaaaggaaatcaagtcgttctttgtagcgtatgctatttaaatatggtagagtaggataaactttcccttaaaaatgttcaaaaccgaaaaaaaaaagttccaaaaccacttggcacttcttgggggaaatagtcaagatttgcttctgtacttctctcctttcctcctacaaatagcctctgctagggccattccaggatgttatttatttactagaaacctgactttcctttccccaaggttctggagaatccaatctgaccccaagaatcccattaacttccaaaggccatttccatgccctatccccaccctgaggggagggggcggttcggaggagaagcaagcaacaccatatattctgagatttaggagcagcagttggagaggaaggtacctgaggttgggaggaaacaagctgtccccacttgccttttcagcaaacacagctgcagtttccaaggggaaggtggagcctgccgaggaatccacattcctcagagggtgcaacagccctcacctgctgaggagctatcactgggaaggcgacagatatggcgctaatcccaaggaagtgcatccccgggccggagctagaaacacacaaccttggtaaaaaatcagaatctaaataggaataactcatacctctgagcaatggctcagacatccacctggtccagtgatctgtgaggggtggatcacttaaatacacccttgtttaaaaacaggcaaggatggcttaaacattatcttaaatacaaaaacaacgtggagagcaaggaaggcaggagaagagacggctgagttctcttagctctcttccccggtgacctcccgcgggccacagtggcacatcccagaattcaggcacgaatctggcagcttttcagagcccgggtgcaggcagtcggcgctcgccgcgtgggaaggcacctttccacgcactgcccaggatgagcggcgacagcgttctcagcctccctcccctaagggtccggcccatcccggaggccagggtgcctcttccaattcgactgagaactgtaatccacactcaatctctgcccgcgcagcgaggctgggggtgtggggtgaggaaggtggcggtgatagggggagatacggtgcgggattaacaaagaaaaaaatcgaaccctgttttcaaacgagcagaaccaagagctacttgcttccctttctacccccaagcccctttgatcattttgggtagagcaggaaccagcagctcaaggagcactcaaatgggagtcccagaggagctttgttcttggtgtgcagtaattagagcgcttgggggaaagcccccgcagggggcccgaggctaaggccgagggggcatcgagggaccctgcatggagtgcgccagcgccaagcccaccctcagccgcacgcggcctgggcgcagagagcgcgtgagggtgcgcgcatcgcccacccgccgcgccgctcacctagcaccaccgcggccacggtggacagcaacacccagttattcttcaggaagcgcttccactcgcatcctttcctcgccggtttccccatggctgtcgccgctattgtgcgctgggctcggccgtgcgcgcgtgggctgggcgacccggggactgctggctgctcggcggcgcggcgagatgcgggtgcacaggggagaggtgagagccggccgctgcagtcgccgccgtcaccaccgccgttgccgccgccacccgggatcgcgcaccgcgcccgccgccctgccagcccggtagttttgcgtggcaggcgcgcccggctcctcctgctgccgccgcgctctgcggcgcctgggccaaccagcgaggaaggagggaggagcggcaggcccgggaaggagggtgggtgcgtgcgtgggacgcccggggtccctagggagcaggcgtggtagggcgcccagcgctgcggcaggagctggggcggcctctccgggaaccctgagtcccgccccacagccttccactggagtctgtctcgctttccacgcctcactcatgctagggctttgggttaagggttttcttctgtccctaacccagagaggcggagccactgccctcctgggcgcggacttcatcctgcacgtctccctctccgttctccacaccagctatttccagcgccggcacctgcagaacgggtgccctttcaagtcgggggaagctgatcctgccttgggtccctcttgctcggctactcaggctgggatgtgccagcagccgcgaaagcctgaagcttctgggaggagagaaaggagtcctggggcagaacatggctttggaaactttcacgcggagcctccagtgcccccacagggattattctcctcttcgagtcgctggaggtgatttgtctgtggacactgggcttgggagtgttccctgcacaaggagatggtgatttctcttagaactttacttctgctccttgggacttgctctgtgaccacaggccctggagcatggaggcttggggcagtgattagaactgagaaccggacccgggagccgctctggggagaaagtgggcggtccatcccctaaggtccaacggattggaaaggcaaacacaggagaaactaggttagtggtgccaaatatatttggtgttgctaagtgaatttctgatgctcttccatttttctacccaattttttcactctcacgtatacaatctctttccctccctttaccaaatcagtacctccgcagctgtaagcggtcttcttatcagcgttcctaaagttaagtgagcctggaaccctttttgctattgtagaatctactctgattgtgggtagggagaatttcccctactagattttctgatgactaaatccccacaattagagcttcatccctttggtgtaaattgatacaagcatcttttaagcgataatagattaagatttacaaccctgtagactttagtatgaatgagtttatcagctctttatagaaagtaaactttgagagaaagaaggttagagggattttaaggtcgttgggtgtccgaggaagatctgaagaaatgtcagaaggggacccgggtgcggtggctcttgcctgtaatctcaggactttgggagtccgaggcgagcggatcacgaggtcaggagattgagaccatcctggctaacacagtgaaaccccgtctctgctaaaaatacaaaaaaattagccgggcgtggtggcacgtgcctgtagtcgcagctacttgggaggctgagggaggagaatcgcttgaacctggaaggtggagattgcagtaagctgagatcaagccactgcgctccagcctaggcgacagagcgagactgtcaaaaaaaaagaaaaaagaaagaaagaaggaaggaaatgtcagaagggaaactatcaagaaagggagaatagtcccgggcgcgatggctcacacctgtaattccagcaatttgggaggccaaggcaggcggatcacttgaggtcaagagttcgagaccagcctggccaacatggggaaatcccgtctaccaaaaatacaaaaattagccgggtttagggccatgcacctgtaatcccagctattcgggaggctgagacaggagaatcacttgaacccaggaggtggaggttgcggtgagccgagatcacgctgcagcactcctgcctgggcgaccggagggaaaccctgtctcataaaaaaaaaagagagagagcgtgcgcgagagaacagatttgtcccacagtaaaaaaacagctggaaaaaacgcaaatgtccaacataaatggaatggtaaatatatta

SEQ ID NO: 588863 - DNA, 4001 bp, Homo sapiens
atgtaggtattttggctttctgtttaaaatcacattcagagatgatattccactgctaggatataaatcagaactccattacaataccacatacgattgtattgatgccatttgtccactatttaaaaaaataatttaggtgtttgcaggaattacttctaagctctttaccaatctgctttccactcacctaagtggtaggatggccacgattgttattaaaactccctcaaattctactctaaaaatagttgaagtcatgtttattatggtgtgcaaagtgggtcattgtgatgcagaggcagatggcagggctggccaatgattctctttacaatggatgctgatcagttcctggtcaagtgacctaagacatgattgtgtcaatcaagaaaaacagccatgacaacaataatgacaagccctgctgggctaggctgctgactggaaggtacagctacggtgacacaaactttcttcctcagacatctctaaagagatggttctttcttggtaattgccatgtgttcatttaaaaagaaaaggccttgcaactttctaggcacatacacactttcctatgaaaattaaattgttcacaaaatcattatgcccactttcagaaaataagagacaaataactgctgaattggctttgggaggcttatgtaacctatatttacaagtgttttactctgaagcaagtagctgaggaacttagtaaacatctgcaagaataccccaaaattattttttccactgctatgttagtctagctatcacagaactgcagaatcaatctgctatccacaagagccccaaacaccatcacatcaaaagaactgcagatctcaaaaacataataattcagaaccgtagtcaagaaaagcattaaataaaaatccaccaccaccaacctttgcttgggcttctggtgctgtcaccttgacgaccttattgcggtttatcatttgcttcacccatttttctacttggacgttgaatttcatgaaaaccacatagcaaaaataagctgttaagagaagcaagctttcccaccacatgatgacattatccaggaaaaatatgatcagcatgatcaagtcaacaatgtagaaagacacatctcgaaagagcggccaccatgtcaggtttaagatttctctagaaaacagagcacacatgccaataacaaagaggatgttgaatactgctgaacctacaattgtgcctatgccaacgttgctgtgagcgataaatacccctatgagagatgtgaaaagttctggggctgaccctcctgcagccatgaaggtggctccagccacatcatcagagatgcccagtttttcagtgatgacagtcaaagaaggaacaaagaactcatcacagacaatggctaaggctatgaacatgtagatcattccaatgacatgcagaatgatcgcaccttttcttctctcctcaagggaaaagatgtctttcgggtagtctccttgggcgtgatctgtactattctcagactcgccttccttagaaagaggtggctgtggagtataatccagaatcttgtcatttaaatctaagagagttctctgatggtaaccctgtgctaccctagggccacttacaacactggcctctcctgtgctctgtgtatctgtctcagaaaaggcactgattgaaaatgagacagtgctaatggctaccagacccatgaaaaggcctaagactcgaattaacttcagttttttcttgacactataatgtcttctgcagccagacagtgactcatccaaacaccatttctctagggaagtgatggtggtgctttgttgcagatccatcctgggtcttctggtggatatggtgatcttccaactttagactcaaccagatggttctttcatacttttccttactttatagttaacgatgcttgtggggtactttcacaatcagggattgttatgcttcacaggaaactttcatcatttatgcttaaataaaaataaaaacgagaataagtaaatcataaaatcacgtctttttaataaagatctttgcagatatgataaagtcctgtcctgcagctgtgcgatcttgggtaagttacttaacttctctgtgcctcagtttcctcatttaaaatggggacaattacggtacctaccacccaggattgttttcaagatgagtaaaaacatatgtagcacttagtatgggatgtggcacttatgaagatgtatgtataaacccaaataaatattttggtaaatccaatgttaggtgcagagaaggcagatgtaagaataaaaattttacaggtgaaaatctatcagattatctcaccttaaatcatgtaataaccttccagtgctataaaggtacctagacttctttcagaactgtctaggtacttggcaactaacaattattcattgtttacttttggtccaattacataattctcagttgtaggcaactttttctgatttaacctatcatttggaaagtgagtgattctttaatttagtgatcttttttctgcacacataatgatatcagatcttatttttcataaaaagtctctcctttatcagatgcgggaaagtagtcctttacaaatttaagtttacaaaaaaaaattctggtgacatgcacaagctgccttccctaaacatctagacattgttttcagctaaatattttttttaaaaaaacaacctttagtcatatttaaaataggcagcttagtaagtcaaagaactcccaatgcagtgaaataacaagtaggctatttcgagagaccacatgtgtatttcataaacaatacgcaagttgtagcaatacctctgtccacaaaatctgcccaaaatagccccaccactgactttaataggttagatatccaaagcagagttttctttctctatcccacggaggagatgggtaaaatagccagacttgacagctgatattctgaagagttctctttttagtttttctttaaaaagactattcttttccatatcaacgatttcattttggaggcagtcgctgagataatctcaggtgtaaaataagctaattaaacacacgccacttaaatactgagattagctggagctcaggttttcagagcaaagcaagagcacaaatcaaccccgctgagttgctgctactcctgagataacccgaccccatcacggagattcccaggtggctgcgaacgtcaacgcttagcaggaacgattaagcgattcacagcactcaggggattgtgtaaatgcccggcccgggcgaccagcagggacagattcaactccccgggcgcaaagtcatctccagcccgatcctcgctccccctgaaaacccaccgctcgtctccccgggagctgcctccgtaggagaatgttcgcccccagccgcgccccaactttgccttgcgtggtcccaaactttccctggtggattaataggaaaataaatctaaaggacagacgccccacctgtgagcttggagctgggttgcatttggtgaggcgcttggcccgcatccccctgagtcgtttgtaggtggctggggaatggaagcgcccctctgcgcgtctcccccgacggcaggccctgccccacgccccccatcccaagccaaaagcaagggtaggagaggcgggggctccaaatccacgccccggagcacagagagttggctaactcctagcggggcctggggcgcccacatccacggcagagccacctgtgagcctgcagagcagcaacgggatgcgcgcaaccgggatgcggggacgaccgccacagcggctacagcggcaggcggggcgcagccgcccgcacttaccaggataagatgggaggacgcgcacacggcggggcccccgagcgcggcccgccgctccagtccgccggccctccgcctacccgctctgaggcccgggctctggctcgcactggctgccgctctcgccagccgggct

SEQ ID NO: 588864 - DNA, 4001 bp, Homo sapiens
gagaatggcgtgaaccccggaggcggagcttgcagtgagccaagatcgcaccactgcactcgagcctgggtgacagagtgagactgtctcaaaaaaaaaaaaaaaaaaaaaaaaaattagctgggtgtggtggcacatgcctgtaatcccagctactagggaggctgaggcaggagaatggcgtgaacccgggaggcggagcttgcagtgagccaagatcgcaccactgcactcgagcctgggtgacagagtgagactctctcaaaaaaaaaaaaaaaaaaattagctgggtgtggtggcacatgcctgtaatcccagctactggggaggctgaggcgggagaatctcttgaacccaggaggcggaggctgcagtgagccaagattgcaccaatgcactccagcctgggagacagaaccagactccgtctcaaaacaaacaaacaaaaaaaacttgtctctaaatctcctggacttaaccattctatcttgcgtagtgttactcttggtcctcctaggctgatcctaatagttagcgctaaataccttggatgttgatccaagaatcttgaacatgagttaacaacacctatgtacacccacccaacaaattggtttaattcattggcggtttaccagattcttttcatacttggctacgagattctctaattgtcatgtgtacaaatggaccaaactaactcagcagtgaaacaggttcttaggtaaagtactcaggagtcctattccaggctgtaaatcaggctaagctacagtaaatgaaatacttgggaaaatggcagctacacccgccaagtcagactgaagggggaagagacagaagggaaagaaacagcctctgctctgaggttctcatacagaaaggccagcacttctcttcctggcaggcccagggatgaccatttctctgcgcccctatgcccacacctcggccaagagcccacaatagtaacaatctcgctttgacttttagaaaaaaaatttcccccggattctttcactccgtccacactccaaccccgcggggatcacgatcccattttctggataaacagggcaatggagatgagcctaaaccatgagaactgtcagtcttcgccgccaacgtccacacggatcagcctgaaaccccaataccaatttttttttcaactcccacatgttcctgagaggaaccagatcagggcccacggctggcatggaaacgagagggaaaggagggggtgctgctggggactgatggatgaacccatccttgggtgaagggagcgtccagcttggccttgaggtcaggaggtgacaaaggcacactcctgagacctggccttctactctgggcaagaaagggcttttcgcccatcagaaagcccataggatgcccacctgtgtccacgaagaacccggctcaagcacccaaagaagtcaggaaggagccccgctcccaccagggcataagtggggtgtccctcagtgagtcagggggcacccttcctctggacagtgggggttccgcccagcccaaggggccgtcccccgagacctgtcacccggccctcgaggggctccctccccgccagtgctgaggacgcgcgcagcctacctggagctcgccctcggtgcggtgcagtcccaggcgccgcagccccaccgccaggtcgttgacacacaggccgccgtcccggttgacgtcgagcgtctgaaagagtctccacaggcgcagccggtggtccgggcccccgcagatagcgccgccgcaggggtcccccacggacgccggcgatgaggcagacgaagaggcggcggtggcggcggcgtccggcggcggggaggccacacagcggcacaacacactgctcaccatcgggcgcgaggcaggggctccgggcgcgggcgggagcgggggcggcgggccggcggtgaccgcgcgggaggcaagccaggcgctctgcagctgggagcgcgggctcggagacgccggcaagctggcggaaggggcggcttccgggagccccgcccctccgcgccccgcttcgccggccacgcccgggcgcaccgaaggccagtcacaggctcggatggggaggagggaggggcggagcctgtctaaggacagcccacgcgccacggactacccggatcaatggggtgggcggggtcacccggctccgcctggggccgattcaaactgagggaggcggggattggctgagccgggggccaagagagagaaaatcacgcagcgataggcatgagtaatgtgattggcaggcggaaggccccgtgtccagtttccattgatgaactaactctgtttagactgcgggatcttaaggatgggaggagcggtagtgtacggagagatcgtagcctccagtgggaaacaggatttgtgtgagagcatttgtgaactgcagttgcgaggcagagtttgtgccggtgggaggaattaaaagttaattgacccatgggtcacggccgaaagcactaagtatcctcaggaagcagggttttggtaatctaactccctaaaccaccaataaaatagctgaatttaacggcttaatagtcgtaatactgacaattgaacgacagaatgattttccaatggaagtgaataaaggttaggtgggcggggccctctgggcgacggacacaattttagaccaatgatcaggcgaattacagtaagcaggcgtgctctttagctgagcgacagatcgaaagaaccagtgatcgacgtgatatttgagcagctaccaaccgggaaggccggttttcccggagaagcgctgggaggcgggaagaggggaagtgggcggatctccgcacacctcggcggaagaggcagattcaggaagccattacgctgctggctggcagcggccgggccggtcggggctgggccctacgcactttgcgtagcgaggggggttaccaaaggcctagtgcttggcctcgagcaagcctggcctatcccctgtagggggtgggtgaggggcgaggctgaggaagaagagaaggggaattggggcgcttgaggggattataatttctttaaaaagaggggaggggagaggccatggccgtcccagccaagaaaaggaagatgaacttctcagagcgggaggtggagatcatcgtggaggagctggagctgaagaagcacctgctggtgaaccacttcaacgccggggtacccctggccgccaagagtgcggcctggcacggcatcctgagaagggtcaacgccgtggccacctgccgcagagagctgcctgaggtcaagaagaagtggtctgacctcaagaccgaggtccgtcgcaaggttgcccaggtccgggccgccgtggagggtggtgaggcgccggggcccactgaggaggacggagctggggggcctgggacaggcggtggcagtggtggcggtggcccagctgtagccccagtgctgctgacccccatgcaacaacgtatctgcaacctgctgggcgaggccaccatcatcagcctgcccagcaccacagagatccaccctgtggccctcggaccctcggccaccgcagccgcagccacggtcaccctgacacagagtgagtgacctctcctgcccaggcggcgtgcataagtgggaagggccagcaagctctggggtggcctggggaaggttggctgccaagggtcagaggtcagatgggggtcttggaagaccatgaggccttccaagagcagcacccagacagaagtgatcttgctctctttgggacttcctcagcacgtgggctggacttctgacgtgctggatagctcgccactgagcattgccaccatgtttgtccatgacttacctccacttgccgaactgggtggtccttgaaaacaagagaccgtgtctgtatccccacaggacttttcacagggcccggcttgtagtagacagccaggccatatttgttgaaaaaattgatgggaataatactgccc

SEQ ID NO: 588865 - DNA, 4001 bp, Homo sapiens
ggtactgtatgatgctgaaaaatagagcagttaactgctaaagacaaaaataggtgattttaaaaggagccggccattcgaggtagtaataaggcaagcaggtctatagataaaagttcctcacaaagctagtgccacagccattccaatcttgtctaaaacaatcaaaaggtacaaagtgacaccctctctttgaatattaagcaaagacatctcaggcataacagtctctgagagacccactgctttgctcagaaggaacccatcaaagacgaagacttctccccagtgcccacatgactgcaaatgttattacatcaaaagtccctagtagcaaaggcaaaatgagcttttatttcttaaatgtagcaattcatcttaacatctctgtggtatctataatgtgccaaacgggcagaatctccttttcttctctgatttttctcctaagtaaaaagattgaaaataaccaaagctcaggaggtgaacgaggtcactcctacagcagggaggagaaatctgagccaagtggcaatttcctttctaatactgagcactccattagtctccttaaaaactgctttcctaaggggaaaacgaggcagcacaggacaaggatttgggggtgaaatctcagctccacctctctttagttgtttaaccctgggcaaataatgtaaccattctgcacctcagtttcttcatctacgaaatggggatactaccacttaccttggctcttgtgaggatggtaactcacgctctgggctcaggaaggatgaaagaccccacagttggcagacccgcagcggccgcagtcatttccagaggggcaccagcctctgcgcctcatgactccagcctctcctcggacccagtctcatgccttcactcttcctcccagacccaaaggagagatgggtcggacccaggcaaggggactgtgaccttcaggatgccaagaccacccccacagctccaagcaactgggttccacggtcgaggcacactctctcgcccctttagcttcgcccttcctgagctgttcggataagctaaggcacactttcacaggctgcccctcactttcaaatggctttcttcagccaaactaacaaatcctaaggcaagtctattgcaaccttccttccctcaacagccacactggggtgctcgcagtgggtaatgcagctttcacaggggccacagaaagattttagattgcatttgtgggcttcctcattgcctaccacttctccctgaaccccgaactaacgttgtgagttctcccttcctccccacactcgttttttccccaggaaaatgatcccagaccaggccctaaactaggaggtcctcttgaggccaacattaccttaggaaactgctctgcaggtccaaccaccagcaaaatggtgggtcttttttccgtggcctcagcccttccgtcctgtttccccaaaaagcttgccatctggtctctccaggcaggggctggggtgcctctgacttcacgatcgtccccctctctggagccgtggcacccagccctggggaaaaagctagctaggaaatgccacagcatctgcaacatcacggtctcctccaaacgcctctgatggcgactgttcacttttgagggatgtgaccacagtaccaacgctctctggctacacagctgctgggaggacgggcctggggttctcaggctggaagctctgcatgcaggggcggtttcctgctttttcaaatgtgctagcactgctgtcgtgcccggcctgagaagtagctcactctaagggaggcttgccaggctgccggcaataaggagaaagcagctggagcttcttcaataaaaactcacttctgcaggtgatggtgagcaaacgtttggcttttttttaaaaaaaaaaaaaaagaaaaggaaaacgcgacagccaagcagaccactcccggaggcagcaagcaacttcgagctcccagttattcagctgtcctcgctcatcacccaagccgaggacccgagcatccagtctgcattctcactgcagcagagcccggccaatcacctctgccgacactaccaagttcattatccctaccagcaccagccctccaatcacaggcagctgattgcctgcatgaagcccggcaattctgcagggaggtgcggactcaagctccagatgaggctcagcttacagaatccactctgagctggctccgtagcaaaagtaactccctgccctccactcgggttgcttccagaaggcattcaccatcaagtgcaacaccatcaagagtccttggcagcatgtcctaagagcattctagaaacatttttccttgtttcaagatccagttttctccagcagagcacatgccacatcacagcagctacttctgctgcgtctccctccagaagatgagctgcctgggggcagggaccaagtcacagacctttctacccctaggaccaggcacagattaagtctgtagaccgaactgagtaaaaggtcataaataaaaaggaattaatctatggtcatttgtttcttagtttactaacagataaatgcactggctactgtcattcctcgctgaggtgaccctctgatagtgttcacaacctttattgattgattgattgattgagatggagtctcgctctgtcatccaggctggagcgcagtgggtcgctcttggctcaacgcaacctccacctcccaggttcaagcgaattctcctgcctcagcctcccaagtacctgggattacaggcacctgccaccatgcctatctaatgtttgtatttttagtagagacggggtttcaccatgttgaccaggctggtctcaaactcctgacctcaagtgatccatccaccttggcctcccaaagtgctgggattacaggagcgagccaccgcgcatggccccacaaccattattttaaaaatacaaacacaaggccggatgtggtggctcatgcctataatcccagcactttgggaggccaaggcaggcggagttcaagaccagcctggccaacatggtgaaaccccgtctctactaaaaatagaaaaattagccgggcatggtggcaggcgcctgtaatcccagctacttgggaggctgaggcaggagaatcacttgaacccaggaggcggaggttgcagtgagccaagattgcaccattgcactccagcctgggtgacaagagcgaaatttcatctcaaaaacaaaaaacaaaaaaaaaccaacttgttaaatgacaaagtatagaagaaaggggattgtgtgctgccatttattcctagcttttatttgtgaagacggcctctggaaagataattaaattgaagagagggtgtggggcggggaggacacttggggctttgagaggagaaaggcagatgagagacgtgttttcaccgaacatcctcttatatcttgcgaaactgaaccataagcatgtatgacccaggcatacacacatacacatgtaaataaaacaatcattgaaaaagaaggccgagcgcagtggcttacacctgtaattccagtactttgggagatggaggtgggccaactgcctgagccgacgagtctgagaccagcctggacaatgtggagaaacctgcctcttcaaaaagtaaaaaaaaaatagccaggcatcgtggtgcctgttgtagtcccagctactcaggaggctgagaggtgggaggatcacttgagcatgggtggtcaaggctgcagtgagccatcatcgtgccactgcagtccaacctgggtgacagggagatcctgtctcaaaaaaaaaaaaaaaaaagacaatctggagagaaagtaagatggttgagatggggtcctaaggcttgttctgaaagctgaaggagcctgtatcagttgccctctcactagataaacagaacttgtccagaagcagttttgcatgttgattaaatgcacagtcactggagccagaccccaaattccaatc

SEQ ID NO: 588866 - DNA, 4001 bp, Homo sapiens
cagtccctgctctcagggaagccaggtgatagagctgccctggctctcccgctcactcactgaaaagcactttagtgtcccaagaaggctttgagagactgttccttggcaatgaggttccaaaagtaaccccccccgcccccgcctcccaggaggtgggctttgttcagcagctgttaatggttggcaactgggacagctccacgagagcacacatttccccagcacctagcaccggccgcagggcgtgccaaatgctttacttctagcaacccacttacccccctcgcaaacagctctaggaggtaggaaatgtcatttcccccattttacagagaaggaaacaggagttccgagagcctaaacatttacacaaggtcagacagctagggaagtggtgggcgggatgcaagttgggccgtggtcctcccaagccgcctccctgcacatcctgccgccaccctcaaggctaaccttcagaacatgggggatgaaagtgagtcaccccaactcagcaacgccctgaatccggaacccaaaactgggaccgagaatctcccaaggaagatggtatagtcttcctgtgtcctccggatttctcactgggagaaatcaactgacagccagctggggtttggaaatggatggcccactggctagctcgcgtcctcaaaggatcaccaccgcgcctctctcttagacacactactgacagcgccttgtgattcctcagctgccaaaggtgtcaggggcagggaggcctgaacagataccccatgacctggcgcgatcaaaaggctaatgtgaggggcgtggctggaatgtaggacagatgcaggtacatattttatctgctgaggttacatttaacttcctgtggacatctgtgctctcagacaagagtgacataaatcacctatagggtgactgctccaaatctctaacaggaatggaaatagagtggacaagccatttaggcaggaggcgaacatcaggcatggagccctctgggacccagccgcctgctgccagggtgagccacatgcctccctggggtgggtgctgtcgcagacacccagagcagagggtgtgctcaccgcagctggcttcaacgcattctcaaagtgcttgcttctgcctcacagggcctgggcctccttctgtctccttccttggatctgcaaatcccccttggtgcacagtgggcactgggggtagcagggaaactgattaaccgagaagccgaggtggcaaggggcctccggactctgcagctcggcttcctcactttcagggcagacacaggccctgttccacagcgatgtctgagagtcgagaaggcgggaggctccctcacccccacaccagggacgggcagctccaccacgcagcaccctcaactcctgggcctccctgccttctcctcccatgcactactggcctgccccccaggtccctttctggctctgtacttctcaggaacacccccctcattccagcaaaaggaatttcctttctgaaagtccatttctcacaacagccttcgctggaattccagccttcctgggaagtcacatgaaaaccggtcactcctgtgacgtacacgtgccggccatagccgcatggcaatgggaaaaaactgctacatttcagacattctttcctctcagtgggggatggttcatgcatgctcagccattcactcaacaaataccggttgaatgcgcctctcccttccgcgcggtcaccccacagacctgcttccactggcggtaggtggagaattcctgggaggggatgaagacactgagcttgaaaatggacttcagctcggcagggagccccttcgactcaaagtactggaactcggtctgggcttccccgatgaccggcacatacaggcacagacagagcatgttggcggcctgctgggtgctccactgccctcaccaccgggagcaagttccctaaatgctgccggtcccgggaaacttgcataagacaagcctggcctcagctgtcattggctgcttaagccctgcccttttacttaattgaaaaaagaaaaaagccctcccacggcaagtcctgccaacagccaatgaacacagagcccgggggagaaggtggcatcaggttgctcaagtgagaggcacaaagatcagggctgacgtcaccgctccctccctgcagttaactcttggagaagaggccgggtggtgcgttctgcctgcctgggtaccaggtacagagcccaaacaaaccttcaccctctagctgccaaccccttcagatgaacaaacagcctatggctgctttcacacaaggtccccaaacgtgtcacacaacagtttttctccttttagtaaatcattcccaaccaaaaaatcagtagttggagagagacagagctgattgccactgcaaacgggcccagttcagctgtgaggataggaggctgaggggtggccgagagccaggtgcctagccaccctggaaagtggacccccctatgggcccatgtatcccacaggggagctgccctggccacacacggctccaggcacagttctagctggctcctgctccagggaacctgcagccctccacagcccacattgcattgaaacctcttccaggccattctgcaatgtgagcaccagccttcacctaggagccccagagtgcccaggagctgacatgatggggttggtaagaggacaccatgccaaaggactccccagaagcatcaatctggggtcagtcgaggcctcacatgagacccacagtcttcaacgcccacgtccgctcagaacacgtaggagcccagtcttagtcacagctagaactttgctgttcaatacagaagctttttaaatgtaaagtcatagccaggcgtggtggcacacgcctgtaatcccagctactggggaggctgagacacgagaattgcctgaacccaggaggcggaggttgtactgagccaggattgtgccactgcactccagcctgtgtgacagagtgaaactgtgtctcatgcaaaaaagtaaattcattaaaatgacatgaaattacaaactcagttccccaggatagccacgcatagtcactgggcatttctgccacagcggaaacttcactgggcaacacagctcgagaacgaccctttcagggcaggacgaccctctctgcaggccggcctgaattctccactcattccttccccacagattcgtgctgcggaggaagagaccacgtcaccaagatgagaacaggctcagtctcacccttgttccttctacagtgcgccacttcctaatatagactatatcttcccactaccgggatggataaaaatggatagttattacttggggatcacagaagtaaaaggactttttaatgcactaaaacgcttgttgttaactcgtaaagagggtgttacaagatgttgatacttacacacaacattatgaaacagagattatgacaagtgatatgacatttgggccttctaacagagatctgataacgagtctgtgagaacaggtcttgggctaccctagtgacggatcctatgaggtcgcactggattatccaggcagattcctgctcagcctccgctaaatccatgacactcagctatctcttaagctgcccaatccagaatgttctgccttgggctattttaacacgcctcttatctctaccaccagggtccttgaaggtagaaggctcttacttcaaacccttggacctccttgtctggaaataacctcctgccttgatcaaataaggtgcttcatgaacagcttccaaatgagtgaattagctcagggggctctaagaccccaagaaacaaacttataaccatgcttgatgaaggcctatttttctgagcatctgcaaatagagttgtcagggcattatattcaaatggacaagataatgtatcattattattattatttttgagacagactgtcactcttgtcacccag

SEQ ID NO: 588867 - DNA, 4001 bp, Homo sapiens
caactattttaagaacattactgtacattgagattctcagatttaaaaaataggcctagatgggggaaaaaatgttatgaaaccctcctggactttacagatttaaagctttttctctagtttaatcctacacaccaggatggtgtgaatatgttcttaatttagcaatagaaggataatgtgcacagcattatttggtagtacagtttagacttttgcatgtttacctatactgtgaacatggttaaatttctttgctaaactgatctttatatttttattcattaatgtggataattctttgcaatttattgcaaaatttatttaccataactttacgcttgtttgctacgtaaaactatctcatcataagggagcagttaatgaacttgattttcaagcaactacaagtgtcaagcttctgtgactaagaaaacagtgtaaagtctaaaaccttattataatttacagcctacatggatcagcatgatacagatatgatcctagcacaaaggtctctgcaaaaactggggagagggtgactccaattctcaaaggatgtgaatttccactagtcagcaggtctgagtcagcattcagaacaagatcagcctgggtctagtcctagttacgacactagcttgccaatataaagacaaagcaatatctgattttaaaatccactgatctgagtttgctttcatttaccaaacgagagatcagatgagtcaactcctagcttgttttcccctgagatgcgctaagggtgattccagttccaaagcggtaacctgtgctctaaaccactatgggacctcaagagtcctagcaccttttgatcctatggaatcctttcaaagcacgggcagaggcggctcaaaatggcaaggtcactatacatttcaagggcttctgtttcagagattacaagtagagaaaaacagaaggtgggaattaagatcagctaggtagagctgtgagatgcaaaacaaaggttttgcaggaagttgaggtgctgacatactccatctagctaaactgaacaccaaataatggatggagactaacaccaccaacaccatcgtccccgaaaatccttgtacaagtgagcttcctacaacgcgatgcaatatgctgtcgcagaacaagcactgccaggctatgtagctgaacttaccgttctccaggcgtccatttccccaacctgtgaaaggcggggagggggttggacaagatcactaagtcctcttccgtttctgacacttcacagtcaggggtcccgaggtgaggccgaaatcccagtctcccgggacgcagaggcccttgcgcggtgccatccccgctgtcccccgggcgcaggcagctcccggctcctccccgcccctgcggttcctgtgcaccagggaggtgcctccccagcccagggcgcgcccgaatgaagggacagcgccttcgcgggaaaggtcgcccagcagccggacaaacacccgcggcaggcgggggagcccggagccgaggaggctcagaactgattccgcccgcgccgcctgggtggggcccgcagggaccgggccagggcagccggagcgcgcagaagacagggatgggcccccagggcggcagcctgccccagcgggcccttcagcgcgtttcccctccctccaacctcatgcgaagaaagcccggtgcttccccacgctcgtcccacactcacccatcagcgccggcgtcccgcaggacggctagcgagccggggcccgcgcaggcgcagactgtgaccgaccccgaggttggggcgcagcgcgacgcgctgggcgctgttggggtcacgtgagggagacaccgccccgccccgcctcccctccctcggcccgcggcccgccagatgtcgccagcctacttctcctggccgcaggccgccgcggcggggcaggtagagggccacgccagcacacctgtcaggatgcgggctccgctagccaccatgcttcacccttgatgccgtacggtggcctcagcgtgccagaaacagccaacgcgttctctagcgcgctgcctgcagggggcgtctgggcattgtcggttttaggggccttgtcggttctgcggggcgagcgccttcgcggaaaactccaaagtaccctctgtggagccttgttgagtatcttcaaaccttcagagggaccttttatcagcgacccatgccgcagtttacagaagaacgctttgtgcgtgctttgggacgtatggatcacttttaaactttttcctttgaagctcagacagcttgcggggggcttgggaggagcgctgcccggggagttagaaggcttgggtcaaagtcatagccctcatacttcttgagagtgaccttgggtgagtcgctggaccctgagccccaaatctccgtctgaaaagtaacccatgccttgtatgcgtcctcgggctgttgcaggagtctttggaaatgatggttctgactctgagttggaaactggaacgcacacaacagatgggaggcgttgaaggaaacagaaaggtcggcctgaggggagaggcgtttcaggaggcttgcggatgtgtgaagtgtgcgcactgtgcttggggcgagcccaagcagtaaccccacccgagtgaagcgttcttggggggatcggctccgggtgggcgacgttccccgcgtgcccccttcccccgagagcactttgtagacactgactccaaaagcgggtctggtctctgcccagccccactttggctggcgtgcttaggtgcctctcgggaagctggagaccaccctcccccattccagcaaacgctccattgaggaacctactgcgtgccaggtcctggggagcttagcgtctgatgaaggatacaacaacaaaagactggaaattcagaagcatgaggggacctcccccctcgagggagaaccagagatggcttcacagagcagacgtttgaactgggccttggaggatggatgagtggaatttggcccagtggagaaagtcatagcagcaggagataagattgtaagggtcaggtggtggggctggataatgcgaatcttgactgtcagacacagacacctgccatctaattagtacgcgagggataaattttggactccgcaggataaggacaaggctacacaatggcttagaacagttaatcgggcaacagttggaaagggcctttgcctcaaaattatgtttgccctgtcttgtgtgaatgcctattcagatgcattatttgaaaaataaataaaccaggcaggcatccagcgtgttcataagcataaataattaatttcagattagaatggagaggttattctcctgcggtaaaacctgaacaagaaggaaaagactgaaattaaacacacaattggggcacaccagactcagaaaatcccaggctaacgggaaaactgaggtctggagctgagcccagtctgcttcttttatgctgctgcaggccacagcacagtcctctgcccctccagctcttagttccttgtcagaaacccccaggcccttcattggctcttcttgggcatatgaatgttggggatgaaaaccctctatttttggataccagatccatcttaaagttagcccttcatttctgtcctcatccacccattcctgcattccatacctccaaccactaggtcagctgccagatatcctccaacccagctgtgatcatgtcatcccgcagcttaaaaatctccaatggttcccccttggttccctcttggttcccccagtaaatccaaactccttaactcggtgcacggggctgtcctgtcctggcccttttgccagtctgtccacctcaaccccaactatattctgtgctttagccatatgcagtctcagtgttttgcaaatcctgtgttccttaagcctgtttccccctttcaccactgatacatgttagcccttcaccaaatagcccttcaaggtccttttgcctcctctccctcctag

SEQ ID NO: 588868 - DNA, 4001 bp, Homo sapiens
gccagccagatagacagatgggagaggcaggcgcagccttcgttgtcagtagttctttgatgtgaaaggggcagcatagtcatttaaacttgatccaacctctttgcatcttacaaagttaaacagctaaaagaagtaaaataagaaggcaatacttgtggaatgtacaatgcatattggcggtgcacgcctcattacgattcgcttgcttgcttctcctgttcaatcgtttctttggaaggcagtggatttttctcttgcatctctgtcttcttcagtttcgacttatcgaatttctcaatctcagccatatcgggtttgtcagacatggttgcggaggaaaagcggagcgaggcatgcgagaacgagcgaagtctggtctgcgcagtggccaccaccgagttgtcctgagacgtgttctaagaggcttttctagccaaaacatgacagttcactcttctgacatccagggtccctaaaaccggatggcctgggggtgggtactgacttaagagcctctggctcgctggcagtggtggctcacacctgtaatcccagcactttgggaggccgaggcaggcggatcatgacgtcaggagttcgagaccaccctgaccaagatggtgaaaccctgtctctactaaaaatacaaaaattagccaggcatggtggcacacacctgtaaccccagctactcaggaggctgaggcagaagaattgcttgaacccgggaggcggaggttccattgagccgagattgtgccactgcactccagcctgggagacagagcgagactccgtctcaaaaaaagaaaaaaaaagtctctggctcgactccccacccagaacccagggaggttctgtggatgaccaggccaagtcaaaggggcagctccctggaaaaggagccctgcttggtccctgcccatagactcaggtatcgcagtgcgtctgttggtctatagagggcgacccagaaaacgagttagagcctggaagtgcttgaaaggtgaccgcccagggggcaaagctgattgagggaggcgaggaggaccttgaagacaccaccacccatcacacagacacacacagccactcggatgaatctttggggtctagggcttaggggaaggcgaatgacttgactgtgcttcaggggctgggttgagctaggactcttgggttctattcctggagctttgaggactcgatcaaggggacatctgatgggactgtttttctccgagttttcctgttcttgggagtagatgaaggtcacaaatgtgaaatggcctgagagcctccaagccaggaaaagggaatggtctggaccacaagaagccctgggagaccatctccccctccccctcgcgaaaagcaaaagccgggggcgggggaactgaaccagagtcctcaaccccaacgccagggtccagggtcctcagatctctggcctcccatagcccgccatagcagaggggcaggaacctgtcctggaaggctggggcaagaagaggccagaagagggtgactagttccctcgggcccctgtcccgggtcacgcgtgccgccctcgcccctagacagcaaggtaacagtgcgtctgtcggggaaatagcgccgcagggcgcgccccccacctggggtccgcaccgccacctcgcccgactcggcctggcacatgtccccacccgggaacccaccagcccggtctatgctcacccggcgtcggctccgccgcgcggcgccccgtccagatgcggcccggttgcagcagcgtagacagcgtgaggggcattagccgcccctggacgcacggagccgggtctcagcagggtttagccggctctgcgccctgcatggcccggccgccccgccagccccgcccgccgcccggccccgcccgccgcgctcctaccccgcccgcctcccgcaccccaaacctgctgtgccaggccgcagcaccgcctgccgcaccttccccgaagccggcaagccacagagccggcggcgcagcgcagccccagcgcgcctgacgccgctcggccccagcccgccctgctcgcgcaacggcttcgggcggcgccgccgcgcggcacgctgggagttgtagtccacgccgcgcggccccacccagccgaggagacccccgagtccgcgaggagacaggcgggcttcaccccggcccttcctccctgccgaccccggcccttgccccctgctgtccccagcgcccggatgtaggaagagcaccccagtccacaccacagccgaaaacccggagcacgctctcgggccccggccgagttcagcaaacacccagcaccacacctagaagctcgctaagagggcggtttcaggcagaggtgagcggggcggccgggttccgcagccggctctgtggcgcaatggatagcgcattggacttctagctgagcctagtgtggtcattcaaaggttgtgggttcgagtcccaccagagtcgaattttgatggctcctactccctgactttcacctgcgtgttttaaggactccaggacctatctaacaaataaggttcagaacgaaaatcataagtcacacccaactttgctgcgacacagccataaacctggtgtctaggtgactacgagaaatcctttctcgtaccatggtgtcttgtgagcagcctggcacacctgttggcacaaaggacacggatttggaggcccttagttaacttcaccatctatgatctctggtccctgcaacaaatcagttaacctatatttgtcatgccacccttatttgtcatgccacctccagagccataggcgagtggccagattctcggccctgttgggactcttggcctctgaaaaattggtttcttgttaagtaaccatgttgggcatccacagttgccacttgtccttaaacattaatagatccctgggaggctgaggcaggagaattgcttgaacctgggaggcggaagtcgcagtaagccgaggttgcgccactgcactccagcctgggcgacagagcaagtctccatctcaaaaaaaaaaaaaaaaaaaaaaaaaaaaaagattctgggactggcgtggtggctcaagcttgtaatcccagcacttttggaggctgaggcaggaggatcacttcagccaggagttcaagaccagcctgggcaacatagtgagactctgcctctacaggaaaaaaaaaaaaattagccaggtagctcttgcttgtactcccagctactcaggaagatgaggtgggaggattgcttgagctctggaacttggggctgcagtgagctgtgattgcaccactaaactccaccctgggcaacaaagtaagaccgtgtctcaaaaaataaaaataagctgggcacagtggctcatgcctgtaatcccagcactttgggaggttgaggtgggcagatcacatgacgtcaggagttcgagaccagtctggccaacagggcgaaaccctgtctctattaaaaatacaaaacttagccgagcgtggtggtgcacgtctgtaatcctagctactcaggagctgaggcaagagaatcactgaacccgggaggcaaaggttgcagtgagccgagattgggccactgcactccagcctgagcaacagagcagtgagagcctgtctcagaaaactaataataataaaaataaagatgaaattttggtctgataaggatttggacctatttcttctggaatatagggtgcctccttttggggacttgagtaaattccagcaccacatccttcatgggtatcaccatcaggaggcagaatgtgcagtggtatgggcatgagcattgagttcgccttctcagctgaaaggtcaagattcattttgttcttacatataaaaaatgggacatactaattaataatacctcacagggtcagcgtggagatttgtggggagtattttttttttttttccgagacggagtcttgctctgtcgcccaggctggagtgcagtgg

SEQ ID NO: 588869 - DNA, 4001 bp, Homo sapiens
tccccctcacttagcccttagagaagagatcaggatgtgccaccctccaaatgcccacattttggcacaagaatattttgaactgaaggctatgaaaaagaaagcagacacagaaagagctctctgccctcccccatcccccatcttcctaaaagcagcacatttattgatatttcccttgcacaggtgtcccgcttgctcatacaaggaagagagcaacccttatcaccaaagacagagatgccgctgagataaatctgcatgaacaaacctcgataaattaacccttatcttccattatttccacctcccacccccactttattgtccctaaaagcataaccctcttttcctttgtctagtcatttcactatttgccgtgctttgttttaatggtatataagctcctgagtctattaggtttttccgtttcttttatgtgaggctctcatacatgtgagattttattttattattattatttttttgagactgagtctccctctgtcaaccaggctggagtacagaggcacgatcttggctcactgcagcctctgcctcccagattcaagtgattctcctgcctcggcctcccgagtagctgggactacaggcatgtaccaccatgcccggctgatttttgtatttttagtagagatggggtttcactatgttggccaggctggtctcaaattcctgacctcaaatgatcagcccgcctcagcctcccaaagtgctaggattacaggcatgaggcaccactgccagccacatgtgagattttaaatatgaataaaatttgcgtgccttttctcctgctaatctgttttatgttggtttaatttgcaggcctcaggcactcaacctaagagggtagatgaagttgtttcctctcctacacttgtgacctataagtggtaacccgatgcctactcatggagatgggcatcactgtgaccatgggacagatgatcaaacttgggctctgggaagttacaggaatttgtgggtgctggagtctgaactcctgtcaaagcccttttacctccctctttcctttcttggctagcacctcaaagttttgttttgcccatctagcagaccgtaaagtccaagggattgttgacacttgccggtgcaggcttcccatcttctccagagcgcccatgctgagtgtcagctaaggaaaggaagcacacctaaaaacagccctggaaatccccatcccagacccagtcaaaatagcctggtgtttctgacaggtctccttctatgtctctgcgggcacccagcctcgggctgagcagcattaatcactcagtgagttttggttgatgaagtgagactgatttgcgtaatccagctgctctggggcaggtaccggggccatctgacaggggctccaggacttggcttgagtaaaaggaaccctgagacactaccccagccaggatctaaattcccccatttttcccttctcaccagttctttggaaaagtgcctgaagataaataatggacccctgctgtgagccagaagggaaaaaaggcaagagaagaaggctgtcttgtttctaagtgaccatagggatcacaacacatcgattaaaagagacttttcaggtttgtcaacccagaagagcccaagaagaaaaaataatgggcttaaagtgtgccgttaaaaatcgtattgtcctgataatctccctgcttaggtaagaaacttgccaaggggctaaggaaagggcagcttttccactgaaggcctttaacataagaggaaagctctgctcacctggaagcccacgttgctgtagccctcagctctgggggctgctgtactcctcagctccatgctctttttgctgctggctggctctggtctggaggtcctttgtacctgggaaaaagcaccagtctctgctgatgtcagaaagccacctgctgttacagggacctgggcacagcttgcttcagtttggaaacttctgcaataatctcctgaatgactagggctgacacctggttggggtggggcagagaggcgggcgggttggcggggtggaggcatctagtgctggcccgcccaccttattaatcttttcctttatccccatttttggcatcctatttgcactcctggggagaaaactcttgtggtgcacaaaacagaaaaggacactttctttttctttctttctttctttttttttttgagatggagtctcaaaaaaaaaaaggctggagtgcagtgacgcaatctcggttcactgcaacctctgcctcccaggttcaagcaattctcctgcctcagcctctcaagtagctgggattacaggtgcatgccaccacacctggctgactttatttttagtagagacggggtttcaccatgttggccaggctgttcttgaactcctgacctcaagtgatccacctgccttggcctcctaaattgctgggattacaggcatgagccaccgtgcccagccagaaaaggacacgttctctatagtgcttagtgaaatcctctgttttcctgtgggtggtgttaaagactaggagtggtggtggggtggagggtgagtgaacacaggatataaggtcatgccgccctcagtgatcacctactgtataccagggatggatagatggatagatacatagacagataggtaggtaggtaagggtcttggctcttcttccgaacaactcaaaattctatactgaagtacagaaaagttaacaatttgtttagtgtcatttagctaataaagggataatgagaattcaaattcaagtttggttaattccaaaaccttttattacatccctgcttcagactgggctgctttcaaaaatccagcttacagaaatgccgatatgtgacaagtaaatgaaaggtgaccagctattcaattatcaaaagtgaatagaagtgctttgttttcataaagcaattcactttgctttatgaaaatattagctgtagaattcttttaaaatagggattttcccccctagtacaatttaaaatactgcaaaactgtggacaaaagaatggaaaaggcctggtgcggtggctcacgcctgtaatcccagcactttgggagcccaaggcgggtggatcactttaggccaggagttcaagaccagcctggccaacatggcgaaactccatctctactaaaaatacaaaaattagccaggagtgataacgtgcgcctgtagtcccagctactcgggaggctgaggcgggagaatcgcttgaacccaggagacacagattgcagtgagccgaaaacgcaccgctgcctcccatctggatgacagagtgagaccctgtctcaaaaaaaaaaaaaaaaagaaaagaaaaagaaaaagaaaaagtaagaaaataccaagtattatgagtggttatttctcggtttttaattttatgggcagttggtgttttttttttctccttcaaatgctgctgagttttctataaagagaatgatttacttttattattgttaacctaaaggaaaaaacggagacaaacttaatgtaagtatagagtttatttggtctaagtttgagattgcaacttgggagcacatattcaagttgctctgaatatacacttagtagcagttacaagtagattcttgtgtgtgtgtgtgtgtgttctgttgcccaggctggagtgcatgatcatggcttgctgcaaccttgacctcctgggctgaagctatcctcctgtctcagcctcccgagtagctgggactacagacaggtgccatcacccatggctaaattttttttttttttttggtagaactgggggcctcactatgttgcccagacttgtcttgaactcctgggctcaagcaatcttcccacctgccttggtttccaaaagtgctgggattacaggcactgtgcctggccacaagtgaattttaaaggaaaagaaggagtttctgagttgtttaccaattatttacattaaaataa

SEQ ID NO: 588870 - DNA, 4001 bp, Homo sapiens
tcactgtctgggcttgttagtacctgtccttcttgggaagggtttccagatatttgaaaggtctagagtgttgtaatctaagctatatctgctttgggggacaccccaagctcagcaacactgtggttcttgcagacttgtagaggtacttccttgatggtcttggacaagatctaggagaattctttgaattaccaagcagagactcttgttctcttcccttactttctcccaaacaaacagaatctctctctctgttctgagccacctaaagctgggggtggagcgacacaagcacctctgtggccaccaccactgtgactgtgctgggtcagccctgaagccagcacagccctgagtctcacccaagaccttctgtaaccacttcctggctactgcctatgttctgtcaaggccctggggctctacagtcaacaggtgacaaggctagtcaggcctgtgtccttcccttcaggtcagcaagctcccccaggcctttggtgggtccagaggtgctgtctgggcctcagggagtagaatgaaaaccttagaagtctacctgcactgtggctgagctggcactcaaaccataagacacagtgcttcccactcttccctcccttttccaaaggcagaggagcctcacttcatagccaccaccaccgcaggccacggggagtactccacaggaagtactgccatactaccgccaatattctcttaaggcccaaagtctcttaagtcagctggtggtgaatgctgcctggcctgggactcacccttcagggcaatgggctcccctctggcccagggcaggtccagagatatccacaagccaggtcctgaaatatgtgaccccaaaagcctgcctggtgctttgcccatttgtggctgtgctggtatctgaagctagcaagtttcagaggctcaccctaggcccttgattgaaggggtcctgcccctccacacctgtgggtgtttctcgtcaggtggagacgagagactgagaaaagaaataagacacagagacaaagcatagagaaagaacagtgggcccaggggacccgcacactcagcatgcgaggacctgcaccggcgctggtctctgagttccctcagtatttattgatttctattttttactatctcggcaaggggagtgtggcaggagaacagagtgatgatggggagaaggtcagcaggaaaacatatgagcaagtaatctgcatcataaataagttcaagggaaggtactgtgcccggatgtgcacgtaggctagatttatgtttctctttacccaaacatctcagtgtagcaaagagtaacagagcagtatcactgccagcatatctcgcctccagccatagggcggttttctccatctcagagtagaatgaatggtcggcttcacacggagacattccattctcagggacatgcgggaaacagaggccttcctcttatctcaaccgcaaagaggccttcctctcttactaatccgcctcagcacagaccctttatgggtgtcgggttgggggatggtaaggtctttctcttcccatgaggccatatctcaggctgtctcagtggggggaaaccttggacaatacccaggctttcttgggcagaggtccctgtggctttccacagtgcatcgtgtccctggttaataaaggacggagaatggagatgacttttaccaagcatactgcctgcaaacatattgttaacaaagcacatcctgcacagccctaaatcccttaaaccttgattcaatacagcacatgtttctatgagcacagggttggggctaaagttacaggttaacagcatctcaaagcagaacaatttttcttaatatgatcaaaatggagtttcttatgtctttcttttactacatagacacagtaacagtctgatctctcttcttttcccccacactgatacagtacctgggtatcgctgctggttgttcaggtcccaagcgctcttcatttagcagatgctgaatgctggccggactgggtcctttccttcaaggtggcaggttcacttctgactcagggtgtgtctagaaatgtcatctgggagctggggcctggaatgggggcctcacaactctgcccagtgccctatcctgctgtggctgagttggcatccaagatgcaagacaaagtcctccccactcttccttctctcctcaagaggaaggaaggagtgtcttatgcagcggagggctgtgcagcctggagttagaggaggggcaccccagctggtgtctcagtatgtcacatgccacacccctgcccccccaccaagtccactgtctctgggcccagttcagccctaggacatgaagtcatgtcagaagaactgcaggctggtcagggtggaggaactggggagagggggtagaagatgaagtcatgccaggcgtggtggctcacatgtgttatcctagcattttgagaggccgaggcaggtggatcacttgaggtcaggagtttgagaccagcctggccaacatgatgaaaccctgtctctactaaaaatacaaaaattagccgggcatggtgctgggcacctataatcccagctactcaagaggctgaggaaggagaattgcttgaacccggagcggggcggaggttgcagagagcaaagatcatgccactgcactccagcctgggcgacagagcaaaactctgtctcaaaaaaaaaaaaaaagaagatgcagtcagatgaagatggactctgtagggcatggcatgatcacatttactttttttttttttttttttttgcctaagatttgcagcccttacggcctagactgtctttaaggttttttagagtcccagagcactgtagccctcagtggtgaggtttgtgggaactcaagttcagacagctggaataggcgattcccctctggctagggctggtttgaatgctcccccaataggtgggtgttagctgagtttggtttagttttcctttctgctctaacagaacagcactgagttcaatgccttacaactgctgtttactccctccctcagtgcccagagacgcgctccgcaccatgctactgctggggtcaagcgtggaatggaggggtgggggtactttgagggctcatgtgattttttggttcttttttttttaacttttaagttcaggggtaatgtgcaggtttgttatataggtaaacttgtgtcacagcggtttgttgtacagattatttcatcacccaagtattaaacctattatccatttgttatttttcctgatcctctccttcctccagccctccaccctccagtaagccccggtgtctgttgttcccctctttatgtccatatgttctcatcatttagtccccacttataagtgagaacatgtagtatttggttttctgttcctgcattagtttgctaaggataatggcctccagctccatccatgttcctgcaaaggatatgatgtcattcttttttatggatgcatagtatgctatggtgtatagatattgtatttttttaatccaatctactattcatgagcattgaggttgagtccatgtctttgctgttgttaacagtgctgcaatgaacatatgtgtgcatgtgtctttataatagaaggattatatttctttgggtatatacccagaaatgggattgctgcatcaaatggtagttctctttttagatctttgaggaattgccacgctgttttccacaatggctgaactaatttacacacccaccaacagtgtataagcattcctttttctctacaacttcaccaacccctgttactttttgtgtttttaataatagccactctgactggtgtgagatggtatccatcgtggttttgatttgcatttctctaatggtcagtgatgttgagctttttttcacatgcatgttggccacatatatgtttcttttgaaaagtgtctgttcatgtcctttgcccactgtttaatggg

SEQ ID NO: 588871 - DNA, 4001 bp, Homo sapiens
gaacatgatgctcagcttccggcccaggaggtcgttgaggatcatggcactcaggcctccggccgctgctcccagggtgaacacggactgcaggggaagggggtgcagggcagatatgtctgggcacttggcaccccaatctcatcagagtccagggacagcttcttccctaggccgaccccaggagctggtcaagcacttggccaagtcaagcacttgaaacagggagcctcctgtcttcaaggaacagccatttgttagggatgcccaaacggggaattctgctctaaggaagaggtgctgcgccacatatccacagtggttctgtccagcctgatgtttaaatgtctaatattttaatacaggagaattctgtgacttgaaggtactgggctttaagatttggaggttcttaagttccctgtacagcagcaactgggaccccctctggactctgctaactggtagtgggacctgggcacattgcccagcctgtctgcacctcagtttcttcagctgtcttatggggagagcgcaagttctacctcgtggcgttggccctgagaatcaatgaacgttcagtgcccaacacatgcctggcacataggaagtgctcagtaaaccttgggaatttttatcttaactactatgttaacaactctacatatgaggctattaagattataattttagactctgggactctgggatcttcctctccatcagcccacaatctgtcctgcggactctccttgccccagccagtgcctctccccactgacacctgatacccttgcccccatccagccaactgtgggtgtggggacccggggaagcctcagccccacctagtatagaccctgacagccacctccccacctgctccttccctcaccctctccactggctttcagttcctcatttcagaggaatcctgtagctttaccccacccactagtggcctggatggctgggggaggggggaccagggccctggagggacccccaaggtggagaatttgggaggttcctagctggagataaggctcagcaggtccctccttcctgcacccaccctcctccagaggatggtccttaccccaaaccaggatgcctgggatttggtcagatgcaggtcaggatccaaggagcgctccagggctgggatgacaggggatgtgtagaccagggcatacccaaagctgaaattgccgagcactgcggcgaaggtggccaggaacacccttttgttctgcagggtcctggtgatggtggcggacaaaaagaccagggtctctgagtccctcctccagggaccattgccttttctgaacccagtggctgcccggctcagcgggcagtgctagggaggcctgggtccaaggccattcacgttcccagggcctgagccccagctcccctgggaaattcccaggccattgttagctcatccgcagtggctgagcctctggtgctggggccttttctccggaagaggaggctctggttctgcccccagggcggcggctggaggcttgctgtgtgacctcaggcagaacccctgctcgctggggcctcagtctcactgtctgtggcagtggggggctgggcccggtactctcgtggatcgttccttcccttagggggaccagttccttaaataggagtagcgtgtctgggacaggagggagccagatggcccctcggtggcgactaggtcaggggaggcccagggcgggagcctgccgccggctggagggaaccagggccacccccaggccccacccgcagcccccaacctagcgactctcacccgacccgcgccctgtcccctggcgacgggggcggcttctcggggaaggtgtcgtagtccgggccctcggctcccagcagcggctcctgcatggccgggtctctctcggggcgagcggagggcgctcagactggagcagccgcccggggccagcagctccgagggcaccggccaggctccgccccttggccgctattggctgtgggacggccctgcagagacacgccggccaatggggcggccgcaggctgtcctgatgctcggatgcggacccggcttccccgggcgcggccggcaccgcgtgcgcccccgaaggtcacgccccaagacaggatgggggtcccagggcggagcccctgctggatcgtccggggcccccgcggagcgccggaagcggctcacccggcccggctcttgcaggcgtgactgcggcaatgcgcgcagcccctgtcgtactcgctcccgcggggtggaaaccgaggcccagagaggcgaagccgagcgccagggtcacagcgaatgcgcacctcgctcctccttacgctctagccctccccgtcgcgtggcgtctcagggccacctctgccctggctctccctggcaccagggaatcggggtgtgtcagggcagcagcggatgtgcgggacgaaggaggcaggaggggccggcgaggcgctgtgggcagctccagtgggcgaggtctgtatcctccaccccaggctctggtggtagaaataacctgagctcgtgacacgtaacccaggtagtaagataacattgaaaaataagaaaagcagaaatggaaaattcccgggaagaccgtcctcaaaaaatcccacagcagttccacctctccctttgggccttttcgggaagaggacggaatcacgccctgctctgttggatggacgtgccacacacgcttttaaacggagcctttgttgctgagtatttgggtcatttcccattttagctattaacatggtaaagcatttttaaaagttagaattcccttttattatgattgaaatacaaccataatagaacaataaaatcacatccatctcccgtcagcctgaccttgatggcgttttagcctcttccagtcttttcctcatgtgcctattttgcatatttgctattggggcccccattaaactgtgcagcccctttacgtcaccgttttcttgccatcaagatcataggctttggactcaggcacaccctggtatggtgatcaggctgcacagtcctcgtggccatatatatacgtatatacatatatatgtgtatgtatttttacatatctatatgtgtatttttttttttttttttgagacggagtctcgctctgttggccaggctggagtgcagtggcacgatctcagcttactgcaacttccacctcccgagttcaagcgattctcctgcctcagcctcccaagtagctgggattacaggcatgtgccaccacgcccggctaatttttgtatttttagtggagacggggtttcaccatgttggccagcttggtcttgaactcctgaccttgtgatccttccgcttcagcctcacaaagtgctgggattacaggcgtgagtcaccgcacccggccttctctttttttaaaatgtattttttttcttttaaaatcaactttaggccaggtgcagtggtgtgtgcctgtaatcccagcatttaggaggccaaggtaggagaattgcttgatgccaggagtctgacaccagcctgggcaacaaagtgaccctgtctctacaaaaagctaaaaaagttgtccaggtgtgatggcaagtgcctgtggccccagctactcggaaggcagaggtgggaagattgcttgagcccaggagtttgaggctgcggtgagctgtgatcacaccacagcactccagcctgggtgacagagggagagccttcttgaaaaaataaaatacaagaaaaatcaactttgttaagctataatttatatacagtaaaatgaatccattttaaatataggttgatgagttttgacaattgtataaccccaaacacccccaatcaagatataaaacatttccaccttttctttctttcttttatctttttttgagacagagtctctctctgttgcccaggctggagtgcagtagtgcgatctcggctcactgcaacctccgaccactgg

SEQ ID NO: 588872 - DNA, 4001 bp, Homo sapiens
actaccagtggctgccactagctccctcctgggcccacaggccaccaggccctcacccatgcatctaaggttattccatagcttaggcccctaacacaggtgtgtttctgcccagttaaaaaaaccaaagacataaaaggcccagcttcttccccaccctcttctggtccagctgctgctgccggttagcaaacgttggtgaaatgagcacccagggaggggcctgagtggctgctttcaacctcacttgggggagatattgtccaagcccatggctgggggcagttcatgggtcaccaagctgtcaggatccagtcctctacaagccatgccaggggctgtctatccaaagtcccactgaatcctgaccactacctcaggggctaatgccataatccctgttttccagagaaggaaactgaggcccagggaggcactctgctcaggttagtggcagaaccaggatttgacccagatgttcggggctcccaagtgggcagcctgggtcaggagggggaaagggggaagatggggaagccagaggggctggcctgtgagaagggaaggggaacacagaggccagcagcctttgccccaagagaaatcaggacaggaacttcctgctaattgcagtcattgacccgaagccagggatgaaaaccaaaatgtagggagtgggctcctgtggatcatccgcaggtttgcagagcaaaagaggggcacggctaagtgggacaaccctgggttcctgcaactgcttcccctctgactagctgtggacctcgcctgggcaaaggacttcacctttccgagactgcatgtcatgacctcagtgtaaaatggagagaacagtaggatccttcccagggtcgacgggagggaccgcgagataacgcagggacttcaagcctggcacccagaaggtcccgccagggggagccgcgcccccaggcctggggagcggtttgtcccactccccctcggtctcaggccgcgagacaggacactcgagagacgggacactcaccggggccactagggaggcaacaccgcaggccaggccggtgaggaggcggccccccagcagcatccacacgtcctgggccgcggtgatgacggcaaagccggccacgaagggcacggagcacagcaagaggctcagcttgcgcccggcgcggtccaccagccagccgcccagcactccccccgccgcggcacccagggtcacgacagcctggaggcgggcggctgctgaggagggggcgccgaagccgcagcccatcctccccctccacccactccccgcgggctcagaggtaaaagagccggggccccgcgcccgtcccgaggggaggggtagggggctgaggggcccggtgctcgtcccgaggggaggggtgggggctgaggggctcgatgcccgtcccgagggaagggatggggggcagagaggcccaatgcctgtctcgtggggaaaggtggtggcggcggggcccgatgcctgtcccgaggggaagggtggggggcggagggtcccgatgcccgtcccgagaggagggcgtggggtcccagggcgggaggagcgagcccggggcctcaccccgaaccaggaggcggcggcgtcgtccaggcgcggggccgggggcgcggcgcgctgcaggctagggatggccggggagctgtagccgagcgcgaagccgaagctgagtgggcccagggcagcggcgaaggcggcgaggaagacgcggcggccgcggggcgcgctggggggacagggccgagggtgagcggagcggacgcggaggggcgggagggcgaggccgcatccgggcccgggttccccggagctcacctgccgccaggaggccccagaagcggctgggtttcctctgggtcctcgggcgtcatgtcggcggccaacgccgatcggccagctctggcgcctgaaccgccacgggccctgcgagtgcggcccgcaccggcctctcgcagccaatgggcggcggggggtgggggacggtgctgggcgggatcggaaccgcagagcaggagcagccaataggaacgcaaggcggggctagcgaatcagctaggacccgcccttcacattaaagcagaccaatgggagcatagaaccgattagcgaagcgcgctggaaccgcccctagggcggagcggtccaaggtacaggtggggcggagtttccgtctgggagaacaaccacccaattggagtgtagtgcgagcccatagacggggccagagagctgcctcagaactgagctggccaatgaggttggagggaggagttttttttctggcacctcctctcaatctggcttcaaccaatgagggtagaggcggggcgaaggcgaagcacgtgggcctcagcccgagacttcccgcccccaactccgagaagctgcacctgtcctgcccggtcgggtctgcagttcctgctccgctttaatcgctgccctggggactgtattggaggcgtctgacctatgcctgggcccagctctgcaggggagagagcctctaagcagaccgtcctgggccgcctctctctcctctcggagggcgagactggtcagacgctcccgctgggctgctggcggcggaggcgtggccctgtgcaccgaaacccactttcatgcttcccagattgctgaaggctcgggtctccaggtgctgaggaccagtggtaggtggggtcccccacgccgtatgtgtgacagatctgggctccactccccctcttaagtgtcactcacttcacagggagtcctgactcttgaatcttcatctacctgcctccatattttgagttccctgtggattttaatgccaccttctcccgtgtgcacccaagtcgaatgatgaggcactgttggatctcaccagttgtacccgattcatacccaacactctgggtgcaggcagctgtggtggaatgctggtgtaattctggaaagagccagggcatgggagtaagaggcttggcttgtaatccctctctgggccttgtgtttcctcatctctaagtggggatgaccattatcttccaggagagttgtgaagcaaggtaatgtatataagacatgtgaagcactcaaaggctaaccggtatgatgaagacagtcatctgatatgttgcagtcacttgatggttctagcaaccaacatttttcagtcctgaccacaagcctatccttaaagacttaggcaactgcccttctgtactcccacagcatctaatgcttgataactcgagcactagatgtgtattcttatcacagcatttatcactgctttgtgatcccttgtttacttccgtccttcccccaatggacatgacctcctctggagaggaggcacttggtgtgtgcagagtggatcaatgcctccaactccataggcagacactgcagttagatgattttctgtgtgactcagccagtcgggtacacagaaaggattatgtaggcagggtgctcctaccctgtggccgatggcttcccttcccgtgagtgtgcagaactcacttcttggcctttgtagacaaataatgttgccagaacagcctcctgcccccttttcataggcaaagcaccatcagcctgatcagtagggtccacctcttgcccttgctacatcactcctcagacctgtgactcttgtcaaattgtgggtggctctaatgctgctgatttggaagaatgctctaaaatagtccttgggttttttttatgctacactgtgaagcaagaaacttccagaaaaaaaggaaaaacacagatacaagctcataaagcttacaaattagtttaacatgaaaaacaccagccagatccagctgacacaaggcactgagcctggctctgcatggcagacgtggggaaagcaagggctctggagtcaaagaacttgcaggttcaaaccattgccccttcctaagcctatttccttatttgaaaagcaagaataataaaacataat

SEQ ID NO: 588873 - DNA, 4001 bp, Homo sapiens
acctttgtatccccagcagttactcagtagaagtccaggtctaatccactcattttacagtgcttagggagcctggcccaaactcagagtgagttataagggctgggacaggaattcagatttcctgattcctagtccagtattaccaatctgaagatacacgaatttaggaagacagtggctttctttttttttttttttaggtgcacccagtcctgcagttcaaagcctggcaagactcaccatcatcttcctcctcctcatactgctaatgagaatcagcagctgtgtttctacagtgataatctgcgtatgcatgttcgtgatgttccaatcaccaaaaaggctattgattttaggattcctgagtacctacaaaagctacttaaacatccaggataaaatcagctccacccaagaatacaagataagagttcaaatattcccttggccattttttttttttaaagaaaaggctggaaggacatgtcataaacacctagaaagattctgcagtgagactgctttgcaagtgactttaagtattcattccatgttaaaaataccatagataatgtaagccaggggctagcaagctctttctgttaaacatttagatgtttcagtgctgcaatcacagtgaccggtgttggggagagggattagaaagtgccatggtacttaatccagttactcccccaacacctccaagaggtagccaagttcacacactaaacagagctactgcaacagttctagtgctagtccttagattctagttccagttccggttctagtgcttagattccagttgcatcattccaactgtgagccttcgctgctttaacatctttgccaggaggtgcaaagttctctgggagggagctaccaatcatttcatttcaatttcatactgacagattgaaacattcacgtaagggacacctgtagtaccaacctgactgtgaggggaagcccaagaactccagtgagtctgtggacgctacgctgggacactatctccttagccacaccttgtctaagccaggactaccccaggattgtttcgagaatgataccaggttaaccaaagaaatacttatgtaagatacagatagggtggaaactggaggcagaggagtccgccacaattgatgttgatttagggctgtcgcaggaagacccagggaaacccacgccaaagttggggtggggatgtgtctgcctccaaagtatcctcctttccatcacccaccgccagaatatcttagctcttctgcacctcatccgcgtagaatacaggtggactctagaaaggggactttcctcgaggtgtatgctacagtctttcaatagtcactctgtaagggcacacagtgcttaagggctgataaggttcttgttcacccactagctcactatgtcctgaatcaaaggacgaggaatccagtctcagtctgccctttactctttgtgacctcggactagtcacccgggtgcttagttccttcgtctccctatctgtaaattctgagattacgaggaggccgggattgaaatccatggcctctgagctctaaaatcttctggaccagcaggcacatggaagaactggacaaatggccggttgcatacacggggaaactgaggcaccgagcaccccggcccaaggtcactctggctatgccactgcaggggccgggccgaagccccagtctttaaccctccagtcccgagctctttctccttccgcggagctgaggaaagcggcgaggaaggtccttgtcccgctgggaaaaggacggtacccatgcacaggggtgcgaaagaggggccgagagaagccttacctttccaggtcaagtccagccactagcacctctctctccgaatcttaacccgtcaccccctcacgactcttcgaacggcccctccacttctacccggctcgacgtgtccaccaccgccaccgaggccgaggatttcccgccccctcccgccccctagcattaccgaccaatccctgcaaggggctgtgaagctccgccccgctgcgggctggagaggcctgacgtcactcggcgctcgtgcccgcgcgagcctctcatttgcctttgccccaccttctccagagcccagtctactttcggtccagagaccgtgctggagttcgccctgccggaaagcagcacgccgccgcggcattttacgacgtcggcggtgacaggccctgggactctgggaatacccagcttcctccccgcaacccggtgaaagccaacgcaatgttcggtgcgggggacgaggacgacaccgatttcctctcgccgagcggcgggtgagtgactgagaagtatgcgctggagggcgtggctgagagataccggcggattgttggaggggggtcgatctcttctcaggccttttcccaacttccggggggagacccttgccacattccggtgctctacacctctcagaatctgggcagaacttgcaactgtgctgaccctgccgatctgaggttcgggacccggcatctctcttggcgggaagatagccctgggtttgccttttgcattctgggtcacaatttctccggtgaaatgggaatgattgctgatgagacttcctgcctcagaatttttataggagtcagctggggctgatgtgagacttcttttctccatggagaaggcgaagacactttagaaccaggccttggtgggtcagctctagcattcttcaaggcccagctcggatgtcacgttttggatgcttttccttctgcaacctcaggcagaatgaattgctttctcttccttattcctgcagctaggtgtgtttgcctctattcttataccccgcacctattagattatgagtcctcaccggacagggactgcttatggtgttcatttctgtctagcatgcagcatggtacctagcacatagtgagtgctcaggaagtggctgttgaatgaataatagctgcgaaattgcactttgtaaagcttaaagcttaaaaccaacgtaacagacttctgtcattctccagtttccccaagcattatattaatatataccagcctggaatagaaatctttaaagagaggaagggttttgtctcttttagtagtcagtttagccttttccattgtgttgtgccagtggacagcttgacttcctccaaacttgtgagctaccaagctctgatcattgcagagcttttctttgaacatatgcttaacaaattttgtgcgtgctgaagaatgtactggaaaaatgacaaatgcaccacatatgccccttattctgctaaatgctaagaggttacaaaaatgattaaactgctgtgcctgcccttaagttgcttccagatctgttgggccatgtggtttctattgcaaccacaaatactcagttctgccttgtagggtgagagtagtcatagacaatacataaacaaatgagttaatagatgaatgaccataaaatgacactggccttcttttgtccttaagtaggaatttttgatttacactgactagctctatattacctaccttttagtctttttcactctcaccactctgttcccttcctaccccgtctttagatggcctgcattcacttagttccactttgagttctttccgtttctcagttattttacagttaagctgtgcttttgttccttttttccctattccactttaaattcgcattcttcactatgtgaaagtatttgggagaagtctgtaatgttagggctcccaattttcatgcaacaatcagtccaagctgactgaaaattatgggataggtaatgacagccatgtgctcttttccagattcctggccagagataaattcttggtggctcaactattcttttttcctgagcaggcttctcaaggatctgagacacttgaattctaggcatgtgactgtgctcctagacatagacaacagctaatttgatggtaaaagacatactg

SEQ ID NO: 588874 - DNA, 4001 bp, Homo sapiens
cttctctgagtccatttggtaaagcagatggtatgaatggaatgtccctagtggctaattaatcagtcagggagttgccataactggtttccttctatcatccttgggcctgggccagttatcttaggagcccaaaacagcccagacatgttttgccatagacctgaacacccacagaacagtaagagtaatttgaaagatttctttttgttgtgctaggtctgtgcagaccctggcgatacagagatgaatgggacaagtctttggcccttagggagctacctgtctatgaggggggacatttaagtgagcaaataattacaacaggttgtaggtcagagaaagggaggcacagtggaggctccctgggggtgctggggaccaagccgcctgagagacacctgccctggccagagagcagttggctaggatggttctgaagccagagaagcaggagatagctgggaagatgaactgtatggtttgttcagagctggaaacacccacggagtccgaagccccagagggacgaagactcacctgtcactcaaccctttctacttttgcctttttgctagaggaaaagatggaagtcagcacaccctgacttgagagaagcgatctgggctacagttttcaattaaagggctttgtggtcagataggcaaggggcagggccccaatcttgttttcctacttgggatgaatcttggcctctgaaagtttaactgatttgtgcttttttcagggtggggctgtggtgaaggagggagcaatccctggaacttgttttcttctatatttcttcatttggggttacttacactttgagaaaagcttccttatttgtaaacaagggttgggaaggagatgaaggtcccagttgctaggctgactggctggggaacttttgcaagtgctttccatctatttccctttttaaaggacggctgatcatttcactaaatggcctacatacacttcctatatctttttttttttgttttgtttgtttgaggacgtcttgttctgttgcccaggccgaaggtcatggctcactgcagcctggaacttctgggctcaagcaatcctcctcatcctgcctcagcctccgagtagctgggattacaggcgcctgccaccacttgtggctaatttttgtagagacggggtctagctatgttgcccaggctgagcttcctgtatcttaaattctatgacattcttcatgggatgaagaaaatgatatgacttcttcaaagacgaacgagtcttgcaagctgtcgttctctccagcccaggtgaaccctaccaagaaaaacagcttgtctgaaacgctgttttctgactgaaagtgtagggaagctggaaagtagctggttctgttttattccccgaagaatcaggctacaaacttgacaagagcagggccggggatgtgcgctcggtgtgcgcgcggggctgcgggctgaaatgcgccgggggtttccctttcgtggaagccttcctggaatctcccaaggcgctgctctccgccctggggcgccggccagaggtccggggccgggggccccggacccagctgtcttcagccaccgcgcccccactctcaagccgcgccaccgcgggcgctcggtaactgctcgcctagccggactgcctcccagcaggagggacaaataaagaggaaaaccacagagccaccgcaacctatacctgccgcgtcccccaaccctgttccagctgttggcaatgctgccaacacacccttcaccagccccgggccagcggcagcgaggattcggggtgccgagatggcagctccaggagaccccgccccaaccgcccaccctcttcaccgtagcgcccggcccttaccgccatggtgagtgcgcagggcgggcgccagggccgcgtctgctcgctcgggtctcctcgctccgagtcagttcaaccgccgccgccgccgccgccgcgatagctaccctggccgcacggatcacgtggtccgggcgaggcggcgcgcgggcgcctgggagttgtggtccccacacgcgccctacttcggcgtcctcgggcgcgccccctggccgagacccaggcgcctcgccccaggttcccaagggctgaggcttggcgttcccggagtcgcgagcgagagggaccacctgctgccctctgtcttcgcccttcctgttttgcacttggcttgtcttggcgattatgagaatgtttattgctcattgtaataaactaccccaagcgtaacatatattgagttgaaatgggcaagtccgtgctatggacgcaatagcaacacatttggagtaaattaagtcaattatgccctagatttttagtgtagtcattacaagataattacatttttctttttagaaaaatattttccaatctgataagccaaaaggaatacacccgtgtaattttgtttttctttgattactagggtagtaaactatttttcttacgggtacttccatttctgtgtattgcctgttcatttcactgatccagttttttgatggggagtttcttgtagggtgagggatttttaatggttattgattcttaagcatatttaggaaccctttgctaatcagcctatgagtaaagaggctcttcagagaaaccttactaaggacagtattagcagagaccttgagcctggagctaacctcagttcacatccatacgcatcaactattggctttgggaccgtaggcaaatagcttacatctctgaacctcagttttctggtcagtaaaatgaaaataataataaaatctatgtcatagggattaaatgaaaacatacatgttaaattatcatgtaacctggcagtgggagcttgttcagtaaatggtagaatcctcagggtcacacagctttttttcttttctttgaaacagagtctcgctctgtcgcccaggctgtagtgcagtggcgcgatcttggctcactgcaacctccatctcccgtgttcaagcaattctcctgcctcaggctcccgagtagctgggactacaggcgcgcaccaccatgcctggttaatttttgtattgttagtagagacggggtttcaccatattggtcaggctggtcttgaaatcctgacctcgtaatctgcccgcctcggcctcccaaagtgctgggatgctgggattacagacgtgagccatcttgcccggcccacacagcttttaagattctcagtctgaaagctaatggagcagcttcagggagagaacatgggccgtggcactgtgatggggctggagagggagagctgctgctgtcatggtttactgggccatggggaagcactggggagaagggctaagggtatctctgaagcatctgggttccaagagctggggagggctttgggtgtagcttttcacctctctgggccttacatgggaagcaggagtaagataatctgaccttcacataagtgggctctggtgcaccccactccccccacctgcattgaagaatctgcaacacagctttattcatttgacggtttttgttggctttgtcacaatctgatgacctttacacttacttctaacttcctcatggatgttttggttacaacacttagccagggagtcctaaaatttctttctgtaccaccagaggcactccttccctgtcccccaggcagagagcttgttgcaaaccatgggatcctagatcataagatcacaacacagccacccaagcctgggtccatggcaagagattccggattctgtgttttgacagcccatgactcccctcctttcacggagcaatagtctgttgttgtctttccatagcacacctagaccccccgagacagaatccccactcaggaaagatggcactgccttgagtgtcacaaagattatttagaggccctttaacctgggctcatttgtagtcagttgatagagcggaaatccaaccagtcatttctccttctgaggttcagt

SEQ ID NO: 588875 - DNA, 4001 bp, Homo sapiens
agctgcggagggctggttgcccgccccgccctgggcacccgtcccgtcactcactgcccagcagctggaaggcggagctgaggacgtccagagagcagatgaagaagtacaggctgccgaggagcccgcaggccttgaggacgctgccggccacgcggcgcagcctgccggccacgcggagctctgaggacacagggcaggctgtccctggctggccctccaccctgacaggtctccctcccaggcccctcattctctgccccctctctcctctgtctccaacagggctgggtcccatttcctcctcttccgtaacccccagggcagggcccgggttcctgcctttccaagccagaagcccttgggaccctccctcgcaggagcaggaggggagggacggatgggcagaggtggccggtctgccccaggacagcacagacacccggttgagggacacgtgtctccccagagggggcctgcatggcggagttccccacacacagcctgtttgggcaggccccaccctgctctgtctccccagtcccgttggggacagaggcctgccagcctgccacccccggaacctccagacccacctttccagggctggcttgtgtccttcagctgagggagggtccaggggtctgtgtccccttcctccaagactggagcagaactggaggtccctgtggaggtagaattgagtacggctgtttccaggaccacctccctccaactgggggcacaagggcacaggccggaggacgggctgaggcgtaagaggcctggagtgagggacagaaacggaacggggaagatggggctccagctgggctggacctgagtggaggcgtcatgagccctgtgggttccccgggaggcccgcaggaaacctggcctgtctctgcccagtgcctggggggtgggtggtcagactggtgaaggcctggggcacaggggccactggtaccttcattcctcagagtcttttccactaggtcaaccgcgtccagagtggggtgggggacctggctgccgggaagggaactcggcatggatttcgggcagggacagacccaggcccaggtctagatctgctgggggggacgcgcgtgtcagagacatttcctcctgccccggccctgtcctcacaagctggattcacacccctgggtcccctgaattgagcccttggccgccaccctccctctctacgccctgcaggcctcagtgaccatccccctttctccatccacagggggatggctacaatgacctcaggcagttgtcaggcgagcccagtccagtttcaggggtagactcgaaggggctccagctccccggctcccttgctggtcctgactggaaggctagtgccgagggtgcaggccatgagctggggaacctggggacctcccctatctggtgtcatcggggacactgtggatggtcccgacttagactttggcatttgatactaaacagtgacgtctcggcttgataagggccccacgccctggtgatggggagcaggtggggtcctcacaccacttcaaggctcctggccccgaagctgctgccttagcctcctgggcctggtcaccccacccctggggccccccacctggacccctccacctagtgccctgggctcaggtccaggcgtcctgtgcctcaccctccctcctgctgcccaagcctggcgtctcttgcccttgggtcctggagactcaggatggggcccaagcccttggcctggaggccacccagcctcggcctcactgtccctgggcctcagcctggtcctaggagctcctacctgtgtgggtggtgagggggcacctgcagggaggagacacggggcgggagcagttgcaggtcaaagatcccctgatcgcgcacatgacctgctgggtactgagcccattaatgtttacccaggagcccaggccctcacgggggtaccctcctggccccaaggcccctaggccttgtctccatcctgtcactctgtggctaggacctccaagccccagcccaaccctcctggagtggggctcctcccaggggtgggctctgaatcaggccgagggcactgcggggcggggcaccggccctcggtactgggcatcctcagcaggcatccgtgtgacccaagagacacactccacccagccaggcaggatgctagagtatggctggggctgcccgggagtcgagagacgccagtcccccacttccatgcacctcagggctccccagaccttctcagggtcatccctgccctcggcagagcaggggagggaagccctttgcaccaggtggtgggggaggacgggctttttcacgtagccggggagggcacccagcccgaggtcagagggttcagatccgggttcagggcagggttgggcccagcaggctgctagcgggctcggccctggtatagccagcgacggcggccggcagcctccatctgcagaggggaggacagagctccccaggccaccttccccacccgctgcctggcccagcgcacagttctccccagcggagtcccagctggccccaccgcctgtggggtgtcccctaggaggactgggcctcttcctgccctggggtgcggggcagctcccccagaggctcaccctgcccaggggctgctggtgccctgctttgcttgctgcccagcccccgctgtgtgcatggggactttgccctggagaaggtagaagcttctgagtgtccgctcagcaaattctcttccgtctccctcctgcgcccttgctctgggggtggggggcagcagtccttccctggggctcctgagtgacagctcgttccagtgggggtgggggtgttgcagcactgacttggtggtaactgctgtccacagtctggccccagccccagccccggcccctcaaaagggtctgtgtggtggctgctcggagccaggaaaggttcagcgaaggatgagaccaactgggctgtgagacctcaagcaggccccagccctctgttggcctcaggcaggccccgccgaggcatccccttcaatgcctgtatggcttcgtgcctacacgagaccctcccagaaccgcacccgacacacagtgggaactccatgagctttgttgagtgggtgaattcacagggctgccatgcagggcagggaggaaggaggtagtcttgccaccctcccggtacaccccggggacgtctgtgggagaggggagacctgctctgggcagcccgccaggcatagccagaccggccctgcccctccagcctgcagcccaggcccccgggacgccttcgcatcctcttgggagccatcctttgcgctgcgtctaggcccaagccaggcttgccgcccactcagacagcagtgtcctcaccaggcacatccggtcgggctagtctggggtctggtaattgtggccaggacaggtgggaggtcaccagcctcctgcggagcctcccagcccccaaccttaggctgtggcctgggatgttcacggctgggatgacaccaccctgctgggccacacgaagctgcgtataggatgctactgccaggttgttctgagtgggctgaacccatgatggtgtgtggtcaggggttccaaggcaggcatttcccctgcaggggtgggaatggccagagttcagacctcggggctgcctaggggtgggcagcagaggctgccacagccccagcagcagtatctgggctgggggaagtggggctggggtcccagggcagggcacagcccagctggctgccgagtgatggcgctgcctttgagggaggtgaggggcaggggttctagtcttgccggctcccgctcagccttgaccgccaggaaagcagccaggtccaggtctagcatggccacccctccgcgaggcgtgggcgtgctctgacggcactgcggacaggggatccagcgctgctcgggcgccggtgtgtccagccgccgcacacacgcctggca

SEQ ID NO: 588876 - DNA, 4001 bp, Homo sapiens
acccacgcttagcagccaccatgctgaccacgatggaggaggacgtgctggaactctgcaccagggctgtgaccagcacgccaatgaccagtccagccacagggttggacagcaccacgttgtccttgaagatgtctccggccactttgcctacaccggcaagagaggtgcgctgaagctgcggagggctggttgcccgccccgccctgggcacccgtcccgtcactcactgcccagcagctggaaggcggagctgaggacgtccagagagcagatgaagaagtacaggctgccgaggagcccgcaggccttgaggacgctgccggccacgcggcgcagcctgccggccacgcggagctctgaggacacagggcaggctgtccctggctggccctccaccctgacaggtctccctcccaggcccctcattctctgccccctctctcctctgtctccaacagggctgggtcccatttcctcctcttccgtaacccccagggcagggcccgggttcctgcctttccaagccagaagcccttgggaccctccctcgcaggagcaggaggggagggacggatgggcagaggtggccggtctgccccaggacagcacagacacccggttgagggacacgtgtctccccagagggggcctgcatggcggagttccccacacacagcctgtttgggcaggccccaccctgctctgtctccccagtcccgttggggacagaggcctgccagcctgccacccccggaacctccagacccacctttccagggctggcttgtgtccttcagctgagggagggtccaggggtctgtgtccccttcctccaagactggagcagaactggaggtccctgtggaggtagaattgagtacggctgtttccaggaccacctccctccaactgggggcacaagggcacaggccggaggacgggctgaggcgtaagaggcctggagtgagggacagaaacggaacggggaagatggggctccagctgggctggacctgagtggaggcgtcatgagccctgtgggttccccgggaggcccgcaggaaacctggcctgtctctgcccagtgcctggggggtgggtggtcagactggtgaaggcctggggcacaggggccactggtaccttcattcctcagagtcttttccactaggtcaaccgcgtccagagtggggtgggggacctggctgccgggaagggaactcggcatggatttcgggcagggacagacccaggcccaggtctagatctgctgggggggacgcgcgtgtcagagacatttcctcctgccccggccctgtcctcacaagctggattcacacccctgggtcccctgaattgagcccttggccgccaccctccctctctacgccctgcaggcctcagtgaccatccccctttctccatccacagggggatggctacaatgacctcaggcagttgtcaggcgagcccagtccagtttcaggggtagactcgaaggggctccagctccccggctcccttgctggtcctgactggaaggctagtgccgagggtgcaggccatgagctggggaacctggggacctcccctatctggtgtcatcggggacactgtggatggtcccgacttagactttggcatttgatactaaacagtgacgtctcggcttgataagggccccacgccctggtgatggggagcaggtggggtcctcacaccacttcaaggctcctggccccgaagctgctgccttagcctcctgggcctggtcaccccacccctggggccccccacctggacccctccacctagtgccctgggctcaggtccaggcgtcctgtgcctcaccctccctcctgctgcccaagcctggcgtctcttgcccttgggtcctggagactcaggatggggcccaagcccttggcctggaggccacccagcctcggcctcactgtccctgggcctcagcctggtcctaggagctcctacctgtgtgggtggtgagggggcacctgcagggaggagacacggggcgggagcagttgcaggtcaaagatcccctgatcgcgcacatgacctgctgggtactgagcccattaatgtttacccaggagcccaggccctcacgggggtaccctcctggccccaaggcccctaggccttgtctccatcctgtcactctgtggctaggacctccaagccccagcccaaccctcctggagtggggctcctcccaggggtgggctctgaatcaggccgagggcactgcggggcggggcaccggccctcggtactgggcatcctcagcaggcatccgtgtgacccaagagacacactccacccagccaggcaggatgctagagtatggctggggctgcccgggagtcgagagacgccagtcccccacttccatgcacctcagggctccccagaccttctcagggtcatccctgccctcggcagagcaggggagggaagccctttgcaccaggtggtgggggaggacgggctttttcacgtagccggggagggcacccagcccgaggtcagagggttcagatccgggttcagggcagggttgggcccagcaggctgctagcgggctcggccctggtatagccagcgacggcggccggcagcctccatctgcagaggggaggacagagctccccaggccaccttccccacccgctgcctggcccagcgcacagttctccccagcggagtcccagctggccccaccgcctgtggggtgtcccctaggaggactgggcctcttcctgccctggggtgcggggcagctcccccagaggctcaccctgcccaggggctgctggtgccctgctttgcttgctgcccagcccccgctgtgtgcatggggactttgccctggagaaggtagaagcttctgagtgtccgctcagcaaattctcttccgtctccctcctgcgcccttgctctgggggtggggggcagcagtccttccctggggctcctgagtgacagctcgttccagtgggggtgggggtgttgcagcactgacttggtggtaactgctgtccacagtctggccccagccccagccccggcccctcaaaagggtctgtgtggtggctgctcggagccaggaaaggttcagcgaaggatgagaccaactgggctgtgagacctcaagcaggccccagccctctgttggcctcaggcaggccccgccgaggcatccccttcaatgcctgtatggcttcgtgcctacacgagaccctcccagaaccgcacccgacacacagtgggaactccatgagctttgttgagtgggtgaattcacagggctgccatgcagggcagggaggaaggaggtagtcttgccaccctcccggtacaccccggggacgtctgtgggagaggggagacctgctctgggcagcccgccaggcatagccagaccggccctgcccctccagcctgcagcccaggcccccgggacgccttcgcatcctcttgggagccatcctttgcgctgcgtctaggcccaagccaggcttgccgcccactcagacagcagtgtcctcaccaggcacatccggtcgggctagtctggggtctggtaattgtggccaggacaggtgggaggtcaccagcctcctgcggagcctcccagcccccaaccttaggctgtggcctgggatgttcacggctgggatgacaccaccctgctgggccacacgaagctgcgtataggatgctactgccaggttgttctgagtgggctgaacccatgatggtgtgtggtcaggggttccaaggcaggcatttcccctgcaggggtgggaatggccagagttcagacctcggggctgcctaggggtgggcagcagaggctgccacagccccagcagcagtatctgggctgggggaagtggggctggggtcccagggcagggcacagcccagctggctgccgagtgatggcgctgcctttgagggaggtgaggggc

SEQ ID NO: 588877 - DNA, 4001 bp, Homo sapiens
tctttcccaagaacggtgggaaaacactgttctcctcgaacagtgctggtacatcacaagtgcttagtgaaagctatcaaaaatgagagaaagagctgactcctgccttccctgcctacctccccgcccaggcacagtgatcttctctctgttcctccagcagccaagctcatgcccacttcagcacattgtacacttgctgctcacttctacctggaatgctctgtgacagctactccagcccaggcactctcacatcagatctgaaagtgtctcgtttattcatgaacctacctgtttattttctgtctccaccactgaagcagaatctccagagcagggaccttgtgctgttcacagaggcttccctggtgcttgcaatgggctcagtatttagtaggtgcttaataaatatctgttggaggtacaaccaatcgagcttatgtgggcctcagttttctcgaatataaaataagaaaggtgaggctggatgagatagtttgcacctgtaatcacagcactttgggaggccaaagcaggcctagaccagccttggaaacacactgagaccccacctctacaaaaaatcaaaaaaattgccggtgcagtggtgcacacctatggtcccagcttctctggaggctgcagcagaaggattgcttgaacccagatggtcgaggctgcagtgagtcatgattgtgtcactacactccagcctaggcaacagagtgaaaccttgtctcaaaaaaatattatacacacacacacacacacacacacacacactatatatatatatatatatatgcctgccttggcctcccaaatgctgtgattacaggtgcaaaccacctcagccagcctcagctttcgtattttatattcgagaaaagtgagacccacataagctgaatctgtatgtatatataaaaaaagaaagctgatactctaagatactctctaactaagacactctaggtctctttgggctctaaaatgttgatggcatattcttgtaacatagtagagtttacaaagagccttcacatataacagctcgtgcagagccctggagggtaattaacacgattgtaatcattcaggttttttgcatctgaaaaaaattgctgactgtgagactggtccaaaaagacaggtgttaaccggtggagctgggtctaaatccacaattttctcagtgccgctacaatggtagcagaattaagcaggattttctagtccttacaaataggttcaaggcagcacaaatttgcgtttacttcacactaatccaaaaaagtactccatatgaacttccaattgttttcccgagttttccatgaacacgctggtcatctgagaatgaacagtcaatcaatacagacttactggctcaggagtacctgaccgttgaacatggagatctgtgtaaggaattgcgtcctttgaagcaggcatttgaatccctgttttcagctcgctgggtgtatgaaagaatctgtctgagctctaccagcccacctaggacagggcgcctcgcagcagggcaggcgcgctcaggaagagaacgactttctcaggttgtggcctgagtgtagaaagctgagcgagttctggagggcgcctgggaaactcgaccaatgtgcccagctgagactcgagggtccctgtccccacccgccctgtcccgggcgccgctgaagcgcacggaggacaggggcagccccgcactcccgcagaccccccggccccgggccccgcctcacccgtaggtggtcagcagcgccttgttgacaagcacgatgaggaaggagcaggtcccgtagaagagcgccgacagcagccgggccacccgcgagggcagccgcgccgcgccgggctccccgccagcgccctcggcctcggcctggccgccggccgtcatctcctgcggccccgcggaccccgccgcccgccagccccggctgcgcactggtcccgcccggccgggccggggaagagggcgcggcaggaacaggaagagcccggcgcaatcccaggtcccgacccgccccctgcgagcgcccgaggccggcgcgggaggaccctgcgcgctggacttcaccctggttccaggcacctccttcggtctccagggccggcaatgcgctggggagttgaaaagcgctgccttcctccaggctttcctggaaagaaacgcttcagtaagtctcagggcttgttttgcttttttttttttttccctacaacttttttgtttagtgtataatttacatacaatgaagtgtacacatcttgccagtccatagtttgagatgagcttcgacaaaggcatccacaggagtaactactcaaaacaacatttccatcgccccaaaaattccccttgctgcccctttgaagttaacgcccgcatctcatcgatgactattgctgtaggttaggtttgccttttccggaatttcaaataaacagggtgctttctagaatttatgaatgagcatgtggtctcaggggttttcactctatgctttggactcgaccatgtggtttgtttaatcgttgaatagtatcacaaattgtgtatccattggttgtttccagtttaggaccattaggaaaaatgcttccatgaaaattcgtgggcgtttgtgggacctgtgtcttcatttctcttaaataaatatctaggagtggagtggctaggagtaaggtgggtgaagccttgggacttgggtgtcctctgggtgctttgtggtaggtgcattcctcgcggagggccgtttgccttcgggtcaggtcagttgaaggacagcttcccagaaccgcctacccttgtcagtctttaaaaaatatgaacttttggccaggcgcggtggctcacacatgtaatcccagcactttgggagaccgaggcgggcagatcacgaggtcaggagatcgagaccatcctggctaacacggtgaaaccccgtctctactaaagatacaaaaaaaattagccgggcgtggtggcgggcgcctgtagtcccagctactcaggaggctgaggcaggagaatggcgtgaacccgggaggcagagcttgcagtgaggcgagatcgcgccactgcactccagcctgggcgacagagcaagcctccgtctcaaaaatatatatattatatatttaatatataatgtatattatatatatatatatatatgaacttttagcttcttagaaaagcttaagatttcaagttaaataaaagttggggcctaactatatagatgcccagagaattgtttttctacccttaggcactaaacaaccaggagaatgaaaactgggaaacattttcagccctgataagaactaaagcagaactcgtgaaaattagctagcattaaaaagaccagaagtgcccaagttacccaaaacaagaaagaaaagacatgttaagtccgttttaaaagagaaaatgaatccatattcaagttaaacaggaaatcggtcattttggttaatttcctcagaacattcaattttcttgtgagtctccaaatgttttgactgcaaaaagaatattttaaagttatttttaatgatgaccttcatcataattgcatttagtttgattgtatacacatacttccaggaccttacctcgctgtcaaaatcccatccttaccctgtttaaacagcaactcacactaaggagttgcttgtgatattcttctgcacaagggtaggacaggctgacccttgccactgcaaatacacaactaaagatctaccaaaaataactgatgaaaaaagaaaaccaatttgctagactcttagaaaagtacacaggctttaaatggattcttgaggagctgaccccagagacaacccatcctaaatgtaagtgaaatgaaatcccttttccttattaccctaatttaaggcctggaaatggggtggcaatagttcaatacttatccacagcagtatatttttaacactgtagtaatgaa

SEQ ID NO: 588878 - DNA, 4001 bp, Homo sapiens
cccaactagacccccacaaattcctaaccagttgaaagttatgtgcaattctacacctttatatgttaatatgaaaactctgatataccaagcctctccttcctaacacctctacgtatagttttactttgctattataactgaataggaatctttaactacaccaaaaagcctgactataatgctagcaggaaaaaaaaaagctaacgggtaagcaaacactcaaaaaaaaaaaaaaaagactggaggaataggatgataggatggatacctaataaaacacaaatgtcccccattcatctgcaattctagtcattttctctctaacagatctcagattttcagaacaagtatgcaggttatttaaaactgagttatatatagtcatttagcagcagcaaaaacacttctggcattatcacagatgctagctttctggaggaattttttccccccaaactagcgtttttcttcaccaagaaccaaccatcctttatttctaaaaacaagagcccttttctgccccctaaaacaaacaaatcacagaccacagttaatgaaactacgctaatgaaactgtgagattacatcccaggcgttgtcagagcctatttttcatacaccaccacaagacagtttgatgcagtattcctgattgctttttatagtatttgtaaatacactcgctaatccactaaattaggtaatttacaaacaggtcctctcagttattagtggccagtagtcgagttctattacatttgatcctcgtacagttgtctaaacatttccacccaggttaagggctcggatccgagagaaggaggttggcgaaatttggatgggggcagggtagaagctgagagaaatctctgcatctcagccctcagcgacaacattcagccagtgcccacagaaaaactaaattcggaacctcttcctcctgttacactggcaacaaagagggagtttccgtagcgctcccgtcacccaccaggtgcccaatctccttcccagcccagagtcggcgctcccgcaggggcctccgagtgcggggaggccgcggggcccgggtcacggcactaaggggggatggggtgcaagcgagcaagcgaggtctgcggagcgggccgtggaagggctccgggacccgctgaaaccatctgaacccagccagggggcagcgggcaagagaaaagggacagaatatctaatgaagcagaaactggaattcggtgggagaggtgaagagctcttgctgggggtacacctgcgaggagcacagaaaacgggcggcggatggcggggagactccacggaggtggaagagaggagccaggcccggaagaacagggaaggggatgccacctggggcagaggaggcgccagtgcagcctctacctgcaggcgggcgggacgggcagctcaggtgtgactgggaggagggggccgactggggaaggggccgggaagagctgagggcgcactaggcgccgcgcagaggcgcctttgagtcggcagccgcggagccagcgcacgggcatcggcgggacccggcggacggaaaggcggagtgggggtctttggactgcacggtgcgctcaggggaggctggggacagcgagaggtatcgggcggcgggcgcccgccgcgcgacgcggcgcacgggaggcatccgggcgggcggccgggaggcgggagcccctcacctgcgcggcggaggaggcggagctgcagcagcccatggcggggccgaaggagcccggaggcggcgccgggcgcgcagctacgccccggagcccctcggcatgcgagccggcgggcgcccggggagggcgcggcctggcaccgcacggctaggcggcggcggcggctgcagcggcggctggtactcaagaggcggcgcggctagaggcaggcgccggccacatcccccggcggcggcgacggcggctacgcgtctcctgctctgctcctgctgcagcagctgctccccagcggaaaggggcgggcggcggcggcggcggcgcctccctctgtccccccgcctcccgcctcccgcgcccagtccctctcccgctccctctcccgggccgccgcctcctcagcgccgcgcgcgtctcccatcagactccccgcccccagtgcagcgccgtgctggtggcagggcggcggcagccagaacaaggccgggcccttccgcgcgtgtcagaggctgcgcggcgccgggcttatttagctgtggcaccgaggcagctctctgcctcgaggctggagggcaacgcggtctgaggcagccaaagaccgggccaactcgctgccaaaaaggggccggattgcttccggatctaggaggcaagcgggacttctccctctccctactggacgcacaactcaggatcctgatggcttcttaccgccccgtcggctgttttttttctccagaggaaagcgtacacaagaaacctttcctggagaaggaataggtgataagaagacgggaagaaacaagcatctgttgctactgtccccattttgctgatgtggaaactgaggcttgaaagggaccaagaacctaatgaaatgttcccaaggttgaaatggtaataaatagccagaaatgaggaaaaggcaaaaagttatccaggctcgcaagtcaaagccatactggatctaagctaaactttcttatacaggatagtctacaaaaaacaataaggggacattaatttattcatattaaaaatacttactgaagacacactacgttccagtgactagtactgggaataaagaggcgagcaaaagagacttaccaagttcctgttgctaaatcagtaagactcaaggaagtagcaacaagttagagtagacgtggtaactaccttcaagaaatttacaattccaaacgagtcgttaggaaatacagtatgaggtgaaaacagttaaaaagtgaaagaaataaaactaaagataatgatgttaaaaaaaaccccacattatcaggcactgttatagccttcatatgtcatttcatcttgtcaaagaatgtctcaaaagacagccacaggaaagaaaagaaaaactttatttgcaaagctgcaagggagtgagacttccaaaaggactgattcaccaaatatgagacatcaagttttaaagattagttaaagtatagagggaagaaaagaacacagaattaaattgactttacatgcactgaaagggaatctaagccaaggaaagttggaatggtagcctgtaaggggacagctacagaaagggccagggaagaagaattcctaattgatgttttcctatgccatttcctgagttcgtgactgtggacgagttatctctccaaatctcattgtccgcttctgtgaaatgctggtagcagggatgactgcaaaggcttgtggtcaagattaaataacataagaaagtgctgctaggtcagcaagtactcaactgattgagatcttgaattcttctgcattctttctagtttcctttcaggttaatcagagggtccaccataccacggagctggcgaatcctacatgtgtttcccataaccattaaaccaataaatacaagtgaagacataaaactaatggttctagtcccaattctggttgtaaactccagaattagattgtaaactccctgagaacaaggaaaagtattttctcctttgtatctccctcagctctctcaaatgtttgttgaattattcagtgcagccaagaataaaaaacattcccttgagattttccctcaaagccagaaaagtacatcttgtttttaactcggggaggaggctgaaagtaaaactacagtcctaaacaagaagccatctgtcttccttctttatagtcaaggaaaggggagttgtttctctttgcagagtcaatatgggagcatttctctcagattagaaaaatctttttggctagtgctgccgttccgtgtagtagctagtgcttattctgtaattg

SEQ ID NO: 588879 - DNA, 4001 bp, Homo sapiens
agagtcttgctctatcacccaggctagagtgcagtggcacaatctcggctcactacaaccgctgcctcttgggttcaagtgattcttgtgcctcagcttcctgagtagctaggactacaggtgtgcaccaccacacctggctaatttttatgcttttggtagagatgaggttttgctatattggccaggctggtcttgaactcctggcctcaagtgatcctcccacctcccgcccaaagtgctgggattacaggcgagagcctctgcgctcggcctttgaaattccatccctttaaaatggcaagggggtgtgggggaagaaacccaattccatctcctctgttgaaggccatcctgaagcctcccctactgactccaggtaccactgaccacacctccttgactgcccagaaccatgaacaccactctggtaacatttcattctcaatatagataattaattaacaatacattacagataaactcaggggcatataatcttgtgtcccttgtgcctcctaggtagcaggttcaatccctggtgctgagctaggacacccagaccatggcatccctggtgtcagccccatgatgcagagggctagcaatgtcctgcctcctcaagaatgacagactcaccaatatagaacatgtatgtctctttcacaaaagccaagaggagggctcctgacccaaaggagaccatcccaatcatgatcatggtggtgtcccgaaagcagcgggagaagaccaggacacccaggaagctggtgatgaagatggtgtaccctgcagccataccatagcccacctgcacttggttccaaccgagaggctccctcagcacaaaaagagggatcacgtccactgtgcccaccaccgccaggtcatatatgatagcacccacaaagagcaaggcaatggtggttttatggggttttgcttttccaggagatggagggtgccccactgcatactgttggtccaactgatcaggatccagagtgcggtatgtgccaaccgtgccagacacggtatccacggcggggagctcctggctgggtttggccaccgactcagggacctttagcaccaaaaggctgtagagcagggcaaacgaggcacagctcacgctgcaggccgtcagtatcaggccctgcccagagtgcccagccatctgcttgaagagatgcccggaagccatgctcccgcagaaccccgccaagcccagcatcaggtcaatgaggatgaggcgcacagagcggcggccctcggaggagcccagcgatcccagcgccatgaccccggaccagaaggcggagaagccgccgaatagcccgttcagcgccgccgccccgtacagcacctccactggccagtccagcagcaccttgagcagcagcccgaggcgggagagcaggaagcccagcagcgacatgcagatggagatctttcggtggtagcggtcgctgagccatcccagcccgtaggcggacagcaggggggacaggcccaccacaaggttgtagataatgtagaaattggagatggctctctgctgttggtcctctagagccccccggggcgatgggctggcactgtggttggaggagcctccggttccgtaggacgccttcaccacgaggagtagccccgcatcgtagagggaggcagccacctgggacgaggccaccacgggctcaacccaggtcctcgggtggaagcgaggcaggtggcccctccgcgggcaggtgacctcggggctcatgtgacctctctgatggggatcgaagggctttctggctgcagtgacaaggatatgctcccaaattcggctgctacggctgctcaggtttcagtcccggagcgcgagtgtgctccgtgcgccgggagcgcgagtgtgctccgtgcgccgggagcgcgccggccagtggcgagcagagccagggcacgcagcgcctgtgacagcagcccgcccagcagccgagtgacctcccgagtgactcctcctcaggccagaaaaggccgcgctccaccctgccctcgccacctcaggcagagtaggactggcgacagtccagggaagccaggcgcgggggagcgcaccgcgagtgctggctcctggcgccagcacccccggggccgacgggtcacgctgctcctgtgagcgcggccgcctgacggggccgaatttccccacagccaggcgtgcgtgcccggacctcccgcggatctctgcggaccccccaccaccggggcaggggctggaaggaagctccccaggactggctcagggagcgtttccaaattctcccatcccaggaaggcaggtttgcgcgaggggtgggacgcctaggattctgcctaggataagtattggggtgtgaagttttatttatagatttaatgcaacaggggcccatgtgctataggcagctgggtagcactttgagagaagtaaaaacttgggagccgccaggtccaggctcttctccaagccaaaggcctcttagagaagagtcctgtttggtacacctgcattggtgggcctagtgcctgggccttgtctagaaggctcctgccccaaaccccagggccaagggagagacggcaagatcctgccagccctagatgtccccctagatgataaaactggactcttgggcaggggcttgagcccactggaaggggcagagtcaccagggtcctcatctgaatcaagtgcccaggtccctttctgcttgttagtagtcactcttcttctgtctgtgggctcactcccctgggctgggctgagacctccacttcccaggtggcctcgcttcttgtttaggtacatacttctgcaaagaaaaccagggtgatggatggtgcaggggccaaaatgtaccacagagcatgacctgttccatggtcagccccagggatggagactcaaagcacacagccttcctgtccctctacccacaatccactatagctctggcagcgtggatgatcaggaacccaaagacatgaaagggagacgcaggtatgcagggagagcttaaaatgccacatggataatatactcatgtagggagtagggactggattccaaatgatttagtgtatctatgtgctcttttggtagtgtttaggtgggctataatctcctcccctgccaccctcaacctccagcatggcccagcctcctcgtgtctaggcccagacgactctgccttctgcaaagagaaagacacacctagtcttgcccttcaagatgtgccccatggatctggcccagcagcccatttccttcttcctccccctcacctagggtcaccttgggagatacatgtttcacccaacccaagcctggctctcccactccattcttaatttttccagaggctacagcaaacagtccaaacaccttgatcctatgaggggtggagactccagtgaatgagtaggttatggggccaggtggtattccacaatcaaatatggccatgagaacaacctgacccagatggaccactctggccacttgatcaaggagtctgtgcattctagggctctagactgtagggggcagcccttgtcatctctgggagggtctgtggtatttcagttcttcccattgtcttgggaaaccagggacatttgaagggtctctgagagagtcacatcagatctagaacagatctagtaggagctgggttattaggatgctagtcagccctaggaacccccaggcttctgagttctctggcctggaaatgaacaagactcagggtagtcagtgtctctcccagtttaggctactgtgggttggattatattctcatcatgtccccacttcttgctccatctctgaatgcaggccccaggtgagctagcacctggtcatcctctgcagcccaggctaccagcaagtagagccctgaccttgccacttcaagatagaatctagtctccagtgcaaggttggcttcattaaagtgcaagtactaaat

SEQ ID NO: 588880 - DNA, 4001 bp, Homo sapiens
tctggctgttacaggagaactgcaaggttcaggagatagttaagataagagttctttttatgtctgtttgctgattcagaacatctcccctgacctgaagggctgcctcttgttttgtatgtggctttctctgtaaatgaattgataattcacccacaagaagtagcaacatcttcagaactgggcctcaagcactgttattcttaatggggaagcagtgcggggtgggtaaggagaacagcaatgcagataaaggaaataaatctacccgaagtttcctttttacaggccaaggttgtcgggataagcggtgaaacattaccaaggcccacactgcttcttggtctgagctgtgcaactttaaacaatgcataatgtgatctgtcagatacaaatcacaccgggttctaaagttaaccttataagttgctccatcaagaccctagaaaatcactgagaacatttcttcagcattcttggggttattcacaacactttcccattcgtttcaaagtcaaatatgttttttaaaagttgttagattaaaactttgctctgttccttgggcttctgtgaactctccttcatctttcaatcagggcaacaaattaggatgtgggtgagctgctaccctcactttaaataaactgccttgggaatggtccttgcccagagtcagacctggcaaaggctgtgaggcagctctgtgcacaacaaaagataacaacaaactcggcagcagctaattagtcccccatgaacctcagacactgccttaataggatcctggctcttaacattaccacccttatagataccatgagttgccatctcaaaagagtctaccagcgatgcaatttcatggcctcttccatgaggactgacagtgatcccacaaaggaaaaattgttttaaaaagggaatttacgagaaaacctaagtgttagaaaccctttagagcaaagcatcctctactctgagactcatgtccattagtagttataaaggtaatcacagatgaaaatcacttttaaaattcagtggaacccaaagggctgggcaaactggtcaaaacaaaagctaacaaactgaacaaaaaaaagttagtttcaaatcatgacaccctgaaaggtaatatgtcacgtatatttacacatatgcctgtctctcctaggttaggcccttttgcaaagcaacctcattctggatgttgataagaatcaacaacagccacttccttttctgactgccaagataagtttatttatactttaaacatataaaaagaagagtctgaaatacatactttaaaaacctgtggttaaaatggcacatttttactgaagagtaaaactcaaccatcatatgctgaatgaactaaagttctatcataggcactcattaatgtcaactggccctgactttcacagtagcaacaacaattcaacaatgaactccaagttcattgcagttaaaatggataatagccattaatgatgttactatgccttttaaaaaatcaacaaatgagttcatttaacctctctgagtttcaagctccttacctacaaaataggcataacagtagctgactacaacttcaattttgatacgaatcaaataaaatatgagatatgaagacaccttgtgagctactatatgctcgcattattgccaggatccttctaacagcttcaattcccactctggacttgaatccacaatttgccagattaatctaaaatattgctttgttcatgtattcccttgttcaaaacttctgagacaagcctccaatacagattggataaaatattcatgctttaacctgcaagtcaagtctttccacaatctccgactttatcttctgaaaattctccccaactggaacttcttgctccaggcaaccggtcaaaacaggtacattggtctttccacgttccttcaggccgggtctctgtgatctcgccgggtctctgtgatctcggggctttcttctgatctgggatgctcagatgccaccacccccacctctgccctccccctacagcaaccttatcccatctcaaagaccttatctaccccatcagctcaagaaagctcaccctgatctctctctctgtatcacatggcccatgcagtttaccatttgttacttgtattcaatatgctattataaatacaatattaaatgttcaggtacattctttaagacacataaattatcaattacagatcatctattttttacagaattttggactctgcttaatggtcttttagtatagcacaacagcaagccacaaaataattgtgactatttgcaaagccatttattacatgtccagttcaacaaagcacaggggggaagatgggagagggctttccttctggacatccaatatccatgtgtgataaagcatctcccagtgggatggtaaaaactgaaatataccacatcaagtaggtaaagaaatatataatcatcctgaaccagaaaaatacagtttaagtgcaaactgatacagaatttcccttggataacctgtaagccaacatatgacgttcctttttggttagagatttttatcatttttaagtaattttgaattccaaattctgagtttagttgtttttgttttttttaaaggagggagtttcaattatatttaatggttttcaaactttaaatattatttcaacttctgtgggtcccattcatcaacttacaaaagggccagcccatatttaaattaggccagtttctaaaaagtttctaaaatattactgcttgcatagatgtagatgacatactggcataagattgatgcttaaattgatactaatccacctaaaaatactatagaatattgtggttttaaaaactgttgtaaatcttacaggtatacggccagattacaattgttcaaatattctggaagtcgtagctatctaataaaatatcctaattcatactaggcttcaattatataataatgtattacaaacccagaagtccagaaggacattatgtcagagtttcaggccaaaatcttgtattccatatctaaaccatcactccaaatgtgtaaattaatgaggtgtttatatcaaacattcaaaagaccagctattttgttcctgaatttcattggctctattgtatgtttttctgaggtacaattattcaagcatctttgacgatatatttataacttttactacttaaaagctctctttaacatatcctacactttcaaggaaaagtgctatattaacatgggtaataataaactcataataaacagtaagaaagctgcagttttgccagcccaggttgcaagatcccatttaacttaatgataaatatcttacgtaaataaatatgctctctttcataatgactctggcagaacatagttttagactcctatagtccctagtaagtataaagtcataagtttctatatagaaaaaataatcactccaggccttcctaaatatgctatcaaataaattaccaccatgtgtattttctattcactacttagcgaatgacccatggctttattaaccggctaaaggttagagtcccctaataagaacgcttccaaaaatgacagaaaattcacatcctctattggccaaagacatctccaaaacacaatatttaagggggaaaaaaaaacaatttagaagataattcttttacattaaaaaggagaaatcagaaatagcccctaaatgtggctttcatactagggaaattttctcatctgttcacaagaaatacagcagaaaagaaatgtaactcatatagttttctaaggtaactcaagttaaccaaagaatttgtccctatcgtcccttaaatcatcttgaccagaaacagaatcaaatcttaaagtggttaaatcaggtcctaccaacactccttccacttgcaaatgctgggaaacagtccttagtattacatatgtgataattcagttgtcctcatg

SEQ ID NO: 588881 - DNA, 4001 bp, Homo sapiens
ccccgcgctcaccaccatccgcagcaaacggcaacccggataaaaataataatgcaatccaggcggcagaggcggaggcggaggcgagcgatcagacactggcaggaggcgatttccccgcgtgtaccggaaaccggcccaagtgccccggccaaggcgcgggtgtccgccggagcccgcactgccgcgccccgccctccgccgtgtaactgcacccaggctgcgaggcctggtgcggggcaccgggagcactgtgctccgtgtgcgccctgcggccggagggcgccgaggggctggcgcgccggaccggttatttagggaagtgcatcgcgacacctttgcagatggcatggccgtgttttgcaacgcaaacgggaggaagggaagacggccgggtggagggggagagcaaaggaaggggtaaaccaggttgggatgggaataaagcaaactcctgagcagggagcgagaaggaaggagtgcgtgtcatcgttgggaggaggctcctacccggtctccccgcctcccgccctcgccacccccctattccctccccaccgcagcccttccccttcccgggcgaaccacaccgccgctgcccggtggtgcgcgggtcctgtttgtgacagtcaggcagacaggattatccggatcatggcctcccgggcccgcagccgccgccgtggctctcctgggtcccggcgcgcccctagcacccggacgatcgcaggcgccccacgcccgcagctcccgcggcgcaagcaaggggaagacgcgaagcaaaagaacacggacccggggagagggagggcagggtaacggaggctggcgggcacctccgacctccttgggggcctcctcccttccctccagcagtgcggcccgggccggacatcccgaactttaacacccgagcctgcgctgccgccaggtaccagaggcagggacgtccgcagcgcccggggcgcagccccctggcagcccctttgcctaaaggcctgcctaccaatcagcctccccatccacgccggaggaaacgcggaaagtggaggtgacacctccgatcaggcacgcaccggccccgcggcagtggccgctacctccttcgcgcgtcagctcaggcttctcccgctgcgatccgctcacgtctccgcagccggagccctttgaacaagtccctgggaagcgggtggcaacagcgtccgttggcgccccgccgccagcctgggctccccgccctcctttcccgttccccttccaactcttccggggagggttgcccgggatgaacagtagcgtttccatcctcctcccctgtcccccaggccttccccctcctgcggccacccccctccccgccgcctcacttttaaggggatggggggattgcaacctggcccaatgtgtgtgttgcaaccttgagttggcagcgcctctgactgcccactcaggatcaaggctgtggcttgttgggatttttttcctcctttgcccccttgaagtagtaattattactgttattattagaacagcaaggttcggttgaaactttctcgtttcttccaccgccgcctgggagctgtcgttagagcattccacctgaggcccgcggggaggaggcgggcttttttttgtcgcggcggttggcccgcctgtttgttttggtctccttgcatgcacaataaataataattaggataataatggataatcccgggcgaaggcggcgtggtgccggaggggtctgagcggcggctgcagcggggcggccgaagggaggggaaagaggagaaaagagttgtaagttatatttaccttgctcgcgaggagtgtgctggctgaatctcttccctctctgagtcacccagagtacagaaacagagggagagaggactagattatgaatatgacttcattgatgacagccgtcccctcctcttcctaaactcgggctccgcccagcgtcccaccctcgcctcctccgcgggcgccggaagacgcgccgcagttggccccgcgcgccgctcctccctgcccgtccgggcgcgggttggcgggacgcgcctgtcactcgctcagctcagcgactccgggagcgcggggggaggagggggcggtgtgcaagaatgtggatctagacagctctactgtatgcgtggatccgtgtgtgactgcaaggcgccggctctcgggccgcgtttgtgcctggagcagagaaactgcgcgggatgcagaaagccccaagccctgctggagctgggcgcccgctgtcccttccctggcagtcctcttcctcgggcgccgcggggctcctccagggagactgcggaaggggaggaggcgaagcgaaaacggagggcagccgtagtaatagcgcgtagtagttcgggggtatgtggagaaggtgctggaatttaactgtgcctccgcctgccagtgcgagcctgcagagagagagggaggggacgggggacgggctccgagtggcaccaaagctgtttgtggcacagtgtggactgtggaaaaaacgggcattgtcgtgccggctgaaactttttctcccccttccctaaggctgtcattataaatctgccccctattccaggtaaaaaaataaaaaatagaaaagggaggcgggcacaaagaacgttcctgccaaatctgtctcttccctgaaggactgcaagcttccaaatgccaacgagggagaaacagctgagaggctgaacgccttataaataagtaaacccaccctaacctctctgtttacttcgtggactaggtacagcactataaccttccctcacctgccatcttcgctaaaatatatacaaaaatatggaaaaacaaaccctgggggcggggctggcgggttagggggcggctgaagcatggaatctggttttgatttaaaaaggggaataaatctcttattttctacagaccgtagtctcttccctctcaccccgcatttgagaccaattaaggctgcaaattgtaatttgctggcaagtcgcggttttgagacctctttgctccaattttccttgaaatacagtactttggccggaccaataggtcggtgtttggtgagacaattttatttttagttttatgaagtgtgaaagaatgttaggagactttaaatcaggggcctattattttagactcagattaatgtagatgcttgactcttaaaactgttcctatgcagtagtgttatgaaaagtatgatttatcccttatttcgtaatgtaatggcttaaattagtcattcaaagtgcactgtgactatctggttgaggattcttccccctagagtaaaatcctattttaagaccattttactgttgcaaaattgactccatttgagcaactgggtctgaaatgcagttctaggatgcttaaaacttcaggctggataagttgaagacaagaagtaatggaaagaacgccaaatactgccatgtagtcattaagaagcaagaattctttatatcactggtccactgctggctgaagcagagcccactagggcagcattttcatgatggctgggagtgttggtgatcacccaccctatagctttctaaggtcttgctacttgcttgttaactttagcttcatcattttctgtctatcttgaagtgaacctcaagacaacgaaagataacacagctaagagaaatagaatatagtgtgccctgaaggatccattgtaagaacttgtttttctgcctgaggatatgccggtataactattaactgagaaatatatagggagaaattttaaacaagactagtagtatagtaaaagtgtaacataaatactaacttctaactgcctaataagtcgcaactaataatatagccagataacctacctgtctctaataaagagatttaacctaatagcaatgcttattacattgagagtattaggttttaatttttttggggtctaatttgtttctctggcatgccggcctcacatgccaatt

SEQ ID NO: 588882 - DNA, 4001 bp, Homo sapiens
ccgaaggcttcctccttcagcctgttttaatattgacaactacttatcatatttttttccccttattattccaggcagcagaattagagattttagctcagatggtttctgagtcttgctcgcattttaacaattaagccagtaagaaaacaaattaatattcaaatttattttaaaaaattaaaacaaggtatgcttttttggtattttgtaccttattttttaaaaaatagcagcatggtttggagcagtctaaatgatttttaaaacagaagacaattttttaagaaaattaaatgcatgtaaataaaagcaatgtacatgttctaagattcaaatattttaacataatatgttattctgctctttaaagaaaattcagaacaactgtaacacttcactttcagtttcatgctgtaaaatttttcattgtttttcttctcactgagataaatgaagttggggggagttgtaaaaaggatatttctactctcaccccgccttaattttgaaaagagggaaaaagcataagcttgtgatatttggacttttaaatctctaaatctgtgagtagctaagaagcgaaaacaaattaaattgcaaacagaacaactgaaacaatttttattacaactgctaatacgtgcagattcttattaaatttaggttttggaattacaaggaaacacacaaagtactgaccattattcccctcaaactaaggttttatgcaggaatgcagagagctacaaaacatcttccctcctccccaaagaccccaaacacatccatatgcagtgctttatgttctgtgatttctaagggtctttttctaatggaaatcaattcactaaacacttcccaatgcttttcgcacataaagagtagagtaagattactcctgcatgtaagtaaaattattcatggagattttaaactgttcttttattttaaaaaattatttactaaactggctcaactgactcaaactcagcgctgggggctggggggtcacacacaaaaaaaaccccaaaacttgctacacaatgctaaagtactacccccaaaaagaattcccttccaaaccttttaccagcacaataatgaaataaatcacagaagcaaacccccagtttccgactggtgacgtgttgcgcaagagtgcgagccctaattcaacatacagacggctcccatgctcaactgcctctagatttaatgaagtgaataggaaggaagtcggggaaaaaaagtgtacaaataagaaattaacactttccttccctaccgagacggtgaaacacaactacagcgaagtttagtgaggcacctcttttcttaaaggcacactgcacccgtttggctccggatgtcacgaaaaaaaacccatatggtggtaaaaatccccagtcaagttaaaacagttaagcatatttcagcctgcgtttttcctgaatgaagctgggaattactccttcctccactggatggcaaccttttttttttttttttttttttttggccctctttctctcttttctttctttcaattttgcttaaaagaaaatgtttttcatgactcagggtgtgcaagaacgagatgcaaactagctccctcttcaattagttcttatgaaagcggcgtgcacgttctgacagcaaaatgcaggagacagtcatgcaggattagctgttctagaggaaacgctttgcagctagcaaagcacatggcagacccgggaagcagccacacgtgggtccagtcgtggccctctcatcctgacacacaccaaccacatctttactgcgtgacggcaggtccagaaagtcagcctcaggcgccttcttctcaacccggtggtgtaaagaattgctgttatgcgtggttcacagtatcacaaagcagaggggatccatgattatgaataggtaaacagggacacgcaaacaaaaagccccaagccaactcctgcgcatcgtttccacctccgcctctccaagtccaccaagccatgtggcacagtccttacagtggaacaaaccatcttaacactgaaaggagcaattctaaagatatccagacaaggcatggaaatttcttccatgtgcaacgggaaaagtcagtactcaaacactaactctgctatttcagtatcatatttctgtccactgacactttctctttctccctctggggatcctcctcccttaggaactctagttggattccagaagaggaccctgggatgctgctgggcatgggggtggggttatagagcccagggctaagcgttaaagaatgcaggttaagaccactacattatactggtgctttctggggacagctcacacatcaccaaacttgattccaaaattcagacaggctaaacctccctcgtgccctgctgagatcctggaagccaataatacagtaatgatcccccaaacaagaaaagcaatggcaacaaaatagtggaattttacatttacattttcatatatgagagattttcttacaatataaatattaaacaacaacaaagttgaacatagagctcgtcctcaaagatgctacgttattttaatcggtttaatgcatactgtagcacttttggatgcagaatttcagactcagggctttggacagtaagtttttgattattactgtctccacaagcaacctgttagaaaaactgacataaaatcaaattccctaaagtgaaataatctagacgcaaaaaagcaaatactgtatgatttcagagatgagaaaagagaacagtggttaccagcggctgagggaagacggccggggagttagtgcttaatgaggtcagaatttcagtttgagataacggaaaagttctgaagatgggatgttggtgatggttgcacaacaatgtaaatgtacttcatgttactgaaatgtacacttgaaatggctacaatgggccaggtacggtggctcatgcctgtaatcccagcactttgggaggccaaagcaggtcaatcacctgaggtagggagtttgagaccagcctaaccaacatggagaagccccatctctactaaaaatacaaaattagccgggcatggtggcgcatgccctgtaatcccacctactcaggagtctgaggcaggagaattgcttgaacctcgggaggctgaggttgcaattagccaagattgtgccattgcactccagcctgggtaacaagagcaaaactctgcctcaaaaaaaaaaaaaaaaaaaaaaaaaaaaaaaagtctaaaatggtaaactttatggtattttcccataagaaaaaaaagtccctgaaaagaaaccaaattatctaaattaaggaacaacttaaccccaattaaaccccaacaactgcaggttcatacatgttcttaccacctcgacacacagcacatattagcgaaatcttgctagctttccttcagaattcaacccttttaacatttcaacagatagcacgttcagtcttgccctggccaatggctagaacttttcgaaaatccccatttattctttcaaaggttattaagggaatatccatgatgtaagaaaataactgtgtatagcacataactattcacaaaccttatacttttgttaacaaatgcttcccatattcaagagatgagttggtctgaagggtaaggacttttttggatatagtttttttcctccgactgtggttcaataaactgatgacattaactcaacagactctgtttcgtatttcattcgtcaggcaactgggatgccaactgcactcccagttctccctgatttgggactgaaatgtacaaagctgaccataaaggggaagaaaattgagcctcagcttaactgaatttctggtacagtgggttttccagtttactgatcaataacttcagatcacttttgaaaaaaaaaaaaaaaaaaaaaaaaaaaaaaaaaaaaaaggttttctctttccccatatgccataagcacatggaggtgg

SEQ ID NO: 588883 - DNA, 4001 bp, Homo sapiens
cctggcatgttaaaaatgccagtgggatttttaaaaaaatatgttttctacgcatcctccaatgtgcaaatccatagaagcaacatgcacacagacagattcctaagggacagtctgagcctaggccttaataatcaaaagacaatttccatcacgatcctacagtgttcagataaccactatgaaggaggcgagatctgatgagttatgaggaaaaaggaaaaggaaaaaaaaaaaaaaagcttcacattattgcattaatattcatttgcctaaaagcaggacacccactatacagctaaacacactgcagctaagcgaagattaagaaaaggaaattgtcccgcatatcttggaggctgaacatgctaataataaatacagcatgcaaggctgtcaacagttaatggtattgctctcctcaagcacccagttgcacacagaaatacggagaacaccggcttttgatgtgttacacacctacacatgcctgggatgtagttctactgaatcttcaagacggcaacgaaaaaggatatttaccttaccactatcagcaggccggctatcagaaatcacagttagtggggataaaattaacaagccagcaaagcagcgagctgctagtctcttcatcagctgatcaggaaaaaaaagagagctggggaaaggctgtgttttcatatacaagtaattttattttactgaaaatttaatactgaaaggattgtggatactcaaatctgctgtttcatgctacctactacaaggcccgaaggcttcctccttcagcctgttttaatattgacaactacttatcatatttttttccccttattattccaggcagcagaattagagattttagctcagatggtttctgagtcttgctcgcattttaacaattaagccagtaagaaaacaaattaatattcaaatttattttaaaaaattaaaacaaggtatgcttttttggtattttgtaccttattttttaaaaaatagcagcatggtttggagcagtctaaatgatttttaaaacagaagacaattttttaagaaaattaaatgcatgtaaataaaagcaatgtacatgttctaagattcaaatattttaacataatatgttattctgctctttaaagaaaattcagaacaactgtaacacttcactttcagtttcatgctgtaaaatttttcattgtttttcttctcactgagataaatgaagttggggggagttgtaaaaaggatatttctactctcaccccgccttaattttgaaaagagggaaaaagcataagcttgtgatatttggacttttaaatctctaaatctgtgagtagctaagaagcgaaaacaaattaaattgcaaacagaacaactgaaacaatttttattacaactgctaatacgtgcagattcttattaaatttaggttttggaattacaaggaaacacacaaagtactgaccattattcccctcaaactaaggttttatgcaggaatgcagagagctacaaaacatcttccctcctccccaaagaccccaaacacatccatatgcagtgctttatgttctgtgatttctaagggtctttttctaatggaaatcaattcactaaacacttcccaatgcttttcgcacataaagagtagagtaagattactcctgcatgtaagtaaaattattcatggagattttaaactgttcttttattttaaaaaattatttactaaactggctcaactgactcaaactcagcgctgggggctggggggtcacacacaaaaaaaaccccaaaacttgctacacaatgctaaagtactacccccaaaaagaattcccttccaaaccttttaccagcacaataatgaaataaatcacagaagcaaacccccagtttccgactggtgacgtgttgcgcaagagtgcgagccctaattcaacatacagacggctcccatgctcaactgcctctagatttaatgaagtgaataggaaggaagtcggggaaaaaaagtgtacaaataagaaattaacactttccttccctaccgagacggtgaaacacaactacagcgaagtttagtgaggcacctcttttcttaaaggcacactgcacccgtttggctccggatgtcacgaaaaaaaacccatatggtggtaaaaatccccagtcaagttaaaacagttaagcatatttcagcctgcgtttttcctgaatgaagctgggaattactccttcctccactggatggcaaccttttttttttttttttttttttttggccctctttctctcttttctttctttcaattttgcttaaaagaaaatgtttttcatgactcagggtgtgcaagaacgagatgcaaactagctccctcttcaattagttcttatgaaagcggcgtgcacgttctgacagcaaaatgcaggagacagtcatgcaggattagctgttctagaggaaacgctttgcagctagcaaagcacatggcagacccgggaagcagccacacgtgggtccagtcgtggccctctcatcctgacacacaccaaccacatctttactgcgtgacggcaggtccagaaagtcagcctcaggcgccttcttctcaacccggtggtgtaaagaattgctgttatgcgtggttcacagtatcacaaagcagaggggatccatgattatgaataggtaaacagggacacgcaaacaaaaagccccaagccaactcctgcgcatcgtttccacctccgcctctccaagtccaccaagccatgtggcacagtccttacagtggaacaaaccatcttaacactgaaaggagcaattctaaagatatccagacaaggcatggaaatttcttccatgtgcaacgggaaaagtcagtactcaaacactaactctgctatttcagtatcatatttctgtccactgacactttctctttctccctctggggatcctcctcccttaggaactctagttggattccagaagaggaccctgggatgctgctgggcatgggggtggggttatagagcccagggctaagcgttaaagaatgcaggttaagaccactacattatactggtgctttctggggacagctcacacatcaccaaacttgattccaaaattcagacaggctaaacctccctcgtgccctgctgagatcctggaagccaataatacagtaatgatcccccaaacaagaaaagcaatggcaacaaaatagtggaattttacatttacattttcatatatgagagattttcttacaatataaatattaaacaacaacaaagttgaacatagagctcgtcctcaaagatgctacgttattttaatcggtttaatgcatactgtagcacttttggatgcagaatttcagactcagggctttggacagtaagtttttgattattactgtctccacaagcaacctgttagaaaaactgacataaaatcaaattccctaaagtgaaataatctagacgcaaaaaagcaaatactgtatgatttcagagatgagaaaagagaacagtggttaccagcggctgagggaagacggccggggagttagtgcttaatgaggtcagaatttcagtttgagataacggaaaagttctgaagatgggatgttggtgatggttgcacaacaatgtaaatgtacttcatgttactgaaatgtacacttgaaatggctacaatgggccaggtacggtggctcatgcctgtaatcccagcactttgggaggccaaagcaggtcaatcacctgaggtagggagtttgagaccagcctaaccaacatggagaagccccatctctactaaaaatacaaaattagccgggcatggtggcgcatgccctgtaatcccacctactcaggagtctgaggcaggagaattgcttgaacctcgggaggctgaggttgcaattagccaagattgtgccattgcactccagcctgggtaacaagagcaaaactct

SEQ ID NO: 588884 - DNA, 4001 bp, Homo sapiens
acaacctggcatgttaaaaatgccagtgggatttttaaaaaaatatgttttctacgcatcctccaatgtgcaaatccatagaagcaacatgcacacagacagattcctaagggacagtctgagcctaggccttaataatcaaaagacaatttccatcacgatcctacagtgttcagataaccactatgaaggaggcgagatctgatgagttatgaggaaaaaggaaaaggaaaaaaaaaaaaaaagcttcacattattgcattaatattcatttgcctaaaagcaggacacccactatacagctaaacacactgcagctaagcgaagattaagaaaaggaaattgtcccgcatatcttggaggctgaacatgctaataataaatacagcatgcaaggctgtcaacagttaatggtattgctctcctcaagcacccagttgcacacagaaatacggagaacaccggcttttgatgtgttacacacctacacatgcctgggatgtagttctactgaatcttcaagacggcaacgaaaaaggatatttaccttaccactatcagcaggccggctatcagaaatcacagttagtggggataaaattaacaagccagcaaagcagcgagctgctagtctcttcatcagctgatcaggaaaaaaaagagagctggggaaaggctgtgttttcatatacaagtaattttattttactgaaaatttaatactgaaaggattgtggatactcaaatctgctgtttcatgctacctactacaaggcccgaaggcttcctccttcagcctgttttaatattgacaactacttatcatatttttttccccttattattccaggcagcagaattagagattttagctcagatggtttctgagtcttgctcgcattttaacaattaagccagtaagaaaacaaattaatattcaaatttattttaaaaaattaaaacaaggtatgcttttttggtattttgtaccttattttttaaaaaatagcagcatggtttggagcagtctaaatgatttttaaaacagaagacaattttttaagaaaattaaatgcatgtaaataaaagcaatgtacatgttctaagattcaaatattttaacataatatgttattctgctctttaaagaaaattcagaacaactgtaacacttcactttcagtttcatgctgtaaaatttttcattgtttttcttctcactgagataaatgaagttggggggagttgtaaaaaggatatttctactctcaccccgccttaattttgaaaagagggaaaaagcataagcttgtgatatttggacttttaaatctctaaatctgtgagtagctaagaagcgaaaacaaattaaattgcaaacagaacaactgaaacaatttttattacaactgctaatacgtgcagattcttattaaatttaggttttggaattacaaggaaacacacaaagtactgaccattattcccctcaaactaaggttttatgcaggaatgcagagagctacaaaacatcttccctcctccccaaagaccccaaacacatccatatgcagtgctttatgttctgtgatttctaagggtctttttctaatggaaatcaattcactaaacacttcccaatgcttttcgcacataaagagtagagtaagattactcctgcatgtaagtaaaattattcatggagattttaaactgttcttttattttaaaaaattatttactaaactggctcaactgactcaaactcagcgctgggggctggggggtcacacacaaaaaaaaccccaaaacttgctacacaatgctaaagtactacccccaaaaagaattcccttccaaaccttttaccagcacaataatgaaataaatcacagaagcaaacccccagtttccgactggtgacgtgttgcgcaagagtgcgagccctaattcaacatacagacggctcccatgctcaactgcctctagatttaatgaagtgaataggaaggaagtcggggaaaaaaagtgtacaaataagaaattaacactttccttccctaccgagacggtgaaacacaactacagcgaagtttagtgaggcacctcttttcttaaaggcacactgcacccgtttggctccggatgtcacgaaaaaaaacccatatggtggtaaaaatccccagtcaagttaaaacagttaagcatatttcagcctgcgtttttcctgaatgaagctgggaattactccttcctccactggatggcaaccttttttttttttttttttttttttggccctctttctctcttttctttctttcaattttgcttaaaagaaaatgtttttcatgactcagggtgtgcaagaacgagatgcaaactagctccctcttcaattagttcttatgaaagcggcgtgcacgttctgacagcaaaatgcaggagacagtcatgcaggattagctgttctagaggaaacgctttgcagctagcaaagcacatggcagacccgggaagcagccacacgtgggtccagtcgtggccctctcatcctgacacacaccaaccacatctttactgcgtgacggcaggtccagaaagtcagcctcaggcgccttcttctcaacccggtggtgtaaagaattgctgttatgcgtggttcacagtatcacaaagcagaggggatccatgattatgaataggtaaacagggacacgcaaacaaaaagccccaagccaactcctgcgcatcgtttccacctccgcctctccaagtccaccaagccatgtggcacagtccttacagtggaacaaaccatcttaacactgaaaggagcaattctaaagatatccagacaaggcatggaaatttcttccatgtgcaacgggaaaagtcagtactcaaacactaactctgctatttcagtatcatatttctgtccactgacactttctctttctccctctggggatcctcctcccttaggaactctagttggattccagaagaggaccctgggatgctgctgggcatgggggtggggttatagagcccagggctaagcgttaaagaatgcaggttaagaccactacattatactggtgctttctggggacagctcacacatcaccaaacttgattccaaaattcagacaggctaaacctccctcgtgccctgctgagatcctggaagccaataatacagtaatgatcccccaaacaagaaaagcaatggcaacaaaatagtggaattttacatttacattttcatatatgagagattttcttacaatataaatattaaacaacaacaaagttgaacatagagctcgtcctcaaagatgctacgttattttaatcggtttaatgcatactgtagcacttttggatgcagaatttcagactcagggctttggacagtaagtttttgattattactgtctccacaagcaacctgttagaaaaactgacataaaatcaaattccctaaagtgaaataatctagacgcaaaaaagcaaatactgtatgatttcagagatgagaaaagagaacagtggttaccagcggctgagggaagacggccggggagttagtgcttaatgaggtcagaatttcagtttgagataacggaaaagttctgaagatgggatgttggtgatggttgcacaacaatgtaaatgtacttcatgttactgaaatgtacacttgaaatggctacaatgggccaggtacggtggctcatgcctgtaatcccagcactttgggaggccaaagcaggtcaatcacctgaggtagggagtttgagaccagcctaaccaacatggagaagccccatctctactaaaaatacaaaattagccgggcatggtggcgcatgccctgtaatcccacctactcaggagtctgaggcaggagaattgcttgaacctcgggaggctgaggttgcaattagccaagattgtgccattgcactccagcctgggtaacaagagcaaaa

SEQ ID NO: 588885 - DNA, 4001 bp, Homo sapiens
tggtttaagatttcagcatagctgagtgcttatactggatgaacaacttttcagctgtctttcaatcctcttagtgatagaatgtgcatgatcaagattttaatataaggaagacattaaggaatctagtcagaatttaaggcaccaattttgctcatgaactttctctagcacgttttgcaaaggcatagggccaaaaaccacatcagacataaaaggtcttaagatacccaaaggtttaattgccactcacctgccttgttactgtgatttcatcatgaacctcaaatcctaaaggactttgctttttgtcagaattatcaaaagtgattgacacagaggctttggtaataccagcctgcccatttttgtaaactaaatcttgtaaattagaagcccgaacctaaaataaaatatgaaaagtgtaacaattacaaaactccctaccgtacaaagcagcactaaaaatgggtcccttgctgttggaaaacccaccaacgtagtgtccattaagtagacaaggttaggcagctgcatcctctggcaagaaaaacaaggaaaataggcaacaacctgcaatggacacttttctctacagaaccttttcaaccctgaattgaattgtttcctattcattttttaataaaaagttactttgcaagatataaggaaatactgtcccaaagattttcactagtcattcaatccattaataggatttgaaaaggcatcattacacagggttgaaaatactctggaatgagactgctttacagtcagaatgcctgagttttgaggcactgttacttctaaacatctctaagtttctattttctcatctaaaggagtaatattactttccttaaaaggttgcagtgaggtgtaatttacaaaaagtataaaaacacaaatgaagagaatatcgggacgtctccaaagttcagtgaggattctcctgccaacttaaattcaaataaatcagaaagtttacactttacctgagacaggttggagatgcccagcaaaaagcagatggagtccaatatgttggatttcccactaccatttaagccagtgatagcattgaagagggggtcaaaaccattgacttcggtcctctgagcataggacttgaatccctctagaataattgacttaatatgcattttcgatactgtcttgggtcagcaaacctctgacaggaatcaaacaggccacaaaccagttctgtacgaaacagaaataccaccacctaagtggaatgtaaacctggaatcataatgaacacgaggcaaaaacagcaacgatagggtgatagaaataaaacagccacttgacaaactatcttgtctgatgtaaagacatcgttcatctactcaaaaatataccagagttagccactatctggaaattaaaccattcaactgggaagtcttaactatttcttctacccgtttttccaggcttgccttctacttttatcatactctacctaaacaaagactatggattattacatatcccattatctttgcctataatgtgcttttctctgatactgacatagcttactctctactgcactcacgtctttgctcaaatgtcaccttactggagtcctccctgacctccctatgtcacctctccacaatccttcactcggctttctttttccttcatggtacttaaagctgatattagacggtcattacttgtctgtaagttcccgcagtgtcttcacctacgtccgtcattgcatccccgaattgtgcttgactccgggaggaggggaagtcatttaagtatttactagagatgagatgtatctcatattctccaacttcttgcttttactcaggcttttacctcgcttctccaggcctgtctacacctcttcgccctactccaaggtcgaacagaagctagcctttatttctaaggatcacctaaggtccctctgccactggtccccctccctacagcccccgcgccccgcgccccgcctcccgcctcccgcctcccgccaggaagtctggcccggcccaaccggccgtgctcacgcacacgcctcaccgctgcctcaggccaggggcttgacgcaccccaaaagctcctccgggtcacaaaggcagggaacagaacaactctctagccggggccgctacaaagcgaacttcaccatagcggctacaacacctgccacaccgctctcaacacccgcgccggaactatttattcctttgaatttcggcgcgagcaaaggaccccacctccattgcttatttcctgtgctggtgcctaggagctgcctgtctttagggttcaatttttcccctacactcgaaggattaaagccgcagggcaatagaatgagagtctcgataatggtagctccggggactccccggcaggggcctgggcactacaggagcagatagtgtatgttcacaccggcgtccggcactctatggtcagccccacacctcggccccgggtcctcgcgcttcgccagccccgccccgcctcggtccctctagttcgcgttaggcacactgcagactccgccttctccagtctgcggtgctggctgtggcttacttttctctcctcaaagcgacagttaggaagtggagaggcattctatgagtgttctcgtcggttctgttttggaagcttcagaatcttctcgggttggctcagattgctgcaaaataaaagctgtacttcttggggccagagaggcaccgtccttcgggggactctggcccgcgtcctggctccgccccgtactggcctcggacctcggggagcgtttttatctgaagtttccacgtcggaaagggatcgtagtctaccgagagctgttccgagcccagaggagaaattgtgtggtgctaaatagctattcatctcccttataccggaaagcgttgtaatgataagccgacctaacctgttggggattttttctggaaaccttttaagacagttcatgttattgagttctgaatattaggctatattgcaaggggctttttaaaatccacgtagcaaccctatgaaatcagaaattgccctcgttttacaaatgagttaaatgagaccaagtaaaaggttaaacagcttgtctagtaagctgggatttgttcccaggcggtctagctccagattgcatgcttttaaatactaggcttcatgcatagaatctagtattattagccgatcctattattagtatgtattgttctttaggaagaaaaaacgtgtcaggattgctcacgtttccaagcacgttgatacttaagagttaggaagggcttaactccgaatgggtatggtgttaccctaagtgaggttcaaaaagatggtgtgggcaacaatgctattttggaatggcttgatccttttgggcttccataacaaaatatcctagactgggtagtttatgaaccacagaagtttattcttcacatttctgaaggctggaatgtcacagaataaggtgtgtctagggaggggtgctttctctttagtggatagcaccttctggctctgtcctcgcatggtggagaggcagaggccctcgcttgggcctattttataaggaccttaatcccattcctcacttcccaagatgccacttgctaaaaccgtcagttcgggagttaggatttcaaaatgtgcattttgagggacacatttagaccatagcgtaggtcatgtttttaaagttgctttcttggccctggaatggcaatgcagtcatctgaattggtcttaacctaccaggaatgggcttatattttgaaaatatttctcgataagggagtaaaataagttgtatgggttttttgtttaagaaaggattcctttgtttactctggtatgcttatccacttctgtgatgtcaaccatgggtagtgacctaacattaatttaattcaacagatatctttgtctgccttgattcctgcatcccctgggctccacagctattcact

SEQ ID NO: 588886 - DNA, 4001 bp, Homo sapiens
cctaaaggactttgctttttgtcagaattatcaaaagtgattgacacagaggctttggtaataccagcctgcccatttttgtaaactaaatcttgtaaattagaagcccgaacctaaaataaaatatgaaaagtgtaacaattacaaaactccctaccgtacaaagcagcactaaaaatgggtcccttgctgttggaaaacccaccaacgtagtgtccattaagtagacaaggttaggcagctgcatcctctggcaagaaaaacaaggaaaataggcaacaacctgcaatggacacttttctctacagaaccttttcaaccctgaattgaattgtttcctattcattttttaataaaaagttactttgcaagatataaggaaatactgtcccaaagattttcactagtcattcaatccattaataggatttgaaaaggcatcattacacagggttgaaaatactctggaatgagactgctttacagtcagaatgcctgagttttgaggcactgttacttctaaacatctctaagtttctattttctcatctaaaggagtaatattactttccttaaaaggttgcagtgaggtgtaatttacaaaaagtataaaaacacaaatgaagagaatatcgggacgtctccaaagttcagtgaggattctcctgccaacttaaattcaaataaatcagaaagtttacactttacctgagacaggttggagatgcccagcaaaaagcagatggagtccaatatgttggatttcccactaccatttaagccagtgatagcattgaagagggggtcaaaaccattgacttcggtcctctgagcataggacttgaatccctctagaataattgacttaatatgcattttcgatactgtcttgggtcagcaaacctctgacaggaatcaaacaggccacaaaccagttctgtacgaaacagaaataccaccacctaagtggaatgtaaacctggaatcataatgaacacgaggcaaaaacagcaacgatagggtgatagaaataaaacagccacttgacaaactatcttgtctgatgtaaagacatcgttcatctactcaaaaatataccagagttagccactatctggaaattaaaccattcaactgggaagtcttaactatttcttctacccgtttttccaggcttgccttctacttttatcatactctacctaaacaaagactatggattattacatatcccattatctttgcctataatgtgcttttctctgatactgacatagcttactctctactgcactcacgtctttgctcaaatgtcaccttactggagtcctccctgacctccctatgtcacctctccacaatccttcactcggctttctttttccttcatggtacttaaagctgatattagacggtcattacttgtctgtaagttcccgcagtgtcttcacctacgtccgtcattgcatccccgaattgtgcttgactccgggaggaggggaagtcatttaagtatttactagagatgagatgtatctcatattctccaacttcttgcttttactcaggcttttacctcgcttctccaggcctgtctacacctcttcgccctactccaaggtcgaacagaagctagcctttatttctaaggatcacctaaggtccctctgccactggtccccctccctacagcccccgcgccccgcgccccgcctcccgcctcccgcctcccgccaggaagtctggcccggcccaaccggccgtgctcacgcacacgcctcaccgctgcctcaggccaggggcttgacgcaccccaaaagctcctccgggtcacaaaggcagggaacagaacaactctctagccggggccgctacaaagcgaacttcaccatagcggctacaacacctgccacaccgctctcaacacccgcgccggaactatttattcctttgaatttcggcgcgagcaaaggaccccacctccattgcttatttcctgtgctggtgcctaggagctgcctgtctttagggttcaatttttcccctacactcgaaggattaaagccgcagggcaatagaatgagagtctcgataatggtagctccggggactccccggcaggggcctgggcactacaggagcagatagtgtatgttcacaccggcgtccggcactctatggtcagccccacacctcggccccgggtcctcgcgcttcgccagccccgccccgcctcggtccctctagttcgcgttaggcacactgcagactccgccttctccagtctgcggtgctggctgtggcttacttttctctcctcaaagcgacagttaggaagtggagaggcattctatgagtgttctcgtcggttctgttttggaagcttcagaatcttctcgggttggctcagattgctgcaaaataaaagctgtacttcttggggccagagaggcaccgtccttcgggggactctggcccgcgtcctggctccgccccgtactggcctcggacctcggggagcgtttttatctgaagtttccacgtcggaaagggatcgtagtctaccgagagctgttccgagcccagaggagaaattgtgtggtgctaaatagctattcatctcccttataccggaaagcgttgtaatgataagccgacctaacctgttggggattttttctggaaaccttttaagacagttcatgttattgagttctgaatattaggctatattgcaaggggctttttaaaatccacgtagcaaccctatgaaatcagaaattgccctcgttttacaaatgagttaaatgagaccaagtaaaaggttaaacagcttgtctagtaagctgggatttgttcccaggcggtctagctccagattgcatgcttttaaatactaggcttcatgcatagaatctagtattattagccgatcctattattagtatgtattgttctttaggaagaaaaaacgtgtcaggattgctcacgtttccaagcacgttgatacttaagagttaggaagggcttaactccgaatgggtatggtgttaccctaagtgaggttcaaaaagatggtgtgggcaacaatgctattttggaatggcttgatccttttgggcttccataacaaaatatcctagactgggtagtttatgaaccacagaagtttattcttcacatttctgaaggctggaatgtcacagaataaggtgtgtctagggaggggtgctttctctttagtggatagcaccttctggctctgtcctcgcatggtggagaggcagaggccctcgcttgggcctattttataaggaccttaatcccattcctcacttcccaagatgccacttgctaaaaccgtcagttcgggagttaggatttcaaaatgtgcattttgagggacacatttagaccatagcgtaggtcatgtttttaaagttgctttcttggccctggaatggcaatgcagtcatctgaattggtcttaacctaccaggaatgggcttatattttgaaaatatttctcgataagggagtaaaataagttgtatgggttttttgtttaagaaaggattcctttgtttactctggtatgcttatccacttctgtgatgtcaaccatgggtagtgacctaacattaatttaattcaacagatatctttgtctgccttgattcctgcatcccctgggctccacagctattcacttgtattgattctgttaactcttacacattaactttgagctgtgtctccttccttttatcattttgtgagtaaagaattttaatttgccaacaaatcctaatgtggactttgtcacgttgtgaaataaagtgattttttggtatggaaatatgtgttaagacagactgttagtctttgcactttaacaactagctgatacacttacgtcacatggatgaaaacatacacaagtgcactgttgttggataaggactcctgggtggttagaagaatgtgcagatctaactact

SEQ ID NO: 588887 - DNA, 4001 bp, Homo sapiens
gaaactagcctgggcaacatggtgaaaccccatctctacaaaaaaattttaaaacattagccaggtatggtacgcgcctatagtccgagctacttgaaaggctgaggtaggaggatcacttgagaaggggaggtccaggcttcacggagccctgatcatgccactgagctccagcgtgggcaacagagcaagaccaaagactttcatatcttctttacaaagccctttctcatactcgtagacaaaactaaccacttcatcctttgtgaaggatcctgatatatgttgttatggtatctaactcatttgattacatttatctttcctgatctggattcaaatagcaatgcaactatgtaacagctgcgtaaaactgggcaaaataacctactgagcttctttcagcaatggaaattatcaagatagagttgttatgaagaaagaatgagtgcactatgtacctggcacacaataggtgcttgaaaaaaaaaggtagtattgttattacaattctgttatccttatgccactatgtgcaagctttaaaaagacttccggccggacatggtggctcacgcctgtaatcccagcactacgggaggccgaggcgggcagatcacctgaggtcaaaagttccagatcagcctggtcaacacggtgaaaccgcgagtctactaaaatacaaaaaaaaatagctgggcgtggtggcggctggctgtaatcccagctacgcgggaggctgaggcaggagaattgattgaaactgggaggcggaggttgcagtgagccgagattgcgccactaccttccagcccggacgacagtatgacactccgtctcaaaaacaaaaactagccgggcgtggtggcgcgcgcctgtagtcccagctactcgggaggctgacccagaagaatcgcttgaaaccgagaggcggaagttgcagtgggccgagatcgcggcacagcactccatccagcgtgggctacaggagcgcaactccgtctcaaaaaaaaagaggaaaaaaaaaaaaaaaaagacctggaacaaatgaactggaaggtgctaggcaaatacatgatatatttaaaacttactaaattctaaagcggtaactagttgtctgaaggggagagggaggaaccagggaagaaaactgggtttagtggggtcaagggtttgtagggaggtccaacaattgccagtaagtgtttaatttttttgtacctgtaacctccattcccgaacaacctttaccgtcttatctactcctctctggcaaatgcctaccctaagaatccgccacagcatcactatcacgccgaattaactgttgcctcctcttaagttcccggggacaatacttctgtgaattccagaccagggccgctatggatcgcgactcccagcgggcagagacctactccctcctacaaccactacctgctacatgacacctttggaaaaccttggctgactaaatttaaaaaccacatcacccaaggcacacatctcctacatcatacacgtcaatctccacagcctacgtaggaaaatcctcaagggaaccccggcacgaattcaaggccagacccacaagccaggtacacacccacacgcccacgcccgcgcgctgccggagccccggggcctgctggccagcacacctccacacccgcggcgcggcctccgggcaacttacaggaagttctccatcgagatgcggacgatagagccttccacgaaaggcccggacgactgcaacagcggcagctgcggggccgaattcttcctcttgctcgggacctccgacgaagggtctctcgggagagctctcttggaaggctgggggcttggagttgacgtcttcttgctcggagtcgccatcctggcttcctcagcgtcccacagcgacttccgttcccaccgtccggcagcccaggcgcccaagcgcccatccacccaggcgccccgctcccgcgcgaactgccgcgaactgttaccgcgcgctcgctcccgcgatctcgcgccgcgcctgcgcagttcaggtccggcgacgtcagcaggcccgccccgcccctcccgcgctccgccgcgctgtgcgaggcccagactgagggcgaaacagcaggcaggactgggtggagacgttcggggacgtggcaactggagtttcttctccgtatatttcggcattcagttcctttttttttttgttttaactcaggaaaaaatctcaattgcgtttagtattttgaaagccactttattgcttcccgagcctcagtcatgtgtggtgggaggctgctgtgggtggcacctggggcgtccacggccgccaaggcgggaggacgtcaggccctgcttgctcccaccccttccaggtgagagctcccgggcacgcccgtcgttggctcttcgtcctcttggtgttcttccctgttgcttcaaatcaggttcctgtctcaaaaatccgaaaaagaaatcctcccaaatgactctgtgcccgacgctccgttaaggcatcgtgctaggcgttctcaaactcgtgaaatgactacactgcacaggttaacctcattgctactcttccccttgcctcctaattctctggttaaacttccgcccccgaggtttctagaaatccctgagctggaatgcgctgccttcattaagagggtgttctgcttccgtctgctcacattcatctagtaagccctctcgttaaagaggaggcagcacaccgaggcctgtctagaacttctttcatttaaccaacagtgaatatctaatctacaagaaactggagccgtggcagtttaggagcctgccaaggttgcatccctgggagcttattttctattgtgggagacaggaaaagaacaagtgaatcaactgtgaaattaaataattcaaacttaaagctgttggaactttaaattattctgagccttgcgaagaatgtggcgatggggcctgagtcccatggcatacagctgcaatgtctgccttgttttttcctataatcaggaagaccaaacagagacagaggtaagaccccctcagatcactacccccttcataaattaatatagttatcttccttggaatgtagctatctataactaatctaatcgctgtaatttatgcactgctcttgtattgaaaatgtactcctgctgaaccttctctgtttctgcctgtgtaaatgaaaccttaacttcactttggaacattgaccctatttgtttggagttggtgtttccaggtggctgtcctcaagctttgcgttagaataaactctatacttaatgatattttctgaatttcactacttaaggctgacacaacaaatgattagcataatgtcagactgtgacaggtgttaggaagaaaacaaaatgaacctgatgggtgggaggtacggaaggcctcttagagaggtggtggtgtttaagataaactctgaaggacgagaagaaactgtgacgatctgagaaaagagcaccccaggcaaaagaattttgctggaacataccagtaaggacaaaagctctgaggtgggaaggccagtgttgctgcagagcagtgaacaaggttgcagagcagaaccttgtccatcgtggaaaagcctgaattttatttttaaagcaatgggaagccattgcaaagttttaagcaggagagggccatgttctgactaaagcttttaatttttttatttgattttttttatttgatttttttgagacagagtctcacccagtcgcccaggctggagtgcagtagtgccacctcagttcactgcaaactctgcctccctcgttcaagcggttcttctgcctcagcctcccgagtagctgggattacaggtgcatgccaccacacctggctaatttttgtatttttagtagagacgaggtttcaccattttggccaggctggtctgtaactcctgacctcaagtgatccgcccacctcggtgtcccgaagtgctggcacta

SEQ ID NO: 588888 - DNA, 4001 bp, Homo sapiens
caaactggcagtgtggctctagagcatgtattcctgaggagaaagcaaacatcctcttttttttttttttttttgagaaatggtcacttgcatcgctcaggctggacagaatagtggcgtgattgtggctgactgcagcctgggcctcctgggatcaggtgatcctctcacctcagcctcccgagtagctgagaccacaggcatgcaccaccacactggctaattgttgtattttttgtagagacgtggttttgccatgttgaccatgctggtctcaaacttctgggctcaagtgatccatccacctcagcttcccaaagtgttgagatgacaggtgtgagccaccgcacctggcccctcttcttaaaaacaactataggccggccgcggtggctcacgcctgtaatctcaccactttggaaggccgaggcgggcagatcacaaggtcaggagatcgagaccatcctggctaacacggtgaaaccccgtctctactaaaaatacaaaaaaattagccgggcatggtggtgggcgcctgtagtcccagctactcgggaggctgaggcaggagaatggcgtgaacgtgggaggcggtgcttgcagtgagcggagatcgcgccactgcattccagcctgggtgacagagtgagactccgtctcaaaaaaaaaaaagggaactgattgctgctacctgcagtagtctttttctctcatggcccctttatgaggtatgcaggtatccagacttagacccctgttattctgctatgatactatcttccttagcacatgtccgttgacttccattttacactcccaaaataagtcatctctctcctcaaacagctcacatttgacatagccaaaatcaaattccctaccttcaaacagaaatgaatacataaagagctagaagctttgaagatagtctgggatttgaatcaaagttatgtgaccttggacaagtaggttaacatcatttcagtatttgctgaatgcataaacctcccttcctcctatgaaaagtctccaaaaaaggtcctctccctcccttacactcagacacaatttttatgtctgttaatttaattattattaagtgttggcaaggacaggtggaggatggagttctggaaaagcacactaaggtcttctttagtcactaattctcatcccctattccttgaaaatttttctttctagcccagtctccagtctgtctctccccagacaacccaaaattccgtgccagatcgggcctgatagttgttcattcattccaaaagctagttgttcattcattccaaaagcaattaactcttcctctaaggtatgctagacactgagaccacaaggaaaaggagctcctaggcaccgacaaaggctagtttggggtgaggttatcaaacagtgacaatactgagtgataaacgctaggcagagaaaagcaaaggggccgtataagcagagacaacgaatcacattgcataagctggacagggagagaagcaaggcttaaagagacctatccccttgcgcagataattagactggagtccagagtggatccttaatttggtcaatcacagcgcgccagcagtcggccaaggacagaacttaggtctgcaaggtgtgttttccccacccgtgccacctccctcgaggttttgggcttcacgtctgagagctgctactttcctgtgggcccacctccgaggtagcgagatccaagatgcttctttgggggcaaggaaatggccctccactccctggcctctcggatgccttctcccgagtaccctccgccccacacccttaacctccaggcccccggcaaggcgcgaacatccccaccgcaggactcactccgaagattcgatttcgatcgacatagccgtatctctccgggagcaggccccagctctccctcaaggccagtcgcgcaacacaccaacgacacctccggcggacacctaacgtcacttccgcttgggtcggcgtctggctcccgctctggagatagagtgaacgaagagtaggggcgaggttcgcgtaggggcggagccctcaggggctgtcagagggcggagtttatgcccctgccccagagaaatacgcatcaggaggaagactgtttaaaagcaggccggagccgggtgcggtggctcacgcttgtaatcccaacactttggaaggccgaggcgggcgatcacctgaggtcgtgagttcgagaccagcctgaccaacatggagaaacccccgtctctactaaaaatacaaaattagccgggcgtagtggcgcatgcctgtaatccctactcgggagcctgaggcaggagaatcgcttgaacccaggaggcggaggttgcggtgagccgagatcgcgccattgcaccccagcatggaaaacaagagcgcaactccgtctcaaaaaaaaaaaaaaaaaaaaaagaaagatagaaaagaaaaagaaaaaaagcaccgggcgccatacagctcacaaatgtactgaaaaagaaaagcgctggggcggagcgcggtggctcgcgcctgtactcccagcgcgcgagttcgagaccagcctgggcaacatggtgaagccccgtctctactaaaaatacaaaaaattagccgggcgtggtggcgggggcgcctgtaatctcagctactcgggagtctgtggcaggagaatcgtttcacctctggaggtggatgcggtgagccgagatcacaccattgcactccagcctgggcaaggagagcaaaattccgtctcaaaagaagaaaagaaaagtagtggtgataagattgtagtaagaaaagcaaagaaaagaaagaagaaaagaaagaaaagaaaagaaagaaaagaaagagcactggtttggaaagattgctttttttttgagacggaatctcgcactgtcgcccgggctgaagagcacaatggcgcgatctcggctcactgcaaactctgcctcccgggttcaggagattctcttgcctcagcctccggagtagctgggattacaggtttcttgccatcacgccaggctaattttttgtatttttagtagagatgggatttcactatgttggtcaggctgttctcgaactcctgacctcgtgatccgcccgcctcggtctcccaaagtgctgggattacaggcgtgagtcactgcgcccagccaatgttgctttcgtttgatgtaattagttgattagatttaagatgaggctgaatatgcaatacctgatgggatattaatacattcaaaaccaacataacactagccaaaatttataggaagagttaattgaggattttggttggttggttggttttgcgtttttttgaatcaaggactcgctttgttgcccatgctggagtgcagtgtctcgatcgtggcacactgcagcctcgacccctccagctcaagcaatcctcccacctcagccacccaaagtgctgggattactggcatgagccaccacgccctgtcacgggactttaggtcaaacacattattacatttgtagtgacaaatgaaatgtagagatatcagtgaacttcatacataaaacctatttttaaatattttattgctgttgtatataaattgtaaaaattatttgcagcacagtaataataaatctggccaggcgtggtggctcacgcctgtaatctcagcactttgggaggctgaggcgggtggatcacctgagttcaggagttggagaccagcctggccaacatggtgaaaccccgtctctactaaaaataagaaaatttgccaggcagataggtgtgcatctgtaatcccagctactcgggagactgaggcaggagaatcccttgaacccgggaggcagaggttgcagtgaggagagatcgaaccactgcactccaccctgggtgaccgagtgaccaaaaaataataaataaataaataaataaaataaatctgtgttccgaaattacatattgaaatgatgtatttgta

SEQ ID NO: 588889 - DNA, 4001 bp, Homo sapiens
gaggtagtatgaaataagtggactataaattggaaattataaatttcactattacatgcacaatttctctatattatcatacaacagtgcctctcaaagagtggtaggcagaccagaattcatctatgacctatttgttaaccaatctgtacagaaaatgacagtaagcatttagaaacttccattatcattgaataattttgtctattgaatttaattaaaaatttgaacttatattgtgtttgtcttttttaattccatttttctagtaattctttttatagtattttatcaaagcataaatctgtcaaagattaaaaatttttaaaaacaagaactgtcctttaccacaaatagtttgaaaaacactgtcagagtatttaggttgccccccagatctaagtagattacctctataaacaaacattcaaaaatattaaaaaataaacacaagtttgaatatggactgaatattatagattatgtatttacggttttcttaggtataataataccacaataattatgtaggagaatgatacttttagaagctatatgcttatgtatttacgggtaaattatcatgtctaacttactgaatgggggatagcaaaatgaaaaaacacacagcaggcatcccatacacacggctaaagtaaatatggtcaaatattaagaacagctgaatttaaggggtgggtatacagacaacaatcaatactgcactttcaacttttcaaaacataatgttgaaaaaatgtttaaataaataggtcataaaaaccaagtcctccataccccaaagtcaccaggtcagtattctccggaatgacttctggatcctcaccgtcctcaaggcatttcagtttatcaaggctaaaacaaaaaggaaaagcaatactttaaggtcgactctgcatctggttcacagcgagttagggttgttttcctaaatacattactgaattacgaagtcagataaaatccagcaggcggctcagagaggccagaacttaagacaacgatttctgtgattatattttataatgaaaaggccgatgaaggcagccagtactgttaaatggagaaagagattaaagttatttttatattttcatccccaaataaggcacttttaagaaatatttcagtaacagaatacccggaaggtccccaaaagaaaccagttagtcggggttttaacactcctctgatgaagtctcccgcagcttcaccattactcaggttcctccattgtcaaagtgtctgtcaatggcaggtacacgtcgctgttgccctgattgcttttctttattaacaagcactcttagaataagcaaatggaaaaactagtctttgatgcagctgtcttgtccctttgctccaactcgtagaaactgtgcattcgggtcccaggacttctcctggtgtcccaggaaggctccagcgggttgaaagctttaaagggtaatactcctagcccaggtctaaaccacaggcccttctcagggatgagtcccagaggagcgcacgagcaaggctgcaccctgtttgaccccaagctgcaagagcccctttgctccgcactcacccgcacaccgccctcagctcagccgccgcctccaggctgcagtccagatccctggccaccgcggcatcctcccggtcggagtcagctgcctggctcccaggcagagcggatgccggcggctccctcagcgacaagtccccggccccgcgcagacggccccgccacagctccccaaaggcgcccacatggaaagcgcgcgtatttagctcgggaagctcatactctggaaagttgcagccgccactgccggagactgggtcctgcctgccacccaccccgctacacgtagggccacctcggcttccttcagccatgttcgccccactccttcccctgcaaaagcctgcagatcaaggcctcgcagagcgtgatggaagttgtagttgcttggggcgcccggccggcgagcggcgaggcggcgcgggcagggcatcagaaactacatttcccggcaggccatgggcaggcccgccccagggcgcggcaccgcgaggctctacgtgcagggcgcagcattgttctccgacccgggcggtgcgggaaccgttgcggctgtcggttaaccgcagcgggtggggctgggtttctggtccccgagttacgtagcaactgtctctgcccggtagggcggcctcgccaggcgcttaggccccgttccttgcggctttcggactaaggggtgcagggctttttcttgactggggttcaaggactgctctgctgcctgattgctttagagcctaagaaacaaggagggcgagggccgagaccagggacacgaccagccctccagatctggttctttcacaagctccgcagaggccccatgttggtgtgcgtgtgcagtagtgtttcagagcgtctgtgtatcacacgctacatgattaaccctaatgtatgtttttaatgtttttaaaaattacaacaacctttccggatagggcgtatcaccccgtgttgctgttgaggaaggatttacctgcggggaaaatagaagcaggatcggaactcagtctggcttcagatggagctctctccatttctcagaggccctgaaggatacagcaggacatactatttatttattagactgtaatcacatgccatataattcacccatttgaagtgttcagtgatttttggtatattcacaggcttgggcaaccatcaccactatttgagagcatttttaccactcgaaagaagaaacttgtactttttagctatcacccctgatcctcccaactcctccagccctagccaaccaagaacctactttgtctctctagatttaactaatctggacatttaatataaacggaattatatggtcttttggtggctggcttaatgtttacaaggtttgttacaggtagttaggcatgagcagggcaggagagggctcttccctcacccactaggaatgtggggtgatgcttaggcatttatcacattgcctctaaaagtgataaattggcagccggtgccagggagaggccatttcctgatggcccacacctgttgcactaaagtgctcgttgaatgcaggtgacagggagaagcaacttcctgggcatatgcattaagagacaaaatcggggagtatgacctttcagggggactctatcggaaaagggaagaaagcctcagatgggcacgcatacaacttcatacatattgcgctgtgctcacttcccaagggtaaggagggcactgcgcatggaggcagcccaccctaagggaagaatcatgggaaaggagccagcctgtaaagtcctaggatcgaggtcaatatcacagttgacctcagtgacagcttgggactcttccgagcgtgctttcctttctttcctaaaggccttttaaataagcttccactcctgctctgaaacttgcctcagtctctttttgtgccttattgcccctcggtcaaattctttcttctgaggaggcaagaactgaagttgctgcagacccatacagatttgccctggtaacttggatacctgccacctgtaacacgttcatccattttgtagtatgtgtcagtacttcattccttttttggctgaataatattgcattgtatgtatatgccacattttatttatcaaaaagtttttaccttttggcgttgctatgaacattcatgtacacatttttgtgcaaatacgttttcatttctcttgggcatgtgcccagtagtatacagtcagccctccctatctgtgggttctgcatcctccaattcaaccaaccacatatcaaaaattacagtattcccaggttgcagaacctgaggataagaggaattttcctatgggcggattccacagggctgactgcaagaagagcatctgtcaattttggagtccacaggggtcttcgaaacagtccaccctgcagatac

SEQ ID NO: 588890 - DNA, 4001 bp, Homo sapiens
acagggtctcactccatcacccaggctggagtgcagtggtgcaatcacagctcactggagcctcggcctcctgggctcaagtgatcctcctgcctcagccacccaagtagctgcgtccacagccacgtgccactgcaccagctaatttctgtatagctgctcgtgttaactgacttgtgctgtaaacgtccccgctgccccacaggaatctgaggcacagagaggcgagctgtgaggggcaggacgcaggtgcacaactcacagctttccgcaagtgacagatgccacacaggagacagaggcatacagcaatgagctcagaaaaaacccaaggggtgtgatcaccaagctgttaacagtggttatttctggggacaatttcaatgacaaatgctttttaatttttttataacaaacgtgaatcatttttataatgcagaaaaaccaatatgggttcaaaccacgccccctcccaggctactttggaaggtggtggcaggcctgacccagtggcacagccagatcaggccaacagttaccgagatcgggggatcggcaggatccaagtcctcagaaggcagtgaatctgtcagaaacacaagcaacaccgtgttggtaaccagcgtcttgggcagggtgggggcgcagctcaccactgcttcttgggcagacctggggttgtgaggtagtgacagcgcctcaggctgaggctggcggtgagcggaccttccctccctgacagcggggtgggcactggaccaaggccgggttagccagatagagaaaactctgaccacacactggggacctccaggcacacaggacaaagctacacagggttcactggatggcacaagctatctttactggagagacagggaaagtttagcagaaaacggacctctccttcaggagcttagccggtcagatgggaggcacggatgtagaggccctcaccacaggagaaagatagcaggttgcctcagaggcaggccctgggtctgggagaggtgggaagcaaggctgggggggtctcctgtcagggcagcagctggtggggttggggtaggctcagaagctaaagggagcatggaggagagcatgtggggaggggagcatgttgggaggagaggctgtggggtggggagcctatggggtggggagcacatggggaggggagcacgtggggtggggagcacgtggggaggggagcacgtggggaggggagcacgtggggaggggagcacgtggggtggggagcacgtggggtggggagcacgtggggaggagagcacttggggtggggagcacgtggggaggggcacatgtgagaagaagagatcctaggggtgtgagctgtgttgaccatccaggcatggactgtccagactgccatctggtgaggttcaggcctgccccctcctcccaggatggtccactccagaagccctgcacaggcccaaggaggccaggcccagaccctgggatgcctagagcccagtgtacacacacagccagctggttcaggggctagcaaaggaggaattgtcagaagctctctggctggagtacagaaagacaccagtgttggcaaaaaattgggtctggtccaagcagcaccagccatcgtttattattattattattatttttagagacagggtcttgctgcgttgtccaggctggacatgaactcctgggatcaaacaatgctctcacctcagcctcaggagtccctgggtttacaggcctgagaaaccacacccggctaccatcactccctaatgtgcctgagaggaacccaggaggcagaccagctgttcttaccaggaccccaggaggctaggtacaaggggcttacctgcttcagaatctgactcgagacttgattctgagatctccacgtgggagcccgaggagccgggatccaaaatcctttccagctccttgatctcctgtgttatcttctctctttcagcatctacatccatgactcccgcctgcctccaaaacacaccccgagatgttagaaaccaagaccgtgccgggatcccattctccttcagacacacccgcccatgggggatggcaggagcctgctcggcagtgggcactgggctccccagagaaagattaataggccaggcacagaatcggggaaccctgggacaggaacctcagaccccacaaactcctgctatgtgctctgccaggagcctaagccccaagaacatctcccgcctgctctgaggctgcaaccagcacaggcagggagtggatgaacaaggacaggccccactgtcccgtctctgctcccacaccaagccacatggaaactggccacccagcgtagaaggtgtggggtgcagtggcaaagtcactacagggcaaggacacagcccgtgacccactttggccatcctgctctcccatgacacagagccggaccacagagggcatttgagaaacgttcacagagacacacactgagactgcccaggtggcaggcactaacagcatggttgggaaggaagctcccaaagggaaggctggctgttctctgtacatccagaacaacgcctggaacgtggcagtgcctgacactaacaaatgtttgtcaagcttttttcttaggaactgtggtccaggaagtctgaagggagaaggacgctagagagagagtgggagaatgaaacattagcagagaaaatctaaaggaatcactagcacagacccgggagcccaaaacacccaacaacaaagagaaacgccctcccccgtccttggcgtggctctccctgctggaggctgactggggccctgcccaactggaacaaaaccaaagcatccacccgcgagcaccgttagccgcatcagcagcccaggtcccctcactccttcacaaagccccttgtttatgcccgaaatgcttgtgaacctgtaaactcagttaacagccggccagaggcagagctggcagcgaccgcaggctggttcagcgcctccgggccggcggagacgctttcctctggaagcctcacacgaggctgctgcctccccctccccgtgtcgctcaggtgagcaatgatcagcaggaaggaggtcaaagtcacacgtgctgagccactgacatcaggggctgtccctctccccgcacccctctcccaagggctggtcatgagggctgcccaccaagacggagcgcagcaggcggtccctccagccccagctgcggggacgccacccagactcggctgggcccagggaaccccaggatgcgccaggacgatgggcgtttaggcactggcttgggagacagacccggcccaggcccagttccgcctcctgctcgctgcgtgaactggggaaaccccctccgaggctcggccaccgcggaatcgccggcgcagtccccgagacgcacgcgggcgccctgcagccggggccgccccgccggagcctcctcggagcccgcagcccgctcccagccgaggggctcccagggccagaatccccgcgcgcccaggctcggccggacgggggccacgccgggcctcagtttccccgactttgggcgctgccccgcccccgtcccgggcctcggctatccgctcctcgggacagcgccccctccacggggagagccctgaagctgccgacgccacccgcgcctcacctgctgggcgcacaccttacctggccgcgcggaccccgccgtcgcccgggcgactgcagactcgacgcttccggcggctgcagaacaagagcgccgcgcgccggaagtcccgcctcctgaggcgcggggcacgccgggacggccgctgcggcctgccgggactagagaggcgaacggctcgatgctgccctcgcgcggccgccctgggggccgcctccgcgcgctctggaggggcgcgggtggacgcgggacctcaaggcaggggacagacagggacaggcacccggccacctggtcacgatccggaagaccggcccttactggc

SEQ ID NO: 588891 - DNA, 4001 bp, Homo sapiens
tgcagcccaagccaacaacttgactgcaacctcaagaaaggcctaattcagaaccactcagattgtcccacagacactatttccaggtgataagttttggggtaatttgctacacagcaatagataattaattcagtgtcccacacagaactgagaaggaaatgaggtttaacccccagttcctacactattttaagaccaatttttgtcgataagaaagcaaatttattcagttattcaacattttttggagacagggtctcactctcttgcccaggctggagtacagcggtgcaatcatagctcactgcagccttgaactcccaggctcaagcaatcctcccgcctcagcctcctgagtagcctggattacaggtgcatgccaccatgctgtgtgcgtatgtggaaacggggtctcgatatgttgcccaggctggtctcaaacttttggttcagagcaatcatcccacttcagcctcccaaagtgctggtattacaggtgtgagccactgcacctggcctccattagcttttttaattttcctgttcctaatgctttggaacttcactccctgctttcacaaaccctctgcagaaggtacatcaagtcgcactctctagtgattttaagtgctcagtgaccttctgactgcaaggagggcaggttatattttctcatactcctttttcactgtaccacatggtgtcccctctaacgggagaagaaagttaggtcccctgctcccattaatattgggacaagggggaattcatttagtattttactagggagagaaaatcttgatcacaagacctgagaacaattctaatttctgcagttagtgactaagtgacggcaggagcggggatacaatcactgctcaagtctccttcacagctgaaatggccatgggggtagggaggaggtcgtcccttacccctgcctggactctgctgtctctccaagcagcaggagggttgtgctgctctaagaaaatctggagcctccctccgtacaaagaaggtcaaagggcgagctttctttccatcaaccacaaaaccagcctctgccaaacctaaacagagtggtaggccgtcggaggtgaatggagccccagacagaaaaccacaacgaggctctcctcccgccgccggctggggtctgagtcaggtgactcctcaggacaaacagcaaacctaaacaaagatcactccccacatgactgactagggggaagaagactctcgctgtaagcccagggctgcccggtcccagcacggaaagccaggaactcctgctttctgtgcagtctcggaaactggaggagctacaagttatgcagcagctcagcctgcagggatgcacctggaggaactcggaaccccatccgaggacacaggcgccctgccctgaacacacgcctcccgctccaacacgcaggctggacccctccccaccagctgtcaccggtgcttgcgaccagtcacaggcagcgaagcctgtccctctgcggctgcgaccccgcggaggcggcagaggagacgcttcgccgagggctccggggccaggacacgcccgtcccccgggaaggggcggcagggtgggcgcggccccaggcccacgaaggctccggatccatcatcccccccacggggagcgaaataagcctcccactccccggccccaggcgccccaccttgtcaccgaagctgcgggccatcagcaggtccgggctgggcgtgctgtcaccacccacggcctcctcgctgctggagccggccagcgggtgcggcatgtcgcgcagggagtggggccccgtggacggcagggccttggggggcccgcccgccatggcgcgcaccgctcgggacgcgccgccgccgcttcctcctgctgcccgccgcggcgagctccccgagcaccccgggccgagccccgctcggccgccgcttaacccgaggccttgcaccggccgtgctgggggccgccgccacccgccggctggtctctgccggcgctcagacgctccgctccgcgccgcgcgcccccgctccgcgcccgagcccgccgcgggtccgctggcagcacggccgcggcgcccagcccacacagccacaccgcccacccgctccggccccgcccccgaggcgccgcggccgcccgggagggggcggggagggcggggaaggggcacgtggggaaggaaggacggagggagggagggaggaggcgcggccccgcccccgcccggcaggaagtgcgccctgggcctctgcggctgtcctcccagtgtccaacgttgcctcgcggaggccgccgtgcggagcaaatgtctaacggaaatcagaggtggaaaagaggttggaggagcctgttccgttccacccgcgtttactgatgcgcccaccagcagccacgcttggggctgggggctttgaggacacgcacgtgagtcagggtcttctggcctctaaggcacgcgcaggaagaaccctagatagacggaattacgacccatatcggaagaatagcataaagggcgacaaggctcaaatgagctagaggacatcgggtggggaacctggaagggacttcaaagaggcggtgtggggagtcttcaggctcactctgaggtccccattgtggcttgcttctgcagctgagctggatttgtgtaaagtcaaacctcagaacagcgagcatgagtagagagtctcaaatgatatgcgactcttcaactcacactttggccgaagagacttttgaaagaaccatgaggttcaagttattcttcatgcatttgtgcttcctttccaggccttgggctgagctgattctcagctttatttgctggcgtggtgcaaatagtcaaggtgttacttccagccctttggggtgtaggttcacctcctttttccaccttacctgtccctagatcttctgtttccaaggccaagtctttaaagggttttcagtccctctagcaaagtaatgggtagggaggctcatcgtgagggaccacattttccctacccattccaaactcaaaggtttgcctagccttacctgctaaaaggtgatgacagatgttgactctgggattcactaaggcctctaccacagttttctctagaaacaaatagaagagaatgcagagggttgaaatctacccaaaatatcagtcagagactctgagcttcaaagaccttcccctatttcccccaatgtaatttatatagggttggacccttagtcctcaagctatcatctttatctcctccacataagcctgccttggctgggaaaagtagcattcaaagggcactgggaacaattttaaatgctgcatctaaggaatgccaagttctggtcctcttggagttggattaaaattgttaacactttcacattcaagggctgcttacaactactacagaccctattatctgttcttctgaattagcatgaaaatgaatagcacaatataactagaaatgagtatttctagaaatgagtatatacatctatagatgtataacatcggtttttcttattgaatggtgctacttattttaacaaccaggctgccttaaatataatggacatccgtatggattaagactctatacaagctttctctttagtacaccaggggaaagtgaaaaaagaaccacatttgaattcggctttgtcactacaagtgggtgaccatgagcaagttactaacctcagtgaacctgttcctaacctaaaaaggaggagaatggagagcaggtaataataccttatgagatggttgtgagagttatatagcattctttatgtcatagtcctagcaaagtgctggcataaaataggtgctccctaaatgttaattacctaccttcctttccctttctgtcagattttctctactattcttatgaaataataaagagtttttgtaattaaatatgctttactattctgagtagggtctggttgaatatacatatatata

SEQ ID NO: 588892 - DNA, 4001 bp, Homo sapiens
cccagggtctggcacacctgcttgaatctgactcgacaacgtcaactgtaaaacatcctcctgcaacgagtgccacatttccttggaggaagcaagaatctgaaatttaagtaaacatgtaaaacaaagacagagacagtcagctgagaaacccaagacacggtgacaagactgctaccccagggcctggagggtcactgtgagctcggtccccgcttggaacttgggggcgagagtacaggttgacaacgaggctgaggttccacccccgaaaggccccaccattcctgaatcaggctgtgcatacccaagggcctcactgcaaatgctgggacccctgacctcacagatgacaacacagtttcattccccacacaggtcctcagccccagcactcacggggtcagccagagcccccagagccttggagaggggagaggagcctctctcttggagacgtgcagagaaatgatctagggggtgctcagccagggaggatcaggagaccccaactctcccccaaattggcacggagcatctcggcaacccatcaatgaacaggactcaggggcacaggagggctggaaaggaaggcttgctcctttccaggaacagaataacaacaggtaaggcttgaacaaatcaggaagtgccctgccgaaaacgtggcctgctctagccgtggagacccagagggctgaaggagacggggatgacaggggacacactgcctgcaaggtggtgagatgtcccatcaccgtgatgccggaggactgacggcgtctacccttacaactcacagcgtgctgctcctgactgggccccagggcgctggcaagccgcaggaactgcacagacatctccaggaccgaggccatgtcctcccgccggccatcgaactggggcagcagggcccgcagacgctcacagctcaacgacatccgcttcctggttccggtcaagaaacaaatacctctgggccctcctgccctccccgagaagggacagcaactgctagaacctgccagatagaccctgggcgcttgtcaggcagagggggctacaagatgactcagagctgcccccgtggtctgaagccccgagatccacatcagagcacagcctgggcctgacccctggacctcggcgacaggctgtccagcccaggcccaaaccatggctgctttgcggtgtggaaaagacagcgagggtcagaggcagtcagaagcacagagggtcacaggtgcacagcctcaagaggccaaggcttcaggataaagaggggctgcaggatgttccccaacagggcttttctggtttacttggagatgtgcagtctgtccttctcctgggcacaggccacgagcccctcccagctgcctgacacctggtggcagccccgaacataatctcacccgctccacccctttacagcgccctcacccctgggaggcaccaccactcacctgcgctccctctcgctgatcacgttccgccgaaggcaggagctgggaccctcggccaccgtaggggccttgggcgggcccgagccccgggccgagtcctcgcagcaggagagggcaccagacagggagccgctgccgagaaagccaagagcaccgggccctgagaaccccagaaaaggccaccaggagtcccagatgccagaatgggcgtctttggggtgcgggtggaagccaagactgggtcacgtagggacacggcccggccctctctgcaccccttcccctctcccagggtccagggctccgccccaggaggcccaggatgggtggagcccagcaacttgcggaagaacccctgggtacaggccttgggcccccaaccccttggccgccagcccaattcctcacttgcatcccctgacggtagggattctggagacctccgggtagggctcggagcaccgggacgccatgaactcgcagctgcggagcgaccccacgcgcacggccccttccgcaggcagccccgccccctcacgtgtgctctgcccacctgccacgtgctttccacctagcccaccccacccccacttgcaatccgcccccatagcgcatgcgctctagccctccccacgcagccagcccggggcccacgtgacccgcgttcctgcaaagaaggtgctggaaagggactcggggggtccacccactctatgcccccgcaggacgccaggggaaggggccccagcccaggtggccctgcctctacccttaccttcccgggggtcgcctcggttcccacttatgcggtggtctcggtgcccttgggcactttggagatgcgggctctgcccttaggagcccagcccctggtgggagtgggcgggctgggctgagttgtttagcccaggcctgggggacccagggacacagggagggggaagggtacccgcctgctccccagtcgcccacgcctccattttcccccaaatctagtacgcttgcagacgctgcgcctcagggtagggtcaccatccacacttctgggtcgcccagaaccaggggcatcttgtccccaccccaggccaccatcgtccgtgctcttcctcccgctgagctctgccgggcaccctcggaaccgtctgtcccttcacctggccctgcccaagcaccatccccgctttatgccctggggccccagctcgacccctcacctcacactctcaacaggtttctgcgggatcgcgggggtcctgcccatccaaattcagaaagctccggcgccaggtgtttgctcacctccccgctgaactccaggagccgccctgcgctgggcttgagtcccccagtacatacttttggggggatgacggagggaagggggaggtggagacccttcctctttcacggaggttgcggggggccctcagggaagcagaggggacgagggtggggggtgaggctggactgttgggaggacatccctggcctggctcgtgctgaggtcgtagcgggaggaggtggggtgggtggcaggggctctcctcccgagaggggaggcaagaaggagcccgggcaggtgccaccacacggggacgtctgtccggggtgccccagtctcctgtggagaaggcgcggctctgggcctcgggctggcatcctggactttgggccaaagatgggtgaagggtgtttggagcagagggaggttatgtaatataaggtggtgtctccatccctgctccgcccagccttggctgcaggtcagacatggaggaggacggggttggagaggagggcaaaagctctcggggacctgggcccctctcccggccctgcccctggccagggagggatggacgggctggcgatctggggctcctcagtggcagagtggggccaagtttttgtttccctaaagccctcggaatgtcatcaaacctgtgactctcctgccgttgacaacacgtgtaattactgctaattaatcacagatgcagatggtgcggcctctcagttttttctgagttccccaggcaggagggcgttggcagaaaggccaccatcttgccccggcggcacccgcccaggggtggtgggaccccggcagcagcaccggccaatctagggacctgaggaaaaacccccaagatgcccacgagctgtgtggcgggggcacaggctgaacctctgctggggacttagcatcctagacttccccgagtgttccccacccacccctcaaaagcatctgtgttcagcctgctgcctcctggagaaacagggaaggaccctctggagagacactggggaggccagggaccacaaagtacatggcatgcgccctccaaatggacctggccctccccctggccctcgtgggcacagtcctggcttagtgaggggcctggtccaccctgcaaaccaacaaagctctggggacagaaatcgcagttctccagagctctgtgtgaggctgagccagggtgacgcatgtgtaacagtgtgagcacgtgcacgggaaagggggcccgc

SEQ ID NO: 588893 - DNA, 4001 bp, Homo sapiens
ctctgtatccagaaggtctcaggttgctcctggcggtagtcgtgaggctgtgagggagggtactgagtaactcctggccttcagccctctctctcaacctctgggcttggtacttggccacagcctgtcagagcccagctggtgcaagtggcgggggatggggggtgggttctcacctttgttggggcaggagtccctgcttgtgccagctccattcggtagtcatggtgtgtcacagactcaacctcgaagagcttccttgtgggttcctgttctgcctgcacctctttactatgtagcccgaggggtgtcaaggccattctcacccaatttttctcctccccatccctcttcccctttacccaatcccttaccagatctgatgctgcaggagcatctccagcatggcttcacgcttccctgtgagagagttggggggtgggcaaggtggggtctggttaagaaggaggcccagaagaaactaacttgagaaaaggaagaagaaccttggggttccgcccttatatccactggagaatccacagccccaccagaaattccttcctcttcttccctctgagtaatgggctcgttctggcctaccctctcacatttcacacctcgaagtggccaatagacgtttcctggtggctggtacgagtctttctgggtggtgctggagggcatgggtgactttagttgcatagtcagcagtccccggtgtccgtgtcggaagaaaaaactctcagagccatcctgcatgcttgggacttgatccaggtggttggtggctctctgtggatcccaagttgaatgactataatatcccttctggtacccaccctcatgtaaactactgcctcccctaagaaactgagggcagccttcaagaaaagggagcaggccaaaactttaatacctcttcctcccagttgtagaggaggcactggccccgcggcaaagtttcatagcaaaccataagcttccctttaatgtctgggggtttccatagtcctcgggcacccggttctaagacttgcaaaaattcccaaggtggttgtttctggggctcccaggggcagtgctgactccaggaggtatagttagggacccgatctgccaccaggtttctgaaccctggaggaatacaggggctgagctcagagtcagggccagtgtctggaccaggcccagaggcaggaccaggatgagagccagagccatgaccaggaccagagccaggaccagagccaggaccaggaccagagccagagccagggacagagccacagccaggaccagagccagagccagagccatggccagcacctgagctggaaccaagaacaggcccagagctagagcctggaacagggccaggattagaactatggtcagttgtagtgcaagtgtcctgagcaatacaggaaacatagacgggctcaaagccaagactcccatgggctatattgtgggtaaagccgggtcccgcacagggctccccaagaaggctggggtcagaggacggctccatgaactcagaacagggcgctggggtctttgtagataatgcagctgctttggcagtggtgaaggctgcagtagctgcagcagctgatgcagccgctgcagctgctgcggttgcagctgccagggccgacctgggactgtcatctgaagaaggaaacggttccgaagtgggccccagtccttcggagctgggctgtatgtctaaagatctgaaagaaagcaaacacgacatggctgtcaaaagcgcagcagaggaagtcagctgaccttcctcgtccccttatgcctgcagccagagctgcggctctcaccgcgaccgcgaccgcgatccctccgtagactcgttggtctccatcttcagactccagctactgggttgccatagagacagcaaacaactcctggagcctgcgcagaagtacagctgggcggacttgcaggtggcggtggaggcaagtcctctgcggggcggaagtcttcagcctagtgctgttagggaggtccgctttccggtcccggcggcattccgcctcagacggggttttagggttccgctggcttaagacctcgccctccacgtccaaacagtctttgcgtgcggttttctaagatgatgctttatggggatatgttggaaacaggcacagggttgtggcattagattacagcctacttggtgtttgctgagaggcaagtagcttccccttagtttgcttagttcattctcaaaagtgagtggggtctttaacaaatgttaaggatgaaaataaacaaactagcttgagcaaaatggtgagacgtagaatagtgaaaaggcagccgcttttgtttgggtgtgattactcctcctctaataaaagaccctcatattgaccaccctcctcctaagcgcccttagaacctggtttgacctctgaagaagggccaggattggctttcagtttcttcctactcatttaggctcattcctactgttacttttctagaagcttgacctagggtggaccacttgtcaagaagacttacatatctgcaggcaacatttaaccacaggttggacctcctcagtgtctttcactcagaccagtcaaggggcatcatagccctgaatcagttttctttcccctttgtggtataaaattttatattaaagacaggagagcataattaagggagaacagttttattagcatcacagggtccatttttccctttccatccaagcatccagagtctggtgtcctttaatcagttggcaggttcaacctggaggccactggagctgccggcccccaagtacatgaatgtgcagatgatacacagattgtgcacccagcttcccatcgttgatcactgaaattgagcttggggttagggagtcaggatcatggcagaggtcgaagaatgaagatcatattgagaagtaggaatgagaattcataggtgagggaccaagggccaaaagtcactcaccaagtcggtatccatctcccaggccctcagcctttgctgtctgcttggccacaaggagtaggtgtcctagaagctatagagagagcggagggacataggtggcttcattcatagggagcaagacctctagctgggtccaggggctcctcccagccaaaccctggccctgttcttcccacctgctggtcttcttcttcagcctggctaatccgaggaatgggcttcttaggaatgaccaggaagtgcacaggagcctgaggggccacatcacggaacacaagacactgggggaagtgacaggccagaggccacgttacttcaacaggttggatggtatctacaacattcctaaggggataggtcctaagagcaccccacctgctggtcctcatagagaatgtcagctgggaggctcttgtccaggatccgggagaagatggttggggctgctcccccaggagttgcctgctgggccttggccacttcattcccatcagtcacacctgcagctcctcggacctgaaggtggatcgaccatattcaaaggagggagctggcagaagctgggctctgatagttgttaatttcgtccttctaataacctattcatcgttcccacccaggaggaaagttcctgaatttcagagcaccagcagcaaagggtagggccagaaggtgctggacctggttagataacaggcggtattattatcaggattcagcagtgcaattgattcctgctcatgtgtccacgaaatatagcactgtttagggaaaggatctagaatgagagactggggattttggtctcagttcctaccttaccataccactgaattacctcagataaattccttctctcagcttctaatataaaataaagggatggtttccataatctcttgcgatggcttgaatctctttccactctcaccttgttagtacatttccacttatttccgttacttgttttctgatctttaagccttgtcgcctgt

SEQ ID NO: 588894 - DNA, 4001 bp, Homo sapiens
tggggaattagaccctgggccccacccatctgtgtccaaagccacatgaccccgacgttaatagcaatgcatggaggacagggctttttcattcacaaagggcttccacacacggaccccccacccccacagtcctcacaactgccctgtggggagaaaggactgaggtggtctcaaagaggaatcagccttagcagagttggactgctgttcccagggagcgggaggccccctcacccccctccgcatccaggcaggcattggtctccccaggacacacacactgccccctgctgggtaacgcccagtccctggcccaccatggcttcattcccgcatggaatctgagaaggacccggggttctgatttccttcctaggagcccccacctcaggcttcttcaactgacttcttcagagtcagttccctccgggacagatgagatcaaattaactctagtgtgctctggcagagccttacctctcagactgtggtttttcatcctgcctctgggcctccgcctccgccctactggacactgggagacacgatgacgtacggagacaagatgacgcggagagacaagatgacaatgggagacaagaaagggtgagaagctaggaccggctctccctctctgccccagcccagccgcagcatgctgcactcaggaaccgcatggctctctctgtcttgctcagggagctctgtgtgcttcctcccactcttgtttaaatggatgataaactgcttttcttcttagaaaaacagcaagagggggctgggcgtggtggctcacgcctataatccaagcactttgggaggccaaggtgggttgatcacctgaggtcaggagtttgagaccagcctggccatggtgaaaccccgtgtctactaaaaatacaaaaattaggcaggcatggtggtgggcgcctgtaatccccagctattcaggactctaagacaggagaatcgcttgaactcaggaagcagaggttgcagtgagccgatatcactccatttcactgcaacctgcaccacagagcgagactccatctcaaaaaataaaataaaataaaataaaataaaataaaataaaataaaataaaataaaataaaataaaatgaaaataacacacacaaataaaataaaaatacacacacacacacacacacacacacacacagagggattttcaatatgaggtccaccacggacaccttcagtccctgttcctctgctccaggaacacccaagttcaggcccgcaggcactgctgagctatcaggtaggattctgcttcccaggagaccagaggagacaccaggccctggtgggaggccctcaggggcccagcacaggccccagatcaccccacacaggggaggctgggccctgagccacctgcaccagaaaggggctgatgagccagggctcagggcctggtctcggacagagacctccccagtctcatgactggtactggtgctgagtccactggtttgattttgccttgatgcctcctgtgctcccccacagatggactgagagcttgggatggaaatcccagtacactatctacccctaccaacccctggctgccctgcctctccctggaaggatgatgttctggtctcttctgagacttcccatcatagaaggctctccactggatttggaaaagtggaactaataataaaaagaaaggagagaatcaagctctgtgggttgggactgagggttccttacctttctcttcccaggcgatggtgagggtgggtcatcacaacggaagtaagataagtaggggagtaataggaagaagaaccccagggcaaacaccaaagtgaggaagatatccaacacccatggtgtggaactgggggcgtttagcgatgaggcactaagtaattttaaaggaaagggaagattctccatgtgaataggcgcgttgctttcaagcaactgagctctgggcatccccgtggggactagggactggggcccaggcctgcgtcacagaggtggggccttgatgtcacaaagggctcctttgttggggaggcgcatagggagggggaggtgcagcaggagggggaggaggagggagaggggcaggggagggggagactgaagcacagcccctccccaccccccaagctggggatccctccaccatcccaccttctagatccctccttcccactaagttttgtcagtgatagccaattttctattctttctccctggaatatagatattacctggttccttttatctgttggagacggtggcttgaggttacctattttatagcccttgaaaatctgaagttctgaaattttggctatgtaccagggatttttattctcagaatctcattcatcctcaactccagctttcccacactatgtttttgtcttgtatcaatccagggacaaaatgtaaatttcttttactcttatttagttttgcaaattttgaatagtaagttttaaaaaattatttctatctcactttcaatcaaagggaactacccacatacaattaagatttttttttgtcttttaaaattttatgtacttatgtatttattttattttaactttcgggatacatgtgcaggacatgcagttttcttacataggcaaatatgtaccatggtgatttgctgcacctatcaacccatcacttaggtattaaacccagcatgcattagctatttttcctgatgctctccctaccaccggccctccctcgacaggtgccagggtgtgttgtttccctcccagtgtccatatgttctcattgttcggctcccacttgtaagtgagaacatgtggtatttggttttctgttcctgtgttagtttgctgaggataatggcttccagcttcatccatgtccccgcaaaggacttgatctcattcctttttatggctgcatagtattccatggtgtatatgtaccacattttatttatccagtctatcattggtgggcattgggttgattccatgtctttgctattgggaacagtgctgcaataaacatacacgtgcatgtatctttgtaatagaatgatttatattcctttggatatacaataatggtatatctgccacagcctctgtactgcactgtgggaattctgcccagcgcaaaccacccagtctccctagcactggtgggggaaaaccaccggctagacccgcagtaatggcagtcacccttccccccaggaacttggtcttcttaggcagactccaggtgctgtgctagccagtggggattccatgccagtgggtcttagcttgtggggttctgtgggagtgggtctgcttggctccctggcttcagccctcttctcatgggagttgatggatctcctgcttcactggatttctgcgagccaccagagtacgcagaaactcctacagctcagtacctgcccaagtggctgccagctggagcccctgctatgggtctgcacagctttgtgcttgggacctaaggccctggtggtgtggactcacaaagggattacctgttctggggtttgcaaaaatctgtgggtaaagcacagttccccggttgggtagcacaatccctcactgcctcccttggctggaggagggaggtctctttgccctgtgtagctcttgggtgaactgtcgcccaactctgcttttccttgctctccatgggtcacaccaactgcctagtcagtcccaatgagggaatctggatacctcagttagaaatgcagaattcactcgctgtttatgtttgtctcagtgggggctgcagagtagagctgtttctactcaaccaacttggcccctccccccaattaaaataattaatattcaaaatttgtaattctaattatgaaacagttataagtagttaaaccttcaagtggtatttctgtaaatgtatagcattcacagttctggacttggtaatgcttaaagtgcacgataacttatgggactgc

SEQ ID NO: 588895 - DNA, 4001 bp, Homo sapiens
gttctcacaggaggctgagtggctgtttctttagggaggaccatggggaattagaccctggaccccacccatctgtgtccaaagccacatgaccccgacgttaatagcaaggcatggaggacagggctttttcattcacaaagggcttccacacacggaccccccacccccacagtcctcacaactgccctgtggggagaaaggactgaggtggtctcaaagaggaatcagccttagcagagttggacagctgttcccagggagcgggaggccccctcacccccctccgcatccaggcaggcattggtctccccaggacacacacactgccccctgctgggtaacgcccagtccctggcccaccatggcttcattcccgcatggaatctgagaaggacccggggttctgatttccttcctaggagcccccacctcaggcttcttcaactgacttcttcagagtcagttcccttcgggacagatgagatcaaattaaccctagtgtgctctggcagagccttacctctcagactgtggtttttcatcctgcctctgggcctccgcctccgccctactggacactgggagacacgatgacgtacggagacaagatgacgcggagagacaagatgacaatgggagacaagaaagggtaagaagctaggaccggctctccctctctgccccagcccagccgcagcatgctgcactcaggaaccgcatggctctctctgtcttgctcagggagctctgtgtgcttcctcccactcttgtttaaatggatgataaactgcttttcttcttagaaaaacagcaagagggggctgggcgtggtggctcacgcctataatccaagcactttgggaggccaaggtgggttgatcacctgaggtcaggagtttgagaccagcctggccatggtgaaaccccgtgtctactaaaaatacaaaaattaggcaggcatggtggtgggcgcctgtaatccccagctattcaggactctaagacaggagaatcgcttgaactcaggaagcagaggttgcagtgagccgatatcactccatttcactgcaacctgcaccacagagcgagactccatctcaaaaaataaaataaaataaaataaaataaaataaaataaaataaaataaaataaaaataacacacacaaataaaataaaaatacacacacacacacacacacacacacacacacacagagggattttcaatatgaggtccaccacggacaccttcagtccctgttcctctgctccaggaacacccaagttcaggcccgcaggcactgctgagctatcaggtaggattctgcttcccaggagaccagaggagacaccaggccctggtgggaggccctcaggggcccagcacaggccccagatcaccccacacaggggaggctgggccctgagccacctgcaccagaaaggggctgatgagccagggctcagggcctggtctcggacagagacctccccagtctcatgactggtactggtgctgagtccactggtttgattttgccttgatgcctcctgtgctcccccacagatggactgagagcttgggatggaaatcccagtacactatctacccctaccaacccctggctgccctgcctctccctggaaggatgatgttctggtctcttctgagacttcccatcatagaaggctctccactggatttggaaaagtggaactaataataaaaagaaaggagagaatcaagctctgtgggttgggactgagggttccttacctttctcttcccaggcgatggtgagggtgggtcatcacaacggaagtaagataagtaggggagtaataggaagaagaaccccagggcaaacaccaaagtgaggaagatatccaacacccatggtgtggaactgggggcgtttagcgatgaggcactaagtaattttaaaggaaagggaagattctccatgtgaataggcgcgttgctttcaagcaactgagctctgggcatccccgtggggactagggactggggcccaggcctgcgtcacagaggtggggccttgatgtcacaaagggctcctttgttggggaggggcagtgggagggggaggcgcagagggagggggaggtgcagcaggagggggagagggagggagaggggcaggggagggggagactgaagcacagcccctccctaccccccaagctggggatccctccaccatcccaccttctagatccctccttcccactaagttttgtcagtgatagccaattttctattctttctccctggaatatagatattacctggttccttttatctgttggagacggtggcttgaggttacctattttatagcccttgaaaatctgaagttctgaaattttggctatgtaccagggatttttattctcagaatctcgttcatcctcaactccagcttttccacactatgtttttgtcttgtatcaatccagggacaaaatgtaaatttcttttactcttatttagttttgcaaattttgaatagtaagttttaaaaaattatttctatctcactttcaatcaaagggaactacccacatacaattaagatttttttttttgtcttttaaaattttatttatgtacttatgtatttattttattttaactttcgggatacatgtgcaggacatgcagttttcttacataggcaaatatgtaccatggtgatttgctgcacctatcaacccatcacttaggtattaaacccagcatgcattagctatttttcctgatgctctccctaccaccggccctccctcgacaggtgccagggtgtgttgtttccctcccagtgtccatatgttctcattgttcggctcccacttgtaagtgagaacatgtggtatttggttttctgttcctgtgttagtttgctgaggataatggcttccagcttcatccatgtccccgcaaaggacttgatctcattcctttttatggctgcatagtattccatggtgtatatgtaccacattttatttatccagtctatcattggtgggcattgggttgattccatgtctttgctattgggaacagtgctgcaataaacatacacgtgcatgtatctttgtaatagaatgatttatattcctttggatatgcaataatggtatatctgccacagcctctgtactgcactgtggggaattctgcccagcgcaaaccacccagtctccctagcactggtgggggaaaaccaccggctagacccgcagtaatggtggtcacccttccccccaggaacttggtcttcttaggcagactccaagtgctgtgctagccagtggggattccatgccagtgggtcttagcttgtggggttctgtgggagtgggtctgcttggctccctggcttcagccctcttctcatgggagttgatggatctcctgcttcactggattactgcgagccaccagagtacgcagaaactcctacagctcagtacctgcccaagtggctgccagctggagcccctgctatgggtctgcacagctttgtgcttgggacccaaggccctggtggtgtggactcacaaagggattacctgttctggggtttgcaaaaatctgtgggtaaagcacagttctccgggtgggtagcacaatccctcactgcctcccttggctggaggagggaggtctctttgccctgtgtagctcttgggtgaactgtcgcccaactctgcttttccttgctctccatgggtcacaccaactgcctagtcagtcccaatgagggaatctggatacctcagttagaaatgcagaattcactcgctgtttatgtttgtctcagtgggggctgcagagtagagctgtttctactcaaccatcttggcccctccccccaattaaaataattaatattcaaaatttgtaattctaattatgaaacagttataagtagttaaaccttcaagtggtatttctgtaaatgtgta

SEQ ID NO: 588896 - DNA, 4001 bp, Homo sapiens
ctgggttctcacaggaggctgagtggctgtttctttagggaggaccatggggaattagaccctggaccccacccatctgtgtccaaagccacatgaccccgacgttaatagcaaggcatggaggacagggctttttcattcacaaagggcttccacacacggaccccccacccccacagtcctcacaactgccctgtggggagaaaggactgaggtggtctcaaagaggaatcagccttagcagagttggacagctgttcccagggagcgggaggccccctcacccccctccgcatccaggcaggcattggtctccccaggacacacacactgccccctgctgggtaacgcccagtccctggcccaccatggcttcattcccgcatggaatctgagaaggacccggggttctgatttccttcctaggagcccccacctcaggcttcttcaactgacttcttcagagtcagttcccttcgggacagatgagatcaaattaaccctagtgtgctctggcagagccttacctctcagactgtggtttttcatcctgcctctgggcctccgcctccgccctactggacactgggagacacgatgacgtacggagacaagatgacgcggagagacaagatgacaatgggagacaagaaagggtgagaagctaggaccggctctccctctctgccccagcccagccgcagcatgctgcactcaggaaccgcatggctctctctgtcttgctcagggagctctgtgtgcttcctcccactcttgtttaaatggatgataaactgcttttcttcttagaaaaacagcaagagggggctgggcgtggtagctcacgcctataatccaagcactttgggaggccaaggtgggttgatcacctgaggtcaggagtttgagaccagcctggccatggtgaaaccccgtgtctactaaaaatacaaaaattaggcaggcatggtggtgggcgcctgtaatccccagctattcaggactctaagacaggagaatcgcttgaactcaggaagcagaggttgcagtgagccgatatcactccatttcactgcaacctgcaccacagagcgagactccatctcaaaaaataaaataaaataaaataaaataaaataaaataaaataaaataaaaataacacacacaaataaaataaaaatacacacacacacacacacacacacacacacacacacagagggattttcaatatgaggtccaccacggacaccttcagtccctgttcctctgctccaggaacacccaagttcaggcccgcaggcactgctgagctatcaggtaggattctgcttcccagaagaccagaggagacaccaggccctggtgggaggccctcaggggcccagcacaggccccagatcaccccacacaggggaggctgggccctgagccacctgcaccagaaaggggctgatgagccagggctcagggcctggtctcggacagagacctccccagtctcatgactggtactggtgctgagtccactggtttgattttgccttgatgcctcctgtgctcccccacagatggactgagagcttgggatggaaatcccagtacactatctacccctaccaacccctggctgccctgcctctccctggaaggatgatgttctggtctcttctgagacttcccatcatagaaggctctccactggatttggaaaagtggaactaataataaaaagaaaggagagaatcaagctctgtgggttgggactgagggttccttacctttctcttcccaggcgatggtgagggtgggtcatcacaacggaagtaagataagtaggggagtaataggaagaagaaccccagggcaaacaccaaagtgaggaagatatccaacacccatggtgtggaactgggggcgtttagcgatgaggcactaagtaattttaaaggaaagggaagattctccatgtgaataggcgcgttgctttcaagcaactgagctctgggcatccccgtggggactagggactggggcccaggcctgcgtcacagaggtggggccttgatgtcacaaagggctcctttgttggggaggggcagtgggagggggaggcgcagagggagggggaggtgcagcaggagggggagagggagggagaggggcaggggagggggagactgaggcacagcccctccccaccccccaagctggggatccctccaccatcccaccttctagatccctccttcccactaagttttgtcagtgatagccaattttctattctttctccctggaatatagatattacctggttccttttatctgttggagacggtggcttgaggttacctattttatagcccttgaaaatctgaagttctgaaattttggctatgtaccagggatttttattctcagaatctcgttcatcctcaactccagcttttccacactatgtttttgtcttgtatcaatccagggacaaaatgtaaatttcttttactcttatttagttttgcaaattttgaatagtaagttttaaaaaattatttctatctcactttcaatcaaagggaactacccacatacaattaagatttttttttgtcttttaaaattttatttatgtacttatgtatttattttattttaactttcgggatacatgtgcaggacatgcagttttcttacataggcaaatatgtaccatggtgatttgctgcacctatcaacccatcacttaggtattaaacccagcatgcattagctatttttcctgatgctctccctaccaccggccctccctcgacaggtgccagggtgtgttgtttccctcccagtgtccatatgttctcattgttcggctcccacttgtaagtgagaacatgtggtatttggttttctgttcctgtgttagtttgctgaggataatggcttccagcttcatccatgtccccgcaaaggacttgatctcattcctttttatggctgcatagtattccatggtgtatatgtaccacattttatttatccagtctatcattggtgggcattgggttgattccatgtctttgctattgggaacagtgctgcaataaacatacacgtgcatgtatctttgtaatagaatgatttatattcctttggatatacaataatggtatatctgccacagcctctgtactgcactgtgggaattctgcccagcgcaaaccacccagtctccctagcactggtgggggaaaaccaccggctagacccgcagtaatggcagtcacccttccccccaggaacttggtcttcttaggcagactccaggtgctgtgctagccagtggggattccatgccagtgggtcttagcttgtggggttctgtgggagtgggtctgcttggctccctggcttcagccctcttctcatgggagttgatggatctcctgcttcactggatttctgcaagccaccagagtacgcagaaactcctacagctcagtaactgcccaagtggctgccagctggagcccctgctatgggtctgcacagctttgtgcttgggacctaaggccctggtggtgtggactcacaaagggattacctgttctggggtttgcaaaaatctgtgggtaaagcacagttccccggttgggtagcacaatccctcactgcctcccttggctggaggagggaggtctctttgccctgtgtagctcttgggtgaactgtcgcccaactctgcttttccttgctctccatgggtcacaccaactgcctagtcagtcccaatgagggaatctggatacctcagttagaaatgcagaattcactcgctgtttatgtttgtctcagtgggggctgcagagtagagctgtttctactcaaccaacttggcccctccccccaattaaaataattaatattcaaaatttgtaattctaattatgaaacagttataagtagttaaaccttcaagtggtatttctgtaaatgtatagc

SEQ ID NO: 588897 - DNA, 4001 bp, Homo sapiens
tgggttctcacaggaggctgagtggctgtttctttagggaggaccatggggaattagaccctggaccccacccatctgtgtccaaagccacatgaccccgacgttaatagcaaggcatggaggacaaggctttttcattcacaaagggcttccacacacggaccccccacccccacagtcctcacaactgccctgtggggagaaaggactgaggtggtctcaaagaggaatcagccttagcagagttggacagctgttcccagggagcgggaggccccctcacccccctccgcatccaggcaggcattggtctccccaggacacacacactgccccctgctgggtaacgcccagtccctggcccaccatggcttcattcccgcatggaatctgagaaggacccggggttctgatttccttcctaggagcccccacctcaggcttcttcaactgacttcttcagagtcagttcccttcgggacagatgagatcaaattaactctagtgtgctctggcagagccttacctctcagactgtggtttttcatcctgcctctgggcctccgcctccgccctactggacactgggagacacgatgacgtacggagacaagatgacgcagagagacaagatgacaatgggagacaagaaagggtgagaagctaggaccggctctccctctctgccccagcccagccgcagcatgctgcactcaggaaccgcatggctctctctgtcttgctcagggagctctgtgtgcttcctcccactcttgtttaaatggatgataaactgcttttcttcttagaaaaacagcaagagggggctgggcgtggtagctcacgcctataatccaagcactttgggaggccaaggtgggttgatcacctgaggtcaggagtttgagaccagcctggccatggtgaaaccccgtgtctactaaaaatacaaaaattaggcaggcatggtggtgggcgcctgtaatccccagctattcaggactctaagacaggagaatcgcttgaactcaggaagcagaggttgcagtgagccgatatcactccatttcactgcaacctgcaccacagagcgagactccatctcaaaaaataaaataaaataaaataaaataaaataaaataaaataaaataaaataaaaataacacacacaaataaaataaaaatacacacacacacacacacacacacacacacacagagggattttcaatatgaggtccaccacggacaccttcagtccctgttcctctgctccaggaacacccaagttcaggcccgcaggcactgctgagctatcaggtaggattctgcttcccagaagaccagaggagacaccaggccctggtgggaggccctcaggggcccagcacaggccccagatcaccccacacaggggaggctgggccctgagccacctgcaccagaaaggggctgatgagccagggctcagggcctggtctcggacagagacctccccagtctcatgactggtactggtgctgagtccactggtttgattttgccttgatgcctcctgtgctcccccacagatggactgagagcttgggatggaaatcccagtacactatctacccctaccaacccctggctgccctgcctctccctggaaggatgatgttctggtctcttctgagacttcccatcatagaaggctctccactggatttggaaaagtggaactaataataaaaagaaaggagagaatcaagctctgtgggttgggactgagggttccttacctttctcttcccaggcgatggtgagggtgggtcatcacaacggaagtaagataagtaggggagtaataggaagaagaaccccagggcaaacaccaaagtgaggaagatatccaacacccatggtgtggaactgggggcgtttagcgatgaggcactaagtaattttaaaggaaagggaagattctccatgtgaataggcgcgttgctttcaagcaactgagctctgggcatccccgtggggactagggactggggcccaggcctgcgtcacagaggtggggccttgatgtcacaaagggctcctttgttggggaggggcagtgggagggggaggcgcagagggagggggaggtgcagcaggagggggagagggagggagaggggcaggggagggggagactgaagcacagcccctccccaccccccaagctggggatccctccaccatcccaccttctagatccctccttcccactaagttttgtcagtgatagccaattttctattctttctccctggaatatagatattacctggttccttttatctgttggagacggtggcttgaggttacctattttatagcccttgaaaatctgaagttctgaaattttggctatgtaccagggatttttattctcagaatctcgttcatcctcaactccagcttttccacactatgtttttgtcttgtatcaatccagggacaaaatgtaaatttcttttactcttatttagttttgcaaattttgaatagtaagttttaaaaaattatttctatctcactttcaatcaaagggaactacccacatacaattaagatttttttttttgtcttttaaaattttatttgtgtacttatgtatttattttattttaactttcgggatacatgtgcaggacatgcagttttcttacataggcaaatatgtaccatggtgatttgctgcacctatcaacccatcacttaggtattaaacccagcatgcattagctatttttcctgatgctctccctaccaccggccctccctcgacaggtgccagggtgtgttgtttccctcccagtgtccatatgttctcattgttcggctcccacttgtaagtgagaacatgtggtatttggttttctgttcctgtgttagtttgctgaggataatggcttccagcttcatccatgtccccgcaaaggacttgatctcattcctttttatggctgcatagtattccatggtgtatatgtaccacattttatttatccagtctatcattggtgggcattgggttgattccatgtctttgctattgggaacagtgctgcaataaacatacacgtgcatgtatctttgtaatagaatgatttatattcctttggatatgcaataatggtatatctgccacagcctctgtactgcactgtggggaattctgcccagcgcaaaccacccagtctccctagcactggtgggggaaaaccaccggctagacccgcagtaatggcggtcacccttccccccaggaacttggtcttcttaggcagactccaggtgctgtgctagccagtggggattccatgccagtgggtcttagcttgtggggttctgtgggagtgggtctgcttggctccctggcttcagccctcttctcatgggagttgatggatctcctgcttcactggatttctgcgagccaccagagtacgcagaaactcctacagctcagtacctgcccaagtggctgccagctggagcccctgctatgggtctgcacagctttgtgcttgggacccaaggccctggtggtgtggactcacaaagggattacctgttctggggtttgcaaaaatctgtgggtaaagcacagttctccgggtgggtagcacaatccctcactgcctcccttggctggaggagggaggtctctttgccctgtgtagctcttgggtgaactgtcgcccaactctgcttttccttgctctccatgggtcacaccaactgcctagtcagtcccaatgagggaatctggatacctcagttagaaatgcagaattcactcgctgtttatgtttgtctcagtgggggctgtagagtagagctgtttctactcaaccatcttggcccctccccccaattaaaataattaatattcaaaatttgtaattctaattatgaaacagttataagtagttaaaccttcaagtggtatttctgtaaatgtgt

SEQ ID NO: 588898 - DNA, 4001 bp, Homo sapiens
aggggcctgggatctcacaggaggctgagtggctgtttctttagggaggaccatggggaattagaccctggaccccacccatctgtgtccaaagccacatgaccccgacgttaatagcaaggcatggaggacagggctttttcattcacaacaggcttccacacacggaccccccacccccacagtcctcacaactgccctgtggggagaaaggactgaggtggtctcaaagaggaatcagccttagcagagttggacagctgttcccagggagcgggaggccccctcacccccctccgcatccaggcaggcattggtctccccaggacacacacactgccccctgctgggtaacgcccagtccctggcccaccatggcttcattcccgcatggaatctgagaaggacccggggttctgatttccttcctaggagcccccacctcaggcttcttcaactgacttcttcagagtcagttccctccgggacagatgagatcaaattaactctagtgtgctctggcagagccttacctctcagactgtggtttttcatcctgcctctgggcctccgcctccgccctactggacactgggagacatgatgacgtacggagacaagatgacgcggagagacaagatgacaatgggagacaagaaagggcgagaagctaggactggctctccctctctgctccagcccagccgcagcatgctgcactcaggaaccgcatgactctctctgtcttgctcagggagctctgtgtgcttcctcccactcatgtttaactggatgataaactgcttttcttcttagaaaaacagcaagagggggctgggcgtggtggctcacgcctataatccaagcactttgggaggccaaggtgggttgatcacctgaggtcaggagtttgagaccagcctggccatggtgaaaccccgtctctactaaaaatacaaaaattaggcaggcatggtggtgggcgcctgtaatccccagctattcaggacgctaagacaggagaatcgcttgaactcgggaagcagaggttgcagtgagcctatatcactccatttcactgcaacctgcgtcacagagcgagactccatctcaaaaaataaaataaaataaaataaaataaaataaaataaaataacacacaaataaaataaaaataacacacacacacacacacacacacacacacacacacacacacagagggattttcaatatgaggtccaccacggacaccttcagtccctgttcctctgctccaggaacacccaagttcaggcccgcaggcactgctgagctatcaggtaggattctgcttcccagaagaccagaggagacaccaggccctggtgggaggccctcgggggcccagcacaggccccagatcaccccacacaggggaggctgggccctgagccacctgccccagaaaggggctgatgagccagggctcagggcctggtctcggacagagacctccccagtctcatgactggtactggtgctgagtccactggtttgattttgccttgatgcctcctgtgctcccccacagatggactgagatcttgggatggaaatcccagtacactatctacccctaccaacccctggctgccctgcctctccctggaaggatgatgttctggtctcttctgagacttcccatcatagaaggctctccactggatttggaaaagtggaactaataataaaaagaaaggagagaatcaagctctgtgggtcgggactgagggttccttacctttctcttcccaggcgatggtgagggtgggtcatcacaatggaagtaagataagtaggggagtaataggaagaagaaccccagggcaaacaccaaggtgaggaagatatccaacacccatggtgtggagctgggggcgtttagcgatgaggcactaagtaattttaaaggaaagggaagattctccatgtgaataggcacgttgctttcaagcaactgagctctgggcatccccgtggagactagggactggggcccaggcctgcgtcacagaggtggggccttgatgtcacaaagggctcctttgttggggaggggcagtgggagggggaggggcagagggagggggaggtgcagcaggagggggagggggagggagaggggcaggggagggggagactggagcacagcccctccccacccccaaagctggggatccctccaccatcccaccttctagatccctccttcccactaagttttgtcagtgatagccaattttctattctttctccctggaatatagatattacctggttccttttatctgttggagacggtggcttgaggttacctattttatagcccttgaaaatctgaagttctgaaattttggctatgaaccagggattttcattctcagaatctcgttcatcctcaactccagctttcccacactatgtttttgtcttgtatcaatccagggacaaaatgtaaatttcttttactcttatttagttttgcaaattttgaatagtaagttttaaaaaattatttctatctcactttcaatcaaagggaactacccacatacaattaagatttttttttgtcttttaaagttttatttatgtacttatgtatttattttattttaactttcaggatacatgtgcaggacatgcagttttcttacataggcaaatatgtaccatggtgatttgctgcacctatcaacccatcacttaggtattaaacccagcatgcattagctatttttcctgatgctctccctaccaccagccctccctcgacaggtgccagagtgtgttgttcccctcccagtgtccatatgttctcattgttcggctcccacttgtaagtgagaacatgtggtatttggttttctgttcctgtgttagtttgctgaggataatggcttccagcttcatccatgtccccgcaaaggacttgatctcattcctttttatggctgcatagtattccatggtgtatatgtaccacattttatttatccagtctatcattggtgggcattgggttgattccatgtctttgctattgggaacagtgctgcaataaacatacacgtgcatgtatctttgtaatagaatgatttatattcctttggatatacaataatggtatatctgccacagcctctgtactgcactgtggggaattctgcccagtgcaaaccacccagtctccctagcactggcgggggaaaaccaccggctagacccgcagtaatggcggtcacccttccccccaggaacttggtcttcttaggcagactccaggtgctgtgctggccagtggggattccatgctagtgggtcttagcttgtggggttctgtgggagtgggtctgcttggctccctggcttcagcccccttctcatgggagttgatggatctcctgcttcactggatttctgcgagccaccagagtatgcagaaactcctacagctcagtacctgcccaagtggctgccagctggagcccctgctatgggtctgcacagctttgtgcttgggacccaaggccctggtggtgtggactcacaaagggattacctgttctggggtttgcaaaaatctgtgggtaaagcacagttccctgggtgggtagcacaatccctcactgcctcccttggctggaggagggaggtctctttgccctgtgtagctcttgggtgaactgtcacccaactctgcttttccttgctctccatgggtcacaccaactgcctagtcagtcccaatgagggaatctggatacctcagttagaaatgcagaattcactcgctgtttatgtttgtctcagtgggggctgcagagtagagctgtttctactcaaccatcttggcccctccccccaattaaaataattcatatttaaaatttgtaattctaattatgaaacagttataagtagttaaaccttcaagtggtatttctgtaaatgtatag

SEQ ID NO: 588899 - DNA, 4001 bp, Homo sapiens; identical to SEQ ID NO: 588896

SEQ ID NO: 588900 - DNA, 4001 bp, Homo sapiens; identical to SEQ ID NO: 588897

SEQ ID NO: 588901 - DNA, 4001 bp, Homo sapiens
aagcaggtcccaagtctcctccaggcctctcgggcactctctacaagctggaaatcagaccgggttagggcagtgagggaggggcttgggatctcacaggaggctgagtgtatgtttctttagggaagaccatggggaattagaccctggaacccacccatctgtgtccaaagccacatggccccgacggtaatagcaaggcatagaggacagggctttgtcattcacaaagggcttccacacacagaccctccacccccacggtcctcacaactgccctgtgaggagaaaggactggggtggtctcagagaggaatcagccttagcagagttgaacagctgttcccagggagcgggaggcccctcacccccctccgcatccaggcaggcattggtctccccaggacacacacactgccccctgctgggtaacgctcagtccctggcccaccatggcttcattccggcggcacagaatctgagaaggacccagggttctgatttccttcctaggagcccccacctcaggttttttcaactgacttcttcagagtcagttccctcccggacagatgagatcaaattaactctagtgtgccctggcagagccttacctctcagactgtggtttttcatcctgcctctgggcctccccctccgccctgttggacactgggagacaagatgacgctgggagacaagatgacgctgggagacaagaaatggcgaggagctaggaccggctctccctctctgcccccagccgcagcacgctgcactcatgaaccgcatggctctgtctgtcttgctcagggagctctgtgtgctttctcccctcccactcatgtttaaatggatgataaactgcttttcttagaaaaacaggaagagggggtcgggtgcggtggctcacgcctataatccaagcactttgggaggccgaggcaggtggatcacctgaggtcaagagtttgagaccagcctggccatggtgaaaccccatctctactaaaaatacgaaaattagccaggcgtggtggcgggcgcctgtaatccccagctactcaggacgctaagacaggagaatagcttgaactctggaagcaaaggtggcactgagccggtatcgcttcatttcactgcagcctgcacaaaaaacaaaataaataaaaataacacacaaacacacacgcacacacacagggattttcaatatgaggtccaccatggacgccatcagtccctgttcctctgctccaggaacacccaggctcaggcccgcaggcaccactgagctgtcaggtagcattctgcttgccaggagaccagaggagatgccaggccccggtgggaggccctcgggggcccagcacaggccccatatcaccccacacagaagaggctgggtcccgagccacctgccccaggaagggactgatgagccagggctcagggcctggcctcggacagagacctcccgtctcatgaccagagacctcccccgtctcatgaccggtcctggccgctgagcccacgggtttgattttgccttcatgcctcctggctcccccacagatggactgagagcttgggatggaaatcccagtacacgatctacccctaccaacccctggctgccctgcctctccctggaagcatgctgttctggtctctcctgagacttcccatcgcagaagtctccactggatttggaaaggtggaactaataataaaaagaaagaagagaatcaagctctgtgggtctggactgagagctccttacctttctcttcctaggcgatggtgagggtgggttgtcacaacggaggtaagagaagtaggggagtaataggaagaagagccccagggcaaacaccaaggtgaggaagatatccaacacccatggtgtggagctgggggtgtttagtgatgaggcactaagtaattttagaggaaagggaagattctccatgtgaataggcgcattgctttctagcaactgagctctgggcatcctcgtggagactagggactggggcccaggcccgcatcacagagctggggcttcacatcacaaagggctcctttgttggggaggggcagtaggagggggaggccgaagcacagcccctccccaccctccaagccggggatcccttcaccctcccgccttccagatccctccttcgcactaagttttgtcagtgatagaactcagccagttttctattctttctccctggaacacagatattacctggttccttttatctattggagtcggtggcttgaggttacctatttcatagcctttgaaaatctgtagttgactctgaaattttggcttatgtaccagggatttttattttcagaatctcgttcgtcctcaactccagctttcccacacaatgtttttgtcttctgtgaatccagggacaaaatgtaaatttcttttactcttatttagttttgcaaattttgaatagtaagttttaaaaaattatttctatctcactttcctttttttttattttttttatttttttgagacggagtccctctctgtcgcccaggctggagtgcagtggcgtgatcttggctcactgcaagctccgcctcccgggttccagccattctcctgtctcagcctcctgagtagctgggactacaggcgcccaccaccaccacgccctgctaatttctttttgtatttttagtagagacggggtttcaccgtgttagccaggatggcctcgatctccggaccttgtgatctgcccgcctctgcctcccaaagtgctgggattacaggcatgagccactgcgcccatccttctatctcactttgaatcaaagggacctacccacatacaattaagatttttttaaaattctatttatgtacttatgtatttattttaagttccggggtacatgtgcaggacctgcagttttcctttctttttgagatggagtctcactctgttgcccaggctggagtgcagtggcacgctcttggctcactgcaacctgtgcgtcctgggttcatgccattctcctgcctcagcctcccgagtagctgggactacaggcatgtgctaccacgcccggctaattttttgtatttttggtagagactgggtttcaccgtgttagccaggatggtcttgttctcctgaccttgtgatccgcccgccttggcctcccaaagtgctgggattacaggcgtgagccaccgtgccgggcctgctgtcttattttaatgtctctctgggcttgataatttaaaaggactggcattcctctgataaaagtttttttattttctcattttccatcaatctatcctgttcagtgaaatatcggttcatgcctttagcccattttctaattggcttgttttttcttgttgtcgttgttgacttttgaaaactttaaacaatattctagatatgagctccttgtcagatatggtttatcaggtgtggtttgcacttttcttccagtttttaccctgtctttttattaacaggctcttatgcagggcaaaagttttaaattttgataacatccaattaataaattcttagaattgattgtgcttttctggtgtcatgtctaataattattcatcaagtcctaggacctgaagaatttctcattaaatttcatatttttacattgagatatgtgatctttttttttttttttgagatggagtcttcctccatcttcatatctgaccaccattggtatctaattggttttcttattgtctaccatccccaggtgatatctgatcactctggcatggcttcagcaagaattctgtgaggtcagtttagccagataccctcctattagtaattttccatacactaccacccctccaccctgctctgtggctataaaatttctattcagagggaaacctgaatatatggaaactggagattactgcaagaccctattgcagtaatctctatatctattgcaataat

SEQ ID NO: 588902 - DNA, 4001 bp, Homo sapiens
gtcccaagtctcctccaggcctctcgggcactctctacaagctggaaatcagaccgggttagggcagtgagggaggggcttgggatctcacaggaggctgagtgtatgtttctttagggaagaccatggggaattagaccctggaacccacccatctgtgtccaaagccacatggccccgacggtaatagcaaggcatagaggacagggctttgtcattcacaaagggcttccacacacagaccctccacccccacggtcctcacaactgccctgtgaggagaaaggactggggtggtctcagagaggaatcagccttagcagagttgaacagctgttcccagggagcgggaggcccctcacccccctccgcatccaggcaggcattggtctccccaggacacacacactgccccctgctgggtaacgctcagtccctggcccaccatggcttcattccggcggcacagaatctgagaaggacccagggttctgatttccttcctaggagcccccacctcaggttttttcaactgacttcttcagagtcagttccctcccggacagatgagatcaaattaactctagtgtgccctggcagagccttacctctcagactgtggtttttcatcctgcctctgggcctccccctccgccctgctggacgctgggagacaagatgacgctgggagacaagaaatggcgaggagctaggaccggctctccctctctgcccccagcccagccgcagcacgctgcactcatgaaccgcatggctctgtctgtcttgctcagggagctctgtgtgcttcctcccctcccactcatgtttaaatggatgataaactgcttttcttagaaaaacaggaagagggggtcgggtgcagtggctcacggtgcggtggctcacgcctataatcccagcactttgggaggctgaggcaggtggatcacctgaggtcaagagtttgagaccagcctagccatggtgaaaccccatctctactaaaaatacaaaaattagccaggcgtggtggcgggcgcctgtaatccccagctactcaggacgctaagacaggagaatagcttgaactctggaagcaaaggtggcactgagccggtatcgctccatttcactgcagcctgcacaaaaaacaaaataaataaaaataacacacaaacacacacgcacacacacagggattttcaatatgaggtccaccatggacgccatcagtccctgttcctctgctccaggaacacccaggctcaggcccgcaggcaccactgagctgtcaggtagcattctgcttgccaggagaccagaggagatgccaggccccggtgggaggccctcgggggcccagcacaggccccatatcaccccacacagaagaggctgggtcccgagccacctgccccaggaagggactgatgagccagggctcagggcctggcctcggacagagacctcccccgtctcatgaccagagacctcccccgtctcatgaccggtcctggccgctgagcccacgggtttgattttgccttcatgcctcctgcgctcccccacagatggactgagagcttgggatggaaatcccagtacacgatctacccctaccaacccctggctgccctgcctctccctggaagcatgctgttctggtctctcctgagacttcccatcgcagaagtctccactggatttggaaaggtggaactaataataaaaagaaagaagagaatcaagctctgtgggtctggactgagagctccttacctttctcttcttaggcgatggtgagggtgggttgtcacaacggaggtaagagaagtaggggagtaataggaagaagaaccccagggcaaacaccaaggtgaggaagatatccaacacccatggtgtggagctgggggtgtttagtgatgaggcactaagtaattttagaggaaagggaagattctccatgtgaataggcgcattgctttctagcaactgagctctgggcatcctcgtggagactagggactggggcccaggcccgcatcacagagctggggcttcacatcacaaagggctcctttgttggggaggggcagtaggagggggaggccgaagcacagcccctccccaccctccaagccggggatcccttcaccctcccgccttccagatccttccttcgcactaagttttgtcagtgatagaactcagccagttttctattctttctccctggaacacagatattacctggttccttttatctattggagtcggtggcttgaggttacctatttcatagcctttgaaaatctgtagttgactctgaaattttggctatgtaccagggatttttattttcagaatctcgttcgtcctcaactccggctttcccacacaatgtttttgtcttctgtgaatccagggacaaaatgtaaatttcttttactcttatttagttttgcaaattttgaatagtaagttttaaaaaattatttctatctcactttcctttttttttattttttttatttttttgagacggagtccctctctgtcgctcaggctggagtgcagtggcgtgatcttggctcactgcaagctccgcctcccgggttccagccattctcctgtctcagcctcctgagtagctgggactacaggcgcccaccaccaccacgccctgctaatttctttttgtatttttagtagagacggggtttcaccgtgttagccaggatggcctcgatctccggaccttgtgatctgcccgcctctgcctcccaaagtgctgggattacaggcatgagccactgcgcccatccttctatctcactttgaatcaaagggacctacccacatacaattaagatttttttaaaattctatttatgtacttatgtaattttattttaagttccggggtacatgtgcaggacctgcagttttcctttctttttgagatggagtctcactctgttgcccaggctggagtgcagtggcacgctcttggctcactgcaacctgtgcctcctgggttcatgccattctcctgcctcagcctcccgagtagctgggactacaggcatgtgctaccacgcccggctaattttttgtatttttggtagagactgggtttcaccgtgttggccaggatggtcttgttctcctgaccttgtgatccgcccgccttggcctcccaaagtgctgggattacaggcgtgagccaccgtgccgggcctgctgtcttattttaatgtctctctgggcttgataatttaaaaggactggcattcctctgataaaagttattttattttctcattttccatcaatctatcctgttcagtgaaatatcggttcgtgcctttagcccattttctaattggcttgttttttcttgttgtcgttgttgacttttgaaaactttaaacaatattctagatatgagctccttgtcagatatggtttatcaggtgtggtttgcacttttcttccagtttttaccctgtctttattaacaggctcttatgcagggcaaaagttttaaattttgataacatccaattaataaattcttagaattgattgtgcttttctggttcatgtctaataattattcatcaagtcctaggacctgaagaatttctcattaaatttcatatttttacattgagatgtgatcttttttttttttttgagatggagtcttcctccatcttcatatctgaccaccattggtatctaattggttttcttattgtctaccatccccaggtgatatctgatcactctggcatggcttcagcaagaattctgtgaggtcagtttagccagattccctcctattagtaattttccatacactaccacccctccaccctgctctgtggctataaaatttctattcagagggaaacctgaatatatggaaactggagattactgcaagaccctattgcagtaatctctatatctattgcaataatccctct

SEQ ID NO: 588903 - DNA, 4001 bp, Homo sapiens
ctgcagtcaggaccagaacaaggaaaggagatttgttagcctggcaggggtgggttccctaaagcctgctgcccatatcacattgcccccaacccaggacctcaccgtatatgaggtcctatgacctcactatagcctctccccaacacattcattcacatacccattcctatggctacccactcccaaaactacagcaggctacaaggaatccctgaaatgaatagaacgtactaaagaagaaggagtggggtgggaacaggacacaaagggaaagattaatcaccttttcagaagagaaagcagcttcctttcctcttcctcttctctctggaaacttttccagtctgggaaacctgaatagtatgttatatgcaatgaagatagaggcacacggctcatacagaagtcaatctgtggaagacccttgggatattaaactctgagagccccaagaatcagtagaaaagggaaaatagtcattgataatattcacaagttcacatgtgtatgtggcatcattagtaaagtcctttcacatacattaccccatgtgatgctcaaaaccaccacgtgaaacacagacatcagtggttacctccaggaggaatccgagcattgaggaagtcaaagtacgtatgcaaagttgtgagacagaagctctgactccaagcccaccagcagtccctcctggatatctcagttggccaccaattgggcaacacccattgctcaggtccatcactttgtcctgcccgtaaatgggcagagcagggcctctgagcagtgtctcaggtctgattgctttcccatgagcctgtcttctgagggctctgttttctaagactgcatctagtaactgacattctaagaaatcatgggactgagtcatcatgaaagagacagaaagggtcacccctgaagctcagatagagcaggctgacattacctttgaatgtcccacctttccttctcctcttggctctgccctgatgctgagaacaaaagacagataatgacaggctgggactcacttctctcactctctatgaagctcattcattcattcattcattcattcattcattatacaagaatattactctttaattaatagaaatatgttcctgttatcaatttttaatggtgataaaatagctcccatttttccttctctgaaaaatcctcaaagaagattttgctgtgagagccacacttgatgtactcagttagcaattctgaaggagggcaaagactcagaggtcaacagtcacatctgtgctccctcatgggacaagtgtcacggagacaggcctatagctccagcctctgctcagagactctcagcattactcctctggtcagcccaacacgaaggaagacttggtcaagtgacaggtgacatgggaatctgactcatgatcaaatttcagcagagaccgttctccttcagagagcccacaatctctaaataatcccacctgggaccacagaattactgtgtttgggattttatcctggaactctccaccacagccagataggtagcttcacatggaaaactatgagcttcagatggaaaccttagtcctcctgaacccctatgtctgcccaacctcttccatagaagagtgaagttctatcctctcttcagacttcccatctaaaacatgtctctgtaccaaccaaacttatttagaaatgttggaataggattgggaaacaacaacagggcatctctcttgggtgttcacccacagttccttaccttttggatgtcattatttttttcggtgggtgacgaatacagggtcaataccacgtagaacaagtacagtataaacaaccccaacccactcaagcagatgaagttggggtcgatatccaaccaatgtgagtcagggctcagccctgtctcagtatagctgttcagaaaacagaggatattctccatggtctgaatagctcagctgcctgaagcaactgagcactgagggtgcccaggcttaactataagcacaggcctgcatcacagagcatggaagagtcacagaaggtttctaagggtgcagggagcaacaagaggagggtgtgtccacagccccaaccccaccagcccagctgactctcctgggccctctaggtccctctgccctaccttgccactccatttcccaactccatcccttttcatgtcatatatttatcttagtggaatttttggtttgttccaacagtaaaccaggcattacccaagtcccgctttactgtttggagctcttaacttggaccccaccaaccacactgccttgaaagcctgaaatactgcctggaatatttgttgtacccaggcattgccactctcaggatcacatatgtcctcaaatccatcttacctacagaacgtttctgccttacataaatgcagatataaaacttaaatttcctttatacttgcttcgttttgtgaatgttgaacattacattttttgttttgaagtcagtttttactatttccaatcagagtgactgtctcaaatgattaaaactaatgttatcaaggaaaagaagctcactgcccaatttgggtttttgagaaaagaaggtttttattgtaaattaacgaacaataagacaggagtccagatcaaacctgtcccctgtgctggctttcatggggtcattttattagaaaaagtttagggagtggcctctggaattaatagttgattggtggaaggaaagcggaggtctgtaagtcctccgcatgcacagttctgtttaacgctgcctcatgtattccatgtgcacatttgtggggagttggttgaaacgtggcagaaatttgggctgtgacgccagccagcttgttctgtgccaactccagttggccttaatagttttaattcattttagccagttttttaatctcagaagcagggagagttttggcattttagtaagttattgttgttgttgttttttaatcgcctatcctgtaaactgattatttcattagtcactgttttcttcaactctctggggcatggtttcactaataatgcattatttaacatctataaaacaaaaataagtgtacaataaatatatataattaaaacttcaagggatcttgggggttaatttatagaacttacttttctgaagttagtgaggtttaaactgttcaagcacttttggaacatactctctacacaaacacacatacacatcgacctaaaaggaagaagttgaggcaaattattataaacacacagttcatttgggtcaagcttgaggattgcgacctgggaacacagatgcaagtccccctgaatatacactccaattagcagcagttatgagtgggttttcaaagtcaaaaaaagaggtcaaggagtgggctgatacaaagttgtaatcaggaattctcattggtttacagaagcgacattgattagtgattggctatacattgttaagctatatggggtgggttatcctgtcaggtgtggcattattgggttactatatagctccatgtggcaatagcaagcagtttcaagagatgaatacatagctcaaggaggaaatagggctgtgatttctgtctcattttaatgtctctctaggcctgataacttaagaggactcacatgcctcagataaaagttcttttctttacaaacacacccacacacccatcctgtgacaaatctatcagtattttcaaatccagaatcaattagttcctccttttatttcaatcttatttgtcattatgaccccacatttctaactctccctcaaatacagacagtcccagccctccacatcaatttggtaacaagtatgcaactcccttaaagcagggataggttacagtgcgctaagctattatgacctaaaagaccaaaatagatgcccctttatcaactaagacaggccctaagggtaaggaaacaaagttacctatgggtcaagggttcagggcctggatg

SEQ ID NO: 588904 - DNA, 4001 bp, Homo sapiens
aggggtggggccccctgaatcctgcttcacattaccccccatccatgagctcaccgtatgtgaggtcatatgacctcactatagcctctcctcaaagcattcattcacatatccgttcctatggctacccactcccaaaactacagcaggctacaaggaatccctgaaatgaatagaacatgcaaaaaaaaaaaaaaaaaaaaaaaaaaaaaaaaaaaaaaaaaaaagaaggcggtgggaacaggatagaaggggaatgattaatcaccttttcagaaaagaatgtagctttctttcctcttctgcttccttctgcaaacttttccggtctggaaaccagaacagcatgttacatgcaatgaaggtagaggcacagggatcatacagaagtaactctgtggaagacccttgggatattaaactctgatagccccaagaatcagtagaaaagggcaaatattcattgataatgttcacaagttcacatgtgtatgtggaatcattagtagaattctttcatatacattatcccatgtgatgctcaaaaccaccacgtgaaacatagacatcagtggttacctccaggaggaatccgagcatcaaggaagtcaaagtacttatgcaaagttgtaagacagaaactctgactccaagccaaccagtagtccttcctcgatatctcaggtggccaccaattgggcaacacccattactcaggtccatcactttgtcatgcccatgaatgggcagagcagggcctatgagcagtgtctcaggtctgattgatttcccacgagcctgtcttctgagggctctgttttctgagactatctagtaactgacattctaagaaatcatgggactgagtcctcatgaaagagacagaaagggtcaccctgaagctcagatagaataggctgacattacctttaaatgtcacgctttttcttttcctcctggctctgccctgatgctgagaatgaaacaaagataatgacaggctggtactcacttctctcacactctttgaagctcattcattcattcattcattcattcattatacaagaatgatatgactctctaattaatagaaatatattcttgttatcaatttttaaaggtcataaaatatttcttgttttcccttctctgaaaagctgaaagaggatttcttctgtgagagccacacttgatgtgctcagttagaagtcctcatccagggcacagactcagaggtcgacagtcacatctgtgctccctcacagggcaagcatcccagagacagagctctggctccagcctctgctcagagactctcagcgttactcccctggtcagcccaacaagaaggaaggctttgttgaatgacgggtgacatgggaatctgactcatgatcaaatttcagcagagactattctccttcagagagcccagactctctaaataatcccacctgggaccacagaattactgtttgggattttatcctggaactctccaccacagccggataggtagtctatgagctacagatggaaacctttgtcctcctgaacccctacatctgcccaacctgttccacagaagagtgaagttctatcctctcttcagacttcccatctaagacatgtctctgtactaaccaaacttatttagaaatgtgggaataggattcggaaacaaaaacagggcatctctcttgggtgttcacccacagttccttaccttttgggtgtcattatttttttcggtgggtgatgaatacagggtcaataccatgtagaacaagtacagtataaacaaccccaacccactcaagcagatgaagttgaggtcaatatccaaacaatgtgagtcagggctcagccctgtctcagtatagctgttcagaaaacagaggatattctccatggtctgaatagctcagctgcctgaagcaactgagcactgagggtgcccaggcttaactgtaagcacaggcctgcatcacagagcgtggaagagtcacagagggtttctgagggtggagggatcaacaagaggagggtgtgtccacagccccaaccccaccagcccagctgactccaccttcctgggccctctaggtcgctctgtcctaccctaacactccatttcccaactccatcctttttcaagtcatatatttatcttagttgaattttccgtttgttccaacagtaaaccaggcattacccaagtcccacttcgctgtttggagcccttaacttggaccccaccaactacactgccttgaaagcctgaaatactgcctggaatatttgttgtacccaggcttttctactctcaggatcacatatgtcctcaaatccgtcttatctacagtatgtttttgccttacataaatgcagatataaaacttaaacttcctttattcttacttcgtttcgtgaatggtgaacattacattctttgtttgaagtcagtttttactatttccaatcagagggactgactcaaatgattaaaactaacgttatcaaggaaaagaagctccctgcccaatttgatttttttgagaaaagatgtttttattggaaattaaccaaaaaggagacaggagtccagctcaaatcagtcctgtgtgctggctttcatgcagtcattttattagaaaacatttagggagtggcctctggaattaatagttgattgctggaaggaaaggggaggtctgaaaatcctcggcatgcacagttttctttaacgctgcctcatgtattccatgggcacatttgtggggagttggttaaaatgtggcagaaatttgggctgtgacgccagccagcttgttctgtgcaaactccagttggccttaatagttttaatccattttagccagtttttaaatctcagaagcagggagagtttcggcattttagcaagttactgttgttgtttttgtttgatctcctttcttgtaaactgattaatttcattagtcattgttttcttcaactctctggggcatggtttcactaataatgcattatttaacatctacaaaatgaaaataagtgtacaataaatgtatataattgaaacttccagggaccttaggggtaaatttatagaacttatttttctcaagttagtgaagtttaaactgttcaagcacttttggaacatactctgtacacaaacacacatacgcatcgacctaaaagggagaagttgatggaaaattattataagtagagagttaatttgggtcaagcttgaggattgcaacctgggaacacagatgcaagtcagcctaaatatacactccaattaccagtagttatgagtgggtttttaaagtggaaaaaggggacaaggagtcggctgatacaaagttgtaatcaggaattctcattggtttacaggagtgacattgcttagtgattggctgtacattattaagctatagggggtgggttatcctgtcaggtgtggcattattgggttactatatagctccatatggcaatagcaagcagtttcaagagatgaatgtgtagctcaaggaggaaataaggctgtgatttctgtctcattttaatgtctctctaggcctgataacttaaaaggactcacatgcctcagataaaagttcttttctttacaaacacatccacacacccatcctgtgacaaatcaatgagtgttttcaaatccagaatcaattagttcctccttttattttaatttcttatttgtcattttgaccccacattttctaactctaccgcaaacacaaccaggcccaaccctccacatcactttggtggcaagtatgcaactcccttaaagcagggataggttacagtgcgctaagctattgtgatctaaaagaccaaaatagatgcccctttatcaactaagacagacccttaggttaaggaaacaaagttaccgatgggtcaagggttcagggcctggatggcatggcaaatttctaactttctataactaa

SEQ ID NO: 588905 - DNA, 4001 bp, Homo sapiens
tgaggatctgttagcctggcaggggtggggccccctgaatcctgcttcacattaccccccatccatgagctcaccgtatgtgaggtcatatgacctcactatagcctctcctcaaagcattcattcacatatccgttcctatggctacccactcccaaaactacagcaggctacaaggaatccctgaaatgaatagaacatgcaaaaaaaaaaaaaaaaaaaaaaaagaaggcggtgggaacaggatagaaggggaatgattaatcaccttttcagaaaagaatgtagctttctttcctcttctgcttccttctgcaaacttttccggtctggaaaccagaacagcatgttacatgcaatgaaggtagaggcacagggatcatacagaagtaactctgtggaagacccttgggatattaaactctgatagccccaagaatcagtagaaaagggcaaatattcattgataatgttcacaagttcacatgtgtatgtggaatcattagtagaattctttcatatacattatcccatgtgatgctcaaaaccaccacgtgaaacatagacatcagtggttacctccaggaggaatccgagcatcaaggaagtcaaagtacttatgcaaagttgtaagacagaaactctgactccaagccaaccagtagtccttcctcgatatctcaggtggccaccaattgggcaacacccattactcaggtccatcactttgtcatgcccatgaatgggcagagcagggcctatgagcagtgtctcaggtctgattgatttcccacgagcctgtcttctgagggctctgttttctgagactatctagtaactgacattctaagaaatcatgggactgagtcctcatgaaagagacagaaagggtcaccctgaagctcagatagaataggctgacattacctttaaatgtcacgctttttcttttcctcctggctctgccctgatgctgagaatgaaacaaagataatgacaggctggtactcacttctctcacactctttgaagctcattcattcattcattcattcattcattatacaagaatgatatgactctctaattaatagaaatatattcttgttatcaatttttaaaggtcataaaatatttcttgttttcccttctctgaaaagctgaaagaggatttcttctgtgagagccacacttgatgtgctcagttagaagtcctcatccagggcacagactcagaggtcgacagtcacatctgtgctccctcacagggcaagcatcccagagacagagctctggctccagcctctgctcagagactctcagcgttactcccctggtcagcccaacaagaaggaaggctttgttgaatgacgggtgacatgggaatctgactcatgatcaaatttcagcagagactattctccttcagagagcccagactctctaaataatcccacctgggaccacagaattactgtttgggattttatcctggaactctccaccacagccggataggtagtctatgagctacagatggaaacctttgtcctcctgaacccctacatctgcccaacctgttccacagaagagtgaagttctatcctctcttcagacttcccatctaagacatgtctctgtactaaccaaacttatttagaaatgtgggaataggattcggaaacaaaaacagggcatctctcttgggtgttcacccacagttccttaccttttgggtgtcattatttttttcggtgggtgatgaatacagggtcaataccatgtagaacaagtacagtataaacaaccccaacccactcaagcagatgaagttgaggtcaatatccaaacaatgtgagtcagggctcagccctgtctcagtatagctgttcagaaaacagaggatattctccatggtctgaatagctcagctgcctgaagcaactgagcactgagggtgcccaggcttaactgtaagcacaggcctgcatcacagagcgtggaagagtcacagagggtttctgagggtggagggatcaacaagaggagggtgtgtccacagccccaaccccaccagcccagctgactccaccttcctgggccctctaggtcgctctgtcctaccctaacactccatttcccaactccatcctttttcaagtcatatatttatcttagttgaattttccgtttgttccaacagtaaaccaggcattacccaagtcccacttcgctgtttggagcccttaacttggaccccaccaactacactgccttgaaagcctgaaatactgcctggaatatttgttgtacccaggcttttctactctcaggatcacatatgtcctcaaatccgtcttatctacagtatgtttttgccttacataaatgcagatataaaacttaaacttcctttattcttacttcgtttcgtgaatggtgaacattacattctttgtttgaagtcagtttttactatttccaatcagagggactgactcaaatgattaaaactaacgttatcaaggaaaagaagctccctgcccaatttgatttttttgagaaaagatgtttttattggaaattaaccaaaaaggagacaggagtccagctcaaatcagtcctgtgtgctggctttcatgcagtcattttattagaaaacatttagggagtggcctctggaattaatagttgattgctggaaggaaaggggaggtctgaaaatcctcggcatgcacagttttctttaacgctgcctcatgtattccatgggcacatttgtggggagttggttaaaatgtggcagaaatttgggctgtgacgccagccagcttgttctgtgcaaactccagttggccttaatagttttaatccattttagccagtttttaaatctcagaagcagggagagtttcggcattttagcaagttactgttgttgtttttgtttgatctcctttcttgtaaactgattaatttcattagtcattgttttcttcaactctctggggcatggtttcactaataatgcattatttaacatctacaaaatgaaaataagtgtacaataaatgtatataattgaaacttccagggaccttaggggtaaatttatagaacttatttttctcaagttagtgaagtttaaactgttcaagcacttttggaacatactctgtacacaaacacacatacgcatcgacctaaaagggagaagttgatggaaaattattataagtagagagttaatttgggtcaagcttgaggattgcaacctgggaacacagatgcaagtcagcctaaatatacactccaattaccagtagttatgagtgggtttttaaagtggaaaaaggggacaaggagtcggctgatacaaagttgtaatcaggaattctcattggtttacaggagtgacattgcttagtgattggctgtacattattaagctatagggggtgggttatcctgtcaggtgtggcattattgggttactatatagctccatatggcaatagcaagcagtttcaagagatgaatgtgtagctcaaggaggaaataaggctgtgatttctgtctcattttaatgtctctctaggcctgataacttaaaaggactcacatgcctcagataaaagttcttttctttacaaacacatccacacacccatcctgtgacaaatcaatgagtgttttcaaatccagaatcaattagttcctccttttattttaatttcttatttgtcattttgaccccacattttctaactctaccgcaaacacaaccaggcccaaccctccacatcactttggtggcaagtatgcaactcccttaaagcagggataggttacagtgcgctaagctattgtgatctaaaagaccaaaatagatgcccctttatcaactaagacagacccttaggttaaggaaacaaagttaccgatgggtcaagggttcagggcctggatggcatggcaaatttctaactttctataactaa

SEQ ID NO: 588906 - DNA, 4001 bp, Homo sapiens
gggacgggtgggcacctggggcccccggttcctccacctccccaactgctgacttcataaagctctgcctaagcctgccccagggcttcagtcccctcctgtccccttcccgggacctccccctcccagatcaccaccaggccgtagggttgcatcagaggccctggtaggaaggaggacagggacagaagggggaagctcctcacctttccagaaggtagttcaggtcccgagtctcctccagctccctcaggaggattctgcaagctggaaatcaggagacagggttatggtggagagggcggtgcctgggaacctcatggaggctgagtggatgtctttttaggggacaccatgggggactagaccctgaagccctcgcatctgtgtccgaggccacatggccccaatggtgacaggaaggtttccactgtgcagcactttgtcatttgcaaaaagtgcttccacgtccaccccctcatcggtgtcacaaccatcttgttgggagagcaaatgggtggtctcaaagaggagtcagccattgctgaggtgaacagctgtccacatggacctggagcctccctgacctccccccatatccaggcaggccttggtcccttccccacaccgcccccttatgggcaataccggtcccaggcccgtggcttcattcccgcagggaatctgaggaggccgcaggttctgatttctctcccaggagcttccctctcaggcctctgcaaatgacttcctcagggacaggcaaagctcagttacctctggggagtcccggggggcagcagagcctcacctttcagagctgagatcttcctgctcctggacctcccgcttctctccctttgaggctgagaggcaagaaaggatgaggggctgggaccagttctcagtctcctctccccagaccagctgcacacacgcagtgctcatgagggacacggctctcagcctctagctcagggagctctgtgtgtgctttttactcatgtttaccgtgaatgaaatgttttctgttttccttcttagggaaatgcaaggaagggttgtctgtgtgactccaacctggctgtccccagtccctgctcctccgctcaaggaacacctaggctcaggcccacaggcgcctctgagctgccagtaggattctgctttggatgagaatggagaggaggccagggtaccatggggctgtggtgaaggaggaaaaagcacatgtggccggggtgcagccacaggcgaatccaggctctactgggaggctctcaggagctcagcacagctcccagatcacacccagatcatacagaggaggctgggcccccaggcacctgccccaggaagggggtgatgagccagggctggggcctctcctcccacagagacctcacccctctcctgacccggtccttgccactgagtccagtgttggtttttgccctgacgcctcctgtgcaccccacagatgagctcgggatggaatcctctgcccactctcacccctgcctgccttgcccttccctagagggatgacgagatttcccatcacagaagggtctcacattgcttaggaaaagtggaaatgaggggaggaaaagaagagagaatctttctctgtggggctgggctgaggactccttacctccctgctgctcctcttcctcccgggcgggggtgagggtgggtcactgtggacgtagaggagcaataggaagaggagcactaggccacacacactggtgaggatgaaatccatcatccagggagtggagctagggctcagccatgtggcactagggctcttcagaggaaagagcattttctccatctgaagtgcaatgtcgtctcctgtgcactccacagatggtctgggagctgggggtggaatcctctgcccactctcaaccctgcctgccctgcccttccctagagggatgacgagatttcccatcgccttcaagcaactgagctctgggcatcccctttgggactagggactggggcccaggcttgtatcacacagctggggcctcctcctcacaaagggctcctgggggtgggggaggggcagtgggaggaggaggctgaagcacagccccgccctcagctcccagcccccagtccctccaccctcctgggtcccccaaatcgctccttcccactccagctgctcaccctgtcagagacagtcctcagtccattttctattctcttcccctggaacacaggtgtcacctggctctccttgtaccttggagatctaggcctgagcccacccatttcatagcctttgaaactgtgaaattctcctaggaatttaggtggtttcttaaggattatttcagaatctcctctgtttttgtaattttcccacaccttacattttctactttcatcaacccagaatagaactcttaaatttacaaaactaaaaagtataaaaattacaaataattaaacctccaaatgacatttttatattaggaacataattttgagttaccgaattatggagcttgctgtaaaaaaacctcaaacactttgacaaattattttcaaaacaataattaagcctttacttattttctttagatctttcatatgttgtcctgatccattttttctttctctgccccaaatacagtcctcactttcctaagttttggaacatgtgtgctccaccatgagccaggagtggtttggggtgatctgaggtccagctcctttgggtggagagcgggactgggcattccgtgccaggctcaagtccagtgttcagcagactcttctgagatcactcgtgtcctccgtacatattctttttttttttttttttgaaacggagtctcactctgttgcccaggctggagtgcagtggcatgatctcggctcactgcaacctctgcctcctgggttcaagcgattctcctgcctcagcctcccaagtagctgggactacagaagtgtgccaccatgcccagctaatttttgtatctttagtagagaccaggtttcaccatagtggccaggctggtcctgaactcctgagcttgtgatccgcccgcctcggcctcccatttgtattctctgctccacagtgtgtcctgtttttcacctcctgcctgctccagaccactggggcctcatgtctggcctgtacctgatagggagcatactttgagccctggaggaaatgttctcattatactattagacatcttttgggcagcagaaactcaggattagagattgcactttttaatcactatgtgatacatttatttaatacttgaaaagtggccttgaaaatcatgtatatctttgtcatgcgttctatatagcctcaatgggagtgagaccatctgagtctatttgggtctgttctcatgaacatgcatcttcaagagcatatctgcttcatctactgctgcttttatctgtctacagtctcttcctcctttatgagattgtcactggggaggcatgacagtccctaatgtggtcaactgggttaactggcaagagtggagaccccagtgacgcctgctaggatcactgggaagtatgggggtcctaagttctacttcatttgcagggaactgaagcctgagaagtgggtctcatcttgacctatgcaattgggcttgggcatgcaaggaatcgcctcccaacaagccactgccaggtcagtaggtgcgctctgtgtgagaaacaggaactggagagcagagacaactggtcgcatcagctccacatttagggaaaagatttgttttaggttccattcctcctcaaacctgatgttcgcctttctggataaatgagaggaccatgtgggtgtgggggttcccagtctctggtgggctgtgtgcatgtctccatccatgcacctctgttccctccacagacttcactgcagggttatgctgttcatccaaccatccacccacctgcctgctgcaacgagggcgaggcttcccagtgcc

SEQ ID NO: 588907 - DNA, 4001 bp, Homo sapiens
gactattttggcatttataaatagaaatgattatggactttgatctgccatacggaggttcggaacctggagaacggctgtgataagtaggttttgattgagtgaaagcatgagcttgttcagagtgaggggcatagtgaaaaaggaacagccatgcctcaaaatcaaatcatttgcattcccacagcatcctgaataccgactacctcttcacttgctaaagcagctaaactgtgaagctctaagtggtttgggtttgttgtttaaccttagcgagatcctttaactgcagcaatattcaagccagatatttggaagcaaatgatatttcctcttgcagtgtccacaaatctgaatattaggggcatgaaattaggcttaccatctgatttgtaattacaattttggaattctctgttttagttgctgaggcctgagttttctggctcttaaagcatagatcatttcacctgatgtttttgaagcatcctaagtacagtagagtagaaaactgatttctttgttaattgtacactgaataatgccttttaaaaatcaaaataaaattaacaaataatggtgaatgaagtgagatgaaaacttgcttaatttttgccttgatgaggagggagacagatttatcacttagcttctcaagagttccttcttcctgcacaatttttagagcttaaaactggtatagcactactaataaggtctagccctatttgctgtcagcaaagtgggacaaatccaggaaatgttgatcacctttcacacccacatgtatgatgaaaccacaccatttgccaattgtatggaagacaaccagattccatgacaatttcctgttagcactgtgcttgtaatcatagccagtagaaaagcccctagaggaaaagcggcatgatattctgttactaactacatggaaggattggaaaatggaaactgaaataagagggagtgacagacccccaagtagaaaccatggagtcactctgccacagcacttcacttaggaaggatttggtaattacgaaatagtgattgattgatttcccttttggaattagcaagccagagctatcactaaggggaaatatcatagaaaatatctgattggttcatagagttggcaaataatcaggaagtgatggagctttttaaaattattccctggttatttaaagaagttgaaaatcctttcacaaatctttatccaggagaagaaaataaattctacctggacttaatgcagggttgtttgaaaagaaattaaaaattcatgataaagataagaaacatgttagctttagaacagaaaaaaaaaaaagtgggaacaggtggagctgaattaaaggttaggaagtcagggaaaaccaatatggagaaaaagacaaaggtgcgatctgtcccagaagataatgatgtgtttgtggtaagtgggggatgtgggggagggttgttgaaaaccacctgagactatttagagtccgacttgaggttaaggagggggagttcatcgatctcttaccgcccggatctgcagctccaccaccacctccagaggcatcgttccctgcgtgggcgaaaggactggaatgagaagatccttttgtgccgagccttggaccaatttttcttagtttagctgaatacctagagcaaatgttcccagaagcttccccagtcccacgcccttgttcccctaccgtcccccccagcccaggtccctcccaccgggacgggtctctcacactcgaagctggagtgcaggcttccagaaggcggaagcgtggcgttgccagggacactcaaacgcgcagtcttcatcgtggaacgcgcgcgaggccccagcgcagacgcgcgccctcacggtcgctgttgcccacgcagtgcccccagccggagagactggccctgtctggcgtgctagacggatagagaaatgctaacaatcccgatcttctttccatcagctcctgctatccccaattaccatgtcagaatgtttaccgttttcattctgaaagtagaatgagatcataggtctgttataatttaaatagtacacgtttagtagctgcacgaccccaagccttgtagtttctgtaacaattctcatttaatatagttgcctgttcctaaaaatactcttttgcttattaaatgttatgtttgcttcggaaaacatggccaccgtcaataacaaacgtgtgctaattagaaatataaggttaattcttaaacatatttaaaagttaggtatcccctgttagcagcaatagaaatatgtcagtctttccataacggtgtccagccttttctggggtttagtttaaggcaagcattgagtagtccaatgggtagttattgcatttgccaaaaccacagttactgtaaacactgtcagaggtggtgcgcagagcaagagttctgaatgagtaggggacattcactacatctaatagagaaaaatgaaggaaaggagcaggtagtggctccttctagcaatccaaaaaatctaggaaggccaatgctgcctctgaaaaaaaaattttaaatcctaaattatgttcagtcatttattactaatattttgcattagagagttatacaattggaaatagtgcagaaggatggtcaagacaagattgggtattcattttggtaactggagtttatttccctggaagggaaaaacttggtatgatgaagaagggcatattgtatccttatccagttcctagtgctgtgtctctctgcatatcaagagatacaggtgggcacctaactatctatagtgtccagatcattgatttgtcactcacaacttgctgacacccagagtgatgtgggacaggacctgtgatgatcctaacaggtaggtcaccaacaccaatgctaagaaatcaaggagagtgacaagcaaaacaaattaataaatagccagagttgtattgggagagaagaatcagtctttactgaggatctgcaaagtgctaggcacattgcgtatgctaattcatctcaaccctacaataactctatcagggagatattatccctattttacagatgcagaatctgaagctagacagccttttactaaaagccacagacctaataagggagcagccacatttgaatccaggtgtgccctaccacatcactgggtctgcaatatagacatcctgttgatctctagagacacaatgttccattctatgctcttcttagtcttaactcttgatctaactggactctccttgcttggctgctagggcacagctctcttctggtttccctccaactttctggctattctttctttgtctgtttatcctcctctggctaagcaatgtttctaggtcctttcctttcctcactctataccctttacttagagtgtcatccattgcagacattgattaacacatgtatacagatttacataccccaccaagacctctcttctgctgacaaggtggaatctcaatatcatatcttatgtcatacatataaatatatatatctcctctttgtagcgactgccataatagcagttttacatttgttcctgtgactcttgattactatttgtctccttaatctgtaaactctgcatggctaagcgtttataccctaaataggatagaagataataaatatttttgaatattaaatgcagagatggtcaagccaatctgtgggggttaatgtacatggataaagagaggtcccatcacaatgggtaaaagaaatctgcagaattagaaaggaccaggcacagctacttctgcaaatctgctatggtgatattaaatgagttgatggggatacttcacactctcctaattgtccccgccatggttacctgaggctctcagctgctgtggagatgtggcagttgctatacacacccagtccctctcactcatcttgcaaagttatttatcattgaggctgtccacctctgccgggggccaacaaagcct

SEQ ID NO: 588908 - DNA, 4001 bp, Homo sapiens
agccaaatttgagacactacccacgaaatgcagaggggcacacatcaggcacatcaatattgtgacccctcagttcacaagtaagggagacacacaattatctgagatacactttaaggacaccaatgaccaacatatggcatcgcaatggctgttccagggaacatccattttcactgtttcctggatttcaggcatagaaagatgactgaagacatatagtggcccttttgccttgacccagttcataaccattgtaaaagtaaccatttcactactcaaaagattataaagaaactatttttcctaagaatctaggatctactacctataattctggcatacacattctttacaaccttaatatataattatcaaatctgataacgaacgttctgtaaattaccaggtactacaatattttggtgtttgccttttaactaaagctgaggggggagagtggggaggttggaagaagcctcatttcacctgccctttccaaaatttcacttcaaaagagtgttaaaaaaaactcagtatatccaggtataaatctccaagtttaattttcactgcttaacaaaagcgatgtagaaagcaattactgtaccctccattaatcctttcggattgcatggaattccttccagaaaattccaatagaaaaaaagttaagacaggtaatcgcgttttggtacgtgtgtcgtctctggcacaagtcatgtagagtgaaatcctttaagacatttaaatgttcctggtattgttttgtgattaacgtgataaaattgccaaacaatccatatttaccatgagtgaaaacacttccaccacgtacggaaaatctctccaaaacacaaaatctgattcaaaaattataagtaaaaagagaataaatgtaaaaacaattccataaacaaactttgaaatgcgtatacgatgacattactgaagccattactcaaaacgaacctctgtaaaatcgagaacgcacaatcaatgcaataaaatgctcgagaaagccaaacccgaggcgctgcgcagttcccgcatcgcacaattcgtttcaacacattccttgacgaatacacccaaggtcactcacgatggagaggaaaagtgcctgtctctctccagagcacgcaacccgttcgccgcgcccccacggagggcggcgaagagacggcgcatcaggaaaggggctgcgcgggcgcgaggactggccggtgggcgttccggcgccgcgaaccgcggagcctgcaacttacaaggtccgcggccatcccccgggcctgggaggggtggccccagggcaggcccgcgtccccggggtgacccgacccgtcgcgccggggtcccgcccctccccccgccccgcccccgtcgccggcccgggattatgcaacgttccccctccccgcctgcattctggcgcagcgccccctccccgcgcccgactgcgcagcgccgccgccccctgcccgccggcctccccgcccggctccaaacaaagcgcgcgctaaggggccggcggcggccggggaactggggacgagagggtggcggccatgttggcggggggcggcggggatgggggcacggaggagtaggggccggcgaacaaaggagcgcgcgcccgccccgaggcccaggcccgcccagcccgggtccccgccgcggcccagccggcagggggcgctatgcgggcgccgcccgctggacaatgctccgccgggccccgcgcgggccgcgctcacctgcgcccccgggcagaccgccgcaccgctggcccgcccgcagcccgcactccctcacgacccacgcccgccctgcgcgggcctcacctgctgaccgccgaggctgcagtccacaggcccacgggttccgccgtcgctcgttcgcgctcccgccggccccagcctgagccagacggcgcctccccgcccccgctccctcgccgcggacgccgcccgccccccaacagtcagggcgcacgcgcactgcgcccgccgaactgcgacggccgcgccgccccggcgcctggcgccgacggccgactgcgcaggcgcagtggggcggggcggggccggcgagggcggggcctggcccctctcacctggctggcggcagggcggggctcgagcccgggactgccaggtgcgcgccgggaatgggcggcggcaggcgcgcggggcacaggttcctgagggggcgcagcttttcctggaaggcaggcagcctgagaagggcttcgtttttgcgcagtaggacgttgaagaaaggacaagccccctttgtcctggacgtaagccgcaagtcgtcctgagtggtgcacaccgcgaagactgaggaaactggatcacagggctgggccgtgagccttgaacctcggagaacgtcgcattactgctccagcgcgccggttcagggccgcgggacgcgagccctttaaaaggatggatttgcttcctgtgactccctggaagagacgtcttcaccaccgcactgcgtagaggccggcgtcgtcgccggctcaccccgcttgctgcctccccgcacaaagcccagcccaggtagctcaggttagctggagccccggagcctcacctacaagtacctggcctgtcctaggttgtgtggggacgggatgtggcttctgcaagcccagaaacctgtttccactcccccaccacaaatggaactcacccagctctactcgcaaggttaggagccaaaaattcccatgatcgcacgcgaattcatttgacttccgtttcagttaagatgccttttcagcattttgttgcttgtttgcagaagggagagaggtaggatcaagaatagtttttactcctgcagagtcgagtgcgagacttggaggctgagtccaggcgctctcccctccccgccagtcccgtgtcctggagcaggtcactgacctggttcctcgagtgcgacagcgcagcctcatcgtaataaaccgcctcccaaagcgttgtcagatcaaattccagaacatgttactggaaagcaccttgaacactctaaactgcagcacagttattagttagcaatactctttggggtttcactggcaccttttctaacaaataagattgatagatgcctgctcaaacaaattgaagtgcttgtctcagatgacacacttggcaggcatgggacgttcacaggccaactagagagctaatttcaaaactgagatataaaagtgtatcgctgtacttacaagttaccaagtgttgagaaattactcactttcatttgtgtgtttaatgtcttttttgtttttttagacggagtctcactctgttccccaggctgcagtgcagtggcatgatctcggcccactgcaacctccgcttcctgggttcaagcaatcctcacatttcagcctcccgagtagctgggattacaggcgcgcaccaccatgtccagctaatttttaaaaatatttttagtagagacggggtttcgccatgttggccaggccggtctcaaactcctggcctccagcaatccgctggcctcggcctcctgaagtgctaggattacaggcgtgagccaccgcgcctggcctgtttaatgtcttgcagtggggtcatctccgaaacaaagagggatgggaagaaggtaggtgccaagaagtctgctggttggaagatttcatctcattggcgagatccctgggtttctccacctcagcagtgttggcttttgggatgggataatcctttcatgtggggtctgttccatgctttgtaggatgtttgacagcatccctggcctccacccactagatgccagtagcacacacactcctccaaaattcacggaaaacgtcttcaaagtcaaatatgtggccccaccttcatctccatccccaacccctgatttaaaatttgccactggtgatgatctcattgggagctattgagaatacacaggactgtggtttacacctgtaatcccaacactttggg

SEQ ID NO: 588909 - DNA, 4001 bp, Homo sapiens
cctacactgtgggtgttcaggaattgaatactaaagtgcattggtgtaatcccagcaccttgggaagccgaggcgggcaaatcttggggttggaagttcgagaccagcctggccaacatggtgaaactccgtctctactaaaaatacaaaaattagttgggtgtggtggcatgtgcctgtaatcccagctactcaggaggctgaggcaggataattgcttcaacctaggaggcagaggttgcagtgagccaagatcgtgccactgcactccagcctgggcaacaaagcaagactctgtcttgaaaaaaaaatttttgtttaaataaaaaaaaaaattaaagtgtattgggaggagggggtgttcagaactctaagatgtcagagtttctttctgggggatgtggggaaaagctacatttacccccaggctgcccttgaccttgacccaaaatgccccctcctcactcagcccaggcagtagtctgaaatgtgcaaaaaacaaaaacaaaaacaaacaaacaaaaaccaaacttcttcagagcaggcttttcagtgttcccaactgctcaaggagtaggtaggtgtaggtgccaggctgggcgtaagcaggctgctcctgaacaggtccccagacccgtttccctttccccctgtgcccaggtctgtttccagctggggaaatgggtgtgggactggccatgaggtcagtggccctggatcctgccaggcgttgccttataacttatggcttttgtccaggcgggtcctaactggtctccccgcttccctgttcagtttattctcaatgtaccaaccagagcaacccttgaaagacataactctctgctcaaagctttcagtgcctcccattttagtcagaggaaaagccaagttcttatgttggccaacaaggtctttcccggtacagttccaatttgcctctctcatctcctctcctatcactccgtacaatgtcccctcctgccacactggtcttacagtacctcagtcactccaggcatgcccctgcctcaggtcctttgcacctgagctgttccctctgcctggaatcttctcccagatatccacatggcttagtccctcatctccttcaagctttgctcaaacatcggactctcagagatacctcccctgatttgaaattgcaacccccttccagtgcccatcaccctgccaagtattttttccttaacttttatcagcttctaacataccgtttaacatacattgtaaccatcttgtttattgcctttccccttttcctctaccccattggatttatgctccatcaggaccgtgctttttctgtttgggtcactaatctgtcttaagggctcagaacagtgcctgacatggtagctgtgagattgcagggatggcccagatcctgagagggccctgccccaagtatatgtgtccagtcctgggaaagggctctgtcgtgctcacatggctgcccaagtcccaaaccacagcctttcagagagatcgggagctcagaagacctcggccaggtctctcttagcatccaccaccctgcacccagcatacttgtcagtctctcctgagagctgggacctacctgctcccttctgtccccacagcctccagcccaatagttgctcagtgcagctttgaactggaacaatgccctcttttacagctggagaaactgaggccccaagagggtaggggactttggtaattctgcgccagtcaggatttgaacccaagtttcttttctcccagcccagaactttccccagcacagtggagggtgcatatgcagaatgaaggtacatggaaaaagctgaggcctcacagggtgctccaggccctgcttctgctctcaccccaagctcacctaccaacacaaagccacagagaatccaggttctgcccactcacccctgtccacaacaaggagggcagccaaggccagggcgattacccactggcggacggccatgctgatcctgggatagtgtagcctgagctggctggggcctgcgcctgaggaaggatgggggcctatttatagtgccgctctcctaatcttatcttatctagggccagatggagagaccagagttaatctttgcacgctgacatccggaaagggcttgctctaggtgcagatgctgagcttttgatgagatggggctgtggccatggggctggcaggtttccagagtgacaaaaagtttggacaacttgcaaagctgactccaatctgagggttggagcaaggagaggaaagttgaagtagaaagagagagagttcaaggcagagagaaggggaaagagatagagaaagagagaaaggaaaaaagcaactggaagatggcaggaggcagagaagggggctggagcctggattcctttgccagtgcctccagcaaccaactctgggacctcggtagagccacttttcttaactgggcctcagatcacccatgcacgaagtggagatgagacttttggctctgcctttctcccaggctgctgtgaggatggcggcggtgatagcagacgggaaaacattttgcagaatatgaaatgagctgtaaacgtaagcagaaatgatcatttttacttacttttatttcacttatttttttgtaccgcaaagtgggcacaactaacaggcaaaacaaaggcaaaataaaacattaaaaggaagatgccttcttgctttgcaggtattatgtgttcatttgctttttttttttttgagacagagtctcacactgttgcccgggctggtgtgcctggcgcgatctcggctggctgcaacccctgcctcctgggttcaagcgattctcctgcctcagcctcctgagtagctaggattacaggcacctgccacctgcccagctaactttttgtatttttagtagagacggggtttcactatgttggccaggctgatctcgaactcctgacctcgtgatctgcctgcctcggcctcccaaagtgctgggattataggcatgagtcactgcacgcggcctcatctgtatcttcataggttaaataaagacaagattcttttaaagaaaaatcagtttctaaaactcccccatacttacatagtatacattaataagtcatttggatatttgctctcaaagaatttctgatatataaaatacattttatttacatacacgtttctctaattcatttagatcagtgtttttcagctctgtctgcagattggatttccctgggggagaatttacaaatacagatgctgagcttcgctctgaaatatttaaatcagaatctgtgttttttttttttaaagaaaaactttatttcgaaagatttcaagcctgcagataagttgcaagaatattccaatgacaaggcgaaggattcttgtttgaggacagccccagccaggtgcggtggctcatgcctgtaatcctaacacttgggaggctgaggcaggaggattgcttgagcccagaaattagagaccagcctgggcaatatagcaagaccccaactctaaaaaaaaattttttttttaattaaaaaaagaacagtccctttggggacaccagccatccagtcacctctacagacccatagaagccccagacctgtggccaagactagcttgaggcccccagtgatccttgactcagcttcaagatccttccgttcctccttaggaaactgcacagtcccagggatgcctctgaggcaggtggcagctatctttccattgcttaggcaggtagagaaaatatttaatgatgacttcctgtcctaaagcaaaaacgccatcttataaaaggggaattggactttaaaggtcatcttggggccaggcaccatggctcacacctgtaatcccagcactttgggaggaggctgaggcgggtgcattcacttgaggtcaggagttcgagaccagccctggtcaacatggtgacacccatctctaccaaaaatacaaaaaattagcc

SEQ ID NO: 588910 - DNA, 4001 bp, Homo sapiens
caggacatgggggactattcctgagatccacttttcaggatctgcagttgacccccaactttggatgaaggcaggtaagaaaaagcagaaaaaattctaacccagggaaccaaaagacatacttaaaacagctctccccatgtgcacctcttcatcatattgcttgacaggcttacactgcagcctgtgacataccagatttctccaattattagatgactacaaaacacactgccaagaccaaagcatatcagagaatcagttactaggctgatggtttgccataagaactgcttcacacttgtccaggatgaagcaaaaatcctcctttccagtctctccatcaaggtccctggataacagttaacacactttgagggtccctttgagtaattattggcccagttactaaaaaaggcttattgttaatttcctgcacagaggcctttactgcagcactttttttttcctccgcagcacattcaatttgacctttcaaaatctaagacattagttagctgcaatgaaagggaaaataaacgactagttaaggagtcggaaccttgactcaatggcttcatatagctgagtgttcctcctgctatttccaagattttctgtttcctggctccaagacacccccacccttccatctttgatacattctgttttacttaaggccaattgctatgacgacgcaatttctcaacacattatgaaaatacttcatatggcctctctcctgttcttcccgaacagccatgatggtaagtttttctaaaataacatgatgaagacagaacaaagggcttaaatattttaggatctattatataaaagagatctgattagatgttggaacagttcaagcatcatctcaacccagctttctgagctatttaggcttttcatttaaaacatattcaacttttaacaaggcgcttatttaaaatatattttactctagtacatcagagacttttgaaagcgatgttctaggggaagcgtctaatcaaattctcagggacagctttcaaacaaaagactgttctatcattcaacagtggtatggtagaatttttgacactgtatctcgactcgaaagacccagtcccaggaaacacacacacaaacaagaacgctaagctattaagttatttgatttgagccacataccatgcaagcactgcatttacctattatttacaagcaaatcacaactaggaagaaagaaaaatgtttattacaaggaaagaaaaggagacggccagtctcagacccttctgcgttcagagagacggcagagattcgccatgcaggatgaaattaaggtcagagagccgtttacgctatgctcgggctccccgggctcttcctccctctacggctggccggcattgctggtgcgattcggaagaacgagctgcagaagtcgctcccggccgagggaagggaccgggggcggtgcggggagcgttctgcagggaggcggctggcgaagatcccgacgagggagcccccacccacctgccgcagccggatggggcagggcagggccgcgccgcagccaggcttgggggtggttgggagggacccggcggcctcgcgccccctccccccgtcagtgacattccagcggcggcgccgagcctcggcccggctgctcctccgcagcccacgcgccacaaaagcagcggcagcggcttcccccactcagccgaatggaggcagccccgcggcccgcccggctcacctgtccgcgcgccggccccgccccgcctgaagagctgcccagctcccacccgggggtcggctgcccggggccccgctccctcccggagctccccggctgcccctctcaccggctctcggggggtgaggggcgtgggtgcgtcgggccgaggggtgctgaaggaccgaggagcctccgcggcctccgctccacaccgttcactccgcagcgggtagtggcggcgacgcgcgcgccccgcctcttttataagcggctacgcgcgctcccgcggcgggcgggcgcgagcgccgggggaagcgccccggcgctgcgcgaggggtgggggagcgcgccggcggagcaaagggggcggtgctcccgccggctcgccgcccgaccgcccggcggaaagggccgagcgatcccggaaggagccgaagcgacaatgcgggggaagaggtgagcgaggggcgggccgcgggaggatggggaaatggggcgcgcgcaaggggtgaggggtgatggtgcagtgaggtcactgcctacgccctggcggtagagacgctcccgcctcacctccctccccgcagcttgcgccccgccaccgcccgccctgcggacagtcgtctgcatcgcaccactccgccctgggagctcttccaggactgcggagaagggcggggcgggggtatcgctgcagtctggctggggatgctgcgcgccccggccggaaaaacgcccagtcccaaagggtgagatcacccgagtgcgtctcttcctgctcactttcccgaggaggaggctggcgctggggtcccaagtcagcctaattcggtgggggctggggtcaagaagacgcggatgatttggggccccgggtttgaggaggtggtgagaggaaaaggccaaatccgaatcagaaaaaaaattaagtcgactaatttggggcataaagctgtcattctgggatttggagagttaatttcttatgttcttggagattatgggggaggaaacggcagcggcaaaataataatttcttacattcctgcaacaaaagctttctcacaggtcgccagtggaataggctacattcatcctatttcataaacaagacattaaggttctttctggcacaattaatcgaacttgccttgtgtactaggcactatgctaagtatttcgtgttaccttttcatttcttaatctttgcaataattttatgagatgttttcccattttacaaatgggcactcttacataatgctcatgtaggctaagtctcttggcccaggtcaggcagctaccaattggaagagctaggatttacatctcagcagtcagaaccttccctttgcaaccgtatgtgtattgccttcaaataggaaagggaggcattttgatgcgggtggctgctggggtgcagaaagagaaaaataagattctcagaatttctgatacttaaagtcctagcagtttaaggtcctggctctaaactctgtagccagaagccctggattaggaagccctttccctatccccattccggtgacagctgggccgcagccactgggagtaacacccagatcattcctgtgcagtcaggcagacggggagctctgcagcttaggaaggcttcagcctcctggttaccaagcagctctcctctttaaataaatataaagtcattggacactgcaccagaatctgggcccagacctggccctgagcttcctggccctctgcagtttggcttctttccccgtgcctgggacctgcaatacggtttctaagctgtcctggctgtagccatgatactgaggaaaaatttccctacccactcactccattggagtggagagaaaagcagtgaccacaccccagaagctgctttagagaatctgtgtaggagaaacgtaggagctgagaggcatttcctgcaatcttctatgtagagaaaacagcgctgagcaactcctccctggagtgtgcatttctgagaacagctgatggtatccgtggcctcttctccagcaggttgcagtaaaatgtttgatcagatattcagctctgggtacaaaatggctaacacaattgtagctccctaaaatttccaagaccttctgctccagcaaagaaagcaccttgggactgaggggcaggagctgttcaaaagggagggtttttctattaaatcaccctggccccatagtgaactgggggttctgctgcttttgctggatgcaaaatggagacctaagagagagct

SEQ ID NO: 588911 - DNA, 4001 bp, Homo sapiens
aggaaatgttacatacaggagttctcccaagtctcactgttggacagtttcggggaatgagaagttacactactgtcagtcttcaaaaagggagcaaacaacatttaacagaaaataatccatttctttaaaaaatcatttataaaaaagatcattcaattttagtggctcattttaggtcactacagttaacctaatactgggcatcacttaatacatgagcataagacagagccacatctgctgtctctgctgtttcaagataaaattcccagtatgtcctgcaatggaagacactgtcattacccctaccagtagacggtgatattaagtttggtgatattaaatcatcaaaagtaaagtgaaattcacttgaaatgaatgtaagctctttaagcacagggacttctgcctatttgttcaccgcactatccctagcatctagatctgtgtggtccaatgtggacagtcactaagttacacgtggctatttaagttaaattaaaaattcagttgcagctgggtgtggtagctcatgcctgtaatcccagcactttgggaggccaaagcaggaggattacttgaggccaggagttcgaggccaggctgggcaacacagcaagcccccgtctctattaaaaaaaaaaaaagattagttgggcatggtggtatgtggtcccagctactcgggagtctgaggtgggaggatcgcttgagtctgggaggtcaacgcagcagtgagctgatcgcaccactgcactctagcctgggcgacagagtgaaaccctgtctttaaaaaataaaataaaataaaataagttcttcagtgcccaatgaatagctctgcaagacagcacggggactctcagttattaaatgaatgaacactaagattgacattctggtttcttattatcttatgtatctgaaataactaggcttcaaaaaactcttaactattcttcctttaaaagtctacggccaggtgcagtggctcaagcctataatcccagcactttgggaggccaaggcgggcggatcacctgaggtcgggagttcgagaccagcctgaccaacatgcagaaaccccgtctctaataaaaatacaaaattggccgggcatggtggcacatgcctgtaatctcagctacctgggaagctgaggcaggagaatcgcttaaacccgggaggcggaggttgtagtgagccgagatcacgcccttgcactccagcttgagcaacaagtgcgaaacaccgtctcaaaaaaaaaaaacaaaaataaataaataaaaatcgactaaactagttgtatctttataagacagaaaactgatgtacgcagaagaatgacaaactattttttattcacaaatcctaagtcacttgatttcttttcgacaaaaacaaactccaatttattacaattttattccccaacgaactgtaccgtagttccaaagagctgacttccttaggaccttcccagacgaaggtgttccactcattttcaccactccgttttatcgtccgtctaaactctggtttttgcagacctgtctcctgcgtccccttacacgtgttcctttccggagcttccaggggacccggagcataagaattcaaaccgagaccctcagtcccagcccccgcccccgcccgttcctccctacactcaaccgctgggactagaagctcccggcagtccttccagcaagaggcaccgagtctgggcgtgaccgagccagtcccgccgaggtctcaggccacaaatccacacgcgtcctcccaccctccccgggcccgggtgtggtcgcggaccgctaatggcgcggagcccacctcgtaaagcgcctgtaccatctccaccagaacccactgctccgtggcggtcgccatagttagccgcttccttccggaaggcgggtcacaagcgcgtcccaaaagtgcgcgtcgctgctcagtgtcgttatcacctccgcagagggcggggcggcggagcgctgggcaccgcctactcgcacttgcgcactggttgacaggaggctggacggggtcaggtgggatgccgcagtttttccaagaattgtttaccttgtgtcctattaccctccctgctggattcaggatggagaaagtagtaatgaacgggccttacacttggtcatcagctgggcgcagagagttaaaatgattgcaatacgtttactttatttttttttttttgagacggagtttcgcttttgttgcccaggctgtagtgcaatggcgtgatctcggttcaccgcaacctccgcctcccgggttcaagcgattctcctgccccagcctcccgagtagccgggattacaggcgtgggctaccacgcctggctaattttgtatttttagtagagacggggtttctccatgttggtcaggctggtctcaaactcctgacctcaggtgatccgcctgcctcggcctcccaaagtgctgggattagaggcgtgagccaccgcgcctggccaatacgtttacgtttagtagcataagtaatccagcaatgcattatcattaagaaatgcataattatacacaaaaatagccaacccatatagcacttcctgttttgtcagacataggccaaggctttgcaggtattaaatcatatagcagtttggtaaagaaccttttagagccttccaatgcatatgcaaacagtatgcacgcgcacatacttaattggattggatttcttaaatataattgagatcatagggacaagacttttctacaactttttttaaattttttttctagcatttttttcctaatatatctcatatttaatggctgaagacttccatggaataatttatgtatattcatcgttccattttatgtaaacgtttccctattggtgaatacttatgttgttcccacctttcccctattacaaataatgctgccataactgtcgatgttccttgtgtgtatatctttctgtgcatgttggagtttttctgaccagttttttcaacatgggatatatctgaagactatgcacgttattaattttgataagtactgccaaaatggctcaaccaattaaaataatttggaagtttttctatgctctagtccatgatggatattatcaatcttttaaaaaaatttgccagtttaatggagataaaatgatacctcactatcctttattattgatgcttctggttactcatgaggttgtgcagcttcttatatgtttattggcatttatagactgtatgaatcgccaattcatattcttaatccatttttctattggttatttttgccttcttatggatttgtaggaactctatacattctgaatatcttatatttttctgtttcatatgtgaaaaatatttttgctcagttgccgcctagttgtttctgctctttcatcatactttaattttaaattttatgtagtgcttcagtctgttttttgcctctggatctgcatattgcttagaaaggccttcttcaccacatctatggtttccaaccattcttgcagcagtttgttgttatttgcaattagctctttactctggaaactatatttttggataatgagagttaagggacttaattatgtttttttctaaaggaataacaattttttgagtgccatttatttgagtaaccctgactttccccagaattctgaaatggtaccagtgctattgatacaggagccaaaaagaaattatttaggcagatagtgaaggtaagagagtcctcagcagagcttctttctgaacaaaaagcaaccccaaaattatttcttttttgcaaagagcagcctgaaaaattgagctacaaacatagataagcaagctggcagtgcacgggagaatgctggcagttgtgccgatagaaaaagactacctggaagccaggtatgttcaatatggagactccatcttccattttctttgtcaccacgtgtacagtgaaggaacaggcaacatg

SEQ ID NO: 588912 - DNA, 4001 bp, Homo sapiens
cgtgggccagtcaggggaagaggaccggcggccctgctggggagggctcagggtggggctggcctggggagggtgggcaccctcagcggtgtccctgaggctagtggggcagtcacagggaggccactccagaccctcctccctcctctcccaagggggagcctcaggctctggctctgcaggtgtctggcagccccatgctgttgatacgggcaagcagcaggctggcacggatctttacaaagataatctttattcataatcacaggccacaggggtgagacctgaggtttgggttctgtggtgaaggagaacccctgtcctcctgtcccttgccctgggcctctgctggctgaggagggacaaggtgagggggcccccatggtgctcagacaaccagagcctccctggcagggcaggagtgtgggtgccacagagacaagccccttgcagagctgacctggagcccaccatccccatagcctgtgtgagcatgaagcgaggacccccgggtgggctgtgccctgggcttgtcactgatgccagtggaggctggcacctgcccctctcggcacctgagacagtgagggaaggtagctgctgccgtgaagaacaaagatgctctgagcacacacttgctggggctgagctgaggggcacacggaggcaggccctgcccgtggtctggtcagctgtccctgccgccgctacttttctggtctggggctgtagccttggtcaggttcccagcttccctcttgagaacgctgagcaaagtctgggagctctccaggatctggggccagagaagtgagaaggttgttaatgttcacctgttggtaaggtcctaagccccagctgtcctcacactcaggtgctgggacctggctgggggtgctgtagccaagggatcctgtgtgggggaaggcggaagcccaaggggactggcagacggggtggcagggccctcttccctccggaatctgacccaaaacacttcctctccaccctcaaagccaggctgggttagcactggcccgtgctgggtgctctgcccaagacctggctcttcacactgagcagaaataaccacatggctagcgagaaccggataaagaccaggacccaggatgccccaggccccacagacagccccacagtcactcccacagcagcctgggttcctcaatgggcctggccacgctgcccctgcccgaaatgccagcgaggcacagactgcccacagccgggagccccagccggtcctgacgccttgccgtggcaacacccctgccgtgcctatcccctgatgctcggcctggcctcccgagctccaccttgaggtaggcggcctccgtctccgcgatggtccggtcgaactcgttgcgagaggcaatcttgcgtgccaggttctcgttgacgcgggccagcttctctgtcagctgcctcacctcattctgcagccgctgcttctcgtcctcctcctcctggatctgccggcacagctcctcccgcttctggcacagctcctctatgcctgggggccgggaggggcggcgctgtgggcccagggcaggagcgcggcggcggagggcgggcctccttccacccgaggaagccagagtcaggcaccacccccgagcgcccggcgcggggcctgcgagccagcgagggctcgggccacggacacccggcctccggcacggagggctctgctcagccgcgcgatgcccgcagcgaggcgggtccaggggcaccccgctgcgagccgggaacccggccctgcggccctcccgacctccccgtcccggctgcgccgctcacacttgaccagctcgttgttgtagttctgcagcgccgcgccctgctgggtcatggtcaacgccgcccggggccccaccaccccaaccgccgcggaagcagcgctgtccgcgcctgcgcacgactcccccacggcgcgccgaactagcgcgtcatcgctgagcgccttgtgcgcgtcatggctgcgcgtgcagacgtgcgtcatcgccgcgcgccgcgccgagcgaatctcggagtcggtgggtgcagatggcggcggcagttgtggtggcggagggggacagcgactcccggcccggacaggagttgttagtggcctggaacaccgtgagcaccggcctggtgccgccggctgcgctggggctggtgaggcctgggaagagaggggcggccccgcgcggagtttccgggaccgtacgcgctttggggccgctaccctcgggttcatacggctctgtccatcatccgcctctgtcctgtcctgccattttccaccacctttccgtttcgtttcgttcagctccgctgacagcccttccatagcttcggcccaacgtccgggcagcacggacagggggcagcggagtttttgcagcctccccctcagcttcttcccttccccgcctctccccacctctatgttgtgttcccctcgcctcacggttttctgcaccccaggtgtcttcccggaccagcggtgcagtcccgccaaaggaagaggagctccgggcggcggtggaggttctgaggggccacgggctacactcggtcctggaggagtggttcgtggaggtgctgcagaacgatctgcaggccaacatctcccctgagttctggaatgccatctcccaatgcgagaactctgcggatgagccccagtgccttttgctactccttgacgcttttggcctgctggagagccgcctggatccctacctgcgtagcctagagctgctggagaaatggactcgcctgggcttgctgatgggcactggtgctcaggggctgcgagaagaagtccacactatgttgcgcggagtcttgttctttagcacccccagaaccttccaagagatgatccagcgtctgtatgggtgcttcttgagagtctatatgcagagtaagaggaagggggaagggggcacagacccggaactggaaggggagctggacagccggtatgcccgtcgccggtactaccggctcctgcagagcccgctgtgtgcagggtgcagcagtgacaagcaacagtgctggtgtcgccaggctctggagcagttccatcagctcagccaggtcttgtgagtagtctgtcccgatggccatgcccttgctccttctggttccccgctgctcccctgggtccagctggcctcagcagaaagctggtgagccgtcctgataaccaggaacatgacagagagagagtcccagggattcctgtgcagcgtgtcctggacacaggtgtctctcttctgtcactcaccttcagtcccacagattcatgccttgaccctggtaaggccctatgtggcttgtgtctgcagcagcaaatttcttagcaactccaaacttcctggactctgcagaattccactgtgccttttgtcgatcctggggaggaatgattctcaccctcgtcgacattccttgccctgtaattgtgaacagaagcttgctgctgcttctctccaggaagatcaggtcactgtgagggcaagcagtctcttgttagtttggagaggagaggggtttgttgtgagagacaggtcctgttgtagttctctagcaattgtcatacccttggccatttgtggtggttttgtcacattgaacgggggtgtagccatgcagctacttgagaggtcttaggtggactaaaggtggactaaaggagtgctccttttgctggcaggggtcagggagaccgtgaagggcttctgttgggctcatccctgcaaaagttacacggcaacttttctcatcctcctcttgagtccttttgtcactgtagaccagagactgcactgaaaggcacaaacagtggcatctgtacctctgcggccagggtagcagtgcagttggttgtcgtttcagagttgatcctaggagataaggctagggcccccgacagccacacctgctgccactgatcacatggggaaggccagtgtccctac

SEQ ID NO: 588913 - DNA, 4001 bp, Homo sapiens
ggccccggagataacactgttatcatccccacattctagataaggaaagcagtttggagtgaagtgtgtagtacaaggccatacagcaaagaagcagcacagtggggccttaaatactggctggaaagcccatattcctaactggaggctagggtgtactgtgcgacctatggctctccatccctctgggcctgtttcctcctctacaaactggggactgataatgcccaccgtgtgaacttacgggaggggggcagtgaaagccttctgtatactgtaaagtgctgtgcacatgacaacgggaaagtggtgcctcagaagggccaccagccccttcagcctaggaccagggctgcctagtgtggccccgcctcctccccacccccagctgactcagtggctgtcccctggtgatccggatctgggtcagcaggccaggtggcacaaggagattggagcaaaggtcactcaagaaatggttttaataattgaaaagctggtgcctggaggctaccgcctccagaaaccatgtgccaaaggccattggaaccaggaagctcttctagccatctggcctagacccagcctggggctggtcctgctggcagacttagtgaatgcccctaccaccaccaagcctcccaggaggggaagggcttggtggcagcagaactgtgggctagtcactgggtagtgggccaccctggtcaccacgtgtgtctctctgggctccaggtttctagactcgaggcacaagtccctaggccacccttcagaagccaccaagcagttggctggtgctctccaaaaatcagaagtgggaaagtggcccccaccccctaccccatcaccccacctgccccggcgcatcctgcctgaggcccaccattttctgcccgcaagctacgtcagcttctaaaaataagtcttttctgtgtggccagctgtgcaggggagggagttctgcctggcacctgctcccctgcccatgaggaaccagagaccttgactcaggcagtcgagatgaactgccccccacatccagctctctctctcacagcccggggcttctgcagtaaagacaagagcggctgaactgaacttcacaaccccagttccacgtaggctttgcctggtgagctcgtagcgttacctccgttttacagggatagcaaggtactgacactgcagagtggatgccacctgcctggggccacacggtctgcaagaacagggttggactttgaggccattctgcccttctctgctcagcagtagggaggtcagaagtggcagtgggtcctggggtggagaggctgctgagctgctccgccagtcggggcctctgcgttccctggaagtcctccttcttcccacttaccggagccttcatgctgtcgctgtccctcagtagtctaggggctgctgtctccagggctggggctgggaaggggtgggagccgggcacctgccaagacccagaaactcagagccgggaggggtaaggcaggtggggttctaagctatagggaaaactgaggcaggagagggtacaggccggggtgaaagcacatggcacccgggaatccaaccccttgacgtctccaaacaccggaaggcaatgtccccatcctaaaggagcaggaatcagcgacgtttgcgagacctcctgccaacccaattcccagtgcgcagatggggaggaagaggcagcgaggaggcgcccccagctcaaggtcacccatcaggtctggggcagagagagccagaagcccggaattccaccccatccatcctacctctctacccgggggacgaatggagaggccgggcgagggcaggacgtaggtttttcaccgcccttccagattccactgccgcatctcccggccgaatgctaaccgggcgtgcaggctggggttcgcaggaggctcgcgatccgccgctcggagctccatggcccccgggccgggccgactgggctggaagctgatccgcgcggccagaggcagggggcggggccggggccggggccggcgaggaggggcggagactcgcgcgccgggggcggggcctgcgcgccgcaggcggatcctacgagcgcggcctgcgcgacctggggagggctctgcgcggccgggacggggcgggacgtgaatggctggcggcgaggcctccagctaggggcggggcctcagggccgggggcggggcttcagagccggggcggagtctgagtaccagcatctcccttttcggtcctgccgaatttccagcaggctcctgcctgggcgaggctgtcgggccgcaggggaaagagacctagagggtgtcgggggccaccaggcagtggcggcctggctgtccggacttgagtgtctccatttctgaaatggtggttggggagggaaattaagcagggcttcgggtcaggcagcccacgtttcaactggtaggattgctgcatttatcaagtaagatacagaacgcccagtgacattggaaattcagataaacaacgaatacatgagttattttcaatatgattattttattatgattatgtcagtgtgacagtcacctgagtctgtttttctcctctgagacacacgtgtagaggcagctcctgtcacagccaggattcgaacccaggaagtttcactccagacccggggctgtgaccacctactcttacctctcgaaggctccctcgctggaatgtcctccaaatccaagtcaagtcagctcaggccccaggcagatgctgcagtgtgtcctattggggtcccttgggatctcagaggcaactgccttcaagcgccaggctggtggcagaaagcactgggacagtagcaggggtgggcctatggggaagtgagagggcacacttcctgtctaggattttttttttttttcttttgagacagagtctctctctgttgcctaggctggagtgcagtggtgccatcctggctcactgcaacctccgcctcctgggttcaagcgattttcagctaacttttgtatttttagtagagacagggtttcaccatgttggccaggctggtatcgaactcctaacctcaagtgacctgcctgcctcggcctcccaaagtgctaggattacaggcgtgagccaccacgcccagcccttgtttatgattttttgtgcaaaatgttgaattggccagaaagatcatttcaccatcccaaccacacccacctcctctgcagggagctagcctgggaaccagcttgggctcctgccctggtctccatttcaaactcctttttcctttttctcagaggctcaggcctgggcaggatgccagggtatctgtccccagctcagcaaccttcccagtctaccctgctccaggttcaaagccaaatcacccctgggcctggtgctctaggcctcagtgcctcccctatccaggggctgggaggagggctgctgtagtggccctgccccctaggggcctcctttgagcacaaactctcctgtcactgccactccagcctggacacacatggggagtagtggttcacgctcagtcaccatggcccctcactcacacaaggcagtgggtccccaaagccagagccctttcctctcagtcctcgttcttcaagtttctttcctcataggcccaaccctgagggcacaatggtgagaagttccctatggattcactcactgcccacaatggctggtgaggtgatgattccttccccggagaggcaactccatccttgctagggccacatggagacagggacatgcccaaatggcccgtgctcccagggtagatgaggatcataagtccacagtagaactgtgaccaggaagtcccacagccccagataaagatcttcactttgcttttggcaaaaacctactctgcttaccacaacctacacgatcctacacagtgtgaactccttcagtcaccctccacctgccctggccaccctccgaccgccaatcattactgaagc

SEQ ID NO: 588914 - DNA, 4001 bp, Homo sapiens
cttgttcttgccctcacagaccgttagagcaaaagacaggagtccagaatcctggggtggccccatctgccctgagaccttggcattcaaggcgcccaggggtccagccgcctatatcttactacgcgtggccaccctttcctgcggatgccccctgcccgccgcccactttcccacctttgcccgagctgtgccctcagccaggaccaccgtccccctggtccgccccgtcacaatcctgctctgagaaggccatggtcagtacagcatgtcagctgccagtgcgaatcccggtttcaccacttactggctggggggcctcgagcaagccatgtgacctctctgagcctcagtttcctcatctgtgaaatgggaacaataagagtcggtaactcaaggggttgttggaaggattcaagcagatgtggcaagggacacgcggggcttgaaagtgctcccacattggccgggcgcggtggctcacgtctgtaatcccagccctttgggaggccgaggtgggcagatcactaggtgaagagatccagaccagcctggccaatatggtgaaaccccgtctctactaaaaatacaaaaattagctgggcgtggtggcgtgcgcctgttgtcccagctactccggaggctgaggcaggagaatcgcttgaacccgggaggcggaggttgcagtgaaccgagatggtgccactgcactccagcctggcgacagagcgagactccgtctcaaaaacaaaaacaaaaataaataaataaaataaaataaaagaaagaaagaaagaaaagaaagtgctcccacaatgccaacagctgttagtcttgtggttaatcactgttcaaggcccgcctctccagtgtgtcagtgaaacactcctcccctgaccccagtgcagcgactttcccggaatatcaaggaatgtgtgggaatgcgttctaagcatcacccacgcactgaatccaggcaatgcatggtaggagctcttgttgcccattttacagataaggagactgaggttcagagaggcaaagcgccttgcggggccgcccagagccggctccagagccttgtttacagggagctgcccagggctgagcctgacttcgtctccctggaggatccctctcggctggaacgggtcagaggccatggagtgtgtgcccaggacgtggctcggcacaggcaccagggcgggggtctaggggtgccggcctgttggggagcggcttgctcacgctggggaggcggcagccccgagcgctgggccaggagcatggactcagcccaaggctggacgtgcaggcgagctgagcgggagccgagggtgggggccacaccctgccctctgtttgggggctttccttcttccagccccgggagtcctcccgcagatcgggacgcccccacgaacccgcgtgggaggagggctccagggagaagggggaggggggctcctaaatccaagacgatgcgggacgctgagcccgtgcgtccacctggtggggggctcacccagcgcgcgcctcgcctcatccccctccccaactcctgcactccgggggtccggagccctaaccccagctgggaagaaaagagaggcaggaccgctgacggggtagtcggcggcaagaggcccagcggaccccgcgacagaccctgggcgcgaggaccggaacctcggggcgcggctaccaagggggaaggggtctaggggtgccgccgggggacccgcatccatccccatccccggcgattagcaatctcctctcccggcgccctccgccccagcccccgcctccgcccccgcccccgcggcctgctcccgcgcggcgcctgctcacctccggcggggagcgcccggccccccgcggcccccgagccccctcacatggcgccgggagccgagcgccggggtccgcgctcctcaggccgcccaggcctcgccgcacccgcggcccgccgggtcctagcgccgccgtcacggcccggcccaggcctgggaggtgggcggagcctcggggccgcgggtggctccgcccacgggcggcgcgggcggggaagggaaaggggaggcggacccgggtgccgccgcctggtgagcgcctcggtcaccccactgggcagcccggggtgaccaccaaaatacaacagcctttcggctccctgcagtgtggatcgggcccacttctagctctctttattgccaccatgaccccggatggggaaactgagttccggagcacgctgtgcttgcactcagtggagtttctacctgggctccccacagagggcctccagctccctgccttgcaccctgtagtcacctgggcaaacttagggttcaccctcagattcaagttaacctctgccattcgccagctgcgcagccttagcgcataacttcccttctccctgcctctggaaaatagggagaagaataacttcacagagctgggaaaacttaagatgttccttcttgtaattaccagggcatccatgacatcactctacgtgatagggaaaaataacttaagtagccattgctaggggactgcttaagttaaggcacagcctgccgaagtgcacgaggaggctgttaaaatgaaggatgcgggccaggcgcggtggttcgctcacgcctgtaatctcaacactttgggaggtcgaggcaggtgcatcacctgaggtcaggagtttgagaccagccaggccaacatggagaaaccccgtctctactaaagatacaaaattagcctggcgtggtggcacatgcctgtaatcccagctactcgggaggctgaggcaggagaatcgcttgaacctgggaggcagaggttgcggtgagccgagatcacgccattgcactccagcctgggcaacaagagcgaaactccgtctcaaaaaaaaaaaaaaaaaaaaaaaaaagaaggatgcaggtcagtatgtcttggcaggaaaggatggccaggatatttataggatatttacgtgaagaaagcaagttaaagaactgccagccaggcccagtggctgtaatcccagcactttgggaggctgaggtgggtggatcaccagaggtcaggagttagagaccagcctggtccacatggtgaaaccccctcccccaaccccccaccccaccccgcctccagtctctactaaaaatacacaaattagcgaggcgttgtggcgggcacatgtaatcccagctacttgggaggctgaggcaggagaatcacttgaacccaggaggcagagattgcagtgagccgagatcatgccattgcactccagcctccagcctgggcaacaagggctaaactccctatcaaaaaaaaaaaaaaaaaaaaaaaaaaaaactgtcttggaaacaaagttgtaaacatttgcattccacagctgagtacacatgccctggagaaattcttgcagatgtgcccaaggaggttcatagcagcatcgctatggggaaaaaccccaaatatccatcaacaagagaatggaattgttttatacaatggaaggttcacactgtggaataatatgtaacagggtaaaatcaatgatctacaattacatggatgaatcttagagacacaaggagtgaaaaagaggtattggaagataagtaaaaactacacaataggggccgggcgcggtggctcatgcctgtaatcccagcactttgggaggggaggcaggcggatcacttgaggtcaggagttcgagaccagcctggctaacatggtgaaaccccgtctctactaaaaatacaaataaattagccaggcgtggtggcacatgcttacttggaacacgctacttaatcccagctacttggaaagctaaggcaggagaatcgcttgaacctgagaggcgggaggcagaggttgcagtgagcccagatcgtgccactgcactccagcctgggcgacagagagagactccgtctcaaaaaaataaaataaaataaaataaaataaaaata

SEQ ID NO: 588915 - DNA, 4001 bp, Homo sapiens
gaagtccagctcctacagtacactcaaccacctgcagcacctggaggctggcggcttcccctccccaggccagttctgtactggagccatccagtgggccatagctgggccttcttcagcaaggcccagatctcagcctttatgggggcaggggtgctccttatattaatatctgctattcctgtattcctcagaattccaatcccttgttactctagtgtcctattatagtcaataattttttgcattaaacttttccgtttaatcactgtgtagtttctttttcctgattaaactcaaattaatacaaccaccccatcccacttccaaacctcaggctccaccaaggctgcagtggatcctagggaaggggcatgcagggccagtcatgtagtaagtgcttaggaaagaatgaatgaatgaaagaatgatggggaatcctgacattctcagggtcatgctcgggctgtatcacctttgactctgatcagtgcacccttgccccatttcccgctcacctccacctgcccacccctctctcctgcacagcactccacagtcacctcggctagtccttgaccatcacagacagaccgtcaggcctgggaaggcagagctgaccctgggcccgggaacaggcaggagcttgccctaagccactcagaagatcagtggccaaaccagggcttaaatctgggcctcccaggcatgggcagcttcttgcggggaagaagagactcgtggtggctggggtctgagacaggtccaaaggaacccgttccatggagggaagtgagaggctcaatggggttaagaaatgaaggcagacttactttgttgctactcatttctctccggcgtctgctgaggggtaggtgtcggcgtcctgcaggtggccctgggggcagggatgtgggttcacacctgcaagccaccagaaagggttattatggcttcggtcctttgggtccagcaagccaaaggctacaccttctctgccccgcactagttcttctatgcacccagaactttaaggctcaggactgtatcccttttgcagacggagacactgagggccagaaaggccaggaatctgcctgaggtcacacagcctggtggcggcagagccctgcccattctcctccctaagcaggggccttcccacaccaaggcagctggcagggccaaagctggctcccctgctggaggacctgacctccacgcagtaggagccccattcacaccctgctctaaaccctgccttgggtccctgtggtgtcagaataaaacaacaccgcttgtaggcccccgaactcctctgctctggctctctctcaggttggcctggaacgccctccctcctatggcctcctgactcccactcatcctccaagcctggcatggaccaggaactcccctacgtcctcccatccccccaggctaagagctgcctgcgggatacagcccacccaggtcctcactcagtttccctgtgcctccacagccacggagattcaggaatatcgctgaatgaattagtgcattaacaagcaggatctctcgggggctaagggcacagactcaagtctgagaggctcggttctagtccaggctcgacagtctctgccagggctgactcctcatctgtcaaatggctgtaatcacagtctcagggggtggctgggggggcctttggaagacctggcagtgaggaggccggcccagctctgctccgcacaccccaatctcttcctctcccacaaccaaaacccagctcctttccagggttccccacctgtgaaagggaaaatgtactgtgtccagcctacctccagcagacaggccgggggcagggcgggcaggagtgcagagggaagaaactggggcttagggggccctcctcagctccgtcccctgctccaggggcctctcagttcctgtattctctgagccctttgacctagccgctgtttactcctacacggccaccaggaatagccagagaacctcgggccagaggaggcttggcacacacacctcgctcctgattggttagatcatggccccgccccctctccaaccccgccccctccccgtgggagcgcccctcatccggagctcggcttcgggtttctccagcggctgcccctcactgccagtcagggaggcccagactcctatctagtccaggccctgcggtacagagcagaaaacggggcctcatcagaagcagggagcggcttgttcttgccctcacagaccgttagagcaaaagacaggagtccagaatcctggggtggccccatctgccctgagaccttggcattcaaggcgcccaggggtccagccgcctatatcttactacgcgtggccaccctttcctgcggatgccccctgcccgccgcccactttcccacctttgcccgagctgtgccctcagccaggaccaccgtccccctggtccgccccgtcacaatcctgctctgagaaggccatggtcagtacagcatgtcagctgccagtgcgaatcccggtttcaccacttactggctggggggcctcgagcaagccatgtgacctctctgagcctcagtttcctcatctgtgaaatgggaacaataagagtcggtaactcaaggggttgttggaaggattcaagcagatgtggcaagggacacgcggggcttgaaagtgctcccacattggccgggcgcggtggctcacgtctgtaatcccagccctttgggaggccgaggtgggcagatcactaggtgaagagatccagaccagcctggccaatatggtgaaaccccgtctctactaaaaatacaaaaattagctgggcgtggtggcgtgcgcctgttgtcccagctactccggaggctgaggcaggagaatcgcttgaacccgggaggcggaggttgcagtgaaccgagatggtgccactgcactccagcctggcgacagagcgagactccgtctcaaaaacaaaaacaaaaataaataaataaaataaaataaaagaaagaaagaaagaaaagaaagtgctcccacaatgccaacagctgttagtcttgtggttaatcactgttcaaggcccgcctctccagtgtgtcagtgaaacactcctcccctgaccccagtgcagcgactttcccggaatatcaaggaatgtgtgggaatgcgttctaagcatcacccacgcactgaatccaggcaatgcatggtaggagctcttgttgcccattttacagataaggagactgaggttcagagaggcaaagcgccttgcggggccgcccagagccggctccagagccttgtttacagggagctgcccagggctgagcctgacttcgtctccctggaggatccctctcggctggaacgggtcagaggccatggagtgtgtgcccaggacgtggctcggcacaggcaccagggcgggggtctaggggtgccggcctgttggggagcggcttgctcacgctggggaggcggcagccccgagcgctgggccaggagcatggactcagcccaaggctggacgtgcaggcgagctgagcgggagccgagggtgggggccacaccctgccctctgtttgggggctttccttcttccagccccgggagtcctcccgcagatcgggacgcccccacgaacccgcgtgggaggagggctccagggagaagggggaggggggctcctaaatccaagacgatgcgggacgctgagcccgtgcgtccacctggtggggggctcacccagcgcgcgcctcgcctcatccccctccccaactcctgcactccgggggtccggagccctaaccccagctgggaagaaaagagaggcaggaccgctgacggggtagtcggcggcaagaggcccagcggaccccgcgacagaccctgggcgcgaggaccggaacctcggggcgcggctaccaagggggaaggggtctaggggtgccgccgggggacccgcatccatccccatcccc

SEQ ID NO: 588916 - DNA, 4001 bp, Homo sapiens
cataaagtgtctggaaggacccacaaggactaccagcagttgattccctgttaaagtgaaggtggggcaggacggttgggtgctaccttcacttttccctttataaacttctaggttgtttgcactgtacttatatgggaagttaataccagtttgtttccaattaaaacaaaagtcagcagtagtcccccagggtccagcctttaggccataaaggcactgcccaccaggcagggagggggtggcccgcaagggtggattggaggcttcctgtccctggtgcccacctccatccgcttcctgagcctcagaccaagctccacccatggccctcctaggtcgccgaccccgccctacaagtgacaggatggaaaaccatggagtgggggcagggcggtcagacaggcaggaggcctgatgaacttgacttctgaggactcagagcctctagcccaaggccacccagggcgctgggggctgcaccaggagggaaacatcctgtccccagcccttctcactaacccaggccagtgacccgaatcaaacacccagaagtgagagggtgctttggccctgctcctggacagcatctgggcctggagctgcctgtcccgcctgccatgtctctgggcccaggctcactccagcaggatttgcttcagggctggcttcccttcttgggccccaagaacgacagcaaccatctcaataacagtaataacaaggatgagaaacagagcagcttactctctgccaggcactttgcaaacacacctcattgaatccttatggtggcctatgagttgggtactgcggttaacccactttccagaggaagaaactgaggctcagagaacacgcaggtggcagggttgtttccactaggcctgtctgtttaataaccacagacatattctacacggaagccttgggtctgtgagagccaggccaggccacaccaggacgttcctgcatggtggctgtggccagtcctcgtgggcctcccccccccagcccttcccccacagtctgggagagctggcctctgctttgacccttcctgcctcctacacgggtaggagaggcccgtgtatcccctgcttcctgacccttagcaaacttctttgagccgttaggatttttcccttccatggtattctggaaagagctctaagagacccctcacctgccgcagctcccaattcaaagaaaccaagatcaagggtcggagggagaatagaacttgcccaagactccgcagcgggtcgtgggcagagccaggctgcaagccaggcctggggactccggcctctctccctctaggcttttgtctgggggaggggcttctggagaggagaggcctgtgagagtggcgggcaggtgggggcctgcacacaggggctgctccatagcccaagacctgggctcccggccagagggtctggaacgaggaagtactgcctcttcccccacagaggctggagagggcagacgggcctagatgagcctagacgctgggtcccaccagtcccccaaagccagatgttcctgttctcacctgggtgtgtgagattttttgtttcattttgttccttacaaggtgaagctgtgtgaaccgtgagcgtgagctctgggccaggctccatggcccttctaaggaaaaggccccttaggacacctctgggctgtgaggcttccccggcttcccctctgggcttggaggaagtagggtaggtcctcagccactctgctgaggggcaaaggaaccagggtatgaacaggaaaacagaggcccaaagagtggctgcagattcaggtgatccctggggctgtggggaggctcctgccctgggctcacctcaaggaagctgcaggaactgctgtggcaaaagcagagagtcttcagtttcctgatcaagacagccttcagtagaccccgaaccagccaccagacctgtcaaggatcatctccatctgcctggaggaagtgactgacgcatcactcctgccaggtcaccacccccagaaagacacaccatttgggccaacccagcagtaaataccccacccgagggtagggccaggttagaggagcctctgtgtcctgggcccaagggctgggtcagccttttcccaggggatagagaaggaagaggaggcagcctcccaggagagagtggagttcaaatcccatcagaaccagtggacactgggccttggacacccaggatgaggcagggagtagggagacaaccaatggggcaggggcttcctgccatctgtcaccaccaaggaagggcagggccagcccagggcagatgaaccccacgaaaaatgctggctccacatgtcaagtgcctgctatgtcctaagccatggggatagtccactgtctgaatctgtgaggtggggacaattttaaccttttacaaatgacaaaacaggcccagagaggggtactaatctgccaagaccactacagcagaaagtggggccagaaagaagtcaggccttgactccagggccctccctctgagcccggaaaccccctccacctccgcctaccagactccatcccgcccttacctctgcctgacacctgttgagagctcctcgctccgtgctgtggctccgctgccagcctgctccttgcttcgccagctcagggctctcctcccccctcccattcctgcagaaacttctgggtccacctggcactgggcaggaggaagccgggcacaaaagcggtgctgtgaaccaagtgccaggtctcagccccctctgtgaaagccaagggcgggagggagagtatgccgggtcacccagagcccccgggactactggctacataatttctgggatccagtgcaaaatgaaaatgcaagtcctcttgcaaaaaaaaaacaaaaaacaaaacaaacaaacaaaaaaccctaagaatttaaagttggcaacagcagagcattagcatagggccctgatccctggagctggcagctagaaccccagggctgcatcccagctgacagcccgaggccctggcccagtcctctgagtcttcccgtccccagatgaagtagtgatgcctggaaggggtgatgcttgtgggctctctccagcccaggggtgcagggctcaggtcctcgggctcagctctcagacctggtattgcacactggcccagccgctccacagttgtccggcttcagctgagtggcctcagctcatctgtaaaaccagctagcaccagtcctcctctgaggatggcaaggttccgctggtgggactttttttctcactttacagatgacgaaagtaaggcctgagccagactagactccctcacagcagccacccagggctgccctctgccttcctgttttgcagggagaccaaacccactttctttctttctttttttttttttttgagatggagtctcactctgtcgcccaggctggagtgcagtggcatgatctcagctcacagcaacctccgcctcccgggttcaagcaattctcctgcctcagcctactgagtagctgggactacaggcacccaccgccacatcctactaattttttgtatttttagtagagatgggatttcaccctgttggccacactggtgtcagacttctgaccccaagtgatctgcccacctcggcctcccaaagtgctgggattataggagtgagccaccgcgcctggcccactttttttttttttttgtagagactggttttgtcacgttgctcagactggtctcaaattcctggtctcaagcaacactcccgccttagcccccactgtgccaggcccaaccccagatttaatggctaatttaacttgccatttgacccaggaccagggaagcaatatgggtggagaaatttccctcccactcagagtcgcttcctcctggccctggctctcctctcactgggtacagaacggggttcccaaagaagcctccgacttagggtcagtttcctgggccag

SEQ ID NO: 588917 - DNA, 4001 bp, Homo sapiens
ccaccaagccagaactctgtgcagagaccaagtgctatggggcagggggctgggccggggattgctggaggctgacattcatcagaggattgggggagggagggcaggacccagaggaggagatatgaggatggaagcctgagcctagggactctcggagcccataaaagtcttaggagtctgtaatccagccttgtgagcagcctgctcatgacactggatattctaagccaggggtccccaacctagtccgtggcctgttaggaaccaggctgcacagcaggaggtgagcagcaggcagtggagcaaagcttcatctgtatttacagccgctccccatggctcgcattaccacccaagctccacctcctgtcagctcagcagcagcattagattctcatgggagtgtgaaccctattgtgaacagtgcatgtgagggatccaggttgcatgctccttatgagaaacaaatgcctgatgatccgtcactgtctcccatcatcccgagaggatggtctagttgcaagaaaacaagctcagggctcccactgattctacattatggtgagttgtgtaattatttcattatgtattacaacataataatagaaatgaactgcacactaagtgtaatgtgcttgaatcatcccaaaaccatcctcccgcctccatctgtggaaaaattgtcttccacaaaactggtcccttgtgccaaaaaggttggggactgctatttttttttttctttctgagacagagttttgctcttgttgcccaggctggagtccaatggcgctatcttggctcaccacaacctctgcctcctgggttcaagcgattctccagcctcagcctcccgagtagctgtgattacaggcatgcgccaccacacctggctaattttgtatttttagtagagacagtttctccatgttggtcaggctggtcttgaactcccgatctcaggtgatccgcccgccttggcctcccaaagtgttggggattacaggcgtgagccaccgagcccggccagggactgctgttctaagccacagcgggctgagggcagagctggtgtgagagcgttcaagcttaggcagcaaattaaacagtaaaatggagccgtatctcgaatcaagtctatttttttttccaaaagcaggtatattcctgaaacgtctatttttttttaatctgaaaaacaactttactttaaaaattatctggccaccagaagctcatctgcttcacctctggcaacgccctatagtcctctcacacaaagacaattcttccaaagtgacaaaaatctaacccgcaaactgtttccaagcgaatgcatttttcacaaatgctgaatctaacatttaataaagtgtatatatcatgtatagaagcatttaattaaacatttacttttattttgcagctttccttttgtgttttgtgaattttttaggtctcaaacattttcacagacccacgctgcaggggtgtttttaggggactgggggctcccaattatgtactcgggatgttcccgggggtcctgcctcggtggacccaagcgcacagaccccaggcacgaaggatagaggagctgccccacgccctcaaatactcagccagggctggagaatccttagtcaattcacaaagggggaaactgagtggcaaagggcacccaggaggtcaccgttggaggccccccgggttcaacctaggagctgcaggccgacactggccagggcgcgggcccctcgccgccctcggtcggaaccgccggccgtagctccagggttgcgaccgttaccccacggagctcccgcctccccgcagggaacactcggcacctggtacttctccatgggctctccgggggaccctgggcctcgctccccctgcgtggggcgcctgcgattggaccctggcccaagcatgatcagtagcgaccgcgtacgggcgagcgtccacccctggccccaccccgcgtgggtcagtgggacccgcgggatcctccccgcccgaacggcgccctcgaggcactcaggcgtccctcccgcgcgctggccccagacccccaggtccccgcccccttaaaagggacgcgttccgccgggccgggagggaccgcagggcctgcgcgcggcgggcggggcctccagcgtgagaggcgtggcgtcgagcgcggcgggcgtggcttcgagcggatgggtcgggaggctggggatggcgcgtggcccctttaagacgcaccggggcgggcccgggcggcgcgcggcccctttaaggcttggcctacgtggcagccgctggagccgcagccgacgcggagcgaggccggccgccgggcacttcctgtggaggccgcagcgggtgcgggcgccgacgggcgagagccagcgagcgagcgagcgagccgagccgagcctcccgccgtcgccatgggccagaacgacctgatgggcacggccgaggacttcgccgaccaggtgcggcctgcgggctcctcccccggccccggtcccgacccaggccgcccgggccgctccggagtcggcctcccagcgcagggcgccaggcccgggccgccccctgactccttgttcccacagggggacccccccgcccgggccctctgtcccggctggacagccccaaacccggcctccgggcccagtctcccctgcccgctgggccgctcccggagcccgggcctcggcgccctgcctggctagccgcccccaccctccagccagcccggggcgcgggctgtgggggtttcttcccgggccggcggcgcgagtcctggcgttgggtcgggtctgaggctcgcggggagcgcctcggcgtttggagctgctggggggtccccgcacgtttttcctctcactggggctcccggaggcgggctgggagctcggggacgaacgggggccgggggtcctcccagaggaaagggggcgcgctggcgtgcgccccagctacaggaagccacagcaccttttccttttctctttcccagatgtgctggactcttggggtccctttgaccctgtctgcgtctccctccccgtttggactctgccctgggctggattgagtggggacctgtacacagcctgggaggaggggaagcctatctccctgatagtctccttccagaagtgtccaggtggcattctgagcaacagggaagcctttgaaacaggcggttgggtaactgttgagagcattcgggaactgggtggacaggatccgatcctacaaagtgaagggacacaactcccttccctctttcttgattaagcttgacagaacaaaaaaacaaaaacaaaaggtggtggtggttacgcagatttatgccttttacttctaaaagaatcccgttatgtcgacaaattaacagccttatccccgcagggagagccttgtgtggcccacttgccgttttttcctcggtttacttaatgtgttcgtgtggctttgctagagttttaagtagtgatggttaaatttttaaatttttctggaggtggtagtgagtcatcaaactctgaggcctagacttatcggaaggcttgtatatgtgtggtttaaaaaaaaaagaaaagagtaagtgaccgttttctgatcagctattgaactcttccgttcctcctggggggtgatctctttctagtgtgacctcaccatcggttctcattgcaacactttctgtgagccaatattttaaatttggagggaaaaagtaatcaacttgacgaagcattttttccctaagattctgattttgtgcttaaagacacaattttatttgtttatttatttttatttatttattttttctttgagatggtgttttgaccttgttgcccaggctggagtgcaatggtgtgatctcagcacaccacaacctccaactcctgggttcaagcgattctcctgcctcagcctcccgagtagctgggattacaggcatgcaccgtcacacccagcca

SEQ ID NO: 588918 - DNA, 4001 bp, Homo sapiens
ctgtaaataaacattaagtacaaagatcatgttgattctcaaagaactccaagcagatttgccactgcagtttcccaccaggaggtcagggtattgaggaatgcatgctaatacccacctttttatctaggaaaagacaactaactatcgaagaggcagttaccacccattttttccctattcaagttttagaatcagtcaaatctagatttaaatacaaactaagtgactttaagtaatttaacttctttgactatcagtttcatcaagtataatatggggataagaatacctaccacatcatctgttgtgaagattcaataaaataatatatacataaaatacgtggcactgggggggtcgcggtggctcatgcctgtaatcccagcactttgggaggccgaggcgtgtggatcacttgaggtcaggagtttgagaccagcctgaccaacatggtgaaaccctgtatctacaaaaaatacaaaatcagctgggcatggtggtgcacgcctgtaatcccagctacttgggaggatgaggcaggagaatcacttgaactcgggaggcggaggttgcagtgagcggagatcacactccagcctgggcaagaaaagcgaaactccgtctcaaaaaaaaaaaaaaaagtgatacggagcctgacctatttagtttcaatttttgttgttgtggttgccattattctcatcaactcctccctgttacactctccatttgggaagataacctgcaacgttattagtagacaaaaagtgaggaataaagatttctgtaattcctttgatgctcctgggaaggaactgaacacagggatccctggacaagggaaatggaacttatagctaagatgctgtggataaagctggctttacaaataatcagaatagatgactccaatgtcatgttctttgaggggtcctggaaaggaccacccagccctctaaattgctttcactgccatcctgcctgaaattccatctttagaaacactgtaattcctctggatcactaagagctcctgagtgggtaccaggactcctgagaggtccaccatctctctttattggaaccccctccccagagtaccagttcctccacaggggaacgagactgagccacttacagctcctgccttgaagactgggaagggagggtgggggtgagggtgggagaactcagggttcctggcgaggaacaaaagccgggaaggagagttctccaaaacgcagaggaaagcggagggggaaaaatggggcagaaagtggagctagaaagagaggtaagaagaaagccagagagacttcttccttctgcaaatcggtctaagtttcgggaggtgggattgggggaggagggggttcaccctggggccaggccagggctgggtggaggaggcggccttcgagagagtgagtcgggaaagaaggggagtgggcaaagggtgagatgtggggtcccggtccccgcctcgctggctgccagttccctctgcgtttcctagtccgcgtgcgtgacacgagatagtgcagccctggcatggggcttggcatctggcggccgcgagataaccagggcccgtgcgatgggaaacgtgccgttggcagcccgccacccctccatcgtgacctcagtctgccaaacagggttcgtgatgctcagtttactagggaggagccgcggctttgagatctcgcccagcccgaagcagcggagactggccaggagcccggctgtcagacctcggagcgcacgctgcgggcgggggctcggtccacgggggagggtcaggggacgcgggactcacccttgaaggagtcggggagccgctgggcttcggagtcccgtgtgtgccgcttctcggccatgctgcccgagacgcagtcgcactcccccgtcctcgttgccaaacccggagccgccgggaatgccctgaggagccagaggcacaagacccagattgccgccccgcccccaatcgaggtcccgccctcgtgagagttggccaatcaacgcccaggatcgaggaggacccacctcccaatccccgccctcctgtccctccacggcgcgactgcttcgcagtcacttcccgctagttctgtgggctgaggggcgtggcctgaggggcgtggcctgaggggcgagagcccccaaggctgtgggtatgaggccggggccctgcaccggaagggagggcggaagccacgggacgtggagcagatggtgaggatagtggggaggtagcagcagaggatgacccgaggcaaaagtgcaagtgaagaaaagtcgccttgccgggcagaggtacgggaccaaggcgcctcctctgggctgaggagttagagggaagaaaatggcgccctgtcatgagggcgcgaggtccgagttgaggggagaagactgagggacacagaagtggccgaagtgagggcgctgaggtcagcctgagctgagagggccggcagatcacgccgcagccgaagtgaacgaactcgagtgaggtgtgttaagaaaatcaaaatgtataaatttggaaaaggagaggaggccgggcgcggtggctcacgcctgtaatcccagcacgttggaaggccgaggcgggtagatcatctgaggttagaagttcgagaccagcttggccaacatggtgaaaccccgtctctgctaaaaatacaaaaattagccgggcgtgtggcgcgcgcctgtaatcccagctacttgggaggctgaggcaggagaatcgcttgaacttgggaggcagaggttgcagtgagccgagatggcctgggtgacagagcgagactccgtctcaaaaaaacaaaacaaaaaacaaaaaaacaggagaggagactttatttcttgtaaggggttacagcctgcaaggtggccattccgcaggctggagaatggccaggaccagagacaggcatttcgttggaggaggggttggagtagcggctttatgctgaacagcttgggtagacatgcatattcagcaggtgacaggaggagctatgaatattcatgagggtggtcctgacgcatgcccattgagcaaacatgcatgtaacatacaacccatgttcattttggagtgaagagttaccaattaaatgttaaatgcctggcctgcatggtgacgtccccatctctacaaaaagtaaaaaaaaaatagccaggtggggtggtgtgtgcttgcggtcccaactagtcaggaggctggggcaggaggatcacttgagcccaagagttggaggctgcagtgatgtatgatcagatcactgcactccagcctgatggactctaaaaaataataacaatacatgtattacagttagaccccatgcgtcaaaaggtcttttcaggacaggaaggtgtgcaagtatgcagtctgtgtaaactagccagagccagtccatggtcggtagttttcctatgaggagaaagttactgaaatcagcctcttgtccaattaaagctgtaatgatggctggtggaataggggttccattaggccacatctggtggagctgcaaattgttttaatattgcttatctcgaggccagtgcttgttaagctgctagagaaagagaacaaccttgtggcagttagaacacagtttattctctaagtgaagggatgtgtgccttaacctttgcctggcatgaccttaggtataatttgtttataatttggtatcttattgtcacaaacagtctgttctgtcagtcttatgatctgtgttttaacgttaatgctggtcagctgttgtgtctaaactccaatacgatgaagttataatgaggcgagtctgaccttctgtcctgtcattggctgggaactcagttttaaagttttctggagtccccttggccacaagggagtccattcagtcggtggggtcatttattcaaacaaaatcttcttggagcatcttccatgtggcagggagtgtgctaagggcctcgtggagtttacctta

SEQ ID NO: 588919 - DNA, 4001 bp, Homo sapiens
cttcccttctgccacattgatggccgactctcgggtcccctcagactctagaactgtggcccgtttccgccgctctgcctccacctggaagcccacaacaatcccaatcaacaagccaagggagactgatacagacatgcaactctacccatcataacaggagggaagtctggatcctcctggtactggagcaccctgaggcccttttcccacccctccttggcccccacctgcatctgcatagactctttcacccggggtggcacatggatatccttgatctcataacggaggcagcggataccccagcagtcagcagcttggttgatggcatccacaatgctggcattcagggactcccgttcctggaaaaagaggtgtaagccccacagcctcaacctacctatcaagggcctacactgagaagggcctgggactgatcttgaccttcagaaaagattaagagtgtcaggtttgtgtcttcaaaccctaactctggctcagatctgcttacccggaagactttgtccagagagagtttgccgagctctgatctcatggttgtttgagctagctgggtgacggcatactcagggtcctccacaccgtagcttgcctgagatggacacggatagtgtaagaagcttgggcacaagattttagtgaagagggcaactcaaaaggctggataaagtaggggacaggtaccttgtaagggtccatgatgcgcaggtaaaggactccatcgatttgcagagttacattgtctgtagaaccaggagagaaaacggggaaagtcaggcctctaggtcccaaccagttctttctactaagctctggatctacagcaaccacatcctaatagcctcagagcacccatgtcaccctgaacccctcaccgagagtcacagccgactgctcaggcacgttgatgacaatttccttgagactctgcacatatcggatccggtctaacacagggatgaggatgttcaaaccctggaaagaggagtcatgggtcctcagaaggctgggaactattgggttgggacctaagctagtcctggagtatgtagggagtcaacacatggaacatgcccagaaaagcagcagctcctaccaagaaataagtcctcagaaggctgaggtgtcactggtaagaaaacccaagagaacaggaatgcaagactaggcccctgaatggaggggagagtcatgagaatcggagccagcagaatagccatctctatgcagactgagaggtagggctgagagtgggcaggggagattcccaagaatggggcctgtgagatgcataggaaaaggtggtaacatggggatgatggtcagcagcctgggccctgtcaggtctggcctacagagtcgggagctaacagtgcgggcaggcccaaaggaagtcctcccgacattgcatgtcgtgagggattggtcatctggctggcccagggtgggcagaagaggtttctcacaggctccaggatccggtggaatcggcccattcgctccaccacccaggcctcctgctgcggcacgaacagtaccacggtgtttcggggcaatccagaggaggcgcggcgcggagcgcggccagaagccagtagagagccctgaaggaaagaagagggtgagcagagatcccatctggccagacacgccgcccctcggtcctgaaggcatctccataaaccacgaccctcaggatcctcggagaatcacatggggaccatgacctctgaccccagtcctctccaaaagttggaatttcgctcttttccagcggagaacccaggtaatctctgtcctgaccctctggaaaggttgcctcgctctcaccctcagcaaaagggccccagtgccccgcgccgcgcgcgccagcatttcccaccgccgcagcgacctccggaaccaacgagacgagcggagcggtcgctcccagaagcctacccgagcctttcctcttgcagttccgctcccccggatgtacttccggcagctccctcccccgcttcaacactcacccaatcagcgttacttggtcgaacggcgcgtcaagttgttccctgggaaacgcagaccttctagagaagggcgaaggctgtggttgttctgggtttagctgttcacgccgaagatccccggcctgatggccaaaatggaggctatttttcgcgggcattatcactcagacaccacgcactgaattattcgtcctcacccgagactcagtttgcccaccagagcgtagtatcgcccccatctgtcaccatagcgactagtggattggagctgactcgttgccatggttgccatagtgatattctctggtagtcccgctgtgttgtgcccaggactcccactggggactgaccccaatcccgttgccatggaaactgggcctaatattgcctggcgattgggccgagattttcccctcccctctttcctcaaagacactgcagctccttccctgtcttcccaagcaaggtttgttatgcccggtcttaaatacagtccagcaaacagcctcaacgttcaaccttgtctggagcatgtcaccttgcccacatccctaatgctctggtagtcaagagacctccgtagtcacctccattttacatatgagggcactgaagttctgaggggctaaagtcattaatagaaccagtattagaatcctgatctacaattcagagttcagcttctacggctgaactttacccaccaacccctccgaaaggagaaaaaccaggccccaggaatcagcagggactagcctaagacctcatgggcccaggcctgttgcctctctggtagaaagggctgagtcccagctccaggaaggccctccatcccccttcacaccctctccccaacaacaacaacaacaacaaaagtagagcttagttcaagtttccaaacaagaatttattctttcttttttaatctttttttctaaaaaaaagtaccaggtacaattttttcctgtttttgatttgctttgttttttcaagtttcagcaaatgcttgttcccctcagcccagccccaggagttaggactgaggctgggtcagagtctggagtggggaatggggtagtttggaaccacatgactgagtttgaggggtgcccctcaccccagctgaggtaggtgggtcagagtctggccaggtgagaggaggcaccccagtgcttggccctgactctgccccctggacaccttcttcagtcaggaccccaaaacaaggagacacaggtaggaggagagggacaactggagtctggagccctaggtgaggggtggttaacccctgtgtgtgtgcatacatgcacactcacacacacataccacacaaagacaagcttgtgcacacacacatacgcataacttggctttcagagataggtcagagggtaggggaagtgaagggactggggaaggacaggggaagctgagtctttggctactgactcagtccctctggaatagcccctcttccctcagctgagggaaagcagttctcctcctgcccccaccgcataagcctcttcaactcctgaggttggagcaatatctgagagtgggaagcggggaggagtgatgccaattatcaggtgtgggaggttaccaaggcaatccaatttgaataaattataaattaaaaataaataaaataacaagtggcccctgcccaggacagggaggcaacgctggcataacttgcctgggaacttgagaaaatctcagggtagctccagttcctccctactacctaagctggcctgggaaacccaagggaggggacaggcacatggagtacccgaagtagggcagggtgtagtaagaatcagaagctttaaacacccaaataatccatttgggcgtgagcatggtgagggctttaattcaagcctgaagggtctcttgctgtctctccatatatgttctctaagatggagcaggatgggcaggtcattagcc

SEQ ID NO: 588920 - DNA, 4001 bp, Homo sapiens
caaagtgttccaatctctccccatacttccactccttggatcttccatactctcttaagcaacctgtgttcctagctctctccaacttaagcagtcatttcctgccctaaacctgggcatcctatttcccccaccaccaccaccaccactccaatccatcacctatgcctttctagttacagacatgtccacatacacctctgccttgcccttcccttactccactataggtattaagcattcttctacatcctctaccccaaaatagcctgtctaccttccttctttctccctacctcccttctccctacagcacaaaattcagtgccccaaacctgtgcttccctccctccacctactgtactccagacctgtccaccttcccctccagtctatcccgttgtccccctctactgatttcgttctcaccctcccctccaccttcctcctccccaaccgctccacacttcccgcctcagaaatctttccttccatttgtccccacactttacctgccactccaagaacacttccctttccccacccccttttgccctccacctcacacactccacgccaccccacacctgtccctctcccccagctcctgcccctaacgtcctccaacacttgccaagaacccctcaccctccgtcctacctcaaaattccctctcttgctgatcccaccttcttccatacttcctgcataaacaccctccatttcacgcacttctcccgctatcctttaaatgccccacacacctcctgctctccatccccatcacccttctcctactgtccccacctctctctgcaagccctcaaactaagtctctgccccaatgaacttcccccttccaccccatactcctcttccctgagcaccagatacctgcctttttatccttacatgtcaaccccctcccgcctccctgcaggctcccctatacacctggccacacactccctcacacccctcgcaggtctcctggagcccctgggcctacccttcatttccctatcaccccagaagcctaggcaccctgctcccctccctccctttcaggcgctccctgcctgccctcacttccccctgccccgaccccctcctccatcgttccccttcacgggcgtcccggtggccttcctaatacccgccccactccctgcccctggcacgcagcgctccttccagtcctgctcgagtccccagtcttctccctccattcccaccccactcgtccctgccctccccaaaagccccctcattccctcttgaaccccacaatatagtgcccccccccaccggacggaatgtcctccatctcgcactcgcctggcccagggggccccccaaacctgcctgaaggctctcctcctccattgggccggatccctctgcacccctatttacccccaaatctgcccacaccttccgcctgccccccgaagcctctccccagctcctgcccccaatgtcctccaacacctgccccgagccccgagccctccgtcccggaagacctcccggcaccgcgtcccccaaccctgcccacgccctcccctgatcggccgggaccccgtccccgcgaaggtgaggaaggctgcccgctgcccttgcccgaagcggccggggcaccgcagcggcggcggcggcggccacaatgccggagccgcggggccgggattgctccctgctctccgcctcggccgccaccgccgccgccgctgctaaggacgcacaacaaacaatgcggggcccgggccggctccgccaaccgcctcaaccgccgccttaaccgccgcccgcccgggacggcccgccgcgcaggcgcccgccccgccgccggagcctacccgcgccgccgcgctctgcccgcgcccggtacccgctcccgctccgccgccgccgccacctcgcccgctcgcgtctccggctcctctgcccagcggcggcggctgcggcggctgctgccctggtggcgctcgcggctccggtctccgcttcggcggcggcagcggcggcagcgagcacgtgacaccgtcgagcgcgcccattggccaggccagggggcgggccccgcggctgctggggaacggaaagcccgccccctcgttcgccgcgcgccccctccacgcgcgtcctgccgcacctgagagcgccggccagcgcccgccgccgccttgctgtgccgccgcctgcgccaagtgcgcacctgggagcgcgcagggagcactcgccgccggcggccttatgcacctgccagcggacgcttacgtaaactgcgtccccgccttcctcccggccccaggcccccgctcgctgcagcacctgagccccgctgcgctagcggcgtaactgcggcggagcggagacgagctgcgctgggaggctagcgaaatgcacggaaacttcgtaacttccgaacctgggagctgcgccgagccgcggcggctagccgccttccccgggccccgcaccccagtgcgggatgccccccaaccccagcagccacacaaatggagtaggcgtcgcactgcctcccgaggtagaggggcaggccagtaggctttgacttgtgccaccgcccacctacttgctggctgtgtgaccttggccaagttaccaagaaccgttctgagcctcagtttcctcatcaggaaaactgggacaataattccaatttaggagctgttggggagatggcataagacaataggtgtgaatcctggcacacagcagtcgctgaacagaagctgctacaatcacctctccttcacctgcctataatgaacctcgctgggattgagtttgggcccaggacctctctgacctccttatggttgggtcagactttggctgaacacctaccagctctgtgccaggggcggcgctggggaagaattaaaggttcgctttctattctacagtccctggcctcaagttcttggtgcccagcattctgcttgccagtatacagtccctgctgtataccggggggtttgcaggctgcagggatgcactggcaaatgagacaatgtctttgccctaagacaattcccagcctggagcagaaacgacctgaccactcagtgccaagacagaggaccttgaacagcccaggggttgaggagggactccccacaacagcccccttggggccccttttcatctttctaacacaccaggctcaaatattttaacagctctgtttcattcacagaataaagtgtaaaaaacccaatttcaactgaaaaggccttggtgatctggccttaagcttcaaggtgcacgcccttccctttgcccctccttcaggccaatgtgaccctccagccacacagaactacagtactgttgtttccagagtatgcccaggtgtgtaggagcctgagtctcctgagacagatgccaggccgcaaatccctttctaaaccctctccccacctctgaccactcacaccttccttgaccctcctgaaaaaaatcctgggtatccttatcaatcagctcagagtatattctctggagatccttggctgcctcagacacatggtctaagctccctcggcttgaacatagtcctgttaagctatatgtattctcatggcactagattgtaattgtttagctgtctgtctcctccctggtctctcagtcccttgaggacagggtcatcttcctgcctaagtgtgttagggaagactacacgtgcacatgacatgagatcattaaagctgggttttgtaggatgcccataagtatcagagggagaagaggcgccacactgtaaagatccagattcactgcacactagctgtgtgatcttggaaaatcaatctctctagtctaagtttactcatctgccaagtgagactaatagtattgcatattgtagggttgttagaaggattcattgcaaccgtatatctaaggcactcagcacggtgtccagcacttggttacatttttaatttttttaaaatagaagaacagca

SEQ ID NO: 588921 - DNA, 4001 bp, Homo sapiens
atctctcaaactcaaagtgttccaatctctccccatacttccactccttggatcttccatactctcttaagcaacctgtgttcctagctctctccaacttaagcagtcatttcctgccctaaacctgggcatcctatttcccccaccaccaccaccaccactccaatccatcacctatgcctttctagttacagacatgtccacatacacctctgccttgcccttcccttactccactataggtattaagcattcttctacatcctctaccccaaaatagcctgtctaccttccttctttctccctacctcccttctccctacagcacaaaattcagtgccccaaacctgtgcttccctccctccacctactgtactccagacctgtccaccttcccctccagtctatcccgttgtccccctctactgatttcgttctcaccctcccctccaccttcctcctccccaaccgctccacacttcccgcctcagaaatctttccttccatttgtccccacactttacctgccactccaagaacacttccctttccccacccccttttgccctccacctcacacactccacgccaccccacacctgtccctctcccccagctcctgcccctaacgtcctccaacacttgccaagaacccctcaccctccgtcctacctcaaaattccctctcttgctgatcccaccttcttccatacttcctgcataaacaccctccatttcacgcacttctcccgctatcctttaaatgccccacacacctcctgctctccatccccatcacccttctcctactgtccccacctctctctgcaagccctcaaactaagtctctgccccaatgaacttcccccttccaccccatactcctcttccctgagcaccagatacctgcctttttatccttacatgtcaaccccctcccgcctccctgcaggctcccctatacacctggccacacactccctcacacccctcgcaggtctcctggagcccctgggcctacccttcatttccctatcaccccagaagcctaggcaccctgctcccctccctccctttcaggcgctccctgcctgccctcacttccccctgccccgaccccctcctccatcgttccccttcacgggcgtcccggtggccttcctaatacccgccccactccctgcccctggcacgcagcgctccttccagtcctgctcgagtccccagtcttctccctccattcccaccccactcgtccctgccctccccaaaagccccctcattccctcttgaaccccacaatatagtgcccccccccaccggacggaatgtcctccatctcgcactcgcctggcccagggggccccccaaacctgcctgaaggctctcctcctccattgggccggatccctctgcacccctatttacccccaaatctgcccacaccttccgcctgccccccgaagcctctccccagctcctgcccccaatgtcctccaacacctgccccgagccccgagccctccgtcccggaagacctcccggcaccgcgtcccccaaccctgcccacgccctcccctgatcggccgggaccccgtccccgcgaaggtgaggaaggctgcccgctgcccttgcccgaagcggccggggcaccgcagcggcggcggcggcggccacaatgccggagccgcggggccgggattgctccctgctctccgcctcggccgccaccgccgccgccgctgctaaggacgcacaacaaacaatgcggggcccgggccggctccgccaaccgcctcaaccgccgccttaaccgccgcccgcccgggacggcccgccgcgcaggcgcccgccccgccgccggagcctacccgcgccgccgcgctctgcccgcgcccggtacccgctcccgctccgccgccgccgccacctcgcccgctcgcgtctccggctcctctgcccagcggcggcggctgcggcggctgctgccctggtggcgctcgcggctccggtctccgcttcggcggcggcagcggcggcagcgagcacgtgacaccgtcgagcgcgcccattggccaggccagggggcgggccccgcggctgctggggaacggaaagcccgccccctcgttcgccgcgcgccccctccacgcgcgtcctgccgcacctgagagcgccggccagcgcccgccgccgccttgctgtgccgccgcctgcgccaagtgcgcacctgggagcgcgcagggagcactcgccgccggcggccttatgcacctgccagcggacgcttacgtaaactgcgtccccgccttcctcccggccccaggcccccgctcgctgcagcacctgagccccgctgcgctagcggcgtaactgcggcggagcggagacgagctgcgctgggaggctagcgaaatgcacggaaacttcgtaacttccgaacctgggagctgcgccgagccgcggcggctagccgccttccccgggccccgcaccccagtgcgggatgccccccaaccccagcagccacacaaatggagtaggcgtcgcactgcctcccgaggtagaggggcaggccagtaggctttgacttgtgccaccgcccacctacttgctggctgtgtgaccttggccaagttaccaagaaccgttctgagcctcagtttcctcatcaggaaaactgggacaataattccaatttaggagctgttggggagatggcataagacaataggtgtgaatcctggcacacagcagtcgctgaacagaagctgctacaatcacctctccttcacctgcctataatgaacctcgctgggattgagtttgggcccaggacctctctgacctccttatggttgggtcagactttggctgaacacctaccagctctgtgccaggggcggcgctggggaagaattaaaggttcgctttctattctacagtccctggcctcaagttcttggtgcccagcattctgcttgccagtatacagtccctgctgtataccggggggtttgcaggctgcagggatgcactggcaaatgagacaatgtctttgccctaagacaattcccagcctggagcagaaacgacctgaccactcagtgccaagacagaggaccttgaacagcccaggggttgaggagggactccccacaacagcccccttggggccccttttcatctttctaacacaccaggctcaaatattttaacagctctgtttcattcacagaataaagtgtaaaaaacccaatttcaactgaaaaggccttggtgatctggccttaagcttcaaggtgcacgcccttccctttgcccctccttcaggccaatgtgaccctccagccacacagaactacagtactgttgtttccagagtatgcccaggtgtgtaggagcctgagtctcctgagacagatgccaggccgcaaatccctttctaaaccctctccccacctctgaccactcacaccttccttgaccctcctgaaaaaaatcctgggtatccttatcaatcagctcagagtatattctctggagatccttggctgcctcagacacatggtctaagctccctcggcttgaacatagtcctgttaagctatatgtattctcatggcactagattgtaattgtttagctgtctgtctcctccctggtctctcagtcccttgaggacagggtcatcttcctgcctaagtgtgttagggaagactacacgtgcacatgacatgagatcattaaagctgggttttgtaggatgcccataagtatcagagggagaagaggcgccacactgtaaagatccagattcactgcacactagctgtgtgatcttggaaaatcaatctctctagtctaagtttactcatctgccaagtgagactaatagtattgcatattgtagggttgttagaaggattcattgcaaccgtatatctaaggcactcagcacggtgtccagcacttggttacatttttaatttttttaaaat

SEQ ID NO: 588922 - DNA, 4001 bp, Homo sapiens
agttccaaaaaagaaaaaaaaggatggaagcatgctgaaaagctacagaaagcaacctgaaagaaaactcccaatgatcaaagctggaacaatttcaaacataaaataacacaagtgtaggataacaaccaatagaaaaacatctaagtccacatggatacaaataaataacggaatacaaataaacaaatgggaaatgggcagctcatccttacagaataatttcaattaataaagaaatgaggaaagtagaaaatcatcattagaacaccatagtcataataattgctgaaggcaagatccaccaatggatgtgaaatttagcaagggaaagtctgaggagaaacaggatatgcgtacggtttaaaagctcccccccaagatgtcaattataaggagaaaaataagacctttacattggagaatcccagcagacactctctaccaagtgatcaagattaacctcacgagcaataagtcatatatatcagctatgctcatatgatgaactgagaagggcacacacacttttgtgttcttaacaaaaatgtataaccttaatctaatcatgagagaacactggacaaaccccatttgaggggcactctacaaaataactgaccagcattcttcaaaagtgtaaagatcagaaagagtataaagacagaaaaagactatcagtgtaaagacaggaaaagacagaggaactgtcacagactggaggagaccaaggacccaagacaactaactgcaatgtcgggtcttagagtggatcctagaatagaaaaaggacattaatacaggaaaaaaaatcacaagttagtaattcagttaatagtattatactaatattaacttcttgcttttgataattgcgctatggtatgtaaaaaattattaatggaggcaatagggaactctgtattacttttgaaacttttctgtaattttaaaattatttcaaaataaaaaagttttttagtataagaggatgtttcacgtaagacaggtaaaaacatttagaagtcaaagaactgccatcgtattcactgcattaatacttggagagaggggtgccaggactgtgccaggtgctttacaaactttatcatgtagtgcttacaactaatatgagatgggtaccataatactcatgtttcccagtaagttacttaggaggttattaataagtgaaagaccccatttctcaggaaacccagcccccaaaagtgacgaacaccttccatcggcccagagctcccacttttcaggatactagtggcgcccgatttcttccggcccgccgcttaatgtttctgacttatggaagagataccgaatttggagagaaaagtcaaagtaaagtctcctctctgaacctcggttagctaaaaggagggagccaaggtgtgggaccttctgccaaccacctctgggtttggcgagcaggggcttccggcctctcgctcccagtcctccgagcctcactaccatcgagcgtcgcgtcattcctcgcagtgtcacccacagcacacctgggccacacacaccaaacgcccccaccagcgaacggatgcgcgggtctgtcccgggacccagacgccagcgaccctggcgacccggggcctacagcgcgccagagacaggacgcgcgccggaaacttttccaccccgcgaccccgggaggccgtcctgctcgcatcgtctgcggcctccctataccagcttccaataaagcttccaaaaacgaaaccaagcgaggctccgccacttctgaaaaacaggaggagccaccatggcgctcgcacttcggatccaatgccctacttgccgcccagcgcctcttgcgcgcgccacacgggcgccaggcccaccaagcctgtgagggcccgacgcccccaaaggcggcctccagagagccccttacctcccgccggggcgctcgaggccggtcggtgggcacggcgcaggcgcaggagcgacggggcggggcatcacgaggggtgggcagggttgggccccgcccccgcccccgcccccgccccgcagggcccccaggccgggcgctgggggcgcacaggtgagtacaaatgcggacgctgctgagaacagcgaaagcctttttcaaaagtgatattgatttacgttatggggttgtgactcgagccaagaggagagagacgcacaaacgctctttaggtctgcttgttgtgtttaagacaattcatgcttgtatggccgactgcatttcgcagttttcctgtccgttttcctctgttcttcctagaattttatttgcgggttgggcatgtattcttagctctgttttgaaactgaagctcagaaaggtggtgcctccccatcccgtccccaaaagccctgtgaagtggacagggcaggagtgccatcttaattgcaacaggtgtaaaaattaaagctcagcaaattgtggtttcctccaaaaactggtggagggcttaaggcaaacgtctttatcccgattttatagattatgactctggggtttaacaaagagttttaagtgactcactccagttcagccagcttatggcagagctggaactccaactgggtgtcctaatttccttcccaagttattccagttagaccagctgcaaccacatgaacaagcaggtggccggctttgaagccttgtccaagtcacaggtcctcctctcttcatggcctaacttccagatccagcccttttaaaaagatgtctgtgaatattcagatgacgtgcttagaatgtattcactaatggcattgtctcagaagtgatcaggatgttcaaaccacagttaaggaaactgagttcttagggtcttccagtagagtaggaggtaaacagggaagattaggggcctgtagatcctttaaaaagccttgaaagacaatttctaaaacaaagcaccaaatctaccaagcaatttggattttctttggggacataatgtatactgatatttgttttacaatgagctccagaatgtatttatcaaattttgattctaaggagaaaaattaaagtattaggcaatactgtgagaaaatgttttttatgcaaggatcagtgaaataagatcttttgaaataaaagatcatttgtgttaagttctgaaaaagcttcctcaggtacaaaatcaggaggtgtggtactcaaagattctaaatttggacctggacttctaagttgttatatgtatgtttgctgtaagttaggtgtgtcaaagtagtaggataaacattttttttttttttttttttttagacagagtcttgctctttcgcccaggctggagtgcagtggcatgatctcagctcactgcaacctccacctcccagattcaagcgattatcctgtgtcagcctcctgagtagctgggactacaggcgtgtgccaacatgcccggctaattttttgtatttttaatagagacagagtttcaccatgttagccaggatggtcttgatctcctgacctcgtgatccgcccgcctcggcctcccaaagtactgggattacaggtgtgagccaccatgcccgaccaaaaccttttaatctaactgttggttagcttgatttataatctttaaatattcaaacatatggtgtgtggacctcttttgtgtactctaggtcatcaagttgttaggggcaggcctgctactactggccgacattttcctgaagtcctaactgaacccagcaagtccaaacaaaacattaagtgtatatgttggaaagaaaattaaaaaaaattcttagggtgttatgattgattgctttcttggaaaatccatggaataaactgaaactaattcaataagatggctataaaatacctctcctaaacaacaatcatcaattttaaaatgtaatgagaagaagactgggcgtgatggctcatgcctataatctcagcactttgggaggccaatgagggaggattgcttgaggctagaaattcaagaccaacc

SEQ ID NO: 588923 - DNA, 4001 bp, Homo sapiens
attttttactaatgttgcaaggaaatgcccaccaggtttcaccaaattaacactgattgtgtcaagtcacttaactgctctaagtctccatttcttattcatgggtaaaatgagatgttgacattagaggatccctatgggtcctcctagccctaaacatctcgagtacaagtatcagaacccgtactgcatgggtacaatgaaggtgttacgatgagcaccttttaaaattttgtttcatttggtgttcagtttttataacaattttcttctgatgtaataggtgagataaggttttacaactagattcctcagtaggagtatttcctatatatcaatgaaaagaatggagaggggaaataaaacagctatggtgcccaacaagaacactacatggccaaaagcattccacagcgagcgcgcgctacgataggagagaatcattggaaaggaaactagatttccaccattttattctttttcctttcttatcctctcctacagagaaaagcccagttttaatcttcacttaatccccaaagagatagcaaaagccacagcaatccttacacattttttttgttataaagaaatggacaaaatattgacaaggcactgtttttccacacatatcaccaatcttatttagcactgtggatgccgttttgcaaatgtcacccaccatcagccctcgctccgctgcggccgccactcgccgccacccacttttaaaaatccattcatgtggtgcctttcatccaaacccataaacaaccatttcctccctgccaccgtggtctgagctcccgaagcgttcggccacggcagggcagagccccgcaaccagggagattgcagactgcggcgctgggcggcggacaccgaagctctcctcatctcccgagtgatttcaggggttcaggatcctgataagtccccgccctggaagccaagccccgggaaggggaggagtgaggtggccccggcccagcagagctcagcctccggaaaacaggcgtctcctccccaggccaagccactgcgcctagtctcccaggtgggtctcgcagccagggaccgcggcgcggcccggggcgggggaggaggacgcaggccaggatctcgctcgtcacgactcacccaggagggtggggaggaggagggactgcaggaaaagggagcggagtctgggcgctcaaggaataaagacgaggaaggggagaggggactgaggggaaggtaacgggggtgaggatgggggtgcgggggagggtgacgggctgcagggggtagaggcgagatgaaggagagggacgggtgttgggggtgaaagagggggaaggagggtgggatgggggagaggcgggatggagagagtggggtgagggaggggtggaggaagggggaaggatggggcgaggggagagaaatgggggtgaagggaagagagggagggagggatggaggggaaggaggatgcagggaaaagggagacagggaccgcgaggaaggaggatggcgagggaggagggcgggctgcagggggagggctggggtgaaacatgaggtgagggaggggagagcggggcaagccttcctctcgcgcgggcggcgcctgaataacgggaccccacggaccaggagcctcaggcccggggcgcagggccggcagcccgctcggaggcctgggcgctgccggcaggggccgcgcggggctcctcgggagccgcagtccccgcctgctggaaggatcccggctccacttactctctccgacaacagctttgaggccaatgggggccatggcgctgcgcgagtctcccggctccgatctcctcgtcccgcgacgcctgcggaccccgccgcctcctcaggtgggcgcgctgggccagccgcagctctccgccccgcagccgcgctagggaccgactgacgcgcggactgggcgcgggggcgcggcgcgagccagagcgaggctgccccgccgccggcgcgcgcgggggcggggcaagccgggggcggggcctcgcgccggccgttggcgtcacccactcgcctccgccaatcgcactgcggcccggaggctcaaccccgccccccgagatgcggctgggcgccaggcggccgctggctggtgcggagccgcgccctccccctcacctcacgcgccgcgcgcgcccggggcgcagggtacccaggcctcctctttcccgtcggtgctgggatccctggccacaggctaccgacgcgctccatctgcctgaaaccccgctcgggtcctgtctttcctctttctgggagcttccgttttttcctgcccacggaaggagcttggaggcgagatctcttactagcagcgcccactcccagccgcagcgaagccagggtgaatccacccacagcacctccctgtcgctgggtacctgcattcgtgcattcaccaacactgagttcttgtgtcaaactccgtgccaagcacctcgcgggcatcatctcatcaaatcctccaatcactgggcattgctttttattttgttttgtttacactcctcttagctcatacctatgggcattatttttaatctccattttccggtggaaaaaccaagtctcggagatattggaaatagcactagacttaccttcaggcagcgtagcatccgttagctaatgttcagtattctgtcacttttatgtgtaagccgttattctgtcccctggagctacgaccatgtacaaggcagaatctcatcttgcttatgggcgctcagagtttagaagtttctaagccccaaatctgatacgaatatactgtgggaccgactctggtctcagtatctccttcctggagtccgtatttattaaagcggtcccaggtcagtttttgctcaactttctttgttaataggagatactgcttttctttttcttttttcttttcttttctttttttttttttttttttttttttttttttgaggcagagtctcgcactttcgcccaggctggagttcagtggctcgatcttggctcactgcaacctccgcctcccaggttcaagtgattctcctgcctcagcctcagagtagctgggattacaggcgcccgccaccatcgcctggccaattttttgtatttttagtagagacggggtttcactatgttggccaggatggtctcagatactacttttgaaatatgggggagggcttgcttttggcttcaaagtaacacaaattgagccaattaaaaataaaaaagaataagagagctagtagtagtaaaaatcagtgaacattcattaaatatttggaatacatttgagctaggtttttaatcttcatattattaagatgcataataatattttacagatgaagaattgagattcagagtggataagtgctttattagtaaatgacaaaggaaagatccaattctaggatctgaattctgaaccattatcttatactgagcaaaaacaaaaaacaaaaaacaaaaaacctgctgagaactaaggaggaattttccaaagtcacagaagccagtggtggctgagccaggacaagaggctacatgtcctacttcagtcgccagccccaagtcaagcagatttgaccatcttctcaccaccaccccaatctacccccaacagaaccttcagatgggttcagagagagaggaggcgttaatgtgtcaactctctatgtctgggccttgccttttgcccaggaaacatattgatagcccctgtgtgtatttggaggaggagatagtgtgtaaacatggggagacctaggatgcactggtaatgccacatgcttcctccttcgccagctggcacatatcagcagagactccacagtttctgtatctgccatgaaaatataaatttgaagctggaaaattccttagcagctaaggagtaggaatggccaagggctcctcttgtcactcatccagtcagtgggtcaacaagcgtttattgagtgcggccaaag

SEQ ID NO: 588924 - DNA, 4001 bp, Homo sapiens
ggcagtcaggtgtcaacagcaagcccaacagatgactgataatgagagctcccacctgaggtcaaggcagtgactaaaagtcccaccaaaaggggcaagctggccagcagaagccagggctctgctgttgaactcaagtaaaacaggccctaggggggcagccatgcactcactcggctggcagagggacaggctcagccagaactctggactccaactctgcaatcaggttcagcttccacttccgacgctggacctacagtgacagagcataaggccaagcagatggcagcaaggtcaagggcccagagttacgcacaccagatgccggtctttacctgccatgtccccaagccaaaggcagtcacagggatgaggagcaggacccactgaagaaaggagtcatcttccgcttttgtggcagatgcttctgctgcagaactgccacatctgcttggcctccaggccacccctggagagtttcacaacactgacatggagccagaagccctcgaacacagacctggagcagcccgttccaagacagactccagtactgccaatcaaaacctgctgcctagagccaactagcagcacctgtatccagcccagctcctaacccggtgcccagaacaaggcacacacagtacgtctgccaagtgagtaagtgggatctagggctcagtgccggtttgaccaccaaccacgaccctgagtaactcatgcctttttactcaagaatctagatgtattccactgcactaagatgcaccattcatccattcaaaatgcatttaataagcagctacagttggccgggcacggtggctcacgcctgtaatcccagcactttgggaggccaaggcgggcggatcacgagatcaggagttcgagaccagcctgaccaacatgcagaaaccccatctctacaaaaaaatgcaaaaattagctgagcacgatggtgcttctgtaatcccagctactcgggaggctgaggcaggagaatcgcttgaacctgggaggaggtggttgctgtaagccgagattgcgccactgcactccagcctgggcaacaagagcgaaactgtctcaaaaaataaaaaataagcagctacagttactaagtagcttagtcaggcactagtggttgttgtgttatgtagaaaaatatatcaattcagtaatggctcacagagctctcttaacagctttccatttttacaactcatcgtaaatgtaaagagggaagaatgtacacagaaagtgcctttaagctctcagaggatgagttccatccgctgaaaagcaccaggggccttgcggatactatttttttttttttttttataaaaaggcaggcctggggcaggcttgcacagcactctacacacggcaaaacagccctgtgctgcacactgagaggaacacgtaagccgcggtggttagatacgctttactttcagagccctgggctttcagcctgggctggccacccattagctggatgggacgttcggaagtaactctcgagccttctctgtaacaggggaacgaccaaggagctacctctcgcgttgtgaggacaaagcgctcgctacatgcccggcacacgaccacaattccactgaaagcattttaatacggaacttgtcactcccagggagcctccgctcagccggcagttggttcatttcaatccccacgacaacccttcaaagtgcagggcagacagcaggtggctctgcccaggcgcctggatcacagcccggcctgcagccctcacctgggcgcggggagaccctgaggacgctcctccaggcggcgctggccggggcctgcggacacggacgggcgggctgagctccgggacccctccccgcgccccgcaccccgcaccccgcacccggcgctcacccgtcccagccccgccgcccgcagccccagctgcaacgcagccaccgccgccatcgcacccggccccgcgggcgcttccgggacgcaggaagcatctgcatccggggcgccgctgagtcccgcccagagccccgcccccggctccaggttctgcgagcggcttccgccgggctgctccgcgggcgcgtcggccatgagcgagttgccgggcgacgtgcgggcgtttctgcgggagcacccgagcctgcggctccagacggacgcccgcaaggttcgcagcgcgggaggggaacggagtggcggagaagggcgcagttgggatgaggggctgaggggagggcaggggagaggagagggcaggggagaggggagaggggagagcaggagagaggggagggcaggggagagggcgcggcgggatcaggggaggagagggaagggggcgcggcaggagggggcaccagggagcggagccctggccctcctgacgtcctgcccgcccacgcgtccgcaggtgaggtgcatcctgacaggtcacgagctgccctgccgcctgccggagctccaggtctacacccgcggcaaaaagtaccagcggctggtccgcgcctccccggccttcgactatgcagagttcgagccgcacatcgtgcccagcaccaagaacccgtaggtggtccgcggcggcgcggggaggcccagggcaattaggacagcccctccgctggactccgccagtgctgcagcccctactctttcagagttgggagccctgggacccaggtgggcgcccgggtgctggaatcacctgcggtcccagcggcgaggcctcttggtgagctcgtttgctcacctgaggtttgtcctgtggggtgtggctgcttcccagatgagtagaggcttgtgatttgtcacctgaggttgtgaacagcgttgggttcttcccttaaccccagaaggggtctttgatttagctgggagctaggctttgtaataatcgtcaaaacagagataggatgtttccattcattgagcccttgctccaggtggagccatcctcttgcatgaactcatcctggagcagtcagtgaggctgccatgcgtgcttttccggtaaacattaagaggctgcagtcggcctgggtcagacggttccccacccagcttcagagtggaattgctccgggagcctttaaaagcccgatgtccaagccgcatggtagactgtccagggatgagtccaagacacagccaccagtctgaatccttgctgtgaactgtccctacaaatttggtctctctgctctgtaggcaccagttgttctgcaaactcaccctgcggcacatcaacaagtgcccagaacacgtgctgaggcacacccagggccggcggtaccagcgagctctgtgtaaatgtaagtcccagtggacccccatcagtgcatcgccatctgagtgcatgcccgccttgccccagatggagcgtgcttgaaggcaggtcgtccttcagcgatccgtgttgatgcatcaggcctgttttttggcacagtgaagagagggatgatggcccctgaccccacagcttttagtgcaggcaggcacagagccagaagcaggctcgggagtgagtgagtgtgcgtggcaatgcgaggtgtgaaagaaactgggcgagggatgtggggtgggcttgcggagacaggagggctggggagactcgctgagggattcgctcgaggctgaggctggagggatgtggtggcagtggggtcgggggaacagcaccccagggagaagccagggtccatggaagtctgaggcaaaaatgtgttggctgaggtaggctccaaaggactggctgggctagtgtgcacagcccggatgacccagagaccaggccaggagcactgcagtgggtgtgtggagagggttgggtgggggctgcatggacagtgtgcatggttgagaagggaggactccttgactgcggtcatccaggaaaagacggtgggttttggggggagaattcagagtccctttgaaggttttaagcttgagctgtattaggaaaggtgtgtattagggaagta

SEQ ID NO: 588925 - DNA, 4001 bp, Homo sapiens
gatccacggtgcaaccatctccttcatccagcacgggtgtccctgtttcaaaagcccgatacttccctaatacacacctttcctaatacagctcaagcttaaaaccttcaaagggactctgaattctccccccaaaacccaccgtcttttcctggatgaccgcagtcaaggagtcctcccttctcaaccatgcacactgtccatgcagcccccacccaaccctctccacacacccactgcagtgctcctggcctggtctctgggtcatccgggctgtgcacactagcccagccagtcctttggagcctacctcagccaacacatttttgcctcagacttccatggaccctggcttctccctggggtgctgttcccccgaccccactgccaccacatccctccagcctcagcctcgagcgaatccctcagcgagtctccccagccctcctgtctccgcaagcccaccccacatccctcgcccagtttctttcacacctcgcattgccacgcacactcactcactcccgagcctgcttctggctctgtgcctgcctgcactaaaagctgtggggtcaggggccatcatccctctcttcactgtgccaaaaaacaggcctgatgcatcaacacggatcgctgaaggacgacctgccttcaagcacgctccatctggggcaaggcgggcatgcactcagatggcgatgcactgatgggggtccactgggacttacatttacacagagctcgctggtaccgccggccctgggtgtgcctcagcacgtgttctgggcacttgttgatgtgccgcagggtgagtttgcagaacaactggtgcctacagagcagagagaccaaatttgtagggacagttcacagcaaggattcagactggtggctgtgtcttggactcatccctggacagtctaccatgcggcttggacatcgggcttttaaaggctcccggagcaattccactctgaagctgggtggggaaccgtctgacccaggccgactgcagcctcttaatgtttaccggaaaagcacgcatggcagcctcactgactgctccaggatgagttcatgcaagaggatggctccacctggagcaagggctcaatgaatggaaacatcctatctctgttttgacgattattacaaagcctagctcccagctaaatcaaagaccccttctggggttaagggaagaacccaacgctgttcacaacctcaggtgacaaatcacaagcctctactcatctgggaagcagccacaccccacaggacaaacctcaggtgagcaaacgagctcaccaagaggcctcgccgctgggaccgcaggtgattccagcacccgggcgcccacctgggtcccagggctcccaactctgaaagagtaggggctgcagcactggcggagtccagcggaggggctgtcctaattgccctgggcctccccgcgccgccgcggaccacctacgggttcttggtgctgggcacgatgtgcggctcgaactctgcatagtcgaaggccggggaggcgcggaccagccgctggtactttttgccgcgggtgtagacctggagctccggcaggcggcagggcagctcgtgacctgtcaggatgcacctcacctgcggacgcgtgggcgggcaggacgtcaggagggccagggctccgctccctggtgccccctcctgccgcgcccccttccctctcctcccctgatcccgccgcgccctctcccctgccctcccctctctcctgctctcccctctcccctctcccctgccctctcctctcccctgccctcccctcagcccctcatcccaactgcgcccttctccgccactccgttcccctcccgcgctgcgaaccttgcgggcgtccgtctggagccgcaggctcgggtgctcccgcagaaacgcccgcacgtcgcccggcaactcgctcatggccgacgcgcccgcggagcagcccggcggaagccgctcgcagaacctggagccgggggcggggctctgggcgggactcagcggcgccccggatgcagatgcttcctgcgtcccggaagcgcccgcggggccgggtgcgatggcggcggtggctgcgttgcagctggggctgcgggcggcggggctgggacgggtgagcgccgggtgcggggtgcggggtgcggggcgcggggaggggtcccggagctcagcccgcccgtccgtgtccgcaggccccggccagcgccgcctggaggagcgtcctcagggtctccccgcgcccaggtgagggctgcaggccgggctgtgatccaggcgcctgggcagagccacctgctgtctgccctgcactttgaagggttgtcgtggggattgaaatgaaccaactgccggctgagcggaggctccctgggagtgacaagttccgtattaaaatgctttcagtggaattgtggtcgtgtgccgggcatgtagcgagcgctttgtcctcacaacgcgagaggtagctccttggtcgttcccctgttacagagaaggctcgagagttacttccgaacgtcccatccagctaatgggtggccagcccaggctgaaagcccagggctctgaaagtaaagcgtatctaaccaccgcggcttacgtgttcctctcagtgtgcagcacagggctgttttgccgtgtgtagagtgctgtgcaagcctgccccaggcctgcctttttataaaaaaaaaaaaaaaaatagtatccgcaaggcccctggtgcttttcagcggatggaactcatcctctgagagcttaaaggcactttctgtgtacattcttccctctttacatttacgatgagttgtaaaaatggaaagctgttaagagagctctgtgagccattactgaattgatatatttttctacataacacaacaaccactagtgcctgactaagctacttagtaactgtagctgcttattttttattttttgagacagtttcgctcttgttgcccaggctggagtgcagtggcgcaatctcggcttacagcaaccacctcctcccaggttcaagcgattctcctgcctcagcctcccgagtagctgggattacagaagcaccatcgtgctcagctaatttttgcatttttttgtagagatggggtttctgcatgttggtcaggctggtctcgaactcctgatctcgtgatccgcccgccttggcctcccaaagtgctgggattacaggcgtgagccaccgtgcccggccaactgtagctgcttattaaatgcattttgaatggatgaatggtgcatcttagtgcagtggaatacatctagattcttgagtaaaaaggcatgagttactcagggtcgtggttggtggtcaaaccggcactgagccctagatcccacttactcacttggcagacgtactgtgtgtgccttgttctgggcaccgggttaggagctgggctggatacaggtgctgctagttggctctaggcagcaggttttgattggcagtactggagtctgtcttggaacgggctgctccaggtctgtgttcgagggcttctggctccatgtcagtgttgtgaaactctccaggggtggcctggaggccaagcagatgtggcagttctgcagcagaagcatctgccacaaaagcggaagatgactcctttcttcagtgggtcctgctcctcatccctgtgactgcctttggcttggggacatggcaggtaaagaccggcatctggtgtgcgtaactctgggcccttgaccttgctgccatctgcttggccttatgctctgtcactgtaggtccagcgtcggaagtggaagctgaacctgattgcagagttggagtccagagttctggctgagcctgtccctctgccagccgagtgagtgcatggctgcccccctagggcctgttttacttgagttcaacagcagagccctggcttctgctggccagcttgccccttttggtgggacttttagtcactgccttgacc

SEQ ID NO: 588926 - DNA, 4001 bp, Homo sapiens
atcaggtcgttctggcccatggcgacggcgggaggctcggctcggctcgctcgctcgctcgctggctctcgcccgtcggcgcccgcacccgctgcggcctccacaggaagtgcccggcggccggcctcgctccgcgtcggctgcggctccagcggctgccacgtaggccaagccttaaaggggccgcgcgccgcccgggcccgccccggtgcgtcttaaaggggccacgcgccatccccagcctcccgacccatccgctcgaagccacgcccgccgcgctcgacgccacgcctctcacgctggaggccccgcccgccgcgcgcaggccctgcggtccctcccggcccggcggaacgcgtcccttttaagggggcggggacctgggggtctggggccagcgcgcgggagggacgcctgagtgcctcgagggcgccgttcgggcggggaggatcccgcgggtcccactgacccacgcggggtggggccaggggtggacgctcgcccgtacgcggtcgctactgatcatgcttgggccagggtccaatcgcaggcgccccacgcagggggagcgaggcccagggtcccccggagagcccatggagaagtaccaggtgccgagtgttccctgcggggaggcgggagctccgtggggtaacggtcgcaaccctggagctacggccggcggttccgaccgagggcggcgaggggcccgcgccctggccagtgtcggcctgcagctcctaggttgaacccggggggcctccaacggtgacctcctgggtgccctttgccactcagtttccccctttgtgaattgactaaggattctccagccctggctgagtatttgagggcgtggggcagctcctctatccttcgtgcctggggtctgtgcgcttgggtccaccgaggcaggacccccgggaacatcccgagtacataattgggagcccccagtcccctaaaaacacccctgcagcgtgggtctgtgaaaatgtttgagacctaaaaaattcacaaaacacaaaaggaaagctgcaaaataaaagtaaatgtttaattaaatgcttctatacatgatatatacactttattaaatgttagattcagcatttgtgaaaaatgcattcgcttggaaacagtttgcgggttagatttttgtcactttggaagaattgtctttgtgtgagaggactatagggcgttgccagaggtgaagcagatgagcttctggtggccagataatttttaaagtaaagttgtttttcagattaaaaaaaaatagacgtttcaggaatatacctgcttttggaaaaaaaaatagacttgattcgagatacggctccattttactgtttaatttgctgcctaagcttgaacgctctcacaccagctctgccctcagcccgctgtggcttagaacagcagtccctggccgggctcggtggctcacgcctgtaatccccaacactttgggaggccaaggcgggcggatcacctgagatcgggagttcaagaccagcctgaccaacatggagaaactgtctctactaaaaatacaaaattagccaggtgtggtggcgcatgcctgtaatcacagctactcgggaggctgaggctggagaatcgcttgaacccaggaggcagaggttgtggtgagccaagatagcgccattggactccagcctgggcaacaagagcaaaactctgtctcagaaagaaaaaaaaaaatagcagtccccaacctttttggcacaagggaccagttttgtggaagacaatttttccacagatggaggcgggaggatggttttgggatgattcaagcacattacacttagtgtgcagttcatttctattattatgttgtaatacataatgaaataattacacaactcaccataatgtagaatcagtgggagccctgagcttgttttcttgcaactagaccatcctctcgggatgatgggagacagtgacggatcatcaggcatttgtttctcataaggagcatgcaacctggatccctcacatgcactgttcacaatagggttcacactcccatgagaatctaatgctgctgctgagctgacaggaggtggagcttgggtggtaatgcgagccatggggagcggctgtaaatacagatgaagctttgctccactgcctgctgctcacctcctgctgtgcagcctggttcctaacaggccacggactaggttggggacccctggcttagaatatccagtgtcatgagcaggctgctcacaaggctggattacagactcctaagacttttatgggctccgagagtccctaggctcaggcttccatcctcatatctcctcctctgggtcctgccctccctcccccaatcctctgatgaatgtcagcctccagcaatccccggcccagccccctgccccatagcacttggtctctgcacagagttctggcttggtggccatctctccagatttggctcaaatcacaggctctaagatcagacccccagagttaccccaggcagtgtcctgctttctagtgacatagcctcaggcaaggacctagctccttgtgcctcagttttccccaatgtaaacacagaggtagcaatggtgtcaactgcaaagggtggctgtgaagtgcttggcaccatgccaggcacacaatggcttcctgattgtaccagtcacaagattggttactttcttgttggaaaccagttgggaggtggatgctggaagttgaggtcacagaggtctatagagagtgaataagccctttttctctgggaggttcttgcacttgagtgcccagctggtcctcattgcaggttgggggagggatacagggttgtagaagagctccagaatcggccccaaataggtgagatcagagttctgccattgaaaggcttcttgccctccttgggccatttcctctattgcaagatggggtggagccacttgctctgccagcctgacaggggagttagcagggccagaaaaggagttggagctgggcttttggaaagggaaaagttgtgtgcatttcctgaaagcttctctcttccttgctgataggttttgtaccagctgaatcctggggccttgggggtgaacctggtggtggaggaaatggaaaccaaagtcaagcatgtgataaagcaggtaagaggccaagcctgtgcatcccatgccgggtggttctgtgactgtgattttccccaatacaagctcttcccatgttggagaagcttcctgatgcggcagctggattcctcgctgctgacacttgcggagactaatctggttggggtagatgtgggggtgcgtgaagctctgtcaccttgatggggaagcaatgctaatttttactccaacaccaccacctcccaccatttacgcatcacgtgctgtatgccaggcactgactcacttcatctcccgtcaaccctgtaaagcagaaacaatgaccctgtttatagccaaagacagtgaggctcaatgcagcgccagactaggcaaggtcacacaatttccaagaggatttgaattcaggccacctcactgggggacaccgtgctacccagtgctgggtcaccagttttaccaaaagggagccaggcccagagaggatggggactggctcaaggtcacacagggctaaggtcacacaccaggccctgagcccttccaccacactcctcaccagggctagcagggcatggggaggtgtaggcctgcaggaagacagccctttgtgtgtccgagacagggaggtccagatcaacagagggactagggtgagaaagctgctgcaagagtccctggcatgccctcctctctgtggtggtggcagggacccagcaggttcagggctggccatacagcgggaggagccttgtcagcagctgctactgggccaggcctcagtccgtacagctccgcagtctcaccctgtatggctgggcctggagtccttgcccctgccctgct

SEQ ID NO: 588927 - DNA, 4001 bp, Homo sapiens
atgggtcactataaattatgtcaatgaaaactgacaaacctaaaaggtctacctggttcttgagagcttttgatatgaattgtttttaaaattgtgtctttaaaggctgggtgccgtggctcacgcctgtaatcccagcactttgggaggctgaggtgggcagaccacctgaggtcgggagttcgagaccagcctgaccaacatggagaaaccctgtttctactaaaaaaaaaaaaaatacaaaattggctgggtgtgacggtgcatgcctgtaatcccagctactcgggaggctgaggcaggagaatcgcttgaacccaggagttggaggttgtggtgtgctgagatcacaccattgcactccagcctgggcaacaaggtcaaaacaccatctcaaagaaaaaataaataaataaaaataaataaacaaataaaattgtgtctttaagcacaaaatcagaatcttagggaaaaaatgcttcgtcaagttgattactttttccctccaaatttaaaatattggctcacagaaagtgttgcaatgagaaccgatggtgaggtcacactagaaagagatcaccccccaggaggaacggaagagttcaatagctgatcagaaaacggtcacttactcttttcttttttttttaaaccacacatatacaagccttccgataagtctaggcctcagagtttgatgactcactaccacctccagaaaaatttaaaaatttaaccatcactacttaaaactctagcaaagccacacgaacacattaagtaaaccgaggaaaaaacggcaagtgggccacacaaggctctccctgcggggataaggctgttaatttgtcgacataacgggattcttttagaagtaaaaggcataaatctgcgtaaccaccaccaccttttgtttttgtttttttgttctgtcaagcttaatcaagaaagagggaagggagttgtgtcccttcactttgtaggatcggatcctgtccacccagttcccgaatgctctcaacagttacccaaccgcctgtttcaaaggcttccctgttgctcagaatgccacctggacacttctggaaggagactatcagggagataggcttcccctcctcccaggctgtgtacaggtccccactcaatccagcccagggcagagtccaaacggggagggagacgcagacagggtcaaagggaccccaagagtccagcacatctgggaaagagaaaaggaaaaggtgctgtggcttcctgtagctggggcgcacgccagcgcgccccctttcctctgggaggacccccggcccccgttcgtccccgagctcccagcccgcctccgggagccccagtgagaggaaaaacgtgcggggaccccccagcagctccaaacgccgaggcgctccccgcgagcctcagacccgacccaacgccaggactcgcgccgccggcccgggaagaaacccccacagcccgcgccccgggctggctggagggtgggggcggctagccaggcagggcgccgaggcccgggctccgggagcggcccagcgggcaggggagactgggcccggaggccgggtttggggctgtccagccgggacagagggcccgggcgggggggtccccctgtgggaacaaggagtcagggggcggcccgggcctggcgccctgcgctgggaggccgactccggagcggcccgggcggcctgggtcgggaccggggccgggggaggagcccgcaggccgcacctggtcggcgaagtcctcggccgtgcccatcaggtcgttctggcccatggcgacggcgggaggctcggctcggctcgctcgctcgctcgctggctctcgcccgtcggcgcccgcacccgctgcggcctccacaggaagtgcccggcggccggcctcgctccgcgtcggctgcggctccagcggctgccacgtaggccaagccttaaaggggccgcgcgccgcccgggcccgccccggtgcgtcttaaaggggccacgcgccatccccagcctcccgacccatccgctcgaagccacgcccgccgcgctcgacgccacgcctctcacgctggaggccccgcccgccgcgcgcaggccctgcggtccctcccggcccggcggaacgcgtcccttttaagggggcggggacctgggggtctggggccagcgcgcgggagggacgcctgagtgcctcgagggcgccgttcgggcggggaggatcccgcgggtcccactgacccacgcggggtggggccaggggtggacgctcgcccgtacgcggtcgctactgatcatgcttgggccagggtccaatcgcaggcgccccacgcagggggagcgaggcccagggtcccccggagagcccatggagaagtaccaggtgccgagtgttccctgcggggaggcgggagctccgtggggtaacggtcgcaaccctggagctacggccggcggttccgaccgagggcggcgaggggcccgcgccctggccagtgtcggcctgcagctcctaggttgaacccggggggcctccaacggtgacctcctgggtgccctttgccactcagtttccccctttgtgaattgactaaggattctccagccctggctgagtatttgagggcgtggggcagctcctctatccttcgtgcctggggtctgtgcgcttgggtccaccgaggcaggacccccgggaacatcccgagtacataattgggagcccccagtcccctaaaaacacccctgcagcgtgggtctgtgaaaatgtttgagacctaaaaaattcacaaaacacaaaaggaaagctgcaaaataaaagtaaatgtttaattaaatgcttctatacatgatatatacactttattaaatgttagattcagcatttgtgaaaaatgcattcgcttggaaacagtttgcgggttagatttttgtcactttggaagaattgtctttgtgtgagaggactatagggcgttgccagaggtgaagcagatgagcttctggtggccagataatttttaaagtaaagttgtttttcagattaaaaaaaaatagacgtttcaggaatatacctgcttttggaaaaaaaaatagacttgattcgagatacggctccattttactgtttaatttgctgcctaagcttgaacgctctcacaccagctctgccctcagcccgctgtggcttagaacagcagtccctggccgggctcggtggctcacgcctgtaatccccaacactttgggaggccaaggcgggcggatcacctgagatcgggagttcaagaccagcctgaccaacatggagaaactgtctctactaaaaatacaaaattagccaggtgtggtggcgcatgcctgtaatcacagctactcgggaggctgaggctggagaatcgcttgaacccaggaggcagaggttgtggtgagccaagatagcgccattggactccagcctgggcaacaagagcaaaactctgtctcagaaagaaaaaaaaaaatagcagtccccaacctttttggcacaagggaccagttttgtggaagacaatttttccacagatggaggcgggaggatggttttgggatgattcaagcacattacacttagtgtgcagttcatttctattattatgttgtaatacataatgaaataattacacaactcaccataatgtagaatcagtgggagccctgagcttgttttcttgcaactagaccatcctctcgggatgatgggagacagtgacggatcatcaggcatttgtttctcataaggagcatgcaacctggatccctcacatgcactgttcacaatagggttcacactcccatgagaatctaatgctgctgctgagctgacaggaggtggagcttgggtggtaatgcgagccatggggagcggctgtaaatacagatgaagctttgctccactgcctgctgctcacctcctgctgtgcagcctggttcctaacaggccacggacta

SEQ ID NO: 588928 - DNA, 4001 bp, Homo sapiens
ccacacagttccttcggtcccatccaccctagcactcctgtgatctttgctcttggggaagtctcgtgctatccctgtgcgcctgctgctgctttttttttcttaagagcaaaggggaccaagcccaagcccagccccagccccgccctgcacagaaccaacatgccctgaagcctctcacctgcagggttccctgctgagctggaagcccaagctgcttcctctttggctgcctcaggcctcctggccccagaggctgctggagatttctcccccaaggacttggccttgtgctcagcagccttctcttctcgcttccggaatttcttttgtgttttcttccttttcttttttgggggccctgcagtttctgagccttgagttttgccagctgaaatgcaaaataagaaagagttaagtcccaatctcatggcccattcaataggcaggaaaggctcaccaaggctttgatcccaggaagatgccgaaagaggatcaggatcgggggccagagacactgatcctagagctcagaaccacaaccttgacccagtagttctgcttgtgagaattcatcaggcacaaagatgaggcttcaaggacgttcatcaccattatttgagtgaaacattagaaaaacctgaatatccacctccactaacaatttctggccctgctttacaataagctaccatgctgccatcaaacacaatggcaagggctttcattttagctgctgggggttatgtttacattttttcttttttgagatggagtctcaatctgttccccaagctgaagtgcagtggcgcaatctctgctcactgcaaactccacttctcgagttcaagcgattctcttgcctcagcctccggagtagctgggactacaggcgcccaccactgtgcccggctaatttttgtatttttggtagagacggggtttcaccatgttgtccaggatggtcttgatcttctgatcttgtgatccgccctcctcagcctcccaaaattctgggattacaggcatgaggccgcacggccggacaatgtttacattttaaatgggagaaatcagtctaagtaaagtaggagctgaatcgttttaatgaaaaaaaaaaaaaatttcaaaaaggatgagaaagacagacggaagacatactaggtaatgagaaaattcacttaagattttggatttgctataaccaatatatcgtccttgaataaaaaggaaaccccgttttacctctggtggttccagagaccctgctgctctcctctcctcctgggcccagacagcactgacacgtccccgctgtcggcttccccacccgattatctacttcccttgtgcagcgtggtcaccaggccatgagaaccctaagcgcaggagccctctgccatcctcctcctccccacaccgcaccatgcccgtagtgaagggactgaaagggtcttttcccactgactgaccattactcctgtctctactaaaaatgcaaaaaaaaaaaaaaaaattagctgggcgtggtggcgggcgcctgtagtgccggctactcgggaggctgaggcaggagaatggcgtgaacccgggagacggagcttgcagtgagccgagatcgcgtcgctgcacgccagcctggacgacagagcgagactccgtctccaaaaacaaaaacaaaaacaaaaaaaacaaataagggaaacggcgataatttcacaagtcacttagattttttttctagtactttacagactcgtctacaccggctccggccgcgtcccccgtttcgcaggccccttagtcccggcccggccctgtgcgttaccccgcgtgcgcgcctgctgttccggggccgaatgggagcagatcttcttggccaggctctgcaggtaggcgtccttggcgagtagagaggccatggcggagacccgggccgttcacgactcacaccttccccgctgcgcgtgcgactctcaccacctccgccggaaaccaccacacgggcaggcgcggccaaacgaacgccgagccgccagcccgcgcgctcgattagccaagcctgactccgccggaagcggcgcgcggggcggggcgcacagcattgcgggccgaggacagccaatctccgcccggagtcggtgcagcagggcacccccggggcctggcctcagtgcctctatcaccccggtcccgcacgtgttcctgtgctcccctcacccccaaccccgacacagcaggcgctcatgagtaggggcgaaatgaatgaatgaccagcagtacattcattccgtcctttggagtggggggcctcaggtctcaggcggacacagactgagcgcctggcacgtggcaggccctaggttcagtcctaggggacacaagcagtgtgtcacacacacagatgtgttctcggcgagtgtctgccgtagaggtgactgataaacctggcaagcgtgtgactgtcaggtgaggggagcgccaaagaaagcccaggggaaaagggagaagtgttgggcgggagggagcctgcatgttcaaggaagaccccctgggcagtggcttttgctctgaaaaatagaattacacactacgattccctcccccaccccggtgacggagtctccctctgtcgcccaggctggagtgcagtggcaagatctcggctcactgcaacctccacctcccgggttcaagcaattctcctgcctcagcctcccgagtagctgggattacagacgtgtaccaccacgcccagctaatttttgtatttttagtagagacggggtttcaccatgttggccaggctggtctcgaactcctgacctcaggtgatccgcccacctccgcctcccatagtgctgggattgcaggcatgagccaccgtgcccagcccacactgcgatttttaacacaagatgtggtctttataataactcactaggggcaggagaaaagagaggtcatggcctgaggcttgggaccaccacaccccagttcctgcactggaaaattacaggctcattaaggacccagagccccttccagggccaccccgttggtagagaagggagaacttaagagtcttaaattacaatttgaaaaggtggctgctgatatatatattagaaacagaactgttgtatttgaaacagaactaaactttcttcccctaacttctgccatgaggtgatttaaaaaaatttttttggccaggcgcagtggttcacgcctgtaatcccagcactttgggaggccaaggcgggaggatcacttgagccctagagttggagaccagcctgggcaacatagtgaaaccctgtctccacacacaaaaaaatttaaaattagccaagcgtggtggccggcccctgtagtcccaactactcaggaggctgagaagagacgattgcttgaaccggggaggcagaggttacagtgagccaagatcacgccactgcattctagcctggagtgccaggctgtctcaagatatatgtatttttttcacttttaaaaaaggcagtcaaatttagcagtgtgggggtcgaatgccaactatagtgacactaaggttaattagttctgacatcccactgccattcagaccagcctagaggtgatgtttcatggaggataggcgtgacgctgctgctgactcccctgaactgctgggtatcttaacaccatcacctactgagttcagaatgggcatctgaccccccaagccccatctcttcctctcactgtcaacccttttttcagttaaagcggctccatccttccaggtgcttgggccagaccttgaaaccactgactcctttcttattccccacatccaatgcttcagcaaatcctgtcagctgtgccttcagagcacctccagaatctcagtggacccactcccatctcatcaccactttggtcctgttttatttattttttgaaatggagagtctcactcttcctcccaggctggagtgcagtggtgtcatcttggc

SEQ ID NO: 588929 - DNA, 4001 bp, Homo sapiens
ggcaggattctcaaccacaagtctccttgtatgtcatcacatggaaatttccttccacttcaggatcagcgtttggttttagtaaggaagatgggggttccttagaccctctttcccccgcctcaagtttacttatacaaatagcaaaggaggacatcagccccatgcagatggcagtccaagggggacaatccttctgtcctcacgttggcagacacagatctctactctgaaggctttgtaggggcctgagctccttcgggagtctgagctggaactgaagctggagctgcagcctgagccttggtttgatccttgaccttggtctttggctggcacagcctgagccccttggcaatgcgggcacgagcacgtttcccaagcttgaggtgggcaacgtaggcaagagctgacaccctttggaatcttgggcttaacctccttggggtttatgagggcaaggcctcagcacgtgcactcatggccttggcactgtcgccctgcatcttctttaggcccctcttattgtgcttcttggcaaaccgcatgtttgtcaggaacttggggtccacccctttaaaagattcgtatctttgtgatccgggtttcatgatgccgtttctgtgccattttcgggactggttgtgtgtggtgtggtgcttggatttggccatgtctgcactgtaacctgtggctcccgaagcgcctagaactggctagacccacttttcttgtcactccctgagacggcttccagtggcttccaggcacagctaagtccaaaggcctaggtctgccaatcaaggcactctgccctctgcctctggtgcctccgtgtgcttccttcccttctcccccgggcctgaattctgaaggaattcattcattctacactcatttgtggagaggtgacagtgccttctgctatgagctgggatacctttttcacattttcccatatccaaatatgaccaatcattgatggcccagctcaagggtcaccaccgattcccctttccctgccctcaccacccacaccttctcatggcacccatgccattctgccttgtattacagttatgtggatgaatgtcacctcccctgcgtgtctgaatcctctgtgtaattcctactcagctcaacactgcattttgcagaggaggaaaaacaactccctcgattgcttggaaatagaacatttgctggtctaaatcctccagacaatgagctccacgagggcccgcactgcccgccctcatcgcgcacagggaagctgttcaagggccatctgttgaatgaatgagtgaattaatggcttcactcctgtactcttccttacgcgtctttctcaccatatttagcatccggctctctaacaacgtgaaaaaattaaaagtggtaagaaaattgcttcgggtcaaaaatgtgtcatgcaaaagccaccgcagagccggaagcgtgacagcgccgcagaacgccctggcctccccgcccttccccgggcgccgccctgcccgggtccgcgctcgcgcccagcccccaccccgcctcctgggcagtggaggtccctgggggcccggccaggccgccttaaaaccggcgtcccccggcgtcgcggggtcgggcgggggcagggaagcccggcggggagccccccgcttctctgagctcctccttgccgatctccaacggccggcgcgggccccacctgcgccccacgcctcggcaccgcgccggcccggcccaggggcggggaagcgtccgtgcgcccagagtcctcgaggcccagccgggggccccgccggccgcccgtgcccgtcccagcccgcactcaccgtcggggcccggcgctcccgcggcgccgcgggccaggccgagcagcagcaacagcggcagcaggcggcgagacgggcccgcatcccagggcccccggcccatgccgccgccggtccctcccggcgcgcccgcgcctcctcccggggccctcagggtgcagagataaggctacaggcgccgcggggaggggaccagccggcggcttccggcgccgccgagggaagcggggggcgctgcggggtccccgggaggccgcagagcgcgggtccttcctcttgtcggggcctgggcttaggacacgcccgttccgcgtccgtctctggctccgcacttgctgccctctcgccgctcacattcgcaaagggggacagacactcatcggataatgacacagctggacgcagagccccggagagtgctggggaggaaatgttgcggaggattcaagccactcgagggctcagggaggcacccccggggagaggggtgaggggagcaaggggcggaaatcttccaggacgtgaaagggagctggatgaggtgaccacagcgcaaggcccagatgagaggtcggaagacgcagacccaggccacccaggggcgacacacttgaccaggtgacacctggtcaccgggagtgagagagagtagggctgtgatggagggaggggctggcatcagtccccgctgctctgaggacacccggcttgggacgcgctgatgccagcccctacctccatcacagccgtactcatcccaagggaaggagtaaaccaagacccaaggatgagaaggacgttggggaggaatctaagcgggagtttgttgtagaaatggggaatggggacctagagtgagagcagagggttggagaggggcgttgagctgcagagggaagttagccctcctaacccaagtgatggaggtcgccgggaagctgtcacagtttcaagcagtgaatgacttcatcactgacacatctctgtctgttctgtggaattgggattggggttgggttgggatgtggaaggcaaagagtccagcccggagttgctgcaggaatcaggcaatagaagacatgtcctggcccggtgcggtggctcacgcctgtaatcccaacactttgggaggtcgaggcgggtggatcacttgaggtcaggagctcgataccagcctggccaacttggtgaaaccccgtctctactgaaaaaaaaaaaattaggtgggcacggtggcaggcacctgtaatcccagctactcggaaagctgaggcgagagaattgcttgaacccaggaggcggaggttgaagtgagccgagctcgcaccactgcactccggactgggcgacagagtgagactccatagacagatagatagatagatagatagatagatagatagatagatagatagatagatagacagacagacagacagacagacagatagagatagagatagatgtgtcctgcagctgggcattgacaaatgagtgtgaagagggcagtgtgtaagagtggaatccactaggttttatgactagtcggggagaaggaaataaataagatccggtttgaaggctttgagcttgtgatgtctgtgggagcgcagccgagagcaggcaccccactacttcaccccatatcctcacttgtttactctctgccatgagcctgccgtaaatctcaccactttcaaacacacccatataagggctaaagttgtggagtcttaacaagtagttaaaaatcaacttcaagctgggtgaagtgtggcatgcctgtagtcccagctactaaagaggctgaagggcaggagaattgcttgagtccaggaattcaaggcccatgtgggcaatacagtgagaccccctctcttaaaaaaacaaacaaacaaaaacaaacaaagaaaaagctcatcttcctaggctcttttttcctcttggggagacaaggtcttgttctgttgcccaagctggagtgcacagctcaccacagcctcaacctcttgggctcaggtagtccactagcctcaacctcccagtagctgggactacaggggcgcagcatcatgcctggctcatttaaaaaattttttttgtagagacaagatctggctatgttgcccaggctggtctccaactccttggctcaagcaatcctcc

SEQ ID NO: 588930 - DNA, 4001 bp, Homo sapiens
aattttttttttgcattttttgtagatacggggtcttgctatgttacccaggttggtttcgagctcctggactcaagcaatccgcccacctcagcctcccaaagtgtgggattagaggcatgagccaccactcctggtcagtggtgttttagtgtcaaatcctctccaaaggctcccaaccccccagcctctaacttcacagcacatttcacagagcaagaaactgaggtcacatggcaggggagtgatggagtccagatgatggcatcatccctgcaccagaacaagtaccctccctgggctccactgggcctgtccacaagcttgggggcaggtatacagtggggaaactggggcacatggggaaactgaggcacagaggtacagcgactcaccccaggtcacaggggggatcctaacccaaaactccaacaagggggccagtgcctgggaagtggtcatggtggtcagaggcagagccagggccaggcaggatgaacaagagcacagggtgccagactaagctccattcccagcacaaattccaaggcaaacagccttttgtatgcaaatatgccagagcctccagatactccctggccttgggctgaccttgggcaagtcaaggctatccaaagggcactggcacccacgcccccaggctgttgtgccagtagaaggggctcctcaggtagtaccaggccctgggcaggccttgctcaaacacaggagcaaaagtgctcatcaccccaacaccaaattagggactctggacattaggctgccagagtcaaactaaataaaccaaatccaccagcgccaggaacaagtctcagcgcccactttgctgagctgcggacctctgctcggtgaattagctccctgagccgcagtttccccaactgtgagaggaagccattctcctgccaccttcctgccagttccctggggctgcaggctgacagtgtgacctggtccagcccaccccactccgggcctcagcttcctcctgcgcagagccttagccccgcaacgcctgagacgcccagaaccctcaggcctaacgttcgtgggcagtggccgcggaagtaagcttttgggatatctgagacccagagttccggtttggttccgtttctaaaagggttagactttagaatcattcaaggagcaaggccagcattcgaaccccggagccttgggcacgggagcagacaactctttaagcacattcttgaattcaaacacttaaaagtaaaataaaaagcagcttctcttccttccaaaggcctctgagcctcctccgagacagccgaggcgatcccaagcctggctacagggtgacctcggacagccactcccctctcgcaggctcagtttctccatctgtaaagtggagctgcgctggtcaccaaggaatcgtgaagatgacacctccctcaggcgcagagagggctcccggctcccccctcccgcccccgcgccacccgcccgccaggtgaggccggtttcgacttccccgggaggggcgcggaggggcccggagcctgcggcgtggagaggcttggccggccgcgctgtccgcagacgcccgggaccaaggcgctgcggccactcgggaacgggcgcgcgggctgctgcgtgcagccgcctggtttcgaactgctcgctgccaggcttcggctccgctagggcgcctgctgggccggcggagggtcgaggaggttcgtcctcggggcagatcgttgctgtggcccccacccacggctgtgcggccccgcgaccccctcccctcggctttcccgtctgtgaaatgggcgcagagccccgcacgcggccactcggccccagccctcacctgtgcggttccctggggcaggcgtggtgaccccggcccgcccccggggcctcgccttgccacggagggtggcggccgcccagcgcatcctgcgcgctccgaggcgcttggcggggtctgccaggggagtgagcccggcttgtgggggcggggcctgggcctgggcctgggtgaggggcggggaggccccgccctccacgcccgcccaggggcggttccatgcaacttacagaccacgcccacacgttggactggggccgaggtccggccgggggctgtgggcgggggcccttggggagaccaaatacccagcgggccaaggcagccggctgagcggaaagtgttgctactccggggcgttgcacgcgtggctacctctgcccaacacccttcccccatcccttcctgttctcaccttcactcctagtgtggtttttccatgtgcttctgtgtttttattttttgagcaggattttgccttctcagggtgccggattcggccggtaccaaagggcaaacagcaaaacgcctccccggcccgcccctcccgtaacccactcacccccagagtcctgtgtggacccagccttctttccctgtctctcactgggccaggccgtctgaggcacactgaggtctgggtgcccttgttgtcttcggttctcactgaggggcccccggctgggggaaacaggatggaaagccctggggtctgtctgcagggcccaccacacctggaggcctcccttctcctggcttccccttcccacccagctccacttgcagcaggcccagagctgtgatccgggctctttctctccctctgaccccacccaacccaggcttagccccctgcccaggcagccaccaaagggttgggtgtggtgtcaggcctcagacatcctggatcttgggctgcttgtgggagaccacctgagccatgcctattcctgtggagctggcaaaggcaatcctggcagagggaacagcaggtgcaaaggccctggtttggcaatgtgtggcagcagaagcccagtgcggctggcttaggcatgcctccaggagcgcagaaggtggcccaggtgggccaggctggctctagagtgcctggcaggtgaccgtgaagagtgtggatgttcaggtggaccatgaagcagggttccagcagggcagcccctccccgtctctgctttccgagccctccaaagctgaggttcagtgtgaaacgtgaggggccctccccctttcgccatcagggttggcgtcacccctgatatgttcttcccacttggacttgtgggtcacacacgatggcttacttcaatctcctttattcaaaatcaagcatgtgtattctttctgccatgtcgggaagggcagggccatcagcagtgcccactccagaccacactctgggaccccagaatgtcttgccaagtggcccctagcccacctctcaggcctgtgtggtcccttccctggttttgcccaccatgcaccaccaggcagaaggccactgcctgtaggtgcatggacagggctgggagggaggtctggggcagccctccaatagctgggtggagctaggtggggatggaaaacaccaggctgcctgcagctccctaagccaccacgctgtgacccaggccttcaggagccttcaaatgctaaacacctggccatttaggaagtgtgtttcctagagctgtgtaacatagtaccccagactgggtgcctgagaacaacagaaatttattgtcttatggttcaggaggccagaagtctgagatcagggtgtcggcaggcctgcagtccctccaaaaactccaggagaacagccttccttgtatcatccagcttctggcagttccttggccggtggcaacttaactcctgtctacacatggtgctctccctgtgtctctctgtgttcaaatctctcttctaaggacaccagtcatattagattagagcccaccgtaatgtcctcatcttaacttaagaccctataaagagtctgtaaagaccggccaggctcagtggctcacgcctgtaatcccagcacattgggaggcagaggcaggtggatcataaggtcaggagtttgcgaccagcctggccaacatggtgaaaccctgtctct

SEQ ID NO: 588931 - DNA, 4001 bp, Homo sapiens
aaatgtgtatttgctaaaatgatgcctccatcacctcttaaattgacaaagatattaaaaagaatagtatgatattggtgaatatgtggcaaatttactgctgagatactctgctgatgagaatataaatttatacaaccctccaagggagaaatggacaatagtatcaagaagttacaaatgttcataacctttagttcaggaacttttatagaaattcttcctaaagatgtaaacagaggagtccacaaatatttatgttcacgataacttagtaaggaaaaatcctaagtgtccaacaataagtgattgttgcacgcaatggaatagtatgcagctaatgtagaacattttaattaggatataacaaacgaaaaatgtaggctacaaaacagcaagatattaaaagtatgaatggatgtacatactgggcaactgttcaacaacctgcaaacagtggcttttttaaagtgatgaaattttagggtttttttttcctctccctactttttgtttaattcagtccacaaacactggcttgctattatgtgttagatatttctatatgtttctttttcccccactgaatatggattaatttgtaatcagaaaaacagacacactttacaaaagtccgacatcccaaactgacttcctcttccagatattaaaaatctaataaaggattggagcaaaaataggaagggcacgaatcttacattgaaagcataacataactttaaaaagaattggggttaggtttatatcactccatgtcctacctttagaaacactttgtaaaccatgctcacctgtttcagcttggataccgtctgctcctacaaacgtgaatgtgattagcgtttcaaggatcccttcctaacagggtcctcgaagccgactatctaaggagcctgacatccctctaagcgttttaaaatccattatcccattggaacctccacaacaataataggcgggtagcgatgactctggttttgtggatggggacgcttgacttggggtggttatgccttgcccaggactgaaccccgggatagagacgggcaggcagcggtgggtcgaagggcccggggactagggcccgggtcgggaggggcgggcgccttaccgcggcttgctggaaggcgcccttggtgtaggtgccgccacctcggtaggagatggcagggatctcttggaggagcagcgcgcacttgtgctggcgcgcgcggcgggtggagatgtaatcgacgcgcggcaccacgtagttcttggacgagaaggtcacgatggccacgcgcgtggccgtgggcaccacggggaagtcggacagcagcttgcggacgaacatgagctcgctgcggaagttgacttcgcccacgctggacgaatcatccaccaggaagacaagctccaggcgctcgctgagctcccgcagcagccgcacgcgtcgccggaacgcctggcccagccgctccactctgctccccgccgcttcgtcgccaggagcgggcggcgcggggatactcccgggggccccgggcgcggtctcggggaagaggcggaagctgaaattgcgcgacggggacatctgctgaaaggtcgcccagcccgaaacgagcgccagaccccagcaacaaaaggccaggcgaggccacatcgcgctggagacagagcggctgccccggagcgcaggcggcggctcgggcgggaagaggcgctgggcggccggactcgcagaggggcgtgcgcggagctgggcgcggggcagcggccaagagcctcagcgccctttcatctgacactggggacagacacaatccagactcctcagcagctcgggaactccggagggaacggcgcgcgctctctacccctctcgctctcctctttttttcttccctctctcctcctcctctctctccctgaagcctataaaatgtttgaaggaaagggggcagtcaagaaaaatctcccgcttccctccttctctccctctctccctctccccgctcctgtctactttctgtatctgtgactctatctccctcctccccctctcattctcctcccgggatcaagccaaaggctcggagattccatgacaccagaaccccgcgtctgtcaggctgtcaacattcccgcagcaagcgcaccagcgccgaagccctgattgatcccatatgtctggcaggagctgcagaggaattcactggagatggatccagataccgagagtgccacagtaattggaaacactttgtagacgaaaacatacacgcggactggccagggagttgaaagcatcctttgaaaactgcttgctcaccttttgtgtttcttttcccccattcagtgtcccaaagccctcgccaaatagatgattgtacaattttcctgatggggatttctaatcagtggtgtgtgtgagcgtgcagattaagcccttaagggccccctcagatcacaccataaaggagttgcatctaaccttatgcgttccacaggaatgatttgtcatggtacttcagtcgtgcatttattcattcatctgtttgttcattctttcctgattttaacaaatattttttgaatacccattgtgtgccaggaactatgtgaggcactgcaaatataaggaacaaaaattgacagggattctatcctcaatgaacttaaagggtaacaagtgaggtgaccattaaccagatattaacatacaaaatatatgtaattacaagtgaccatgctaaataaaggagagcttaggtagacagacttgaccttggagaggccagagaagccttctctgaggacagaaagtttgtgctgaagtctgaagtgtaagtagggggtccccagtcccctttcatgtgttcttgatctatttcaacagataagatccacctggctttaagtggtacctggcatatatctgctttgaaacaagttgctacctggggtggtttttccaaagcaagacctccaaaggggagagcgcacgtgtaaagaaaaggtgcactttgcatgagggtggggcctttggttaaaagattccagctgggagtcaggaacaccgtgtaggtaagcctacggttatgtaaaccacctgaactgagtcacttccaatccttggctcagcatcagtatctatttcatgatggaattcagtgatctcagtttcctctgtttctaatagtgaatgatttaactccgtctgtatttaacaaaatactttcagtgacaagtatcacaatgtattgtgtaacatgttagggctctggcatcagttttcctggacgaaatcatgactctgccatttattagttgtacagccttgactcagtttgttcatttgtaaaatggagtaataacgataacatattaagggctgtcataaggattaagtcataaaaaagtaaaattcttaggacaatgcttggagcatagcgtgtactcaataaatgctggctggttgctcttattgccacctttaatcatgaatgttcttcaaattattttcctaacaatacttattgaccacctgctatgtgctggcatgttagatacggaggatttaaaggtgaataagactgagttccagtcctccagaagttcaaagaacattagaaaagaacatagatttgcaaacaattacaaagcagtagggtgactgcaaaagcagagaagaaagagcaaggaggagaaagatctcgttcttcctggggaatgagtaagacttcatttgagctgggacttttttaaaaaaaaaaaagtttttccaaatatcatctactctgtgttatttaaaacacatcatgaagccctttatgtgcaaagcaccgtggcatctgcaatgtgtgccatctcctgtgttccccacacaaaccaaggaggtactcaattgctttagaactcttgctgcaagtaagtggcacctaatgtctcctcatttaaacaaaaagggattttttggttagtataactaaactagggaa

SEQ ID NO: 588932 - DNA, 4001 bp, Homo sapiens
tttgtctctactgaaaatacaaaaaaattagccaggcgtcatggcacacaactgtggttccagctatttgggacgctgaggcaagaggatgggttgggcctgggaggcagaggttacagtgagcccagatcgcaccattgcactccagcccgggcgacagagtgcgactgtgtctcaaaaaaaaaaaaaaaaaaaaaagagaaggaatgaattagcatgaatgagaaaggcatgatctgcagtgagttaccgcatggtcaaagacagtggataccaacccacttgcagagagaagctcaatcagcccagtgcttttggcaaactatggctgccaccccgtcatcgtcatctgagctcactgtgagttgcccttcaggccctgcctctgaccctgccatctctggagagccctctttgcaagcccaagcctgggctccccatctcagaaccatgtgcatacttgtcctggaattatttttttgcctgtggctcctggagggcagggggctatctggcatacacctgcattgcagcagttgctaaatcaatgaacaaataccaagtctttcccgatctaacttcttttttgtttttgagacttgtctagctctgttgtccaggctggagtgcagtggtgcaatctcggcttactgcaacctccaccttccgggttcaagcaattctcctgcctcagcctcctgagtagttgggattacaggcctgcaccaccacgctcggctgatttttttgtatttttagtagagacagggtttcatcatgttgggcaggctggtcttgaactcctgacctcaaatgatctgcccgcctcagcctcccaaagtgctgggattacaggtgtgagccactgcacccggccctcacgatctaccttaagagtggtggtagttgtagtggcaactccatctgggggatgagagaaggagtaggctgcgttttgggggtggcttgccagcgaagaggagagactattagcaacgaaaggagtggccagggtgaacgccaagcattttcctgactggggagctatgggtttgtttaaaggcagggctgggtgaggggtgaaaagagcgaggaggagagatggctggtgctggactggagtgaaaggcatctgaggagccaggagacaggatggggagggagaggagttagcctaggacaggacaggataacacttctttgaagactggcgggcatgaggaaaggaaggggagggattcgggaatgacctggcggttctcagtcgactgggagaagatatggaagagggccaagcggggattggctgctgttgggatggggagtggggccgggagcgcacaagggaaggtcgaggatgggaaagggggtgtgggggaagaaatactcacaggggatcggaaggccccgcggcaacttcgggtaagtcttggttcagtcctagagaggaatccgaggggaaagtctgattggacccacagcccgctgtgaggacggggtactgtggggatgcgggaggaggagcagttgggaagtaggagcgccagggactggatccatctggaaagggggcagacacgctctcaggatcagggtagagaccctctaggaagggggcgttctgagacgggggttgtctggagcactggatgggagtctttggaggtgatttctgggaagggagagtctggggcagggctgtgaggagtcaggaaagaaactgtggagtccgttcctcgcccacctcctgagccctggggtccgaggcccccggatcagggggttcaatggcgcaagagggtccagcgcgggagtcggagagcgacctctcaggtgcaccgggccaggaactctgacccggagtgtgaactggcgcacagaaagctgcgcgcgcacccaaggaaagccggccccgcccctctcccgaggtgggcggggacagcggttgcgtgcgcagcttttgttgtgacgccacaggtccctctggccacgccgctgcatagccacgcccccttccgcttcatatttctcattgaccaatgggctttgatctttgaggccacgcccccattctgcgctccagtatcgccctggttacgcctcctctggctccgtcgcacagctgcgcggtggctgactgacttccgcagtggttgccgggatcgcgctgatgtggccccaaccccgcctccctccccgccccgcgatgtcggaagaaacccgacagagcaaattggccgcagcgaagaaaaaggtaaagtgcaccgggtcgcggccccccgacccagccccagccccactccgatggcaggaccatggccagagtctctgccactcctgaggcacaccgggctgggctccccacggcgcgtccgggctccctccaccaaagtcttgtcagccagccccgccccctcagccgcccagcccccgccctcgccagtcgcccccgggtgactttgggctggtgctcccggggctccccgctccagactcggccctcacctcctgccccccgaagtccgacctccctgggctctttgggctggcgtctccaaggacctaggaccccagcaattcagcccctgccctcgccagtgactttgggcccgtgactcccggggccccccgctccagactcgaccctcacctcctgccgccccaaaccggacctcccggggttctttggtctcgggtctccaaggacctgggtcctggccctgcggtcccctcccccatcgcggagcggcgacttggacgtcgcgctgatgttccccctaggagtggaatgtagtgacgtcacaatccccctcggaaccgtaattagttgcgcgagaccagtctttgatcttaggacccagtcccctaagtgttctcatcccgcttctggttcctctggtcacagcataaatttccagctggaaggggattggggactatgggacctaggagggagaggtttcaggctgccttacacccttaacatagacattgacagtgtgaaaagcctacacttcacccgtgaactgaaaacattggcagtatctctgggtggcaatgtgagaacgggattggtttggttttcccccaggcttctactctccagagagactttaacatttttttctgacttctccacctcatattcgaattctccatggttctgggaccagagtgcccttcagtggtctctggaatgagatctgcttatcttctgtggaacaggtcttgggaaactgaacttgacagcttgaatcttcctcatatcatctcaacctggggtacttggagtgccacaggataaatacggggcatctttctgaagcatcagtctccctttattctcttgagagagaaaaaacattaatgtacttagggatgacagtcacataaatttctaagagtataccagacttttctctgaaatgaggcttgggttgtcctctttctgttaaattcccaggttcaacagaaaggctgccttctgccatgtggatacattgatgtaaaagtttgagaggcattggtgcatttcttaacattaccaaacgtgtgaggatgtatgactctaaaccacacagtgtacagttcctgccgacttaatgttccggcccacattttaagatacatatttatttttagagagggggtgtcactgtgttgcccagtctgaccttgaactcctggccttaagtaatcctcctgccttagcctcccaggtagctgggactccaggcttgacttctccacctcatatttgaattctccttggtggagtggaatgtagtgatgtcgcagtccccctcggaaccgtaattagtgcgtgaaaccagcttttgatcttaggacccaatccctaagtgttctcatcccgtttctgggatgagaggtggaaaagtacctctgcctctggttttggcccctggcagctgctgatttgtggcaaaaccccagagcttggagtcagaagactgagtttaagttcaattcttgcctttttt

SEQ ID NO: 588933 - DNA, 4001 bp, Homo sapiens
acaatgtgctaaataagtgaagttctactaagaagtcttccattaaaaaaaagcagagagattagacctgcatttagaatattaaataggggcctaacaaagatcagggtgattcatttctaaagtgaaatctagcaataaaataacgtttctaccaatttcatctctcaggaaagataaagacctaaagtatacaccccatttttatcctagcttaaaactttctagttattaagactattataaaatcctattttatatttcacttcaaatacagaggcttaaaaaaaaatcttcccacaatccctcagtagaaaaatctcttttttcctagtgttcaaatccaaccttttcaaatccaaggtagaagagtaagaggataagacacaaatcaagtaatttgattataatctctcattcaaatacactttaaagtgcacttcaaatacaggggataatacaaatcaatttctgttttaatgcaagagttttctaaatacgttaaaacaaaagtgccgttcagaacaaaaatgatttgataaaataatttcaactgacaaagatttctcacttaaaacacttaataatttacatgtatttaagcctttttgagaaaatataattctatctatgcactgctcggactttcactggggagaaggaggacatcaatgtatttagttgcatttaattaaaatgctgcctgtgtgaaggcaatgaatttgtccctactaagacaaagaagtcagatggtagaatcaattccatttcttccaggaactcttagggattaaatggttcctttttttatttttaataccaagaatcagatatggcacaacatcttcaactcttttttttttttactacacgctgcaatgctttgaactctacttgagttcgactgaatctttgctaagtcaggcaaaactcaaaaaatattttgcaacactgtttccaacgtaaaaaaagattcaaactctcacttctccaattgtctttctagtccttgaacattccaacaaaagaatggattgcatttatatagtttttaggtgggcttaaggttttggagccacattgccaaaaacagacaaacagacaaaaagaaacacccttaactcttaactcaaatttacattttactacataaaactttcttgctctccaagttcattggctaagtaaattacttgacaatgaaaatgtatccacaagagtaattatgctaaattttagtagtggttcagaagggttgttgtttgaatgcaactgctgtttctttttgtagtaaaagatttgtctaagctcataagacgtctggacatttctactttgagtaactttgataaacactgcggcattttccagtggattcgtgtaaatggccaaaggaaaatgttctagctccaagatcgacttcctcgcgctgtgcctgatcccaatcccgcgtctcccgagggccgggccgcgaccgcactttccgcgctccctgggggcctgggcgccctggggtgcccgggtcactttccgcacggtctgacctccgtcccctccgcccaggcctgagcccctctctcccggcgcagcttctggatcccgagcgcgggtaggttcaggagcgaagctggcggaacccacctgtattttattcacatggtttcagcacttttacctcggccgatgaaggtagaacaagaaagggcatgaaagcagcgcgtcgttccccgtaacctcctctccttaccagaaagtcccggccgggtaggggacgcggccacacctacctgcgccaggtgaggcgagggcgggcgcagcgcggggccacccgctcctcctcgctctccagccgccgccggggtggcctcagccgccgggcccgcggctcttcctcattttgggcaacttccttaacgcgcccgggcaggcggcccgcacttcctcccagtgtcgcgccccgccgccctggcccgccctgctgaccgcgcccatgagcccggagctgggcgggaatcggctgaagcgccgggcgaggcccgcggaatcggcccaggcggcggcaggtgtagaggagcccgggtggggcgcgcctctctcctcccgccggacaagggcccttcgcaggcagagaaggtggggctgcccgggacatggaccgcatcggtccccctcctccccgccagcgcggtggcttctgtgactgcccaggacccacagacacccagcggccctttccttttgctatgcagtgccggggaagagactccactgcatggcatattccctggagtgtatcttggtcaccaaaccaacaagctccaagctactgtgctggagcactcgggaggcctgggcagtgctgagagggaccctgtaggtgaacaccagacttcacggcgcactagtgggcaatggggcacgctgcttctgaaggctttaattattacaaaaggctttgcttccttcttaccatgacggctctgacgtccacaaccaaataaattaaacctatagccctaagaatggttttgagatacccgcctgatacccttctcccaacccatcccccttttccttttggacattcctctttaaaatgttcccacaaaacggcatccagaccttcttgataacactggttggcagtgcctgttttaaaaagctttaccctaagccaaaatgcgagaagcaaaaaaatatatatataatgtgctggattgtaattgccatggagaaaatatagggatgggactatttacacttattggagcccccagccttttctgcttccagggttattggattttcattcatttttgccattattttttctaaacctgttaaaagaaaacttcagcagaattaaatttaaagcagtttaattgagtaatgaatgatttgcgaatggggcagcttccagaatcacagcggattcagagactccagggatgcctcatggtcagaacatatttatagacaaaaaaagggaagtgacatacagaaattggaggtaaggcagagaaacaactggattggttacaggttggcttttgccttctttgaacacagtttgaacactcagcagtgtatgaatggttgaagtatggccactgggattggccaagactcagctattgttaaaggcacatactcctaaattaggttttcaatcttgtctgcctattaagctaggttacagttcatccacaaggactcaaatatagaatacagagtccttctcagatcatacttaggttgctttaacaaacataaatggaagattttgataatggttatatttgcttatcattggacttaattttgcttcaactacccgaaaaaatagccattgttcctgagatggagcctgcagaatgtctacagatggttttcagagttgtcagcattattggagatgaacactaggggaccagtgtgtacaaagcaaacccagcctgcacaaagattgcagttttctcaggctttcacctgatggaaatgagggggaaattctagatccatctacaacctccttcctttacactgctgtgttcctttccccctttgagtcaccttccgcattacttagtatcatgtagtaattttttttttttttgagacggagcctcactctgttgcccaggctggagtacagtggcccgatcatctcagctcaccgcaagctctgcctcctgggctcacgccattctcctgcctcagcctcccgagtagctgggactataggcgcccgccaccatgcccggctaattttttgtatttttagtagagacggggtttcaccgtgttcgccaggatggtctcgatctcctgacctcgtgatctgcctgccttggcctcccaaaatgctgggattacaggcgtgagccaccatgcctagcctaaaagatggttcacattatgtatcatcagggaaatgcaaatgaagacagtaagatatcagtatggcccaaattcggaacactgaccgcagtgaacactag

SEQ ID NO: 588934 - DNA, 4001 bp, Homo sapiens
ttcagggcaccccaccctcaggctcccttctggaaagcagggttctgggcccacctcagacccagcaaatagggcatacggacaagaagggtaaattttaaacagcttcctaggtgatttttttttttttttgagacggagtcttattctgtcaccccagctggagtgcaatggcacgatctccactcactgcaacgtctgcctcctgggttcaagcaattctcctgcctcagcctcctgagtagctgggactacagcgcacaccaccacacccagctaattttttgtatttttagtagagacagggtttcactatgttggccaggctggtgtcaaactcctgacctcatgatccgcccacctcggcatcccaaagtgttgggattacaggcgtgagcctctgcgcctggcctgcttcccaggtgatttttaagcactctaatgtctgagaacctctgctataatctaatattgccctattcaagtgctacagtgtgacagggaggcaagttgaccacgttcagtgtgagcgaaagcaagttgccacttgccacgggtggggaagggagccagggaggacagtcaagtcaccgtgctgtgctggtgaccgggccaggctgcaggctcaacctgggagacatctctgcagttcttctccaccaggaagaagtacatgcctcatcatacaggtgtgctcagagaagggggaagggacgcacacgcaacgcacacacaattggtaattaaaaagagagctagcttttgtgaataattaacagaacactgggttgcaaccaaaattgccacttagcaatgtcccttgcatgctcttttgagcagaagaggacagggtggggttgcagccagcggtgtggggcgcatattgaccctgagtggggccaaggatgtctccccagtgaactgcaccatctaccatgtcccagggccacctcatcactcactcttctctggggaaaaacacaaacaaccaacaagatgctagaaaaaagaactcacgttgaatatgcctgatagatcttactatattgcttttatctgggcaaaccacatatggatgatgagaagggcagcgcagttgcaggctttccttgatcctgccctggtacccatcccaagatcctttcctactcagctgtgaaggcctgggcggggcgggggggggggcgggggtgaggccacagcagactgcaatgacaacagccggcagacctaacatctcttgtctgtgccttagtgccttgctgaagtttcccgctttcaggctctattttacttttccatcactaccttatgagcataatctttatggggatcctgcagctgctagagaaaccaaaacacctgacttaagcaaaaaggacacagtaaatgtggattaagaaatatctagagttttactgaatgtctatttaaaaaaaatcgctagcattctttttcctagccagttaaaaaataattgtgggtgactcaggactgcaagatattacaggagcttatgatggtctcctgagattttataattgtctttcataaacctgagacataaatatactcaatgcttaaagcaaagtggcataggttataggaaggagagaaggatgctttagctgcatcataactgcaggcaagacaagatggcaaaccgctaaaccttccagctcaagatggacatgtgctcagtggaagaatgttagcggcagaggagaggaaacgcagatgcaggcatgaaacctaagtatccctcctacagacacccacagatgcgcagagcctgaggttagggtttctaaatatgcttgattcccacaaatttgacctacctccctttcctggattcaaacgcagatctggaatcccaggcgctgggcagtatagaatgtgggaagggaagaagcacacaaatctgagaggagtatcttaaaaggaaaacagctgaaacagagagaaagcacaagacaggcatcaacaagccagagtgcttcctgctgctggacgatgtctgtaattagggaaatgggcttttcctcaaagtgtcagcatgcaaaacaaaccagaaagcagaagtgtgagatccccagcagcacggggcctcttttaattgcacattcaaaatgaagtaatgctctgagacatggatccctccagaacacacaccagttgaggagggagtcagtggacagggctgtgccatttagtgcttagccagcctggaaatgccctttcccaagtgtttttaccaaaaatgaacttggtcttgaattgctggaatgggtatagcgaggttttcctgattgttttatgtttttttaaaaagtcctacatcataacatgtatcaaattcaaccagaagattgaaccaaataggaagagcatccttgaaaagatcttaatggagacctcaagatgctaattgccagccaggagactgaaaaagtcaagcagagatggtcttaatggcggaaaggccaatgtgtagggcagaggaaagaagggtgccagctctctctgtccctgttcccaggcctcctggtcagacagctgctcatggtgctagcaacagatgcaactttacagagcacctctgaccagctccctcagggtacttttcaagcatctactaacattcccttactctgtgaagcaagcagctttttaatttcccactgcagtctgtgacatcctccacactcaagaagggccagaagctcagccagggcccactccacaaaaggccgtgaaacatccctggaaacgcaagataaaaaggaaccctctccagagctgtagaagctggaaggagtcatgttgatgagtttactggggtggggttaggagcctcgcgagggaagtgttcagaaacacaacagtaggcaatctgcacctgcaccccaaacttgtgaaaatgacagcttcatgaaaaacaagttctcattttatagaagataaacttcagccacagaagaggttggctgtacatctttagtgctggccagaatggccatgatgatgaaggtgatgaggataatgcaaaacagctattccatgagtacttgactcaaaggttatcaactgatgtgcacaacatccctaatggtagatactattgttatcctcaattcacagacctggtcatcgagcctcaggagggtcaactggcttgctgaagaacacacagtatgtggtggagccaatatttgaagcctgcctcttctcttagctaccatcttcaggtggcagtgcaaaggccctcatagtcaacccatccaaatgtaagcttggggctttcctgcctaacttggagctccttcttgttccctggagctgggttctcaatgtgcgtctctggaccagcaatgtcagcatcaccaggaaacatggaggatatgaaaattcttagggttccaccctgacctgccaaatcagaaactctggggtgaagctctaggttttgtattttaaaggctcaagtttgagaaccttggcccaagagctccatccatttatgaagatgaaaatccaagctctcttagatcattcccttctctacactgctgaaagtcaaccccttgccaatccctcccatctcacgtctcagcctcccacacatgcctacttgtctccaaaaccacataacatccttttcctccacatctcttttgagtagctctggctgtcagtgcccccaccttgctcccttcctacatgttctaagctgtggcccttttctctgctaaaaatcctccactgtccaggctaccctttgagctcaggataaacatgtccctgtccccacagtcaaaactaacatgctttccttttgtaccactgaccactgttttgacttaatttacctttactttctagcatgtgaatttttgatgaatgtctgtttgtcccataagggcagaaattgtatctgtttctagtaagacttgaaattgagtagtgtgagtcctccaactttgtcctttttagtgggt

SEQ ID NO: 588935 - DNA, 4001 bp, Homo sapiens
gaatattcatgttcttaaatgtaaaagtacagaaatattaatgcatggaattacaggattctctccagactatattggaatggcatgtaaccagcagggtcaacatgtatgtttacctttctaaattctgagcaatgtctttctcagttctgaaatttagattctaaattttaattccaaattctgaaaaagcttgaattccaaaatacgtcttggcacaagcatattggattataaccatgggcaaacaatgtgctaaataagtgaagttctactaagaagtcttccattaaaaaaaagcagagagattagacctgcatttagaatattaaataggggcctaacaaagatcagggtgattcatttctaaagtgaaatctagcaataaaataacgtttctaccaatttcatctctcaggaaagataaagacctaaagtatacaccccatttttatcctagcttaaaactttctagttattaagactattataaaatcctattttatatttcacttcaaatacagaggcttaaaaaaaaatcttcccacaatccctcagtagaaaaatctcttttttcctagtgttcaaatccaaccttttcaaatccaaggtagaagagtaagaggataagacacaaatcaagtaatttgattataatctctcattcaaatacactttaaagtgcacttcaaatacaggggataatacaaatcaatttctgttttaatgcaagagttttctaaatacgttaaaacaaaagtgccgttcagaacaaaaatgatttgataaaataatttcaactgacaaagatttctcacttaaaacacttaataatttacatgtatttaagcctttttgagaaaatataattctatctatgcactgctcggactttcactggggagaaggaggacatcaatgtatttagttgcatttaattaaaatgctgcctgtgtgaaggcaatgaatttgtccctactaagacaaagaagtcagatggtagaatcaattccatttcttccaggaactcttagggattaaatggttcctttttttatttttaataccaagaatcagatatggcacaacatcttcaactcttttttttttttactacacgctgcaatgctttgaactctacttgagttcgactgaatctttgctaagtcaggcaaaactcaaaaaatattttgcaacactgtttccaacgtaaaaaaagattcaaactctcacttctccaattgtctttctagtccttgaacattccaacaaaagaatggattgcatttatatagtttttaggtgggcttaaggttttggagccacattgccaaaaacagacaaacagacaaaaagaaacacccttaactcttaactcaaatttacattttactacataaaactttcttgctctccaagttcattggctaagtaaattacttgacaatgaaaatgtatccacaagagtaattatgctaaattttagtagtggttcagaagggttgttgtttgaatgcaactgctgtttctttttgtagtaaaagatttgtctaagctcataagacgtctggacatttctactttgagtaactttgataaacactgcggcattttccagtggattcgtgtaaatggccaaaggaaaatgttctagctccaagatcgacttcctcgcgctgtgcctgatcccaatcccgcgtctcccgagggccgggccgcgaccgcactttccgcgctccctgggggcctgggcgccctggggtgcccgggtcactttccgcacggtctgacctccgtcccctccgcccaggcctgagcccctctctcccggcgcagcttctggatcccgagcgcgggtaggttcaggagcgaagctggcggaacccacctgtattttattcacatggtttcagcacttttacctcggccgatgaaggtagaacaagaaagggcatgaaagcagcgcgtcgttccccgtaacctcctctccttaccagaaagtcccggccgggtaggggacgcggccacacctacctgcgccaggtgaggcgagggcgggcgcagcgcggggccacccgctcctcctcgctctccagccgccgccggggtggcctcagccgccgggcccgcggctcttcctcattttgggcaacttccttaacgcgcccgggcaggcggcccgcacttcctcccagtgtcgcgccccgccgccctggcccgccctgctgaccgcgcccatgagcccggagctgggcgggaatcggctgaagcgccgggcgaggcccgcggaatcggcccaggcggcggcaggtgtagaggagcccgggtggggcgcgcctctctcctcccgccggacaagggcccttcgcaggcagagaaggtggggctgcccgggacatggaccgcatcggtccccctcctccccgccagcgcggtggcttctgtgactgcccaggacccacagacacccagcggccctttccttttgctatgcagtgccggggaagagactccactgcatggcatattccctggagtgtatcttggtcaccaaaccaacaagctccaagctactgtgctggagcactcgggaggcctgggcagtgctgagagggaccctgtaggtgaacaccagacttcacggcgcactagtgggcaatggggcacgctgcttctgaaggctttaattattacaaaaggctttgcttccttcttaccatgacggctctgacgtccacaaccaaataaattaaacctatagccctaagaatggttttgagatacccgcctgatacccttctcccaacccatcccccttttccttttggacattcctctttaaaatgttcccacaaaacggcatccagaccttcttgataacactggttggcagtgcctgttttaaaaagctttaccctaagccaaaatgcgagaagcaaaaaaatatatatataatgtgctggattgtaattgccatggagaaaatatagggatgggactatttacacttattggagcccccagccttttctgcttccagggttattggattttcattcatttttgccattattttttctaaacctgttaaaagaaaacttcagcagaattaaatttaaagcagtttaattgagtaatgaatgatttgcgaatggggcagcttccagaatcacagcggattcagagactccagggatgcctcatggtcagaacatatttatagacaaaaaaagggaagtgacatacagaaattggaggtaaggcagagaaacaactggattggttacaggttggcttttgccttctttgaacacagtttgaacactcagcagtgtatgaatggttgaagtatggccactgggattggccaagactcagctattgttaaaggcacatactcctaaattaggttttcaatcttgtctgcctattaagctaggttacagttcatccacaaggactcaaatatagaatacagagtccttctcagatcatacttaggttgctttaacaaacataaatggaagattttgataatggttatatttgcttatcattggacttaattttgcttcaactacccgaaaaaatagccattgttcctgagatggagcctgcagaatgtctacagatggttttcagagttgtcagcattattggagatgaacactaggggaccagtgtgtacaaagcaaacccagcctgcacaaagattgcagttttctcaggctttcacctgatggaaatgagggggaaattctagatccatctacaacctccttcctttacactgctgtgttcctttccccctttgagtcaccttccgcattacttagtatcatgtagtaattttttttttttttgagacggagcctcactctgttgcccaggctggagtacagtggcccgatcatctcagctcaccgcaagctctgcctcctgggctcacgccattctcctgcctcagcctcccgagtagctgggactataggcgcccgcca

SEQ ID NO: 588936 - DNA, 4001 bp, Homo sapiens
gggcgatggaactgccggattttgatgggccccatgtgggtgggaaagaagggctgccataattccatagcaggaattgaatgctggataatattccctccaaaggtgccccgaagaccctgttgcttggggaaataatactcatcattggagagattccatggatctttcacttctggctgagacatgttctgctgtggttcctccctgatgacacctgttttgcccaagagaattcgactcttcttcagagatgattccttcttactctccttggagggggagttagaggtggcctcttccttctcatcaggaatttccaaaatgaggttctcatcattgggatcaagtgccaaaacaggaggttccaacagccggggcatggcctgagcatcccaaatgatattgtcctcccagcgtccatacaccagatcctcattgtcaatgggaaaaatggagtaccaaggtttgtcatcatccagagtgggtgcaaaaccttgctgaacattgtaagccattacattcctagtcttaatagaaggaagccagcctgccaggcttgcaccctgaggttttgtccctttgtgtttgatatcctccccatcccagatgatagaatcctcccaatgcagctgtgtcaccatcaggaagttttcgtcagccagaagatcagtgccattgctttcctcaagtttcctaaattcctccatcattctagattttatcacaggttcatgttgtgtctttctcagtttgaagccatagtcaaacccactgccatcttcggagacacccagcatatcataccacagtcgggcaggcccataacgccactcagccactcttggtttggtatctgtcactttatctacatctccagttgattgggaaaatttggactccacaggaaccatcatcgtgatttcatcatcagcgagacactgctctgggggtggtggtggagcatagtcatagttccacaaagacttctggctgacttctgattctactgagcattccacctcctggatctgctcttcctgtatcagctcacgatgcttcttcctctttctccgagcactccgccaaacagatgggacattcttccctggtccaaaaagatgtaggaagcgtaacacttttccaggtcgaaattctggaaaaagttcggtgacacttggcaacagcttggtggcatcatgctgcataatcccagccaatggaagggtcagctttccatcctcagattctgcctgtgttgcttcctgaggtcccatctcagattctgaatcagagtaactactgaaatccactttctctgaggccaaaaaggaaggggcaatgatggagggcaagatgatgtcttctccactttcagacacacaggtaatagcatcttggtccttatccttcttcattggtcccgggggtggaggtggaggaggcatcaacttgcaatcaatgtcttcacaatcagcatcatagtcatcttcatcataatccgagtggtaaaggggctgcaagctccccatcgtctgctggtgtctttggctttcatcttctgccacctcattgatgtctgaatagtctacagcatcttctgtactcctaatccacccttcatcatttaccaaggcaccgccagtcccagtcaattcttcatttgccgtgagttcagtgattaggctgcccagccccaaagcccccaagcctgccaagtgcttcttacactcatcatccaagacgctttccccctccagctgccccgctccactgatgttgccgaaaaggatacccgctaaagtaaatgggccacctccagatgaatcttcctcgctgtccgagtctgacatgatggcggcagtgacggtagctgctgccctcagcagcaaatcgcagccgggtcgcataaaccggaaataaaacaacagtcgcccggaagtgatctacttagctcccttaccctaccagcgtctaccggaagctgaataaaggcggggggagggggcaaaggggcggggggaaaaacccgcaaaacttttttttttttttttttttgagacggagtctcgcaacgtcgcccaggctggagtgcagtggcgcgatcttggctcactgcaagctctgccttctgggttcacgccattctcctgcctcagcctcctgagtagctgggactacaggcgctcgccaccacgcctggctaatttttttttttttgtattttcagtagagacggggtttcaccatgttagcctctcgatctcctgacctcgtgaaccgcctgcctcggcctcccaaagtgctgggattacaggcgtaagccaccgcgcccagcctgtttgctggtttttgagacaaagtcttgctctgtcgccccaggctggcgtgcagtggcacaatctcggctcactgaaacctccacctcaggagttcaagagattcctgcctcagcctccacagtagctgggattacaggcatgagccaccatgcctggctaattttttgtatttttagtggagacaagatttcaccatattggccaggctagtcttaaactcctgacctcagatggtcagcccgtctctgtctccgaaagtgctgggattacaggcgtgagccactgcacccagcctctgtaaatctctttatacatgaactgcatatgtatgcttctccaaataatctatagcattgtcatgctttacaattttgtataaaaggcatcttactgtgtgtactcgttttttttttcccccttccttttttttaagagatgggatctcactatgttagccaagctggtcttaaactcctcctggcctcaagcaatcctcccactttggcctcccaaagtgctgagattacaggcaagagccaccaaacccgaccttactgtatgtactcttagccagaatgttttctggataaaatttatgtttatgatattcaactatgttgatgcattcaattctatttttatagctctatagtgttctacagtatggttatgctacaatttatctatgttcctatgtttgttcatttaaattgttcccaaattgttcctcttataaataatgtatatgattccttgagcatatgtaggacacattctccagggtatacatctaggagtggaattactagattttacaatatatgctttttcaactacacttgctattactaaattgttctccaaagtagttgtaccattttacatacctaacagcagtgtataaaagttctcacctctccacatccattctaacacttagcattgtcatttgttaatttttgttcatttctaataaatgtataatgataatgtggttttaatttgtatttttctgattgctactgaaggctaacttttcatacacttattgaccaactgtttttcctcttctgtcaattgccttttcatatatttttatctaatttttatagtatctttaggttatctgtcttttctttaatgtataacagttcttcatatattatggatttgcttgcaaataacttccccagtctgtgacatgtcttttaatctattttaatggtgtctttaatatatattttaaaatttcaatcttatcaaatttttcctttatgctttttttttttttttgagacagtcttgctctgttgcccaggctggagtgcagtggcgcgatcttggctcactgcaacctctgtctccaggttcaagtgattcttctgcctcagcctccccaagtagctgggactagtctagtcaactgtcttaatgattttcacaatttgattgcagattatcttgggtggttgtttatgtaatcctctataagtaatcatatttaaagtgttattatttatcattctatttttaaatactatcaattgtgtatgcatgtttttatctcttccttttagataaccaatagtatttacttttccaccttgcttttcttgcttaaaaatatatcttggagattactctgtagtagtttataaa

SEQ ID NO: 588937 - DNA, 4001 bp, Homo sapiens
tggattctgccagatccgtgctatttcactgacttgttgggtaccaggcctccaagcctaagactaagcttgatcacccttgatcaaatacatctcatttttcaaaaccaactttaaaatctgttctgagggaagcatatgctactcattcatctgagatctattatgagaaacttttttctttttgagaaggctaatgtgccatagcaaagaagacaaattacaaattcattagttcattagcgtctggtattacatttctattgtttactctaaatgttttgtttaaactaagctctctgttaaatgagtcattaaatggtaatgtttggattttcataattataattgaattttacaggtcttgaatcagcaggagttcaggctgagtgaaacgttttaatgcatgacatgtgaagtgaaggctttagctaacttatttcagctaactgtttttcgtaagaaaactacgagccctaacacataaattatccagttgtttcgtctcacagatataatccactatttgcctttagaagtcacatatgtacaaatggctcagcacaagtagcacctcacacttctacagagttgaaaggacacagaactgttccacatatctctgctgcattcctgtaatccccacaccttagtgggcggggggcggggggtgtcttttctccacagatttttcccgcaagtctcccaggttggtttctgcaggggttatctttctattcatcaatcttaagatttattttgttcacctttgatcaaatgcatctcatttttcaaaaccatctttaaaatctgttctgagggaagcatatgctgctactcattcatctgagatccattatgagaaaactttttttgttattgttgtttttgagagcgagtcttgctccgttgcccaggctggagtgcagtggcatgatcttgggtcactgcaacctccccctcccgggttcaagcgattctcgtgcctcagcctcctgagtatctgggattacaggtgcgcactaccacacctggctcatttttgtatttgtagtagagacggagtttcaccatgttggccaggctggtctcaaactcctgacctcaggtgatctgcccatctcagcctcccaaagtgctgggattacaggcgtgagccaccgtgcccggcccatcaatcttaagatttattttgttcacccttgatcaaatctcatttttcaaaacaaactttaaaatatgttctgaaggaagcatattctacttattcatctgagatccattatgagaaaacttctttcttataactgaagacattgagtataaacagtgattttcagcctttttttttttttatttagaattttttctccaaaagtcttatgcagaacctggatttaaaataggcagaggtaggccgctctacctgacatccctggggggtggcggcccacaagtgacattcctcatggcttctttcagctccctgcagctgtctctgagccacctcccaggaagctagaattcatgcttcacgagttatcatcaggtcaactctggaacatgcaaaagtctgtccacaggcagtgatttctgggcaagtgctgccctgggagatgacagccagagccacactaaggaatgtggtggcttggaccaggtgaaggaacctggtagttctcaagcagagttctgtcctccaggcctggcaggtggggtccttgagggaagagccccagaatgttcccctgagcagccactcccgtttgttgcaggctttgctcccccaagaccttgaccaagaagttgatatacctcattgccaggcgaagcgtttcatttttgctcagctttttgtctggagggtgagtggggatgagcttcctcagcttggcaaaggcgctgttgacattctgctgcctccaccgctccctggtatttgtgaagatcttcctggtcatgtttgagttcctgagatggaaagagaaagggccctcagggccaatatcttataagaggcctgattggtatcacatgtcctgccaagaacctgagatgttagattttctcgactcagagcttacgagattcatttcctcattttcaggtttttaaaaaagaaaacaaccccacagggacacaaacatatgcctctcacctttcgaggcatcagtgacgctatgaattatgcataatttctttttttaacttaaaaacaacaggggaaggtaagaacaacacccttcagctttttctctctggctgttttgaagcctccagttgaaagattgctttgtcccaatactcctgtttcttcctttataaccaactcttcctaattgttcagaatcaggtacaatattgattgagtttatgtataaatgcaacatatgtttggccaatagaaagtttgttttttgttttttgtttttttctttttttgagatggagtctcactctgtcacccagactggagtgccatggcaccatctcagctcactgcaacctccagctcccgggtttgagcgattctcctgcctcagtctccggagtagctgggactataggcgcctgccaccacgcctggctagtttttatatttttagtagagatggggtttcaccatgttggccagcctggtcttaaactcctgatctcaggtgatccacccgcctcggcctcccaaagtgctgggattgcaagcgtgagtcacgatgcccggccaccaacagagagttgaatatgaatcaacaatgtattatcagaatgaagtaaaaaaagaaaatgattgtaggtttcgttaataaaataaaatttggaatagagaagacaatacagctctcttgttagctggcagacctcacctggaggattcagcccctctctgtaagaactaaaatatccagactggactatatttagaggagcaggaacagaatgatgaagggtcttgaaaccctggtgtatgaagaacagaagtgggggtatttagtctcgcaaaaatgaaaagacaaggggcaggtgggagtggtgatttggcgtggattctgtagaagatacttgggcctctttggggctgcattggatgacctttccaagtctaggagagtggtttatcatcacatactgccgagcattatgcaggcatttttcactcttagaggcaagagtcccttttttcaagtggcttggattaacatgtgctaataggaacacttgggaggcactggcaaacaagcccaagtctagccccaggcagtttgatgttcttggcttactgctattggtctgctgcctgctccacgctcagctcctctgggcactgggccctttctagttcctccgaagactcatgaatattcccaactctacactttcgcacattgtcattttctgttccttgaatttcctccccactctctacttacctatttctttaaacagcaggtgagatcttccctttccaagccctgactctacaggagtcttcacgtaactcagccatcagtggaaccatatgcatggtggtcaagagcacaggctccaaggccagaaccccggtttggctgttggttatactcaccctagctgtgtgacgagcaatctacttaacctctctgtgtttcaaatgcctcataagtaaagatcagtacaggagtactgcatcattgtgaggacacatgaaatgatacacataaagcaccttagctcagtgtctagtgcatattaaaggctcaataaatatttaatgattggcgggactcagtggctcacacccgtaatcccagcgctttgggaggccaagtcggggggggggggggtggcagatcacctgaggtcaggagttcacgaccagcctggccaacacggtgaaattccatctctactaaaaatgcaaaaattagcagggcgtggtggcgcacgcctgtagtcagagccaatcaggaggttgagacagaagaatcacttgaacccaggaggtggaggttgcagtgagtcga

SEQ ID NO: 588938 - DNA, 4001 bp, Homo sapiens
gggattacaggcaagtgccaccaagcccagctacttttttatatttttagtagagactaggtttcaccatgttggccaggctgttctcgaactcctgacctcaggtgatccacctgccttggcctcccaaaatgttgggattacaggcatgagccacggcacccggccagaagttcttgctggcaaagttacaagggcaaaaaagtgacaagaagctatgcagaacacgttgggatattttttaaaacaggcaaaaagagagttatctttgtgctcattggggcaaagtctaacacagcaggatcagctccttaaagtcagtgtcccaaggctacccattttaccactagccaaggtttagttcaggcagcttagaccccaagccagggagagaacaaggaacaaccctgcagttaaccaaactcaccaacacaggaagctagctaaggaatgaggaaagactgtcctgggctcaaaaggtcccaactctcattctccaggcttcagtcctgtcctgttactctcaggaatctggcacctcctgcggaaagcttaggaaagcttagggcatgctaagtgtggccactgcccctctgggaaacccctccaagctcaaggcagtcactgcctgttcagctctacagaatctggaaaaggccccaagagtctgtgtgtaatttccttccaaggccccagcccccagcagctgggccccagagctgaccaggtgtggcctccccctgtattctagccacagggctgctgtagggaaaccgtgaaaatacagaatggcttcttaccactaaagctgagttcccgcagcttttccaatgcaattgagggctccttcaggacatcctggaaatctgcaattctggaaggggagatagggcggcaaatgaagcatgctgatatcggctcagtgagacccacagccctcagctccctcacactgccagtttccaacctgtgcctctctcccctttaggacataaaaatcacacagcttagtcaaggtcctcaccaaagacagctttggagaacaacaaaactatatttcacttcttcctctacaaccagaaacacagaatgccagggaagaaacttgagagatattcttgtctagaagttcccaaatgaggaccataaaattagacatattccaacattctaatacttagtgagctgacatttactgggcacttcctgccggccaggccgggtccacgcacagccaccaactgaactccttggacctcaggaaccaggagtaatttgatatgcagacaatggaccatgctcacaaatataaccattacaagacctctgggcctgccagaaggcaaggacaaagggtttaaaaaacacgtcctgaaggaaaactgaagagtgagcaaaattcagccaatgctgcaggatctggcctgggggaggggccagactggagaatgcaagttctctagcaatcctagtaagaaaaaggcacgggggacagggtgcacttggagagagtacgggagcagggggatcaaaagggggaaaggcacgggggcggggcatgggggtctggatgaggaagactcaggggaagggggacaccaggggtccaggatgagggaggcagaagcagtgacatcaggggcaggagaagggccgcccctccgtcgttcctgcagcccacaggcaatgaggttagaaggtggacgctcgagaccctctgccgagggggtctgccgattcctggccacacccgcgcttcccccttctgaggggcagaaggggcagcctggccaggagtggcccagccgggtcaggccccatggccccttaccggctcttgtgcagacttgacatggtgttgacttccggaccccccagccgcctccgccgcctgcgcctctgccgcctgcgctgccgccgccgccgccgccccccagggacgcggggctctgcgcaaaagcctccggcgggaaacacagccactagcctgcgcgttccaccgcctcagccccgccccgccccgccagtcacgtgccacccctcgactctcacgcttccacacggtactggcggctacggccggccgggttgagcggggcaacctcgggtctggtgggcgtggcaatcgcgggccgggagccccagcgccgccgaccctgcgggccaaatttgagaacccgccggtgacagcgcagactgtgtgtctctggactattccttgcgcttccctgggcctcagtgtctacttacgcaatatacctgtcaccctgtcgtcttccctgcactcacccccctgtaattaactactgcatgattgttacaggagtctcggcctcccctgctaaactgttcaggccccccagcttatcttggtctctgcagaatcctcaaggcctgtatagcagggactcgcatgaaccgccgtgcgcggcccaactttttttttttttataaaaactataccagcaaaccctataaaatgtaagttaggaagaaagaaaaaaacacaaatgatatcttaagaaaaataggctggaccgggcgcggtggctcatccctgtaaattccagtgctttgggaggacgaggcaggcagaccacttgaggtcaggagttggagaccactctggccaacacggtgaaaccccgtctctaccaaaaatgcaaaaattagccgggcgtggtggcaggcgcctgtaatcccagctcctcgagattaccttctttacaaaagatgtaaaaattagttgagtaggccgggcgtggtggctcacgcctgtaatcccagcactttgggaggctgaagcgggcagatcaccaggtcaggaatttgagaacagcctaaccaacatggtgaaacctcgtctctactaaaaatacaaaaattagccgggtgtggtgacgcacaactgtaatcccagctactcaggaagctgaggcaggagaattgcttgaacccgggaggcggagcttgcagtgagccgagatagtgccaccgcactccaatagcgccaccgcactccaacctgggcaaaaacgcaagaccctgtcaaaaaaaaaaaaaaaagaaaagaaaagaaaagaaactgcttaaagattttccgaaatggttgtattatttaacacctttttcttgagaaaaaaaaaaaaagaaagaaacagctagccaggcgcggtggctcacgcctgtaatcccagcactttgggaggccaaggagggcggatcatgaggtcaggagatcgagaccatcctgtctaacacggtgaaaccccatctctactaaaaaatacaaagaaaaaaattagccgggcgtggtggtgggtgcctgtagtcccagctactcgggaggctgaggcaggagaatggcatgaacctgggaggcagagcttgcagtgagtggagattgcacgactgcactccagcctgggcgaaagagcgacactctatctcaaaaaaaaaaaaagaaaaagaaaaagaaaagaaagtgcttaaatattttccaaaatggttgtattatttaacacctaccccagcagtatatgagagttgctgttgtaccacgtcctcaccaatacttgatgtggtcagtctttttaatcttagacattctagtagatgtgaagtggtatctcctgctttaacatgcatttccctaaagacatatgatgttgagcatctcttcacacgtttgctatgcatatatactcttctttcttttttttgagacatggtctcactctgtcaccccaggctggagtgcagtggcgcaatctcagttcactgcaacctctgcctactgagtagctgggactacaggcgcatgccaccatgcccagctgatttttgtattttgaggtagagatagggtttcatcatgttggccaggctggtctcaaactcctgacctcaagtgtctgcccacctcaggcctcccaaagtgctgggattacaggcatgagctaccatgcctggccttcttttttttttttcttgagacggaa

SEQ ID NO: 588939 - DNA, 4001 bp, Homo sapiens
ttctggctagccccttccacttggtggaactgactcctcctgtcaccacaccttcttgcacagacttatcacatgtctctacagaacatttcagggtgcatgcaggttctccctcagtctctcccaccagactttaagctgtcagagaaccaggggtgggggtgcattagctccacaccccgccaagcgcagagccaggaacaatggaatactattataaagaccatgtgttgaagaccctgcatacagcagtcaacctgtggaagagacacatagacccgggaaccacatgacctcgaaaatgccttccctggccagggattcctgagtttcattattttaaccaagtcccccagcctggtcacccgccaagtccagtcagtaaaggagaactgaacacgtgggcatccacagatacccacttagctggagttggggttggaggggtggacagatggggatggggtggggaaggctatctcctggcacattcttctctgatgcccatagaacacttagcccagatctgtctttccaattaagttatgggacacctcctcttgacattagcactctgaccttggttccatcaccttgtgtgtgcatgtgtgcttatgcaacaaaaaattattaagtactccactaggtaccaggctgtattctaggtgatgcaattaattcaacaatttgtacatgcctgtgatgtgtcaaatgcttacaaaccacctaggttctgagaggttaagtaacttgtccagggtcacacagctagtaagtagcaaatgtacaatttgaatccaagcccgtctgatttcaaagaatgtggcctttctactgctttaggctttctcagttacacatgatgataaaacctaccccttgctgctgataggaaaacaggtttaagcatgcctagatgaacaatctaggctgatcagtgaaacctaagtgtttattttcctaatccctgccagtctcttctcagcattcactgaccttggccaaaatatcaagaaacgggaatcagaatcctggccttgagagaggattgcaaagaccatattttgacttacttaggtcccaggtaagaaagttaaggtaactgcactgtcaggcacacccaaaagtaaaagttttgattcagcactgagaggtagaaagactatgggattccaagctaccctactctctagacgcatggacctcgagccagtcctttcatctccctctgactcagtttcttgatccgtaaaatgggtctgtcttccctgccttgtgggaacccaatgaggaaatgggtgggaatgcactttgcaaagcacaaagttcttggaactgtcgtcaccgacactccaaatttactgtgtccacctcacactcgcgcccagccttgccctgcgaaaaggggacctcacgccgctggaaaggagaaagtcgttgcaggaatttaccttcagggtaataacccggctgggagtcttgatttcgaagatcccctcctcagcgtccgccttacagtcaaacactgcactggagaggtcgatgctgtccaagggattggcatcctgagcggtccgcgagtaatacagctgacatttcctttcgtcgtagaagaaccagcgggatttccagccccggatgggccctttgccgccgaacttacttaaatacccacagagtttcttggggaccgcctccagggaccgggcgcagtcccccgattcttcctccggaggcggcacctgtggatccctggcagactcttcggacccaggggcagaggagctggactccggggcgttctccccagcgccctccatcgctgccagccggagactgcggagggacgaggggtccgcgggaccaccagggacaaatctcggagactcggcgggcagcttcccaaagggagacacctgggcgggggcggggccgacggcgaacccgcccccaggaagccacagagtcgggaccgggtgcggtgcgcgcgcctcaaagatcgcaaacccaggttacggcggctggccacgcccctccaccgccaggccacgcccccgcagcgctcagtcggctccctgcaaagcccagctgcttccggctttttctccgcgccagtcagccatctttactgagggcagccgtgctccctggcttcaggttaaaggcgtggtggcactgagttaggttaaccgcgggcagagaagcctgtccctagctacacttccctggtagttcgcatagtcacctagaaagatagtgctttcttgcacccgatgggctgcttgttccctccctgtgccgcgcggggcaccctcggacggcgcatctcgcggccattggctgaaaggaagaccgctgggaggcccatcttccggcgtcgcccgggcagcgcggctccggagctgtctgccactcttctcctggtgttccttcagccccgtcagtgacgccgcggacggccttcttatccctcgcctgacagcagtggcctccccagctctctgtcctggctcctattcgcctcctgacagcgctggttgtgttgcttggggcgcccaggcgcggccgctgcgctgcggaaacccatgccactcctgggtcatagttgggtgcagtacatttatttttattttgttattgctattattatttttagagacggtctggctctgtcacccaggctggagtgcagtggcgcgatcagagctcactgcagtctccgcctcccggtctcaagccatcctcccgcctcagtctcccgagtagctgagaccgcaactgcgcaccaccacacccggctaatttttaaattgttttttgcagagaggggggtcttgaactcctggcctcaagcgattctcctgcctcggcctcctaaagtgctggaattacaggcgagagccaccgcgccaggctgttttgtaaataagtaaaagaatttagggtttgactaacttgctcaacttctgcctcattttacctgtttccccttaaacttctccccttccctcctaaggcgcatttctccattagggttgcggagcccaattgcgtccagctttctttaggagcttctttctgcctttctcttgccctttgttcagcctttcctcttacttcatcgtctccccctcagccgtcgttaacgagaccctcatgcacactcagtgatattgacaagaagcagggtgggggtaaaggcgagggctctagagtctatttgcataattttcagattcccactctgcaatactgagtgatttgctcaacctaaaaatggagataacacttcttcctacccacccccgacccgccgccagacaactttacggtgaagctaatgaaatttatgttcacttgcatgggtcgctgggatttgtagtctaacaggtggggagttgcaaccagggagcatttctcctaaatgccagagagctcttcatttgttataatttacaatttattttctcattctaaataaccatcgtcatacctaattttgtgttcataattttgtaattttttaaaaatcagaaggcccttaatgctgtttaattccagtccccacaaaacctggatctacacctgtctacccttagagttgttttgataattaaataaaataatatgtgtgaagctcttagtacagaatgtgggacaaaatatttcttttcttttcgagacagagtttcgctcttgttgcgcaggctggagtgcaatggcgcgatctcggctcaccgtgacctccgcctcccggattcaagcgattctcctgccaccgcacccagccagtttcttttcttttctttttttttaatttttttttttttttttttttttgatacagagtctcgctctgtcgcccaagctggagtgcagtggcatgctctccaattcccattctcctgcctcagcctcccgagtagctgggattacatacacgcgtcaccatacccagctaatttttgtatttttagttgagacggggtttcaccatgttg

SEQ ID NO: 588940 - DNA, 4001 bp, Homo sapiens
gggacagtgaaaatccactcatagcactgccatgatctctgggccaccccgaatcctatctcatcctggggtggcagcaggggaacaattctgttgcacccttgcccggtcgccatctccaaacacttgccgggcaccagctccaagccatcctctgtgcctgttcttctacctatcccacctggtgcccacctctgttgcctgggctgcttcctgagtcccatcgttaacacctgtttcagggattccttttttttttttttcctgagagagtctcgctctgtcatccaagctggagtgcagtggcatgatcttggctcactgcaacctctacctccggggttcaaatgattctcgtgcctcagcctcctgagtagctgggattacaggtgtgcaccaccacgcccagctaatttttgtatttttggtagaggcggggcttcaccatgttgcccaggctggtcttgaactctagccccaagggatccacctgcctcggcctcccaaagcgctgggattacaggcctgtgccaccgcacctggccccttctcagggatttctgctgctgattccaaacaatctccctacttccaggcccaccttctcaagcccaccctcctgagcagtcacagcagtcttcttggaacaggaacagaagtctgattgaggacttctccactcagaatccttcagctccccagtttccttggagtaaattccaaactcctcaactccagcctcatgtctcactctccctagccctgccccccacctctcagaccacacgtctttactatgctgtctcttttcctggaaggtccttctccactgcttgcctggataacattaactcatccttaggactcaattcagaaggtacctcctccaggaagccctccctgactttccttcctccctttgggcccccaagaatcccacaagtccaagtgcatctttttttttttttgagacagagtcttgctctgttgcccaggctggagtgcagtggcgcaatctcggctcactgcaagctccgcctcccaggttcacgccattctcctgcctcagcctcccgggtggccgggactgcaggcgcccgccaccatgcccggctaatttttttttgtatatttagtagagatggggtttcaccgtgttggccaggatggtctcaatctcctgaccttgtgatccacccgcctcggcctcctaaagtgctgggattacaggtgtgagccaccacgcctggccccaagtacatcttgattgggttacactccctcactagtctataccctccttgtaggcaggaaccagccttattggtcttgatgtccctaccccacagctactcagtgaacgctgcggaacaaatgactcaatcccccgaccacaggggtctggagaagaacctgatatgggccctgctcacaaggggtcagttcagagggagaggggcagacaggaaatgaggagagtgagacggagtgggcagcatggggaccagcagaggggccagggatggagacggctggaatagggccccaccccgcaccttcgtcagaagggccttctccttctcagccacctttctccagatctttgtgacctggtggatctcggagttgaggaagcagttctgggtccggtaagcttccatgtcatcctggagaagagagtaaaatatgttatcagttggacataaacatctccctggtcctggggagtcacaccctcaaatgagcccccaaagcttcttttccttagaaatttccaataatggcaacagaagaggaagtctgaaagaaaaataaaatactcatagcacccttctctattcttgatgtcagcatgatgtggtaaagggaccagtaggtctgaatttaagtcctggctgatgttctggctggaaggcctcaggcaggccactgaaccactctgaccctctgtttcctcatctgtaaaaggggcaaataccaactaacctactgggcagttgggaaactaagtgagataatgtgtgacaacactaagtacagggaccaaaacatagcaagtgctcaagtagtgtttgtttttaaaatcaacatattttatcatatatttacaatcatactgtaaaattaactcagtgtcactttgtaaaacctttcaatgttgctacataagcttcccagtgatcatttttaacctctggtgatgattctattgggtgaatttaccagaacttactcataatccttttcctgtcattttttaatttgaacctggggtgtttgcagttggtttttgattatgaataatgctgtgataaacatctctgagttttccttttgcaagttgcccatccagtggagggaatgagctccctgctgctggggcatacaaggagaagccagacaagcactgggaaggttcaagcaaggacctgagcctcagagaaggatcagctatagcagtggctctcaattctgctgggatggacattacagaagccgttcagtcacgtaacacattcttagagctatacctcacaattccagggtatttactggctgaaactcaggccctttctctcccattgatgtatgggctggaggtgagtgcaagcgatgctgcagcaaggatgactccgacatggccaggttgatttggaaatgaagaacatcacatgtgcaagcgatgctgcagcaaggatgactccgacgtggccagattgatttggaaatgaagaacatcacatgtgcaagcgatgctgcagcaaggatgactccgacgtggccaggttgatttggaaatgaagaacatcacatgtgcaagcgatgctgcagcaaggatgactccgacgtggccaggttgatttggaaatgaagaacatcacatgtgcaagcgatgctgcagcaaggatgactccgacgtggccaggttgatttggaaatgaagaacatcacatgtgcaagcgatgctgcagcaaggatgactccgacgtggccaggttgatttggaaatgaagaacatcacatgtgcaagcgatgctgcagcaaggatgactccgacgtggccagattgatttggaaatgaagaacatcacatgtagtttggggcacatcctcgtcagggtcacatgtgcacagcccacaggtggtcctggccctccctgggtgggtcttcactctggccaagatgatctccaaggtctccccaggctggaagctccgatgcctgcccaggggctgctgccctccgcccagagcctgacacactagaagggcctctgctcccaggggagggaacgaatgccccctgttgactttatcacatcacccctcaccactccacgggggctctctgtggtgccccaacccaggccacccctgctttcatctccctcgctgtgccaaggctgaaaggctgtgcatccactcagcttgctctctgccttctggctggacccaggcagttccaacccctggcgccaccctcctccccctatccaatcctgtccctgacctagataaaaaaccagcttcactgcctctcaaaaatgctgctgtgtgcgccagccgctctgctggcaagtttctgcctgcttcttctccacagtccccatatcctatccttatgtggcaagaagtgaaaatcttgtttgtggcacagggaccagtctcccatgagcatcaggcctttcctggaccactccccactctctctggagtctaacactttactgtctggagatatagaaacttatgaatacagaggctgtgcaggcttccggcatcacccccatcaccaacaccacgcagcatatattctctcacttcatcctcctagcaaccctagaagggatgttcttttattattcctatgacacagatgaggcctcagaggctctgaaagggtaggcaacttgcctaaggcacagccagtataaggcagatgtgaccaaacccaggtctgtctgattctttttgtttgtttgtcttgctctgtcgcccaa

SEQ ID NO: 588941 - DNA, 4001 bp, Homo sapiens
ggcactcggggttggattatattttttctttatattcacattaagtatccagctagattatattgcacagagaacttaaaagaggggttctgcaaggagtttaaaatctcttgatgcacaatacaatagttcattcagccatgttcaacctgtacacttaaaagggcattagcaggggattacacttcattttcaatctacagagactgaaatctgaaggcactgccaactgctgcctcacagtctcaccgtgcaactaccaaagacggaggctgtgtgccaccaaagggccctggattggggcacaggagatgtgagtgctaatccagctggccccaggggcaattccctatacccagaacagtactttgcacgtaactgatgctcaatgaatgtcagctgagaggaaatgcaaaaatatccaccatgtgcccatttatattatatagtaaacacaaagatctttgtgtccctgccctcaaaaaactaaaatccaattatgtaaaacatggaccgtttgttgggaggaagagagtgaatactgcttggcaattattatgaggcaaaggatatacagtggttatcttggaaaagccttgcaaagtaagccaggtacctctatttgacacatagaaaaccaggctaagagaaagcatgtaatttgttcaagatcacacaatttgtaaaatgagaagcccagatttcaatccaggtctgcaaagttcacattatttgcagtatgcaacacattcatacacatcaaggcagcccaggacgagacagggatttgggtccaagttttacttctgctattaagctgttgcctatctctctagagagaacatttctctgcatttttttcaccggcacgattggagagcagagaggtgttggtaggagggttaatgaactagatctgtggttttttggtttggtttggtttggatgggcggtgatcagaattcttctgggccaggacttgttctaatgtggttgtttcccttccctgctcttagaaattatttgagaatggtacctttagctattaatggaaatatacctctcaagtgaatgggagcagaaagatatgccggctccaagctccctcctagcaagctgaagctgagagtctgaccctgctgaggggatgctactgaaagttgagagacaacttactcacggatccatgtttccctcccagctgggtgctctgtacccactgggtgctcctcgtttgagagaaatggggatgtgtgtcctgcattacttaagcggcctgcctggggctcgtctccagattatagagaccttcaagagaagttcgtggtgtaaaatacttgggttcaaataggggagcgcggacatccctcgctgggggcggcggctgcggcctgtcgcgccggtagcgggaaccacttcctggtccgcatctcccgcccgcgtccacaccccgctgctgcatttcccccacggcgcagagcttccgaggcggcaggaggctccgtccgactcccgcgtgaacgcccggcccggagcagggtcccttcagagatttaaaacacaacgctctggaactccaactcccccggcgcccagcccggttcccaggcgtcggggcgggggcaatcccctgcggctgcagggaaaaggccccgagcctgttggagcccccggccctggccgcggtcccaccggtgacccaggtgcgccgcgcccgcccgaaatctcgtccgacgtcgcccggcacctgtcgcgcccggagcccgcaggacctgcactcacctcgttccgggggcccacggcccgtccccgcgtctctgggcccagctcctgccgccgtctccgccaggggccccgccgcggccgccgcccactttcggtttccccgcaccaccggagccgccccgcggcttgggaatcacctcaagcccccgccccgccctgctcggccccgccccgcttcgccccgccccgcttcgagggcagcctggcctcggctctgcgcacgcgcgggcgctccggccgcgtcggcccacgccggcgtccgcgcgtgggaagggaaaccgtcgccacctagcggtttctgcgcgtgcccacgcaccggccggcggcggaagacgcctgcggggcgggtgcgggagcgcctcctggtggacaacgcaggtacgcgcgggccgagcgagccgggactcagcagggggcgagggtggctccttctatggggctcaccctccttccaaacagttcaactcctgcacattattttcttcaacatctggagcagttactttttattgccctagacacacactctgtccgcccatatccttcaggcctttctcaagcattaccctttcaatgacggtggacacagtctctaacatgtcaacctccttccttgactttccctatccccattctcaaccttatttctccttagcacctatctagcacactatatgtattttacttatgcttttattgtctgctatccttctaaaattaaagctctgtgagcacaaggatttttgtttggttccttaacctattcccagagcctaggatagtgcctagcacacgatcagcaataaatatctgtcaaatttattcattcactctaaagttattgaacacctaataagtgaatacttatttattctgcacattaattccaccaacacttattggcacctgctttgcatccctgcagccaacattgaacacttctctgcaccattggatatgcatttactgagaacctgctgcttattcaaccggtattttattacagcttgactgccatgtataagacatacaataaactgaacgtttaaaatgtacagcttgataaattatgcatttactgagaacctgctgcttattcaaccggtattttattacagcttgactgccatgtataagacatacaataaactgaacgtttaaaatgtacagcttgataaattatgcatttactgagaacctgctgcttattcaaccggtattttattacagcttgactgccatgtataagacatacaataaactgaatgtttaaaatgtacagtttgataagttttgatatatatatatcactgtgagaccatcactgcaatcaaaatcatgaacatatccatcacccaaaaaagttttactgtgatcctttgtaattcttatatcttgtccctccctgtcacttgccccctcaactgctcacctgctttctgttgctatagattattttgctttttctagagttatatgtaaaacttttatgtatggaatcgtatgtactatcctttggggggctgcctggcttcttttatttagcaaattatgttcatccatgttgttacatgtatcaatagttcatgtctttctattgctgaatggtattgtagggatgtaccaaacctaccacgcaacccagcaattctgctcctgggtatttacccaggagaaatgaaagcagatgtccacacaaaaacctgtacaagagtgctcatggcagttgtgttggccgtagccccacatggaaagaatacaaacatccgtcagaaggtgaatggacaatcaactaatatatattgaacacctgctgttaaataacaaattttcatggataagcctgtgcttatagagcttttgattcagtgaaaagatgcagtaggcaatacaaagaaaaattggaagtaaatctggaaaacctgatatccagctctcagacacttggatgtttccccaaaggcggtagggaattgttcagagtttttgaacagggcttttctttgaacactgttctctttcatatcctagatctggtccctgactaagtttgcctaaatgtctctctctggaatttctctgcatctcctttgctctatttcagtctatttcagatgtctttctgttctttcccttccagtctactccaaacattgcagtggatttttaatagactttgctatggtctgaatgtttgtgtccctacaaaattcatg

SEQ ID NO: 588942 - DNA, 4001 bp, Homo sapiens
tgtttgattttatgacaattcttctaagcctgtattgcaaagtgctataacacagttgctttaggagtaaaaaaagtgaatgaaaacagttgtgtgtgtattaacctacaaagtacctcagagaaactatagacacctgggcttcacatcactataatccctggtatagagtaagttccagatttcatgtcactggtaaataatggcactcagaaaaaaaaaaatcaaaaatggaatcatgataattatttgaagtacatattattggagaagtcaacattatttaaacaatttccacataaatactgaagccacctaaaatcttttaatttttagcaacttgtgttacacattcttaaagaatattattaaattctcaaaatattggttgttgagagctataaaacaaactgtattcaactcagttatttcattggatttgttttttgaatatttaataaaatagttcaaacacctagaaaatatagcagatacttatgtatactcgaatcaaattatattaatatgccctatatccatgaagtttagtgaattttcccaaattcatctccaatatcaattcgattttcgttattaaaattagaatgttttcaaaccgaaggggagagactgatggcaatgataaatgtatttgtgatatgtagttcaggtttggatactgccttctacctatgtcacataggctgagtgagctacagaggcacaccactatctggagtatctaagcaataaacacgctgaacccaacacactggccaaccactccttcactctacaacaggcttcatatactctcctgtgttaaagattttggtaactgcctaaatttttgtttcattgggccagtaaaccctttatgaattactacatggcaaacattttttaaaataaaacaaaaattctaatagccccaatctccctgaccctaactacaagaaaaaaaaaaaagcctacaatttcattgctttgcttaaaataggatgtagatataaaatctttttacagaaaagcatctttgttcccttttaacagtgacaatctatacactgccttaattgggcccctgtatttctcagcatgaatttcattttttactgaagattttctttaaagcaggtaaaaccggtttgttctttaaaaaaaaaatcaataagaaaaacactccagaatgaggagcaggaaaataatgcatgatagtaaggggatctcttcaaataagatgatttaatcggtcctcaaagagtttctaacacaggggccaatcacccagaagacaaactagcaaaatcagttcatgccacagagcctttgcatttcaatccttccacacatattgactggagactcacagagaaatggtgcctttgctacagccaccccttgttcatcagcactgatgagatttggggagagcacccagaaatcactaactctgttttttaaaatactaaattaaaaaaaataaagccaaaccttaccagaaaggagcaagctgactccacagagaactaagctggctaaagagtccatgcttccccaaatctctccatccagtttccacaaatgtgcatgaggtcccaaggatcctttcaaaaacccagcggtttgtgactttccattagcatcgtcctactacgtcttgtttacaagttagaggcaagaaggaacagcacagaagcaggctgtaacagtctcatttctgtctgagcacagggagttttaagttcctttttcctgtttcctttgtagattaggatgggaaaggctgtatcttaaaggcatttggtatcagcagggctgggggcactcaagccctatccatctcgcaattcatcaaaacacttatctgttgctgttgcttctgctgctgcttttgctgctgctgtaggggcagaggaatttttgttggaagtgtgggtcccggtcagcattttcagaaacaataggggtatcctctcataggcgggaaactgagaataacaagccctccacctatgtatggtatgcgatgatgaccaatccttctcagacttctaacagctctcccggggctactgggatctctgacagaaggagcttttgggtgtgggaagccgttttggcttttgttttctcattttaacccacatggtttgaattgggagaagaaggtttccgtgatgagaaaatacaacctgaaaagcaattaatttcagtgagcaccggtgaggtcaatgctcaatgtagccccaagagaccagagtccaaaattgttagcctgttttctttcacacagatggcctgttggttggccattagcccaaagatacccatgttgccggctatagctttaattttcattaacaattcatctaaaggtgatcaaatttcttgaagaagttggcatagaaggattttggtaatgagaaagatttggtagtcattgagcaatggtgtttcagaagcaaattatatataacatttaaaaactaatctgtgtaaaaacacaaacatacaggattagattgggataaaaatggtgctcatgagagcaaagagagttcatggaccaaaatgaaaatagccatggaatgtacaatatctagaatgaggtcagagaccctacacttatccagataattactccacaatatgaattatgacattagattagagagtatacactttgctcatcatcgaccttcatgcctgaggaaatcattatactcctccttttcctacccaccagaggaaaaggcagatgcagctagtcttgactaatttctgtcccaggttttatcacatcgatgatgatcttaagaaccaattaatgtttccagtttgcaggtgtgaaaaagcccaggttctgtctgcaaacagaactgggttcaaatactggctcagccacatgtgtagctgagaaaagttacttagtctttttgagcctcagtttcaacagctgtgaaatggcaaaaatatctccttcccaggtgttttgagaggaataaatgaggtttaaaaatataaaaccatttggtactatgcctagttctttgaaggttctcattaaatgttaataagtttattttctttcatctttccattcagtctcaatttaaattccaagagcttctactaaaaagctattttctattcctatgagatgactttaaatttgtcatcacgaaaaaaaaaaacaaaaacagtgggcctggcacagtggctcacgcctataatcccagcactttgggagtggatcacctgaggtcaggagtttgagaccagcctggccaacatggcaaaaccccatctctactaaaaatacaaaatttagctgtgcttgctggcgtgcacctgtaaccccagctactctggaggctgaggcaggagaattgtttgaacctgggaggcagaggttgcagtgagccgagatcgtgccactgcactccagcctgggtgacagagcaagactctgtctaaaaaaaaaaaaaaaaaaaagaaaaaaaagaaagaaaaatgaagttccacacaggctaagttacttgctctgctgtgagtagcagaggtaataatatctgaatcctgagctctggacctccaatttttcccttgtttcatagttgaaaagtagatcaagagtaatgtaggacatcacaaacaccagcagggtacacctagaccttacagaagtatttgaaatgaaactttgacagataagaatagtttggtgacactgagaagtgcggtcagttcttagtgtgcttctgaaataactaatgtcaggatcggtgggtgctgtattaattcacttcaggaaaatgaaaggggcctcctcatgagtcaagctcattccatttaatttgatttttccagacatacctacagtaaaagcataaagaaaaccaaaccaaactaaacaaacaaacaaggctcttggctgattcttcattttctatttcctgctttttgcactcaatacatgaaaaacactatagacaaca

SEQ ID NO: 588943 - DNA, 4001 bp, Homo sapiens
ctgctgtctggcctcccaatgtataacccaaagccctgtcactccagcataactccaaccctctctgctctcccagtttttcaaggcacttcaatattgcaacatcatccaacactccaaacacagggtgctactcagtccctccgagcactcccctcaccctggtcccccaatattctccaatgccttgccactccaacatcctaatatatctgttatccatattccaacatccacaggccagttacaacctaatagcctcaaaccctctttcatgtctccacccaccctgctagcctaccttggatgtgaggtcgcggtgaaatacacctttggagtgcaggtaccgcaggcctcgggcaatgtccagggccaggtggagcctgaccggccaggacaggggttcaggggagctgagcagctgttccaatgtccccccattcatatactggtgcataggaggagaatgggaatagatgtcagacttcagtctgtattctaggtcccccacttacacgctaggggacactcccgaggatcacagaggtcataggggtaagactgtgctgtaggaccccccccatccatgttctaggattgccccgttcaactcaatagccattagccatgtgcaacaatttaaataatttaaaaaattttttaatcaagttgacccacaaaaaataatctaaacaatgaaaataatttaaatttaaccacatgtggctagtggctactgtattggacagcacagatagagaacatttccgtcactgaagaaaattctattggacagcactgttctaggggatacagagaataagaccagttgaggccttttatatgtggtttgcctaaaggaaagttcaggaaagcctcccctgagaggagatcctgttgcctctcactagtcctccgtagatccaccaggcctgttgactccctttatccttgggggtgaaggggggtggggatccctccttcctggcctatcctcacctctgtaagagcgtgcagctgtccctggtgcacacagactcccatgaacctgcaagaggatggggaagatagaaggataggctattaaaggcctcagctcctcctcagttccacttttcccgcgggatctttccctttctctcccgcccagcaagctgcccagagactggggccgctcaccttaggatgttggggtgcctgagccggttcatcagctgcacttcccgtagtgtgttgccccggttactggggagcttgttcatcttcagcaccatgacttgccctgactgtcggtgccgaacctgggggcaggagcagccggcgagggccgggcaggtcgggcgggtcgccggagtctggaccctcttccccgcactcccggccccctagtttcagcctctggttgaaggctcggtcccgcccctctgccctctcggccggtcctaccttgtagacctcagagaagaagccggccccgatcttctccgcgcagtgaaaatcgtccacacgcgccaggctagacacggcgctgcggagagcccggtaggaggaggggcggccccggcccgggcctccgcccgtgccccccggccccgggggcccctcccccggcacctctccaggcccgggcccagggccccgcagtgggggccgttccccggccatggccgggcccccagcccgggcctgcctcacatggcagggtccccagggcccgggcaggccgcgcttgccatgggcgcgggcccagcccgatcccgggcgcccggactccggctcccgccctgagaatggaagatccgccgaagatcctggacccgcccccgccgcgccggctggctgggcccgggtggacgccgcgccgctccgctccgcgcagggcctgggcttgggcctggaccgggcggtggcggtgacggtggcggcagcgctccggggcgccggcgggctggcttgccgcgggcggaggcgggcgggcgggcgggcggcggctgctccgcttagccgccggggatcaggctccgcggcctgccgggggcggggctgggccgggcctccgcttaactccttccagcccggcctcccggcagcggccacgccccctcaggtgcgcacccccgcctccccgctttccggccgcgatgccctgggccgcccgggtcaaataagctccggcctgagcttgaataacgggagggaattaagggctgatggtgcgcatgcgaagcttagctgcccagggagtcccctctcctccctgggttactgtccgttgagggtcgggctcagaaacctgccggattcctgggctccagggaccaacggggcagaaaggtaggcccctcaggcccagccgcaatcagaggtagcctagcaacctgtccaccttcctggcctgcgccccggcccagcctgcccatttcccaggtctcttcgactccgacaccttgaacctctggcctccctaacaccttctaccttcacgggaggttgtgataccccggggctataggaagcctttggccggcccatacccagcttagccccgactcctcctcacttcatcctgccgcctcccaataaagaagagagtccaggtcctccgccctgtgaccacccagccgggacctccctcttactactttgcccaaaagactctaagagagaagcctccacctgcagggaagcccgtccttccgcaagatcccacccccctcaaagaacgctgtccctcggagacccctcccttcctcagtgagacacctccctttcgggggcacttttccccagtgtggcactgccaccgtcagtgtgtcagaacccctcagtgctgcacccccttgctctgtgttcctcccacgcagtgagaccccacctccgaggaaatccactagtcattgtgacccctcctctcaaggtgactcctcccctcagtgtgacccagccctcctcagtgtgagggttccgccctccacgtaggaacacggtctgccccctaaggccggaggaggggctgcaactggcctctttaagtcggcgcggtgcctgggtgcgcacgcagtctcaggactccgtgcactcgccgtaccagacgcttccggttctgccgctggttcctcctccggcctcggcgaaatagccaatcatcgctagggttgggtggtgacacgcgatcccggcggtccactccggggcaaacggtttaaaagggcgtcgttgagccgcctgccacctagcggcggaacggtgggcggagggagagaaagctgccgtctcgagtgcggaggcaggctgagagctcctcgaggaagcgaggctgagtcctgcaggaattctcaagtactgtattgatatttctgtagtaagcttaaaagagaattaatacaagcacagtccgtatcgcgtggggttaccgtcttccaatggagtctggttacacgtttatgagacttggagccaagaaatactactcgcttgtcgagggctactgagaaaagaataaagacggtcataaatgatacatgatgccttagagtcaagagaaggccagatgctgtcttggtgcgctgtacaagggaaggtattgcacaagtttggagcgagaggaatgggagacattcgcaatccttccacagccggtggaggcaggccaacctcacagaattgcacggggcacgtgcatcctgttcttttttctggaggcgtttggtcttcagcacacgctcattcatcacattaatgttaacatctacaactaatttgtgaatttgctttttattgtatgacatctgtaaacactaggaatttatgcctcattttgtttaatatcatagatcttttaaccgacactgggttctggccctttatcacgtttgagaattactgtagtagttggtgatggtaatgccaagccaaagagccaggtgcctattttttgtaagatgattgcggtggttgtatggaggccgggagactgattaggaaggaggctgtgactgtgg

SEQ ID NO: 588944 - DNA, 4001 bp, Homo sapiens
ccacttgaatagggtaagtacctctggaatatataaaacttctgctaatctcctggtttatcataattatcctgtgcctggccataaaaagtgacaatgctacacatgagggtataaaaaaatgggtaaaacgaaagtttcctttattacaatattaataaaatggccagtgcaatactgaacagctcaagttcaaggaattcagaagccaatcagctatgacaatatatccaaatttacttaattacagggttatattagatcgccatgaggtaggatttcccacaggttaagaaccaattctacaaccagattgattaggcttttatccaaactctgacgccttccagctgtacactgtcccaatttctatctacaaaatagggataatcatacacaattgtaaaacactcagaactgtgcctggtacatggttaaatacgtatgctcaaagcataaacatgtgcgtgtccctcaagtctcaggatcaggacataccaagcccggtactagatgcattgtgtacctcagtatacaatctgcacagaaccatgcaaggtaggtggaactaaacccattttaacaatgtacctcagaaaagtttggaagtcacgcctttatcaagaagttgaaaagggattcattcacagaactgagctctgcaaaaccacctttaacataccagaattaacctgaagactggaagtcttcgtggcaaaacagtttggcttatttcatttgtccctattaccaaattttcatctcacccacacctctagttaccttagtcttaaaaaacaaaacaaaacaaaaaaaaaagctgggggtcggtgggtgggtgggtgggagggaataaggcctaaaaagaaggccatgatactcacctggcctcttttaatacaaaaatggttttcattaattaagcaagcacactttgtgagcttttcctacaattttattactagctggtactagacacgaaagtaaatggtacaggacattcagaaaaattaactcccttcctcctccactcctgtgggttctatttagccattaaccacctgatagatcttcaacagtctactgtcaacttcatgccatattatctatcgctttgtattagtcacattaatgctttctctgttaggaaaattaagaaggctgattgaccttccttgacttttcaaacctagtaatattattacgggatacaaagcattttcatgcgaagaactctcaaagttctactagtaattgactttaacttataacaaagattttcataacacagcaaatcaaaaagtcccactaagccacttttacagtagccggtttttagcaaaaggtaggaacgccagtctcagaggaggagctcacatcactagtccttaggtttgcgatccccaatagtttcaaagctgaatgtcacacattcctactgtaggtcttttctaattccaacaaaaggcagatcctagcgtttttaggatttcaatcgaactaaattccaactataaatagtttgcctgccaccttcttacccttcctcatttccaccttcttttccaaaaaaaatcagagagaacgatcgtactgcactcggcctttgataatttcctccccaaacccttaaactcatgagttcctccaaactccactgaggggccaaccagaggcgacagacttcccaaaaagcaaatggcccaggcaggggcgaccccagaaaactggtagtccccttccgctcgcttaactctcccgcctgggcgaccagaggacggaacaggggacgccagctcatccccactccgtattcggtcctgcatccatcccagaggcgaacacaccatgggttttaggaaaccatcgttcctcctactccaagggacgccggccaggaccagagtcggggaagtggggcccgattcacacactccgggctaaaactctctcggacccgaaaccaggcgaacccgcccagtcacctgaagctccgcaaacgccctagggggtcccgcccccgcagtgccggccgcacacccaggcccagctcggagggacgccgcggcccagacccgggggacgcaaatcgtgcacggccgaccctgcccgcttgggccgcggatcggggggcgacggccccaccacgctcagtcccgcgccccgggaggacccggcccgacgggcgacggccgcttacctgaggacccggccgcggccggggcgagaagcccgagaagacaagcgagggagcagaagcccacggggcaacagcgtgcgccgccgacctcaggctctagctcccggagcgtgttttcaaatagcctcgtcctcacgcggccgcgtctccttccgccgcccggaaatcagggcccctccccctccctgctgtgctcacgtgatcgcagcccgcagccgcgcgcaaccggggaggcgggagcgggagcggtaggccccgcccacagaggagggtaccccgccggaagccccctgctctgtgggaaccggagggaggacagcgcgaggtccccggacaaagcgtggcgcataagtccggcccgtaacttggtgggcaggcaacttaggggatgtgggcctggttatagctgagcatgcttttctattcctcccagaccacagttcttcagacctggagccactttcagagaagagtataagttgcactgaattgaaaaagggaaaagtttaggactgcagaagatggaattcctggggacgttaaactgggctaagatggagcagataagatttccttaattagagcaagacacacctagtatctagagcctggaagtcttggtcaaggattctccctaacatctcagtttctcagcactaacattcctgctactaaaatgaagtgagaaattaatttctgaagttaagtaaagaaataaactaaaattcctagaaaagaggtaagaagaatgagcctttgaaaaatgtcttcacaaagactggcatgatggcatggaagaaagagccccaggtaaggacttcagaccttgattcaaatttgtgtctacacctcaccagataattaagacttagtaaagctagcgaagatattgaccctcattatattgggtgggaattcaaaggaatgatgtctaaatccagggagacccaagcactggaactaaaaccatgcctgttccataatcggagataaagaggcagcgctagaaaccctgacctccctttgctggcaatatggccacatcaccacaatctgcctggaatcgaccataaccataaatatttgggagtcattggcattatgtggcattatattctgtttaaagctatgagactagatcagaagaggaaagatttattgccaaccagacaagtccctggaactccaaacttgtatccaacagttttttcaatgtttccttcagatatccagtatacatctcaaggtcaacttgtccaaaacagagctactgatgattttccccttgaaatctactcttcctacagcttattcatctcaaatagtaagtctgtccttgcagttactcaagcagaaacctttgggtttttggtttggcctctttgttccacacctcacatctaatccatctggagattgactctacctttaaagacatcctaactttcaccagttaacacacctcccctgctaccattctggtccaagccgcttcttgatcactgcaaaaagcctgcaaacacatcttcctgcttcccttattgtccttcttccccctacagtctggtatcagcagagcagctgtgtgattattttaagatctaggttagatcagatcactctttggctcaaaaccctttaatggctccctatttcacttcgagtaaaacccagagtcctttctagggccttcccttaggctgttcttgcatggctataaagaaatacctgagactgggtaatttacaaagaaaagaggtttaattggctcatgattctgctggctttacaggaagcatta

SEQ ID NO: 588945 - DNA, 4001 bp, Homo sapiens
aacactcagaactgtgcctggtacatggttaaatacgtatgctcaaagcataaacatgtgcgtgtccctcaagtctcaggatcaggacataccaagcccggtactagatgcattgtgtacctcagtatacaatctgcacagaaccatgcaaggtaggtggaactaaacccattttaacaatgtacctcagaaaagtttggaagtcacgcctttatcaagaagttgaaaagggattcattcacagaactgagctctgcaaaaccacctttaacataccagaattaacctgaagactggaagtcttcgtggcaaaacagtttggcttatttcatttgtccctattaccaaattttcatctcacccacacctctagttaccttagtcttaaaaaacaaaacaaaacaaaaaaaaaagctgggggtcggtgggtgggtgggtgggagggaataaggcctaaaaagaaggccatgatactcacctggcctcttttaatacaaaaatggttttcattaattaagcaagcacactttgtgagcttttcctacaattttattactagctggtactagacacgaaagtaaatggtacaggacattcagaaaaattaactcccttcctcctccactcctgtgggttctatttagccattaaccacctgatagatcttcaacagtctactgtcaacttcatgccatattatctatcgctttgtattagtcacattaatgctttctctgttaggaaaattaagaaggctgattgaccttccttgacttttcaaacctagtaatattattacgggatacaaagcattttcatgcgaagaactctcaaagttctactagtaattgactttaacttataacaaagattttcataacacagcaaatcaaaaagtcccactaagccacttttacagtagccggtttttagcaaaaggtaggaacgccagtctcagaggaggagctcacatcactagtccttaggtttgcgatccccaatagtttcaaagctgaatgtcacacattcctactgtaggtcttttctaattccaacaaaaggcagatcctagcgtttttaggatttcaatcgaactaaattccaactataaatagtttgcctgccaccttcttacccttcctcatttccaccttcttttccaaaaaaaatcagagagaacgatcgtactgcactcggcctttgataatttcctccccaaacccttaaactcatgagttcctccaaactccactgaggggccaaccagaggcgacagacttcccaaaaagcaaatggcccaggcaggggcgaccccagaaaactggtagtccccttccgctcgcttaactctcccgcctgggcgaccagaggacggaacaggggacgccagctcatccccactccgtattcggtcctgcatccatcccagaggcgaacacaccatgggttttaggaaaccatcgttcctcctactccaagggacgccggccaggaccagagtcggggaagtggggcccgattcacacactccgggctaaaactctctcggacccgaaaccaggcgaacccgcccagtcacctgaagctccgcaaacgccctagggggtcccgcccccgcagtgccggccgcacacccaggcccagctcggagggacgccgcggcccagacccgggggacgcaaatcgtgcacggccgaccctgcccgcttgggccgcggatcggggggcgacggccccaccacgctcagtcccgcgccccgggaggacccggcccgacgggcgacggccgcttacctgaggacccggccgcggccggggcgagaagcccgagaagacaagcgagggagcagaagcccacggggcaacagcgtgcgccgccgacctcaggctctagctcccggagcgtgttttcaaatagcctcgtcctcacgcggccgcgtctccttccgccgcccggaaatcagggcccctccccctccctgctgtgctcacgtgatcgcagcccgcagccgcgcgcaaccggggaggcgggagcgggagcggtaggccccgcccacagaggagggtaccccgccggaagccccctgctctgtgggaaccggagggaggacagcgcgaggtccccggacaaagcgtggcgcataagtccggcccgtaacttggtgggcaggcaacttaggggatgtgggcctggttatagctgagcatgcttttctattcctcccagaccacagttcttcagacctggagccactttcagagaagagtataagttgcactgaattgaaaaagggaaaagtttaggactgcagaagatggaattcctggggacgttaaactgggctaagatggagcagataagatttccttaattagagcaagacacacctagtatctagagcctggaagtcttggtcaaggattctccctaacatctcagtttctcagcactaacattcctgctactaaaatgaagtgagaaattaatttctgaagttaagtaaagaaataaactaaaattcctagaaaagaggtaagaagaatgagcctttgaaaaatgtcttcacaaagactggcatgatggcatggaagaaagagccccaggtaaggacttcagaccttgattcaaatttgtgtctacacctcaccagataattaagacttagtaaagctagcgaagatattgaccctcattatattgggtgggaattcaaaggaatgatgtctaaatccagggagacccaagcactggaactaaaaccatgcctgttccataatcggagataaagaggcagcgctagaaaccctgacctccctttgctggcaatatggccacatcaccacaatctgcctggaatcgaccataaccataaatatttgggagtcattggcattatgtggcattatattctgtttaaagctatgagactagatcagaagaggaaagatttattgccaaccagacaagtccctggaactccaaacttgtatccaacagttttttcaatgtttccttcagatatccagtatacatctcaaggtcaacttgtccaaaacagagctactgatgattttccccttgaaatctactcttcctacagcttattcatctcaaatagtaagtctgtccttgcagttactcaagcagaaacctttgggtttttggtttggcctctttgttccacacctcacatctaatccatctggagattgactctacctttaaagacatcctaactttcaccagttaacacacctcccctgctaccattctggtccaagccgcttcttgatcactgcaaaaagcctgcaaacacatcttcctgcttcccttattgtccttcttccccctacagtctggtatcagcagagcagctgtgtgattattttaagatctaggttagatcagatcactctttggctcaaaaccctttaatggctccctatttcacttcgagtaaaacccagagtcctttctagggccttcccttaggctgttcttgcatggctataaagaaatacctgagactgggtaatttacaaagaaaagaggtttaattggctcatgattctgctggctttacaggaagcattatgttggcatctgcttgcttttggtgaagtctcagggagctttcaatcatagaaggtgaagggggaacaggcatgtcacatgttgaaagcaggagcaagagagagagcaaaagaaaagagacagagagagagagaggtgccacacatttttaaacagccaaatctgatgagaactcactatcactaaacaagcaccaagccatgagggatccacccccatgacccaagcatgtcccaccaggccccacctccagcattgaggattacaacacaacatgagatttgagcagggacaaatatccaaaccatatcagttctcaagctcttccatattctgacacagtctcttaccatctgagcactcctccttccactctccccttttttactctgctccagtcacactt

SEQ ID NO: 588946 - DNA, 4001 bp, Homo sapiens
gtaaactcctccaggacatggactgagcaatgttctgtgtcttcaactaagtccactactgttacttgaatacatgaacgcttcttgtgctacttctggtggaaaagagtgcactgtgttattcaagttaatagcggtgtggaaatgttacctgtgtttcatgcctaactatactgattctcccaaatgtccacacagttatcctgccttcctccctaggccaatgtcaaaaatccattgtttcctctaatgcaggcccacgtgaagggactcaacaatgtgctaagagtcggaatgaagcctatctgatactcaaatcatgaggacagaatccaaagtggataataaagaccaattgctcatcagacgactgaagaagaaaaatgggctacgccagatagtatgatgtatacatatttatatatatatatgacatacaggtttgggaaactgagatctgagtgaaaatcctagctttagcacttaagttattgggtacttaacgtgtctgtaccccactttgcacatctgtaaagtggggcaaatgccactactcctgggagtttacttgtggtgattaaataatgtaattatacaatagtgtatgcatttacatcgtagtaatgcacaatacatagacggtagctattaggactgattataatcgtcaccgtcagtcttgattttttaaaaaaatttcaacatcttttgtccagtttcagaaacagaaatgtactttcactgcattttagttgctaacactgaggctgtgtattttagcttctagtgtctcagttcagctgctaacgaagtttttcactcatccctttgtggataccaaccacctaccccaacctgatttactattttgaaaaatccagccaacagtcttccttgaaaaccagctatacagatgtctgaatcaaactattaactgtcactcaagaaaaggaacaacgtgagtgatgttccttcgaggaaataaaaagcgtttaatcaattcacagtcgttcccaaaatttccaaaacccgcagaatgagcaaacgttcaagtttccactatgaaaacaatccgtagccgtctggttactggactcacttcaacactccccagacgcacgaaagaagaaacattccgcgcatctccgcgcttccttcttctcacacaaagcccccctggctggaggagcagccccttccagcagggtcggctcgggtcgagccgggcgggagtcagggcggcctgcggacccaggggtctcaccacacgtcgcccccgactcccactggacgaagccctagaggctcggagctcacaccccgcccgggagccgccttccaccccaacctcaaaccccgccccgggttcggcagcctctggcacggaccctcttggggcgggggtccccagaacaaggtcacgccgtgcccagggggcggcggcgggcagccacggctctgccagtccccgccggcctcgcactctccgcccctggccctcgcccactcacaccccagagggcagccccggacctcggacgactccgcccgactccacctccccggggagtcccgagcggggcggcctcgggcagccggacacgtccgcccgcgcccggacacacgcccctgccccgcctccgctccccgcttgcggttcgcccggcagccgccgagccgcgcggcgccacgagagcccggcccgggccccggcgccgccacctgcgcccccggccccgcgccatgtttgagaaagagcaggagcgagccagaggccgggtccggcccgcgcgccccgcagtcgcccgcccgccgcgccgccgctcacccgtcgcccccgggagcagcgccgccgccgccgccgccgccgccgccagcacgaggaggagcagccggggacgcggagcagcgaccgccgcctccatggtcccgccgccaccgcctgtggcccggcccggcccggccgcgccgctgcctcaccccagcaaacctcgcctcgccccacctccctagccgccgcggcggcctcgctccggccctttgtaactgctcggaggacgcgcgtccattggctgccgggctcccgccggccccgcctccccgccgccgcgagctgccaagcgggacccagccgggagccccgcctgcgggcccgccaggcagccaatccgcagccgcgagcgccggtttctggccacgccccacgctccccgggggctgggccgccagaccccagccccggcccgatcggctcccggctccgagaggccgcgtgggggcggggtctgccagccccagcaccgctcagccgctagccccggagggccgggtagagcgatgggtgtgtctgtgtgagtctctttcggaaaaaggctgtggccgttcgacgctcttttcttctaacctcctctaggcgcggaagatctggtactgcctcagccccaccctgaccccattcacagctccgcattggcaatcccagcacatgccacccagatccgctgcagcgccaggcccctgcatccacttcaacttcccctctccaagtccacgcatcaacttcagcattcccccgaagatccctcctcagtgcccttcacatgcgactcactctcctatttcctcctgctcccagcggtcaccccaaacccagctcccccacccagttccaaacccagaaagtcctcagatcccagcgtcagacccagatcctgagcccaaacacacccccaaatagcctcccgcctccctccagcacagatccaggatggggatccaagccgcactcctctcaaaccccttcccgatccaggttggaaagggaggatccccaccccaacccctcaaaggaggggttcccccttcttagcacccagctcccgcggggcggagggggagcagtcatcattactttgagctgtgtctgacactgctgtataataatcctgaggtgtcactaaaaacccaaataaactctacgttttcattctgaattcctaatttactgcgagacgctccacccaccttccctctgcgacgccaaaatgagctccagatttgtaattcttcctgtcagactagtcctttcttcagacacaaacacagccaaggaggctgttacgtagaacagagaatatttttccgcagaaccttttaaggaggaaattttattttctgtgtcatttgagcttagaattaaataaaccttgatagcaggaatcagaatggttctgattaatgccaatttgtgcactactttagagtcactgggtgagcattttccccacctgtgaaggcttccttccgggagatgaaaagggaaaaggcgtggatattggagctgggatctgagacccgcgcgctttctccctcctgtctaggacacttacttaagcaagtcagctaacctttctgaacctccaacaggctcagaggcctgcaacttgctctacaccgcagctccagcagcctcagcagcaaactcccctcttgctcaggctgagggattccagagagatggcttctggcaggctccagtcccaatttgccctctcagttccagtttcttcaatggagatttggtggactttgtgccacctgaggtccctagactgcctttttgctgctctatttgcaatgtctttcataagataagagctaatgagatttttattgtatgaatgaatgaatgatctcagaaagtgactgtttttctctggccattagcttcttcatctctaaaatgtaaataataatagtacctaccccgtttataaataaaagggattgaatcacttgtcttgggccccttaaatgacgtaatgtgtctggtacagtgtctggaacatagtaaatatttagctaatgccatttctttgcccatccccttccagctctgtatgattctaatcagcatgtatgttcatgtcagtctgtgcctttgacgtacggagcctagattaatcagtgttaatcacacctccagttccttaacattttcc

SEQ ID NO: 588947 - DNA, 4001 bp, Homo sapiens
taatcacatatcctgtcaccctggggtgcaggtgctctaacccatgcggctgtagagtgtcctggtgggcaaaacaaagattcaaatacataaccggatggaaatgtaaagcactccttgacactggacagaaaacttcactccaacatacctaggccagtacttctcagacgttaatgtgcaaacggatcccttgggtgatcctgattcagcagatctgggtggggcctgagatcctgcatttcaaaaggtcgacaggtaatgcacccgtgaccttaaagtggcaagacacgtgaacacttgaaagtacccagaatgtcaccctatcagcaactagaataacaggttcctcaccaggaaacgaagaggataggtagtatctctcaagtggattggttaagggcttaacttacctaccgaccacgtttgtggaaatgcgttcagaaacctggacagaagacctgcctgcggaggcctccctacggaactcgcccacctctgggactgggaagtagccacagacaataaggatagttgagatactcagttgcgcagaaagccctcgtgcaaacttcaaaatagtcttgaaaatgcccttctcaagctcgaagaatgcctggaattcagtggcctttttccaacataaagatctccaactcggttttgactgagagctccctatagaagaaccttgcaatgcagccctgggaaacttacaacgccctgtatatgctgacaagctcggcccctcccttacaaatgggtcagaaagtgaaaatttttttgttgtttaaatgttttctaagtctctgccgcgttaggcggaggagatccccgttttgcggaccacgcgggcagggcgagcacccccagggctgtacggtcaagctttctggagtgcggagttttcaagccccgcggcggaggctcagcgggcactcaagcagccccaccagcttccaataaccagcgccgcgctccgcccgcgtcactccaaggcaccggctcctgcccccacccgatgcagttggctgcgccaacagaaattcaaaggcccttttaatcgggtaaaagagaagctcagcagaaagtgaaacagtttccatcccttgagtgaaagggtgccaggccagggagaagaaaaaaggtggctcccagacacctgtggctgccgcaggtgcgtgttcaggcacacctgttgatgattcccccagagagaccctgtgaggcgctgccgccccgggggcgatgaggaagcagtgaaaaagtaaatgcccgatgaagtacacagcgcactctgcagagaaacctaggggatgtcaacccgtttactcgcgctgcccctcaccccgcctgcacaaacgacccagggcaccagcgcgaattcgcgcccaccaaatcattccctggccaaagtcgggacaggagggaaggcatcccggcgacgcctgggcacaggctgccgcgcctcggcggctctcccggggcgtgcggcaggcagcacctgggccggggagggagagagaggagggtacttgcctagagccggtggcggccgccgccgcggccggcggtgtcgggcgctgggcgagggcgaaggcggctctccggggcgctgggcggcgcggcgctagctgctgggctggtgtccccctgcgctccctgcgcgcgtcgctggctgcacttcacccaagccggagtgcgggaagctccccgggaatgggagggcgccagcggcctccgcggctgctcccgtatattattgtgattcgggctatttcctgtttagaggtttgagagaaggggaaaaaaaatccagggtgggggcagggggagttgggcggtggcgagccagagagcagcggcggggaggggaagggggtgggcggcggctgtcacctgcttccttgagaccggagggttctgggcgcgcgagccccgggagggagacgcagctgctcgcagcgctactttggggtgtcgggaaaggcggagagggtgggcctgcacgcacgccactcagcggtggggcaggggccgcggctgcctgggagacctttgtcactggagcccgcgcgcctactttgccgcctcttttcttctacgtagaactgcagctgagcttcctcccagagctggtgcaagaggaatttgctgggcttctttctctattcgtgcccaggtccgcttcctaatcctttccagggtctgggcaaggaggatgtcagctcctctacccttcaaagcccccgggaagcatggttgtgggccactgtgggtgcgtggggggctcttgggggggggaggtgactgcttttattggggggtgtgagaaaagttaatgattttagtgtaaagttaacttttacgacccgcttccgttcccctcccccgccagcctcacccttagccgggatcactgggtctgaggcccccatccggaaataccggttcctccacccggacaataggtgagggcgggagcactacccagagagcctgcttagtcacctcgggagcccctgctcagtcgggagggcagaaccctgccagtgcccaggcctccacctggcaagcaggtgccccttctgtttaacgtggccttgttaaaaaccctgggaagggaatgggaacttagtgcttaatcggtagagtttcaatgtgggatgacaaaaagttctggagaccgagagtgggggtgtttgcacaacagtgttaatatacctaataatgctgtaaccgcccagtgggtccaccttgccggctgcgtagacagccgatttgtcaagacaggggaattccaatggcgaaagagtaattcacgcagagccagctgtgcgggagaccggagttttattattactcaaatcagtttcttcgagcattcggggatcagattttgtttggttggttttcgggtttttttgttttgttttgtttgagaccgagtttcgctcttgtcgcccagactgcagtgcagtggcacgggcgatctcggcccactgcaaccttcgcctgagttcaagcgattgtcccgcctcagcctcctgagtagctgggattaggggcgcccgccaccacgcccagctaattttagtagttttagtggagaaggatttcaccacgttggccaggctggtctcaaactcctgacctcaggtgatccacccgcctcgcatcccaaagtgctgggattacaggcatgagccaccgcaacccgccctgagtttttaaagataatttggcgggtaggggcttgagaagtggggagtgctgattggtcaggttggagatggaatcaggcgggggtcgaagttaggttttcatatgtcttctgttcctatctgcgatggcagaactggttgggccaggttactggtccaggtggtgtcagctgatccatcgagtgcagggtctgcaaaatatctcaagcactgctcttaggttttacaatagtgatgttatccacaggagcaaatttggagaggttcagactcttggatccggaagcagcaagacccctaaactgtaatttctaatcttgtagctaatttgttagtcctgcaaaggcagactggaccccaggcaagaagggagtctttttcaggaaagggctgttagcaactttgtttcagagtcaaatcatgaacggaattccttcccaaagttagttccgcctacacccaggaacgaacaaggacagcttaagggttagaagcaagatagagtcagttaggtctgatttctttcactgtcataatttcctcagttatacttttgcaaaggcggtttcagtgccttacactgtacacttaaaaatggttaaaacgggccgggcttggtggctaacacctgtaatcccagtactttgggaggccgaggcgggcggatcacgaagttaggagatcgagaccatcctggctaccatggtgaaaccccgtctctactaaaaatacaaaaaaatttagctgggcgtggtggcaggcgcctgtagtcccagc

SEQ ID NO: 588948 - DNA, 4001 bp, Homo sapiens
gttttgtcttggtgatggtctgcagatatgtgtaatgggctcatggcatttgtttaattattatgctccatgatttagatatttaattcttttatggtaccaaacatttcataagtttaaaaaatagggagatgaggccgggcgcgatggctcgcgcctgtaatcccagcactttgggaggccgaggcgggtggatcacgaggtcaggagatcaagaccatactgactaacatggttaaaccccatctctactaaaaatacaaaaaattagccaggtgtggtggcaggcacctgtagtcccagctactcgggaggctgaggcaggagaatggctcgaacccgggaggtggagcttgcagtgagccgaaatcgcgccactgcactccagcctgggcaacagagcaagactccgtctcaaaaagaaataaaaaaattaaataaataaataaataaataaaaaatagggagatgagtgggtgaacaccaaaatgaatactgactcctggtgaaggatctaatacccaagaggtacgagtatatttaacagcaaatttttcaatgcagttagaattttgcaaagtgaagaggggataataatttcaactggaaggagggcgagttgaaggatggtaccagtaatttgaaaggggcaaagagggtaaagcaaggcaggtgcggtgggcagagtggggacgcaggttaggtctggggagttgtggggggaggtgtatgcagaaaacgccaagtcacctttttaatccaagtgtcaacattctatccattaggaggatcttcaatgtgctttcatcatctttccttatcacttttacttttcacgtaagtagtgttcatgacaaccccctttatatctaacaggtcattcttaagacctcatggaaagttaaaagtgagctaacttttctaccataaacaaaaaacttaatgcattaacagtaaggtttttgtgtgacaaaagaagagaaaggaactaaggcaaatagttacttattgtgtttttttttaatctttttataaagcttttttcctttgaaaaatcttggccagataggtaaaaatcctatatattttacataaagaatgtagaaacatgttaaaagccaaccccaaaacagataccgaagtgttcactgcccaaagtccccctgaacaggcggcttttagattctgtatccacagactgctgctgcccagtgatggaggtcaaagctaaaaccaaagattaatcgcaagctgtccacgtaagggacatgcttcataaaagtctcaagccatcaaagtaaacactcacacatgttcaaactgtaagaggaaaaaagaacatgtgaaaaacactttttcttctaagttagaagcctagacataataagaatatagatttctgcagtgtaagaaagcaaaaagttttatcccaaaacaagaaattctcaaacatgaacaaacacaaaagccagtatgttaagctctacccaggaagcaaaaccattacagattcctagcacatggaaaacagcagcctttgatccacagatccagtaagaggctatcagtttcacatagatctgctaaaattaatacaagtatttttaaaaacccaccagtgactacaacctacaatctcacaatttgttgctgaaagatgccagaagcacaaatcaatctgaggataaaggactcactgtgagaatggttttgcttccctccccttcccatgaagaaaggttggggaaaacaaggggagagcttgcagagggactcacacggcctttccatctcctcaactttttaacagcctggatccacatcctatgtagggcttgagcagtcttcatggtctctggagatgcatgggccaggccaccgcctacattccgggctgctcacccatttccatcactccatgtggttacgtaaggcggatacaatagtggcccacatttccagcaaatcctgttgtcatctcacacagtgacacatccatatggcagggatgccaaacgctttgaaaagcactacttatgagcaaaaaagaaagcagtttggatttgcaccacttcaacagctttctttctctccctctctctcccttgccagggaactagagcatccgagtagatatttcttttaagcacataaaatgattcagcatctaagttgacagaattgagtaaatgagacactttagagcaacattatggaaaagaatatttagagaagtatttatacagtatagaccctctgatacacacacacacacgccagctagaaataaactagcaatgtttcaggtcaactgaatggctaatgttacacagaaattaaaaagcatgaaaagaaaatgttttacgtccttggagataacaaggggaagataagactcatttggtgctgctcagagacaactcagggacagaatgcttgctcagcaaagttccactgtctaacctttttgtaaacttagcagataaaagaataacaaagagccctgccgtctgttctttgtctttaccacttggggagaagggaggggtggagaagcaaattttaggtttctgaacatctagcaaagattttatgggatgcctggggcttgggagctggggttaggaattcagaagtctggtcttggggagcctctggccaattcttgctaccatagtgtatgttatatgccaatgggcttggccaaacagcgtgcaaatgtaaagtgtgccatttgatttgaggctgagatgtatataaatctggaccatgagatggccaccatctaggaaacaaggagaagcagagccaagaaagtgatttttaaagtcacaagatctggagtgagatccttgtcctgtcacttagctgtggggcgttggatacactatacccttctttatacagtggcgataaaaccatctacacttcagaagggcaatgtcggcaagaaatgaggcaatctctacaaagcactcgtgctggtgctggacaggcactgggaaatgtgtgtccttccctaagagttgagttcttcatgttatgacagttaaatgagatcaaaaatgaatacaagtttatgtttcaaatcctacactttgccaggcgcagtcactcacgcctgtaatcctagcactttgggaggctgagatgggcagatcgcttgagccagaagttcaagaccagcctggccaacatggtgaaaccccatctctactaaaaatagaaaaattagctgggcatggttgtgcacacctgtagtcccagatacttgggaggctgaggtaggaggatcacctgagcccaggaggcggaggttgcagtgacctgagatcgggccactgcattccagcctgggccatagagcgagaccctgtctcaaaaaaaaaaaaaaaaaaaaaaaatccaggctgggcaccgtggctcatgcctataatcccagcactttgggaggctgaggtgggaggatcacctgaggccaggagttcaagaccagcctggccaacatgttgaaacctcgtctctactaaaaacacacacaaaaaatccgggcatgttggcgggtgcctgtaaccccagctacccaggagactgaggcaggagaatcacttctcctgcagtgagccaagatcccaccattgcactccagcctaggcaacaagagtgaactccgtctcaaaaaaataataataaattatttattatataaataaatgggtacaaaggaggaccttggaatctaagcaagtgtccaaacctcaacctaggctatgcagacatgtgcaggctctgtacacaccagccaggttcagcccatgggctggctcactagctccaggtgcagaggagcctgagaacccaggcaactcggggagggttcaggccagcccactccttcactctgacagtcctaaggaaaacacctgagcttatcctcatgaggaaataaatacttctttcccttaagttcatgcatactacccagaagtcagaggtgtcct

SEQ ID NO: 588949 - DNA, 4001 bp, Homo sapiens
attaatctattgtttaggggcgtgtgtgtgtgtacgcacgcatgcagtggaaatataaagaaaaagcaaggaaatgaaaaacataacattcaggatgaggtgacctgggcaggaggcagagtatggtgggaggtacacaaatttccttcgtgttttgtcttggtgatggtctgcagatatgtgtaatgggctcatggcatttgtttaattattatgctccatgatttagatatttaattcttttatggtaccaaacatttcataagtttaaaaaatagggagatgaggccgggcgcgatggctcgcgcctgtaatcccagcactttgggaggccgaggcgggtggatcacgaggtcaggagatcaagaccatactgactaacatggttaaaccccatctctactaaaaatacaaaaaattagccaggtgtggtggcaggcacctgtagtcccagctactcgggaggctgaggcaggagaatggctcgaacccgggaggtggagcttgcagtgagccgaaatcgcgccactgcactccagcctgggcaacagagcaagactccgtctcaaaaagaaataaaaaaattaaataaataaataaataaataaaaaatagggagatgagtgggtgaacaccaaaatgaatactgactcctggtgaaggatctaatacccaagaggtacgagtatatttaacagcaaatttttcaatgcagttagaattttgcaaagtgaagaggggataataatttcaactggaaggagggcgagttgaaggatggtaccagtaatttgaaaggggcaaagagggtaaagcaaggcaggtgcggtgggcagagtggggacgcaggttaggtctggggagttgtggggggaggtgtatgcagaaaacgccaagtcacctttttaatccaagtgtcaacattctatccattaggaggatcttcaatgtgctttcatcatctttccttatcacttttacttttcacgtaagtagtgttcatgacaaccccctttatatctaacaggtcattcttaagacctcatggaaagttaaaagtgagctaacttttctaccataaacaaaaaacttaatgcattaacagtaaggtttttgtgtgacaaaagaagagaaaggaactaaggcaaatagttacttattgtgtttttttttaatctttttataaagcttttttcctttgaaaaatcttggccagataggtaaaaatcctatatattttacataaagaatgtagaaacatgttaaaagccaaccccaaaacagataccgaagtgttcactgcccaaagtccccctgaacaggcggcttttagattctgtatccacagactgctgctgcccagtgatggaggtcaaagctaaaaccaaagattaatcgcaagctgtccacgtaagggacatgcttcataaaagtctcaagccatcaaagtaaacactcacacatgttcaaactgtaagaggaaaaaagaacatgtgaaaaacactttttcttctaagttagaagcctagacataataagaatatagatttctgcagtgtaagaaagcaaaaagttttatcccaaaacaagaaattctcaaacatgaacaaacacaaaagccagtatgttaagctctacccaggaagcaaaaccattacagattcctagcacatggaaaacagcagcctttgatccacagatccagtaagaggctatcagtttcacatagatctgctaaaattaatacaagtatttttaaaaacccaccagtgactacaacctacaatctcacaatttgttgctgaaagatgccagaagcacaaatcaatctgaggataaaggactcactgtgagaatggttttgcttccctccccttcccatgaagaaaggttggggaaaacaaggggagagcttgcagagggactcacacggcctttccatctcctcaactttttaacagcctggatccacatcctatgtagggcttgagcagtcttcatggtctctggagatgcatgggccaggccaccgcctacattccgggctgctcacccatttccatcactccatgtggttacgtaaggcggatacaatagtggcccacatttccagcaaatcctgttgtcatctcacacagtgacacatccatatggcagggatgccaaacgctttgaaaagcactacttatgagcaaaaaagaaagcagtttggatttgcaccacttcaacagctttctttctctccctctctctcccttgccagggaactagagcatccgagtagatatttcttttaagcacataaaatgattcagcatctaagttgacagaattgagtaaatgagacactttagagcaacattatggaaaagaatatttagagaagtatttatacagtatagaccctctgatacacacacacacacgccagctagaaataaactagcaatgtttcaggtcaactgaatggctaatgttacacagaaattaaaaagcatgaaaagaaaatgttttacgtccttggagataacaaggggaagataagactcatttggtgctgctcagagacaactcagggacagaatgcttgctcagcaaagttccactgtctaacctttttgtaaacttagcagataaaagaataacaaagagccctgccgtctgttctttgtctttaccacttggggagaagggaggggtggagaagcaaattttaggtttctgaacatctagcaaagattttatgggatgcctggggcttgggagctggggttaggaattcagaagtctggtcttggggagcctctggccaattcttgctaccatagtgtatgttatatgccaatgggcttggccaaacagcgtgcaaatgtaaagtgtgccatttgatttgaggctgagatgtatataaatctggaccatgagatggccaccatctaggaaacaaggagaagcagagccaagaaagtgatttttaaagtcacaagatctggagtgagatccttgtcctgtcacttagctgtggggcgttggatacactatacccttctttatacagtggcgataaaaccatctacacttcagaagggcaatgtcggcaagaaatgaggcaatctctacaaagcactcgtgctggtgctggacaggcactgggaaatgtgtgtccttccctaagagttgagttcttcatgttatgacagttaaatgagatcaaaaatgaatacaagtttatgtttcaaatcctacactttgccaggcgcagtcactcacgcctgtaatcctagcactttgggaggctgagatgggcagatcgcttgagccagaagttcaagaccagcctggccaacatggtgaaaccccatctctactaaaaatagaaaaattagctgggcatggttgtgcacacctgtagtcccagatacttgggaggctgaggtaggaggatcacctgagcccaggaggcggaggttgcagtgacctgagatcgggccactgcattccagcctgggccatagagcgagaccctgtctcaaaaaaaaaaaaaaaaaaaaaaaatccaggctgggcaccgtggctcatgcctataatcccagcactttgggaggctgaggtgggaggatcacctgaggccaggagttcaagaccagcctggccaacatgttgaaacctcgtctctactaaaaacacacacaaaaaatccgggcatgttggcgggtgcctgtaaccccagctacccaggagactgaggcaggagaatcacttctcctgcagtgagccaagatcccaccattgcactccagcctaggcaacaagagtgaactccgtctcaaaaaaataataataaattatttattatataaataaatgggtacaaaggaggaccttggaatctaagcaagtgtccaaacctcaacctaggctatgcagacatgtgcaggctctgtacacaccagccaggttcagcccatgggctggctcactagctccaggtgcagaggagc

SEQ ID NO: 588950 - DNA, 4001 bp, Homo sapiens
acagattgcagagtaaagtctaacagtttcaggtccactagacccctaaatgcagaaattgaatcttgttcatctttgtatcccccacagtgactggcaggagtaggggctcattcagtattataatatctggatggtactgaaaaagttacagcagcatttcagaggggaaagttccccttcatcaatctgcataagtagctctgaaaagaaataaagtggccccactgcagaagtagttctgaaaaaaacacaagaaacacctcaaaagccaccggtgctttagtaaagcacctccgcttctgccatctccccacaatgaggaagctccagtaccctgtccacatttctaaatggcactcatcggattcttaatgagttgcaggctttcccaacgggactgtgtgacagagccacgctcttgctcatctgcgtaatccccacactgaagtggagttgttcatgaaaacttactaaataatcaaatttcatcctctcaagcaggatatgcagtggtactttgctacaaatacatttaccactacgaatttctcacttcaagcgatctcctgcccaggtgtgtgctctcagaaaattacatctctttctgaattacgctggcaaaggtggacctgttttcccaaaaggaccgtcagcacacccagcacagaccacctggggagctgaagaaaacgacctccctccctcctccccgctgggattccccgggctgagagcgtgagtgagaagcgcaaggcagtttctatcatgggatgactctccgctgggaacttcagggaaaccacaaccatcattactcaggccagacagctgccagaaaagcagcctagcctaagaactgaagctgaaatagaggtgggaggctgtattccattactaagcgcgggagcactcactcccaagtttgtccacatttcaagaatgttaaaaccctgtggtagaaatccctgattatttataacttaaactaccgtgtaaaagcagaaacttgacaaatgaagacataaaaagaactggtgacaggtaggctagtactagaatacaaagcattcatcacactcctcttttgtgggtccttccaaacctccatccccattccctactggaaaaaaaaaaaaaaaaaaacaacttttacttctattacagacgcagctgattgaaagggaaaagggattctgctctgtgatgagttttcagtttctctcacgtacacaagcctgtaactttgcatcaataccgagtgtggtttgaaatagagaaggaaaacacaaagacatgcaagcgacacaacagacacgagatgcctccaagccagcagaaatccaggacaccgggttcaagacagtgtcccctactcgcgccttaatctccagcccaagtgacttcagagtaaaggttccaggagccccggaggccacgagtcatcagcccggacggtgaaacctacccctcccctgcgtcccacgtccggatgggagaatcccagcttcctacggcgcatcggggaacaacttcagagcagcacgcgagcagagcccccagcgctcccacgctcacgctcacgaccctcctcccaaccgcgcggcacaaggaggcacttacgcggagccaacctgacagctcccgccggggtggaaacccgcggtctcctcgcaccggcatttcggacacaggtcccgcgtaggcgcgcagctccggaccccgcttctgcttctgctcctgctcctactcctcctgggcaccaccggacagtgctctgacccgcagcccaaccgccggggtgccgacccgcggggacccacccctttgtccctcctcccgcggcggcggcggcgtcagcccgcccccgacccgagcgtggcgcctccgcgctggccgcccggcccgggaaactgtcaaattggccgctaccacccacgcgcctgccggggaagggctcgccggcgccgcgccttcgaggctcctgcggcgaaccgcgtcacgcgcgactcctggccgggggcgggaggcggcggcggcggcaggagaagcccaaggcccgagcggcccgcagcccccacgcctgcacccctccacccccgccagcccgatggttcgctccgcggcgtgcactggagcaagcaggtcccgctccgagcgcgcgcgctctgggaagtgctgcaagtttggagacctggagtgagctccgggcgctgctggcccgactgtccgcggtgtttccccggtgaggtcgcgggggcatcctgtaggaagactttttggcgaggttcgcagggcctcacacaggcagcttcagttctcctacgaagagtcgaactgggaaaacctcaaagttttaggtcctgtctagaggcctgcccggctaaccaacacatacacggccttgtaccccacatttctcagcccaacaactgcctacccgaattccgagggttataagatgttcgtattaaatattaaaacaggacttttcaggacaatatattccaggttatctctttggcacatttccaacaactccaataaagagattgaaactcctctcccatcatcagcttataaaaggttgccagtaggtcacaagtgcttatctgacaggattcatctaatgcaattcagtgtgcttattcctttcgaagtcctccatgtgcaaagaattgtgcagtgacgttaagtgtctttattttaagagcatataaattaatttggagaatccaaacaggtaccgattaaaaatataaccttgggtttgaaatcttaaaaaaccatcttgtaagagaatagttttgcctgccctgctcttcccttaattggaaagcaaaactcgtcctaggctcacaagtagaaggtaaaaggtgtggtctgtcccagaggagatgcagatgctgggctctctccctgaaaagttgcttcacttcctgcctgatcaaaacaagtctagaagtttcgtggaaaaacaagtccagtagatgcctctccagaagtgttatgcttctggactcctttggagtaactaagtccacgcctctggataaaaagcactgtgagtaacgtttcccactttgcctcgagtctccggacttagacattttggttgtattcctgatgtaaggcattgctctcctgatctaagcacctatttataaaatgtttcccaaatctggccaggcacggtggctcatgcctgtaatcccagcactttgggaaggcaaggcaggagaatcacttgagcccacgagtttgagaccagtctgggcaacatagtgagaccccatctctattttttaaaaattgttttaatcaaaaaaaaggaaaaaaaaataaaatatttcccaaattaggtggtgctgactaataaaaatgatagcacttgaaaggtggccacaccttaatgatgtgggcttagagccactaacatttaaaaaataatccagaatgtggcagttacatctactgactgatttccttttttctctctagagcggcactgttcaataagatgaccacttgccaccagtaagtgtttacatttacatgtaaattaactaaaattagaggaaatgacaaattcagttcttcagtcacacttgtctcatttcaagggctcagaagccacatgtggctaatagctaccctattggacagtgcaaatatagaatatttccatcaatgcagaaagttctgttggactgcactactcgaaatgatgaaatatttatagacaaactccattcttctggcacaacacctgacagatgataagcattcagtaaatggttgttagaaacacggttcagttgatatattagcttttttgctggtggcagtgtaaatcaatacaactctttggagaaacaatttattagtcatcttcttcacgtgtgggtttgcacattttgaccccactcctagaatgtgtttatccaaagaacttctactccgcagggcgcggtggctcatgcctgtaatcccagcacttt

SEQ ID NO: 588951 - DNA, 4001 bp, Homo sapiens
gcaaagtattttacaaaaatttataagtcctttgaaggtaagtctcattacttgaagaaactaaggctgagatggatataaatgtgactccactctctcatcctacccaaaccaatccgaaatgacgccaaagcaggtgagctttcttctttatactattatacccacctccctcaccatcaccaatgatgggcaatgttataagcatctagccttccttaatggactttgcctcagaaaacccaattttctagtatggcaaacagcgatttcaacatggctttgcttccctgaacccacactccaggactgagacatcgattgaaccaatgtttcagctcagtctgctgaaaaataaatacatgaagtgcaaatattgacgattctcatgcaactcctaaagacatgaaaaaggactccctggaacagtgcaaaccggcaaaagggaaacaatgggaggaggaggagacaagagaagaggcggcccgggaagaaccaggaaagggggtaacttgaatgacaggtcttaactgagactccacacgccaccgcctggacgcaagaactaagtacaggcgccgccgccacccggctgggtgcaaggggcaccgggacgcccgcgaccactcgcatggcgcggccggacacgcacctgtgatactgcgcctgcaggaactggaattcctctttaatccggtccagggactccgggatagtgaacttgaagggctggcctgcagcctggtgcggcgtctgggggcgaccagcgagggggaccgagggacgggaatgcgggcggatgaataaagcagtaagtcagagaaggcaagaacgggtgggacataaacataaagttagaagtggctgaaaacgaggccccaaactcgagtttgcccttcactatggggagggggaaagcggaccctccccgggccccggcttctaaagaggctcggaagctcttcccagtctccagggcggattgcgctaagtgcgcccgggtcaccaggccaaagggaagggggctccccggcggccagggaagaccaggccagattgtcggtgtcgccgccccttcccccacggcggcgataatgaccccggggaccagaggagaaaaacaactcctttacgctccccattcccagagtcgccggggccacctccagacgcaccggaaccggggccgcattgacatgtaaataggcgagaggagaaacaaaggggggggcgccctgcccccactcggggaaggtagaggggatatggctgcaggagagaaaccccagccttccccagcgcccctgtccgctcggtatagacgtcaagtaggaaggagcccaaagggagggagaaaattaagagtttcggcccactccccaccccaggaagagagggccccagacctccccagccttacaccgctgagggcgagaaggtccgccgggcctcagaagccaccagtctccctaccgcccgggagaagcgcctccccaacgatcctggccccccaccaccacccagccgcgcctcaccgggtgccggctctgcgggaacatcgctctggcggcggccggggctctgttccccggcaactcaattctccggtcaatttccaactttaatcccgccgaggaaaattaagccggaaagccaagcagaagcggggagcgcgctggccacgcacgcgcgctccgccgggcgcaccggccactcggcgcccgcagctgctccggctcccgctcccgtcggtgcgggctccggccctcagggccacattagtgggcgccccaggcccagctgcttcaagaacctgcgcggagacgtcgggcgctcggggactgtgcgcgggggcagcgctccaacccccggcctcagctgcccgggcggggaggcgggggcgcggtgactccgaccgcactcccctcggcgatccgcgtgcgcggcgccagtcctgggcaaacaaatccagacggactgcttttctttgctcttctcctggtccgcctcctcttcgggctttccccgaggcggcggcgggcgaggtgcaggtggcgcggcggcccccgctaaccccacacaaacccgacgctttcggggcgactcccgcaagattcggctgcgccttcggccgggtgctcgcaggctcccgggacgcaaaggggagcgaggttgaagacgcagcggaggctcctggccggggagcgacggatgacgaggcggggaaagtgcggagggcgcgccgggaggcggctcggcacgccccgtgcgaccagcactcggtgttctccgcggttgcacaaaccctccgggcccgacggggctactccaccgagagcagtcccgcaagtgcccaatgctcctcgagcccggggagcatcagggcgccgcgcctcgggcgcactcgccctgcacggccggaccggccgctccggacccttcttccgagctccttcttcctcggtcttctttctttccttccttcaccttcgtgtgcttctccgcaaagggcgctccagcccactgcaaagttctctcaccacccgagggacgacatccacgagatggtggggaaaacagcaggagtgcgctccgccaatcggccaccctccccggcgggcaaactctgcgggcgagtccagagtagtcacagcggtggggccagcgggggttttggtcgccgcgggacgacggaggtccgggctggtggcgcgggtcccgcccggccgtgcgagggtggggtggcgcagtcggctgcctccgggacgcggggcacagagtacccgccgctgtttctgctgctgctgcttctgcagccgccgctcccaccgccgccgccgcccgcgcctctcgcgccgcttacattaacacgcggtttcacactccggagctaaccagcgccggccccgcccagccccgttcgggcggggggcgcgagcgcggagccggcgggggacgtgagcccgggaggttggggggtggggggggggcagaaggcccgcatcagccaatcgcgtgcgctgcaaccaacgtggggcgctgacgcgctcctccccggagcgtatggcagcgcagcgccggacggggcgttctccctccccccctcctctcgcttccatctccgccgtctcctcggtctcccttcccatcccggcccctcctccgccagccgcgtcctcccgggcttggtgaggaactgttcctggaggagccgcgggacgccaaaaccagccaatgggaagcggcgattcgcggagattggcactgatgatgggaaggtcggtgggaaggagagcggcggggctgggctgtcaatcaaagtaacgtggggctggctagagagcgcgcgggcgcgcgctagcgggagggactggcgagcgtgcagccggggaagctgagggctcgagttagcaaaaatcctgccacttgctcacttttccctttaatgaaaatcctcagatctaagtgaaagtaactcaaagactagctgcggagtttcttattggaggcggaggggggcttttggtaattcgagcaaatgtgtttttcagtgctggaccccttgtttgatgctactctaaaagtgaggccacattcaaaaatttatctgaggtttgtttttccttgagctgcctttttacggatgtacgagagggagtggactgtgcacttagttggaaatgcgtaaatgagcaacgccacggttggcgtaggtacaccagcaaagacgactgtgatgtcctcccaccccacccaccccctttgcacccaaagtggtaggatttgatttttattgcaggatttcaagccacttttcaaaaagatcgtcctgtcccgtttggcgggaaggattcccagggtgctgccagaacaaggcacgcgtgtccgcagatgagacgttttgcccggggcgcgaaatcccaggtcttcgtcttaaaagtcctgacttcgctgtgttgggagaggtggggagcggctgaggtttttaggaacttctcagc

SEQ ID NO: 588952 - DNA, 4001 bp, Homo sapiens
cctgtaaaaactgaaactcttccttaatccgatcacaggattcggaaattgtaaatttaaagggttgagcaggctgatgcggtgcctgaagaacaacaataaaatatttaattagcccacatcacaggcgaagcagggagacggagaaaacctactatgcggcgttagcggggggtgagggtcatcgcgcacgcaagcaaagagagattaaaactctcctcccgcaaccctcctcgcgcccaacagcccaggcagaggctggtttcgaggtggtcctggggccccgcatactcccgcccgcaggcccccgcgccccggaccccgagggttcgagtcccgtctcccctccccggccaaagacaggcacccagggacccgcgcgccgcgcccactccctcctcacccggaatcgaaactggcccgtcggggggacccgcgccatggcgtcgggctgcggtcaggccgggggaggagggaggcggccgccaccctctcggctcgttcgttcgcccgctcgccccggcggcccgcggcgcgaggggccggcgccccgcacttccaaaccgcagccagcccagcagcgccgctgccgagggcgccctccccgcccgggcgcggagtcgcgcctccttcatcgctcgccaccccccctcgaggagtcgcggcgcggggaccgcaaacggctcggcgcggcttccaggggcttcaaagacaacaataagaaaatggctacaactcaattgcctctccgcaccccctccgagggccaccgcgccggggggtgggggtgatggcgggcgggctgctcccggcgcggggcgccgatttcgggcggctctccacgcccctccggccaaaagacacaactcggtgcgcagggggcgacgcggggaatcccccagcacccggcgagcccgcgccccgccgcccgcactcactgggtgtctggtctgcgggtacatcttgctcaggtcgcgaatcatccaagccgatttagttggctgcgctcggcagaggcgcgcggctcattggctttaatgaccccgaagaggaggcggccgcggcagcggaggcggccggctcggtctgaggggcggctcgggcggtcccggcccccgccgggtctcgcgtgacacgggcggcaggaacgcgcggcggcggctgggtgccggctgccgggccgctccgcattccccgcgggcgtcactggcccgccgcgggcattgtccggcgcgcgtctcccaaggcaacgctccgacgttcgctccgccgaggcgcacccgccgagcccggcgccgcggccgccgctcacccggccgggaaagtgcgggctccgcgccccaccgcccgccggcagctcctctcgctcgctctgcgtcccactccaaactttttttatttgtcttttaattggttgttattcctccgaatgaatgatctttcttcttccctaaaagcaaacacaaactcctttggttcggaagaggtctcggcggtgctttttggtttctctggagatttttttcacttcacagcaacgatcttttaaaaggcaccttttagcttcttttaccacatctcatttccttatttctcttccttcctgttttcttgtcttttttttaaccccaaattgaaggggattataaaaataaaagagtgaaacgcttgcggcttttttttttaattctctctcctttcaaactctgcgaacaccacctcaaaataatatacaagtgtgtgagaaagggggaagaaagcagccaacaacccaaacacccgctcagcacagctctaacaacacgctctgtgtaggtgacttctttgaccaaatttagcagcagctaatcattaacattctgatacatattcacaatcttccgcggggcggccgcgcagcatcccgggagatgtagtccgccccgggcgaccctgcctgagaatacggccagattgactacaatcaccggcccgccatgcgagcgctctggcgagctctccaagcgccccgcccacccccgttgcggtaggcgtctccaccaaccaatcagaggtggctgaacattaatcgccgttctgtgttagtgcccatcatttcactgctgacaaatggcaagccagcggggaggagccaacccagctgaaacccacgtgggggccgggcgtcgcctgtagctccgaccaattaacgaagaggaatgaggttggcggaggcggggcggagatggcccgcccaaggcggagcttcgccttggctgacgttccttagcgcgagcgttcgaaccgggaaaacatttgttcagctgtcaatcaaagtaacgtggggctgggagaatcggcggctgctgctgttgctgctgccctggctgcatcttcagaattaggtgttggtggtggtggtggtggtggcggcaaaataaagagggtggagggagcggtgagcctgggggctggtcaaaagatcttcttccgagtctcgtcctcccgcccacccgtctcccaacccagacaccttcggcccctcgctccgcagccgcgccaggaatgcggactaattagggtccaatgtctccttaaagagacaagctcggccttgtgtaacgcgccgaaacccctgttgagacaagagggggaggatcacgctgatcttacttcgttcggttcacatcaattttacgcgccgctggagccggcataattttccgtgtgaacgcgactcggtccccgttcttgtttagagccagaaatggagtcgcgagatgctggctggggccggggccgcggggtgggcggggagctcgtccctccaagccccgcgggggctgtgattgccatttagttccgaaacaggcctccctccctccacccccggaggcactcggagagaaagcgcatcccgacgctccatcgggggtcgcggggggcagtaaccgtgggggctccgggtggggctgaagatccgggaatcagagacgctggacctccaaagaaactttgccgactgggccacgtgaaccccgaacacggtcggtactgaacagagcaggccgacggggcacgggtagaaaacgcccctgcgcgccctgggacgttccctcccccagatcagtaccaagactgcgcctctttttcccgctctttggagaagcaagtcaagtttatccccgttaaaaacagagcagggtgccacgcgggcccgagagatggcggaaaggtgggggtggccccaggggcagatgctggaggaggagagaaaggggcagccatggctgaggaggggcacccctagggaggggcctgggaaatgggggcggcctccgtcagtgcgcctttccatccttagtccgtgtccagctggaggcagcgccccagttcaaggggaggctgctgaggctcgcagtcttttctagcgagcggctaatcttggggacagggaaaaaattcggaaaaagtcaagaagagtgttggctaatgtaacaggctgggttttagacgtttatttctatgcgtgcttgcctactgtaacttgacctgttggttgagatggtgccgccggttcggcgttagtggaaaactattcttcttaatgatatccctttcctcagtggatgactcggtgacttaatgtccaacctagcacgttctgtgaacctccttccgttctggccactgtagtgagctggtgcaaaggaaggctatggtggtcttcacctgcctctaatttcatactaaaaacccagagccaaagttcacagaatgtttcaattcggcaaatattttcgcctccatccccaaaataagaggacagagaagtccttttgacagttttctgaacctctgctgttccatacctagccacatgtgactgttaagcacttgaaatgtgtccaattcaaaatgagatgtgctgtaagtacacatatatgtggcattttgaaaaaattaatgtgaaaaaactgcagctcaataatttataattatgtcaaaattgtgatattttg

SEQ ID NO: 588953 - DNA, 4001 bp, Homo sapiens
tctttgggtctcgtttcctcttttctgttggggagtgggggaaggggatctacaaatggtccaagaaattaaaagaggcttagatccagggggtgacacacagcaggggatgggagtagggtattcagcagatgaccaggtggaatgtaggtacatgactgggtgaaaatggtaggagagtaatttaaaatgatgggaaagctcaggttttgatgagggtaaattcaggtaggatgtgcggattaaaggttggtgagggaggtagaactaaggatgggaacggatgataagatgagcatgggagagttaaaggcaagggaagtattttgtaaggggataggcaggatgggtgtgaaatgcagagtcagggatgagagttggagaggagggcttaataccaagagaacaagtgaagtgggagaagcagggctaaactttcaggggattcagttattcccttctcccatggcaacagtgattccttggttagcttcccccatagtcatcagctccttcttccctaggcagtccccaacttgtgactaggccttgtacatcctgggtccctatttcccacctatgttgtctgtaaacaacacagtccagaatctctgtcccctaactgtggtggccacagcaagggccttgggcttagagaatggaataaagaagctggaatcccagatgcctgcaattctagctaaagccagaacgctagcctgaaattagtttatctctctgggtaaaaagaagcccctgtaactacataggaataaaggatttccctacaaaagaagggcatttacctactgccaacctcttaaattttatctgctcaaggtcaactatgctagcctcaaaccacaacccctaaagctgccccaaattcctaacattaaccccacctctaatttgtttcctgattcccagtaccggcttggacattcatccctttcctagcacagactcatatccaatccctgatccctgaaactgatctaagttttgcctttagcaccaaatcccctgatgttaaccctaaatgttgacccctaagcctaaagttcatttataatttgattcctaactcacgctttcactgtttatccttaacaccgaccatgccaacattctttaatccctcaaacaagctctaacctgattcctgttgtttgttgacccttaacctgaccctgaactcaaattatgacgtatgatggccatcccagcaaacaagataatgaccgtaatctaaaccttacctatctaaaacggacctgactcacactaactcttaagttttaaccccagcttttaactcctatagcgacccttgattcctaaacggaccccacctaatccccaactcacccaaagctttcctacccacatgcccgctatcagctaacaccaaagcccgtccccgccctgcgccccgctgccacccgactcctcacgctccccaaagcctatcccagacataggactgctcccaggaaaggcctgtcttccccaagacggcctacttcacgccgagctcaagccgagatgcgctggacgctgacctctccaactaataggacccgaaccggacacgcaagagaggcagggcccgcccgccccggggccaggccccgcggccccaccctaaggcccccgcccggcccggtctggcctacctgcgctgcctggctctgcgccccgcccgccggcccgccgccccgccgcttctcgggtcgccctcgggctccggcctcgccctcccttcgacactctctcggccacttccgtcctgggaacgtcccccacccgcgggcggcgccctgggcccgcgctctatggtcgcggggggcaggcaggaagctgctctggccccgttctcgatgctcgggagccgccaaagcccggcagcccctccctggcaggaagcgagggtgcggcgcaatccggagaggacgccaggacgacgcccgagttccctttcaggctagaactcttcctttttctagcttggggtagaaggcggagccggagccccggaacccccgccctcggggtgcgaggcggcagcagggccgtcccctacatttgcatagcccctgggacgtggcgctgcacccaagcctcttctcagttggagggaactccaagtcccacagtgccacggggtggggtgcgtcactttcgctgcgttggaggctgaggagaattgagcctgggaggcgggtccggagagggctatggaaagccgccggcggggaatcccggccgtagagggacagtggataggtgcccgaggcctacagctggcctggggctcgtgtctgggcttcggacgttggggcccggtggcccaccctttccgtagttgtcccaaatggagctggaattggatgctggtgaccaagacctgctggccttcctgctagaggaaagtggagatttggggacggcacccgatgaggccgtgagggccccactggactgggcgctgccgctttctgaggtaggttggggttctgactggggaaagcgtgggatgtccatgaagtcaggtgatggtgataaggtcaaggcctgttcattggaaccctgcgcaggtaccgagcgactgggaagtagatgatttgctgtgctccctgctgagtcccccagcgtcgttgaacattctcagctcctccaacccctgccttgtccaccatgaccacacctactccctcccacgggaaactgtctctatggatctaggtgagtctgaaataagtttgcggggaggacagggttcatgggcctggctattcatactttcccttttgcagagagtgagagctgtagaaaagaggggacccagatgactccacagcatatggaggagctggcagagcaggtacttgacttgattttcaggagattactctcacattccccaggtgggggcaggattccccattcctctctgacatccccatgcaactgccgtccactttcttgttaccctaggagattgctaggctagtactgacagatgaggagaagagtctattggagaaggaggggcttattctgcctgagacacttcctctcactaaggtaagactctcattggttgaacaaaggctgaaaagggattaaaagtcccaagtaggcaaattctgttaactttatatcaataactttaaaaaaggattgaggtgagaaacttagtagatttattgctaataggaagttgaggcaggtacacaatatgccagatgcaagggcagatcctcgtttttgttgggcttatacaaattttggtgttctgttaaaaaaataactcaaaattatcagtgcaacattagtattgggccttggaaaggactgtgtaagtgaagggccttgacacttcgttggcttcatagtaatccacctcttgctgaatggtagaactgtttagagagttcaacagggttggactaagcagtacatgaataaatgtaaaatccttagttttcagttttaagcaatgagtggcaacttcacaagcagagtactggggtactatgatgaaatcagtgctcattaatagaaaggttacaggaatatatatatattttttgacaaggtcttgctctgttgcccaggctggagtgcactgatgtgatcatggctcactgcagccttgactttctgggcttaggtgattctcccacctcagcctcccgagtagctgagactacaggtgcacactaccctgcccggcaattttttttttggtatttttagtagaaatggggttttgccttgttgccaggctggtctcgaactcctgggctcaagtgatctacccaccttggcctcccaaagtgaagaattttaatttcttcaaagtacaagatgagtcagcagtgtgatgtggctactaagaaagttcatgggatttggaaactgtagcaatagagttattgtctctacaagtcactctcttgctttccttgatactggctagagcacatctttga

SEQ ID NO: 588954 - DNA, 4001 bp, Homo sapiens
catacacagttatcaaacacaagaaatgtgaatagtgtaaattgagaagtgtggtaaatgtaaaacatatactaaattccagacttagtaccaaacaaggaatgtaaaaatatcaataataggtaaatatatattaaaattttaaacattattttaaatacgctaagttaaataaaactattatcgaaattaaattcacttgtttctttttttaatgaggctactaaaaactttaaaagtacatatgtggctcacataatattgccaatggatagcactgatctagcattctaggtagaagaaatagccagtgcaaaggccctgtggtagaaagctgttctaatggcaatggagagttattaaaagtttttaaggagagtaatttgttagattgaagcctaaggaaaaataataacaacaaatgcaagtacataacaaacaagaacgtgcagaatgaattaaaggaagaagactggaatcaggaaagcagttagtgtgtaagagtcaatgccaggggaaatgagggcctgccttacagtggaactaaggggatgggcagggatggacaggcttcagggactgacaggaaaaggtacatggggaaaagaagtcaagtttggctgtggttttatctcgcagtgagcctaattagaaaatctatctccattaacctaacagcagagggatacagagaagaggacaaggaggaggactatgggcagggaattgagggaagggatggcttcaagataatgaattagtctttgctaaatattacttgattttctcctatatcctcaacttcaggactgcagctggctttttctctcttgagtttctgaccctgcctcactgtaaatcattttcttagctgttcggctctactatgggtttctaaagcaactgtgaagtctgcgcaggggaaaaacaaaagagatccatcatgaataagattaccaaccagctgattggtatttcactaagaaagaaactgttgcattagctgacattatacatatttccctcttgcttttttcttctctctctctctcttttcctttttcattctcttatttttttcatcctctggactaaactatattactgcatacagaagtctgacacccacttagaaagttctttctctagagacacacacacaaaagccatctttttcctgagattgaaaggagcagggtgactgcttgaagctgagtgtaaagaccaccagtgggaagaaatgacactgaagcagtctgcttactctctagtgaagaaggtattataattctcttacagatgcgaaaactagtctcagacaggtttgataatttcttcacagagccacaaggtagcagagcagggaccttaagcagatctatgttatctcatgcccctgttagcactcaaaatttccaaatggaacaaacccccaatggctgcctctagtgccctgtaacaatgaattatttgatctctgtggcttcttgagtctttaaggtaatttaactcttttttttttttgcaaaaataaacaaaccagggcacacagtgagaagttctgggcagaagtgagggaaagttcagaggagctgactccagccacatacctccacgcagggctcccagctttctggtctcacgcaggagaggaaggccatggctgggatcagagtcccagccaggcgcgaggcagacatcatcctggcatcatcctcactgcttctgtgagcagcagtggccctgtgaatgcgtggctcgctatcaccgtctgaccgagcagtttctgaggcactggtgtcttctcttcctcgagccgccccacagcaattggtgtattcaaagcagttctgggctaaagggtgagaggaagtgaaagcggcaaccttagcattctggacttttgtttctctaatagttatctcttttgtcacaggagaggaagttagaagaagaaaacgcctgcagaccagtggctaaagaaacagcaagaggaagctagttggcttttatcccaattagtcatctgacctctgcctgggcttggtgaatttaggaaaacaatcaggttctattaaaatagcccttgtaactctctaggatgacggtgattttccaattttgtttcagctgtggaaacactatttgtattagtttgctggggctgccataaggaaataccacagactgggtggcttaaacaacagacattcattttctcacaattctagaggcttccagtctgaactcaaggtgtcagcaagtgtgtctgaattctaatctccccttcttataaggacaccagttatgttggattagggcccaccataatgacctcattctaccttacatacctctttcaaggctctctctccatatacagtcatagtctgaggtagaggggttaggacttcgatatgtaggtttttgcaggacacaatttggcccgccccttcttgtgaagaaactcacatacaaaactgaaaataaacctcaactgaaacacagtttgaaaagtacaagaagattgggaaaagtctgggatttcagaatggaatatactgaagttcagatctcagctgggtgactcatggctttgaggcattggtcaagtcatgtaaaccgctaagctttactttctttcttttcttttttcattttctgtattatggtaaaatcacataacataacatgacataacataaaatttattatcttgaccatttgtatgtgtacaatttagtggcattaattatgttcatatttttgtacaatcatcaccactattcattaataaataactccccatttcccctttccctaggcccttgaatctatgcactacttttgtctctataatcttgactactctaggcagctcttagaagtggaatcatacagtatgtatctttttgtcactggcttatttcactttgcataatgtcctcaaggttcttttctgtgtagtatagatcaaagcctccttcctttttaaagctgaacaatattccattgtatgtatagaccacattttgcttatccatttgtctgttcatggacacttgcattgttgccacacgttagctattgtgaataatgctgccataaacatggttgtacaaatatctcttaaagtctctgttttcaattcttttggatacgtactcagaagtgagattgctggatcatgtggtaaatctatttttaattttttgagcacccaccatatgattctccacagcatctgtaccattttacattcccacaaatggtgtacaggagttctcattttttcacatcttcaccaacacttattattactttctggtctgtaaaatgtggtaatcacttttaatcatagcagaagcttgcatttataaaatgtattaaaataaagatacgcaatggtagtcaaattatacaaacctaccaacctttagttttctggtctttaaaacgaagataatcgcatgtgttttgaattactgaattaagctaacttacgtaaaacgtctagtctagagcatcatcattacattccataaatgagagctatgatgaggattgaaaatgtggatagaatgaagatgataatatgtatctcaaagtattgtattgggattaaatgaactggcatttgtaaagcttttaggacagtgtctggaaagtagcaagtgcaatgtaagtttctgttaaataagaacctgatttaaaacaggaatattatgcatgctaagtcctagatagttctactgtaatatcctccaagcacttccaatccaacgtgtcaaaaaccaagctgtgagggaccattttgtggtggactgggcacaaactcttgtagactccatcaacacaccagtagagttaagataaaaacaacctccatgtcaaagctttgctctgagtattgagattattcatgtaaagattttagagcagtgcctgacacagagtaggtgctcaataaagtttagttccctggaaagttaatggtgttt

SEQ ID NO: 588955 - DNA, 4001 bp, Homo sapiens
ttgactctgaacaagtcaggtttgaactgcatgggtccactcatatgaagatttctttcaacgaaagctaccccgagtgtgcctgcctttcctgcctccccttccacctcctgcacctctaccatccctgccacccctaagacagcaaggccagtctcttctctctccccctcctccttcagcctattcaacttgaagatgacaaggatgaagagctttatgatgatctacttccccttaatgaacagtaaatatattttttcttccttacaattttcttaatagcattttcttttctctagcttaccttattgtaagaatacagtgtataatacataaaacatacaaaatatgtgttaataaactgtttatgttattggtaaagcatctggtcaacagtaggctgttaggaaagtgtgagggtagtcaaaagttaagctcagatttttgactacgcaagggtcggcatccctaaaccccaagttgttcaaggtcaactataattccctattactcctcactcttcctccctccttcctcctcttcttccttatcccttctccttcattttccccacaggctaactgcaactcagcccacttcatttcctaatttttcctcctccctgcatccccccgagtctttgtgagatgctcttcccttcactcctgccagccctatggcatcatggcattatcatggtgtatggagaacttctgtcttatctgtttctcccactaacccagtggttttcaactggagacaattttgctcctcaggggacatttggaaaagtctggagacatttttaattgtcacttctggggaagggggttgatactgtcatctactgagtagaagccaaggatgctgctaaacatcctacagtgcacaggacagcccctcacaaaaaaggattatcaggccccaaaggccaatagtgctaaggttgagaaactgcactaggctgagttcctttaaaatatgaccctattcagcgctgttccagcagctccacagacagtgtccagtgcccagtaggaaggaatccaaacagttttaatattacatttgaaattttaattgaaaaactcttctgacagctgtatgttataactaataagcaatatgaccacataccacaattcaaaggaaaaccaatatccagaggtaaaggtggcttacacccatcagtctttgacacttcctcctatctagttctctgtatttcttccctttctccttttctcttgtccctgtgctcactgtccccctttactgtcatgtttgtttgaattccacttcaaaatgggaatttgaacagagtgcaataaattgtcccacatttgtttattttaggaaatcattgcatttaattttaacatttaaacatatcaattaggccaggtgcggtggctcacgcctgtaatcccagcactttgggaggctgaggcgggcggatcacgaggtcaggaaatcgagaccatcctggctaacacggcgaaaccccgtctctactaaaaatacaaaaaattagccgggcgtgatggcgggcgcctgtagtcccagctacttggggagccgagatcgcgccactgcactccagcctgggagacagagcaagactccgtctcaaaaaaaaaaaaacttatcaattactgggtgacatgctgtgcactgcaagaaaaacaaagataaataggaaactgggactatcctaactgggggagatttctgtagcagtagaaaagtagaggaaatatagttttatttcactaatgtgattagggaatatctcatggagaaagtcttcgatttaggtcttcacacatgtttcataaagaatgttaacacaccacacataggtaataatgttgtctttccttacctggcatcattatgagggccactttttggggcaatgattcctaaatttcagcaactcctggagggcttgtgaaagaaagcacagattgctgggttctgccctcatagtttctgaggcagtaggtcttcggtgaaatcagaaaactggtgtttcttttttctttttttttttgtgacggagtcttgctctgtcacccaggctggagcgcaatggcgtgatttcagctcactgcaacctccgccttccgggttcaagcgattctcccgcctcagcctctgagtagatgggaaacagtcgcgcgccatcatgtttttgtagaggcggggtttcactctattggccaggctgatcttgaactcctgacctcaggtgatccgcccacctcaacctcctgaagtgctggggttataggcgtgagccacggcgcctgtttgtttttttttttctaatcagaggttttgctcttgtcgcccaggctggagtgcaatggtgtgatcttgtctcactgcaacttctgcctcccaggttcaagtgattctcctgcctcagcctcccaagtaactgtgatttcaggtgcccgccactacacccggctaatttttgtatttttagtagaggcggggttttgccatgttggccaggctggtctcaaaactcctgacctcaggagttcggcctccgaaagtgctgggattacaggcatgagccactgtgcccggcctagaaaactggtgtttccaacaagtcctttggtgctgctggtgctactgcgggccttctgaggagactttgagaaccgctgcatcaggattatcagcctggtaactcctggccgaagaaatgcacacccttcatttggctaaaagaaagaatttccaatattcataaagaaaacacaacttgtgggttctccaagcaggagaggaaaaatcatgttccagtctattcctgtaactaatgaagggctcaggtttcaaaggtaagttaattgtcagacccactttattgtacccagtgtccttgggaaacataattatttattggaaatatgtcacaactaacataagtcttaaaaatttgttaaattagaaacaaaatattgtatttgctgatatgttaaaacataagggcctaacatttagaattgcacttctcatactcacaacatgtactcaaaatgctgttaacatctactttgatgattgttttgggtttacttgaatctaatgtttccatttaataattccttttttttcccctttccttttttcaatcaatcctttctcttttctatgttctatattcatgttatcttagaattccattttggccttctaggttctttacttcttcctccagcctgtcattttcatgtcttcagtgatttctcagacttctcacagaaagttaaccatttttgtgcatcttgaaacttttaacctttgatttgaagataaatgctaataaataaatataattcttatgaatacattatgcacaatgttaaattcaaaatgactgacatgtttcatgctgtgtgctatagatatgctaaacttcatttcaaacagactaaataaaacacatggaactacatgcactttttgtgaacagcatcttcatacctgttgtttgttaatgtcagcaattataagcttataggtgtgtttttcaagtgatcactgaaaataaatgtagtatgtctattggcagaaccactcacacctactaattatttgaaaaacatgctcaaacacacagtagtgccttctagagaaagcatagtatagtcctccctcatttccaaggacaagaattcatttctttaagctttcttcacgaaagaatgcaataaaagaggaggaaactgggacttgattgaagaaatatctctactgggagcatgaactaataatgagtgactctaagaaatctctcacaggcatttttatttttggcttttgttgttgttgtttggttggttttcatttgttttttatttttattttttattttatttttattttttgaggcagagtctcgctctgtcacccaggccagaatgcagtagcactgtcgtgggtcactgcagtctttgcctcccaggttcaag

SEQ ID NO: 588956 - DNA, 4001 bp, Homo sapiens
caaaggcttgcttcatttagggtagcataagcatctgcgctgagactctcttgctccttcctcactcttccagaaataatgccccttcaagagcccaaaagtataaaggttgtccggcagattcccagtggccttatgttcctccctcctccccctactccgccttggtttaaagaagacaagagaaggctccagaattgataaaagggcaagttagcaaggatgtggcttatgatcactagcatctgctaggccagctccaagaagaccctccactcaaaaaatgagacctgaatgcctgtctttgccccagggccataatccttgtgcgcctctgggacccctttagaaatgaagaggaactttactgctgggaccctcctccccagtgttatccactaaagcctcagcaagctctttgtttccaacagctgtgggggggcaagcggccttggagagaggggagaggtcactcccttgctccccgctgctgccagaatccaggccctcccgcaaaacacacacacacaggcacgacatcttccctgggacccaattctctctttccacactttaataacccagggttacaccttgctacacaagggcattccctgagacctaatttcctctttctacatccaaaccctacacaggatgatgactcccaagcctcctcccctttgaaaagacataaatggggttcgctatagggcacccatccctcctcttcaatgcataccccagggtgactaactgagccccaggcttcacacacaacacacaaaaacacagggtcacttcctgggccctgggactttccccgctcatatccacagacccgaggtcactctaagcccccagatcccatctcagaacccaaagaacacacacgcgcgcgcgcgcgcacacacacagtcactctgcatcgccaaaccgcgtcctcaagacaacccgttccctttatccacacgacccccacccccgagacccccagtgccttaaggaagaatctccccagcacatcagcacatggtcactcccctgccctcaccccgcccagccccctcgccgtctcccacccaccgcactctgcacacacacacacagatccctgcctggggccgccctccctcccctcagccttcacaacacaaacacacgctcccgcgagcacacccacgaccacaccgggagccccggccggccgctcagcctcgccggccccggccccggccccaccgcctccccacacgccgggccgccctcgcccagccactcgacacactcggacgcacccacggccactcccatccccagcgccggtcccaaagccacaccgcacgctcgcgccctgccctccgccctcgctcaccctcgggcccacccctgggacccccacgacggggtctttcccagcccggccgaccgcagggaccacgagggaggcggcaacggaggggtgggaagacctagggccggctccgaccggtcctacctgagcagttgatgctcttgcctttgccgccgggacagtccccgccgctgccgccgccaccacccgggggctggttggacgcgcggctcccgggcagagagaaggcgaagagcagaagcaccgacgtgtagcagcagaaggcgagcggaggcgcggcaggcagccggagcggcgcctcagcggctgcggcgcccatgactggtgcccctggacggcgggaagcgcagggagccgcaggccgggggcatccagccgcgcgcccagagccccgccgctgcctcggtgcctcctagcagccgcgccgctgagccggggagcagcccgtcagcatccccgccccacccgcagcgtccgccaggcccgggcccgcggcgctcgggacggagtcggcgggtccgggcgcgtgcgagggtcgcgggcgcgcaagggtgcgcgcgagggtgcgagccggcgtgggggacaccgcggcgaggggagcgggcgggcgcgcgcgcggcgggcgggggtcgcgggccggaggcaggcccagcctcttgctcgcctcctcgccttccctttgtgtccgtggccgttgccaccgcgtcacaaagaccccggcccgcccggtgaggggcgcgtgacggagccgccggcgggaggggtggctgcgaccccgccccgcgcacacccccagctcccgcgccgacagctccgcccccggccgcggccggcgccgcctccaggggagctattgttcctgcgacagggcaggggcgcgggggccggggttggggccacccctcggcggtaggctgcaccgtagcagacttgtttgccgccctttgtgagctgtttttgaagcgtttccttcgcccagcagcagggctgggaatgagggcaggtggtctgtcatatatctataatagtttttaggtggaagaaactgagtcacggaagaggtaaaggtgacttgtccaaggttgcataccaagaaatgggcaggaccaggatgggagcccaagttctgactctagccatgcagttctcagagatgttgggtgaatggttagatttctaggttcctcatccccacctcattcccgtagactcacatacaagtgagtgaaaatagttttacaaaagtctgtgttgccctctccccctaacaaaagctgagattcagagaggattttctaatatacaaggcctggtgaaagctctttatgtgcattctcttcaattatttttttacaggcctcggagggagttttcgttcttatctccattctacagatgaggaagtagggacccagagaggcaaggtgatctgactcccagtccagtgctcttcctaccacatcctgctaggtgataactagacataggtactaagatcatggactgaattgtgtgaaagtcctctgcctttttcattctattatattgcatcccaccccagaaggaattttaagtctcattgaaaaactgatcaatttgattcataaaattaagaaatgtgtgaaaagccaccgcaagcaaagccacattaggaaaaatgtcttcagtgcaaatatgagacaatatacttaatataaagttatatgtcaagaagaaaaagttaacataatagaaaaataggaagcttgactcttattcacaaaaagtacagacaataaatacatgaaaacagatttgaacccactagtaataaaagattaaaaccacaaaactctggccaggggcagtggctcacacctgtaatcccagcacttttagaggccgaggtgggcggatcacctgagggcaggagttcgaaaccaacctggctaacatggtgaaaccccgtttctactaaaaatagaaaaaattagccaggcatggtggcgcgcacctgtaacgcctataatcccagctacttaggaggctgaggcaggagaatcgcttgaacccgggaggtagaggttgcagtgagcagagattgcactatttcactccagcttgggcaacaagagcgaaactccatcacacacacacacgcacacacaattattttccctttggatgattaacaagagttaaaagaattggcagactgagcactactaatttatacattttaggagggcaatttgactatgtatcaaaaaacctttaaaatatgtttactctttagcaattccatttattggaatttatctaaaggataactggataagcacacaaaaatgtatacattaggatgttcatcacagcctttataacttaaatgtccatcagtggggactaaagtacggtacctcttagtacaatggagtattatgcagctttaacaatgatgataattaggttagcgtttactgacatggaaaaagcaggatactgatgagtaataggaaaaccctatttttctagaatatatataatgtgtacacatccctaggagaaaaaagtgaagaacactatacagcaatatattaacagtggttatgtctgaaagaccagcttatgagtaataattacctat

SEQ ID NO: 588957 - DNA, 4001 bp, Homo sapiens
gtttcatgtgacctgtcatcatcttacccttctgatttgtttttcacctggtcaggtggaaacttgggtggagagaaggataagccatttattaaccccacgcccctagcaccagctgtcaccttggacttgttggagatgcaggggctagaaaggaaatgacagagtgtacaggccccttcgaccccgtgtcccataggtggtggcccccagacacaccctctctgctggcagtgcagaacatgcatcccaataccctagaggagaaacaccaccccagggagagccctttctgctccaacctcctgggcaggtcccaggttggggcagcagccatctgcaggtgtttgtcaggcctggccacacatgcggacagaggatacgactggggtaccctagggtgtggggagggtcggcctggggtcagggggcatgaaggctgtgttccagactcctcctgcccccaatcctctgtgcccctgctggagctctcctagcttctctgatctgtaaaaggcaaagagagacaagctcgaaccacatccatcgtggctgggcatccctgtgcccattttatcatggcagaaactgggttccgtaacaaggacaacgggcagtggaggccaggcctgggtccaatgcggggcttctcagtccagcctcactcctctcgggtgcccacgtggctgctgtggccttgccacacccttcactctgcacccttcctctcaatctcaggggcaccccagcccctcttggttctttctcctcaaagggagctctccaagatctgtctactgcgcccacccccagctccaacccatctggcagtcacatgctgaggaggccgggccagagggagggaccttgtctagcctatcgcatggtgcacccaggcttggctgcccaaaactctgggtgctggagaggtggcattcacttctcgctaacccccaggctctctcacctgtgctcctgtctttggggagctgcccggtctccaggaagagccagaggttgttgcatttctccgactccactctcgtcaccccgtagctgaccacagagcctgcaactgtggagcaggaaatggaagagggctggggcctctgtgcttcccaggctaagagaaccgggcacaggctacttcctgacagacgtggtgggtgggctcaggtggggctcccgccgagacctggggctccatgtcagagtcagggacgcagaaccacagccccaaccctagcagaaacccacccctcaaagagcccaggcaggggccctggagtacccacccacggccactaggaggctccactgcaaagggtatggaaacttcctctgaatgaacatctgcaagccaaaggccatgccggtgcctgcaaagagccgaggtccccatcaacctgtacccggggatagccagggcccaccttgccaggcccccagcacctgcgggcaggtgacttggcgccccctgctggggagtcagggcagggcgggagggtgcgttctctcccagccgcaggacacctggacgcagcctacctgtgacgaaggtgaaaacgcccttcatgaaggcgtgtgactggcatgcggcatactccccgagtccctggggtggcagaggcgggtgaaggctcgatcccctgccctcttccttcaccgcctctcctgtccctcctctgggcacaccctggctgtggaggagtgagaccctgggcgcttggacacgtcccacctcccctatgcccacccggacgccctgagccccttagcaagagagtgcccccagcctccgccactcttccctgacgagggcacccccacgccccggccccccgcctcgctcaggtcagcttctggggtttgaggcccgcgtcccagaccggccttctcaccgggtgcttggcagccacggcgtcgtccacccgggacagacccaagttcaccatggttggcagggctcggggagcgggcctgcgcaggcgcaggcggaagggcgggacgggaacctgggggtgtggcccagaggacaggcctgcgcagttacggacggaggggcagggcccggatctgggggcgaggcctagggaccggcccgcgctggaacaggcggagggggcggggcctaggagacggcgcctgagggcgggtccgcgcggcagcaggcggagggggcgggacctgggagacgtgatctgggggcggggcctgagagacgggactttggagacgcgacctgggggcggggcctgagagacaggaccggggagcgggcctgcgcaggcggaggtgtcgggttctaagaggcgggtcctgccgggtgcaggcggaggggccagggccttggattgggggcggagcatggatcgagcctgctagagcgcaggggagaggggtggggcctggggcctggccacgcctctaggagcttgggccctgtgacctccggcgacgactgggcggggcgaaggcgggcaccgggcggggcgtggctgagagcgtgcgctcctccccccggccgggcctcattcccacacttgcagaggcctgatgattgtcagtgttattttgcttgaggactacaatcagggattgaatttctcataagccaccacggagtggggatgtataaaatcactgtttagcaaagtggttctgtaaccagcagcttagtagctgagcctcaaactccttttgttttgcatgacaaagagtctttactttcaaataattatcgatacaccaagtaataacatgtacaagttcttgaattctatcatctagtaattttgattaagagaaactaaaatcagcccaaacaattccactagtattcactggtgtaaccattagcaagaacggaggacttcaagtcaggctgctgcttcacacaggttacaaataactatttactactttttcatcgataaagtccctgatcttcaagaaagtgctagggaaaaaaattaaccccttcctttcttcaaagaattattatgtggtttttttttttaaactagatcaaagaaagaaaaagtcaacactgatatacgtgttgcttgagccaaaaggcatgggaaaaaagacaacatataaccattaaattcctaagaaatatgaggtaaaaagatgaaatcttggccaggtgcggtggcttacgcctgtaatcccagcaccttgggaggccgaggcaggtggatcacaaggtcaggagttaaatactagcctggccaagatggtgaaaccccgtctctactaaaaatacaaaaattagccgggcgtggtggcaggtgcctataatcccaggtactggggaggctgaggcaggagaatcacttgaacctgggaggtggaggttgcagggagccaagatcgtgccactgcactccagcctgggcgacagagtgagactctgtttcaaaaaaaaaaaaaaggctgaagtctttagataatttataagtctgtacaaaaaagctagatttgctactcttcaaaatgtggaaggacctactctataatatatggaaataatttaatgccatttgtggggaaaagagagatcagactgttactgtgtctgtgtagaaaaaggaagacataagaaactccattttgatctgtactaagaaaaattattctgctttgaaatgctgttaatctgtaaccttagccccaaccctgtgctcacaggaacatgtgctgtattgactcaaggtttaggggatttagggccgtgcaggatgtgccttgttaacaatgtgtttgcaggcagtacgcttggtaaaagtcatcaccattctccattctccattaaccagggacacagtgcactgcggaaagccgcagggacctctgcccaagaaagcctgcgtattgtccaggtttccccccactgagacagcctgagatatggcctcgtgggaagggaaaggccttaccgtcccccaggctgacaaccataaagggtctgtgctgaggaggattagtgaaagagg

SEQ ID NO: 588958 - DNA, 4001 bp, Homo sapiens
ccagttccgcccaaactgatcctctaatgcaggtacacagaagctgggggaagtcatttcggtgtgaagagaaaagcactctaaagtgctacccaatgtttactaagcagaggacatgcctactacacattcttctgctttgcccagaaatgcaaactaaaaagaaccctttgtataggtaatcagacccacaaccacagtatgatacccagaccaattctgaaaagaacaagcgtccttcaagggtcaaataagcattagtagctccattctagccaaccaaagaaagataaggctaaccattttaaaggtgtttttttaacactgagccatttccaacagatttgcctggctgctctggggagtcaggcctccctcagctcaggtgaagcctctaccctttcccctctctctaaattcttctcactttttaccgggaagagcagcacatctcaatacatgcaactgtgcagcagcgcatcactctgtcacactgaatcaaggggagtgaactcaaggcagtgagtagctcatgtgcacaatgaaagttttaaaaattattaggcagtctatccttaatcccaactgctgataaaaggagatatatatcaaagtctgttttcctaacctgcggagaattcaagtgagctgtttccgctccaggtcgaagtctggtgacactcatcaaccctcagcagagagcatccagggaattcaggaccttggttttatcgctaagggtgtagccactagtgctattaacagcagcactctgggtcctcacagagagggcccccctcctttaccaggatctcccaactctgcagagaaaagctgggaatagggtccagggctaaggctattccccagatttaaaggaagctgtacacgattttaaagcctcaccttacctcagctaacagagaggcagggggcggagggcggaggacccaccaacccaggggaattgtaaggagacaaagatgaccccaaacgcacaagcgcgcgcgcactgaagcccggactgcaaagcacattccatcaacctttcactgtaatcggcttactgtggggtttatcccctcaccccatccctctccagaaagtttaaggctgttcgcaccgactttgaaaggtccattgttcccttccccgtaaacgtaatgaaaagagagagtggagagaaagaaatcaagacaccgttcccgaggaccctttcttaagaagagaggactgactcctggggagtcgggtcagtcccaatccagagatgaaaccgggaaaggaggcgcacgggggaagggcgggaggacgttttccttttcggcagaaatgcccaacgccggagccggccaggccgccgggagcagaaaaggtgggcgagacccgggtctgcgtccccgcagtggcccccgagggcagcaaacgaggtggagcggggtgggggggcgggtgaccgagtcgcttcttaccttcccctaccccgcttagcgtccgttaactcaggtgcctacacagcggtccagggagacggagaggagtccctggcgtcctcgggtccagatctcctctccatggccaggaagccactcgattgccggcgcccgcagctgccgctcgtactcaactggcagccgcagcctctgcctggaggtgaaatactctcctcccgagagtgacgcgcacttccctccgcctccgcctcctcctcctcctcctcctcctgccccgagcctcgggggcaggggcctcggctcgctctctcccggagccgccgctcggctttctccgttccttcccctccgggagaaagaggaggagaatcgtggcccgggcggcgcgggcctgagcgtccccgcgacaacaggggaggaggcggcggcgcggggcagagtggggtcccaggagtcgctcttgtccctggtcggcgggcgccgcggcttgctagggtcgcgctcagcctccgccggccagacaagcagcccggctcggctgggccgggaactgtggattgggcgggcgggcgggcgggcggtggagagcgagggaggcggagggagaggaggagcctgccatcagaggaggcggtggccccgcccggcccctcccgccggccccgctccccgcgagctgcgaaagcggaggctcagcgccactcgctgccgcgcgctggaacagcgcccgagcgcactgccggcggggcagagccccagccagcgccccccgctgcggctgcaggctcctacccttcctgggcgcgcacacccgcctggccgaaccggagcctgtgcctccagcacccccagataaggctggtactgcgcctgtcactccctggctgagcctgacactgcgcccccaaagtcccctggctgagcgtgactgcaccccatcaaccctcggctgcgtcagactttgagccccatcacccgtaaagagatttccacactcccacaaatgttctgagcgtccagtcacagcccctacctggccaggcgcgagcgccaggttctcagcgctgtcagaagaaccagcctgctctgggacacagggcagctcttctggtcccttggagcaaccccagcatcccgctcgcaggccggaataaatatacttaggtcttcccacgccccctacctgcgccactctggagtggcggccgcttgcagaggtggcgccgaaagccacgccccggcccaccccagtgccaaaacgccgctctgaggacaccggcaccggccctgaagcagccctgccgccgccaccctgccccctcgctggagctgctctcacagccttggctctgggtgagggcgcggcccgggctggatcactcagacgcacgaggtcccgagctagtgacagctgcaggactgccaaatccgggccgtcgtcatcctcgatttaattggaattggaagttttccctccaggaaactctttcagtgaataatatacaaggtaggatagtttagttttcagggttgttcattcctcctccctcaacaaactcagtcctgtaaccgcgacacacccggcagtgaaggggaatcccctatttcaagggtattagttcaggactttgtataagaaattactgtttccaaatcttggctgatgataagaatcccctggggcacttagaaaaaattggattgccagacgtcgcgcaatctactgaatcagaggtatcgggaatatgtaagtttgggaaacagggctagaatgcatcctctaattaattaaagccttggaaagatgcctccaaaacagcagcgcgagctagtgctgagatcttacagaaacttcacccagctgcctttgagagccgctgtcccttctgggataggcagggaggaaaggtttttaaaataaggaacatagttttgaataacaagatggaagggacaaaagactgttttcatggtccaaaggtgttttggattgtgcttaataaagatagaaactgtgtcacccgtgtgctaggctgaaaaatgttccctccccagagataacaggttctaagtcctggaacttgtgcatattaccttacatagacagaagcagggccttcgcatatgtgattcaattaagggtcttcttgagttggggagattattctggatgatcaagatgggtcctaactgcagtcacatgtacttttataaggggaaagggggtggttagcacacacagaggagggctggccactgtggaggcagagattgaagcgatgcctccacaaggcaaggaatgccagcacagaggcaaggattctcccctagaaactctgaagtgagcaagatcctgctgacaccttgattttggcccagtgaaactgagcgcagtctcctgcttccagaagtgtgaaagaataaacttcagttgtaagctacactgagtttgggtgatatgttgcagcataggaggcctgtgctgggccaactttatattacaaatatccattttttgaatccttattaagtgccaggcactttgct

SEQ ID NO: 588959 - DNA, 4001 bp, Homo sapiens
ccaccacgcctggcctgcttttgcttttaatcatttaggggtgtaaaaaccatcctcagctcaagggtcatacaaaaacaggccttaggacattgtttgctgatccctgctctacagagtgccaacaaggcccacaaagaccacactctggcaagaagtcatgggctctggggtcacaaactattcaatgggtctttaacatgagcccagattgttgtcttcatacagggtgggggggggggtgcctgagttacccacctcctagagcaggaaggagggattctccagaacaagtgattcccaccaccaccatccactaagctctagccacaggtttcaatccatttaaaaccgcagctctgtaaccagctacaccacgtagcagagagtatctcaatattcatcctatttaacccttgagggttacaggcaaccactattcatttcaggaaaacattctcttactttatttgcatctcagcaaaggttctcatgtggcacctgactggcatcaaaccaaagttcgtaggccaacaaagatgggccactcacaagcttcccatttgtagatctcagtgcctatgagtatctgacacctgttcctctcttcagtctcttagggaggcttaaatctgtctcaggtgtgctaagagtgccagcccaaggtggtcaaaagtccacaaaactgcagtctttgctgggatagtaagccaagcagtgcctggacagcagagttcttttcttgggcaacagataaccagacaggactctaatcgtgctcttattcaacattcttctgtctctgcctagactggaataaaaagccaatctctctcgtggcacagggaaggagatacaagctcgtttacatgtgatagatctaacaaaggcatctaccgaagtctggtctggatagacggcacagggagctcttaggtcagcgctgctggttggaggacattcctgagtccagctttgcagcctttgtgcaacagtactttcccaggatccacaggaaatactcagagtccacctggacattttacttatattcagtttccaagtgtcagaggggttcaggactgtctggcctggggggcctcctcatgacctcaattcaggattatctactcaaagcattaaacaaaaggaaatacattttcaggatgaaggctgctcttttaagccctgctgaagaaaccatttcaaacaggattggaatagggaaacccggcactcagctcggcgcaagccggcggtgccttcagactagagagcctctcctccggtgcgctgcaagtagggcctcggctcgaggtcaacattctagttgtccagcgctccctctccggcacctcggtgaggctagttgacccgacaggcgcggatcatgagcagctgcaggagaatgaagagcggggacgtaatgaggccgaaccagagctcccgagtctgctccgccagcttctggcacaacagcatctcgaagacgaacttgagactcaggaccgtaagtacccagaaaaggcggagcaccgccagccgcttctctccatcctggaagaggcgcacggacacgatggtggtgaagtaggtgctgagcccgtcagcggcgaagaaaggcacgaacacgttccaccaggagaggcccgggaccaggccatccacacgcagtgccagcagcacagagaacaccaacagggccagcaggtgcacgaagatctcgaaggtggcgaagcctagccactgcaccagctcccggagcgagaagagcatcgcgcccgttgagcgcgggccggggcccggccgagcgtgccacccgcggggctgcgtctcctctccccgtggccctcgcccgcgcctgccgccgctgctgcgagcgagaggcagcgagcggccccgccagccccagccctcggccctgatgcgccggcaatcccccggccccgacccgggactcaaccctggccgcccgtgaacgcccgcctcgatcggacgccatgcccccacagggcgcgtccctagtgcgtcacttccggtcgacggcggaaggcggaaggcggagcggtccctgcaacccggccggcgggaactgccttctagtttttagtctcagaccagaccaccgggcgcaccccgatgccgagcccgcagcttctggtgctcttcggcagccagacaggcacggctcaggatgtgtcggagagactgggtcgcgaggcccggcgccggcggcttggctgccgggtgcaggccctggactcctacccggtggtgagggctcgctagggcctcggcgtgggggacgagcaggcctggcgtgcccgcctcgcggggtcatcgacccaaaaggcgtcgcattttctctgagagcgggtctttcccttatggcggatttagggaaggaggtttgggaaggggagttcagtttagcacctggaggaggttggaacctgaaagagaagacggtctggctgctcacataaatccctctgccctgtcagcctgagtaaaggagaagggggtcaagttttgggaaggacgcccggtccttacagccggaggtcttacgtgtgtgtgtctttttgttgaggtgaatctgattaacgagcccctggtgatatttgtttgtgcaactacaggccaaggagacccccctgacaacatgaaggtaaggctggcctgatgtggctcctcagatccctgccctcgaccctcaccccgttttcattgcctggcgtctaggtgcagtaaatagctctcctttatctcatgcaccttcagaggtggatttgagagaacgtccgtgagtggggctgggggctccggttgccctctctaataaactcgtcgtagccaccaaatagccttattatccgttttaacctttcttatttttccagggctatctatatgtgcatctagtctgggtcttgtgtgtatttctagactgtatgaccctcagggaacgttgctgaattctctgaccatcttttaagcacatattctattcttggcacagtctggtgctggggatccagctgtgaacccagcagccatatttccatcctggcagagttcacactgtagcagaagcagctaacgggcaatgacagtgccagcaaacacctgctgctggggaaagtagcatatgtcacaggagcactgataaggggcatcgagccttatctcacccaaccttggggcccaggcagaggtttctggaagaaaagagtgtaagctgagtcacggaaggatgcgtgagggctagtcaggcaccgaggaagaaggagcagtcagcgcagaggaaaaagatgatttggtttgtgtgaaaagtggaaagcagctcagggtggccaagctgaggagtacactggggcaagaggggaggagaagagaggcaggaagccaggcccagtccaaagagcctgagtaaccacagcaaggcagatgggcttgaaatgaagggttgtcggaactgtaggggtgacacagtcatgttcctaagctagcaaaaccgcactggtctgcaggacagcaggaataatgccatgagatgcacaggacaggcagcagatgctaccgatctgagctgaagtggtggcagaagatagaagtggacacattgcagtggtgtcaggaagagagagtccccgggacatggaacggacccaataggtcaagcagaatcgagacagggatgtgggctctggaaccaagatggatggtggttccatccacagaaatcagagaacacggtgggagtagggggctgtgcaggaagggaacctggagacattgaagtggagaagtgcagtaggactagcgctccaaggaagatcctggggcggagataggtgttgaggtagccacaatacagaagtgtgagaagaggaagctcctctctccccacaggacaggctgcccagaacgttagagcccaggagggcaggagagtgaccaagcagctagaagagagggtgcagcaccccaaggagagg

SEQ ID NO: 588960 - DNA, 4001 bp, Homo sapiens
atattaactctctggcccgagctcaggcagttcctgtcccacggctggatccacgcttggggcgggggcagggcaaacagccaacgcccggcaccgccagccacctgtccgggagctccaaactactcttggctcagcgccggccacagcgctatcaagaccacctcaccccgccttgtccaccaccgggcgcccgccgagccctgacctgagcagcaggacaccgcccacctgcacccgcccagctcacggctgcaacaggcgcccacacgcaatgcaacccagaggtcctgctcctcacccgtctcgaccccacccaggctccgcaaagtgatcccaacgtgcacatgcggagtggcccccacgcagggatggtcccattcccatgctggatagggcctgggttggagacaggccttggggtggagggagacagcacacccgaggcaggagaggcgtgcctgccccacccctcccccccaggactctcctgggatagaggtacagaccagtgcagtggggcaggggtatcagcccaagtcctgctgttaaacccagcgcccttcacagttgccagttgcaggtcctgttctaggggctttccaaagctgggtgcaggaaggagccgggctgaccagctgtggcagagaaggtggaaacattaggggtatggcttactgccagggggcagaggaacaggggaacttgctgtggggcctgggcactctgctttgatgagacccatatgcgcgtgcaccccccatgatgcagccgtgaggggtgtgagggcctgcagggaggacggtgcacaaccactaaacaagctttaattcccctcccccagctgccctcaggagggcctgcagggaggacagtgcacagccactaaatacgctttaattcccctcccccagctgccctcagccctctactcaggtggtaggggcgggggtggtggcggctcctctgaagaagcctccatggggatggccacaaggctctgatcctctagtggtggcaccagggagacctccaggtcagcgtccattagctgggactccacgtaaaccgggtgcaggtccatgagatcttcctggaccccaaaattctccaccaacctgcatgacgggccgggtcatcacgagctggtagagtccttgttcccccaggacaggctggcgtctgggacagtgcacccccacaaagggcctcccttgggacagcacacctcctcttccagggacagcacccctcctcctccagggacagcacccctcctcctccagggactcccctgggatagctccccccgccaagggcctcccctgagacagcgtgcctccctcgagggcctccctggtgctcacctgttgtccacttgtctcgggcatgtttcactgaggggacgaaggccaacatgagtcctggaacagtgctgggcccccggagctcccccagcacacgcctaggaaacgccattcctaccccaggtgacagcccacccagggggtaaagcccttcttgcaagaccaagggcccagggcagccagcctggcctcactcccatcctctcccggccccagggttcacgcaccccttggcccgcaagacaccaattgccacgatgacgagggcacagaagcagctggcactgatgcccgccagcaccacaaggagggcgatgagggcctcgcggctgaggccaaggctgcattcacagtaggttccagctgcagagacagggccacatggccatgggccggtcacctgcctgcagagggcccccaagtctgcccctgccctggtagccaccagaaggacaccagagctcccaccttgcctggggaaggggagccatggctgggagtggagtgcgggggcaggaggaggcacctgcagcagggatgagcagaagggacaaatatgtgaggcccaaggggccaccacgcaggcaggacacaggccagggaccgggggccatgtccagccctggccccactgcacacctctgacggaactgttggaaggtgctgacttcacagtaggactgtgaggtgggggtgggggggctcacaatgccagtgtgtcatttgcccttgggcaccgcaattcaaggagccatggccaagcagctctgggaatgggacaggtagggtgggcagaggcctgagagcccagccagctcaggccagctctgaggcagaggcagcagtggggctggcctggtcttacgggcagtccttcagtggtttcaccgtgttagccaggatggtctcgatctcctgaccttgtgatccgctcgcctcggcctctcaaagtgctgggattacaggtgtgagccactgcgcccagccaaatccttcacagtgaaagggggtgggcagcactccaggccccgatgtgggtgcggtggcctggcaaccttgcagggtgggcggcaggcagcctcggcctcagctccctcccagcataagggctgcggcagctcagcatgtgggctgggctccagctggctgtaggtcaccttcctccagggctggggcaggaaggggccaaggagggctaagggggtgggcttgcacccatcctccctccccactgcttctgggagggtctggctcacgccctggcaaagctcaggtcagaagggctgccggcacccaagggaatcccccatcaacttggaaaggtctgggggacactggccacccctgtctgagcaggaccccaagccctgcctcccagacatcccccaaggctccagactaaaggtgtcactgaagttggagcccccaggagctttcccctctgcagaaaagacaagcgttgcccaaggaagtcgaccgcaggccggcatggccagggttgctttcagcctcctccctgcacctgctattccaggctgggagagaggcccctgccctcccagcctcccctcctctggacctgccaagcaaaccgccaggcagcaaaaggaaacacctgccccacagccaacggaggccaggccttctgccagctcaggacacatgggacacggggggtggggggggtgggcacagtctggccccagtggccctgggcaccagggaccccctcgcctgttgacaggcaccctcctgctggggtcctccgacctctgacttgccgagtgacaccgtgacccgagatgcacccttcgcccttgtcttcaggacacaaccagagatggaatccacaggacacagaacaaaaggtgtaccagagccaggctggcagtgacactcgacaggccagcccagcaggtttgtatcctggttaggacaatggcacacccagcctggggccaggtggtggccacagacagcgggatccaggcaaggccaccttgctctgagggggcatcagagcaatcgggaccatcccaccagaattcaggagaggggtccctctttttgtgacagcagcacagacagccttggagtgaagtggagcaggtggcagggcccagggctagaggggagataccgcacaggcggaagcagccctccttggcggggcagaggcctgatgggcacaggctgtgcatctggcgcctgcctaatcccggccacttcctccttcaagccctgaggcaaacaagagttctccagagcaaggagggtgcaggaatgtccactgaacgggacggctcaaacaggccagagctggagaggtgggagggtgctgggcggcagctgcaggaacccacgacaatggacatgggaccagcaagggcatcaggccagagctggagaggtgggagggtgctgggcggcggctgcaggagcccaggaccgtggacatgtgggaaccagcaagggcatctggggacagcggtgggagcactgaaaccaggcgcagctcacagcctgggaaggcgctgcagcaggagcgggactcgaggcaccagttcaaagggcctttgtcccccgcgaggacggcgccatcggggtggaacgtgtctggcctggaaacggcac

SEQ ID NO: 588961 - DNA, 4001 bp, Homo sapiens
tgtcagacaataatgccacaagactcagttacataatccaactctctttaactacccttttcccaaaaaccatcccatctaaggagggtttaactcttgtatcttgatttttttttctttcagcaaataccaagtgtgataagcttttaaccaggcaaaaattactttatataacggatcattaattttattttcaacttattcaaacataaagcagctcagtttccctgtggtcagctcatgcatcatttgatgcctcacatctgcagcccactctagatttatcttgctctcagctggttctggatagcactttttgggttattttacaaaacatttaacattgtgtaaattgttaagaagcaactggagtagcttcctttcctacccactgcctcttccagtgtccttaaccctcatcgcccttccctaaaatgtgtccccaacatgcctatttacatgactctcgggtaccagaggttatcacacccatcacataccaggtcaatttctaacagtgtgaaggctctccaagcagagcaatttgcttccacggggagctgggcttagtcatattctatcaatccagccacctttgtaggcagagattagacgatggtctcgtggtcccacctgccttgtatctgattgatataacaacagtatctgtcatacgggctgttctgcttgtaggagcaaacgatgatactgtcctggggcacaaagaagatgctatcctcaggctcagggcactcagatctgtcccttgctgagcacttgacgtccaaggcactgtaggtgagggaactgcccgaggggcagtagccgtccaggtatctggacgtctcctcctgatgcccattctggacgaggctctggcattctccttcctccgtgggtgtggggctgttgatggagctggccacggacacctcaccctggctttgtgggggaggcttccccctgaggcccgccttcttagccagctcatctgagctccccttgccggattctaggtctgaaggggtcctcagcagctctaccacctccttgtctttgggtttccggaagcagggcaatttgcggacccacagcagctcgttctctggccacttggtgcatccctcggttttcctggccagggcaatggctgcgatgcctggtaggcagatggctggcccgatggccaggagggggatgtttcccaaagtctcccctttcatcccagagacggtgaacatgaaaccaaagacgaggaagacactgaccagggccaccaccagcccagtcctcgggttaatgtcatcaggccgcatgtttcactccatccaggttgggggctgcttgctgaccagggagcagcgttcctctattctgtcagagatgaaaccacagtgcgttaaaaaaaaatccaagtcaagctcccacccatcaactcttgtctttctcttgccctttgtctccgacttgcttcttgactttcagtcttgatctctgtctctgtatctctcttgcaatctctctatctctctctctgcgtttctcttgcaatctctccctgtttctatttctactctttctctccgtcccctctccctccctccctttcttgtgccctccctctcttcctctcactattgcaacctccgtctctctctcatatcaacacgctccggctggggtcaacgaggtacctgaggtttcctgccctctccaggaagtagggaaagaagccaggctgtctcctcagaagcccccacagcagctgccccctcggctcgctcccttggttctgggaggaaagcctggtttcccccacggactctgcatcggggaggtggaacctgggagagcggctctcccagcagtgcccgtcggtcccggtgctgtgcaagcggagcccggcgccagctcagcgcgcagagcgcggggcgcgggaggaggagggagcactgagtctgggaaagaggggacgcggcgcgagcctggccttgttacatcactgtcagagcaggctcagaaacgcagacagacgcgcgggggcgcgagggggtcagccccagagggaggccacccggcggcaggcgctgcccggggtctcgtcggggctgctgggagcggccggggtttgtgccgccgccgttccggaggctgagcagggcgacctgacccgcttccgtgcccgggaagggtctggggcgcgaggctgccagtggccggagtcggaaaccagggtcggtttgcccacggggcagccgttgcaatatccgagctcgggctcccagtccgggatccgaggagttaggtgccagctggagatgtccctccgggacccgcacccttctccagttacaaatccgggtgactgacggcaggcccaggggctccccgaccgcccttctctcaacccctcgactcggggcgcgggggggtgtgtgtccctcggggagccggtgcccgaggactgctttggtcccggctctgggcggtggcggcgcgcgaaagcgctcttgcagcggagcgactgcgccgcgggagcgcacagaaccagcgcccaggcggagtgggttagtggtgaggggtgggtgccaggctagtccgggccttgggggagtccccggagtccccgtggctttccagctccaggctcgggagagggtgaccttggagccgggatttcacttctacagcgctgtggtgccggggggacagggagaagggctccctggcccccagttcacgaggagaaggggccttgaccggtcaggaccaccaccctacgacgccgctcagctctgggcgattctctcctcccttgctgaagcaggcattgagagcctgcgttcctcccgctctggtaggcaggggcagatggattcctctggccccggggggcaagactggctttggctgtgattcttcaacagggctgcccatttaggatagaggagggcggtggagaacaggttgatgagcggtacatgctttcatgtcaagacactgatttactggaaagaattttcacatccaggccttccccagttaaactagctgtatattcctgggcaagtgacttaacctctctgagaatcagtcgtcctatctgtaaaatgagattaataccaaatatatgaggaaacattgtgaggattaaataaacgtaaagttcctagcacaatgcttggtacatagtctgtgtacaaaaattacacacacatgcacacacgtacacatgtatatgtatatatatttgtcatcataattagtgtcttcatcatgtatgacaggagccaaacaaatcataaaggctgtgagactaaggactttttatccactaggcaatgaagaacgcttgatgtattttaagcaaagatcaatacaaaaacattccagtttgactgaaaggggcggcaggtgagagcataggttggagctggtaagtctggaagccgggagtcttgttcagtaagctgagaagttcagtaagccgggcaagacatgatgtggccttaacaatgtcgggctggtagaggagttggaaggaagcagatctgagggtatttaagggttgagtgaagtgtcttggagcacagtgaagtgagatgaagggaggagccaaggtcaactcccaactttctcactttcaaaggggtggatcaggaagcagatccttctcattttcctctccatcatctattttgtatcttttgtactcatgaccattagacagctgctgcacctttaggcatagaatcatttaggagggaagaaaggagaaaatgcaaagggtaaaagtgaggtgccagttctttggccacttgtatgaggacaataataattttcctggcagcccccccaagtagataggcatctgcctgtaattgaccagagatggatgagctttgggatacaaaggtacctgggaaattgttgtttatttatttaccagatccactgatggtctgaaaaaagggttttgtttaaaaggagcagcatactgc

SEQ ID NO: 588962 - DNA, 4001 bp, Homo sapiens
aaagagcgctgaactgggcctccataaaagtgaaccacagatttgctcatgagctgtgtgactttggaccaatcacattctctgggcctgtggcccacaacggatgagtcatgaacatttatctgtatgtctgtcatctccattagaatatgttcatataggattatatgtaccgtgaagacgggacctgtatcttagtccttttttaaacctctcacaaagcccaacacctaacatatgctcgatcaactttaaacatgaaccaagaggtggtattgagggaacaagagaagaagggtgttttgggtcattcatcactctgccaataacctcaggcaagccaaaacaccgctagacagataaggggaattaatattttccaacttaatgacgtcaaggtacactgaactttatttcactgacaaaagaagtgaatcaatttgtaaatggtactgtttatgaatcaattggcattcttacgcactaaatctccacttgtttttaacagtctccagttaaatatgtggataattaactagtccacaatatagtctgagttaggaattgtgtcactagattacctttgaaatctttccaattctaaagctccctggttttgtaagagtaagctcaggttaatccaagcatcacaaatctacgtctctccccttcacgcggtcagctgctttactccaggcgggaggaggtgtgctgtggtacaccagtccctgcacaacaaaagcagttacctaaaagtaaagcgtggagaggaagaagcacaggcagctcagcacccagtgccttgcacaaattatacaggaatcacctgaactgagaggcagcaccagccagtgaagcaagctttgttttaggacttgtaagaaatctaagacacccaaacccctctttgtccctaagtagccctagcctggtaagaggtcacctttcctatctgcaggatggcaagttggcctagaatctctaaggtcccttccagctctgacattcagatgcgcagaactgagggtggccgaagcacccccgccctctccaaccagaagtaaaaccaagccccactgccatgctctgaggcctctctctgcaaagcgaaataacgattctcaatccagggcactgtccccctaagagggcctattaggattgaaacaaggcgaaaagcagggaggctgtttcaaatcacgcccgccccctttttggaagaatgtccgccaaattcctgaggtgtgagaaggaaagcggagacggacggtcactgcagcacaggtgtggcccctcgtcgcccctgcaccgggaggaacagctgcaggattgcaccccagagcgccgggaccacgggcgggggacgggggcggactgccgctcactcacccacaggctgctgaagtagtccagcccgcggcagatgagcgtggcagcgtgcaccagcagcacctgcacgcccaagtagctgccgaggcagtagaggccgtacaggagcgggccgccggcgccgagcagcaggagcaggcggcggcggcgcagcgcctgctcgcccagggcctcgacgccgtagtcgacgaagcagagcggcaggagcagcgcggccaggacgatgggcgtgtgcgcgcggtgcaggcgctgcagccagtggcggcccaggcgcgtcagcgagctcttgaaggggtgcagaaaagtgccgcatagcacggcccagagcagcggccgcaggaaggcctccaggatgaagtagaccagcaccgcggcgccgcagcacaggcacacgaacagcacggccccggtgttgtagaaggcctgcttaatgggcttgtcgaagcgcagcgccagcgccgcggtccgcggggtctccccgccaccgccactcggcccgaccgcgcgcgggacccgcggcgccggcccgggagagctccgcaggcttggcgcgtccttagggccgccgccgtcggccatcgttcctccgccacagccgcccccgaggggcggtaatgggagtcgggctagaaacgcgggcgggaggcagggcgggaggcgcgcgagattgtgggagttgtagttccccgctggtttacagacccaccaagcgcttgcaggaaactacaactcccgaaggggaaatggggaaaacgcctccgcctccttggtgtccgcaaggtcctgctaacaagtttgcagggtctatatcttcctggagggggggggggggggaagctcctttcactcattcgttaatgtcaatttctcgcgaggcgagatcccaaaaggcgccacattcagatattaaaacccaagctgcatactagaataccgtgggggagtacttttaaagaaccaatgccccgattctgttttactgatttatttaacagatatttttaaagtgttttctttggtgtatctgacaggattttaaatagagattaccatataacaggccctattctaagtggctcactcctattaactcatttaatccttagaacaaccctacaaagaaggtgttattatcctcattttaccaacagaaaaactgagacagagccgttaagtacgcagccagagtcacacagctaccaagtggcacaggcaagattcaaactcagggattctggctccaaaggctatacttttatctaccatagtatttggcctgaggaaagaactcttggcatttttcaaacgttcctcataagcctgtaatttgcagccgctgttgacaactgtttgtgcaggtttcgctgtggacgcaatctaaactcttaaaagagtcgtagatcaaagtctcaaactgccactgtttctttttgagacttgatgtaatgtcagttaagcccccaatctcaagttttcctctgtcacatggcgatgataataataatagcttttgctttagggttattgtgtgggggaagggaaactctggggcggtacaaggtgcttctgttcccctattggaaaagtgctgggatccaagcctgctacccataaaatatcccaatcaacattttgatttaaaaaaaaaaagaaagccttgactgagtactcaacatgtgattgcttcaaaccttgcaagttgtccctttcctgtttcaatagtattcctattaatttctacataatttttgtttcccttctaaagcagacaagacaggtaacataatccacagtttgcagataaagaaactattgcttgatagatttggagacaaagggatttagtaaaggaagtaaaggaaaaagtaattccctatccatctcgattgtaagttttaggtctcagtatttcagatggcctttggagttttataaccaaaacgcaggtttagtcgctcaccacttgcagattccaattaacaagagcaaggtctggtataaagaaagtgatgtattccaaagctagcttaggggaagaagtacaggtttcctccctaaggctactgcttcaattgtggagcagaaagcaggcacttttaaagcgaaggaagcaagcagttgtcgggggaggggtctgcatgccttatctactgggtggtcaagctggtgactgctggcaccttcgttggcaggactaagccaaaaacccctcagatggaagagagtttcatatttctcaaggcagtctcccggtgggagggagttttgtagaaattggatgttatctcttgagttcctttctggagctcctaagcacatagttagatgaacttgccctgtagggactgtctggtgaagacaacgtaaaaggctatatttacctttattaaattatttatttatttatgagacggagtctcgctcttgtcacccaggccagagtgcaatggtgcgatctcggctcactgcaacctccatttcctggcttcaagagattttcctgcctcagcctcccaaatagctggaattacacgtaccccccaccatgcccggctaatttttttttttttacgaggtttcaccatgttgaacaggctggtctcgaactcctg

SEQ ID NO: 588963 - DNA, 4001 bp, Homo sapiens
aagctttataacaggttttaatatctgactaggcaaattctctctcattacccaggatgataattttctaggcctttaaaaattaattttattgaggtgcagtttacatacagtacaatgcaccacttaaatatatatatatttcgatgagttttgtcaaatttatacgcccatataaccatcaaaataaaaaattgaccaaagtatccaaaagatcatttggaattagaactagtaaaaattaacagaaaatactcgctatagtgcaacacgtgacaaagaattactacttcaatgtgtaatacacataaagtgtttaaaagtcaggaggagaaagatactccaactgaaaaatgggcagaagaattaacaatcaactcacctacagaaatgcaaaaggctactacacagaggaaaaagtgttaattcccatgggtaatcaaagacatgcaaattaagacaagataccattttttggtccacgcttttgatttaaaacttcaaatgtgtatacatagagaaaattttaagatatgcagaaaatctaaaccatctagaagttgaagttttaagttatttttattttgcttctcctttggatttttgtttactggatgttttctaatatgtgtatccttacaacattctaataattctaataatgttgattttctcttctcacctcataaagtacctagtgcagtgcattctagaaattcacccctaaaaaaaaaagctatttcccctatagaaggagaaacacacacatgcacgcgcacacacacccgcatgtgttgctaatggtccgcatggtgagatcatcattggagccgccctgcggtcccccggagagagcctgggccgagcagaggatgcgggtcacaacgaccctgcaggagctcacgccccaagacaccgcgagcgcagtgcgacactagcgacgccggagccaagggccagaaagagggcgagacacacccaggtggatctaattaaccctccctcttggaaaaagaatgggggacgatgtccagggccctggatctagtgtctgtcgctgaccttgggcagtccctgccacgcttgagcctcagtttcccacccgtaggccgagctgaccgtctccatcgctgcgctccttcccttctgctggtttttcctggtcctgggagggacgccttcctctgcccagtcgccctcccccagcccttggctgcgaggtcgcccgcagaaacccaacactgctgccgcgctctcggcgcgcccggcgaacctaaggtgtggacgcgccgcgagggtcccctgcttgcgggcggccattaggcgccaggccccttggcgcttcggccctgctaggctcggcgagggtcttacccagactggcacgcgccccgctcgcgtccttctattgacctgtcagcgcagctggcgcaggcaagggccagggaggcgcccccgagacactcaaccatccccgcactgatgcgggcccctgctgccctggggacccctgcggggtcctcgcaatcctccggcaggaagcggtcggagctgcgggcagggccgctaggcaacccgcctgcccgaggcgcactgcccggggcacaggccctctgcgatgactctccccaacccccagctgccctgcttgtgccagctgtggccacccctaatccttgtcccctcgctctagtgtccagggctccgaccaccgcgccagaagggctgggcagatcgtgcgcaacagaaacctacccggttggggcgaccagctcggtcccctgcgcgcgccgagggccgcctctggtattgcccaggctggctagctcatcccggtggaggcgccatctccggggcccggaaggagcgggcgcagcgcggtttgggtgtgcgccggagcctcacctcctcccgcctcgcagctcaggcgcagggctccccttgctcaggcgggccatgtgacccgcgagctgcggagagaccgcggcccccaaagcggcttggggaaaaaggacggcaaaaggcgccaactgatgggcagccagggaaaagcaggagtcgcccccaagtcacgcaaacaggaagcctgtttcttttgtgaggggactagaagccagcattatatttcatcaggtgtgtacatagagacttattcacaccaatggaacgatatctctcaatgcgtgtaaacgcttcatgagaaagctgttactttgggtcttgaatgtttttcagtcttccccaaaccctcaatttaaacacaaacggccacgagagacataacgcctgaggtatgagaaagtatgcacattgattgagaacaatcccggcaaagcaaataggaaaaagatacggaatgatccgagggaggaaaaatgtgggggtcaaaagaaaagtaacagcctcctacattccaccttggactttcccttctgaatgggttttcagcacacaattgtacggccttactcagtgcttctaatcctaggtttgcctgtctaggccacaggttagcaactacagtttgctgcctgttcttgtacagcccacaagctaagaatgttttttgcaatatttcatggttaaaaatggaagaatatttcagggctacgaaaattatatgaattcaaaatttgatgatcgtaaacaaagttttactgcaacatagtcatcatttacatattgtctatggctgctaccatgaaagaacagcagagttggatagttgtgacagagaccttatgacccacaaaacctaaaatatttactgcctgatttgccaacacctgctctaaaaggtctgttcagtggtcacaagataaagcattaaagccagtaaatgctcatatgatttcttcttgtgtaagtaaaattgatactagatattaacttcctttagaaccttacaaacacccacctgagcccccattcatcatctactctttcagccagcatttactgaagaatggttctgacatactgccatcactatagatgacaatgaagtaagaatgaggtgtggatccttcactcaaggaatttgtcattaggaatgctggaaaacctatatctgaggctggaaagtatgagagctggatatagcacagaaagggagcttgggaaggtagtttcatttcctgggagaaaaaatgggagtctgatattccgaaattggaggattgtaaccaacacaagttgaattcagttcactgtcattggctcagtgctggggtctaatctatttactggctatgacaaattaactcctctgtgcctcaatgttctcatctatatattggggacagtgatatttccctcataggtttgttgagaggtttacatgagataatgtatataaagtgcttagcattctacctgtcaaaatatctagctttctataaatggttggtagttattcacttgtttaacaaaaattcattgagtacctattatgatgttccaggcaatgtctgtgctgtccaatctcatggtcactagtcacatgtaactacttacattttaattaattaaaattaaataaaatgtaataatcagtccctcagtagcactagccacatttgaaatgctcagtacctacatgtggttagtgctactgtattagatagtacagctatagaacatcccatcatcacagaaagttctatgagatagtgcttttctagagagtaaggattcagctatgaacaaaaccaagtctctgcctttagggagcttacatttgggtggacaatagataataagcaaataaatgcatactatatcaggtattgataaatattttaaatagtaagatcaaacacttccctagtactttctatggctgttactgtcctgagtgctttttactaactcttaatcactccaacaaccccatgagacaggtaagctaagtaacttacccaaactgctagaaagaggaaaagccaaaatccaaactgatgaaatccggcttcagagtccattctcttaatcaacatgct

SEQ ID NO: 588964 - DNA, 4001 bp, Homo sapiens
atcctaaaggcaatcagttacatttatcagaaattcacactctagaggtagtcctctaacatttatacaaaaagaaatcatcactctagaggcatcttctacaatcacttcatttctcttaatttttaatcaaacccagaaactctgctggttagtataacattggaaataagttttggttttcataattattatcttattaattagcataaaggatgccaaaagtggatgctcatgggtaagattacttatattcaagatacatggagtagctaaaatattttagatactttctactcttgcacgaagagggcaaaataattatagtcttgtagcctgtatcttgagaatgatgcctagggtgttatccctaaatggtcctgtggctagccaagaattaggaggtttcttgttgcctgatactgactataagattaactgaatcttttttttcttgtggtaaaatatatatgacataaaatttactgtttttaagtgtatagctcagtggcactaaatacactcatattgctctacaaccatcaccttaaaactctctactcattaaacaataggtccccagtctctccttccaccagcccctgggaccactgttctactttctgtgtctgtgaatttgactacgctaagtactcatgtaagtggaattatacaatatttgccctttgtaactgacttgtttcacttagcataatgttttcaacttcatccaagtggtggcatgtgccaggatttccttcctttttaaggctaatattccattgcatgtatataccacattttgtttatctactcacctgttgatggacatttgggctattatgaataaatgttgctacaagcattggtgtacaaacatccatttgaatccctgctttcagttcctttgtgtataaactcagaatgtagaattgccagatcaaacagtaattcaatatttaatgtatagaggagtctccacactgttttccacagtggttgcaccattttaacattcccaccagcaatgcacagcgttccaatttattgacatcctcaccaacactagctgtttggttttgttttttgatgataactatcctaatgtatgagatggcgagaaagaatgaatcttgcctctagaatattatcaccttcccctgaaggaatgttttatgcaaggtgagatcacaacacctaaaaggacagtaaactgggacttttctgagctcacagagattccaggactcattttatgcctgcttcttcatttgttgtgtggcagaatttggtctgggacttgctttccttagaacctcatagccaggttatgggaagtaactaaccatcacctgccactaattaatgacagctgccatgatataacaaaagagcctgggtttctaaattggcttaggtgggttttcactgggggtggtggtagggtttctctgagatgagttgcccctgcgtcatggttttccccaaagatggcgccactcttcctaataacaaccccagagtaattccctgacaataaagctttggttctagacagacagcccatgggacatgtaagtcgctccatagtaggatcagaaattactcagatcttacacaactcagcccatctcagcccttcttggtccctctgcctgtcagcacgtacctgtctactgtggccacgggcagggccccatgagcaaggtgttgtcggagcatgtgcctcaacactcctttgctttcagtcacctggcgatagttgctccagaaaattccactcagaaggatcacaaaccccagaggcagaagcaaataggccgcaatcaggctcccctgacagtcgaatatggagccccaggaaatgaagaaggcccccaggcagaccatcaggaaacccatcaggagggcaagagcacagagaatgaggccagttctgttctgcatccttgcaccttaggaacccagcaccctgaccctgctgctcctctgcttccctgcttgctccaagagaatgagctcattagccagcttgcagctttatatgctctgggacccactggcctttggacaactaaatgaaacaggcacttagaagctattcattaaccattgaaagtaagtgtaatatccttggagaattagccaaaaaacatagcattgtatactgcaggcaggagtggcttcgtgtagctgttttgttcttcagagttgggtgggacactcagctgttcccagttatttgaacgtacagccctcctttgattaaaaggcgctggtctcttaatccccatggagggcaattccccactaaaagctggagaagttagcactctttaaagaacgatcttctttgaggtttggtaagaaatcccttcctgattccttctccctttttctgtactaaaaaggcatttcttcaaggctgttaacatgtttgtcttgcctccctcaatgaatccccacttattgcccccacactatgatactggcataattccaagacagaagttcagagtgtgaacttcgtggttcctgctctgttgacaagatcgaaagagcctgagtgggagggaaaggagagtgctggagaaaaggactataatagacagagcctcgggaatttggggggattttgggcctgtaattcctgcaatctttccccctttcataaagtacatatgaaatagaattcgttttagaggatgctgctaaaaatgttccctgtcctctcctccacacctctgctctatgtagcattgcctcaaaaaatctttccagaaccagccttctgtttcctggctggaatttgttttctttagcttgactgtctttgattgtggatagcttatttcagacgtgctttatgccctggctctgcccttttttatttgataatgtggcatgtctctgccaaaagtctccttcccataggaaccctgggttgcttttactcaggatagcttatcttcagttcctctttgctgctgttccactccactactccattaccattattttccatttactttcccaatgagagcagcagttttttgtggcgtgccctaataatccctcatataacctttagtctcacactcaccatctccttagctctaccttcatgttagggctgggagacacggatattagagaggtacacactatggatcaaaaactatataaggcacttctccattccaacccttagcctttacctttcttagcttcaatttcgaccttgaactaccttgatcttctagtcttgatattgtctttgtaatcttaaaacagctcttattccctccttccccaaactgtgagatggaatatttctaagatgatccctaaggatcccacctcctgatattcatgtccttgtgtaagtaatcctctcccctgagtgtaggctggacctagtgacttcattctaatcaatagaatatggtaacggtgatcggaagttacttccgtggaggctacacaagattgtggttttcatctttctagcagactctctctattgtcctcttggcttacgccctttgaagaaggaagctgccatattggagaggcccatgaggcaaggaattgagggcaggttctggccaacagtcactgaagaactgaggcccttagtccgtcagcccatgaggaactgcatcctgtcaatgaccacgtgagcttgcaatcaaatcctcatcccactgagccttgagatgactctgctcccaagcatcaccttgactcagtgaccctgaagtagaggacccaggtaagtcatactcggattcctgacccacagaaactgtgagataaaacgtttcagccagggtcctggatgccacaagatggcaagagccataatcaatgaatgcattatgatcaaatcatttcatgtttatggatgtcactattttaacaaataaaagaggtcaaaagtttaaaaaaagtatattttaaaaatatgctaagttttgtggccattttttagatagcag

SEQ ID NO: 588965 - DNA, 4001 bp, Homo sapiens
attcttgcctccatgaaagggaagactagaacaaaaaactgacaagaacaagttctagctccatcacggacttactgaatgaccctaggcaaatcatgtgggctctttcttgtgttttaagttttacctccaatgaagtaactacctcagactagctgtgaagctctcataaggtgatggatttgaaaatgccttgcaaagtatcagcaattcatacacagaaaatttcacgtacttctatatattgcatgatgcccacccagggttaggttaacagttgttgatccaattatgaaagaaataaaaagaactctttaaaataatgaagtaaaatagctaattttcccgttggtttaccatatgctgtatttaaaagttttaaaaattatactaactatataactaaacatatttatgtttattatatataatatgacatgcaattatataagacatactattatgtttatatataatgcttaattaagcaattatatttaaatataagttatactttccttccccagataagacaaagaacctgtttacttctctgagggatttattggttcctgtgaaatctgtgaaggccacaaacactccatagccagagaatgacaacatacgattttcttctcagtcttgtagtatccacagtagtgatgtctgtccatgtacaagtgtctgtccagaacacccattaaattccatgcctgctgtgtgtgtcacggggaaagggacagagacagaagacagattcactggtggtactttcaaacaacgcggtaggccttccctttggggtctgccatgacaacgataccccaggtggcaatgcctagaaaaaaaacaacaataccttacctttatgctgcatttaaatttaccaagtgtttcacatatacgccatcttatttaaccctcacaacacttctggaggatatattaccattgtatctttcttataaggcaagtgaagcacagaaaaagaaaaaaaaatcaggaaaaaaaagaatatcctgtaggagaatttacctatacaggatcaagaaggtaagacagttagaaacctaaaattctattcactgacaatcggtttgaaagctaaaaaaatcatgacgtttgattggatgacatcttgacgatcacagaacggggctgtgggccacattacccaggtgtaccaagtaggtgagcttagaatccacgtctaaagatctgggattcaaggcaaatttcttaaattaaggtcaagggccctcgctcaggctttctccaggacctggagaaaaagtatgggctttgagatctgatatacctgggatcaagtgactgtcatttcctgaccatgaacacaatactcctcgttgcctcggtttgctccacagtaaatactataatcatacctacttctaacagctattctgagaattaaaagggctgagtctaataagggttctcaagaaatactaacttaaaattaaaaaaaaaaaaagaaaggcgttccaacaacttcctctcccaccttgtttgaggtgcccccaccacctgaccagcggcagcaccccgcctccccgcctccccgcccacgtggctgctccgtttccttcctctaccccgcagatacccaacccgcccaagtgctgtgccttgattctcactgaggccgatgaccatctgcgtaatggtccatggactcggggggtatcccatcttcatgggcttccgtgccacccagtacacgtacccgcccgcccccatcagccccaacccagaaagcacgcgacagctccagcaggtcttcaacaggcggtgttctgctggggaggtcggcgctccgggtgtagctgggggcgcaggtttggcgggcgcggcggcggtaccgggaggcgcagtgatataggactcaaaaggctgggacaaccgagaccccatgctctggaactcggcctcaaccttgggcgtctttggttcaaactggcgtaaacgacgcaccggaaggcagagcgccggaaagcagaatgccgggacgctagcgcagtgcgcggaggaatcttaagggctgctgggaaatgaagttctcctccgcttcagaggcggaaaaggtgaaagaatgctgctctttcctgctggatttctctggcagcaacaaccttgtatgcgctggaggacaattccagccctcctccccgccgccccccccgcccccactgttttagaaattctgtaatcgctactcactaaatgaatcacctttcagtctccttaaagaagtctggctctcttaagtttcctgcctcacatgaactgcgagaccttgggcatgtcatatctcctatccagaggcctgtgaatcaaggagttgggttttatatgtgcataatcatgtgctagatacagacataccatagcgattgcaggtttggttctagaccaacacaatacagcaaatatctcgataaagcaagccatgcaatttttttttggtttctccgtgcatataaaagttgtttatactgtagtctattaaatgtgcagtagcattgtgtctaaaaaacagtatatatatcttaatttaaaaaacatcttgcccaaaaaatggtaacgattaccttagccttcagtaaatcctaatcttttttttttttttttttttgaggtggagttttgctcttgttgcccagactgcccagtgcaatggcacaatctcggctcactgcaacttccgcctcccgggttcaagtgattctcctgcctcagcctctcgagtagcttggattacagatgcctgccaccacgcctggctaatttttttgtatttttagtagagacggggtttcaccatgttggctaggctattctcaaactcctgacctcaggtaatccacctgccttggcctctcaaagtgctgggattacaggcatgagccaccgcacctggccacttctaatctttttgctggtggagggtctggccttgatggtgatggctgctgactgatcaaggtagtggttgctgaaggttggggtaactgtgccaatttcttaaaataagacaataatgaaattttctgcaagaattgactcttccttttacgaaagatttttttgcaacatgcaatgccgttttatagcattttaataaccactatataacgtctttcaaaattggagccctttatccaacattttgacaatgttcatagcatcttcaccaggagtagattccgtctcaaaaaaccactttcttcatccataggaagtaacccctcatctgttcaagttttatcatgagattgtggcaattcagtcacatcatcaggctccacttctaattctagttctcttgctatttccaccacatctgctgttacttccctcatctgaaatcttgaacccttcttagttgttcataaagattggaatcaatttcttccaatatccagttagggatattttgatctcctcccatgagtcacagatattcttaatggcatcagaatggtgaatctttcccagaaggttttcaatttactttaaccagattcatcagagaaatcattatctctgattgtaaggctgcaagagccttacaaaatgtatctcttatataataaaacttgaaagtcagaattacttctttatctataggctgcagaatggatgttgtgttagcagttatgaaaatgctaatctctttgtacatttccattaaagctcttgagtaactaggtacattgtcaatgagcagtaatattttgaaaggaatcttttttctgagcaagaagtctcaacaatgaacttaaaatattcagtaaaccatgctgtaaacagatgtgctgtcatcaggctttgttgttcaaattataaagcacaggcagagtatccttagcataattcttaaggatgctaggatttccagaaaggtaaatgaggactggcttcaatttaaagtcatcagctatattagattctaacaagaaagtcagatttgaagcgtg

SEQ ID NO: 588966 - DNA, 4001 bp, Homo sapiens
gttaacataaataatgtattcttcaagcctggccaacatggcgaaaccccgtctccactactaaaaatacaaaaattagccgaacttggtggcaggcgcctcccagctactccggaggctgaggcaggagaatcgcttaaacccaggaggcacaggttgcagcactgagccgagatcgcgccactgcacttcagcctgggcgacagagagactccgtctcaaaaataataataataataatgataatgtattctttatgaaaaataacttttccaaaacaaaaaacatttagtgagaagaatcacactgtgtacattctaacaaatgtctggcttcaaatagaaaactgttagattctcatatctacttccttctgttacagtatcacaactcaggtagcctctggaaaactccactgtacacttctgaaaaaatgagagtgaaaaagataacatctgcatattattacgaaagtaattttaaactggcagtgtcagagaatcccatgggtccctggaccacaatgtgaacatctgattcagcctatacaaaaaaaaatttttttaatcaaattctgaacatgtagtagcaacaaaacttacttttttcaaatcaaagaaataatatcttatgcagataatgtgttctactttaatgcagtaataccatcctcatccaggtcaaaatttgtaccaacgatttaaactgagctacaaacttcaacataaatgaaaaatatttctgaggtctaaggattttttaaaaccagtaagtagtccataagaaagatacagcatcatcctccagacctcactcatcaactatccgtagggcaaggcagatgaaagacagcaagaacacaaagaaagtaggcaaagaaatgtctgacctcaaagaaagaagaggtccatacaactaaaagcacagtagaataactacaaaagtaaagcagtattagagcaaacgcaccctggtgtaaaatccaataaaatacaactactgtcccttgatcgcattgctaaaagaactcaaaatgctgtttcaagactatatccccattctgcagatagtgaaactacgccaggtaactcttgcttgtacagtgtccgtcgtgactgtgaaaaggggaacgcactcgcttctcacatgctaggcagggtgttaggacactgcgtgaaggggaatcctggtctggctacaggaggctttttgtttcagtgcttgtacaactttcataactggagagtagtccgcaaccatctattactccaagagactgagtcagaaacctgctgtctcctcacatgactttcaaacactgcgagcgagtggcgacactgcgagcgagtggcgacactgcgagcgagtggcggtaccgcgaggaggccgcccaagccctgggctggcgcggatatctgtggttccgaaacgctgcggcagcttctgtcagtcctgggacttctgcgggcggttggcaaggtcggccctgctcgcccaggctacggcctcgcggaccccaggtcacgcctcctttgaggagtactagagcctccgtcctcccccacgctgtttccccatctgcactcagtaagtcagaccaaccggcccttggcgcccctccaactctaccatcgaactgtctgggctagcggccactcagccgcccacccgacccacccgacccacccgacttagacggtcctcgccgtcaggagcactctgaggggtccggcccgcggcgccccgcactcacccggctgacgtttcaccgccatcactgacactagatagtgcgcgatgtcaaaaaagggaaacatggacgtgcgggagaaggccagagccaactcgtcccatggagaatccataacgaccaccgaccgcggcaaccgaagcagccgcggctactggttccccgcgctcgcgcggtgaggagtaggagagggcacagccgcggccgcccgctcctccgcgccggctccagctccgcgcgtgcgccctggcgccgagggggcggggccgcgcttcgcgggagccgcaggctcaccggcgctaggcgggtgggcggggcgagcgggttccccgcggctccagccggctcttgcctcggttctcctagtaagggtccagcgtcttcttggtcctgggcgcagtgcaggacctggagagcgtgcagatgaacaaaacacggtcctcaaggggagacgctcagagttggatttatttctgtaaattgatgtcattcacctaacatttatcgagcaaccacagtgcaagtcacactgtgacttactggagatataaaaataaaacaataatatcctgacctcaagaactatgcgttccctgaaagagattttttataaaaagagaaaaaacgcacataatggtacaaaagcaggtactgagaagtatagctgccgtgcgagagcagttcgaaacgaagattacaattctgggaagtgagtaaagtgacatgtgagctggactttaaaagttaagtgagaaacacaagctaggtgggagatggagggaggtgttttgggttgactacaaagtgagaaatgaggttgggaaaagtcctcgaatggcagacaaagccaggcagtttggctccagaggttaaattcttgatcaatcactatgttaagctcagagccagaatctcttctcctaatctctacgctaactgggttgtttggtggaaggtgagggagtagaggtgcaacgaagcaacaagattaagaatagattgatgagaagcgactgacaacggaaaatcagagggtattcactggtccaagcaaaaggtagtggaggctgtggcagcagaaattgagaccaattgtgggaaacatgggtagaagcagaatatcgtcagtgagtgtcagtctgtacaggcgggaaaggaagcatttgtcaaataaaatgaggaacgggtgagtaggaggattgtggttgcattctgataaataggaaacaagaaggaataggtttgggtaagaaaaaaaactagcttggcacacttatttgatgtgtgaacagattatgctggcaccaggaaattggagaaacgtgattagctgctaggtaggtgacagcttcacgggtgtatgcactgcaaaaggagaattttttttatctgaatatgtattcattaattttaattcatttaacaaaatgttttttgcgtgcctactatgtaaccagcattttgctggatgtcagaaatactgccctaaacactaagtgtttaaaacgtaggaaaattgtagtaaatctctacacttcattacttatcaagaaagaatagacttgttcaaatacttttcacgtgtggttttctaagcaagcacttcccgtagagaaaagtctttagacctgtagcacactttctagcaaaactaaggggaaaaaaaccacctgtgaatatttatactttcctgtttaagtctgttctttccatactttttacacattcgcttatttttggaattttagttttgcgaatttaggctcagagtttggatattacttcttttttttcttttcttgttttttttttttttttttttttttttttttgatatgtaatcttgctctgttgccagacgagtgcagtggcgcgatctcggctcactgcaacccccaactcgctgattcaagcgattctcctgcctcagcctcccgagtagctgggattaaaggcacgtgccaccacgttttttttgtatttttagtacagacggggtttcaccatgttggccaggatggtttggaactcctgacctcatgatccgcccgccttggcctcccaaagtgctgggattacaggcgtgagccactcacacccagcctggatattatttctttaaatattttacattttaacagtcttaaattttgcaaaatatatggttagtctttggacttaaaaaaatatatgatgtaatctttaagacactactgaattgtgtgtctataccagtattattctggggtac

SEQ ID NO: 588967 - DNA, 4001 bp, Homo sapiens
ttaacaacacacaagcatgtacacatgctgccagcctccccacaatccctcagttacacacatacacataagtgaccagacatctctgcaggggttgtgacctttcacgtgcattcgtctccttaagtttgtacactgaaccaggcccccagagctcactgatacccattctccaccccccagctgttctgttggctgttatttccaaagactccatcaggcacatctccatcctatctagagtgacacccaccagaggtggctacagacttgggccatgaagactacagtcactccatgatggagccatcttcatggcacatcccctagaccaggacaccccctcctcctcccacattccaaccattaaaaaattggacctctctctcttctgtccaagtcacttccccaccggagggtggcccttggctgacgcctggcaaataaggaacagtttgtggataaagcacccttgtgggcagaccggggagaagggaggttatgctttgagcctttccccacttgggtctatttttctattaagtatacattgcagtggataaaaaaaaacacactagtatgaaataggaattaggaaaccttttttctagccccagcacactgccattcacaagctctctgactttggacaaattgctccctccctgagcctcagtttccccatctgtaaaatagcctccgagtttcagccctgctctaaaagtatcaggaattattcctaggcaaatcaatcttctttggaacaagaatcattacaagaagaaaactcattataatggcaactaatccatattcatctatttgctacatattatctttaaaactcttcttcatgccgtttgaatgcatgcccaatatctcaaaggtttgggctatatattcccacactacactaggggcttctggtgtgggactgtctctcccccatcaaactttgtgagcaggagcaaagcccacaacatttccctggaaaagcaagagtcaaagtggggtcaggacagacaccagaaaaaatcttggagtctctgtgctagaaactgtaagccacctgctgagcctcaaacccaattaattaccactcttttgaccctgccaatccctgttgtgtaagacctctctactctctatttctcccacttgctccccaatgatctagttccccaggtcccacctctcctgaatctctccagcccacccctccctgccggaaccccattcctgcctcaatcttccctgcttctgcactcaccagcccctgggccaaggacagagaacagcaacagcagcaatagggctggcggcagctgaaacccagacttgagtctaggctgggagaggggcagagtatgagagataggggggactagagggagagacttgggtaaacacagagatgagggcaaaggctgagataatgggttgggctgggctggacactggggcttgaacaagggcagggagtgggatggaaggaagggctgtgatggggactgcagcaagggacggggttgagccagggccttaagcaaacactgggaatggggctgggacagggcctgggctgggatttgtgacagggggtggaacgagggccgaggccgggatgggggccaggccaggggcagagactggaagggggtcctggatggggacccaggcaggggctggggccgatgtgggaagcggggcgagggcggggctgggggccaaggcggggattgggataggacgaggggccgggacaagggctgggccatggcccggggcgggggcggggccggacaggccagcgcggggcgctcgcagagctggcccgcggctccgctccccacccccggggggtggcctccggtgtcctcgcgggcccggggcgggggccggggacctgggtaggagttcaggcctgggcgactccgggctgcgctgaaccggcgataaccaggccccgcggcggcggcctcgacttgacgtcggcgtgacgccccgccccccggccggctcgattggtccctgtcagtaaagcccgcccccgccctactctattggtccccaacttagtcctgctgggcttcgaggacacacagactccgcccccgcctcagctacccgagaccctgcctttctcaccccaagcacagagcccgaggtcccctcagatcctcacagcccccaacgaccgccccacagatgtctcaaaggaaccctatcctcacaatcccagactcccccggacgtacgcacagatctccgcagatcctacccaaacactcgctcacagagatcccgcaacacacaccccacttttcagaagtaaaccctctgggctcgccccctcgaggcccaatgcaagcccctcaggagaccttacccaccggggaggtgaccagaccgccgttgccacggagactactaggcgttccggttgccctggtgaccggcgcctactctcctggcccgggttccggaggcttcagtcaagaccctccctcattggccctagaccccttgtccctacccacttccccaggtcatgccagagctcctttgcgaagttctgcagatatccaagtccccttcccagatagcagactttcaggcaaggcatttcaacactcagcacctgcagctgaggcacatccacaaccaagagcctttcctccctgaggatcaacacctccccctgccatcctaagtcaaggtcttgacctaaggacttgtaacaaccaagccaaagcccagagggtaggtggtttctccaacggcccttgccctcttccctcaaagacatctgtctttctcccacccctcagtcccttcacattgttgtagtagtagtagtagtagtagtagtagtagtagtagtagtagtagttgttgttgttgttgttgttgttgttgttgttgttgttgtttgagacagagtctcgctctgtcccccaggctggagtgcagtggtgcgatctgggctcactgcaacctccgcctcccaggttcaagtgatttgcttgcttcagcctccccagtagctgggactacaggcgcctgccaccatgcccagctaatttttgtatttttagtagagactgggtttcaccatgttggccaggctggtctcgaactcctgacctcaagtgatccacccgccttggcctcccaaattctgggattactggcatgagccaccatgcctggcccacattctgtacttttcatccttactctcctcctccacccaatttcctcctccccttctctttccccttcctcacctcccatcttctggttctccactcttaggccccttttctctctagctgactctggtcatcttcctccctgtaatcctacctctgcccctaattcccttcccaaacatccccttcaaaaaggctctgatgcatttaaggagtgatatatctagcgtctctggaacatgggggtaaagtagggagcacggaaagttaaggcaggaatcctcaggctgtgttgaaaatgatgacaggccttgaatgccagggccaagaaatttggacttaatcctttagactgagtcatggaatgtttttaagccacaaagtgccagttgttgggcttgcactttagaaagatcctgattgggtcaggaaggaggactacatccttgcaggataaattaggtatatccccctccccaccgtatcctagactcaccccagaacaacatcaatttatttgtattgccattgttggttaatcggtctctctcctagactcaactcaatctagagcttagcacagcgggtcagtaaaagcatcagattaggctcattgtaaaagtataagttacataaatccatgaaagaatgggtgaatggattaaaatgctgtggatggaagtagaggggcaaagttattacacaaaggctgaagatgatgagaacttgaataaaattggaagggagaggagagaatgcatttggggaatatttagaagataggaa

SEQ ID NO: 588968 - DNA, 4001 bp, Homo sapiens
acagctccttccttcaaaggcactggctggggatggatggataacttatattcgttatgggaggcatgcaacactgccctcacccttggaactgctgagaaagggtctccagccccattcacagcttcagtgatctgtccatatgaggaggaggcagagctgaagaggaatgtacatgggccacaacatgtcccctccccttcataccataacacaggcgctcagaagatacactggctcacatgcaccccacacacatgcacgtgtctacacttaacaacacacaagcatgtacacatgctgccagcctccccacaatccctcagttacacacatacacataagtgaccagacatctctgcaggggttgtgacctttcacgtgcattcgtctccttaagtttgtacactgaaccaggcccccagagctcactgatacccattctccaccccccagctgttctgttggctgttatttccaaagactccatcaggcacatctccatcctatctagagtgacacccaccagaggtggctacagacttgggccatgaagactacagtcactccatgatggagccatcttcatggcacatcccctagaccaggacaccccctcctcctcccacattccaaccattaaaaaattggacctctctctcttctgtccaagtcacttccccaccggagggtggcccttggctgacgcctggcaaataaggaacagtttgtggataaagcacccttgtgggcagaccggggagaagggaggttatgctttgagcctttccccacttgggtctatttttctattaagtatacattgcagtggataaaaaaaaacacactagtatgaaataggaattaggaaaccttttttctagccccagcacactgccattcacaagctctctgactttggacaaattgctccctccctgagcctcagtttccccatctgtaaaatagcctccgagtttcagccctgctctaaaagtatcaggaattattcctaggcaaatcaatcttctttggaacaagaatcattacaagaagaaaactcattataatggcaactaatccatattcatctatttgctacatattatctttaaaactcttcttcatgccgtttgaatgcatgcccaatatctcaaaggtttgggctatatattcccacactacactaggggcttctggtgtgggactgtctctcccccatcaaactttgtgagcaggagcaaagcccacaacatttccctggaaaagcaagagtcaaagtggggtcaggacagacaccagaaaaaatcttggagtctctgtgctagaaactgtaagccacctgctgagcctcaaacccaattaattaccactcttttgaccctgccaatccctgttgtgtaagacctctctactctctatttctcccacttgctccccaatgatctagttccccaggtcccacctctcctgaatctctccagcccacccctccctgccggaaccccattcctgcctcaatcttccctgcttctgcactcaccagcccctgggccaaggacagagaacagcaacagcagcaatagggctggcggcagctgaaacccagacttgagtctaggctgggagaggggcagagtatgagagataggggggactagagggagagacttgggtaaacacagagatgagggcaaaggctgagataatgggttgggctgggctggacactggggcttgaacaagggcagggagtgggatggaaggaagggctgtgatggggactgcagcaagggacggggttgagccagggccttaagcaaacactgggaatggggctgggacagggcctgggctgggatttgtgacagggggtggaacgagggccgaggccgggatgggggccaggccaggggcagagactggaagggggtcctggatggggacccaggcaggggctggggccgatgtgggaagcggggcgagggcggggctgggggccaaggcggggattgggataggacgaggggccgggacaagggctgggccatggcccggggcgggggcggggccggacaggccagcgcggggcgctcgcagagctggcccgcggctccgctccccacccccggggggtggcctccggtgtcctcgcgggcccggggcgggggccggggacctgggtaggagttcaggcctgggcgactccgggctgcgctgaaccggcgataaccaggccccgcggcggcggcctcgacttgacgtcggcgtgacgccccgccccccggccggctcgattggtccctgtcagtaaagcccgcccccgccctactctattggtccccaacttagtcctgctgggcttcgaggacacacagactccgcccccgcctcagctacccgagaccctgcctttctcaccccaagcacagagcccgaggtcccctcagatcctcacagcccccaacgaccgccccacagatgtctcaaaggaaccctatcctcacaatcccagactcccccggacgtacgcacagatctccgcagatcctacccaaacactcgctcacagagatcccgcaacacacaccccacttttcagaagtaaaccctctgggctcgccccctcgaggcccaatgcaagcccctcaggagaccttacccaccggggaggtgaccagaccgccgttgccacggagactactaggcgttccggttgccctggtgaccggcgcctactctcctggcccgggttccggaggcttcagtcaagaccctccctcattggccctagaccccttgtccctacccacttccccaggtcatgccagagctcctttgcgaagttctgcagatatccaagtccccttcccagatagcagactttcaggcaaggcatttcaacactcagcacctgcagctgaggcacatccacaaccaagagcctttcctccctgaggatcaacacctccccctgccatcctaagtcaaggtcttgacctaaggacttgtaacaaccaagccaaagcccagagggtaggtggtttctccaacggcccttgccctcttccctcaaagacatctgtctttctcccacccctcagtcccttcacattgttgtagtagtagtagtagtagtagtagtagtagtagtagtagtagtagttgttgttgttgttgttgttgttgttgttgttgttgttgtttgagacagagtctcgctctgtcccccaggctggagtgcagtggtgcgatctgggctcactgcaacctccgcctcccaggttcaagtgatttgcttgcttcagcctccccagtagctgggactacaggcgcctgccaccatgcccagctaatttttgtatttttagtagagactgggtttcaccatgttggccaggctggtctcgaactcctgacctcaagtgatccacccgccttggcctcccaaattctgggattactggcatgagccaccatgcctggcccacattctgtacttttcatccttactctcctcctccacccaatttcctcctccccttctctttccccttcctcacctcccatcttctggttctccactcttaggccccttttctctctagctgactctggtcatcttcctccctgtaatcctacctctgcccctaattcccttcccaaacatccccttcaaaaaggctctgatgcatttaaggagtgatatatctagcgtctctggaacatgggggtaaagtagggagcacggaaagttaaggcaggaatcctcaggctgtgttgaaaatgatgacaggccttgaatgccagggccaagaaatttggacttaatcctttagactgagtcatggaatgtttttaagccacaaagtgccagttgttgggcttgcactttagaaagatcctgattgggtcaggaaggaggactacatccttgcaggataaattaggtatatccccctccccaccgtatcctagactcaccccagaacaacatcaat

SEQ ID NO: 588969 - DNA, 4001 bp, Homo sapiens
gcttgtggggaaggtgaaaaggctgaatcagacactgtgcacagagcgcctagccgagtcctctgccctgggtactggcgctcgaggtggactcagaagctccagggcatctggttccacaaaggacccagcctgtcccaggccactgtcacccctgggagtggcacacactggagggaatgcctcgctcccagcccacacgtgcacactcagcttctgccattgcgggcaaaattggacttgaccaattcaggatacaagcataacatgtgaatatatgcttgcaaacacacgtgtgagctcacgggcctcacccgctcaggactccctctgtgcactcacatgcacttggcattcttgcccatagaggccctgctgctggagaaggaggctgtctggggagaggaggtggagttttcacaggttgggcccagcactgccccaagaaggaggctagtgggacgcttgcctccccagagcaggtgtcatgctggggattgggctgtcagtgaaggaggggtgtgatggaaggtgagcaaggaaggcttcgggagagcaagaggtggggcaccacttgtgggagtccaggagtgagggcatgttagtggagaaagtcggaaagacccagaggcaagaaggcagggggtaccgagacatataaatgatggctgaatggcgagatggtaatagacgaatagatcacaggtagatggatgcgtagatagagagatagatggagagagagagagagagagagagagagagagagagagacaagctggagaaggtggatagctaaagccagagagacacatggagagtcaggggactaaaaccagggagggtgggaccaagagctttagagagagtgaattccatggggatcgagttccagaaatcaaaagagaaccagacagagagagaaaggaaaaaaagagaaacagagaaaactagacacagaaaaccaatacgagaaacacagagtgaaagagacccagaaagagagagagagaagacaggggagacaggggtcccagaaacagcgacctcagaaacaaggacagatggggttctgggcgctccactgaaagccggataagatcacccaatgacaggtaccaggaaacagagagcaggagagagccagagagagagcaagcggagacagtcagccagccagacacataaatagaaagagaaagacggacccacagagagagaagtaggccccagaagagggagagaccagcaggccctcctgaaccagagcagctccaggattctggaatcagactcactcacccaggccttcacactccctgaaccctgcagaccccttcccaggcctggcttgccccactcatctctgctccatcgtggcctatgggtagagctcgaagagaggtggggaggggaggtggccccatgggcagccgtgggggctttgattagcagctgagaaaaggggcacgctggaagggtttatcctcaactcaatggccctgcttcaccccaggcttggtctcacacaggcagtgatcccagagcaacttcctggcacagatgggaaaactgaggtccagataggggaagggactcccctagtcctctctcttcagtctccagaccccacctgggcctgctgtttcattttcaaatcacttctgctcatcacccaatacaagaacgctgtggacagagagcctctcctctacctccaggatggggcctgtgtgggacttcctcccagcccccagactcaccgccacgaagaacagggtgaagaggtagaccatggcctccatgtggaaccgcctcttggccgcgatgctgacagtggggaggaaggccaggctgctgagggtgggcaggagcagcttggccaccagcgtccccatgggccaggaggaaagcactggctggggtggggagggtgctggtgtcccaggtccccagcacaggagcacgaagtgggaaggccagctccctttgggcagggctctgatggcagctgcggggagcacccacaagagggtttaaatgcccttgacggaggcggggatgtgcgtgcacgtgtcgagtaacacacggagagggccaacagctgacatgccacgtgaccagcatttgtctctgatttttcttttctttttctgagacagagtctcgccctgtcacccaggctggagtgcagtggtgtgatctcggctcactgcaacctccaccttccaggttcaagagattctcctgccttagcctctggaataggtgggatgacaggtgcctgccaccacacccagctaatttttgtatttttagtagagacagggtttcaccatgttggccaggctggtctcaaactcctgacctcaggtgatccgcccaccttggcctcccaaagtgttgggattgcaggcatgagccacagcgcccggccttctctcttttttttttttttttgaggccagaggagttaattcaaggattcagggagaccatatttcttttctctgaggcaacaaccttggggaaaagtccccaacaggacaatccctgccttctagacattttccatcctgatcctccccccagaatgggaagcctggtggatgctgctgcttcagtcacgtgtccatgggtggcctgaggtgagagaacccaagatttcaccaattctaatccttaaaaggaccttgtagataaatctcccaccttaccagcccacatatacttctcactcgccagctcttgccccacacaggtttccttggtggccagactaatgaaactaacgttcttttctacttggttacactgtttcacattgtaagtaaacaacctggggccatctcttttagtgttccaagcaccaggccggtgcttgccctctcggtgtttcttccctcgtctattgacaacagttctttggctggccttccggaaattaccttccctcgttgtaagaggtcttgcgggagctgtctggcagggtgccccctatcccctggccaaggaatgatgggtgtgtgtggtctgagctacccaggcagactctctttccctggattgattgattgatttgttgttagcaaaataacagcttttacttccatgctcttttttcattgtgatgtaattcacataggacaaaacgcacagatttcacctgtatagtctgctgaaaacgcacctttgtaaccagcacagtgtccatcctcaccacccaggatattctcttgagccctttccagtgagccccctgcagaggcagccactggtatgatttctgcccccgtacctgactgcctgtcctagaactcctacaaatggaccgtggacttttttggatctggcttcttttgctcacaatgtcatgtctgtgcgatttgtccctgtcctactcatggacagtcccttcggttgctgctgggtggtgtccagtgtagtattcctgcacctttgttctcctggaaattagaatctggggacagcaagaccaaggaccgtctcaacactggcccctccaagagaggctgctgggccagtcctgctttgtgaggcccggctgttccacctttccctccatgtgggagctcccacagacctttccagaaatctctcttaagttggctggagcccatttctgctgtttgcaatgaaacgtctgacttgatatgtctcattctgctgcttaagactcttctgaggcgtccacagcccaaagggtgaagtccaagtgctcacagagaccaccaggccatctatggcccagacccgttcccccagcccccatgcacactctcagacgctgcctcctctcctcccagcctcccacctcccctgcagggaggcacttcctgccccgcctgttctggtgaatgcctcgctccctctgcctgcagcctagacagcctgtctgtggggaaagcttctgtgatgaacagcacccgccccccgccggcccccaaggaaagctgaggggctccgcgcagtgccctcca

SEQ ID NO: 588970 - DNA, 4001 bp, Homo sapiens
ccttgagcagggggctctgcggccctgcacagaggacaaaatggcagtcacctctggaagaaagatggggtgggggccctaggggttctcacgctgagggcccagcacctgggttcagggtctggttctgcgattcagacacggaggagcttgggccaggtcgtctccgagagtctgagggcatagggcgagggctggagacagggtctgtaatagtagcggtgggtgaagggtgtaggagggggcggcgctgcgcaggttggaggacgcatcataggcccgatatagaccgggaaactgtggccagggagcggctgtactggaaccactgcccctgcccagctcatcgcatctgaagctgcgtggctcacaggctgctttgccggctacggagcagagagatgcccataggcaccccaaaagtgcacttcctagggttgtacggcttaggatatccgacggccttagtgagtcccaggatacgatcgagtctggggcagtcagtctccgatttctgcagcgtctccgcatgtgcgcggctgggaccccagcgtcccaggcccggagagggtgaacaggtgtggggagcgcaggcggccaagagcgcgccctgcagctctcagggcttgggctcccagctccatcgcggctaccaaacctcgcccctacaaatgggagactgagatccagaaacaagagggggattgccaaggccatgccgagagccggcgacaacctggggctcccgcctccaagctctttccagctccacttggccgcgtagcgcgtgtcgtggtgctttaaaccttgtctctcccagtttgggaaacttcacctgccccaaacactctcagcgcgaacctgggatccacgtccagtcgagcctttactcccccactcccacccccagactcttgcaggcggagaagaggccgcgcccccgagcccagctccggctggcacctgtacccagctgagcaccccgcgggctcagagccccgccgcgctggagtcctgcgggtggcgggggcgcccctccgccaggaccccagcccggggcgccgtctcctccagaaccccgggtccttctcgcgttcacagacgcggtgcggaggtccagagcggagggcgccctggccagggctgcgcgcgcggggaggcggggacgggagcgctgggctcggaaccccgagacccgggctccctagccccagaggcaacccgaggcggcagctatttatagagggagccacgctcagtccctcttggcggcggcggcgacagctgaatattttgcccagatatggctgaggccccggagcgggggcagggagccccgcgagcgcgagggggaccccaggcggggtgggggcttacccggacgcagagctgtggggccggcgcggacgcgggctgcggaacaggcgcgggcggcgggcagatggacgcgggcggaggccgcggtgctccggcgggcagcgggcgggcgagcgcagcgcggggctggacgagctcccgggcggccgcgggcgggcgggagctgtgggctcgggggtgggagccaggggcgggcccggctcggctgtcaccgcgccccgccccgcccgccgccggctccctccttccccccccctccactcgggggcgcccgggcgcagcgcacttccccgtcgggacgcggccctgggccgggagcgcaggggagtcgggctgcagccgagcgagcgcgggcccctgcctgggtctcctccgcttccccgctggtaccaggaagagtttgagcgacggtagagttatgtgggaaaaggtgggcagatttgcattcctgtggggtttagaatttaagattttgagaatctgaagtccccagaagtgatggaccaaagccagctaagcagctgctgcaccttcacctctgattgaagcgccgctccgtccgtttcccagcagcgcggccaggtgggctctgagccgcaagctttaaccgcgatcgttttgtctacacgtagttccaacacgcaatcgaatacattctctctacactgagagcgagtggagtgtctaaaatactgattttaaatgaccacaacaaaaagacccaagttcttaaaaggcttttttttttttttttttttttcagaacaaaccactttaggtggtttattccaaatacaattttaagtgttttaataaacaaatgtctcatgcaaaggaatttatatagaaataggaaaacgtcttattttggattattatgggaaagcttttggtagggtagaccttaataaaatcagctcttaatcctgatgtatagattattaatgagaaacactcattaaccaaattttgtttctcaagaaaatgaatttctctaaagtcctcacaatgagaacgctcttttcaaggggtatatgccatacatttaaaaataagcagtgatctaatatttcagattattttaaaacatttttgttgtgaatcgaacatataagaacatacaacataagttatgttgtatgtgtaaacaaaataaatgtgcagcttcatgactttttacaacgtgaacacctgtgcaaccagtcactcagagaacattgcctacagcccagaagccaacctgtccctcctgggtcccaactcccttctaaagatgatcactttcttgacccttacggtgatcatgtccttgttttttttcttccctctgtagtatgtcttcatttgttcaaatctgttgttaatctgtggttttatgcagctgtagtttttcactgtatgaatatgccacagtttaaaaaaaaatccatttgactattaatgggcatttaggttgtttccaggttttagctattacaaatagtgctgctgcgaacattccttgccagaatcctcctgtccacgcgcacagcctgctgttggaagtgctgggtgatagagaaagcctaacctcaacttcggcagagataagcctgaactcttccaaagttatagtaccattgtacagtgcagtttcccatcttcaacaacacttgaagttacaaaaattgaaacactttagaaattctgatatgtgagtaatggtatctcattgaggttcaaacttgcatttccctatatcctaatgtgttgagtatcacttcatatttattggccagttggatttgttttgtgaattgttcagatttattgtccatttttcttctggatagtcctgtgtattgaatagattcaatggtgtgtgtatcctcagttatattccactcttttgccttttcaccttattaacgtattttgataaacaggtgttcttaaatacagtctggcaatcttttcccttattggcagcactctgtgtcctgtttaagaactctttcctgttcctgggttataaagttatcttcctatgttatcttcccaccttagcctttcatgtttaggttttttgtttgtttgtttttgtttttgtttttgagatagagtcttgcgctttgttggccaggctggagtaaagtggtgtgatcacggctcattgcagcctcaacctcctgggctcaagccaaccccttaacccccacatcagcccctcaaagtgctgggattacaggcatgagccaccatgcccagctatttaaaaaaatgttttttgtagagataggggacttgctatattgcccaggctggtctgaaactcctatgctcaagcaatcctcccgcctcagcctcccaaagtgctggtattacaggcgcgagccactgtgcccagcctcatgtttagttttttgttttttttttttgtttgtttgttttttttttttgagacagggtctctgtcatccaggctggagtgcagtggcgcgatctcggctcactacaacctctgcctcccaggctcaggtgatcctcccacctcagcctcctgaatagctagaactacagttgtgcaccaccacatccagctaattttttggtaaagacagggttttgccacgttgcccaggctg

SEQ ID NO: 588971 - DNA, 4001 bp, Homo sapiens
ctatttttagaggacactggctttcatcttaggctgggagaaactcaagggtcaatgactctctaaaacacgggtttgtaagactagctcattaaagataatacaccaaagtgacagtattcttgttttcactctgcctgttggttgtgtggctctaactgatggaaactttattatctgactccatttcccgttaattcttttttctgtaagtctttgagatggctttagaaaaaaacacataacagaaagtaaagtagaagcaaaaaggaaacttcaggatgagggcgctattgtccagacaaggtaaagtccagaacagcagcagattcaagaagagggggcattgatcgggtgctcccagagctcccggacctgcctgagcagtgggaagggtgcggaaagagatgggaaaggctgggagactgcagaacttctggcgtgaccggccctgtgtgaccttgagcagggggctctgcggccctgcacagaggacaaaatggcagtcacctctggaagaaagatggggtgggggccctaggggttctcacgctgagggcccagcacctgggttcagggtctggttctgcgattcagacacggaggagcttgggccaggtcgtctccgagagtctgagggcatagggcgagggctggagacagggtctgtaatagtagcggtgggtgaagggtgtaggagggggcggcgctgcgcaggttggaggacgcatcataggcccgatatagaccgggaaactgtggccagggagcggctgtactggaaccactgcccctgcccagctcatcgcatctgaagctgcgtggctcacaggctgctttgccggctacggagcagagagatgcccataggcaccccaaaagtgcacttcctagggttgtacggcttaggatatccgacggccttagtgagtcccaggatacgatcgagtctggggcagtcagtctccgatttctgcagcgtctccgcatgtgcgcggctgggaccccagcgtcccaggcccggagagggtgaacaggtgtggggagcgcaggcggccaagagcgcgccctgcagctctcagggcttgggctcccagctccatcgcggctaccaaacctcgcccctacaaatgggagactgagatccagaaacaagagggggattgccaaggccatgccgagagccggcgacaacctggggctcccgcctccaagctctttccagctccacttggccgcgtagcgcgtgtcgtggtgctttaaaccttgtctctcccagtttgggaaacttcacctgccccaaacactctcagcgcgaacctgggatccacgtccagtcgagcctttactcccccactcccacccccagactcttgcaggcggagaagaggccgcgcccccgagcccagctccggctggcacctgtacccagctgagcaccccgcgggctcagagccccgccgcgctggagtcctgcgggtggcgggggcgcccctccgccaggaccccagcccggggcgccgtctcctccagaaccccgggtccttctcgcgttcacagacgcggtgcggaggtccagagcggagggcgccctggccagggctgcgcgcgcggggaggcggggacgggagcgctgggctcggaaccccgagacccgggctccctagccccagaggcaacccgaggcggcagctatttatagagggagccacgctcagtccctcttggcggcggcggcgacagctgaatattttgcccagatatggctgaggccccggagcgggggcagggagccccgcgagcgcgagggggaccccaggcggggtgggggcttacccggacgcagagctgtggggccggcgcggacgcgggctgcggaacaggcgcgggcggcgggcagatggacgcgggcggaggccgcggtgctccggcgggcagcgggcgggcgagcgcagcgcggggctggacgagctcccgggcggccgcgggcgggcgggagctgtgggctcgggggtgggagccaggggcgggcccggctcggctgtcaccgcgccccgccccgcccgccgccggctccctccttccccccccctccactcgggggcgcccgggcgcagcgcacttccccgtcgggacgcggccctgggccgggagcgcaggggagtcgggctgcagccgagcgagcgcgggcccctgcctgggtctcctccgcttccccgctggtaccaggaagagtttgagcgacggtagagttatgtgggaaaaggtgggcagatttgcattcctgtggggtttagaatttaagattttgagaatctgaagtccccagaagtgatggaccaaagccagctaagcagctgctgcaccttcacctctgattgaagcgccgctccgtccgtttcccagcagcgcggccaggtgggctctgagccgcaagctttaaccgcgatcgttttgtctacacgtagttccaacacgcaatcgaatacattctctctacactgagagcgagtggagtgtctaaaatactgattttaaatgaccacaacaaaaagacccaagttcttaaaaggcttttttttttttttttttttttcagaacaaaccactttaggtggtttattccaaatacaattttaagtgttttaataaacaaatgtctcatgcaaaggaatttatatagaaataggaaaacgtcttattttggattattatgggaaagcttttggtagggtagaccttaataaaatcagctcttaatcctgatgtatagattattaatgagaaacactcattaaccaaattttgtttctcaagaaaatgaatttctctaaagtcctcacaatgagaacgctcttttcaaggggtatatgccatacatttaaaaataagcagtgatctaatatttcagattattttaaaacatttttgttgtgaatcgaacatataagaacatacaacataagttatgttgtatgtgtaaacaaaataaatgtgcagcttcatgactttttacaacgtgaacacctgtgcaaccagtcactcagagaacattgcctacagcccagaagccaacctgtccctcctgggtcccaactcccttctaaagatgatcactttcttgacccttacggtgatcatgtccttgttttttttcttccctctgtagtatgtcttcatttgttcaaatctgttgttaatctgtggttttatgcagctgtagtttttcactgtatgaatatgccacagtttaaaaaaaaatccatttgactattaatgggcatttaggttgtttccaggttttagctattacaaatagtgctgctgcgaacattccttgccagaatcctcctgtccacgcgcacagcctgctgttggaagtgctgggtgatagagaaagcctaacctcaacttcggcagagataagcctgaactcttccaaagttatagtaccattgtacagtgcagtttcccatcttcaacaacacttgaagttacaaaaattgaaacactttagaaattctgatatgtgagtaatggtatctcattgaggttcaaacttgcatttccctatatcctaatgtgttgagtatcacttcatatttattggccagttggatttgttttgtgaattgttcagatttattgtccatttttcttctggatagtcctgtgtattgaatagattcaatggtgtgtgtatcctcagttatattccactcttttgccttttcaccttattaacgtattttgataaacaggtgttcttaaatacagtctggcaatcttttcccttattggcagcactctgtgtcctgtttaagaactctttcctgttcctgggttataaagttatcttcctatgttatcttcccaccttagcctttcatgtttaggttttttgtttgtttgtttttgtttttgtttttgagatagagtcttgcgctttgttggccaggctggagtaaagtggtgtgatcacggctcattgcagcctcaac

SEQ ID NO: 588972 - DNA, 4001 bp, Homo sapiens
gagcttggcaacatccctttcaatccttgtccaatttaccctgtttgagcaaaccagagaatactcatattgtgcacctttttcttccccacaaagcagtcaccttcctgaaatgcaagggccaaagcacgctgacttacatctcctgcaaatgacttgtatgcgcacaaagccagaaactcttcacttggttgtctaggactgaataaatcttcttcagtcctgaattgggcttgcctggctgggatggatagtagttttcctttctaaaacacatatgggaaagctctgtaaaaatgggggaaaaagtctacaaaaacatgaaaaagaggcattcattcttcaagtggtgctccctgtcctgccctccctccggacagaaagcttttccaaagagtttccaacagcatcgtacttcatagctgtcagctttagaatctgcagatgcctaaactcaaaacctcctgacattctggaatcaaaatttgacattaacttccagccccgggctactaccttttctccaacctgtgccaacacaacctcctgcttgtaaaatacagccaagtctcagacctgccagcctagtgagacaccctcagattgggtgagataaaaagcgggggctgggggcgggctgaggaacaacacacaagaaacaatccaagactggctcaatgcctcttttaacttccagagtgatggcagtttttggcaatgacaatgattatccaaacttccagttattaagcagtcattgctgatctttctatacctcattttctcctcaaaacgacagcagacgctattgtccccattttagagatgtgaaaactgaggattaaggaagtgatgtatctttctcagggtcatatgtatggtggtggggagaataccaaacacctctggcttcaaacctaagctcttattcctcttacaacactgatgggtgagaagaacccctgtgttctttccaaagtacaccaggggcagcagggttcccatacctgggggatgttgttgctcagatctttctgtgatgagaggtgaggaggaggaggtgattctagagacatgtgggacgctgctggctctaggcaccccagtaaagctgttctccaccactctctagctgcctgtcagttattcatctggcccaggagccacctcctctcttctgtcccccagctctcatttccagggtgaatattttgaggaccaaatgagggaatgggtacaaaactctttgtaaactttatgtaagtgctgtttagatataaacttttatattctccctgcactcctctatcaaactccctctaacccatcccaggggcaggctatgagcaaagtctgccttaaaactctactgccctaaccctcaaaataaaagatatatacaggtgaatcagccagactagaagtaggagagcagttgaagagaaaatttttacttttcctctgcagaacagcagaagataacaactttacgaaaagttccttccaagtctgactattcataaagttaaaacaaacaaaattacaagaccagaaaagtcaaggtgcatctgatataaccaatacacactccttttttttccagcggtggaaaaaaaaaccccatatgttttgtaattataatataaaatcacaactcatttggtaccaggaatgcaatccttacatcataaggatctctagtgatgagggcaaaacagacttacctttccgatgggcgagagacctaggtccttggaagaagtacctggagtgtggagctgcggcggttcccacgtgcgcgttcccccgagttccccagcagcgctgcctttgtgcccacggaggcgggggcgtgtatctgcgcgcgggagaggcgggtgacagtaggcaggctgtggccggtgcagccaactttggctggcttatatagcgagctccttcctctgtaatgggacgcctcgcctccagacatcctttcccactttttcagttggcgaattaaaggaacagccctcccagcggaacagggttagctcatgaaagacgcactcactcctggctctcggccagggaaggaacccatttgcatacaatttatggcgaaagtaggaattcccgcctgcccgcccccgaccccgagtagctgttagtgaaatgtgatttttgctttgctccccacacgggttttctaattgtgagacggatgcctggggagcaagagggagtaggatccgcagccctggctcccctcttgtacttggtcaagctggaaatgggaccagggctcgcctgggctctgggcagcagctgctcagtggcacctcggagcgagtacagggactgagcccagttcctggaaagaggagataaagcccttcaaaagcctggggggtttcaggtttctctgggccagcggagagataacccaggattaggtctcagcaggtggggatcgtgcgggacgctcacatcagccctgcttttcttgtgtgggagccagccttgcccagctgctgggaggcatctttgttccagccccagtgtcctgcagggcagtagctttttgacattgttcatgccctgtgcctggtgtggtcttctcagctgggtctccagggggaaggatttctgaggttttctcttagtgctgaaaggcgtcccccacagccctttctttaaagaaaagcaataatttaaaaaggtaacaacctaatccttgagccataagctgcgcctttgctttccagcctgccgtggatttcctccaagctctgagtcatccgttcgtttggtggttagcatgcattgagtatcctcagggcatacaggggcatttaagggagtggagaagtagcacttcacccgtgcctagagacttctgagcctgccgcagagcatagtagtttgtgacagtgaagtaaaatgaagcattaaatgtaattcaaaacgcaactaccattgagccctcccttattaagtctataatcaggtgctgtgcagggtactttatgaacactatttttgttcactatttttattatatccttgtaaccagtaagtaggatagacacaagtgtctcttttttacacaagaaaactgacgtttagagaagtaatgaaactttaccaagggaatacacctgggaagtgtttatattacaacactgggctccagagatctattacacgttactgtttaggaatagggtatgatgatatttaaacaatgttttatgctgtattagattgttaacaccatttgtgtagaaatcacagccatatttgaatatggaaaatatatttatttgctccataaagctaattaggagagatctttgatttttaaaaattaactactaataatggaggtctcaattatccacttattttcaatattaaatgatatcatccccacagttattattgttgctgtgggcctcagtttccccatctgaaaaaaaaagcaagacacgattaggtcatcctacggttgctttggctgtagtattttaggattctctgctaaagtgaccctcccagacagcaagaaagcccataaatagtcatgtcataaaaccgctcatttgaacttttgatccattttggctgattcaaatgttggttgtttgggaagttttaaattctgtgctttagccaaaggatatttcagtagcatgaagctgtgtctcaaccagcagtgagtggttcctactgagttaatctcttgggttagggattaaaatattagaatagtgtacaatatatgtcatatggtatataaactatatttgtatagaacatataatcaatatatttataattctatgtgagtttttaaataagacaagagcgcatgctagaaaactagatagatatggctttttcggggaatgtctcaaactcgaactcctctccccagttctttaggattctacaatcgttgattagtgtctaccacaagtggtatggtcaatcacagggaaactaagccaaatatgacc

SEQ ID NO: 588973 - DNA, 4001 bp, Homo sapiens
agcttgtccccttcttgcaaggagaacatggctccgaggtagatgggctggaaccagttgctacctacttcgcatacagacttggtccccatgaggagctgggttggctcagggtagctgtctgttaccttggtgatgaccacagtgatggagtctggcttgtttggtcggcctgcttgtctgatttcactgcactcagaggtcatcccacggaatgtgacctgggagtaaatgaagtagtctcccgactctgggatcagcaggaatttgttggtatagttcattcggttcttggtgaaggccaggcctagttcatgttcccagtgcagagctgggaactgatttttaaagtgctgtgtgggagtttgtctcacaactggaaagacaagaaagaggattaattttctcattgggaaactgtagactttgcttaaaaagtgtctcatatcattttcaaaatagactaaagtgatcgaatatacctaacagctaaaaactgctttggggaggaatgaatgaagaatatgtgactggacatacacatttgttcaaagagaataacatcttggactagtgacctggggcaaattactttgcctttctgagactgagtggtctgacctgaaaatttttaattttacctgagacctatgatcctggagaacaatgaaggttaaggaatccccctattcttctgtgtttaggaaaatggcttgctgcaagaattatcctttcccaaatgactcagataaaactcatcgatgcctctcttgtttacgtatgacaaggccaggcaccagacccttcaaattcccattctttgccccataagtgattggctgaactgttttatccccattcatcaattggaacaaaacacttgtcttacaggcatgaggtaagtgatagaaacttggcatctccctggtcctaatcctcactcagagctcaccacaaataatttcctcttagtcaaatgataacaccaatgtcttgggccacaaggatatccccctgcagactgaaaattttcttataggtcaggagggtatgcttcctttttaaccttctaggttttcagtgggttctaacatatccttctgcactgtcttgttctttcctctggagtctcagaggtataggaactctaggtgtgaggtgccttggatttctgcactagacttggaaagttggccaactggtgatagtatggaatttctcttgatttggtgatagtatggaatttctcttgatttctatatatcgatgaaaattctttggaaacacctccctgaaggtaaatgtttagttacatcatcttgaacagggcacagatgaactagataaattggcaactctggggactttttgtttgtgaccagatccagaattacttgcagctccgagttggagagaagccatttctgaatgactcagtgtatgaatgaaagagagagacaggagagaaagagagagggctgatagaatctgaaagaaaatgcccaagagacatgggcctttggaacccccccacagggaagaagacatccaaaaaaccctccatgagatacctgcactcacatgcttattgcagcactattcacaatcgcaaaaatatggaatcaacttaagtgttcatcaacagatgaatagataaggaaaacgtgtgtgtgtgtgtatatacatatgtgtgtacacacacacacacacacacacacacacacacacacacacactggaatattgaggggaggagtctcttaccaaggaatgtagttttcattttaagccactagaatgaattttggtaaagtgctgaaagaaatctcaggattctggcccatggtctcccgtaaaacacagcagggaggcttacctgtcaggtgtgcccttggcttatctccgtctgctctaagaggtgcatctgtaacaaaaggagaaatgtgctttgtatgagacaaagggtgactgaaatgaagacggccctttgtgagttgcatggcgcctatgataggagagaaaccttgatctcctccagcttggtccagtgccactccttgcaggattttggattggaatgtggcacccgcagcaagcaccaccaaggacagggtgactcagaagaaagagtcttgaacacaaatgaatcttggccccatggctttgggcaagtttatctagcctgcctgagaccctgttttctcatctcatctaagatgggcacagtatagatggaggtgcttagcatgaattttgcacatggccaatgctcaataaagcacaactcactgctctttcccacaaaattctttcacaggagtgaattggctttttgccttcttccatggtccctttaactatattcactgaatagatggcccaaaagaaatgggatgaagagtggatgggaactattctttagctatatgactttggtgaatccttttccctctctgggcctctgtttgtctattagttcttgagaagaccttagaatttccctttggttctcagaaatattatgttggattaggcatggtctaattacagttataaatatggtggtgttgatgataataaaaagcaaaaatgaagtgcatacttttgatgtgctagacattgttctaactcctttataggaattaactgatttaattcacattaacccttttgagtaggatctactataaccatttttacaggtgaataaatgcaggcagagacaggtgagattatttgcccaaaggtcacactgctagtagattccggagttggggtttgagttcaggccatcagctccacaggccatgcactttgacatggtgccattttgccttcttagtgcctgcagcagagcctcatttctcctctggatttgcatccctcagcttagcaacttgtacttaaagactcatctctgaacttcctgcatacagaactactagaaatgttcttattccccacgaggaaaggcgttgaagatgagcatacttacaaacttgctgatgtgaaggtgcaaactcctgtccttttagagcctattgggaaagaaagtatagtttagaccaactgtggtccttttgatcccaacacttacagcttcccatagcacaggtatgattacaaagcttctgctgcccagcctgggtactctgtgatgagggaaatgagaatgaaaatatttttgttgatgggaatcttgcatctcagctctccactttcctcccctgacacttccaatgaccttcctctttcttaggcttgtctctgaagctcaactttaaggttcttttcttgagagattttctcgttctattctaggggaactcagcatcttgtctatgcttttgttatttgaacaaataatggcacttgctttattttctttcctctaccataatttaaaaattgggactcttcttaaaaacgacacagaagagaaaataatggctatgttctccttttcatcagcctcaacaattcttccttgtttctgtgcaatacataaagactttttaaataattgcaaccctagtttgtgagctatttcagataccacatgatggtggaagagtaactgccttagaggcagacagatctgaatttaaatccttgttccaccatttattaacaatatgaccttgacaagactttttctctctgagctttggtgtctttatttctaaagtgggaataataacatacttagccctaaattactcataggattgaggtgaagagcaaatcagaaaatctatgagttagtgcaaagaatgcatggaaaatgaaggaaccatcactcacatacctgagcataaagcttaatagcaaaagtatgctcttagcttacaaataatatcatgcattggactattatacatggttggtgggaatataaattagtacagccactatggaaaatagcatggatatttctcaaaaaactaaaaatagaactaccatacagtctagcaatctcactactgggcacgtattcaaaa

SEQ ID NO: 588974 - DNA, 4001 bp, Homo sapiens
atccccacacatctgctctccaggaagatgaatttaatgataatggaatggatggtgtcagccttattcatttcttgagcatctgcaattggataggcacagtgatagattcaggtaggggcagtagcagtgagtaaaaaagaccccgtgccttccttcaccgagcttcccgtctagtgacagtgcatgtctccatctcaccttctggctgggcaagtcatggatcctccctggtctgtaacattctgcttgctggtcttctagatagacaaaggcagtcctcgccttctgctgaccaagggctctcagacatcatcttgatcgtgggaacctgtcatgcctctgggcttccttcagaccccagtgcaggtttctggaggccactcagtgtctcattcaaggacaactatctccttctggctaaagagggacagagtcccagagcaccaactgggcgctgcagtttgacttccagcagaaactggccccttggtggtcaaagggtcaaagtctgacttcccatgacctgcggttcttctttaacataaacagcatttccggtttgtctgcatatttctacattttatgagcaatggcatctggccatgaacgctgctgcctgaatcacagtctgtttgttgaccctgatggggcagcgagaattacagattttccatggcttacttgtggtgtctatgctttgaaactggccaggattgcttagaggctaggtttccagttaaacccattgaaaacccatttttttccctttgcaatttaatactttgaactgaaatgaaatcagccaccatagattatgaagggacatttttaaaaaggatattactggaaagactcattccttaggttttgaggtacatctttgttgttcccagccaagaattatgttttcttcttgacacctatcgctgcccctaccattgttctccctagacttcatattctttttctgactaggcttctcccaggcctcagcaagaccttagagatagacaaccaggcaggaggttctttcttaagctctaaaaagagaaaaagttctaaacccaagaaaaagagtgggtaaagaaattatagcatccacatataggaatgtgtatctatagcatcatgttgttgtgaattcattagcatataaataaaatcataatatattagcagactcagaataatctcgtctcattaaaaaatccgttttatatctggcatataattctgtacagaattatatatcccaaactgttaacagtggtcagctataagagttatgggtaatgatgactttcttcctctccttatctgtattttctaacttttttcaatgaccgtgttagttatgtaattttaagtttttttcttaaataaaaagaatcttcccaaattaccagtatactatgattataattatctaaaaaatatgaggctgaaggttatccccacagtaaaagaagggactgttcattccctagaaatattgagaataaacaccaaattgaacctctccacccctcccactctacatttcctctgcatgtagaaacaagaaatgtgatacatcaagaaactctatcctctgtccagagctgaaatagttgccactcactgcagagagtccactgctcctccccaaggtcagagtgccatgtggcttacctggaactgcacacaggcctctccctgggcccggagctggctgacaagcaggtatgtggtgagtcctgcaaggaaggggagcaacaccaggcagcaggtgagagcccagcgtgcgctgctgctcctggccttgggcctgcagctgccgtgctctggcagcatttccacactggctgtttccccaaagctcagtcccagatcctcggccatgctcctgctgctcctggaggcacctctgactcctgggcagagagagcccccattaaatagaagaccagctctcacagtgggtgacttaatcactcagtctcctccttcccttttcctctcccctcccctcttcaagagcacactgtggccctaccctgctagagaatgcaccgcctacaacagaaaccaagtttggtttgaggaaaaaaaaaaaaaaaaaaaaaagaagaagaaggagaagaagaaagctttcccaagcatatttatatacagtatgctcatgtgctccttccttcgtttacagaaggaagttaggaaagtccctgaaggaggagagaaagaattcatcaagtcagtgggtggggcaaattaaaatatacctgttccctgcactggaggcttaccagctgtgccagtctggggagtgtgcttctggaagtgaaagtgagggatgagaggtgtgtggtttgcagattgggaaacggaaatcacatttgcatcagctctttgcaaagtgctgcctagccctctgtcattttgaacctcatagaaattcattctcagtgtacagatgggaatagcaaagttctaaaaggtgaaggcacttgtcctaggtcatccaaggatgaagacagaggagctaggaagatgacctagttctaaatcacggcttggagttgtaacctctagcacatgactgcccatgaaaggaaagtatttccagtctgcattgaccattgtttaatcagagtatgaggccacagatcgaggtgactgtctgtgagggtagaacattaaccactactccctgattagtctaaagttaattgatcatgtgatgtgctttgcctgcagttgggtgtgggggccacaacatgtaataaaagattatatttattaagtgcttactttgtgccaatcactgctctaagttaaatacatcaataaaattattcaatcctgagataaattttgtgacaataaagctatcattctcattttacacataagaaaataaagcacagacggcaagtggtagagccaggattgggactcaggcaggctggctgctggcttcttcaccatcacacttcaccataggtactgctggatcatgcatgttcataaatacctgcactgtctttacccaggagtgggtaagaccctgcagtgagggggttgagggggcttcctggagaaagaggtggtgttggaactcggccttagagctcagggagggttgatctcagaggaaagtaaaggaccctgggaaaagatgggttctagaaataataggaaagtttaaggaatggcctgtgatgtacggcagaaaccagttttactagcgcctccatccagttgctacttctggttatgtcacagcctggactcttcaggctacttggaaaggcctttcatggcttggtccctgctcactgtcacccgtccccagtgtccagcctcaacttttactactttcccaagctgcagttccctggatacactattgactagctgtactgttgcaaaatggaagtgtccagtcctcttccttcatatcactatgctcctatgctcattctagcaaaggatgattttcatgtcccatggctactcattcttggtttaacaaatctattaaaaaatgtctttgagactaacctaaatctctgctattgtaacttaacctttcttttctatgctcctgttccttaattgtgtgtagaaaccatttttgtatccgcctgcctccaagattgggtaagatgatcatattctatgttcctatagcttccctttcttccctatcattgaatacctcctactagactatgtttgaccattccttctgtctccccaattagaccatcaggtctgggagagcaggtactaagtcataacccttccccatgactattgctcctaactgttattcaatagactcattaccatctactaaaataagcatctaacgtattttcaaagaattctagcaaaggatgattttgatgtcccatggttactcattctggattgaacaaatctattaagaaacatctttgagattaacctaaatctttgctattgtaacttaacctttcttttgatgactgagt

SEQ ID NO: 588975 - DNA, 4001 bp, Homo sapiens
ttttctttggccattgctataaaatgacatacccttggttcactccaaattagaattacagaaattgcagagcccctgcagaagaaaagatgtcctaaagtgttttcaagattattatacttaatagatgtagataagccattaaattatgagttttaagaattccactatctaaatcaaatatttgcaactccttcttttcacttttgtagagatatgagcttcaaagcttccatttaatttcaaagcttgatgacacttgagaaatagatatcaaagccttttaaagcctagttctttccagcaattgataagctatagagtacttggcctaagaaaactgaagaaaaaccagaataaattcagcaggattataataccacgaaaagtaggcactatgaagtaagaaacagaaatattctcactttggcaggtcatgtgggtgggtgcagctcttaaattacccattaacaacttcatcaaaaaattcatgagcaatatatgctattactacagcattttctatataatatatactggtagattctctgtaaacaccaattttctaaaatatgaagaagcttcctctttctcctcctcttctgttttcagaaacaaatcttaccatttacttcaaagtaaatctccgaagacagtctgaccctgtacagtgtgtacccaacgattgcttagtattgtgaggaacatcagagagaacaggtgctaaaaacctttcaactttctgcttctatgtgctgtttcttttttttttttttttgtgacgccctaacttcttcaaagttgtggcttaagaggaagctttcgatttgtcttgctggctttaacaccaaaatgtccaaagctctaagaagccatggtcttctctttcgcctcctttccttctagaccttggcctctgaaacttagctccttgtataaaacaaaagcaaaaacaaaactcttggcaatgggtgaggcctcagaaacctccaggacactcagacttaggatatagaacctcagaatccagtctgaagtccttgaagacatgataacaacttgtgcaaatgtgttatcaggtttctctattgcttccttccttgatatgggtctctggctcattaagatttaaatcttaactttaaaaggccaatagctcccctccactgttttgctcagacagatctgcaaagttttaagatgatggtctaacaatatttttctcaacaagccaaattattttagagagttaagttcctctttcttttctccctttctcatatatatatatatatataatatatactgtataatataatatatattatgtaacataagtgtattacgttatacagtatatactatagtatatatatatatatagagagagagagtttatttatttaattttattttgtgctcttaaccaacaaacgaatatcatttgttcccagggctctttctctcgggaaaacaacaagaaaaggaaagggaggaagaggagtccacttaccgtcctctgaacgaccaacaccataatagtggccaccgtgaagacaaggcacagagccagagtggctgtggtcaaatagaaatagctgcggctcgtggtccccaggtggctggccacggagcccgccggcacatgcatggctgtgtctccaggaggggccattccgttgagtgcttgctgcagccctgggtccattctttatatagtcttccccacatcacaccttatctctcttcatctgattcagttctgggcccatctctgttccaagaaggattctccccctgaatcctgaatcatgtgacttggaaaaaaaccttcacctgctgcctggtggagaaactcttctctgggggcgtgaggcgagaggcggcagcaagggtgggggagaggttcatttttcattgccagggattaagttgtgtgcagagaaactagctacagagaaggtggctgatgtcagagggcgcgtaggaaaatgacggttccccgactgtgtgtgtgtatgtgtgtgtgtgtgtgtgtgtgtgtgcatgcgtgcgcacacacaaagcaacttctgtttcgtttagactctgccacaaaacgccttcctgttcaagaagctgcaccttctttcagcgaggcctgtggctcagaagacctccccagataatgagtccttgctgggtctcagggaggccggatccctcggactgcagtgtaataactccaaagggttcggtttgataggctactgctgaaaaagggacatgctgcaggttccctgggggaaaaagggcacacaaatggagatatttctccaaagggggactggctcatggcagtatgaaatttggggttcaaagatactgtcagaaagcaggaatctggaaatatcaatcttttgaacaaacactcctgcagaagttttgggatctgttaaactggcagatgaacctggacctgccgtaaaactcatgaagaggggaaggaattggcagtgagatggtgtggtgtggaatatgggggctgtgtgtgttctgcgtggtgtactatgtagtgtgtgtgtatttgtggtatgggggtatgtgtaggtgttgtgtgttctctatggtatatgtatgcagtgtgtgtgtggtgtgcatttgtgatctgcaatgcatgccgagtgtggtgcgtatgtaagtgttgtgtgtggtgtgtatgtatgtgttgtgtgtggtgtgttgtgtcttgtgtatgtatgtgttgtgtgtgtatgtgactactataattgaacctctactgtctcaggcacagcgctaggagttacatgtggcttcattccacttccacctccaccctccgaggcaggcaatgtttattttttacagatgggaaaactgaggctcagggaggatgaaaactatctcaacctaagtcgcaagtgtcgatcactgaaagaacttgggtgcactttgcagcctgcctggctgaaagctcgtgctaagtcattcaatcttcactgcacctgaaagctaaaacctgaagtgtggtctcagccctttcccttcttagccttgggccatcatacaagtctttatggctttctctgttcccaatctgcattacagtcatcaggaagaccaagcgagatgatgtcagagtactccatgaataaaaatagatttggggatggtgttggacaattcctgttaaacatcccaagctgtctactgggctaagtctggaatttagatacaatagacagattacctgggggacagagtcagatcacatctgtggttactaatgatctccatttcaaaataccgtttaaaatgttaatcactgcatagctgctgcctccagatgtgggcctttgaaagctccatttggtatcaccgtggaagaagctcattctgcatagcacctcctttcctttctgctcactttttgtctgcagcgcatcactttgagccagcagagatcccagatgcccctaaggaaacgtcctgtgtctaaagccaagcttggattattaccactgctgttcttgcatagaaccaaaacttctgagcatctcccaaattagatcaggctttaggatttggtctggatatttcctcccagtgagtctgtaaaagcatagatcctggagacgaaagagacatcaagagataaattgttttcttgggctaaatagagtggggggcgatatacccattttacaatcaaggaaaccgaggcccccgtgatcccaattgagtttggttttgaaaacagtgtgttcacgttcgtttggtccggtaattaaggtgggaacgaggcaagccagtgttttctggggcatgtacctggctgatttggggagaaggctgtgtcctctggtgggcacggacagtgagtgggtagcaagggctctgtggtctgcccagagttgctgagaaccagctgctcccttggccctcttgttcagcctctttgatcaaagtggaaaacttctgattgttgaatggaagctgtg

SEQ ID NO: 588976 - DNA, 4001 bp, Homo sapiens
taaaagtgaaaataaacaattcatatcaaatacaaaggtcactgagaagcagcaaatatttcactggcagctagatcaatgaaaaaggcaggaggcaggaaataagtaaatttgggagttgcaagaagctgttgaactaggatgatacgggtgtttctgttccccaagactcgctcttctgtgaaagcagagtaataccatagacagtgaaagagacacagaataagggacatctcagtatcagtgagctctggcctaagcccaacatgagccttcaataggatgactttggtatggccttcatttatttgaaccatccctgccgctccatccagactggctggccaataatatacagcaaggaacaatggaaaggatactgaattgagaacgagaaggcagggcattcgagaactgatcataaagctgcttccagttcttatattcagtgttcctataactctgataccttccttccttgctaagtcccctctgaaaatcaagttctcatttgtaaaatgatataaagaatcttaggccctgcctccctcaaaggtccactgtcaagactatataatgggagtaacttcctgtcaattttaagatatagaaaaaaaaacctcaaatatttgcattaatcctatagactcatattcttttttcccatttttttccaaaaaactaatgactcacttcaccctctatacaaagaaacagaaatgaagcaaaactttttggatttcaaaggtcagcacttttgaaagggaaggaacccggccgctggttcacgcctgtaatcccagcactttgggaggctgaggcaggtggatcacctgaggtcaggagttcgagaccggcctggccaacatggttaaacacccatctctactaaaaatacaaaaattagccgggcgtggtggcgcgcgcctgtaatctcagctacttgggaggctgaggtgggagaatggcttgaactcgggaggcagaggttgcagtgagccaagactgcgccactgcactccagcctgggcaacagggcgtgactgtgtatcgaggaaaaaaaaaaaaaagaaaagaaaagaaagggaaggaacctggtactgagttaagagttctggattttaggtcaagatcattcactgaatcgctgagtgacctttggccagccttcccaagaaggctgtttcttccttctagaactatggttctgtttctctgtttctctgtctgcaaaaacgagggagttcctctagggataattacttgagctctttcagctcaaacattcttttttttgagatggagtcttgctctgtcactcaagctggagtgcagtgtcgcgatctcggctcactgcaacctccgcctcctggattcaagcaatcctcccaccttagcctcccgaggagctgggattacaggcgcccgccaccacgaactcctgaccccaaatgatccgcccgcctcggcttcacaaagtgctgggtgggattacaggtgtgagccaacgcgcccggcagctcaaacattcttcaagctgggagaaccaggatgattaaacacgcgcgccggccaccacgtgcacttcagtgcccggaccctgacccgcagacctcaaaccgcgcatatgcccgtcgccttcaacgcgcaccctccttgctccccgctaccgttcagctcagttcgaaggccccgatgaccccttagagttaaggggtgcccgtcggtgagctccccgctggtctcacagtcacagcccgggagacactcactgactcgcaggagggccacgtagatgagaaagttccgtatggaggagatcacatcctcgcgcatcttccgtttcatctcctccgggtccagcttcggcgcgaggccctcaatccggaacatcgcggctctgacttagcagcttccagccgccgcgctctgctctccacggtggccgcctcgcgcccggaactcggcctatcctcacttcctgttcccgccctctcgttgccacactcgacgatggatgcctgcacgggacaatccacgtcctgacccagctgatctgaagtgcggtgtgaagcgggcggccgcaagctcagcaacgcaggctctggtttctccacgctgtctttaataacatctgtcatacaaaaatcagcccggctcggtggcgcgtgcttacaatcccagctactcgggaggctgaggcaggaaaatcgcttgaacccaggagggggatgttgcagttagccgagatcgcgccactgcgctccagcctgggcgacagagcgagcgagactccgtctcaaaataataataataataataataataacaacaacaataacatctatcttgagcctggagcgctgcgctgtaaagtgcttttacgcgctggagggggctgtgcacataggtaccactgtaaacagtgataactaacatttattgaatattcaatataattgtcccccgtgaattcgatattataatcttcgtttcctagattagacaattgaagcacagagatctttaaaacatcttgcccaaatgtgctttaatttttatttatttttttattgctaattgtggtggttgagactgttctggaactcctgggttccaggatccaagcgatcctcccgcctcggcctcccaaagtgctgggattacaggcgtgagctatcgcgcctggcccccaaatgtgcttaaaaatacctcagagggggaaaaaagtattgagagagataagtgatgtcagcaaaatattaaaaactgctggtgactagtacttcattttagttaattattctagtctttcttgagtatgtttgaaactttacataagttaaaacaaagagacaaagatgaaacttttttttttttttttttttttttggagacagagtctcgctctgccgcccaggctggagtgcagtggcgcaatttcagctcactgcaaccgctgcttcccaggttcaagtgattctcctgcctcagcctcctgagtagctgggattacggttgcgcagcaccacgcctggctaaattttgtattttttgtagagacgcggtttcaccatgttggccaggctggtcttggaaactcctgatctcaggtgatctgcccacctcggcccccaaaagtgccgtgattacaggcatgagccaccgcacctggcctttttacagattattgaagcacagaggtctttaaaatactgttagccaagtaacacaatatgtataaagcaagttcaaatctgatcagcattttacagatgaatagaaagaggctcagaaaccaagtccagctttggtgtgaagccctttatctggaacatcgcagctgaagtctaaagtgcactaaagtctagtcattctgctggtgatgcacgggcagggttctaatgcagataattatcatgtcaagttgaattatctttcccctgcaccctactgctcatctgttagtctttaacagttagtgcccacatggatggacatcgctagagtcaagagtttgatgcaaccagatttcctgtcacagaagcatccaaacagagttagtaggctgctgccccaagttacgcatgccaactagccatatctacttcttacacgcaagccagatgactgaattgctcacataattcaaaaccagaatgttccttcttgactgcatattgcatagcaacaatggactttggataaattaggacaataatttactatgagagcaactaataactatatgcacggtcaactttctggttgacagaatgtaaggcactggggcaagaaagggaactcatctgcttattccagctttagcaaccttttgcatctgtaattcatgcaatggaatagcagaggcagctctggaatgggaggggctgactcccaaggaatagcctccagccaacccttggtgagtgtttagaaagcctgcagtgatgttgaaagcagcaagaactgcggaaagaacatgaacaggaacactggag

SEQ ID NO: 588977 - DNA, 4001 bp, Homo sapiens
ggccctggccctggcccgccgaggcccggacagccccgcaggccatgaccgcaaccctcgggtcccgaggcgccgctccaggcgggagcgccaactcccacggcccttccgacccccgcgtcccattgttccgaatctcactcacctcggaggatgccggcgcaggcctggctggggcgctcgccgcgagctcccggcagcccagaaagctaggtcggtgtcggcaggatccgcgaaggcgtacccggcgacttctccgcctaccctccgaagcgggagcaggcgggggcgcttcaccctcctcgcgagacagcggagaccccagcggcggctgcgacccctgtgacgcaaagggctcatcaccaatggcagctcggaagcagggcagagagcgagacccaccccccagctcccgcgcatcaaaacacaacacccgccttcctcacgcatgcgcagcagatggacgccggcctcgggggcggggctcagcgcaccggcccaaatgcggcccctcccccgccgctccagaccccggaggagggcagcgcgaccctccccatcttgttactggtactcagccactggggacactgactgaatgttcgcccctaacttacccggaaaacacgagaactagttcgatgtcgtttcaaccttaccaaactctgcggaaacttaggaaattatctttagtgtctagataggggaattgttagatggacttgaagtctctcacctcctgttgtacgcctcccggaagcaacaccaggagtccaacgggatcccaaaccagagcccaaccagtatcctataaagtcttcagagagggatcccctccaggctggggagaaacaggacaacctaacaaaacagggcctggactcctccctaaacagaccacgtttttctccgctcttccccttcccactccctgaaatctagactaaaactcttttaagataactgcgaggtataaagaacgtctagagcctaagcggcccgttgccagattctactcctcaggcctcaaatgtgagcgccccaaacattctagagctgaacctggtacgctcgcccaccaaactgccgtgctcggggcttagtatctcacgcgcggcagttcaagaacatcagacacgctcaacaaacacttgttgcttgactgatacattatggcgggtaacgcgtcccacgtatttcttcttagagatatacattacgctatacgtttctgaagaatggctcgatttacaggggttcccacaacgatttgtcacatataaaagagtgggtggtatttttacgtcaaagatgaacaggcgaacgtccatctaaatcgtgtggtatcagatgcggggaggcgtgggggagggagcgggggagaaagcgttaattcttccagctttagagccagacgtaatatttaaaacgtggattgtttttcaaattaacttttaaatggacacgacagcaccttatcctgcattaatattgcattgcaactagaaagaaaaccagtggaggtacgcctatctccttagttggcaaaaaaaaaaaaaaaaaagcaatttttaacattttctcgtttattcccctctctaaaaggcgggcaaggcccccgatcacgtgataccgccccccaactccgggcggaagaggccagcgacagcgctgcacgaagcgagtgggcgggcgctcgtgcccggctaaaagatggctgctggcgcctggcagccaccgcctgggaggttactgtaaggcccgcagctcccgccagctcccgcggactgctgccgcctccttaccatgaagccagtaagtcgtcgcacgctggactggatttattcagtggtaagtcccggggatcgcgggcccccaccgtgtcgactcactgggcccgcaggcggaaaggccctatttcttcagcacccagaaactccaaaatccattcctgaattaagcatttcactccctcacctcgactccgcctcttcctggaggatacgatcttccgcttcttacgtaagggctgctgggtgtacccgccactggaaccccatttattcgactttgttactttaattcccaccttagcaatggcaacggtaacctgacgggggcgaggggaaatatcaggtagatttcacacctcctttgcgatttttggtttagttgctgcttgccatcgttttaatctcctggggctgcatcatctatgcttcgatggtgtctgcaagacgacagctaaggaagaaatacccagacaaaatctttgggacgaatgaaaatttgtaactcttctggatttaattatctgaaaatacagttctttccctcatgcttatgtagatataaaaataaaattcataatgcaaagttcccaagtttatttttgcattatcctttataacaagcactagtatgcaaatttttcacttagagattttagtattttacattctcatgacaaaattaacagcaacctaaatctgacagtcttgagtgtcagatcatagttggaataagcttttcaatcaagtttctaaattcttcaaaaatgattcggaaagctttttttttttttgagacggagtcttgctctgtcgcccaggctcagtggcactatctcggcttactgcaagctccgccttctgggttcacaccaatctcgtgcctcagcctccgcagtagctgggactacaggagcccgccaccacgcccggctaatttttttgtatttttagtagggacggggtttcactgtgttagccatgatggtctcgatctcctgacttcgtgatctgcccgcctcggcctcccaaagtgctgggattacaggcatgagccactgcgcctggccggaaagatttccttaaaacaaaagtgcatggaattgctgttcttacatttgtttattgtgatatttcactgttgcataccctgataccaaattagtgtaagtactgtgtaagaaaaaaacaaacaaacatgtaactaaatacttttccataccgttttccaagtcaagaatgaccagaaaaagtaggtagtctctcatatttgtttagcatgtccactttttacttattgttaaattactcagtctcaaattgtacaatgcttgaaaacagatatgacaatttctgagattaaactttattaaagttacttttccagaaaattcagtaaatatggtaatataggaacaaacttaggctcataagccttttaactttttacataatctttaatgatgttgatcaggaaattctttcattggtggaattacttctccagtctccagaattgtatcaccctaggaaaacaaagatacagttagtacaaaaatcttaagtctacagaggtgatagttctattctgttctatgttcatcagatctcacatggaaaatgtacttgagttctggcattccctttaaaaggaccctagacaaagtagaagctgactaaatctgaacaatcagtattcaaaattttaaggtatagtgaaataatagggaaattttcactcagaaacaaaataatcaaaaagggcacgaaaattgtgttctctaagtgataaagggataatcttttattttgtatgaccccaataaatggaggccccagaaagaagttgcaaggaaacatctgcagttccagataaggaggtaatgtacccccagcaactgaatgtgttacgcaatcaccagttttctgattggcttacatactgaatacagaatacaaactttggctaggcagctggtccagatgtcttttcaattcttgatatagatgtgggcaaaaaggcatgggcattgaagccagaaccaagtggtaagaatcttggaacctccactgacaagctgtatagttttaagacagattattcaatttcagtttcagccatgtgtttaagatagattctgttagcctgccagtccctgaatgactgggaagagtagaattgtccccatacccaccccaatccctgccatt

SEQ ID NO: 588978 - DNA, 4001 bp, Homo sapiens
ggctgaggcaggataattgcttcaaccgggaggcagaggttgcagtgagctgagatcatgccattgcactccagcccgggtaagaagagtgaaactccgtctcaaaataaagaaaaaaataaaaaaatgagtgagatgtgttgatctctaagatggatttgatcatgtccacctctaaaatcccatgaccctacatactcactggaccgattttcagaacccaccacaaagctttgatggtattaactgctccacgcatctcaaactcttaacttctacacctttccaaggggaactgagacatgaaccgttttccgggctcactcatttcaacatagaactcccaaatctcatcccacaacaaagagaccccaaacccgatgacatccaggaagggattccaaacttccatccttgccttgtacaaggtgatgtttgaagcatgtggaaagtgcaatgtggccacaaacaggtggacatagtcactgttcagaccaccctcgtaaatattctctgcgatgatcttgctgacgaaatttttgccggtgcctgtccacccgtgcagggagagcgtgagaggtttcttgggctttgggttgtttatgaaaccaaacacggcatttaagatgattttctttgcaagatgctgtccaaagaggttgtcgtccagatccttctgcagtgctgggaaagacaaagccaatcaggagtggggaagaaacagcggcaaaatgtagccacatttacagcccataagaaagccagcaaagccgtctagacgccctccaagcaccttgcgaaacctcaagtactgcggtctgtaagctcctggcccagaggggacggcggtccagggagccctccctttgctggtcctgcctattctaaagccctggcccgactccttcccgaaaagccccttggtgccactgccactgccaccagtttgcacccctaacccctgtgctgctcctcccaccccaaggcagagccgggaaaggaaacagtttggtccctcctggtcggctgcggaagagtcctcaccatccttcctgtctcccgctaggctagaaaggaggcagaacccacttcggagggaggttaccactggtccacccccagcttagcgcaaagtaggccaacctgcagcctggctcctcaggtctccgacttaagtctggcacgtctgtggtcatggccgaggagccaggcctcatcctgcaggccggccgcttggcttccggggtccggcccccgcggactcagctctgcccaggcccggccctcctgggatgtgacccctaccccggcctggccctagtgccatcccccagccccagccccagccccagcccccgctcctgagccccagcccccaaactccgctccagccccagtcctagcccggccctactgccatcccccagcctccatccaccatcctcaatcccctagccccagccaaccgccctggtcttaacccagccctagtgcgatcccccagccccacccccagcccccgggccccgctccatcccccagccccagccccagccccaacccggccctagtgccatcgcccagccccagcccccaggccccgctccagccctagtcctagcccggccctggtgccatcccccggcctccatcctccattctccatgccctggtcctagttcagccctagtgccatcgcccagccccagccccagccccagcctccagcccccgccccagcctaccctcccggctaaggctccgcttctgcccgcagcactcggcgaagaggcagtagagacgcgggtagatgtagccggtgaggacgccggccagggccagtcccaggctgatgggctccaccgcctgcaccacggacggcgccagcagcagcaggcccagcacggcccggcccagcttcatgcccggacccgcgccaccctgcttgttctcgcgccgaccgcgaaccggtgcagccgccagacccacgcttccggttcctcctctcgcggaggccatctttcttcagggcagccctcctcccgacgccggcggccgccatctttgttcggtacaaagccctgttttgcttccggaaactcggttctgctccgcccctgttggccacgtgtttttgtttatggacgttatttttgccaggcatggtggctcctgcctgtaatcccagccctttgggaggctgaggcgggcggatcacctgaggtcaggagttcgagaccagcctgaccaacatggtgaaaccacgtctctactaaaaatataaaattagccgggtgtggtggtaggcacctgtagccctagctactggggaggctgacacatgagaatcgcttgaacccaggaggcggagattgcagtgagccgagatctcaccactgcactccagcctgggagacagagcaagactgtgtcccctccccgcaaataataataataataataataataataacggacgttattttttagaacagatttacagaaaaattgagaagatagtagagagttcccatgtgccacccatccctgcaatttcccctattactaaaatcttacattattagtgtgctacatttgttaaaattaacgatgcactgttgtcatattaactaaagtgtagtttattcagatttccttccttttacttaatgcctttttctgctgcaggtttccattcaggataccacattatatttcgttgtcatgtcttagactactgttaatgacagtgtctcagccttttatttttattttagctggagtgcagtggcatgatctcagctcactgcaacctctgcctcccaggttcaagcgattctcctgtctcagcctcctgagcagctgggattacaggcacacaccaccatgcccggctaatttttgtatttttggtagagacggggtttcaccatgttggccaggatggtcttgatctgacctcatgatctgcccgtctcagcctcccaaagtgctgggattacaggcgtgagccaccgcgcctggcctcagctttttatttttgatgaccttgatagttttgaggagtactggccaaatctttggtgggctggccctctattgggatttgatgtttttctcaggattagacaagcgttatggcgttttggaaggaagatcacagaggtaaagtgctatgctcatcacatcctaccaaggaagggttcttactgttcaacgttacttaccactgttggtgctgacttgatcacttgactgaagtagtgtttgtcaggtccccccacccctcttttctctactgtactctttggaaggacgtccccatgcacagcccacacgtaaggagtcggggattttgctccacctccttgggggcagagtatctacagaaattatttggaattctgcatgggagatttgtttcttctcccccatgtattcaatcatttatatcagtgtggaccattgttattttatcctttgttatactacagtactaatttttttttcaaattgttctcattttggccactgggaatttgagtggttccttgtgctcctttgacatacacccagtgtatataccagcttatttgggtttgagtgcctctttcctttctgacactacaggatactccgggctcatcttgtatttcctgccccagtcctagaatcctattttctacgaggaaccctgattcctttcattgtaaaatggcattagaaactggctgggcatggtggctcatgcctgtaatccagcattttgggaggctgaggcaggtgcatcacctgaggtcaggagtttgggaccagcctgaccaatatggtgaaaccccatctctactgaaaatacaaaaaaattagctaggcatggttgcgtgtgcctgtagtctcagctacatgggaggctgaaacaggagaattccttgaacttgggaggtggaggttgcagtgagccgagatcgcaccactgcactccagcctgggtgacagagcga

SEQ ID NO: 588979 - DNA, 4001 bp, Homo sapiens
ttttttttttttttctgagacagagtctcactgtgtcgcccaggctggagtgcagtggcgcgatctcggctcagtgcaagctccgcctcccgggttcaggccattctcctgcctcagcctcccgagtagctgggacaacaggtgcccgccaccatccccggctaattttttgtatttttagtagagacggggtctcaccgtgttagccaggatggtctccatctcctgacctcgtgatccgcccccctcggcctccgaaagtgctgggattacaggcgtgagccactgtgccaggccttttttttttttttttttttgagaccgagtacggtggcgcgatctcagctcactgcaacctctgccacccaggttcaagcgattctcctgcctcagcctcccaagtagctgggattacaggtgcgtgccaccgtgctcaggtaattttggtacttttaggtagagatggggtttcaccatgttggccaggctggtctcaaactcctggcctcaaatgatccgcccgcctcggcttccccaaaatgctgggattacaggcgtgagccacggcgccaggcccttggctccccatcttttaatggaaataacatcccctaccccactggactgttttggaaccaagtaagagaaatgttgtaggagagctttgtaactacctggactaagtgtgccttaactcagtggagccgggggctacagcaacacaaaggaaagagaagcagaggccagagttagtgagcaggtcacccggaccagtccgactggcctgcagacgagataatagcgggttctcttgcctggtacagttttatcttctgctcatgagggaagtgcagagtcgatacaaacaggtggacaaagttactcttcagaccttttgggtgaagattttcagccacaatttgactgacaaaattcttgcctgtgccagcccagccgtgtaaggaaagggtcagtggtttcttgggatttttgttgttcctgaagccagtcagcgccttgaaaatcacttccgtggctagatgctgtccaaacagcttctcctccaaatccagcttgagagctgcaagaacagccccagaacaaagagagaaacagaccttaaaaatgcatcagcaacgcagcactttcttagctggccaaagcaagaagcacagattatccagggacacagcagggtgtctgccacaccctagggccgaggcagtcaaacgatgccactttcaagattatgtggaggtccttaacgcttcggggtctgataaggaagctaaatgttcattcattcagagatgaaccatcgcttgactgagcgcttgctaatcccagccacccttgctgacctgcaggaaaaccaggggccaaatgtgggctttctgggcgacgcagcacgtctgaaaactacttaatagggttggcagggcgcagaagggccgcccgcctactttccgtttcttccacctgtgatcccaaggaacgggagctttagaaaggcgctggggcagccccacgatctggagactgtttgcgaaggcaccgcttctgcgttcccgcgaacggttccggggccgccccatccgctccccgcccaccccagctgggaccaccgccgtctagatgccacgggcccggtccgtgccaggcgcccacgaggccgtccctccgcgcccccgcgcccccgcgccccccgcagcgccgacccacagctcgcgcgcgcgccgtacccgaagcgttgagcggccgctcctcgcggcagcactcggcgaagcggcagtagatgtcattgtaggacaggtagccggtgatggccgacgcggccccgatggctaggcccacggtgatgggctcgaacgccgccaccactcgggccgccagcagcagcgccagcgccgccgcgccccggagccacccagcccgcaacatcccgctcctcgaagcccgcagaagccactgagccaggcgccccgcggccaagcggcaggacggacttcctctcgtgcgtcacttccgccccgcagacccgcccactcccttgggggcggccatgttggtgaggggcggagaggagggcggtgccatcgttcttgggagtggtccgaaggtgtaggagactgttttgtttcccttttcttttaaaaaaattttttcgggccgggcgcggtggctcacgcctgtaatcccaggactttgggaggccgagccgagatcacgccattgcactccagcctgggcaacaagagtgaaaaaatatctaaaaaaaaaaaaaaaaattttttttttttggccgggcgccgtggctcacgcctgtaatcccagcactttgggaagctgaagcgggcggatcacctgatgtcaggagttcgagaccagcctgctcaacgtggcgaaaccccgtctctactaaaaatacaaaaaattagatgggtgtggtggcgggcgcctgtaatcccagctactcgggaggttgaggcaggagaatctcttgaacccaggaggcggaggttgcagttagccgagatcgtgccactgcactccagcctgggcgacaagagcgaaactgtctcaaaaaaaaaaaaaaaggctggccgggcgcggcggctcacgcctgtaatcccagcactttgggaggccgaggcaggcggatcacgaggtcaggagatcaagaccatcctggctaacacagtgaaatcccatcactacgaaaaatagaaaaaatcagccgggcatggtggcgggcgcctgtagtcccagctactcgggaggctgaggcaggagaatggcgtgaacctgggaggcggagcttgcagtgagccgagatcgtgccactgcactccagcctggacgacagagcgagactccgtctcaaaaaaaacaaaaaaaagccaaaaaaaatttttttaaactttcttatatttttttcttatctgatatgtatattggggacagggtctggctctgtcgccccggctggagcgcagtggcaggatctcggctcgctgcaaactcttcctcccaggttcaagcgattctcccatctcagctgctggagtagctgggattataggtgcccgccaacacgcccagccaacttttgtgtttttagtagagacggggtttcgccatgtggcccaagctggtctcgaactcctgacctcaagcgatctacctgcctccgtcttccaaagcctggggttacaggagtgggcttatggctggatttgttttcttcagagcttctcggagccctcaagctttgctttgttatccctcccttcacttcgccggaggtataatgtgcgtttcttgggtcggcccacccgcctgccttcttcctgaaacagttgcgaactctccgtgctgcgccctagactgagcactggggatgcagcggccccaagacagacctgcccaggcttccacactgaaatcccgaggtccattctttcattcagcacgctaggtggcaggccccttgctggatgccaggaacgacagcagaggaggggacggagttggcccctgccctctcagagctgacggtctatgggggaggccgacaaaggggtgagactcaatgctgagtgggcagagaagtatcggacagtggtacagggaaggcttttgtctaagctgggcactgagggagttaggccaggcaaaaaatgagtagagtgttttaggcagaaaacaacagtcagtttggagaactgaaaggattccacatggcggaaggtggtgagagatagggatgaagaatcaggcagagactggaaggtgaagtccttgcgaatgttgtaaggagtttggcctctgttctggggggtaatagggagccacagagggttttacacaggaagcaacatggtcagatcagagatcattctggctgctgggttcacaagaaatggaaggcagagagccagtgaagaggctgttgccgtggtccaggtaactagtcagggagacagatgagcaagcaggca

SEQ ID NO: 588980 - DNA, 4001 bp, Homo sapiens
ccccccactgtgcccactgcaaagccgggccccacctgatgaagatgaagatggctttgcggtaattggtcccgtataccacccaggaggagcccaggaaaggccgcaggacttccatcaggcctgggggcatcttgtccatctcatcgaagaggaagagggagcggccacaggcagtgaggttcccttggacccagctcttcagatccttctgtaggggagagacaggagttccaggggagctggagaaactcccccaacaccagacctcttcccaaaccaaaactaatctcctttctagggaaggatgtggtcttccagagagcaccaacctcttagtgagactgatggtgaaactgtatcccagattggggcagagacttgcccaaagtcacacagccagtcagaacagggactcaaacccaagcctcccacttccctgttcagagctccttccacgacacttgctgctttctataaaaggggaaggctccttcctgctccctgaaactacacagcagtgttgacggctgaaactgatcagcctggtgggtaccctgcaatcaacaacagtagtagtaagagccaatatttcctgatgcttcctctgagccacaaattggggctgatttccagcaagacaacagtgcagattatctgacaaacataggtgctccataaatgatatctgcaatggtataatctcatgtccctcacaacaaccctggcatgtaggtactgccagggttccttactgccccaaggaatcaaagtactccctgccaggtagaatgacaccttcccaagttctgtgcaggatgggtcctgagggctggggctgcagccgtgtgtggcctggagcaggtgactcccctgtctgggctcaggacttactccctagggtggcaccccatggtgagaacagtggtcaaggacgcatccagcctaccttgtagcgctcgatgtggctggggtgggggaagtggaggacgggagaaaagtggtgcacgcgggggctgcggaggccgccctggaagaggtagtgcgccagcagggagctgacataggatttgccggtgccggtccagccgtgcagggagaggaccagcggcttggtgggggctgggtcccgcacaaaggccttcagcgccttcaccaccagcgccttggccagatgctggccggccaggtgctgagccaggtcacactccagacctagggccacaggaggatggtgaggacacatcccaccgaggcagaggttcaaggagaacatcatgtctggaacctggtctgggactcctgtgtccttacgtttgtccaagctgcctatgcacatggcacgcaaaccttggggtctgtggcggaaaagagccaccttcgggcctgattcagctcggcagcgcccccaccaggcggtcctctagattgcactcagctctaaatgcgagctgtcaacggggtcagccgcagaccccgcccatccccaaggcgcactgcacttctcctttgacggccaggccattccggggaggcccaagaacttccaccaagggttctgctggctgaggcctctctccaggttggcagggcctcctggacctcaacgggtaccctccaccctcccaagtctgcgggccccgcccctcggtcccaccctctgggtcctcagcttctctggccggcgccagccgggctcccagggctcccagcgctcccgcgtctgcccgcgtccgcccgcccctcgctccgggctccctggcgcctcacccggcaagtcgggccggaagtcgcattcgcaaaaggcgcccaaggtgcagcgcagggaagccaggtcccaggcggcggccgcggccgagaccagcccgagcagcccgaggagcgagccccagggccggcagccgcgcgtcgcagccgccatccgggtgaggcccgagctcgttgtggggcagtcaactgcctcgcccgggaactgcaactcccggcgtgcaccgctccgcagcagccacgcccatcgcctacaactcccgacgctcctctccccgcctccaaggcccgcccgtcgttccgcagcaggaccagaaggtggcctccagggggaacccgcgaaccgtccaatccgggacggcgggccgcgtttccatggccacggtaactaggggaccatcgtagtggctcagaaagaataaataaaggatcacgaccacaaagggcgacgtaacaattacagcaaaaacttgtgcggaaccttacaccttgcaaagcgccttttccatgctccttttttcttctatatgacaaaagtgccctcactaacagcttttggtgagcacttactctgtgccattagtgctaagtgcctatataccttataatatggtaatagtatctgctatccagagaaatggtggtgttccaatgagataaaggcacacaaattgtctggctcagaaagtggtcaatacatgatcatcaacattccgttgtgtattaaacaggactgtccctcacctagcagcaactgtggccaaatgcttggtatcagtcctgggagatgggttctgttgttgtccccatcttaataaggaggaatttgggaccgaagaggttaagcctcttacccaatgtcacgcagctggtaaacaatagaactaaacccaagtctggctgcaaccagagccgtagtgcgtggttgcatgttatcagcctctcttggtcaaaggattcagaaggcaaaggactccagacgtttgaggttcagcgcgcaggctccctaggcctccagcttggcctggattcgttttgatccacgttgcccacctcccccacccactggagtaagggaaccaagacaacagccttcatggcccacctcaaagaccctgtccctaccaacctcaacacatagtcacacacacacacacacacacacacacacacgacttctggggccaaatatcagagcctgaaaaagaaataagtatttccggccaggtgcggtggctcatgcctgtaatcccagcactttgggaggccgaggcgcgtgaatcaacatggcgaaaccccgtctctactacaaatacgaaaattagccgggcgtggtggcaggctcccgtaatcctggctactctggaggctaaggcaggagaatcgcttaaacccgggaggcggaggttgcagtgagaagagtgaaactccatctcaaaaagaaaaagaaaggaaaggaaaggagaaacagaaaggatgaaaagagagagaaagaaaggaaggaaggaagaaagaaaggaaagaaagaaagagaaagaaaaagaaagagaaaagaaaggaaggagggaaggaaggaaggaaggagaaagaagaaagaaagagaagaaagaaagaaaaagaaagagaggaaggaaggaaggaaggaggccgggcacgatggctcacgcctgtaatcccagcactttgggaggccgaggcgggcggatcacaaggtcaagagatcaagaccatcctggccaacatggtgaaaccccgtctctattaaaagcacaaaaattagctgggcgtagtggcgcatgcctgtaatcccagctactggggaggctgaggcaggagaatcgcttgaacccgggaggcagaggttgcagtgagctgggattgtgccactgcactccagcctggtgacagagcaagactccatctcaaaaaaaaaaaaaaaaaaaaaaaaaaaaacaagaaagaaagagagagagagagaaagaaaaggaaagaaagaaagaaaagaagaaaatgagtagttcccactatcaaggagaaaaaaggagagaagtctgggtccaggaagccaggtggagcctttcccactctgctgctgctgtgacccgggaaaagtcccttctcctttcaggtaccagtcttcaagaggggagttgggatcatagatttcaaaaagcccttccaccccaaatcctcggatttttggttgtgcatttgtgggaactgttgccatggca

SEQ ID NO: 588981 - DNA, 4001 bp, Homo sapiens
gccatctcgtcccggaagcagctgaccacatcccgcttgtccagcagcagaaacggcacgatggccgcggcctgccacagcggatgctcccgggacagcacagccagcaggctggcgcgcaggtcttcttccgcctgcgccgctgcggcctcggcactgcggaagccgtcggggcgcaggggcagcgcgcgggacgcgttctgcagcacgaagcgcgtgacctcggcgccacccgcgccactgaggagcacgtagatggcgttgtggaagtggtgggagcgctgcggctgcaggaagccgtgcagctcgtccagcagcggccgcggcatgagctccacgtcgtccagcaccaagagtggggtcttctcctccgcttcggcccgcgccaccacgtcggccacgcgccgcgccagctcctcgcggcagtcctgtgcggcgcgcgcctcggggcagtggtgccgcgcatggtattgcagcacgagcgcgctgtcctccagcaccgagcggaagtggcgcgccagcaggcggcccacgtggctcttgcccacgccactgggcccgtgcagcgccaggaggagcggacgactgtgcacatgcgtggccaggtagtcccgcatcagcgccacgatgcgcgatacggcagcgggctggccgaacaccgcgcgctgcagcgctttctccagcccgtcgaggtcatagcgctgcgcgttatcgtccaggttctcgatagcgttgagaacttggaagcccacgatggcgactagcagcagaaggcagcgctgcgcgcggctcctgtgctccacgcgcggccgatacttgcgcgaggtctccgggtaaagcaccaggcggctgcgccggcgcttcttgcgtggcgtcctggagggtagctccgcggggctgtcgaaggtgaagaactttggctggtccaggtccgcgcgcggtgcccgggggctgcagcccggcctgggcgccccggtcccgacgtcgggccccccacccggctgcaggaggcgccgtttgcgtaggacacacacccggcggcgcaggcggagcacagcgcgcacgggcgcgatcacgcaccggcccgaggctcggggggccgcggcagcaggctccaggctgggctggccgcggtccatgtcgcaggaacggcgctccgcatacaggtcgccctccctgcaacgggaagacggggagggtctctggactcccgccactgccctttcccgcgggccgccggaaccggtccccggagtgatcttaccccctgggagtcccgtggggtgcggcccgggctgccccagggccaggggcctggtcgcggcctcgcccctcagaccggcaagcgacccctccgcccctccgcccctccgcccctccgcagggccccgatgcaaatctctcgggtcttcccataaacggccgcgggccttgaggaagtggcggggtagaggcttatctggtggccgccccggcttcctggaggagtcgtcgaaggagtcagtggccgcccaggcgcccactggggtgaacagtcacccccggaccctgcccccgcccgcggctcccactggactgggccgtctcccaaggaggggccgcgggaagcagaggcctgagcgcccaggagttcagagacgcccccacacgctccagaacacttggcgggggtctggctggaacttatgattttgagaataggcccgggccccgtccccaggctcaacccaggcctcccagccccgactccaaaactggggtcctcccaacacccctccagtgaacgagctgagcagtgcagggagccccccggagactagtggaggtgaaacgaaaagatggacagaaagaagaggccggtcggagcaagagagccactgactggcaggaactgggccctgggccccaacccaccccctacctgcagctggtccactgccctcagctccgcaggcccctgcctgtgccagacgctggggcctgagactccaagcaggaaatgcgcctcccagggcgagggggtgggccaggggcctcctgggccagcttcggcctggaggggcagcgacacctgtgggtccccagggagcggccggccggagtagaggaagctctggggaggtttccgcttctatgcaaaggaagtgagtcagggggtgcggcccaggcgggacttgggctggacggaggcgccaaaggggggaggcctggccggcttgcccagatcccctggccggaggtcacattcccgcttcagttctctagcgctcagagccctcctggcttggtcaggctcaggacacctggtgaggccgagggcccctgctgcatgctgtgcccccaccctgggctcctgcacctcagcctgtcctccagggcccccacctcccccaggttatcccttccacctgtcaccccacacacagggcttacagctggggggaggggctccaggccctgtgtaagcaaggcgggagcaaggcagcagcacagggggcgggcagggtcctctgccgagctgcatacccccaatccctctcttattactcctctccccgctttttcattcccctcctgaccccaatcgggggccccccaaagtgggctcattgtctttcctttcccccttcctccgtccccagcctggagccccctgcccaggacaggccagcacacacagacggaagttctatcacggaaaaaaccacgtgcggctcagggtccctgtgggggttggggaacaaatttagaaacaacttgggccgggagccaggagctggagctctgggcccttccccctgccggcctgcctaaaggaccctggactcctcctaccctggcccagcctggaagccgccttccaaggaggggcaaggtggccgctccagccacaccagtgctgctggcattcagctcaggaccccgcagtcccagggacgccccactcctcccaacagccagcccgggcctgatggttccagctgtatattcctcacacactgcacccaaccagacaggctccatcagggaaaccggtcgtgggttgggggtttccattctctccagggtatggggtccaccggactatcacgctcccctccaggagccaggcctagggctcccctcccctgtgcaaggggtgctcgggggcccggatccccaattgtcgaggccgcgggggccgcacacaccaggtggaatgctggtgctctttgggcccactccccggcctctgtgggaccagagcggaaggaggttggctgtccaggccccgtggccccagcacggaggttggggtcctttgggggcctcaggctttgagtctcggtgcttcttctgacacagagaggaccctggaggggaggccctcgggcagatgcaggctgaccgagccctggaaaacctgcagcaaagcctctgccctgcctccaagtgcacccagggctggagctgcttctgccagaggctggcccagcaaatcctcaggccagagccctctgcaggaaagggactcgctcaaggggtgccccaagacctggccctatgggtcaaaggtgaatctgaggcctgggccaaggcctcaccccctgcactttctcccatctacaggggtgaagggagccccagaaccccagctcccagggccatcaccatctcctgtgatacccagggccacccccaatcacacccattcccattccaggaggcctcccctcccgcctccctacccaacccagccctgccgctgcgcccagaattcatgtccatcacccacaaacacagtacatgttctcagcctctgaaaggacttcaccctcactgcttcccccagcccttgccagcaaggttgttttccccaaaccgtgggcagcctccccacttctcctcccaaattccccataggtttcacttcaccagacgatgcctcccgtgcctgggccctcggtcctcccctaccaagtccttctccctaacttcccagcagcgtccacacccagtcg

SEQ ID NO: 588982 - DNA, 4001 bp, Homo sapiens
aaagaggctcccagatcttggcattttgaaaatggaaaaggaaaacaaacaaaaagtatattcgtgtgaaaatcagatatcagaaaattcaaacaagcaccgtccaggttcctactgtcttgagctctccagagggttatattctgcttccttctcctttagggtttcctaaaaagaagggcagacttggagttaagagcaaagatgtatagttaggtccattcaaaggcataacagccagcatcacaggggacagacgttctttttaaaatgttccttgagacaggggtttatctttcttgaatttggctatacctgttttcctccagcccctcagctggaggtggtaactaactaggaattgctgccagagaggcaatttcttccttttaagtgaagtgctgctatggcaaagacatgctgcttcaagggttaaactttaaaacactcattttgatatataaagaaattataaacaaagcacaaggcaaagttgcaatttcagtttgtgttcaaagtagtaataatttcctaaactgacactgttgttttgcttagtccagacctttgaaaacaaacgagttttacaaaagctatattagtaatgtaacaattagtgcactaccactattttcccctctttttctgagtctcagagaagatgaagttttcttgatcatctttttaaaataaaagttgtaggccaggtgaagctttcaaggtgactttgagactgagggaaggaaggaaatggggaagggaaaacaaacaaacaaaccaaaaaaacactacagattacttcatacctctttcaagcttaaacagaactctactttggctttctaataagctagttttccaaaagagagtttgggctttggcctaagacccctctggagccactgacttgcccattagatacagtctcaggaaagctaatataatggcacatttcgtctacaaacttaagtgaaaaataaccaggtacaaaactttgggttctctatcttaaaagcagcaaatatctgtgttcttttctcaaaactggattctgtcaatttcctgaattaaccactttaccattgtggtttgcttgcttgtttttgttgggcagagttgcaaatgtaataagggaagggggtccttgcactggtttagtaccaggcaaggttaccaagggggctcattctggttccagaaagtggagatggtcatcctcactctccagaactgggagtggctcattcccactccccggaatctggagtgggtcttccccacaccccaaaactgagagcagatcaaccccaccctccgcagaagaaagacagtcagggccaagctcttttgccccctgagactttggacttgattgtccccatcagaccttcaaaagatctgaatgtggccgacttcttcacgcctccaagcttcctgcagatgagagtgcccatggtggacagagcagctgatgtcttctgtttcacataggtgttggagacctgaacatcaagccagctcttggacagattctgtctcagccctaccaaggcggtgaggcctaacttcctcttgagttccccacagcgtctctctttggctgctagtacgtggcgtagggttacaatttcagcctccaatttagtgagtttggttttgagctctctttgctcgggctctgtcagatcctccagttcagaagtcgagtgggattcatatgtgcccacagaggtctctgtcctggcatgtggcatggactgggaaagaagatcttcgttaagagagtccaggtccaattcttggtagaaagagtcgaattattgggctgcagagaaataatcttggccagcagagtcgaaatctaggcctgcaggctcagactcttggcaggtggagtcagatttcaggcgggagggatccatggcccagctggtacaatggacaccttgacagttgagttgacgacctggcctgtgaagtagacacgctagctcgtggtgttcacttccgggtggtgggggtggggagccgggctggtcagggttgcggaggtgggacttcccgcccaaaccgcgaggctgtagaatcagtgctcagctgaggcgcaacccacactggcggcattttggcattgcgaggacctcctgaggtaggcagtgcagagattattgtcgaaaagagaggaatttctcctgacatggtaaatgacaagccctggccttcaaaccaaagcgtcaggcaactgttttccaccacaccagctccaacacttgaaaatcatttaaacatcattgtgctagtatgaattttcagttttgcagttgcattttctttattccgccctacctccactcacatttctggaagcatgtctgcctacattcaaggttacctgttgtgggaggtagtctgcacagtaaagtaaaactagttaaataggatctatcagagtgtggatccactctcccctgccaacctgccaccccaacctccccccaaccgtaattctgccgagagtaaacttatgcaatggaaaaatcaggacgttaatccagtgaggtcttgtggtcgagcttcacttagctcattctatggctgcctattctcagagaatattcttgagcaagtcttagactctagtgattttgttggatattcttgtaattcttgcgagcatgatcttgtggaacataatttgatcctcagcaaatttcagcagtttgccctactcatgcctatgtggctacaatgaagcatccagctgtgcattcaaaccaacttcagccctcctttgagtttatgttctataaccctttcacataatttagtagtgtttattattgccttgtcctgagtggtgtgtttccctaagttaaaaagtgagaattgttcttgtaaacatgaaggctgatggaggatttggctatgtgtttaaaggcctgaaaagggcagcaaggactccctaaaaaccaatttgttccagagggtagacttttcctctattgcctgtagaaacactagtggtttcaggaacactcccagactctgaatcagaactcctctttcaaacctgagactaaagggtaaagaaatccctgaattatgctacataatatagaacacacattgtctcttcaaagttgagactccaaatcaccaaatctgaacttgcacttgattttacttctctgtattatttcaaccaccaaccttgatgcctattttctttataagcttcctcatccttcagtgtatactatgaaatcttttattaagccttgattccttttgacagagaatggttttttttctcatagcaaaactgagcttttcagacacttagttgccagatcccacatcaagacataccctgtcattcaaataggaaaataagaagtcaaattatttctttttcagatgatatgattccatatccagaaaacccgaaaggctccaccaaaaggctcctggaactgataaatgacttcagtaaagtttcaggatataaattcagtatcatttctatatatcaataatgtggccgggcgcggtggctcacacctgtaatcccagcactttgggaggctgaggcgggcggatcacgaggtcaggagatcgagaccatcccggctaaaacggtgaaaccccgtctctactaaaaatacaaaaaattagccgggcgtagtggcgggcgcctgtagtcccagctacttgggaggctgaggcaggagaatggcgtgaacccgggagacggagcttgcagtgagccgagatcccgccactgcactccagcctgggcgacagagcgagactccgtctcaaaaaaaaaaaaaaaaaaaaaaaaaaaaaaaaaaaaaaatagacaaaagacatgaacagacacttttcagaagaagacatacaagtggccaacaaacatatgaaaaaacatatgagaaaatgttccacatcactaatcatcagagaaattcaaatcaaaactgtaatgagataacatctca

SEQ ID NO: 588983 - DNA, 4001 bp, Homo sapiens
ctgcccctccagcccccaccagcaacttgggtttccaatcttgcctccagctgcactgggccttggttatttatagagtgtcagatgcccagggttgtctgtgctagcagctgcaggtcagctccctcccaagtgccaggactggtggagaaccaaaactggaggctggaggtcacagaagcccaacccctggggggctgggaacatgagcagtcgacacaaacagctatgtcatctctgatgttcagaccatgctttatgctaatctaaccataggttcatcttaaaacaatcctgggtggaaggaagatggggaaactgaggcagagaatggggaaactaccaccacaccaaagccatatggccattctcctaccttaagctgggggttgggaatggcaggaagtgaagtctggttggggttgtggggtgggcagagaaatctcagggtaaatgacctgccaaggtagctgctttggcatttgtggccctgtccctctgccctgtggcctggcatggtctccaggctgacagcttaatgagggtaaatgaggagccattagaacctgagctggggccccagggcacagcagggctgctgaagccagaggtcaaggccagggaatttctaatggccccttagggttgtaactcaagtggggtctcatctctggatccctctccctcctcctgcaggctagtacctcacatccacatccccccatccccaaacggctgcagtctcctctccaatttcagctggaggattaattgaggtagatggtaaattcttataccttccacccccacaatgactcattgcttgatcactgtacattctaaaagctggaaccaaacagaattacagggctaagtcctctgggggaagtggtaggtggttttgatttatccactgtcttggattacttgtgtaagtttaccctagccctggttactgagatgaaaccatttctctcctggcgctggggacataaggggataaggtgccccaatcctcttattcccatacccggggggccccttcccagagccctaactcctcccattgtcccccaagtccacactcacatcagtggccttcttctcggcctgctccagtttctcctgggcctccttcacggattcagaatacttttccacctcatcctctgtccccttcagcttcttctggagggcctgctgctcctcctccagctgggacagaggggacttggtcagccaggctgggagggggcccaggcccagaatggagacgcggtgtgtgtaggggcgctactaagatttggaggctactgggatggaagcggaataacataaaagggacagtacagtcaagggtactggtgggacccgttgagggtacagagaaaacttcaggccccaaggagcaggaccaaccgcgctctgcaaaggcagagtggaaaccaggggcctggggcttccccaggctattgtaggggagagaagcggctctggcgaaggccctgagggtactgcgaaggcccagcccccaccctgggtgagagagagccttggcgggcaggcccggggctgggggacccatggcagcggcccacccttgccctaggcgcggggagagcaggctgcactgggcccggccctaacctgcttgcagcggtcctcagcttgcttcttgtcggcttcggcctgctcggcgcggtcgatggcgttctccttgtccagcttcagcatctgcatcttcttcttgatggcgtccatggctgcggtggggggtgggccggccggcaggcggtgaggaccggacggactgggctgggtgagcggactgggtgcaccggtggcaggcgaggaggacggagcgggactgggacgtcccggccacgcgggcgcctaaaaggcggggagggaccgggcggggccggcaaccaggaccctcccccacctcggcccaaaccttgtaggggcagaagcacggcccggccggggggtgcggccgcccccttcgcccacccactggggaccgcctcccttggggtcccgcccccatccccctcttccctgccagccgtcggaggaaaaagtggccgacggtcggctggaaaaaccccggcgatgcgaaggggaggggacccttgggctgggggctccgtgcttcctctgagtgacagccggacccagtggcagctgcggctggggcccctggggctatttcggggcgtgagctcacggcagctgcccgggcgcagggaccggcgtgccccccctcagctgcagcagccgctacccttaatttagaagtttcctgcaaatccccccggattaaatgtctctcgggaggcggagctcctcggcagtttgagtgcctcagtttaccctgagtccctctaggtttgcgttatcgacgtggtggtagtagcggagtctcatcgggagcttggggaaactgaagcaggaagcgagcccagagccccggtcgcggtggggagtgtggccgggcttgctgcccccaggaccggcctgacctctcatcccctcgcctcccctcccagcccctgcccctggagccaggcccttcctgcgagcacccggcggctcaggacccagctccccgccccgccccccacgtgccccgcatattttccacgcggctgcggccaggctggtcaccgcgcgttccccgcccccgctcccacccggacgcgtcccgagcccctccgctccccgcccctggctccgcctggccccactcccctccgcgcgccttccctcttctcccccgctccccgcggacgctcctctctttcccagtgggccaactttatgctgaaatttcttttctgcccttttttgggatgtttccccattgggaggcggagccgggctgcggcggggaaggcggagggcgaggggaagagtcactgagctgcggggcatagggggtccggggcgaggtgccttctcccacccaggccgccaaaccagcgccggagccgggtcgtggggtctgggagtcggaggcgcgaggcgcgagggtgtttgttttcgtttttccctggggtggggtggggggaaaggaagtggagagccgccgggaggagggggaaggggaggagagaacaagcggaggaagccgggagggagctgctagcctcgcccccaccctccagtcatagaggggcgggaggcctggattttgcagtgggctggggaccgtgggaacccgaggccgctggccggggcggtggggaggtggcgtggaaatgcattcagatctgtttagctgcctgctagccacacggagagcaaccctggcctgacctcgcagtgttcctctaactccgtggaagacgcctcatccaccagtagcctatgctagaccactgggtatcccctgcccttcgcgtctcacaaccacctaatcctggagaggctgccttctaccaaggaggttcctcctcgggtcggtctgggctggcctctggccgcgccttatgttttcttcagtctgttttgtagtcttacttctagttcctcaactcattcattcatttgactgtcccatgacattgttgtcaaatatctttttaaaagttaatgcgaatattatctaaaattctccaaaacccctccctaatccctgtccccccaccttttttgagacgggagcttgctagattgcccaggctggtcttgaacttatgggcttaagtgatcctcccgactcagcctcctgagtagctgggattacaggcgtgcgggcaccctgcctgttttgaggagaaaaaaaaaatccacatttcttaatatggtatagaaggcccgttgttttggctgttgcctgcctctctggcctcatctccttccatgcccaacctcacccccagtattcatacttgtacctcatgctgcattcataatgagctacgtgcaggagctggaaatagccatacttttcttaaagcttccacagtttatgcattctgttctctctccctaaa

SEQ ID NO: 588984 - DNA, 4001 bp, Homo sapiens
caactggcaagggacatagcactgtctgccctgtcgctctccagcagcctggcaaggcacacagcaggccagctgtccccacggcccaagtcagggggctccactggggccctggacccagcacggcccacccagccccagctcgcctcaagtccatgtagaaaccatcctttgcccaggccaagcgtcctgggatcagggcaggtgctgcccccacagttctgtgagctgtcactctctccctgccagccagtggccctgcccccaccactgaccttctttcttgaggagccagccttggtgaggcaggacttctgcagggccaggtagccgccaatcacctcgatctcatgcacggtggggtagcgcttcttcaacgtgggccccaggaggcaactagcctcctcctcctcggcctcccgtggccgaggctccctgttggcctgactgaagtgctggtcctgcagagtccctggcttcctcttgggcaccactgtgaaggtgttgctgccccggggctgaagctctgccacgcacccgggcctggcagggtgcagaggcctggcagggtgcgggaggtagggtagtttggctgcttggggggcctcctccgagtctacctcatcgatgaaggtgacaggcagccccggcctcacatattcccggctattcttggccaagccaggaaccctgaggccctcagcaggctcagcttcttccgaagcagccggcaggaaggggggcggtgaggacggcctctgccacctaatagcccggtcagcgagggcggtggctgtcctgggacaggccccctcctcgactgcccactgtgcctcgacctccagggggctcttcccgagggcaggcgcaccatcccctccaggcaccggctgggatccgagctcctggctcggggaggccgggcccaggtctccctttggcagctccacggactgcctcccctcaggaggaggagccccggaggccttgctcttggggatgaccatgaaagaatttcgagagtttgcgcggaggctggccagcgcccgggcctggaggtcccccaaggggatggtctccataactggcttgggggccggccgtatctcgaaggagtcgttggtgctggtggctgcggagacgcactggcgctggctaggagtggcactggcagggggtgaggctggagtggcactcggggtcccggggctggggggcgggtggagggagggatcccccgactccacctttggcttccactgtcccgacccaggcggggagcccgcgaggcggttggcagggccggcccggggctcaggggccgagtgcccgttggagagcaggcgggcgcccgcgccgcggtgcagaccccgggggtggacggtgaaggagttgctgccggtcttctggaggaagtcgctgcgccgggccccggggctcgccccgccaccgcggggcccgggcgcggcgggcgggctgggggccgcgggcgggggccggggcggcgcgggcggcggcggcggcggcggggggcgggcgcgctcggggctcccgcggcggcgcggcgcggcgggcgggtcgaacctctccagtaggcggctgacgcggccgggcggcgccccgtacaccagcacctcggcggcgcggatctgcgcggcccccggggcgggcggcgcgggcgggaagccgggcaccgtctcgatgatgaggacgctgtcggcgcggagggcgcgcacgccaggcacgcggcggtaccgctccagcagccgcgcccccgccgcgcccccgccgcgccgccgctcggcctccagcagcatgaacgggttctcgcgcagcgggcccaggctctcggccagcacccgctgctcgggctccgccgccccgggccccgcgcccccgcccagcgcggctagcttggcccgcttccgctccaggatctcacgcttccaagcgggcaccgcagcgcgcggccccgagcccggccgccccagggcggccatgctgcgaacgcggcagcggacggctggactgagggccggagtggcagccgccgccgcggccagcctgggcgccgcggccacgccccctcccgggccaccgaccattggggaaagcccgctctccccgccccgtgcgggaggcccacctatggcaggggaggagggcgggcccctcaagtgaccctaccgattggacaacactcgcctcaaccccgcctcccaagggacttcattggacaacgcctatcaccggagctggcctccattggggacggccccccggacacaccccggtgcctcgcgccgctcactggcagaccccacttccgcctctgcgctctcagctcccggcgtccctgggggtagccgggtgcgcggcccctggaccctgcgccccgagtgaccttggctgagcttgggacttcctcatgctgccagcaccgaggccgcctgttccgtccgctgagagcgcggtgcaggaagggcgctgctccaggaccgaaggcacccgtgtccgtggacggtgcacaggccacactctggcccggaccctgctttcaccaggggtcctccgacctccggcaggtgcctgcggggcttggaaatgccaattctggagccccgagcagccccaacgaaccagtttctcagaaatccctagtttttataggctgcccaggtgggagcctcttaacccaaccttgccatccgtggtccccaaaaagcatctgcaggagcaggcacaaaggaagcagcctctcccgccacacgcaagcaggttcaccagggcagggccctgcatgcttggagagctctccaatgcattcagagccaaaaaaaaaaaaaaaaagccagggtaacggtgggccccatagggccgacccctgtgtctgattattccaccctgctgccacgttaaggttactcctctcccatcggttgaacgtcccctcatcaaggctccggataccatgaccctgagggcacagcctcccggctgacaagtcccttctgccccagggagggcttcagagtgcttccacagcctttcaagcctgcagacaatagggagatcgcttggagtcacggggagaaggggaattggagtgcacggacatcaccttctttccatcacctgccctgcagtcagcagcctgctcagtagacactgctgtttcccacaccaaggtcgcctgggtctctgcaatgatgcagaacagattttttttttttaacttggggatgcccttctcagcttctgtgccccatgacagtctgcagcagccgctagcttaatgcttgccttattctcctgccactccattaagctggagaaaataaactttttctttttcttttttttttgagatagagtcttgctcttgtcacccaggctggagtgcagtggcacgatctcggctcactacaacctccgcctccaggattcaagcgattctcctgccttcgcctcccaagtagctggggttacaggtgcccaccacaacgcccggctaatttttgtatttttagtagagacgggatttcgccatgttggccaggctggtctcgaactcctggcctcatgatctgcctgccttggcctcccaaactgctgggattacaggcgtgagccactgggcctggccagaataaactttcatttcagctttccagaagccaagtgtctcctcccttagggccctcctcaaatcacctttctaaaggaagcatctgatgttcatcacttctaccctagtagggttgcccaattctgaactaccaaaataaaacaggggaacacacaaaacacaaaatctagaaataaataacattacgaggaaactcactcccactgttcagcttgaatctggctttgacaaaagttatgccaatcccaggctggacacagtgtcgtagcaacaaaccagataagctgcctccaacgcaagcccctccatggtttacacaactaagcatacacgccaggcagaggctgacacc

SEQ ID NO: 588985 - DNA, 4001 bp, Homo sapiens
ggccccaagctctgtgtgcttgggatggagatcagagtacccagctcttgtctcatctatcaaatggagaagacaatccctacacatctttccatcctgcttggctgctacagaggttttgcaaactttcacagtggtttcagatcatgggttttgaggtcagacagagctgagttgaaatcctgggtccactgcttactaactgtgggccctgggacaaagtccttaacttccctgaaactcagattctgcatctgtaaaatgggacaataatacctatttcacccatttgttgtgatgactaaatgagatagtgggtcaaagtgtggtgtgtaacccaagtgaagtacttgaatgacatttggctcagatggtgactacaggccttccagctcctcagagaaaaggattaaagtggtgcattatgcttatactgtgctttcacgtctatctactggagcctcaacaggtgggcagggcaggtcatctggcctgagatacattaaactgcccacctgccctggtgtaacaccagggctgccacaggctggtggcaaagacagcacggcatcttaccgccacaatgtacatcaggacctccacccccataacaaacgacctccaggcctgcatcaagactatcagaagacactcccttttaactgtgtaccccatacctgcaagctttcctgcagccagccctacctgttccctccttcccctggtttgggataaaacaggcacccaagacttctctccccatctgtgggtcccttctctcccctccggcctcaataccaccctctctacctgctcattcccacggacatcaaaacgtgcgcaacctgctctaataagaaaagggaaaaatagtactacttttgggtaccgtcttacgtaattttacagacatcatctcatctaattttcactctgtgaagcaggtattgccatcatcatccccaccttacagatgagaaaactgaggcacagagaggctaagcgacttgttcaaggtctcacagctagtgagtggggacccctgaacccagagccagtcctgtaaccacgcacgcttttaaaacactctttattctcgtctccaatttctacatctactctcgcctcacctaacggtagaacttctagaaaagattgtctatacaggcacttggatctccagggaatcatctctccaagtgtatacgcatgtcggggacgccaaatgccctgggcccgccccagtttctatccaaccagccctcctgccagcacctgacccggctctcagcccttccttccggaatcccttcctttccccggcttcccgcatcctctgcggggaattccccccgcgtctctggtggctccttatccgtctccttgacccctttctcttctacactgggcctccatcggctccatccacgaggagtctctctgcgccgcgtgtccccatctcccactcgtcctttggggcgcccctgcaccagaccccactcccacgggaagtctccgtgggccgccccatgatgaggctgggcgccccgctctgtgattcctcgcgcctgccggcgccagcacagcccccgccgcccggctctgcaggctgagcccccagccaggtcggtgagcccgcccgagggcgggggagtgtcgcgtcgccacctccacatatccagttgcgagggcagcgctgggagccaggcagcgccggtgcccgcggaaagaggaatgagcccctgcggggccggggcgcccgcggctgggctgggggcagttgagtccggggcggtctctgcagccgaggtgccaggtccccggctgcacccgaggagtccccgcctcagcaagcgggagctggagcggggagttcggggcgaggaagggggccggggagccgccctgcggtcccggggcaggggtgtagggcagccaacctcggcgccgcctccgccaccgcctaccggcggccaggcccggagcttccggtggagtgtgaaggacgcagccgcaccggcggaaaccggcaaggcagggccggggcccggggctgctgctccccagaccgccgcggggcggggcgagcgatccctgtgaggggaaactgagtctgagggccgggtctgcggcgccacgggcactgtgcgcccagttaactgacacgcgtgtacgcagctcctccgcttgcggggctcctggcatctggtgcagcacctgcgcgtgtttagtgctcagtaagatgccccctgaaaaaacaaacacaaaccgggaattggagcccccaccctggtcccctgcctgcccaaaatccgagtagtgagaaggtgaagaggagtaaaaccgcagtcttacctttcttggatttctccagaagatcctagcacagtgccaggctcgcccaagcttattgggttggagcaatcaagtgatagtacttgatagtacttgatcaaaatgatagtactaagtggttcaaggcactgtgcttttacaaactggatattttaaggaaccgtttctgttttcgtctaaacacacacacacacggtcgctaaatccttaagaatatattaatcaaaatagttatggaacttagtgttggggtagaattttagattaaaagctacacctttatttttgcgaactaccaatttgacaagggctccttctctgtcagatgtcttaaccttgtaggactgatggtggagggagggatgaagctgcccaccttgttggtttggttttaacagctcaaaatctctttatgtgttagggtctttttttttttgagatggagtttggctcttgtcacccaggctggagtgcaatggcccaatcgcggctcactgcaacctctgcctcccgggttcaagtgattctcctgtttcagcctcctgagtagctgggcccaccaccacgcccacgaccacgcctggctaatttttgtatttttagtagagacgggggtctcaccacgttggctaggctgatctcgatctcctgacttcaggtgatcctcccacctcggcctcccaaagtgctgggattacaggcatgagccaccgcgcctggcctagggtccctttttatgtcctgactctcaactggattgtaagagcagggaacgatcttttacttgttttttaacctggcatgcctgtaagactctcacttattggaggcagagctgctgtcctccaacttccgctagacaggcggaagctgcggaacacagggtactctagtgaaagggggacctcagaggcccacctgggagggagatgctgcttgtggacaagcagaagatctcaggggcctctaagagagaatttctgcaatctatgggcaggggcctctaagagagaatttctgcaatctacgggaggttgcccagatgtagcctctgtggggccattcaattctacgggaaaaggattcaaagagttaagtgtttgaattaaaaattgatggactcggccgggcgcgatggctcacgcctgtaatcccagcactttgggaggccgaggcgggcggatcacaaggtcagaaaatcgagaccatcctggctaacacggtgaaaccccatctctactaaaaatacaaaaaattagccgggcgtggtggcgggcgcctgtagtcccagctactcgggaggctgaggcaggagaagggcgtgaacccgggaggcggagcttgcagtgagctgagatcgctccactgcactccagcctgggagagagtgcgagactccatctagaaaaataataataataataaaataataaataaataaataaaaattgatggactctgagtcaattagtctgatagttttcccatcatcagaaaacatttaattatctttgaccttgccttttcctgggtgttgtgaagttagaaataacattccagcaaaaatttgggaagaaatctggggttatttgttgaagggagtttctaagtctagtgattttccctaactcaatagatttccagat

SEQ ID NO: 588986 - DNA, 4001 bp, Homo sapiens
cttgaacctgggagtggaggttgcagtgagccaagatcacgccactgcactccagcctgggcgacagagcaatactctgtctcaaaggaaaaaaaaaaagaaagaaagaaaagaaaagtataagctctagaataagggagaagacagccctgttggaccaagaactgtggccaagtggattatctggagtcagcctggtaccatactccaagcgtacagaattctttggagactgagccagagcgtaggatggcaatgtgaagcagcatgctctgaggaagacgtgaaggcgctggggcttttagcctgaaaagggaagcactcaggtaggacagaatctgaccctccatccctgaagggctgtcatggggactagaaggtggatttgtcttgtgggctctgaggggcagggccaggaacaatgcagggaagagacaggctgattttagcttagtacaaggaagaacttgctaagagtggaatatgtcctgcactggaatgagctgctcagggaggtggtgtcttatcacaaaagttcaagcaaaggaaccgaagcactggatgggaggttatgaccttgactacagcttctaactcagcgctcttcctggaagggtgtgggataaaggggagatacgttttgatggagtgactgctgtaagcaggatgaatgattaggaggaagcctgtctgccgctctggagacaggatggggctcagccgggcttgaaggcaaacctgcctcccacactcaccctctgctccaagctcaggatgcgctcacggtccagctggctctggtggatagaggtggccagggccaggtgggaggcctccacctccttgttgaggacagcaacaatgttctcaaacacacgcagcttcccctccagctcagccagaagcttctccttcatgaagtgctgcagggccagctcctcctggctctcggagcagggtgcccggtagcaatcgacctccaggtcccccgccacttccacggctgcctgcagctgcaggtctgacaggttctgctccagggccatgggcccagactccaggccacagcccagccgggccttccactgtttcatgaaccccaacagcaggtttaggtgggaggtctgggaggtgacctcatgctcttgcacagactgtgggcttccctgacaagagagtggggctgatcagtgaaaacagaggtggagtgaggacaggggagcagtggagtgccctgctatcaaaggtcaccaaggattattcattcacccagcaaaaaggagtggctttctgtacagtgggagggattcagaggaagaccctggcatcagacatgcccacgatgagccacatgcattgcagcttctaattctgccctgccctggagtgcaaggatgattcaggaccatggagaggggcattgggggtgggggtcattttagtgatgttctgcctatgcttaggtaagacattaggaagaacttccctgagtactgtgatgacttaatagtaggctctgatgcttgggaaagtcattagtacaaaggacatccagatgagtggactgatgttacgggaaaatcatggaggggctgcagtggggagacctggaggtctggaaccatagtggatagatctcctttctcacactcagatgcttaccttgaaggagcagccgacacctgcaaaggggcacccaattccagcctcagccacctcggggtgagcctggaaataataatcacatcactgaatgttatagcgatccctgtggctaccctggggctctcttcaatgcaccaggatccaccagggcaggagatggcttgggccacatgactttgcacactgctgttccctttggctatctcctttccaccctttaagcttccacccttccatgaccttccttcaaaacaggacctgggcccttactgtgatcctgggcagcactgctatttctcctgtcagggcacagtccacacagctccgtaatcatcactcactctctggttgccccgactggtcgggggggctctgtgagggccatggctgtgttcccagtgctgagggcagtgcctggcacagctgagacactcagaacacactgactgcatgagtaaatgcctccctcctcctgaagttcatggggaatcttgggctcacaattcccatctgcatccctccttggccatctatccttgactgaggtgtgtccactccgcacaactttcccttccagataacatccagcctgagggaagggatacaggagggtctcagtgctattataatagcaatttgaccccactgttagcctatttaggtctgaagcatttaccaaatgctttcatggccataattcttcctagggctccttacagcatggtggggaagagagggtgggtttttattcctattttactgatgaaaaaactgaggctcacagaggggaagggatttgcccaaggaggccgagctgggaggcagcacagccacagggcccctcccacgcacatcactacctcttaacaggagtcagcccaggagagatgggaaaaaagtttttccaacatatacagtcatgcaacaggaatacattctgagaaatgtgtcatcattgtgtgaacatcataggatgtatttacacaaacctggatggtataccctgctacacaccgaaactctgtgacagcgtattgcccctaggctacaaacctgtacagcacgtgaccatactgaatactgtaggcaattgttaacactgtaagtacgtgtgtatctaaatatatctaaacatagaaaaggtacagtaagaatacagtactatactcttctgggaccatcgttgtatatgtggtctggtgttgactgctacatggcacatgactgtatcttcataaaggcttgtatccagaatatatagagaactcttacaacctaataagagacaaatgacctaataaaaaatgggcacagccaggctcagtggctcaacacctgtaagctcaacactttgggaggctgaggcaagaggattacttgaggccaggagttcaagacagcctgggcaacataatgagacctcatctctacttaaaaaaattttttaattagcagtcttggtggcgtacacctatagtcccagctacttgggaggctgaggtgggaggatcgcttgagcccaggggttcaaggctgcactgagctatgatcacatcactgtactccagcctgggtagcagagaaagaccttgtctctcttaaaaaaaataaatgaataatgaacagatacaatctatgaaagtatcttataaagttaaatcatacttataaaataatttacttataaaccatacttataaagttaccatacaatccacacatttcactcctaggaatttacctaagagaaagtaaaacatatgtctgcacaaaggtgtgtatgtgaatgttcatggcggctttgttcaaagcaacccaaatgtgtcatcagctggtgagtgggtaaacaaattggtctatatatactacagaacaaccaaatggaattaaataccagcataaataataacatggatgaacctcaaaaacattatgctaagtgaaagaagtcaaacaccaaagactacatactacctgtttccattcttacgagcttctagcaaaggcaaaactagagtgacaggaagtagatcagtggttgcctcctggagctgtgggtggggaggggactgactatgcagggacacaaagcagctttatcccgtgcagaaacatttgccatttgactgtagtggcggttacatgattatttatattcatcaaactgtacacttaaaatgagtgagttttatggcatataaataaaatcttgattctataagcgctttgttatttatttatttttttttgagagaataatctcatggaaccacgtgaaaggggatttggacgaaagcaggagaggacagaggtctttcggactgagcaaatacaaa

SEQ ID NO: 588987 - DNA, 4001 bp, Homo sapiens
acttccaatcagctccctcctctgccaggttttggaaggagggagaggggaaaccaggagacccactaccagagcctgagctgaaccctgacaatccgcttgatggtaaaaccagtgaacctctgctcctccacctcctggctggcctttccacggccacagcctctcctcgctattctcacagcctcctcctttgtcgtcatgtttgaacttctcacttgcctgattcagctttgccaccttcttaagctgtaaaaccgcaaacaaaaggtcatcacatgagatagtttaagggcatatttgccaggaaactgaccaaagctgacctaatctgttaggcctcagtgttctcatttgtaaaataggatcataatagtatccacccctctaagttgtgctgaggacccaagggcagagcatttggcacacagtaggtgcataattgcttaaagagggatgtccacaatagtactgatatcatgcctttctgggttgttaatattttaagtatcattaaatacacaaatatatatcgatctctttgtcccctccaaaagggttcccagcaaacggtctgaggtgatgagcaatgctgtggaaggagagatattcgtctaacagtttgtcattcaccaagaggtttatatttgttattataaggacttttgtgattattattcattgggcttcattaacaattctatgacacagaaaacagctttacagacaagcgagctgcggcttagggacattagcagagcaccagaccacacagtgagacagtggcctcacagcctcgaggctctcctcggtgtggatggctttcccctgtgggagctgatgcctttctgtggcttcctctccttccaccacagccagaggggcagtgtcagggagtgtgagaaaagggtgtggaaactgaggcccagagaagaaaagtcaccgcctgaagtcacaggctcctctgcccctcacctcccatcaggggtccctccctggcacccactttctgcccaccctccgctcctccatcacctcacctcgggttctcagagagacagcctgcacagcagagagccctgggctcctttgggtcctggcagacggtgggagggcacccaaagggaaactcattctcatcaggggccgggcgaggactgctgcctgagctggaggccatctcagggttccaggctggccagagggcctgtttaagttgctccagggcaggggaccagccttgtggagtcctggcctgggcctcactctctggtgagtaggagctctgatgactttatcttcttctctctggcttgtgtggttcaacgtcacagctgagtcacagcagggatggagcaggaattaccctttgtggcgataaaaatcccctggatggtgactgaaggctttaggagtgtccagtcatttttttttttttttagagtgagaaaaagcaagagagcaagtcagagaaaatgacccgtgtcacagactctcagaaagcacagtgagagttcccctggttgagaatcgcaggctgccgctggcttcccccacttccctgggcacatcggaggagggggccacagctggtccctggtctgtgttccctggcacctctgagcagcctggaattctcagtgggggtgctcaccttcctggtggaaatccccagggtgttggagacaggtccaaaatttcaagttctaggcgcttttgctctgctctgtttggagtgtctgggtgacctcaaggagaagtcacttcctcacagtgggttctgatgactccatctgtaaaaaagaagttgcaacaggtggcctctgggctgtaagattctgggaccctatcttgcctgggactgaggcaaccagaaggagcaggaaagccctgatgaaatccaaggcctaggaccacagactcctcagggccctccccacaccaccccactcaggaagtcataggtggctacatgctccggtcaggtgccaccactttactgcctcaaggagaacaaagcgctaaacaaatgcaagatcacagcagctggtctcagcatccaagtgggatgtagatccacatttgcaggaaaagtgcactggggaaacgatggctcccagaatgtgtactgtgtgctgggcaacagtttccctccaaatccttacagcaacctgcaaggaattcttctgcagctgtatatagggtcagagaagcaagatgcctggtccaaaggcacacagcctctggtagtggagtgggattcacaccagggctgtggggccccaagctctgtgtgcttgggatggagatcagagtacccagctcttgtctcatctatcaaatggagaagacaatccctacacatctttccatcctgcttggctgctacagaggttttgcaaactttcacagtggtttcagatcatgggttttgaggtcagacagagctgagttgaaatcctgggtccactgcttactaactgtgggccctgggacaaagtccttaacttccctgaaactcagattctgcatctgtaaaatgggacaataatacctatttcacccatttgttgtgatgactaaatgagatagtgggtcaaagtgtggtgtgtaacccaagtgaagtacttgaatgacatttggctcagatggtgactacaggccttccagctcctcagagaaaaggattaaagtggtgcattatgcttatactgtgctttcacgtctatctactggagcctcaacaggtgggcagggcaggtcatctggcctgagatacattaaactgcccacctgccctggtgtaacaccagggctgccacaggctggtggcaaagacagcacggcatcttaccgccacaatgtacatcaggacctccacccccataacaaacgacctccaggcctgcatcaagactatcagaagacactcccttttaactgtgtaccccatacctgcaagctttcctgcagccagccctacctgttccctccttcccctggtttgggataaaacaggcacccaagacttctctccccatctgtgggtcccttctctcccctccggcctcaataccaccctctctacctgctcattcccacggacatcaaaacgtgcgcaacctgctctaataagaaaagggaaaaatagtactacttttgggtaccgtcttacgtaattttacagacatcatctcatctaattttcactctgtgaagcaggtattgccatcatcatccccaccttacagatgagaaaactgaggcacagagaggctaagcgacttgttcaaggtctcacagctagtgagtggggacccctgaacccagagccagtcctgtaaccacgcacgcttttaaaacactctttattctcgtctccaatttctacatctactctcgcctcacctaacggtagaacttctagaaaagattgtctatacaggcacttggatctccagggaatcatctctccaagtgtatacgcatgtcggggacgccaaatgccctgggcccgccccagtttctatccaaccagccctcctgccagcacctgacccggctctcagcccttccttccggaatcccttcctttccccggcttcccgcatcctctgcggggaattccccccgcgtctctggtggctccttatccgtctccttgacccctttctcttctacactgggcctccatcggctccatccacgaggagtctctctgcgccgcgtgtccccatctcccactcgtcctttggggcgcccctgcaccagaccccactcccacgggaagtctccgtgggccgccccatgatgaggctgggcgccccgctctgtgattcctcgcgcctgccggcgccagcacagcccccgccgcccggctctgcaggctgagcccccagccaggtcggtgagcccgcccgagggcgggggagtgtcgcgtcgccacctccacatatccagttgcgagggcagcgctgggagccaggcagcgccggtgcccg

SEQ ID NO: 588988 - DNA, 4001 bp, Homo sapiens
atgtctccaccaacagcacacaactgcttcatacaatactggactccacgtaagagttcactgggtggcacccgattctttttgagatggagtctcgctctgtcacccaggctggagtgcagtggcgcgatctcggctcactgcaagctccgcctcccgggttcacgccattctcctgcctcagcctccggagtagctgggactacaggcgtcaatggcacctgattctaacccacttctataaaagctcatctgagtaatattcaggaacactgatctgcatgcagccatgaatatgaggccctccaaatactagaagttaactttaaaactgtaatttcatggccgggcgcggtggctcatgcctgtaatcctagcactttgggaggccgaggcgggtggatcacctaaggtcaagagtttgaaaccagcctggccaacatgatgaaaccctatctctactaaaaatacaaaaaattagccgggcgtggtggtgcacgcctgtaatcccagctgctcgggaggctgaggcagaaaaatcgcttgaacccaggaggcggaggctgcagtgagccgagatcgagccactgcactccagcctgggcaacaagaccaaaactatctcaaaaaataaataaataaaattacaattttatatgtaaccccatctttttcaggctcaaaataataccaaatagaagcttgataacaacctaaactcttaacaactgtttatacaaaagtatcagaagcaagcgtggtagaagaggagatcttgaaccttacaagtgtccacccattaatacattcagttcctcttattaaaaactagggctattaacagggagagagactgagttacagggcagtaattccgtcccttcaaaatcatgtggccacagagcagggtccgttctcagtcctagtttcccttgacttgacccagaccagactccctcctcctccgagccccgtcttcaccggctgccagacaccccaccccctgtcggccctacaccgagtggaggcttggtgctcttctgcactgaccctcagccctcggggcctcaaaatgacaactccaaaatacccagctctggccctgaccgttcccctgaccccaggctgcccatctggccgcctcccgagaggccatgggcgctgtgactccttcatcttggcctaggaagcaccagccttcagctgctcacgccagattcttgcagacattgcaactcctctttttctcggctctaccttccacaaacatcccctgctactgccaggaccaggccccggccccgatcccggcccggtccaccgcagcccatccccgcactggctccttgctgcccccgaccctcccagcagccagagggacttttcacccaggctcagcctgggtctccccagccactgggcaggaaggcagcagagtcggctccgcccccagcctcactggtcttccccgacccctggctggggggcgctggcaaactcaggggtcggaggcgcccctgaccctcccgagcacgcagccggctgagggtgcggggcttcggggacacgaggggcccacagctgagcgtggaggggcgacagggtgcgggggagcgacggacccgggacggggcagggccgggtgggccgcccacgggcctcaggcggtactgggagccgcgaccccgcgcaaaaccccggaccgtgccctggcgctgctccgagcacggccgcgcgcgttcccgaactttcccgcgccagccacgctcggacttggtttccggcccagcggctcagagaaatcccctcgggctggccccgcccccgccccgcggcctctcccgcccccgctcccgctccggcccggagtctccctgagaggtgcccgcgcctgcgcccgaccccgcgcccgaccccgcacccgaccccgcgcccgcgcccgaccccgcacccgaccccgcgctcgcctcacccaacggtcgcagcgcgcccggaactaagggcccgcccagctaccgcccccaacgccgccgccgccgccgccgctccgccgcgtgcgcctgacggacggacatgggagccaaccagccagccctcaggaagctgtagcgagagccattggccagatacgccccgctccgagcgcgcctgacggactgacgccggagccaaccagcgagcccgcaggagccgcagcgtgcgccgattggtcggcgctgagacggcgtgggtacctaagtcgccctctgctttttcctcaaagagcgcgccggggcgttggtgcggggagctggtgaggtgctgcgctgtggggtccgcgctaattgggtcccttccccaggtgcggcgagacagcgaggcccttgcttcccctcccgtggccccggggcggagacccctgccgcacacccgagaggtgagccgggagcccaagccgggcgacaccggttcccacgaggcgcgcgtcgcgcgcgggacgcggggccctggcggggcggccgcacctacccgacacctgcgggtccctccgcctcccccggtgccgggcgcagagcggcgcctcaatttgggtaacatttatgagaaacaggactaaaagaatactgcacacttaagtaaggtattaaggctatggggtctccttttggggtgaggtaatgctctgcaaccggacagtggtgacggccgcccgacatggccggtgtgctaatctactgggttgtgcactttatttatttttttttttgagacggaggctcactctgtcgcccaggctggagttcagtggcgcgatctcgactcactgcaacctccgcctcccgggttcaagcgattctcctgcctcagcctcccgagtagctgggactacaggcgcccgccatcacgcccggctaatgtttgtatttttgatagagacgaggtttcaccatgttggccaggctggtcttgaactcccgacctcaagtgaaaacacaacctatggcctccagacactcaaatgaaaacagtggccttggcggccaaaacaggggctgccctaggagtcctgtgggctgcatgggggaggcggcactgtcatctgcccaggagaacgggagctgcagcaggttctctctggcggtgcacgggctagcactggacacaccaccccctctccatccagcctttggtgaaatggagacctttcaccccgctttgcagagaaggaaacgttcacggaggtaagtctcctccaagcattcagaccctgagaccacgggactcctcaaggatggaatacactgcaaaacagggcaggctttgaagttgcataatttacacaggccacgctgtccccaggcgccaatgccacatttcatatatgttacttggtttgcagttggaattcccctccgccccaaacccacattcctgggacagcaaggccttgagatggaactcaggaagccatcggattccatcaacgtcatcacccctgagtttgctgcaagcagccatggaaacgtcccaagtccgcacctgcaggctcagtgaggttgctcaagcccaggaactaactgagctctcaaacgtaagaaggcgtctcctcctggctgcacctgggaggctcaaagctgtcctgagtctgcagcagccagctcgggatgagaaagggttcacgtggcagttcatgcctataatcccagcactttgggaggctgaggcaggaggaccgcttgagcccatgagttcgaaaccagcatgggcagcatgggggaaccccatctctaccaaaaaaaggaaaaaaaatttagctgggtgtggtgctgcacacctgtagtcccaactgcttggaaggctgaggcaggaagatgactgaagctcaggaggtggaggttgcagtgagctgtggttgcaccactgcactccaggctgcgctatagagtgagaccctgtctcttttttttcttttttgagacggtgtcttgctctgtcacccaggctggagtgcagtggtgcga

SEQ ID NO: 588989 - DNA, 4001 bp, Homo sapiens
gtggcgtgatctcggctcattgcaacctccatctcccaggttcaagcgattctcatgcctcagcctcctgagtagctgggattacagatgtgtaccaccacacctggctgattttcatattttttaatagagacggggtttccccatgttggccaggcctcaaacccttggcctcatgtgatcctcctgcctcagcctcccaaagtgctgggattacaggcatgagccactgtgcccgactgcttatgtcattttaatgtaaattcttggtaaacaatttaggaactgcttcttcttttttccttaaaaacttatatgtaactgctgctaatcagagtggatagtcacagaaatttgaatctatggtcccagttggccatcctcaagctttaggcttggataaactctgtacttaatcatattttctgaatcttattacttcaagttgacagtaggtagtgggtagggggatggacaaatggatgggtgagactcttgagccagatctgtggaaagcagccttgttaattctgaataacagtttttcaaggagccattattataattacagccatttcatacgttaaaaaaaggaagggtctggtggcagggacaggtcttgagcccacgactccactggattgtcccccatgatccccttttcaccttggagttccaaggttgtcacagtgtggtggtctggagtcatgcagtaccggagaaaggctcacgatggggctgaattcatcacagaagacttcttggagacaagtggtaggatcaacagctgtcagacatgagggcctacctcacccaggcttcatgaaacccagagagagagaaggatttgagagaagccacagaaaaagtcagctgggaagctggagcaggagcccagagcccctggggcactgttaggattatgcatgggtaagggttccacggtgacaatggccctgttgggggcatctggctaatggagtcctgggttcaaggcctgcccctgcctccagagccttcctcttgtggcctataaaatggctgtaataataatggctcacccagggctgctatgagcaggaatgggagtgtctgtgtggccggggaggggagaggaggtaggtagtgacagctgaggctgctcccagggcagtcaggccgtcctcagctcaaagttcacaggccctttctgtggactgcagattaagtaaacctgagatgtctgtgtggctttctgagctacacagggctgtttattaagagggagagtttgtacctctgttaactaaaaggcagactgtcttccagcccaatggcagtgtggcggatcggccatggtggacacggtcaaggacatctgggtaccagcctgggctcccaacctctcactcctaaacccaccttttctgaagctcaactgatggctttggctcgcctttgcccttccttgggtctcaggctcccgctctgaactttcggtcgaccgcttagacgccctctggggcacctttggtttccaggttgtaacccgccactggccacggccaggcacgccccctcctcggccgttatgcctgggctggctcccccaactcccgcgcggcgaaccccgtccccatcgtccccacctgcacgtgcaccgctgcctccagcgccaggcccacagggtggccacggtgcgcgcccagcaccgggcaaagcgcgcacacgcagcggcggcagcggcgacagaagagctcagccacgcggtcgccatgctccgggcagcgccagccgcatccctcgacaagctccgacctcccaggggtccggctcccggtcgccgcgcccgccattcatctccacctcctccggctccccgggacacagggcggggctcccaagggaaaccgaaacctcggccgtgggcggggcggctccaggccggccggccgacccctaggaggatgacagcccgccgggagcagcgtcgggcctcggagcatcctccgaccagcagggtgctccctctgcccgcccaggccgggaggtggtcccaccagaaatgggaagctcctaatgagccagctaggagagggtgggcttcctgcttaatgacgctgttccagtaacgcccagaaaactgcagccctgatgatgggaccaaagttggctgtgaccttccgggggtgctcctctcactttcccttgatcctctcttgcccttttccccggaaagataatcattcccacaactgtaagataccttcatcaacctcaaataaggacacagagattctccaattgagtttatttcggactgagcagaaggattgcaattcgggaataaatgtgccatggcacccaaggggtggggacgcggagtactcagggaggcaaaggaaagcagaggcttttaaaggcaaaacgaggaggattgcatatactgttttttttgtttgtttgtttgtttttgttttttttttttttttttttttttggagacggagtctcggtctgtcgcccaggctggagtgcagtggcgccatctctgctcactgcaagctccgcctcccgggttcacgccattctcctgcttcagcctcccgagtagctggaactacaggcgcccgccaccacgcccggctaattttttgtatttttagtagaaaaggggtttcactgttttagccaggatggtctcgatctcctgaccccgtgatctgcccgcctcggcctcccaaagtgctgggattacaggcgtgatccaccgcgcccggccagatcgttttaaaataataatacttggttacaagaattaatacaggtggcttcagtccaaaagttgaacaggcagttgctgggcagatgtcctcatatcatggcttttgtgcaaggttgtggttctttgtgcaaggttgcagtttggtggaatcttttgcaataatagttcctgttaccaggcaaatcgttgatgagggccccccacttcatggcctcccagcaccatttagtttgtttgagacaggatctcgctctgttgcccaggctggagtgcaatagtgcgatcatagctcactgcagcctctaactcctgggctcaagtgatcttcccacctcatctctggagtagctgggactacaggagcaccatttagtttggttttgatgtaagtgactctgttttggtactgacaactttcacacacacaccaccaccccaaattccagttgcccccccaggctcaagtctagacttccacttataaagccctcagctctttcttaagatccttggtctccgccctgcctatgctccaccctgtgctttttcaagactgggggacgtgcagtttaccctgcttggaacattcttcttcccaaatgccctttgccctgagtattccaacttactctgcaggtttctaccttactatcttttcctccaggaagccttccctccttctccttccagaacagcctatgctttccctatcctggccctccccattcccgcagccatgactgaaaactggagagggcaaagactgtctgttctgcctgttttccagcttggtgtctgactccaagagtagatagttaattggtatttgtggaacaaatcaagaaaaggaaagctccttgtagtaaaatggccagatgtttattattttgttacattatttccattgcatattccacatctatttattttcacttttatttattatcattatttttcacaaaggtacaaggaatttcagaaacaacattaaaacaatcattcaaactgtttcaggcacggtttcaattaaaagcatagatttgatttctgacttcctgtttccttctatgatacaatctcaagttttgtttcaggaagcacaattattgtagcgttaaggtggatacctgccaaagctcatctcctagtgctgtcctcattctcagaaagttcctgagtcaacagaaaggggacgcccagggtatggaataaggagatgagagcatgctctgccaac

SEQ ID NO: 588990 - DNA, 4001 bp, Homo sapiens
agatgaagagccaaggcactgggtggttaagtaactcattcaaggccacaaagtcaggaagagatagagctaggacttaaagtcaggaagagatagagctaggacttgaacccagggtatctgactctaggtcagagtgcctcaactttggcattactgacattttaggcaggataattccttactgcgggggggaagggcgtatcccacacattgtcaaatgtttaacataaaacattatgtttaatgtttaatctacccacttgaggccagtagtatcccccaccctgtgacaaccaaaaaacatctccagacattgcctaatgtctcctaggagacaaagccagacttggttaagaaccactgctttacagtctagcacaggactaaatgctcaatacctaagggttcccttttttttttctggtggttgttgttgttgttttgtctgtctccgagcccaaacacctcactcacagagccactgccccttcaagctgtaatggatcttatataggataaattattccactcattcccctggaggtctcactttctatctgctatcgtagcttgggggtacagggaaaaagggcttaggcagatgaccttgaatagttccacttcttcttccccaaagcctaccactttcagtgggccgggggaccggtggtcagaatggagttagtggcaataccatacctgcctcatgataacggatctttgtttaataaatgaagaagattctgcccttcacagggattaccacactccttcaggattatctgaactgaagatttatcactttgttcctcagcacctgaactctgctcatcttcatatactcatccagtttcatacattacttttaggtccttgggtcccctgaactccctctgtctcccatgcagcgatttaaggaaaatctctttagcagcccaagacaccaatccacaaatctactcagggtcctttgattttatagcccagttaggacatctccaccccacgattcaatcctctccaaaccctgtccccaaccctcttacaattccaaattccaatctttggggctgtatattgcaaccctcgtcaattcctcactcatatgccccaaatccctcggactcagatcgtttaatccctatttccaaatctctgccacactcagccccgcacctcagttcaacgccccaattcctcaccccagatttctgctctccctcaatctgagcccccatctcctgcattccatcgggcactgtgctgccctcataccctgctccttcctcttatgcactgaatgtcatgtgctgccttcacacctcagccagctcccttctttctgctaacaagatagagtccctcaagaactcaccccaccccctcaatctcaccctcagcccactccgaaaaccctttctcaatagcacttaggatcgccctagaccttgctcctatcatctcagaccctgtccttgccagatgcctagcgcccccagatttcctcaaatctcatcggggccccccagttccttcatatttctgaaattctgcacccaggtccctccagggccctgattccctcccatctcccacatgctacaccccgttcctcctcagggccccgacattacctcatacctcccgagatgctgcaaccgcaaatctcttcagagcccctcgctcccctcccccagctgcatctcctcggatctcctcagccccacgaatccctcccgagcctgcccctcgcagccccacccccaccctagtcctgccccccccagatccggtccccacaccctgccattcgggcgcggccgctgcacgccggcacgttcccccgcctggccgctgagccacggcccacgactccggccgcggtccccagtccccaaccctccttcccgccccctacctgaccgcccgcggctccgacgagtccaccgccggcagcccacccgcctgcctccctctgcgcacgcgccgttgagcaccccttgccgggcgccaattcgcagagctccctgtccgtcactgagccccgcctccccagcatgctggggcttgtcgtgcagctggccccaagcgcgcggggcaaggcggccctgcaggggtgagctttcctctgagaacccggggccttagcgacacgtaatccagttttccgtctccttggtgcagatgaagaaaccgacgcccatgggcgaaagggacctgctcaagttcactcagtaagtcaggagataagccagaatgcgtatctgactccagtctcaatgtctaccccttcacaaaacggtagcctccagggtagtcctcagcaaagcgttggcaccttactgaatctgtttttccatctgagaaatgggccaacggaaaaatcaaacttccattctggggaagtcgagaaccgggactccctaggaagggcagtgctttggcctcatgttctgtgctctgacagagagctgcactagagacaagtttatccatgaacacattgctctgtaaaggaatgttttgcctactcagctgggaggccgacagcagaggcagacttggggagtacactctgcagcccctgtccctgcagactgaaggtacccgggaacccaaaccaagtgtagttttgctcgggtgaaggtggaggaatcttaccaggtgggaggtgatctggcctgagatttgagggaatctggggcactaggcatctggcaaggacgaggtctgatacaggactggctggccacgacctgcagtccctgaagtagtttggggccaatcacctactctccaaggtgactatactgtacagcttaggagcacaaaggagtttgaagtaggatggacttggatttgaaattccccttagctatgtgaccctgcacaatgataaaacaataaacaaaaacaatgactaacatctttgaacacttgctgtctggctacagctgaggacttcaggtgcatagctcactaaatcctcataaggacctaatgagataaggcagctgatggttaacctacacctgttgtgtaacctaggtggttacacaaggccacatatacctaagtgttggagcccaaatttgtacccaattctatctgagaacccactctcttaaccttgtttactctttctccccattttctaaatttctaattgaagtttgccatgaagataagccaagattatggtagtttgcacttaatgataactatatttgaaaaattgtaattagcaggtaggggataagggagaggtaatgccaaatgatttctcacttagaccagttggggagactttgcacccgtttaaaatttttttttttcctgaaaaccacagttatcagcccaaagtataaatttaggactgttcatagtcttacatatatacatattatatatgtgtgtatatgtatcaatacagacatactgatgtttccctaattacagaggagtgttaaaaatactcctggggatctagctcaagcaagtgtcttgaaaaaaaaaaatctctcttctcccttaaaacaaaaatcagtgtttgactcttctttaatgtttattaccagttaaatgaattattatacctctcacaaaatcttagagtagaataagcattctaggaaatgcactcaatttttatcttatagcttgacatatcctggcacaatattagaattcctcttacacagaggcatttaaaaaataatctttgtggagtgctttaaacactctttattcagcattttaatgtaacagatttttatttaacacttaaatcacctatatcagtggaaccacctgaggagtttaccttgcccactgcctagacagagctgattcatcaagacaggggaattgcaatagttaaagagtaattcacgcagagtcagctgtgcgggagactggagttttatgattactcaagtcatctccctgagcatttggggaacagagattttaaggataacttggtgggttgggggaag

SEQ ID NO: 588991 - DNA, 4001 bp, Homo sapiens
cactcccactcccttcctttcttttcccctccttttacctcatgtttctccaaatctctacagtccctgagaatgtttcttaaaccaggaatttgggatgcaataaccttgcaaatcaaataaaaacaactccaaccaccatcagaagagtaatagaacaagctaacactcctgaaggcggggcccacctcttttgtatctttgtatctctgttgtctggcataaggcctggcacagaatggaagctcaataaatactgattaggtgattgccacctagggatcctcagaaagcaaaggtgaagttggacatcacagaagcagagatctgctcaatctgtgtgggacattatctatgcccaaatttagcatttttttttggacataggaactaccattttaaccatttgtaaatgtgcagttaaaaacacacctaagggcatccacattgtgtgccaccatcaccactgtccagctccagagcttgtttgtcttcctaaagtgaaactaactttaaaaaaaaaaaaaaaaaaaaagacggagtcttactctgtcgcccaggctggagtgcagtggcgcgatctcgactcactgcaagctttgcctcccaggttcacgcattctcctgcctcagcttcctgagtagctgggactacaggcacccgccaccatgtccggctagatttttttgtatttttagtagagacggagtttcaccattttagccaggatggtctcgatctcctgacctcgcgacccacctgtctgggcctcccaaagtgctaggattacaggcgtgagccaccacacccgaccctgtgacctttatataactctcccttccccaatcctggcagcacctttgtatttcctatcttatgaatttgagtgctgctctggtttgaatgtttgtccccttctcacattcaggttgaaacttaattgccattgtaacagtatcaagaagtgagatttcatttatttttcatttcttcattaaacatcttttctgagcctccaattatgggtccgatgctgaatattcattactttcgttcaacaaagctactaagcacctgacataatagtacatcctggggacttggggatgacattcgttctgctttcatggggctccaattatctgaccctgccttgcatgacagctgtctacctgtttccccactagattataaacccagggaagaattggaagaattcacctgtacaccctcagtacccgagccctgtgagcatcctaagtatttgatgatcaccactcttctgcttagaaccctgcagtactctccatttcactgacagtaaatagcccaaatccatacaatgacctatgcagatcactaaggtctacctttctcgtttcctctgcactccggggtctatttgctgttcctcaaacatacccttcaaggcctttacattcgccgttctctttaccctcaatgctcttccctaagacactcacagactaccttcctctcctcattcatattactatccaacataacctattttacttgttgtcggaacctcctccatcccttcaatgtaggcaagtgttgtttgcttatagatgcttaataaatacttgctgagttcataaatcctccactccgcacccccaccctaggttggcagaggcctcagacctttgctagcctaactcccacctgatgggtacctacactgccgctaagtgatggcacatcgaattcagcctgagagcaccccgcctgcgggtctctcccggcccacaggctgagcgtgcgagtggaagcaggaagggaaagtatcaggaaggtggagtaccacaggccacatgactgctaaacgctgctttctcaacgtccgccccacccgcgagggaggcggacgtcccaggacagaccccgcagcccccagccagcccccttaaccagcggacagcgtacctgatcccctcacccccacgcagcggcagcggcgcgcatcggatcccccccgcccccggcctcgcttccgcttcgtaactccgctccgaatggcattctggaaattgtagtttttcacctgcagggtgctcgtggggccgagccggagcggaggctgcggcttctactcccagccctggcggtagggagctgcgtcctgctgtggtggttgcccaccttctctgaacccctgtctccccgtctgctggacagctattacaaccccaaccctttaccaacttcacagggctcctacaggtgctctgttggttgtcaagggctggacattgcgaaactggggtgtgtgaagcaaaaaaattctaaggcccgcacccgactgaatggacctccctctctgccgaaggaaaccttaaaaactagttatggccattacaggaagcgggagtggagcggggcggttggacatgcactgatattatatcccatcccttgcggagtttaggcccaacggggactgacacaacagaatctttgtagaactaaaatatcaaattccaacctgatatcatattgtgtccggaaatggtggattcttggtctcactgacttcaagaatgaaaccgcggaccatcgcggtgttacaattcttaaagactgcgtgtctggagtttcttccttctggcgggttcatggtctcgctagcttcaggagtgaagctgcagatcttcgcaatgagtgttaaatctcttaagagggcacacctggagttgttccttcgctctcggtgggttcgtggtcacacgggcctcaagaaagagctgcaaatacagatcttcacggcgagtgttatagctcacaaagacagtagggacccaaagggttagcaagcaacaagatttattacaaagaacaaagcacccacagtccagaaaggcaaccccaacgggttgccgctgcttgctcgggcagcctgtttttattctcctatctggccccacccacatcctgctgattggtccactttacagagagccgattggtctgttttacagagagttgattggtccgttttgacagggtgctgattggtgcgttaacaatccctgagctagacacaaaagttctccaagtccccactagattagctagacacagagtgttgattggtatatttacaaaccctgagctagacacagagtgctgattggtgcatttacaaaccttgagctagatacagagtgccgattggtgcattcacaatcccttagctatacataaagattctccaagtccccaccagattagctagacacagagtgccgattggtgcatccacaaaccctgagctggacacagagtgctgattggtgcatttacaaaccttgagctagatacagagtgctcattggtgtatttacaatcccttagctaaacataaaggttctccaagtccccactggactcaggagcccagctggcttcatccagtggatccagcactggggccgcaggtgaagctacctgccagtccctcgccgtgtgcccacattcctcagcctttgggcggtcgatgggaccgggtgccgtggagcaggggtcagtgctcgtctgggaggcttgggcctctcgggagcccacggcgggggtgggggtgggggtaggggtgggggtaggggtaggggtaggggtagggggaaggctcaggcatggcgggctgcaggtcccaagccctgccccgcaggtaggcagctaaggcccagcgagaaatcaacagcagcgccggtgggccggccctgctgggggacccagcgcaccctccgcagctgctggcctgggtgctaagcccctcactgcctggggccggcggggccggccgccgctccgagtgcagggcccgccaagcccacgcccacccggaactctagctggcccgcaagcgccctgcgagcagccccggttccccctgtgcctctccctccccacctcccggcaggctgagggagccggctccggcctcggccatcccaggaagggggtcccacagtgcagc

SEQ ID NO: 588992 - DNA, 4001 bp, Homo sapiens
ctggctcccagagacaggtcttggaaccagttcatcctaattctttccccctatcattcccctcttctagtccccacatgcgcaggaatgaatactctgctatgtcttcttcttttctccttgcggtaaaggatgaaggtaggacattaggaagacaccagaatctgagaaatggctatacagcaaagaaatgtaagcacaagactcctcacttaagaatctgtgctgcaaagacaaatggatgagacttttcaaggacaccttccttatttctcttgctcatggatcccattgttaacctggaaagcactggaagttttagtcagatgatgggtggtaagaattcctacatatggattgccagctagttagcgtttcagtaaaaaagtaatttaatttgtgtgtagctttgctacttaattaccttctcaaaggtgaaacgctacatcattgttagcaaaaagactgagaatcgtttctatatcttattattagcagattaatcatctcccttgcaaagtcacagaaaattgggaggaaaacaaaagagaaacagaacattaagaagtcttcccatcattcatgattaaattggattttttcattgagtagaaaagtataagacacaatagaaagaatgcaggtataacacatgaattaggaattctccaatatatcatgcataattactatattgtgagcttcgctttatcatgcttttattcaggtctttagtgtgaacatcatatattagatttttaaatttattttattggagagggcattttgacgtttaatactggtttgtttcctaaacaaattccttttctttgtttgaaggttttgaactactctatatgaagctttatattttgcttcaacatccaactcagttatctcagaatagttatcctcattgttagaaagcatgaaatagtttcgatgtgctgtgtttctagctgacccttcaattcttctttaatacaaaactttaacagacatcatgtcttaaaatcttttctttttaaatatgctttggaagtctcatgcacgcttagaaaagatggcttctatggcccccagaaaacctctctgtatattcttttctaaaggtagaatggtcacataaccatgactgagtttgtgaagggctggttattttctttcttgtctttctgcattatcagtcatgtgtgatgtgtaatagggaagtgtttttcaaaggctaataattaaaagacatcatattcaagacagaaatgaggacactcacattgaacaaagtataatgattaccctcaaagaataaagcaactactaattttgaaagttaaatatacagtcaataaagcatcaaaataataaaaacaagtctgtaaatattgctttaaaaaattaagtcatttcatttaagcaggattcaatgtttttcacaaagtctttgctacaaatgttagtccccaaactactttgaatcttcttactatgtcctccccaccagctatcgaatcaagttctccaggcaggaagatttacaagcacatacacacacacagggtatattaaacccatttccaaaaagccttggaaagtgctattgcaatctcctcttcagcagggcagcttaacagaaggacaaccactcagaccagtatttgcaagattaggaaaaagggtccactaactttataggaacaaattacaagaaaagtttcacaatgcttctcattgtcaccctctcttgtttcaaatgtataccctgtcttcatcagaacaaacatccccaacccaaaggtactaaattcataagttcgttttgccctttccctccaagcctccctcggtgttgatctttggtcttcctctaggtccccagatccaatattgagaagttgaacaagagaaaagttagctgaaatcattttacctgagcactgattctgggtactggcaaaagcagtccccggagcagctcctgttgctttcattttgctgcagctagggctggtcattccgttaataatgctcttatgaccgcccactggaaaaaaaaagtcacttgttcggctcttcccccaagagacgtttcaagtaagcaatgaacttgggcagattagccccttggaatgtgctgcttcgggattagcctcactaagaatcccatggacattccctcccagccctcaaacactgcttgatttgaacatctaatctgacgccagaagaaaaacaaatccccggagagatcggatttaactggcacaggtcctaacaggctcccccgccctccctccctttttctttttccattttcagagagaaagcttgtgaaagtgtgataaggtgttctgagttctgaaagttcaactttggaaagcaaatccttctaaagaaacagtgtatgaatgatcctagtggttggagcacacaagcggcattgttccaccatccccaaagaatggaatggtagcatttctttaaagagaaactgctaaaatctctgaatgtttcagtagaatattttggtccctgaacatgggcctaagaagaatgaagttggagtttgtcggggaccttcgagaacttctaaaatgtcaataataaaacttctccgatcatacttcttatcctgctgcccctctagcaattgcaaatgtatgattagaaacctacagtcctgcttccttattaaaaagaggtgagctgtgaccacggtggcctatggatgcagatcaaaagttgtgatgccctgatatgtttatttggggtggcccaatggagagattccagctggtattcagtcacatagaaagggctctttcatatatcatccaagagtgaatattttagataatagtattcttgattggataagtgaacaaactgggagataaaagagcttaaatttcaagaaggcaaaaatactttttaaaaagtgagtatatgagcacttcatctccaaaggacttttctcttcccaaacacagaaataagtgctaagagatggcactcttcccttttcttgtggatggtaaatctgtgagggcaatggggctttggttttcatttttccgtaatcctctgttaatgcgcctagtacgtgtcatgtggacactcaataagcataatactgggaaacgaatgacttatttcaaacttgaattcggtcctgagccatctttttagccctctgctctttccagggtcaatcttcttcaaactcccacattttctggtctgtaacttgcaaggtttccccagagaaagaaacaataaactacctagtgactttcagttggggaaacattatgataaataagaaccaaatgaaacatcaaacttagttttagctttaaacacatgatggaggaagtccctttgcctgtcttcaggagttggctacagaataacacttggtgacagccttaatgacatatataaacttgcttctctgcagctgtaacactcccaagcacttattccaaaggaatcatcagagatgtgagcacacagagatgttcactgcagtgttatttataatacagaaaaagtggaaacaaatgaagtctatcaacaggagatgaatcaaataaacagtatttcatgccatttggtggtgataatcaggtttcaaaagactgcttaattacgtagagaaataaacattttcatgttgctatgtgaaaaaagcaggccataaaacagtaagggtggaaaaattataaattttaaatagatacagaggtgataggtaggaaacatttttaaggtggtaactatgtagctaatttttattctattctttttgcttttccatgttttccaaagttttctcctgtaaccatatgtttatagtcagaaaactatattttatatagtcagaaaatattttttttcaactgtcaagcttaaccatatgataataggaggttattacggatgagtatctcaggaagagacaaagcaaggagaattaagtaaaaagatagagggatcagtgg

SEQ ID NO: 588993 - DNA, 4001 bp, Homo sapiens
aagaagagttaaaaagcattattttgggttaaagctgatacatgactttaactgaaaaaatgtttctcattgcacttcgaattactggagttgaattctttcagggagacttagatatgcccattctttgcccctgactcttgattcactagtgattctggagaaaatgtacaccaatttgttaattctctggcctcattctttttcttgccctatcacacatgttgttacaacacagcaaaaacacacatatccaaggaaaagtctcttctactacccatacccaaacctgcctttcctcctaaatagtccctagggaagcaagccatcgccatgacaaccatatgatgggagtttgaacagcacttggggcagcctttgttgaaagttaataccagttggtgtttaacaagaaaaggaaaactcaggcaaggggtaatactctgttgtgaggcaccacttagctgtatggaactaactgtccccatcaaatcttacctaaccagaacacatcctcagaacaaaattctccaagtgtaacgtattcagggctaattcattaattctccattgtagcccactggactcaatgctctgtggtcactaaatcaaaagagcatacatactcaggaaaagagaattaagaactttgccttttttaacttcgaatggatatagaacatcagagatatttatttttccctattaagtattaccaccttctatttactgggcaaaaatgcttgtttcctgcacctttaaatctaatttgtgttttcccccctacaagaaagatcatgaaggtggattagtacagagttgtatggactttttcagtatctttaatgcatttgcttctggaaagagaagcgctgcagacacacggtggcaattcctgctcaggtgtagtgccattcttttgtgtgactcacagctagagagagagctgacattcaatatatgtttaacaatactttcccactactgattccactcaggagactcacatttttatgccttttctaaaaacaaggacacaaaaaaagtcactgtctgaggaggctcattctttgttcatcttcacctgactggccacctaactacacaaagcttttaaactaatgaggagaatcctttgttctctctggttccatttaaagggaaagtgggtcgaagggcttccccagggagagagaaagaaaagcccaggagccaaacacaagggagtaagagatttcactcccactactattcccaccctcccaaagaagttaattaattctgttttaggaatggttaaaaggggtgggggagcaccaggtagcccattctctgagaccaaaatctccttctcgagtgtggttcgcaccagcctcttgtctctgacaccacggggtgtgggtggggggcgtggggggagggcaggagtactgagaacctctctccagccacggaccacagagccagtactgcatgcatttaggctcccccaaaggtgcgtcccagcccaagtccccaagttgggtatttaaatctaaaaagcacaattagcgccattcaaagctgcaagttacagtaccttcagaagtctgacagatggaagaaaggctgcgtggcacagcttccggatggtccagtttaggggtcgaggagcatcagcctgattcatgaccccttccaaattccaccaggaaaacaagaaactgaaaacctgagcaatgcctagaaaataaacggtcccccacggctctggcatcccatggtcatctccacacctgcaaattccattagggcagaggcttcctggaacttggaagactagtcaagtagccttgcctgagcccctgaaccttcttaaaacagccacctcccctctctctgcagccgtgctcatgcataccaaatgtggctgaatggaggcacactgcctgctgcttcggggaggggatgcacgattttgaagaagagggacagcctgcacaaaacagcctgtggtcggagtcaaagcagcctgctccagaatgcgcgctccctctcccgctctcctcccagtaaacgcaggtcaggcgttgggggggaaccggggccattgctttgctagcttggtttgggggggagccaggaggatcgcaaaagggaacaaaaatgaagccagaacgggaaacttgcactttcttgcacaaagcatctttgagggactgagaactggtacggggggaggggtgaggacacagggagagaaggggtgcctccgaatgatgagataaatgcttcccttttgatttatgtgacataataaagtgaggctatcatcaaatacatctatagtaaaagagatctgtgtcgtgttctgaggtttttattaaccgtgattgacagtcttcatcctgataatcggttgcatagatgacagacactgagacagaagcaaactcaaacacactgggttgttcctttcatacaaagcagtttaaactcatgggcatttggctcaccttttagagatggcagtttttaaatgggggttatctcctggaaagccacttgataccgcttctctgcaacacaagtttaacccataaagtgccacatgggatgctgtctataaagaatggattttcctcaagtggggtgtccacccccatcattttctaaggaggctgtatgaaatagttgctgagttggaatgtatagtctttaggactcctgtggtgagagagagaattaaaggacagtttttcaatttgaaggtagaaattggataatttcacatagtaagttgggacggtgagatgagaagggagttcctgacacaaccccccttcggctcccatgtacccccaggcatcggacctcagtgggagcagttgacctgacaactcctatggggagaatccccacatccttggagcatcgccatcttatttattttttcctctgtgaccatgctgattttccatttctaattaacttgaagagattggtaaatcccagctccatgactattatgcagtcagagctgaactgggagtggtgcaagcagatgtgatacactgctgtaattcagaaccgggacaacacaggcccaccccagcatgaaatcaatacctgacacactgcgctacaacaccatttcactcacaatggtcttgtgtcaaaaatttaagaaagatattgcagaaaactagtccacgggtggaaggcagaccattgacctacctcgtatagtaaaatttatgtctctgattatctaccaaacaatatcactttaatagatctcatacacagctgattcattttctgttactattctatttccacaaaggattgaaggcagtattaaaataataacggctcacatgtatcacctagcacaatgcattgcataggtttatgcccatgtcaaccttatggagtaggtgttatggtcattttcttatctcacagattaagcaagtgaggtccagagaaattagtaacaagtctaacatactagtataactggaatctggattgaaaccagtctactaggctgtaaagacaagctttctcttgtctcctatttctttcaaaagggacttcaggaataaaaccactgcctctgttttttggtaatttaatcttacataagagttaaagactttaaagaagaaacgctcagcatttctttcagattattactttggtctgatgttgatgtattagttaacagcatgaattctggaatcaagctgcatggttcaaattccaattttgaagctagtcttgggagatttacgtaccttctttgtgtcttggagtccttatccgtacaatggagattaaaataaacccttatgcctatggttgttgtgaggactaaataagctaatattggcaaagcacttagaacagtgcctggcatatactaaatacctgtaccatgatccatcttctgggtagcatgtgctgattctgagctggaagcccactgacaattttcattaagcatgcatacatat

SEQ ID NO: 588994 - DNA, 4001 bp, Homo sapiens
gaagtataatgaaaatcactcagattatttgggctgtttatactgaaaactcatgatttaaaacacagtgaggccaggcacagtggctcaggcctgtaatcttggcactttgggaggccaaagaggattgcttgagcccaggagttcaagaccagtctgggcaacacagcgagactctgtctcaaaaaaataaaataaaataaaaagtgagaaatttgaaaaagaaggaaaaagagagaagccatatttcaggcacagtatttaccaaatgcttgatagttttggcatagatgtcctatccaaaaaattaactatgatagataattgtaaataggcaagataagaccaaaatttgtgacaaattgcaacatattgcacgattctttcccttcacctctggtataatgatctcaaatgctattcatgcccttgtctatcaagacaagtttaacactaccaaagggtactagtctccagttttggcccaaaaaacaaaactcatgctaactcctaccctagatggttaccactcctggtgggaaacataagaaacaaccagattcttaaagtcaagcccagattccagtctggccaaaatagctaacgctttatcagtcctgtaagaacccaaagcagatgacagtgaaacatcaaaatctgtatacagggggaaagaaattgaataactcgtttcccactttaacaattaaaggtgatcatttctccctagaacaaataatcacaaatgatgtgtatgactagaacatctatgttctcagtgtctttttttctcttttttttttttcttttttatgttctccgtgtcttaaagcactgacctgagttcaaatctcaaatctgcttttctcctttggtttcattttcctcacctgtaaaccggtggagatgggagagacaggatacttggactttataggattactgccaggatgaaatagttaagaatcccaaactcttacaacctgctaaatacgtcaggcattattctaagtgcaaatggcatgtagcatttcaattcatcttgaaactacaaatcgtattatcccattttccagatgagaaagccgaagaacagatgttaactcgcccaaaatcacaggtagtgatgcagctgggatgctaattcaggctacctggctccagagcatatgttcttatcagagcaggctgaaatgagctaacgtttgctaagctgcctggactattcctgaaatacaatgtgctcaattatacttatttttcatacacagtgtgagaaagtccagacaaaataggcgagaccaagaaattaccaggatctccactactctcccaagcgtctccagtgctctcccaacagccaggagcaccctccctctccaagcccccagaacttcctgttgcgccatatgccagcggtggagaggagccagcggggactcctgaggttgcaagtccgggcggcgccgcgttggggaaggaagcggactgcggcggggcgggtgtttaccgtaaccggcgctgtcatcgctccgggactcctgcacggggaacactgggcgcacggggacgcgcaggggcgcggagggacggccgtctgggcacttctccagccgcctcggaaagccgcgacccccggctagtcagcgtccgggtctgagatctgtgcccgtggcagctcaaaacgcgccttctctcctccggattctcagctcaagccacctccgaactcctctccctccggcccggagcggaatcagagctgcctcctctcccggggtgtttcccaccgccccgagctgaacccccgacccccgctaggtttccgctctgacaccacctccgctatggccgcatcccagctcttgaaacgggggctgcgggacctgccctgtagtagcgtacactaccttagataggataatcatctttgggtggagaccagagaacttgaaagccggtatttcataaatcctagctattctagatcctcgttagatgtagtgtccctggccccacccacttctatctaaggccgggggcgcagatctagcgaatcgcctaaggtccttgttccccgccagtcgagcagcctgagcttacctgcaagcgctccaagacaggttgttctttcatctttgatttgcaggccctgctcccaaagccctgtctgagcttttaactgtggaggcagaaactctgggctccacctccacacgctgccttttacagcccagtggatctgtcacaatacctttcggcttcagttacctaactgcctagaaaagaaggtgactctcagtttccttcgataaaagaagaataacgaggatcaaatgggatggccactgtcatcacagacatcctttgtagtaatgtattgttactgttgagtcagtgtggggcgtgaggagatcagagatttaagctaacgcactgcttttactacctgtgacttattgggcatgtcaagcctcagtttatttatctatgcaatgggaataatagggacaaaaatccagttccctcacaaggttacaatgaacaaaggaaatcacttaatgtgcttcatgtgtaacatacaatacaaatgttttgttatttctggtttttttttcattttttttgtttgttttgttttgttttggtggattcctctggataggcatcttctctttctttctttctttctttctttctttctttctttctttctttctttctttctctctttctttctttcttctttttttagagatggagtcttgctctgttgcccaggctggagtgcagtggcaggatcatggctcactgcatccttgacctcccaggctcaagtgatccttccacttcaggctccagagagtagttgggactacaggcacacaccacagtgcctggctaattttatttatttatttatttatttatttatttatttatttatttattttagaaatggggtctcactatgttgcccaggctggtctcaaactctggactcaagcgatcttcatgcctcagccttccagagtgctaggattacaggcgtgagccaccatgcccggcctaggcagtcttgattaaggttgtggtcagtgatttggggtggatcccagggtgttggcagaggtggcacaaagcacacaggcaaaatgatgctcacattattacaagtgtaattaacaatgctagtcattcatccctgacaaccgacttaaaattagggacacctactcatttagtttattatgaatttttgcctggtgaattcacatttgcagacagtttacaggttttttcccctcatttctcaatgtggttttaataagcatttctttgtttattggaaaattgtaatctctcatatgtgtattggcattttgttgtttttctttttgttgttgttgctgttgttgttgagccagggtctcgctctgtcaccgggctggagtgcagtggcactatgtcggctcactgcaacctccacctcctgggctcaagcaatcctccagcctcagcccccgcaagtagctaggactacatgtgcaagccactacacctggctaatttttgtaatttttgtagatacggagtttcaccatgttgcccaggctggtctcgaacttctgaactcaagcaatccacccacttcagcctccctaagtgctaggcatttgttgttcttctataaacacatttaatctcctttcctctccttaacccatcttctttaaagcgttaatctgtaaacagttaacaggttctgaaagctcttctaaggcaagtaaatccttctcgatctctgtcttccatacaatttctttgttaggtctcttacagtgactgggtcagagagttctcagaaatcttcagacccaccaagaagagtagccatttggaactcaagatttgtaagaagtctaccatcttctagtttaccatctttggtaaacctacatgttaggatgatcatatattcttttcagatcaagcttcaa

SEQ ID NO: 588995 - DNA, 4001 bp, Homo sapiens
gatgactaaacctcaaaaaccaagaaggagcaattataaggaatatctagagatacagacaaatagtaactagttaaaagagatgaacatgattacttctcttaaaaagcaggaagtgatggagggttctactgtttttagatattaaccctatggaattaattgattctgaacaatgagaacgtaaaacttcaataaaactaagaagtaaagaaaaaaggcactagtgagactcacatcataatatcttacctaacagtgatggattttacagaaaatagttgccatgtagacttctgatgtgtcacaaaggaataactgagttataggtaggatggtcactttcagttccagcatggtattgattctaccagaagtataatgaaaatcactcagattatttgggctgtttatactgaaaactcatgatttaaaacacagtgaggccaggcacagtggctcaggcctgtaatcttggcactttgggaggccaaagaggattgcttgagcccaggagttcaagaccagtctgggcaacacagcgagactctgtctcaaaaaaataaaataaaataaaaagtgagaaatttgaaaaagaaggaaaaagagagaagccatatttcaggcacagtatttaccaaatgcttgatagttttggcatagatgtcctatccaaaaaattaactatgatagataattgtaaataggcaagataagaccaaaatttgtgacaaattgcaacatattgcacgattctttcccttcacctctggtataatgatctcaaatgctattcatgcccttgtctatcaagacaagtttaacactaccaaagggtactagtctccagttttggcccaaaaaacaaaactcatgctaactcctaccctagatggttaccactcctggtgggaaacataagaaacaaccagattcttaaagtcaagcccagattccagtctggccaaaatagctaacgctttatcagtcctgtaagaacccaaagcagatgacagtgaaacatcaaaatctgtatacagggggaaagaaattgaataactcgtttcccactttaacaattaaaggtgatcatttctccctagaacaaataatcacaaatgatgtgtatgactagaacatctatgttctcagtgtctttttttctcttttttttttttcttttttatgttctccgtgtcttaaagcactgacctgagttcaaatctcaaatctgcttttctcctttggtttcattttcctcacctgtaaaccggtggagatgggagagacaggatacttggactttataggattactgccaggatgaaatagttaagaatcccaaactcttacaacctgctaaatacgtcaggcattattctaagtgcaaatggcatgtagcatttcaattcatcttgaaactacaaatcgtattatcccattttccagatgagaaagccgaagaacagatgttaactcgcccaaaatcacaggtagtgatgcagctgggatgctaattcaggctacctggctccagagcatatgttcttatcagagcaggctgaaatgagctaacgtttgctaagctgcctggactattcctgaaatacaatgtgctcaattatacttatttttcatacacagtgtgagaaagtccagacaaaataggcgagaccaagaaattaccaggatctccactactctcccaagcgtctccagtgctctcccaacagccaggagcaccctccctctccaagcccccagaacttcctgttgcgccatatgccagcggtggagaggagccagcggggactcctgaggttgcaagtccgggcggcgccgcgttggggaaggaagcggactgcggcggggcgggtgtttaccgtaaccggcgctgtcatcgctccgggactcctgcacggggaacactgggcgcacggggacgcgcaggggcgcggagggacggccgtctgggcacttctccagccgcctcggaaagccgcgacccccggctagtcagcgtccgggtctgagatctgtgcccgtggcagctcaaaacgcgccttctctcctccggattctcagctcaagccacctccgaactcctctccctccggcccggagcggaatcagagctgcctcctctcccggggtgtttcccaccgccccgagctgaacccccgacccccgctaggtttccgctctgacaccacctccgctatggccgcatcccagctcttgaaacgggggctgcgggacctgccctgtagtagcgtacactaccttagataggataatcatctttgggtggagaccagagaacttgaaagccggtatttcataaatcctagctattctagatcctcgttagatgtagtgtccctggccccacccacttctatctaaggccgggggcgcagatctagcgaatcgcctaaggtccttgttccccgccagtcgagcagcctgagcttacctgcaagcgctccaagacaggttgttctttcatctttgatttgcaggccctgctcccaaagccctgtctgagcttttaactgtggaggcagaaactctgggctccacctccacacgctgccttttacagcccagtggatctgtcacaatacctttcggcttcagttacctaactgcctagaaaagaaggtgactctcagtttccttcgataaaagaagaataacgaggatcaaatgggatggccactgtcatcacagacatcctttgtagtaatgtattgttactgttgagtcagtgtggggcgtgaggagatcagagatttaagctaacgcactgcttttactacctgtgacttattgggcatgtcaagcctcagtttatttatctatgcaatgggaataatagggacaaaaatccagttccctcacaaggttacaatgaacaaaggaaatcacttaatgtgcttcatgtgtaacatacaatacaaatgttttgttatttctggtttttttttcattttttttgtttgttttgttttgttttggtggattcctctggataggcatcttctctttctttctttctttctttctttctttctttctttctttctttctttctttctctctttctttctttcttctttttttagagatggagtcttgctctgttgcccaggctggagtgcagtggcaggatcatggctcactgcatccttgacctcccaggctcaagtgatccttccacttcaggctccagagagtagttgggactacaggcacacaccacagtgcctggctaattttatttatttatttatttatttatttatttatttatttatttattttagaaatggggtctcactatgttgcccaggctggtctcaaactctggactcaagcgatcttcatgcctcagccttccagagtgctaggattacaggcgtgagccaccatgcccggcctaggcagtcttgattaaggttgtggtcagtgatttggggtggatcccagggtgttggcagaggtggcacaaagcacacaggcaaaatgatgctcacattattacaagtgtaattaacaatgctagtcattcatccctgacaaccgacttaaaattagggacacctactcatttagtttattatgaatttttgcctggtgaattcacatttgcagacagtttacaggttttttcccctcatttctcaatgtggttttaataagcatttctttgtttattggaaaattgtaatctctcatatgtgtattggcattttgttgtttttctttttgttgttgttgctgttgttgttgagccagggtctcgctctgtcaccgggctggagtgcagtggcactatgtcggctcactgcaacctccacctcctgggctcaagcaatcctccagcctcagcccccgcaagtagctaggactacatgtgcaagccactacacctggctaatttttgtaatttttgtagatacggagtttcaccatgttgcccaggctggtctcgaact

SEQ ID NO: 588996 - DNA, 4001 bp, Homo sapiens
gcacgattctttcccttcacctctggtataatgatctcaaatgctattcatgcccttgtctatcaagacaagtttaacactaccaaagggtactagtctccagttttggcccaaaaaacaaaactcatgctaactcctaccctagatggttaccactcctggtgggaaacataagaaacaaccagattcttaaagtcaagcccagattccagtctggccaaaatagctaacgctttatcagtcctgtaagaacccaaagcagatgacagtgaaacatcaaaatctgtatacagggggaaagaaattgaataactcgtttcccactttaacaattaaaggtgatcatttctccctagaacaaataatcacaaatgatgtgtatgactagaacatctatgttctcagtgtctttttttctcttttttttttttcttttttatgttctccgtgtcttaaagcactgacctgagttcaaatctcaaatctgcttttctcctttggtttcattttcctcacctgtaaaccggtggagatgggagagacaggatacttggactttataggattactgccaggatgaaatagttaagaatcccaaactcttacaacctgctaaatacgtcaggcattattctaagtgcaaatggcatgtagcatttcaattcatcttgaaactacaaatcgtattatcccattttccagatgagaaagccgaagaacagatgttaactcgcccaaaatcacaggtagtgatgcagctgggatgctaattcaggctacctggctccagagcatatgttcttatcagagcaggctgaaatgagctaacgtttgctaagctgcctggactattcctgaaatacaatgtgctcaattatacttatttttcatacacagtgtgagaaagtccagacaaaataggcgagaccaagaaattaccaggatctccactactctcccaagcgtctccagtgctctcccaacagccaggagcaccctccctctccaagcccccagaacttcctgttgcgccatatgccagcggtggagaggagccagcggggactcctgaggttgcaagtccgggcggcgccgcgttggggaaggaagcggactgcggcggggcgggtgtttaccgtaaccggcgctgtcatcgctccgggactcctgcacggggaacactgggcgcacggggacgcgcaggggcgcggagggacggccgtctgggcacttctccagccgcctcggaaagccgcgacccccggctagtcagcgtccgggtctgagatctgtgcccgtggcagctcaaaacgcgccttctctcctccggattctcagctcaagccacctccgaactcctctccctccggcccggagcggaatcagagctgcctcctctcccggggtgtttcccaccgccccgagctgaacccccgacccccgctaggtttccgctctgacaccacctccgctatggccgcatcccagctcttgaaacgggggctgcgggacctgccctgtagtagcgtacactaccttagataggataatcatctttgggtggagaccagagaacttgaaagccggtatttcataaatcctagctattctagatcctcgttagatgtagtgtccctggccccacccacttctatctaaggccgggggcgcagatctagcgaatcgcctaaggtccttgttccccgccagtcgagcagcctgagcttacctgcaagcgctccaagacaggttgttctttcatctttgatttgcaggccctgctcccaaagccctgtctgagcttttaactgtggaggcagaaactctgggctccacctccacacgctgccttttacagcccagtggatctgtcacaatacctttcggcttcagttacctaactgcctagaaaagaaggtgactctcagtttccttcgataaaagaagaataacgaggatcaaatgggatggccactgtcatcacagacatcctttgtagtaatgtattgttactgttgagtcagtgtggggcgtgaggagatcagagatttaagctaacgcactgcttttactacctgtgacttattgggcatgtcaagcctcagtttatttatctatgcaatgggaataatagggacaaaaatccagttccctcacaaggttacaatgaacaaaggaaatcacttaatgtgcttcatgtgtaacatacaatacaaatgttttgttatttctggtttttttttcattttttttgtttgttttgttttgttttggtggattcctctggataggcatcttctctttctttctttctttctttctttctttctttctttctttctttctttctttctctctttctttctttcttctttttttagagatggagtcttgctctgttgcccaggctggagtgcagtggcaggatcatggctcactgcatccttgacctcccaggctcaagtgatccttccacttcaggctccagagagtagttgggactacaggcacacaccacagtgcctggctaattttatttatttatttatttatttatttatttatttatttatttattttagaaatggggtctcactatgttgcccaggctggtctcaaactctggactcaagcgatcttcatgcctcagccttccagagtgctaggattacaggcgtgagccaccatgcccggcctaggcagtcttgattaaggttgtggtcagtgatttggggtggatcccagggtgttggcagaggtggcacaaagcacacaggcaaaatgatgctcacattattacaagtgtaattaacaatgctagtcattcatccctgacaaccgacttaaaattagggacacctactcatttagtttattatgaatttttgcctggtgaattcacatttgcagacagtttacaggttttttcccctcatttctcaatgtggttttaataagcatttctttgtttattggaaaattgtaatctctcatatgtgtattggcattttgttgtttttctttttgttgttgttgctgttgttgttgagccagggtctcgctctgtcaccgggctggagtgcagtggcactatgtcggctcactgcaacctccacctcctgggctcaagcaatcctccagcctcagcccccgcaagtagctaggactacatgtgcaagccactacacctggctaatttttgtaatttttgtagatacggagtttcaccatgttgcccaggctggtctcgaacttctgaactcaagcaatccacccacttcagcctccctaagtgctaggcatttgttgttcttctataaacacatttaatctcctttcctctccttaacccatcttctttaaagcgttaatctgtaaacagttaacaggttctgaaagctcttctaaggcaagtaaatccttctcgatctctgtcttccatacaatttctttgttaggtctcttacagtgactgggtcagagagttctcagaaatcttcagacccaccaagaagagtagccatttggaactcaagatttgtaagaagtctaccatcttctagtttaccatctttggtaaacctacatgttaggatgatcatatattcttttcagatcaagcttcaaggcatttagagcctgaaatacaagggcaatgtgaagtgcttaaagcattgaatgtactagtttacaagctgcctttggttcccaagctgtatcagaaacatctgaggcatttgtcaaaagtgcagattcccaggctccaaccaccctacccagatctcttgtatcaggatttatagggtggggcccaggaatctgtatctttcacaagcactttaatcagttgtcaaacttgtatataaaacttcttgtccaggcatggtggctcatgcctgtaatcccagcatttagggaggccgaggcaggagaatcacttgaactcatgatttcgagaccagcctggtcaacatggcaaaaccccatctgtacaaaaaaaa

SEQ ID NO: 588997 - DNA, 4001 bp, Homo sapiens
gactcccgggttcaagcaattctcctgcctcagcctcctgagaacctgggattataggcatgtgccaccacacctgtctaattttgtatttttagtagagacggggtttctccatgttggccaggctggtctcgaactcccgacctcaggtgatctgctcgcctcagcctcccaaagtgctgggattacaggtgtgagccactgcacccggccttttgtattctcttgtagaagtagggtttccccatgttgcccaggctgatgttaaactcctaggctcaagtaatccaccgcctcagcttcccaaagtgctgggattacaagcatgagccaccaggcctggccttcccatatattttaaatcatctctagattacctttttttttttgagacggagtctcgctctgttgccaggctggcgtgcagtggcacaatttcggctcactgcaacctccgcctcccgggttcaagtgattctcctgcctcagcctcctgagcaactgggactacaggcgcctgccaccactcccggctaatttttgtatttttagtagagacggggtttcaccatgttggccaggatggtctcgatctcttgacctcatgatccaccctcctcggcctctcaaaatgctgggattacaggcgtgagccaccacgcctagctagattacttataatgcctaatataatgcctatgcatcaccttgagtggattcaacacagtactaggtgcacagcaaattcaagttttgctttttggaactttgtgtttttcttcccaaatactgccaatctgaagctggatcatgggatgtggaactcatggactcagaggcaactgtacttagtgacacgtgaaaattacctgaagttcaaatatgaatattcataaagttctattggaatacagctaggctcattcctttagatactgtctatagctgtttggcactacattggcagagttgagcagttccaacggaaatcacatggcctgaaaactaaaacattcagtatctggccctttccaaggaaatctgccaattcctggtctaatacctcactcctctgtggaccttcaagggcctggcacaggaatctgagcactgggacactgactcggctcagggatttcctgggaagtgacacacaggatcctgcttaaatctgccttacccagtggatggttgatgaaagagggtacgctggtggctgtgagggtcagctccttctcttcgctgccttccatggggcccagcaagaagcgaacacgctgtttaggagcgggaggcttcctggcattgagacctgaacacacagagataatatatacacacatacatacaaatatatgtacatataaaatattttttaagagacagggcctcgttctgtagcccaggctgaagtgcaatggcgccatcatagctcactgtaacgtcaaactcttgggctcaagcgatcctcctgcctcagcctccagagtagctgggattacaggcgtgcaccacgatgctgaccaggaatatcttgttctgtccaaacacttgggggattagacaacagggaagtatgatgtagaagacaaagcagaagcccatggtgcagagggcagtatagcagtagttaagaaacaggcggattcaaacagactctacaacgtagtaaccgtgtgacaaggaacaatactgagtcagtttccccctcggaaaacagaggaaagtgaggagtaagaaagcacagagaacaggcgtttgggaaagcgctctgcccaggtgaataggtcacgtgattttgttttggggtaaggaccagaagcggagatggacttccaagagaacgagagcgggaacgtgggtctggttcgaggcactcacccttcagaagttgtagctccactgtatcccgcaggtgcttccattttagccccgggggcttatagaccgcgaaaagcccatgcagccgcgacaagccagcagaccccatacttgaagatcacagcacccgctggacctggacggaagtaccgccaggccccgcccccaaatgtggtcctttccacgggcgccgccatgttccacagccggaagaggttcgcattttatagtcttcggggaaaaccggctgtggagaaggaaatagggcccggcgctgagtgagcgtggttgcgtgtcctttgcagacactttctggggcgaggtgacatggcgagagtcttggatcggtggacgtagacggtagacagttcgcgtgcgtttccttcgcctacttggcctacatgccttctgcccgtgaagcgatgtttcccctcgaaaggccgtaggctacgccgtcagaatcggtttttcagtgagttttgacccctccgacgctccgtcgcctgacagaatcgcggcgttcttcgtacccgcccatcctccgcggacgcccgctgccatggcgactctgctgcgccctgtcctccgtcggctctgcgggctcccgggcctacagcggcctgcggcaggcaagtggcgccgggttctgggcgcaggcgggaaggagcctgagggcgcccggctcctctgacctcggcctttttcttgccccgcagaaatgcccctccgggctaggagcgacggcgccggcccgctatactcgcaccacctccccacctccccgctgcagaaagggctgttggccgccggctccgcggcgatggcgctctataacccctaccgccacggtaaggccgcccgcgcctcgcccccgtgggggcggcttggagccgtttcctgtgggtaactggaacatagcctaggtcggggtacccaaacctggttgcagctcgtaaccactcggaacgtttatgaaaatgcagattcctggatcccacctaaacgcactgaatctgaatctgaatctgcagtggagggagaaatgggcgtgaaaccgaaagtctgtctttaaactacttgggagaatctgtcatgcagccatattgagaacatctagactaaatagatgattcataagtaccgatcagtttataatatcctactagaaagtcaactccgaggtcgaggaccatgtctgcctcgttccactgcatctgcagccttctggatagtgcctggcacatagtaaatgctcaataaatgtttgctggatgtgtgactagaacattctagggttctacagtgtttttcttatgcctcctagatttttgagttctgggaagtactgttattcctactaacaaaaacaggctaggcgctattatagtggctcacgcctataatccctatcggggggccgaagcgggcagatggcttgagctgaggagtttgaaaccagcctgggcaacacggtgaatccccatctctacaaaaaaaaatacaagaattaattggggctggttgcatgcggctgtattcccaggctgaggtggaaggaccatttgagccggggagttcgagactgcagtaagttgtgattgcgccattgcactccagcctgggcgacagagcgagaccctgtcttaaacaaaaaatacactatatctccatgtccccagtggttttttgtttgttttgttttgagacacagtattgctctgtggcccacgctggagtgcagtggcgcaatctcagctctatgcaacttccacctcccaggttcaagcgattctcgtgcctcagcctcctgagtagctgggattacaggcctgtgcggcctggctaattgttgtatttttagtagagacgggattttgctatgttgcccaggctggtctcaaactcctgacttcaggtgatcctcccacctcggcctcccaaagtgttgggattacaggcatgagccaccacgcccggccaagaccagcgaattttttaatttttttgtagagacggcgtcttgccacgttgcccaggctgctctggaactcttggcctcaagtgatcctcctgcctcagccccccagtgttgagattacaggtgtcagccgctacacttg

SEQ ID NO: 588998 - DNA, 4001 bp, Homo sapiens
tggtagccacctgctttctaaccaggaatttaggaacgtaccaagtgtttatgacaccaggaaatgcatgcagcagagaaagtttacatcatctgcccttctaggcacgtgatataagagtgttttggataagatattaactttagtaagaggatattttccgtttacatcttctataaataccccttaagtttacaccaggtggttagaggaagattctgcagctccctagggcaatagcaaagaatgtttcactgtttctgaggagcctcatttgcctgatgcatgactgttaaaggtgcatttccctacacaaccctaaatcagttttcacatttgcatattccagatttactcaggaatgttcaatttaagaatcacaggtggttgctcggtaaatcaaaggctccccaaagattaggttttataatgcttcctgaaatttacagctccactttgccggcctgtttgaattcagatgactccaagttgatcccaaaattataaatcaaagtatctcagaagagtattattctattttagcacttttatagcttactctatgcaacgtgaagtgttatttgtatgctttctatttaaaaaaaaaaaaaagccagcaaggattttagcaggacttctttcttcagtaaactcatcagttttattaaactatcaaatactttttagcctaatttagactaacaagttcacatgcacaacactgccatcccaaacaaaagctaaggcggataagccaagtgcatccccccacttcaacattaaacagacacacgtgcataaaccttggctaaatgataaattttaatcacttacaggccagctttgatcaaataacagataaatttaagagtcatatctttggagtcagtcagatcccagcagttccagtcctggctcagatacaattggggtgtgaacttaggcaaagtaccctgctctctccgggcctcagtttcttcatttgagaagattggaggtgttaacagtggctgcctcttctctttgtcgtgaggaccaaaggagataatgactgccaagcactttcacagtgcctggcacacagagagcactccattaacgttagctgttgttcttaggaggaccgcgtcccctcccaagtcctcaccacacatccaaaacacacaaagcaaaactctttaacaggaaacacaaagaaagagctttaattctacaaggtccctccgattgcaggctcttcatcctccagttcctcaaatgaatgaatgaacgcctaggaggggctctgcaaatagctgtctcttaggaatcccctttgcccactttaaggtaactgtctttcaccaccaattaaacacccacaagtacacccagagcgagtcatgcaaatttcagcggagacaccgaatccaggcgagtccttgatccccacaggcgacctccattcattctccacgcccctataccccgacccctctctttaagttctgggaccagccccaccctcgcgacccttcccctcccgccaagcgtctctaccctgccctccgcacctagcgtgaacctgtcaccccaccaagtgagggactgacgaaggggcccacctcgcccctgcccgagggaccgaggcccagggtgcagccgtcccctcgggggccaaggaggggcgaagtgctccgtccggctcgcctctcctccccagggacccgccagtcccggccgggccagccggagatagcgtgtaataagagggaggggagagctctccgaaccccccttccccgggatccctaccaagcaagtgagtctcttgctccagcccctccgagcctccccggctggagtcatggtgccggggctgccccaggaagcccccataaaaaggagggggagacacccccatactcacccaccgtctcctccccctcagctgtttacctcacagtccctccagcctacagggcgccgccatcttggacgtacagcacctcccccgtcgtgaaagggccaaggccgacggcggcctccgccacgaaaaagagtccccctccggacctcccctccttctcgaaaggaaggatagacggccgcgctcggcagccccgccggaaggaagaggctcttccactcataactgacgatgtgggttggacgagaaaaaaagtaaggagggtttttatggaggggggcggggccgggcggaaggatccgaaaggaggctgcgaagagatcttgtgactccgcgaaggaggcaaaaagaagggccggcgcggcgggaggagccacgcgagagcccgagggggcggggcgggcggtcacgtgactggcgggcggggggacgcggcggagaggcgtaaacaagctggcggcgcctgggtgtggttggagcgccctgcccctgccccccgagtcgtttctgcccttcgcttgcgtggcgccctccgagggtctctctgtgggcggcctcagagcagcgatcctgtttcccaaggagctgctggggcccgcgtgggtgaagggcctgcttgggagctttggagttgcagctcacctgggaaggggcggaaagctgcgggccagggcagccctccttcctgggctaaacattttcagaagcccgcctccgggattgcgggggacccccctggcttctgccttcaagtagctcacacttcacacctactcatgacatctaggggaaaccagccctaataggagacagcttgaaaatcagaacgccttattccgtttcctgctgaaacaaggctttaagtcctccaagcctcagtttcttcctctgtgaaatgggcataatgacatctgtgacgtgaagaatcaaggagatgaagtatggacagcgtttagcccagagtcctgcgcctagtaaatgctcactcactagataggtggcctttattgcgaggctgagtatgatgggctccatccagcacgaacacaaagccctgtgagaggaggcagagtgagatgaagtcgaactgtgggatatgaaaggcattttgaaggagtaggcatcaggttgggttttaaaggaaatgtaggttttgtgaaatactaggtcggtgcaaaagtcatcacggtttttaccattaaaaccgcgatgacttttgcatcaacctaatagaaccaggcgaggcggctcgggagagaaggccattccaggcagagggaaccaaaggagcaagagcctaggggcaaaaaagtgttgggtgagttatgggaataacaggttttgtcatgggaaccaattgggtcacagtgcaaggcagccatggttaaggggggccaggtgtgtgagtagccagcaccgtgggtgccttcagaattctgaaaaggccctggatggtatcgggtagagccgctgctagtcagtatagggccttggtgagaattagaaaaatggcacccctgggctgtattttggcccctatccaccagccccaaaccctcctgggcccttgagcagtgaacaacctttataaccatacgtctagagccacgaaggcttaggagggaggtgaaaattgaactgatgattcctctgttctaacacagtcgctggggggaagctaagagttctagattcaaacagaccagagtttgaatgtaggtttcagccatcatgttctaactggatgagccttagtctcctcacctgcaacatagggctaataataatgctagttcatggggatttggggtgaagtcagtgagtcattaagctctaagtggcacagagcctactccagttaatgttatttttgataactgttaagtgccagctgtcagcatccatcacttccagaaacgggtccaccaaacactaaattcttctgtgtcaccacccaagcatagtctgcatggggtccagagatggaaaggtcgagggaaacggggaagggtctgggttctctcagttccaccaatctgcaaactactttacaggaacagactcttccctttgcattcacaccagggaaggg

SEQ ID NO: 588999 - DNA, 4001 bp, Homo sapiens
taaaaatatacaaattagcctggtgtggtggcgcatgtctgtaattgccgctacttgggtggctaaggcacaagaattgcctgaacctaaaaggcagaggttacaacgagccaagaccgtgccactgcactccagcctgggcaacagagcgagaccctgtctcaaaaaaaaaaaatcatactccaatgacttctcaattcacttggataatgtccaaagtcctcacagagcaccttccccctacctctctgatctcatctaccactctcccgttgctcactacctatgatggcactatttgtgggtattcctgaatgggtcgttagaatatatcagcgccaagagagcaggggttttcctttgttcacctctacatcctcagcattcagaactctgcctggcacctaggaggtgctaaatgctaataaatataatattcgttgaatgaaataaaacagtgattgggtaaccaaagaaggcctcactaaggacctgacatttgagctgagacctaagtgaccaagagccagccacgcagatttagaaccagagaccttcaggtaaaggaaatagtataagttcctaaaataagaacaagcttgacttattgtaagaacagaaagagtggttggagtacagtgaggagaagtagaaccccacaggccatggcatggagtgtgcaatggaaagtcgtaggagactttttttttttgacacggtctcactttgttgcccaggctggagtgcagtgtgcgatcaccgctcactgcattctcgacctcctgggctcaagggatcctcccacctcggcccccaaccctcccctcgagtaactgggactacaggcgccaaacactaggctcagctaatttttttttttttcctgtaaagacggtgttcgccttgttgcccaggtgggtcttgaactcctaggctcaagcggatccgcccgcgtcggcctcccataagtgttaggattacaagcgttagctaccccgcccggccgtcataggagacttttaaacaaagcagtaacacgatctgattctggatttgtgttgaaagcagagcaggcagggtttacagataattgttatgtaaaaagagggaaaagagctaagaaagactctaaatttttggattaagcggccgacggatgacgtcatttactgaaatgggtaagaccgaaggagaattaggccgggagagtgaaatttcagatggccatggacaaagcagataagccagtatggtgctcataaagacatcaggggaggggacgctcacacacaggcatataggtacccaataacccttgaaaacagattactaaaacaatcatttgttccttcctaagcaaacaacttaaggaaaatgacggccagccggcaagcccggagccgcacgctcgcgtcagggccggcctttccataccaaggggcggcacgtgcggcaccgcctcccgcccaggccccaccccgcatgccgagcttggcccaacctctcctcccacttttcccaaggcggcaaaagccggaaagtgggagtagatgagcacatacccgccagtcctgatcctttctaaggtctctcttccctgcactgtctccgcctagcaattgtcactgctcaccgccctcgagcctattcccccgccgcgtatttgggtagaaaagctcgctcgtgacgtcaccaagctccggaagtctcctggcgtcggcgcaagggccgccgggaaaaccattgagaggccaccgggaaaccattgagaagccccggaggaccggcctgagcggaggcggagactagagcggccgccggcacgacccgccttcaggcgtacgacgaccgcggcccgggggctctgagtggccaaagcggcggcactttctgcgtggccccggaaggacatagagcggaaggcgggagaaagaagtagccggcaggcggaggcagcccgagggggcggttgcatgtgtgccagacgttcgtagcccactgagcttcctcacgccggctgtcgcagcgcctagccccacccggcggcctctcctgcgcttccggggccgtggcgagctagtgcgcctgcgtgccggcccatccgcgcgccttgcagctgtccttgcgtcggccagcggccagacagttcctgcagcgcttaccgcctggcctctcggttccgcggcgcaccggagggcagcatgtcgcggcggcggcacagcgacgagaacgacggtgagtgcctgcggcccggccacggaggccgctcccggttgggagccgaggctcggcgtctttgggtgtccacggaagagactggaagctcttctccccgggaacgtgcggggagccgcggagggaaagaggagaatatggtggcggtgtggtcgggcggcttctagaaagcgacttctcccccgccccagttctttgagtcaagggccgatcctcgggaaagaaggcctggtgaaccccatgggtagacccttggtctctaaggatgcttcagaatttcgtccgtaaaaccacggagcagggaagcacacctgtgtctgtgctgccgcctcttagggacccactggtcctagtgtctcgttttaaccttcaaagctgcacctgaaaagggctcggaagaattcactgaaggaaaggactgagagatctcatgagttgcagtctgaactctgttccggtagtggttatccgttgatttcacttctttcaagctgcagggaaagaatattgtcttacctgcgcccaagaggtccctaataaacagacacaggttactgcagattttgaactggccgtaagcgcatttcccttgtgtgagagagagtgctagaaaactaacttcaggcctctgagagagttagaacaggggttcccatctccgtttggatgattgtgctcgtggagatcagtgttgccttcataaagatggaataattctagttttaacaacaacaaaaaaaagatgcttatattacacataagccttacaatcggtcaaaaacacaaatccacacaccaaaaaagtaaaacttagagtaattctattgttaacattttagtgtattgttttttgaagagagtgtatagtagtggttaagagatgagactttggaaccagagggtttaggttcaaagccagaccctaccatttacttggtgatcttgtccaggttatgaaatctccttaaactttagtctgtaatacagaagtaatgatatttatatcttctggtttttgtgaaggttaaatgaggtaatacacatcagcaacaatgatgttttatcatttgccaacgcttaagaggcggtaaacgttagcagatgctgtcaatgtaagaaaaaaacccataacagacattttaaattgagtaaattttatctactaacgtttgtctctccttgagtgttgtggcagttgaggtggaggcagaatcgcatgcatttagttttaatagtgaaacaccagatttctacgaaggaatggcttgagaggatattctagtccagctttctatctgacacctaagggtctagagactgagcataactaagatggagggacagctgtcagttcccaaacaccagcaagagcgaatccagtccggggctctcttcactacacaggtataaattaaataactatgctgcgtgctttgatttctaacacgaggtttcttgtgtaacctctgtacaaggcacagaaaatacaattccctcccttttttttttttttctgagacggagtgtcattctttgtcaggctggagtgcagtggcgcgatctcggcttactgcaacctccgcctctcaggctcaagtgatcctcccacctcagcctcctaagtaactgggaccacaggcgcgggccaccacgcccggctaattttttttttgtttttgtattttttgtagagacggggtttcgccacgttgcccaggctgatcttgaactcctgagctcaggtgatccacccgcctcggccttcc

SEQ ID NO: 589000 - DNA, 4001 bp, Homo sapiens
aaaaataagatataaaattcagttctttagtcacacttgccacatttcaagggctcaacagttccacgtggctggtggctagcatattggacactgtcattatggcagaaagcccaaatggaaaatgctgccaaacttgactcaaccctggcagtaaaccagccttggaggtgagaggggcagcgggggggacccagacacagggacaaggaggaatctaaggagacagagctgggcccaggagccaggagagcccctgagaagtgtgaggtgggtgccctgcatgggcccgggaggccccaggcacctgtaggtagagcacaaaggtgaggcgctccaggtgcttgcagttgtcctgctgtaatgagtaggcccttcgcaggttctgggcggccgaggagaagtcacagagctggaggtaggcctcagcccgtaaggcatagaagtccacctgagggtgaggggacccaggctgctagatcctccccaccatctgcccctggagggtaggggaaagtctccacccccctgagagttgacatccaattcccatcagggacttggtggccctgagaggagggatctggcaggtgcgacagggagggaggaagcatgttccagcaactgcctgtgcccacccaggtctgcctctcaccagctgtgggtccaggtggagtgcgcgggagaagagcagcacagctgtctcccagtctgcctgctccaagcactgctggcctctggagtagctgtggggaaagtggggacaggcagaggggtggccctgactgtggaccagcccagggcatagggctggggtgggggttgtgggaagcaagggagctgggtggagaggcaggaggagtagacagaagcccagggagggcaggctggtgttcctggagtccagccaggccatcagcctcgttcccactgaggtggaagagccccattagacagttgagttcactgaggcctgaagagagtaagtggctcaaagctgcacagcatgtgaatggctgtgtcgggcaggaacctgggaccccaaagcaaggtagtcactcactattccctgactttgaggggcactgttaaccctgtgacctttggttttacatcacagatgctttggaacacgtggctggtcccaaagatgtgctgcaggatccctttgggggctggaatcacccatggctttgggatgtcccgtgaggggccctggtcaaccttcagggcatcctagaaccgaaggacagcaagctggagcaggcccccgagacgacccccacccactgacacactccccagcattctgcagggagggaggagaggcggaaatgaggcctggaaggaggcactcccactcggggttccggtggcgctcccagccccattccccttagggacgctccaacctgtccctctgcagtcctgcccttctccctctcctgtggtcaaggtcagggatcagggtcctcatgcttacaacaccgtctgttctcccccagggccttcccagctcccacttccggctactgacaccccaagctttgatgtctccagctcaggcctggtcccaagtctcaggccttgggggtcctacagtcccttgggtaaccttcaggaccctcactccagcaggccacactgagcacctcacctgacttctgccccaggttctcccattttggtgaggtcaccttccccaccagctacccaagccagagacctctgtccaagcagccgccgagccttacaaggatctttcacatgcctggttcttggcatggcggccagggccttccctgagtcggactgctgcccctgcctctcccggccttcaccctttcctgcgaacccagcctcggtctctctgcctggccctctgcctttgcgttagtcttctcccaagcccgcacctcgtccgaatctgtcatgaggccccttccaggaggaccccgaggcctctgccaactacctcgcggccctggccctgacgttgctaggcaccatcaccaggacgcccacaggccccacccctctggccacgcccccgggaaccaagctttttgagccggagggaggtagaaaacttttattagctggagaggttgaggcctacagcggggaaaggacttgccagattttcgccgcaagtcagggccatagcggggggcataacaaggcctcccaaccgaaggtcaagcaagagctccgagcgtcccacacaagtcccgaagggacactgtgacgccgcgctactgaaggcgcctgggttcccggactcggccaccgcctcgccgcttccgcccctcagaagcatggcggccacgtagcccggcccggattggacgttggcggtggacgccaaacagttggcaacacgattggctgctgcggggtgatgacgtcagggggcggtgtcggagtgaatgggggcagcatgaggccgggcggctttttgggcgccggacagcggctgagtagagccatgagccgatgtgttttggagcctcgccccccggggaagcggtggatggtgagtggcgtggggcggcgacgtaggggctcccggtccctagcttcagttcggccattatgtcccgggagccgagtgcccccaaattgctgctctgttttcttaactggtgagttcagtgctcgacgggctccaaacttcttgaagctccgttcctgcactagggcgccctgcctgcccagccttctggagttctcaggggtcgggtttctgggccccttcttcgcgccccttccccactgcagcgttgctctgcgtttccgctcctctgcgttggggcccacgggacgctgtgagatcgggggtggcgagagttgttgggcctcagtttccctggtgccgcccgcaggtggctggcctggggaatcccggactgcccggcacgcgacacagcgtgggcatggcggtgctggggcagctggcgcggcggctgggtgtggcggagagttggacgcgcgaccggcactgtgccgccgacctcgccctggccccgctgggggatgcccaactggtcctgctccggccacggcggcttatgaacgccaacgggcgcagcgtggcccgggctggtgagttgagagcgccaggggtgggcgggcgggccaagggggtgggggttggggcgcgggggccagaggggagcactggctgtgacagatccgcgggttcacctccaagtacctgttgagctccagttgctgcatggctttgggtacttcggggggcctcagtttctttatatgtgaagtgggattagttgtggtccctcatcatgggagtcgggacagtgcctctctgggcagatgggcagtaaccagggctgccgtttccctgtgctaagcggagctgtttgggctgactgccgaggaagtctacctggtgcatgatgagctggacaagcccctggggagactggctctgaagctggggggcagtgccaggtgaggtcctgagatggtcagggttgggatagggcttcaggcctcccagttggggtggagtagggctgctgacccagtctccacaggaaatgggctgctctgacccagccggggcagggaggggtggaaggacactgccccagggaggcactaactgcccctcccatatcccttgaaggggccacaatggagtccgttcctgcattagctgcctcaactccaatgtgagtctacccttttgttgtgcaactgggtcgggtgggccaggggtcccccagcacctcgccaaagcttcctgggcctctctggctctcccacaggcaatgccaaggctgcgggtgggtatcgggcgcccggcgcaccctgaggcggttcaggcccatgtgctgggctgcttctcccctgctgagcaggagctgctgcctctgttgctggatcgagccaccgacctgatcttggaccacatccgtgagcgaagccaggggccctcactggggccgtgacactagtggccatggctgcct

SEQ ID NO: 589001 - DNA, 4001 bp, Homo sapiens
gtttatagcaatggaagtggtaaactgtgagggacaaaagtaaatttggcatgaacaaagaattcaatttgtattttgctcatcaactaggactagtacagtacctagcatgtaacagaagcctaatagttaatgaatgaagaaaaataaatgaatgatatggcaaaaactgagttgttattaagcaacatcttttctgcagtctttcattcattcaacaaatatttatttaccaagtatctgtgtgccaggctctctgctactctgaaacctaacttccacccagagtttcacccacagaaacctaacttccctcctcatcggctaatgcatctcaaccgttcatctagtaggcagtgagcatagctggggtgaccatttgtcaaagtatctccgaaacagtcccagtttacacctattatcccagtgttaattaataatagcaccgcctcaacaatgccctaatctagagaattacatagttctaagcacagcaaatctcctacaaacagatcgggattcaaatatttcattctacagtcttgggatcctcaatgcaagggacaggctgtaagcaagggtctggacagcccggcttgccctcttgtctctctgtcatgcagaggagctgtagttcagtttttgttttttgtttattttacggagcacatttaaagtatagtcttccttgtcaggagattcctggcactaaagagatggacgggaaacttaaccgcctcctccagatcgtccactattgcatcatttgaaaccaaagccttctaaaggcagcgactcgcacaattcaagtcaggtaagatggcaggaacagcagctgtgggtgctggctgctgctggagcctcggtctcaacttcaagagcagggagagcgctgtctctggagttgccaggtgctgaaatgaatagtcaataaatcaacaggtccggcgcgctagcccctgggtgctcaggcccgggcgcgccacgactgaaggagtggctaattactcaaacacagttgaaaccaaaggaggccggagtcggttctcaaagtggtttccctccggccaccaccgactctgaggacctgctaggggaagtgtcccggccccgtggagggagagggaagcaccacagcctgggctgcggctctagccctccagccccagcccctggcagccctgccctgctgtcgcggcaggtacccctctactcattgttcctcaggctgccccctcttttcatcaatcgtaagcctttcggttctgccaccaggaaacttccatagaaggtgagattcccaggtcgagggatgattccacgaacacccagagagccagtgccaggacttcagggtcagacttcgtaaagcccaggcgtcgctgggccggcccggaacagctcagagctgcgggtcctatggtcccgcgccctcacgcccatccaagtgctggcaggacgtgggtcctccatccccacgactcgcggggccggcgctccgaacctcggcactgcgtccgctccgcgcgccgcagggaccctcctagctccagcggggacagacctaccaaggccgggcgcccccacccggcgcccgccagcccaccccagagaggggaccaagggggcggggcctcggccgtcctagccgggctcactcttctctcccggactcctgtccagggcttcaggggccgggcccgcaatccccatcggatcgtacctcgtccgcttccagctccgctcggctgcctaagagcgccatattcctcctctggctgctgccacccaaaaaccaagcagggaactcagagccgactcctgctctcggctctgggctcagcccagcgcaaaggagggcaaaaggggacggcccggcgctccctccgggtctcgggcggggcctgagtgcagctactcgatttccccgcccccggagccggcaggccagcacagcatccatttcctccccggacgccgcgccgctggccgggccacttgcccggcccccagcgggcggcagccccgcccaagtgggtggagtcacctcccagataaagtttcccggtctggcacgccctctgggagggtttcctaagctttcctgccgcctgttctctgcggtggctgggcacacctggaaagaagctagagagcgcgggcatgacgaagccaaggtcaaagcagcgccccacctggggtccgtggaagcatccacctggtctttggtccggtgccagtccttttccctcgccaggtggccaccgcatctcgcagatggtgtggcctgagggcagccttgggtcacggtcactggtccccgagaggcctctgacacaccacccacctggactgtaggtggaaggactctgcttgcttctgtgttcaaaaaatagaaaaaaacgcgggacagagatttatacatattggaactcctctacttccccctacccggacagtgtattctccccatagcatcctgtattttgtaactccaaacataggtgtataattcgtgcttgaactataaactccatgggggtaggatgctatctgtcctcttcaagactgtatccccaacacccagaacagtgtcttgcacatcgtaggtgctcaacagatatttgttggctgagtttagaaactgaaccttgcttctgacatgtaaaataactggaaaattaaaagctagatctttaagagtttgggggagagaggtcagatttactttacatacagaaaaatgcaccaagttaaatgtgtgattcagtgacaagtgtttacaaagcatcccagtcataatatagaacatcctgaaaagttttctgtgaccctttgctgtcaatttcctacctccgctccctagcctctgtcaatcactgatctgctatcaacatcgatttgccttctctagaatttcatataaatttaattagagcatgtggtcttccatgtctggctcatgaaaggctatttaatagtcatccagtgataactgtaaaaacagctaatagttcttgagtccttactatgtgccaggactctactgaacctcttgcatatagtatttcatttattcttcataaccccataaagtagggtgctgttctctttcagatgagtaaactgaggctcagagagttcaagtaatatgcctgaggccagacagcagttaagtaagtagggatgccagcatctgaaccccagcagtctaactctagggcctagctgataaccattgctttgtactgtactggctctagccaccctccctctctttctttctgtgtcagtagagcagttgtctgtgcaagtccattacatacattttcagtgagtcactttgcatccttaatacttgctgtacaattttaatggcttggcatgtacttttgtactagaataataaaatggtttctacagcagaaacattgaaaaaatgggttagatcgtgtgatggttgctcaactctctgaattgtctaaaaatccttgaattgtgtacttacaataggtggaacttatgattatgtaaattatatcttagtaaagctgttttaaaaaaactagctgacacaggctaggtgtggtggctcacgcctgtatgggattacagcactgggagactgaggaaggaggctaacttgagtttaggagttcgagactagcctgagcaacatagcaagacccaatttctaaataataatactttttttttttgagagacagtttcactctcatctcccaggctggagtgcaatggctcgatcttggctcactgcaacctccgcctcctgggttcccactaatctgtaaattgcttagaaggaggcactatcttattcatcagtgcaggtactcaataaaaaagctccaggtgcagtggctcatgcctgtaatcccaacactttgggagaccgaggcgagcggatcacgaggtcagaagttcgagaccagccttaccaacatggtgaaacccagtctctactaaaaatacaaaaa

SEQ ID NO: 589002 - DNA, 4001 bp, Homo sapiens
ttcccttcctcttccactaagactatgagctcctccaaagcagaaccatttctcacttactgacctaaactcagcacttactatagcactgaccacatgcttgctgaaccagttaactcatttccaacatctctttccagcttaagcattctagggatctgtaccttcagatctggggcagaattagttgcaggtatttatatgtcctatatgtttggccacaaagtacttacacttctacaggtgaaaaattaccacaattttaatgaaattaggtaatcagttttttaatgccctcttcatctgctaaaaatatctgctccatgagggaagatacaatattttgttcagcatcatatccccagagcctggcaagagcttcgtaacagatgtaaacatttttgaatgaatgaatgaatgaatgaatgaatgaaatgaatgaacgaatataagatctttgcaagtttaagtaaggcagaatttcctaattttagcaatccttcctaattaaattcaaagttgctgcatttaggtatgacaaaatgtttaaaaataaaaacagcagatgtttgatctctgggtggtagagaaaatttctttttttaaatccttgatttattttaccctgcaggaagtcaaccaaaatactggcacccaaaaagctcctataatatgtcagcctaagtcaaacatattctgcatctacaacgatgactgttaccagttggtgtttaaaagtattttgactactgatctctgaacatatcaacttttaaaaatcatttcagctaatgtaattttaagataaaggaacaaaatcagtagccaaattatatgaatctgttcaataatatgacttttattcaacaaagacaaatcaggaacatatgggggttatggtgagaatcaaaaattaacttatctttagagaatgctcaaaactcactcactaattcagcaaggatacaattctaacgtccaggaaattccaaagggggaaaatgggacacgatgactaaggacagatgtttagactccagggtctgcgtcacacacacaaaaaaaatacccagcattgattctgatgcacaattttaaaaggtggccatacaaaggtcactttttggtagctcacatttactgtaatctgctacaaagagaccactaaagccagcacagcaaggtcagaggtgagagtctaggacaatcaacacatgctatttctgaggacaagccactttactaatctctaaggttctaattaccctaacaaaacaaaacaaaatgctataatgaaaccagcagaggacataagacaaacagtaaatacaaagtgaaccagcatcatcctgccattgttctgcagcaggagtctcagccgcccagacgcacaccttgcagcagcaataaaccagccatggcatcccgggaagaccagatcctcctccgcagcaagtcacactattttcttcaatttcagcactcaccttaggaagttttaaaaaggttggggggagggtcagaggggaagccaagcaggcttgacatgaagctcttaatgaagacaatgtcatctaacaaaaactgcaggttccagtgaaatttaactggagtttaaaaaatttacatagccttccttaaattaaaccctcatagatttaaagagaacatttgaatcataaacccaggaactgctaaataaatatgacatactcacagatttagagcagctgtaactttggaggaatgaatatagtcccactatgaagatgtctttccctctcttctaccagatttttttttaagccaactaaaagaagagacaaacctcaattttagagccaacaaaaatcctcaatttctattttattccttggtctccagtgagactctcaattctcaggcacaagcaaagtagttgccgaggcagctgacagcatcccagggctttccagggcagaatttaagacatgtcagttaaagtggcagctacactcactgctgtagcggatgcttctgcaggaagggatgccgggagattttttttcccccaatctctgctgcagcctaattctaatccatcactgtttaattatctagagaaacaggcaaggaacatacaaatggcctggatttataaaaaccacagaatattttcatgatttttcacctaatccagggattcatgtcctatctaaaaagggacaattaagaaaaaaaaaaaagaatgatcccttttgtcttaaggaaaaatgtaggctgttattgccgactgagacgcagattttatatcatggactttaaaaaaatactaaataagagaaaatcaacttttcccctaagtttttagattaatgcacaaaagttaaattagcaaagggaattaaacacatatatgacatgacagtcataccaagatagttggaaaactccacttttaaattgataattgatcaacaatatttgaagtggttttgatgaaactagaagatagtaggcataggaaatactagttcaaagaccctaagatagaacatagttctaaagttcagctatacttttttggtttaaatagataaaagctctcctggggaataaggtggtcgttgacttcacaaatttcttatcttgcctcaagggctcttgcacatgctagaattgaaacgtttttagtataggactcactaatttttctaattataaaagtaataccagggctaggcgcagtggctcatgcctgtaatcccagcacttagggaggctgaggggggcagatcacaaggtcaggagttccacaccagcctggccaatatgctgaaaccccatctctactaaaaatacaaaaattagctgggtgtggtggctcacgcctgtagtcccagctactcgggaggctgaggcagaagaatcgcttgaacccgggaggtggaggttgcagtgagccaagattgcgccactgcactctgccctggatgacagagcgagactccatctcaaaaaaacaaaaagtaataccaggtaaaatattgtggtatttccaaattataaaatagtaaattccttggaaagagctaaaaaacaaagaagaaaattaaagacagcctgtaatcccagcactctgggaggccaaggtgggtggatcacctgaggttgggaactcgagaccagcctgaccaacatggagaaaccccgtctcctctaaaaatataaaattagccaggcgtggtggcgcatgcctgtaatcccagctactagggaggctgaggcaggagaatcacttgaactgggtaggtgcaggttgcggtgagctgagtagcgccattgcactccagcctgggcaacaagagcaaaactccatctcaaaaaaaattaaagccagccataatctcataacccagagataaccactcttaatgttttgcaataatatacttctagttttcttcctctctatatatatacgcgcatacacacacacacacacacacacatacatatacatatatatatatatatatatatatatatatatatatgtagtatatatggaggggacaagacagctaaatgtatttttgatactactattttaaattacccttttcacacagaattgttatgattatttacccaaaaatgtaccctatagttaaccactcatatttctaaaagttcaaaagagcatatgcaatgacagtccatttgtatctgtatgcctactatgcaccaggcacaggggatatagcagggagcagagcccacaaggtccctgctcccctggagctctcagtccagttggggagccagatattcaccaaacgacagcaaatatcatgtgcgctgtactacaaaagaaaactatagattctttagaaacatgaaaagacctggtgttgtgaagttcaggctttttcaaggaaggaaaagagaactgcaagcccaaatgcaaaattattagtaaagtacatttcacaccttcatttttccatcaatataaatat

SEQ ID NO: 589003 - DNA, 4001 bp, Homo sapiens
ataaatcacaaacagagcaaagccgattatttcttttttttcttttttttttgagacggagtcttgctctgtcgcccaggctggagtgcagtggcgtgatctcagctcactgcaagctctgcctcccgggttcacgccattctcctgcctcagcctcccgagtagctgggactacaggtgcccgccacgacgccaggctaatttttttgtattttttagtagagacggagtttcaccgtgttagccaggatggtctcgatctcctgaccttgtgatccaaccgcctcggcctcccaaagtgctgggattacaggcgtgagccacccactggctgatttcttttcttttctttttttctttttctttttttggagacagaatctcgttctgtcacccaggctggagtgcagtggcacgatctcggctcactgcaacctccgcctcccgggttcaagcgattctcctgcctcagcctccggagtagtagctgggattacaggcgcaagccaccaagcctggctaatctttgtatttttagtagagacggggtttcgccatgttggccaggctggtcttgaactcctgacctcaggtgacccacctgcctcggcctctcaaagcgctgggattacaggcgtaagccacagcgcccggccttgatttctttaaataacatttccccttccatcagttcctttccttcttttttgtaaatacttcctaggctgctctctggtctctggagcccagtacaaccttctaaatatatagtctctccctgctaaaaactttttagggttcccctgttattcttaagataaagtcaaaatcctcacagacctgcaagagtcttcatttcttcataatctagcctagagatggacagaggtaagtccatgcccacctctctacctctcacttctctctaggtttcagaaaccctgctgttttcagttcctagaatacactaccttccttttcgtctcaggaactttgcaaaaacagcccattccatcaggaaagctcttcctccgcattacctttctgccctttaactggtccaagtatgaaagccactttctcaagaggacctctctaactccttagccggtctcatctttctggttaacagtgtttcccaacaaccagctgctccccattgcacttttggcagttataatatgatcggcttcttgagggctggaatcctggccatcttgctcccaaatggctccccagtcagtgctcgatacatattgagaacggatatgcatttatccccccttactcagaacatacacttcccgctctgcaggtacgtgcccaaacctggtcccggattctctcaccgcctttggggtgcgagagagaccccgctctgctcccgggtgggcgctccagggctgagactggaggaactaaccagatgtgaattctgcatcttctcactcccaaagacccaagccgcggccgggcgcggtggctcacgcttgtcatcccagcactttgagaggccgaggcgggtggatcacctgaagtcaggagttcgagaccagcctggccaacatggtgaaaccctgtctctactaaaaatacaaaaattagctaggcttggtggcgggcgcctataatcccagctactcgggaggctgaggcaggagaatcgcttgaacccaggaagcggaggttgcagtgagccgagatcgcgccaccgcactccagcctgggcgacaagagcaaaactccatctttaaaaaaaaaaaaaaaaaacacccaagcctcagtttccccgagataaggcctggggcaaagaccgcggcctggagacctcaggccaaaaggcgggtctcccagaagacggggaaacccaccaccccacgctgagtttttacgcgcgcattttgaaaaacagaaacaacaaaggcgctttcaacttaccctccgaaagcgccgccacctttctcccaacccggaagtgctgctgttgaggaagcggaagtagtagtgcgtcgccttccggccccctcggcgtcacgctgccatggtaacacggctgccgctaggccttggaggcgcgcacatttgcctacccattttccttctgggtcctttagacgtcaggtggggtagagagtgctcctgaaacgaagaaagtaggacagaatccccctccattgacgtactaatgcatgcgtgcattccatttattccagtttttggtgaactccaggaacaacttgggaagacagatgacaaatcaactaagataatttcagattatcttgtaaggaaaataaaacagggtgacgtgatggagagtgactaggggacggtgggtgctactttagatgtaagagagggctcactgaggaggtgacatttgaactgagttctaaatggaaagggcaggcaaaaaatctaggcagaagagtgttccaggctggaagtgagtgcaaaagtcctgaacttggttgctggaggacctgggacaaggccagagcagctggagcacagagtgaatccacacagtgaacccacagggtgacagacaggtcgcacacgcccagcctaagtgaatgcatgtgaatgcaggggagggggtgggagaggaagtcagaggtctgcaggggctatctggtgcagaggctgatggatgttaagcttggatgaagtctcagaagtttagagttagcaggagctttggagatctatcccagtcttcccatttcaacagagtcctgaagagacttagccaaaagggcagctttaacctggccatcaattcgaggccattatatttaccaaccaaacgtttaacctttttggatagtgaacatatacgatataggcaacaagttttctcacttaatccttgtaatgaggtattattagccccaccttgtggatgagaaacctgggtttacagtaacttgtccaaggtgacttaaatgggccagccagaaatcagacctatgctctttctactactccactatcttgcccctcactgttccacctgacttctatgtgatctgccaagtggctttgattaaaaaatgcacaaactatgcttccgtgaaagtctggaagggaagcaggttggagaaacgatgagcctatgtatgtactcatgttgccatgcaagggctgctctgggatgtggacgtgcagttggagctccgtctggagaagtctgtaaatgtggtgttgtccactgttgatatggaaggccttgaagtccaggtccgtcattggtgtcacgtgttctgtggtgaccccacttacccagagccttgtggtgctagtgatgcatgaatgaacccacaaaaggctggcactagaggagagattagatatcatccagtatcgattcaggaaaactccaatagtggtttccaatcctcctccaactgcaccaatcacctgggaagcttttttttttttttttcaaatgcagagtctcaactttgcaatggattttatattaaacactattgtatcacattaaaatcttcggacatgataatgacattgtagttacacatgggaatgtccttgctacatgatgacgtacttagggttaaatatggtgttgacagatatttttcaggtgattctgtaatgtgtgtatgtgcatgctcacagagagagagcaagaaaatgtgaccagtgctggggacgggtgaatctgttagtccaaactgcaccattttgtaagccccctgccattttgcagaccttgcttaaagtgaaacattccacgggggttcaggcagtgagaaacagcctgcctcttatcatattctgctgggagaaagtgacaggaacatcacgttccaccagaacaagggccaaactgcctcatcatgggaataccttatcaacatcttcccgggcagcaggccatacccaccgggcccctccccgcccaggcctataatttctccagcctgtaagcagcggtaggcactggcattaagctggtctcccacctctgtagg

SEQ ID NO: 589004 - DNA, 4001 bp, Homo sapiens
ttccaacttaatgaaaccattaccgagcatctaccatagccaaggcacagggctaagaacctgagtcctctgttacccgcagcagatccctgttaccactggctgtgtccacactcagctatccttaatcaaactcctgacactcctgaaagcacattaaataccttatatgctgcaaataaagtcaaatggctttatccacgtagccaattgcaacagacacctctagagtcactggtgctacattccatcccctgccagtctaaaatgggctcagggatgataactcatgtattcattcaccctttcattcactgcttactgacacatgccgtaagccaagcctggaatataaaatacagtgcctgattttataccactgatcatgaggacagtggtggtgctggtggtggtgatggtgatgatggtggaagaagagagaaaggagaaggtggtaacgtaagttaccatttattgcagacttgtgctataaaacactaagtagtgagtcttctaatgctaacaagatgatgagataagtataattggcctcactttacagagaaggtaataggctgaagaggtgaagcaacttactcaaggtcacacagctaagtagcaaagtgtagtgagaccctaggcctgtctgcctccaaaataaaaagtgttcctctgcccaagagtcacacagcaagtgctaaacaaatataacttcaatgaagaagtgagagagcgggtccggggccccaggggcttacaagctggtggaggagacagacgtacacatatctacaagcagaggcaaatgctgatggctgagacataaaaagagctgcagggaggcagaggagtgagtggctaacttgacctggaggggtctggggggccctcttggaggaagtgattttggggggtaggccttgaaggatgagcactttgcggctgacaagcaggcccgagcgtggtgcaccgcaggagctcagccctcgcccgccgacctgacctgggccgtgccgagacctctgaggtcgtcctgtccaccccactgtgcccacgcggccgggtcgggccgggcctcacctccttccacttgagctggcggatgctgatcttcagggcatccagggaggtcctggccttggagctgtccacggtgaccggccgctgggagccgttctcgccggaaccgtggcccgagctccgcttgcagcttcggcccttgtcccggggcttcccgtgcgggcagaggccctgcaccggcttcggcttggacgggggcagcgtgggcggcggccgctgaaggacctgggtgttcccctcctcagccgcactgggctgcgccggggccggggccaggaccttgggctgctcctcccctgccttgcactccggttccccggccgcgcccgcgtccacgcggacctgttccgccaccgtctccgctgtggcctcggcctcagctttggccgccgctttggccgcagccaccgcctccgcctcccaccgggccgccagctcgctctcggagctgccccgccgcatggtgctcagggccggggccagtgccagtgccaccgccgccgccgccgccgctccgccgccccagtccgccaccaaactgccgccgctgcagccgctgccacgcgttccccgcccgagcccgttgccatgatcgctcaggctcgggttgacagcggcagtcaccgcatcgagacggggtccgggaagggacaatcgccggccgagccccagcgacctcataggcgaggctgcccacgtgaccctgcctgtcacagaggcagcggcggccatgttggaagagggcaaagagccgccaggacccgcccaccccgcggatgcgctggatctcgagggcgcagaactcggagtggcgaggagaagcgggagggcagattgagcgcgcgtggggctcgtgagcctggggactgggagtaaaaacaactacctcaagcaggaggctcagtccccgccaacactcgctgggataactctcgataggacggaggaggagccccccagtgggaccctcctcagtgcaatggatgggaccctcctcagtgcaatggatgggaccctcctcagtgcgatggatgtgagcagcccaggccctaggggagcagagagtgttccgctgaagaaaccctctgctggtcctttgagcgcccccagataagaggggaggcacttttccctgttctcagggagctcccgatgggatggggaagtcatgggcatgggtaagccccctatagattcccactcgagttgaggatattaacgattttttctttttcttttctttttttcttttttttttttttttttagacagggtctctctctgtcgcccaggctggagtgcagtggcgcgatcccggctcactgcagcagcctcaacttccagagctcaagggatcctcccaccccaacctcccgagtagctgagactacacgaatgtaccaccactcccggctaagttttgtgtttctcgtagaaacgtggtttcgccatgttgccgaggctgttctcaaactcctgacctcaggtaatctgccagcctcggcctcccaaagtactaggattacaagcagaaccaccgcgtctcttgttttcttttttgtttttgtttttgttttgttgttgttgttgatgttgttacagagtttcgctcttgtcgcccaggctgggatgcaatggtgtgatctcggctcattgcagcctccgcctcccggcttcaagcaattctcctgcctcagccttgtgagtagctgggattgcaggagccggccaccatgcccggctaattttttgtatttttagtatagacggggtttcaccatcttggccaggctggtctctaactcccgacctcagatgatccacccgcctcagcctcccaaagtgctgagattacaagcgtgagccaccacgtccagcctgactgcttttacttatatcactttttttgttgtggtaaaatataacaaaatttgccattttaaccatttttagtgtacaattcagtggcattctgtatactcacattgttgtgcaaccagcaccactatgggtctccggaactcttttatcttaccaaactgaaactttgtgtctatgaaacaataagtcgggattcccttctctcctagtccctgggaaccaccatttctactttctgactatgaatttgactattcctggttcctcatgtcagtggaatcatacagtatttgtctggcttatttcacgtagcataatgtcctcaaggtttctccatgttgtagcatgagtccaaatttcactcatttttaagactgaaaaatatttcgtcgtgtgcatacaccacctcgtttttatccattcatctgtcaatggacttaggttgtttccaccttttggctattgtgaagaatgtcggttaacattggtatacaaatacctgtttgagcccctgctttccatttttgggagttgccatcattttaaagccaaaccaaggagaaagctctcccctcccacctgagggagccgcatttgtttttttaggaagtggggttgagaaggtgtaacagcaccccagactgaccacagcggccacgactgcacacaggggaactttgcctcgctcgacactacagggtgaaagaaacacagaagttgtcaaggaacgtggcccctcttcctctctcatctctccaggtgtcttgtttctttgctttagtccaggggtttcacttgctgaataaactgccttgaaatgtccaagtcataaacttaagagatccaaacctcctttttagcagcagagggcgctcgcatctgttcccttcatgactttgtttcagagtttctgtaagcatggtcgtctggccacttgcatgggaacaacccggggtgtttatttaaaatgcaggctcctggaccccacccccagagactgtgatgcagcacatctgggtggacctgggaatctgcatgtt

SEQ ID NO: 589005 - DNA, 4001 bp, Homo sapiens
gttggggatccactcaacaaaatagctgctgtttttgttttggacattaagcatttgctcatccacctccttcatggacatgcggcccctgaacacggcggcaaccgtcaggtagcggccatggcgggggtcgcaggcagccatcatgttcttggcatcaaacatctgctgggtgagctcgggcacggtcagcgcccggtactgctggctgccccggctggtcagtggggcaaagccgggcatgaagaagtgcagccggggaaacgggaccatgttcacagccagcttccgcaggtcagcattgagctggcctgggaagcgcaggcaggtggtgaccccactcatggtagcagacaccaggtggttcaggtcaccataggtgggcgtggtcagctttagggttctgaagcaaatgtcgtagagagcttcgttatcaatgcagtaggtctcgtctgtgttttctacgagctggtggactgagagggtggcgttgtagggctccaccactgtgtctgacactttgggcgaaggcaccacactaaacgtgttcatgatcctgtctgggtactcctcccggatcttgctgatgaggagggtacccatcccagacccagtccccccacccagggagtgggtcagctggaaaccctgcaggcagtcacagctctcagcctcctttctcacaacatccagcaccgagtccaccagctccgcgccttctgtgtagtgccccttggcccagttgttcccagcaccactctgacctgtgagagaacacagctaatcatttgtcagccaggtagacagcactactggtcaccgccatgcgaaaaaagccgagtgacatggtgtgagctgaccacagaattcaccctggaggtagagcaaacggacccttcaaagccaaaagacggcagcctgccctgctacgaattaagtcaggggccaaacctgacagcttaacaaacccctccccgggggggccactgccaattcccaaggacagaggaacagccactgccccagctcagctccctgcagggagattacgtgtgtggcggctcctcgcctcggcagacagctggaccttgctcccaaagccgatttagtagaggggattgagtggctcagagaagaggagggcgtccaggggccccggctgcgcagttcccacggcggtgcccttggagcagccccttgacctttgagccgccgcccagtccccagccacggctcaccgaaaacgaagttgtccggccggaagatctgcccgaagggccccgagcgcacggagtccatggtgccgggctccagatccacgagcacggcgcggggcacgtacttgccgcctgcggggacgggagggcgtcagccaaggcaggggccgcggggtccccggagggcggtcggggaaggggccggggcctcaccggtggcctcattgtagtacacgttgatgcgttccagctgcaggtcgctgtccccgtggtaggtgcccgtggggtcgatgccgtgctcatcgctgatcacctcccaaaactacaagggacgcgggcgggcccgggcgggccggggctgagtcaccgcggccggtgcgcagggaggcagccccgccccggacgggcgcggcagcccggccctccccgcccctcccccgccccgcgcgccctggccgccgggttcctgggggcttcggtcgcccggctcggccaattccccgcggagggggcccggcggccgcaatgcgggggcgccgcccggccgctgctgccgccatcttccccggccgcccgcccacaccgcccggcaggcccgcctggccccagcgccccggcaacttaccttggcgccgatttggttgccgcactgcccggcctgcaagtgcacgatttccctcatgatggcggcggcggcggcggggaagcaggaggaagtagacaaacagcagcagaagagcgggcgcgcagagtgctacaaccgacgctccgccaacgcttatataccctccctgcccgcctccgctagtctcggaatgggctgccagaacgaggctggcaagctccctcgtttgattggccttgcccccgtcaatcaagctgcctaaggtccgcctttttaagccagtttggtctttattggtcagccgcagcctcctatctccctatcacaatccccctcctggcgccgcagtgctccgtccattgggtgtttcaaatgattgatttgccgtctcattggctggctgccgggagcacgccgccaggctggcgctattggctgcgctgcttcagcgtcctggtaaccgccgcagtgccgcggccggcgcgcggacggggtggggcgcaggcgcgagtgcgggcttccggtcgggcggcgggcagctgcgctgggggcgccgagggagggcgggcccgacgggcctcgggcaagcgcagtcttggctctgagcccggggcctttcgggagccgggaagggcaggctcggtggcggccccacgtccagagttgcgccctctctggccttgcgccgggacacggcatctgcgcgctgggcgggttctggagcggggtccgcacggagcgagcccggggcctccaggccgaggaggctgcgatgccttaaaggcaggaagatacacgggctcgggggctgcggcggtggaggggagctctccacagagccgcagaggccacggagtttcctgctcccgggtgccgcacgcccactgccctcgcggtcgcgtgaggggagcacgtgggggacgccgcgccccgagggccggggcggagggcaggggaggggagcggaggggcgaggcctcccccgcagctgcgcgccctgccctgttgtggagacggcgctggctctgcgccggtcgccttggtgcctcggccccgtgagtgcgcgagctccgtggagaccaggacagcgcccagacctccctcggcgggtgggccccgacctccgggctccagggccggtattccaaccacaggtcagcgcgctggggctgaaacatacttctgttaatgcttttcctaatttatgacttgatttttacttgggtgggaaaagaaacttaaaatgaattacatgtggttgcgcctgtttaaaaacaaacgggctgtatttttgcagcatttttattttacttaatttattattctgagacagagtctcgctctgtctcccgggctggagtgcagtggcgcgatcttggctccccgcccccccccaggttcaagcgattcttctgcctcagcctccccagtaggtgggactgcaggcacccaccaccacgccgctaatttttgtatttttggtagaaatgggatttcaccatgttggccaagctggtctgaaactcctgacctcaagtgatccgcccgcctcggcctccccaagtgctcggatttacgggaatgagccgccgtgccttctacatttttgtagcttttttcttttttttttgagatggagttttgctcttgtcgcctaggctggagtgcagtggcgcaatctcagctcgctgcaacctctgcctccccggttcaagcaattcgcctgcctcaccttcccaagtagctggaactacaggtgtgcaccaccacgcctggctatttttttttttttttttttttgagacagagtctggctccgtcgctcaggctggagtgcagtggcatgatctcggctcactgcaacctccatctcccgggttcaagcgattctcctgcctcagcctcccgagtagctgggattacaggcgcccgccaccacgcccggctaatttctgtatttttaatagagatggggtttcaccatcttggccaggctggtctggaactgaccttgtgattcattcgcctcggcctcccaaagtgctgggattacaggcatgagccactgcacctggctgtatttttgtagcattttaaataaattacaccatcaggtcggccctgacagtctcctgtgctctggccactgggcatctgtc

SEQ ID NO: 589006 - DNA, 4001 bp, Homo sapiens
ttactaaggacaactaaaaccagatttaaattagtatattcataaaggtatctttttaaaaatataaaaatgtaacacacttcaaataatactcgccgcaacctttcagataatttttaatgcaccagatttatttaccatttcaaaagatcacgatataggcagataccttaaaaattctctgggggcaaacaaatcagtatatattagatgtacagggactgcagccaagacaggcatgagttcctaggttataaatatcatctttataaaaagtgggtattttataggacatccaagtaacaccgacttataaaagcaaacactgtacttaaaatgttggccacatatgaaagaatagctgaaggctttaggggattgaagaatggataaactcaaccaactaaaaacacattactcatccctcagaaccaaaatacaggaaaaaaaaaaatacaacaggttcgcacaacatccagaaaagttcagggaatatgaagtgtttcttggcacccagttctcgctgttttaaaatccgtcccttcgttgttggctaggcctctctccagggaaactagccggggcaagaggcaggggaactgtacatgtgggaggtcctgagggcccttgcacccactcgacctccaccaagcggatggccaagcgccacccggaagtgtccactggtgggggcgggaaggcaccgtagtccaaggtatccgcgggcagggagcgggccagggcgtgcgcgaggtcgggggtagctgggaacggaggaggaggggcccgctcgaggctccgcctctcaccggctgcggcctcggctacagccagggcccagagggctccgagtcccgggagcggaggccggagtcgggttcctgtagaggctgctcctccttgtccccgctcggacgtggtccccgctgctcgaggtgcagctgcagcagggcccggcggtacatggcttccagcttctcaagtcgggccctcagggccctggggctgcccggctcgtcctctcggccgctgtctctagccctccggttcgtgctggcctcttcagggacccggcgtgcctccgcgggcgtcccgttgccgccttcgccggggagccgcaaagcctgacggaagaggctgcggttctcgcgcttcagccgccggttctcgagccgcagccgggcgttctcctgacgcagccgcgcgttctgccggtcccactcgtcccgcgcacggatggcctccaagtggctcgccgccaggtcggcaaaccgctcctccagctgctgtcgggcgccgtccgcgcggcctcgccagcccacgccgccgccgccgccgctggggctgcccccaccacgagcccggccggagcggcctggccctcggccgtccgcagcaccgtccccgccgcagcaactcccgcgcctagtggcgccaccacgcatgcgccacatcggtcccatcccaaccgcgccgccagccccgtgggctgaggggccgcgcggccaggcgcgggcaagttcggggctggcagggcggccggggtgacgacggaggaggagaggaggtcgcgggcggcggctgctggcttagagccaaaggaggccgggaatttgcccagactgaggcgtgtcctgtctcctgtggtggagctgccccctgggcctgctctctccaggctgcgctgacacacagttcccccggggagtgctttgctgttcagccctccggctgcgcgggaaaaagcgtgtatcctcagctgagttgtgccagggcgcttccgtgcaggcctgggcactgcaggaactagccgtcctcgcccgctccggagtgcaaccaccagtggttactttgctctttacacggcattctcaaaactaatgataatagaatgatcggttctgagacaaagctatggggcaagttgaaaagctctaagtgcttcatttaaaacccagtggtttaacccacccctatgtttaataaaacattaaacagaattgggctgagtacctgtcatggggtttcccggtggaaacacctggctctccaaagaatgcagtcaattcccaatttgtgaacagccaggaattcactctgtaaattgttcagaacgctatagaaactaggtcatacttagttgatttgttcaggccaacccccaaaagctatgaaacaagaagtgctctgtttattgaagaaactgaatacttagttccaaagtttctgggatcaaggatgtacatctcattgaatgaatcattccttcttgtagggtctcaacctacatagtaactggatgattgcaaagtaatttaaggattaggtactgacgccagaatctcttaagcaagtatgccctagcaagaatctacatgtctaacagggtcccagagaattctcaggataaccaaaatttccaaaccactggagcaagtaacgaacaagaaaaacatataagtacatacatggggtcttcattgacaagtacaaataaggggaaaatatttgctcaatttttttgtacttttattttgttaggcaagatcttaagagaccacaacaccaaatgtgttctcaattatctcattttatcacatgaaagatataattttggaatttcaaaaaatataaatttagttttaagaaggaccacattccaggccgggcgtggtggctcacgcctgtaatcctagcactttgggaggccgaggcgggaggatcacaaggtcaggagatcaagaccatcctggctaacacaatgaaaccccgtctctactaaaaatacaaaaattagccgggcgtggtggcacgggcctgtagtctcagctactcgggaggctgaggcaggagaatcacttgaacccgggaggcagagtttgcagtgagctgagattgcgtcattgcactccagcctgggcgacagagcaaggctccttttcaaaaaaaaaaaaaaaaaaaaaaaggagcatatcattcttgagatgggagtttcgctcttgttgcctaggctggagtgcaatggcgccatctctgctcactgccaccaccaccttccgggttcaagagactcaagaaggactgtatcattcttaatttacattaaggttgaggctgcaagactgctgtgagctatgatcacaccattgtactccatcctgggcgacaaaaggagacctatctcaaaaaataaggaagggggaagggatgaagagagggagaaagggaagtttggaagaaaaggaaagaaaaaaatgtggaaaaaatcgatccaacaaaaaggtattaagactcataaagactgtcttatgtagcagtgaacatttgtcttatgatttgttaatggagagtccaccaatctttcaaatacgacatagagacaatgtcatttctaagttgaaagtggagttgagacaacagagtgattaaaatgattagtactaaaagtatatacttgtatttattttaatttacctagaataatatgtcaagaatcatatactcgaagatgaaaattacagcttttctgaggatggtagcacaaagagtaaaaatgcttctccacactgtagtttgttaatggtctacatataaaaatattactgggcaaataatatgtacctatatatgaaaataaaatggaaaaaatttggaaaatatacggaactgatcaaatttaaaagaaatgcaagactacaataatacttaaaacatatagaataagtatataagtgcttgattagaaaaataaaaggtagatagatacctgtgctgctttttaagactgggggcttctgaacagtaaaattgcttgcttgctaaatagaagaaagtcttaaaggacataggtcactcttttctgacaactggttcatcattgttccttaagctactcttgctcaagaaaaagaattctgctataaaaagaattctgtttaaacagttttaaaactaaaaagaaaaggactacttgcactttgcatttaggaaactctaagacc

SEQ ID NO: 589007 - DNA, 4001 bp, Homo sapiens
ctttttttaaagttcctgtcacccttgtacacctttgtcactggtagaggaggaaggtgctctgacatgctctgacaactgggaggactaaactgtgtgctccagaaatcctaatcaactttgtttgtagtgtctggattttgggacaactaacatagaccactcaaaggtcttctggctcagtggagggggttcttagcagttgggttatactgaggttgccagaccctggagaacagaatcccagccccactcccttccccaggaatggattaataatttgtcacacaataggtgcttggaaaaaaagtatatgaaagacaattcactactaaggatcttttcaacacatgagggctgctaaaatgagaatcccactaagaaaaaactgattgagaggaagataaaagatgacagtggcaatcaacatatgaggaaaaaacactgagagtcaataataatcaaaggaacaaaaggatcggggacacattgcagacacacttctgtttccgaagcccacccggcaccaaacaggtcagggcacccgaggcgggcgaggacccgccctcctctgcttcccgcaggtagggaggggtaatcgcagggtaggcgctggcgaggggtcttctaccgttcgagcagtatcaatttcctccactcacttttctgacgctgcatttaacaaatatttctggagtggctacattggactagacactgcgcgttaggctctgggtttcccagtctacaaggttttaggcttgcaataactttcaaacatgggaaggctgtttcgccttgggcatttttaagaggacaaaacaacgatcgggataccgataggtcggcgagcaggcagcagggcgcggctgctcccaggaggaaccctggctccagcaaaacccaccgactgagggtgaatcatggacgggcagggcagccgaggcccccgggcccaaccttggggactcagtcattccaaagccactgctgccggaaacgcgccctgcgccacaggagtcccgtgggcgcggcccggacctcacttcctcgcggtcacctggggccctcgggcctcctggacagacctgcacgtgccagggggtctccagccgcaatccgcccccttagtgcggatacagcacgcgtcacctttggggtcgggcatgggtggaggcaggcgggggtctccggcctagacccgctcccaaagggagatcactacccccgctgcgggtggatcacttcacatacggaaaggcagcggcggccaccgacccgtgccttctgcaagggccctccctatccttgcctggggcctgaatctggatacagatggggggccaagggcggaccccttccattccctcatcttcctccagtcggggctgcccggacgggagggtgcaggaggcgcagcgtggggactcctcacgctgtctgcgctctcacatcccccggacgctccccgcgtgcgtgcaatcccccgaggaacagggtgcgagaaacgctgggcaccgccactccgccctccaggggaccctcgtccttctcctcccttcctccagggcaggctccaccgcctcgggcgcgcccaggccgctgcttcccgcagtcccaggccgagacgccgcgtccctttcccctggcgatgcggaggggcggcctccgcacctcccgccaccgccttccccacctcccgccaccgccttccccagttacagaggccgcgcgcggcgccggcaccctggccttccccggtagcgcgtaccttgctctcgatctgcttcaccatcttggctgctggagtctgacgagcggctgtaaggaccgatggaaatggatccaaagcaccaaacagagcttcaagactcgctgcttgctctctccctttataaactggcacgcccggcgtgcgtgtggcgggggcgcgcgcgcccggccggacctccgcgcccgtcgctgcgccccggccacgccccgcccctggagcctgcgagccgggatcggggcggggctggcgcaagcgtggggcggagctccagggcttcggctcctgtaaccccaagcccagctcgcactccagctggaagtggggatcagcactgcgcgtgacggtgggaggcggggagacggacagtcacccccagagacacaaggtccctcccgggtcacctggggatgcgtccgccgggcctgaatcgaacacgcccacgctcgagatggggaccgcccaggcagggctggattcctcgaaaagggccgccacgccccggcccccccagccacgtgaaccccacaaagtgctgagtaacggtgaccgggaagtatctcggtgtgtacgtccttgcctcctctccggaatttaccgtgaccgttctcttctctgtaacctccttctgttctttcattttcactgctgagcccgctgctccagcttgacacagcggtttagtgcggtagaaacgaccgggggactggttgggctcttgaccatcagacagctgcgtgtgagatggaagtgccactgggttgagctctgcaacttagttacgcagttgtgaccctggaaaggtcctgacctcctgaagtctcagtgtttccttctgtagaacgggaatcatgatggtctcaatctcacggtggtggtattttgagggttaatagtgcttgcaaaggacggtgcttggcacatagtaaacactccatagatagttcttactgttcggtgtcttgcagggactgattgggcctggccaccttatacagcatttacaatggcacagcacgcacacttgtgtgagattcttctaacagaggcagactcctggaacagaagtcggagtttgcattgatccaggaatgcctgttgcaggttatgtctggcagggctggggattgtggaaggtgggtatgttagctggccttgtggagccaggagggcctgtcagcggctggaagtggaggttgaaaagctgctcacaggaacgagagctagaaggctgggagggagagtcccaggtctgtgttttcagagctgagctgttcccgatgaagctgcaactaggtgtgattgcctaggggtggtgatactgctgcctggctgccccctgaaatccctggcttccttctttcactctttcagacagaggaagggaggaaaccagaggttttgaatctattgtgcaaagtttctagggggctgaggagcacggagcatgaatatggatataggcaagggacacattctaaagacagcccatagggagggaagacagactgccctgaatgcagcaatgttcccaaagagagggaggttattggggcagagaggaaggagctgtatggagcacccagagcagaatctataacctgcttttctgctgctgggttttcagttcagctgcatcccagcttcctgacttttatctgtttgttggtgaatttgcatgggtgataacaacaaatcattgagttccaggaaggggcaatgcaggccatcctcagctgacttctctccaaagaccttccaaatgtccagtgactcagtgaaggaggtactccctctctcccacctccacagcaccaatgcagagtagatgtggaggatggtacagttataaggaactgggaggccagtctggactctgcaatttgactccgttgtcctcatccctactctaccacttcatgactgggtaactctaggcaagtctaaatagcctttttgtgcctcagtttccttatgtgagaagtgggcgtaataatagcttgtgctattataagggttgagtgaactaaaatatatgtaaaatgcttagaaccgtgcctggtgtgtagtgaatgctacatgaactatgattataggctattaaatgaatgatgagatccatctggaatgatggcagagctagggtggaaggagagattataaaacaggtgtcagtcttaaatgaattaagtaatgaagacagtagtaatgaacagtgagctccgtaaca

SEQ ID NO: 589008 - DNA, 4001 bp, Homo sapiens
tggctgagtccccacccaaatctcatcttgaattgtagctcccataatccccacatgtcatgggagagacctagtgggaggtaaatgaattatgggggtgggtttttcccatgctgttctcatgacagtgagtcagtctaaaaatatctgacggttttataaagggcagttcccctgcacacgctgtcttgcctgccgccatgtcagacatgcctttgcccctccttcgccttcaccatgattgtgaggtcttcccagccatgtggaaccgtgagttcattagatctttttttctttataaattaccaagtattgggcatttcttcatagcagtatgcaaatagactaatacaacatgcctgctctataatagccttgacaattatgtggctactttgtttagtttcaatcaggtgaaagtgatgactcaaagaagatgcactctctttctttatcaatattcctctgggagggagtaactaacttttcagagaaccttgccaagcctttatttctcacttgcttctgaagttgtaaggtagatgctatcctcacaaactcccaacactcttcactttccagtagttgttgtttgggtgtgagctggcctaattggacccatgaacttgacttgactaaactatctgaagggaatactctcatagtataggtatttatttaacatatgcgtattgaggcctatactatgccagctactgcacaaactgctaggataccactgtggacaaaaacaaaacaaaacaaaacaaaaactaggcattctgtctccatggagtttacattttagaatgggaagcttactataaggtcaataggtaatatttgtagtatattagtgctaattgctaataaagaaaataaaaagaaaatgaagtaggaaggaagaatgggggttggattacaactgtagtctggatggccaaggtcaacctcaaagagaaggtggcatctgaataaagatgggatggagatcagggcctctggaaaggtccctggggaggagatgaaaggtcttctgagggaataaggctccaggctattctgtgacatccccagaatattaaaacaataagtgtcaaaagcattagcaaatgtgtgatgtttcaaaacatgttcttatgtcgaagttacagggcagtactctctttcaatctggtcagtgtcatttttgtgatctgtatagccacctttggggaaaatgtcacaagtctaaatctgaggctgctggtggacatgaggctcaggccccaaaccccctcccctcctccagctcttgacttcttgtaatgagggcaggcatcagaaggtctgggttctaatgcccacaccacctcttaaacgaactagccctgaacctctcttttagaggcaattttctcctttataaatcaagaattatctctgtcctatacatgaatttagatttgttgtgacagcaacattgggctgttcccaattttcccaccccattccacatctggggtttctattatttttccttggataagagaaaagatgtggacttccttacttccatggaattttccaagcacaactgaggtacgatccatgggatcagatacaggatgggatgtactaggagctggtctgggattcacctgaagtcaggcaggaaataaaagtccaggaggaagaaagcccttctttatcaatttgacccttggctgcttttcttgatagtaccatccctcaaggaacaagataaagaacaagaatttagaactctccccttgctacaatgcaatgatagaatactggatagagagaacacattcttaaagtttttcaaatctgttcccaagatgtccacatttgaaatactcagtgaagccaaataaatacttgccgtgtctttaataatctgtaccatgattacaccagggaagtgctgatgaaaatcccctgttggtttagttggatcactgtagctgtctcctatttattacagtatcctgcctggaatacatggataacttctctatgacatcattaaacatgtcatctcagaacctggaactttggcagactttggatcctatttcacttttatgccatgactagttcatttgtggacagccaagaatcagaaaactgagggctttatatgcagaatcagtaatgtgtttgctttattttcatcttttataacctatttctaaatatccttctcccttctctaatccctccatcccatcaccaaatgagaagtaagcagagtaatattaaatagatgagattttcacttaagaatttgaagattttgctgttgagaaaaatactaaagtcttaaccctataataatgagtttcctgtaagtttgatttcatgagtcataaattccctgaactttgttattttgctctaattatttagagagtaaagaaatgtcacttttatgctctagatcaagggttggcaaatgttttctctaagggaacagatactattttagttttatgggcctcatacagtctttgttgcatgttccttatgtttttgcaacctttaaaaaatgtaaaaaccattcgcagctagtaggatgtacaaagaacagcagcagtttgctgacccctgcacttgatgatttgccattttcagaactgatgtcagaaaaattctgaacatgaccatggccaatgttcttcaaatctacagagcaacaagaacaaccaaaatgagaaatagtagattctataataaaacaaaaatagcaaaatccttctttctgtttttctatatatgcagctctgggccttcaatcatgtgttgcatgaaaactgtcagatggagacagtggctgcctctgtagaggtatttgaagtatgcatgtaacaaaatatcacatgtaccccataaatacgtagaagtattatgtattgatatggtttggctgtgtccccactcaaatctcatcttgaattgtagctcccataattcccaagggttgtgggagggaccggtgggagataattgaataatgggggcagttcttccatactgttctcatggtagtgaatacatctcatgagatctgatggttttataagacgtttccccatttgcttggctctcattctctcttgcctgctgccatgtaagacgtgactttcaccttctgccagaattgtgaggcctccccagccacatggaactgtgaatctattaaacctctttttctttataaattacctagacttgggtatgtctttatcagcaacgtgaaaagagactaatacacgtattaacaaaaaaattttttttattatagtttaagttttagggtacatgtgcacaatgtgcaggttagttacaaatgtatacatgtgccatgttggtgtgctgcacccagtaactcgtcatttaacattaggtatatctccaaatgctatccctcctccctccccccaccccacaacaggccccggtgtgtgatgttccccttcctgtgtccatgtgttctcattgttcaattcccacctatgagtgagaacatgcggtgtttggttttttgtcctcgtgatagtttgctgagaatgatgctttccagcttcatccatgtccctacaaaggacatgaactcatccttttttatggctgcatagtatttcatggtgtatatgtgccacattttcttaatccagtctatcattgttggacatttgggttggttccaagtctttgctattgtgaatagtgccgcaataaacatacatgtgcatgtgtctttatagcagcatgatttataatcctttgggtatatacccagtaatgggattgctgggtcaaatggtatttctagttctagatccctgaggaatcgccacactgacttccacaatggttgaactagtttacagtcccaccaacagcccaaaagtgttcctatttctccacatcctctccagcacctgttgtctcctgactttttaatgatcgccgttctaactggtgtgagatgg

SEQ ID NO: 589009 - DNA, 4001 bp, Homo sapiens
acacttttaaaaatatccttaactaaaaccctttcttcaagcctgctttctctctctttcttcccttttctctctccaatttactgcatgatttatattacctttctttaatcttacctatggattttatgtttctgtgaccttgtcatgttgatttctgcccactgttggcatttttgttggaattttctgtctttttaacattataaatctttgaaaattaggtgatataacatagtagttaagaccagagaattattctatgactttgggcacatttttccaagtcttagtttttttttaatcattaaaatgtggataaaaataatacttgctttacagaattgaaagttcaaagaccacacacataaaaagcaattagcccaaggcctaactcatagtaaggactcaatacatgttcatttaaacccttagtctactatctcgcacatagaacacaatcaaatattgttggctgttactgtttagtgctttgttatttaatgctatttagtctgcaggccaaactcttcatctcaaatgctgaatttgatcatcatggtgggaaacttctttaagggtcagcaggggtagttgcagaactaaaatataagggctaggtagatctcagcatgaattccaggtttactaaatatcacctgtgtggatttgaactttctgaacctcatctatgacaattaacatgtttacctgaaggagttactgaattgactagtcataatacctaacacagttcctaggatatagtggttgctcaataaatgtttcagaataaaatattgatcagaagttctgagcttcaactccaaccctttacattaaacaagtttcttaacctttctaagcctcagtttcctcaactatgaaaagagagggttgagctatatgatttccaggtattcctccagctcaaatgatttaagattttattaagagccttgagtctcatgcaggacttatgaactcattcatatctccacttacctatgagaaccctctggtcacaggcagctcctctccagccaggacggcacgtcccacagttgtgtcctgagaaattgccgttgcagtgacatgtcctattgaagaagcgcaagggccagacctcccgatcatctctgccatcatggggatactgagggctgtggggccgggagtctgcagtcactgcctcacatctgcccctccctgatgatgagccacagcggtctgtcccaggcccagacacaggggacaggtctgggcaacacataccacttctcaaagcctcaacagtggcacactgtcttgggaattgagcccgggcctgctgaaaaagtagcaaggggaagaagatacagcccagagagaggagtttaggagcactcattctgcttgaaataagagtgcaaaacaaagacctggtttgcagctctttgtgtagagaagactgaagcacgtagaggaaaatccagctgaaaaagagaaagtaaaatgagattatgcaagtttttcttggtacttaaaatggtatgcccccttcccaaaccactttcaaaatggaacccatatgtaaaatgacatttcacacaaataataaaagtgtgacatttcacacaaattttacctttaaaatttggcatatataacacctgcatgtgtgatacccaaataattaaattccctgtcctcgtcattttgtttatatatatatacatactagatatcagttatcaaaagcatgaattagcaggtcaccatcattaattacatttaatttaaccttggagctgaaggaagaattgggaacagatttccagcaagttaatttctgtgatttaaagtcccttacactaatggagttttggcacgtgtccacccactccccataggacttctttccagtacctcacaatcctgaaggatgtctctgatgaacttctcttagaattgaatgttttatatttgcttgtgtttcttgtcctctcacgtcagaactgttaagtgcatgtggattgctgcctgataattaatcccaaatctgctcacccaaactaggcggggggctggtctttttttccaccctttactaatccttttcacttcagtgaatatttctgccctttaaggacttgatcagcacatgattcccttccaactgatttccttgtgatgcttaaagttttaagaaaaggccagaagcactaatttggaatacaagtcagataaactagtgagatttgtttactttgcagagatttttttttattctgttattcaactgttattcaacatattaccttgctagagcaaccaggcaagagaaggtataaagagcatccaaattggaaatgaagaagtcaaattatccttgtttgctgatgataagatcttatatttgaataaaacctaaagactcctctaaaaaactattagagctgacaaacaaattcagtaaagttgcaggatacaaaatcagcataccaaaatcagcaaagtttccatataccaacagtgaaaaatgtgaaaaagaaataaaaaagtaatcccatttacaatagccacacataaaattaaatacctaggaattaaccaatgaatgaaaggtctctataatgataactacaaaacattgatgaaagaaattgaagaagacaccaaataatggaaaaatattatatgttcatggattgggagaatcaagattgttaaaaagtccgtattacctaaagcaatctacagattcaatgcaattcctatcaaaataccaaagacattcttcacagaaacagaaagaaaatcctaaaatttatatggaacaccaaaccttgaagaggcaaagttatcctaagcaaaaataacaaaactggaggaatcatattactttacttcaaattatactacggagtgatagtagcaaaaacagcatggtactggcctaaaaacagacacatagagcaatggaacaggagaacccaaaaacaaaatcacacacctacagtaaagacatttttcaccaagataccaagaacatacactggggaaaagacagtctttttaataaatggtgctggcaaactacatacccatatgcaaaagaatgaaactaggtccctatctcgttccatatacaaaaatcaaataaaaaatgatttgattaaatatttaaatctgagacctcaaactatgaaactacaatgaagaaacattgaggaaaatcttgaggacattggtcttgacaaagatttcttgagcaataccacacaagcacaggtagccaaagcaaaaatgaacaaatgggatcacatctagttaaaaatcttctgcacagcaaagagtacaatcaatgaagtgaagagacaacccacagaatgggataagatatttgtaaactacccatttgacaagggattaatatccagaatatatgagaagctcaaaaaattctatagaaaaaaattaataatccaataaaaaaatgggcaaaatatttgagcagacatttatcaaaagaagacatacaaatggcaaacagacttatgaaaagatactcaacattattgatcattagagaagtacaaatcaaaactattgtgagataccctcttaccccaattaaaatggcttatgtccaaaattcaggcaataagaaatgttgacaaggatgtggagaaaaggaaaccctcatacagcgttggtagtaatgtaaattagtacaaccactatggagcaaagtttggagtttcctcaaaaaactaaaaattgagctactatatgatccagcaatcccactgctagatatatacccaaaagaaaggaaatcaatatattgaagagatatctgcactcctatgtttattgcagcactgtttacaaagctaaaatttggaagcaacctaagtgttcatcaatagatgaatggattaagaaaatatggtacatatgcaaaatgcagtaaaacaatgagatccagtcatttgcaccaacatggatggaactag

SEQ ID NO: 589010 - DNA, 4001 bp, Homo sapiens
gtcaacgcaggcggctctggccggcaatccgcagccacctgctgccgcacacctggtgaccgccttaaggaagcctcgggtgaagaagtggttgcagatgttgcctgcattgtacagcaggctcccgtcggaggcacgtagctgtgcggtctcaggactgatctcgctgtactccaccacctgggggacaccgtccacctggcacaccacgcccacgggctcctcggggtatgccttttccaccacctgcagccaagaccagggatgggttccgagggctgggcggaggggcggggctccgtgaggggcggggccagcctcgggtgcggggcgccgcgcagtcgggcgctaaccttggcgccacagtctgcgccctgcaacacacagaagccgatgaagacagggtccgccagccgcaccaggatgttgtccacacagtacacgtgcacaaactccactccccggcgctccatgtcctccaggatcttgtggtcctccagcgcgcagtagaggcccccgttgccgtctgcagacggagaagggaatgggcatcgcgagggctcccgccagggatcgctctgggagtctaggacgtgctggaggcgggggaagccccggccttgtgcctaaggcagccctggtcactaaccagacagcccagttggtgtaccatgtgacaaatgacgatcaaggcccagaaaaagaggcgcctaacccaggaccacacagcctcggggcagccgcgaacccgggcgcgtggacccccaactacgctcccagttctagtctgggcggtccctccccgtctcaggaacgggccacacctggggccatggcaactttgtctttccgctccaggataaccttgccatcaaaggtcacagcaggcagcaggcgctgctcaaacatgaccacgttggcggggtccaggtggaagaagttgtgctccctgaagaactcggccgtgggccccagagtgaactcgctggtcatgacgtacctgcaagggaggcgcggtgagccggccgcgagtacgcctggccctgcaggcagacggggctcggaccagagccggcatcggggttcggggtccagtgtccagttggggctggggccaggccccattttgggccggttctgggcaatgtcccggtctgtgccggggttggggctcgcgtctggagcggggatgtgggggggcgtggggaagggtacctccgggccgaggtagggcaggcaggacacaccaggggacggtgcagcgggtcccgtggcgctcaccggccagctgctccacccgccgaatccgctccgcctgcagctggtacagggtcttccggctgggcagccccacacggtacatacccttggggtaggtcacgcccaggcgagtgccctgccccccagccagcagcaggacggccaccttgttcagagaaatctgacggaaacctgggggtacgggcgccgtgaagggacgcccgggacccgcccacccttccgctttaggggaaaccaactctggggctggggcgccaggactcgggggccggaacgcgtgaggcgagacacgtctcaaagtagcgaggagaactacagttccccgagcgcggcctcggttcccacccgctccgtgggcacgaccccctgccggcccccagggcctcccaccccgcttaccttcctcctcccagcgccgccgtgtctcggggtcgctgcggctggccctgcccacgcgctctgggggcaggggccgcaggcgcgcggccaagtcgggcggcgggccgtgggggcgcgcgcaggcctccgccgcccgccggcagtgctcgcgcagcgcctcgggctccagcagcgccagctccgccagcagcgcggctcgtggctccggcgccagctcggcccagaagcgcaggaggtgctcctggccagcgcgctgcagccgggcgcgcacgtcctgctccgaagccatgtcgccgctgccgtctgtcaagtcggcactcgtgacccgcgccactgaccagcgtcacgagaccgggcgggcggtgtagaccccccagtggggcgggccccgggcgccccgccccgccccgccccgccccgccccatcccgcccggtcccgcgccctgccctggagcccgcccacccccgctgcgcaccccagactctgtccgggttctctctgaccccgccctgtctacatccccccagcccccccgcgtccggtccgagactcgagacagggcccagccccatctctccagcctgtcccccgtccctctccgtcccctggacccgctccggtgtctggccctggcctgctccctcgagctcccgtccccgttcctgctcttctccaggccccgggcccatgcccgccctgtccactccgcgccccgccccgagagatcccaggaccctctgggtcgcgccagctggcgtgggcagaggaatcgaccattgagctaagggaggaagaggccccagggacgccccgcaggggaaagctaggttctgtcccagcacgggctttgaacctgagagtggcatggccacctttgcgctaaccaagacttggacggagacctcctggtgcagagacaaccggccagagtgcattgaagaggcctgggctacggctgagctgttgggaggctggaaccagaccaggttccgggatgccatcccgcggcttggggctccctcccgcacacccttcctgcttcccattgcctggtgaccagagcgctctgcagcccctcgcccacattgttattttactatcaggttttaaaatatcttgcttgtggtcggcgcggtggctcaagcctgtaatcccagcactttgggagtcctaagtggggtcaggaattcgagaccagcctggccaacatggtgaaaccccgtctctaataaaaatagaaaaattagccgggtgtggtggcaggcgcctgtagtcccagctactcgggaggctgaggcaggaggccttgaactcaggaggcggaggtttcagtgagccgagatcctgctgctgcactccagcctgggagacagagtgagacttctcaataaaaataaaaataaaatagtttgcttgtgaaaaatatgaaagggtagcttctgccagttgggcacaaaactttctcctagaaactatatagtaagtctaaaagtaatatatgtgactgcataaaagaattcaaatggtggccaggtgcagtggctcatgcctgtaatcctaacaccttgggataccgagacaggatgatcgcttgagcccaggagttcaagaccagcttgggcaacatggtgaaaccccgtctccactaaaaatacaaaaatcagccaggtgtggtggcgtgtacctgtagtcccagctacttgggaggatgaggcacgagaatcacttgaacccgggaggcggaggttacagtgagccaagatcgcaccactgcactccagcctgggtgacagagcgaaactctgtctcaaaaaaaaaaaaaaaaaaaaaaccgggcgcagtggctcacttctgtaatcccagcactttgggaggccaaggcgggcggatcacctgaggtctggggtttgagaccagcctgactaacatggagaaaccctgtctctactaaaaatagatacaaatattaaatataaatataaatatataagcatggtgttgcatgcttataatcccagctactccagaggctgaggcaggagaatcgcttgaacctgggaggcggaggttgccatgagccaagatcgcgccattgcactccagcctgggcaacaagggcgaagctctgtctcaaaaaacaaacaaacaaaccgaaaaagaaaaacaaatcatgctgttacaggaaagaggttccagacctcaagagagggttcttggatcttgcgcaagaaagaattcagggcaagcccatacagtaaagcaaaagcaagttatcaggaaagtaaaggaataaagaatggtttctctacagacagagca

SEQ ID NO: 589011 - DNA, 4001 bp, Homo sapiens
tttttttttttttgagacggagtcttgctctgtcgccaggctggagtgcagtggcgcgatctcatctcactgcaacctccgcctcccgggttcaagcgattaccctgcctcagcctcccaagtagctgggattacaggcacacaccaccacgccccgctaattttttgtattttagttgagacggggtttcaccatgttggccaagatggcctcaatctcctgacctcataatccgcccacctcggcctcccaaagtgctgggattacaagtgtgagttaccgtgcccggcccagagaagttttttaaaatacacacaactagacaagcaacaccacctggctcaaacagcctggatgcccacggagttaccggcgctggagcttagtgatgccccgatggttgttcagacggcaaaatcatgcagactggggcagaagaaaagcaagaaagcagccaaaacataccggcccttgaacgcaggaggctcagccccctccttggtgtgaatcctgaggccagcacctcccagttattcacagccagtgcgttccagaagggggcttgccaagcttgcctctgacagttccagaactccacagaaccatgctcacaaaagcaactcgaaagtactgtatgcgagcagctactatggtaagaactgaagtttatccttagagaccacactcagctcaagtgtaacgcactcaacctgtcaacacagatacgtcgtaacttatcacatggagtcgccactagaaaattgcagcctccttcaacctaaattctgccaagccctcagatcatgtcaggtatagacaggaggtcagtctgacacacagacaggcttcttagctgaccttactgagtcctttagagactcgagaactagttccaaaaatcagcaacctaaggaactaaatacacaggagtatttcaggtgaataaactttaaaaagtgtctccgcgaggagaccctactcctgggacttctctcttgaccaattttacctctgcagaaaagcaggggcgcagggccttgtcccgcagcggcactatttcagggactccagctaaaaggcacagtggcctggggccagccaggaaaagagctccaagcagccggctctgcgggaaaggggaagaggaaggagaaggggcctcttcatgaaggagcctacgttaattctcagctctcaaagatgctgctgaaaaaaaacctcaccccaacagcaaaaaggtacaactgccggaaagtcccgaggccctgctccgtcggcgacttcactctccaggcctcagtttcccgatctgcccctacctccctgcgtggctgcagagttaactgagaggctggcgtgtacagggctcggccgggcggctggcacggggcgagcgcttagtgaccggagtccgccggccgaaaggccaggcccgggacgagcgtccagaggtgtgggatccgaaagggggagagtcgggcaaacgggcaggaggcgctgcctccacccccggaggagagggcctgggagctgcggactgggcggcggaccccaggtcggggcggttcggggactgaggcggggtccgcagtcggaggggtccggagcgggtgttgggggcaggggagggggcccggccttacgtgcttgaggcagcgctccttgagcttctccaccgaggtgtcctcggtggcctcctccagccactcggcgccgtcggacgcgcagatgtgcagccgcagcaccttgcccgcgaagatcttctcctcctgcacgaacatcccgccgccgccgcaggggcctgcgcccgccacccgggcccctgaaggtcaccgggaaggcgggcggggagggggcggggccagaccgcccgcgcgctccttcgctgggccgccgccccgccccggctcccgtcggccgggccgccgtcactctccgcggcctcagcggtcgcctcgctcccgccgccgcagcagccgccgggggcgcgccgtcgcggccgcaccggaagtgcgtcacgggcgcgtctggcgcatgccgggagatgtggttctcggacaggcgcctcgctcccgccgccgggggcgcgctgtggccaccgcaaaggaagtgcgtcacggggcgcgcccggagcatgccgggagctgtagttctctggtagcttcgttcctccccgagctgcaggcggttcccacccggggcactcaccacgtgggacctcatgggttctaaaggtaaaatacacgctggatcccaaagaagtaacgggaaaaaggaatgtaaggcatctcgataatgttttcatattgattacatgttgaaataatattttgtatctattgagttaagaaaaatatgtcattaaaattaatttcacctgtttcttttaacctttttaagatagaattttaaattgcctacatggctgctgtgatatttcttttgcactgcactgctgtagaacggaggctctccaaagaacttggctttaacaagcctaggtctttctaattcacacgcagatcagagagtcactgttcctgcgaagcctaggtttgcggggcacccagaggggagggaagccgcccttggtgcaggtgatgccaggcagactcattttctgtggggtgtgacaaagagtctttgcttggccaaacttaagcaggctcctgaaccttctacatcatctgtacacttccttgtaaaatccagttttagcgaagagccttgataagtgagtttagcaagaactcccagcctcaatatcagatcaccctggacgtctggtcaggttcctcgtcccccaggtgctgtctgatatctccagcctctcttcagcaagaaccctgtcaggtcggtttagccagaaccgcccacatccctgatgttttctcctattaattttccattcactgaccccacccacttgcccttgctgtattgggagttgagcctgacctctctccccactgcaagcccccttggcagtggtctctgtacctagctcaacagtcctggataacgtcttacttaccatgctcctaaatatgaattttgtagttcaggttagacctgacacattgactgatctgtactcattcatcccattcatttaaaaaaactttactgcgcagagatgaataaggcacagttcccgttctcagaggttagcaatctaaccggggaggctgtctctgcctcctgcctgcaggcttttattctgtccacaccattttgcacacacatcctcatttttctcctgtgataattccaacctcgtccagattccatgtgtccagttcagcacttactaattgcctctcacaggtgggagcctctgctactcaatgaaaatatggtagtgattaagaccagacaccaggatacagtcctggaatggggcatttttaacgcaggaagcagaagtaccgactgttagagaccgcagtggaggtggtggtagtatcgtggaagctggtggaggagaaaggggaggaacaccaaggtggtgagtggagagtgggggaagctagagggcttggaggagccgggtcagagcattaagacgttgctgtgagagccactaacggtgtgaccaggtggcagaatgaatggtggtgactgtggaggggacagggaagagggcagggcatccttgcgggggagcaatgcggagggagaggaagaggagaagggggcttccagtggcctgtgggaggggaggccagcaggattggagggtgtgggcccaagagtgaaatcaaggatgacttgaagacttccagtgtgggtggcagagtgcagggcagtgccaccttttgaagtaggaggcaggaggaggagccattggccaggaaggtgttgggtagttttggacacggggacctggatgtgctgggggcattcacacggaggtggcctggaggcagctggacctacaggactgaagttgaggagagaggcctgggctggagacaaacactgggcagccggcctgggc

SEQ ID NO: 589012 - DNA, 4001 bp, Homo sapiens
aaaccccgtctctactaaaatacaaaaattagccagccgtagtggtgggtgtctataatctcagctactcgggaggctgaggcaggacagtcacttgaacccaggaggcggaggttgcagcaagccaagatcgcgccactgcactccagcctgggcaacagaccgagactccctctggaaaaaaataaaaagaaacaaaaaaaaaaaaaagttttttttccaatgaggttctagcaggttagtaaagttatctgctgtgcaatgacagcgatggtcactcactaaagaaacattaagtttagcatttctgtaattataatgactcttattattgcaacacacagtagctatttaataaacaccatgaattaatagaactagaaacaaaaatttaataaaatttcacttatagtaagttaatgcggacaatgtaattcttttaagacttgacacatttcacattctttgccataatacgtaaactttttttttttttttgagtcggagtctcgctctgttgcccaggctggagtgcaatgcagcgatctaggctcactgctacctccgcctcccaggttcaagccattctcctgcctcggccacccgagtagctgggattacaggcgcctgccaccacgcccggctggctttttagtagagaaagggtttcaacatgttggtcaggctggtcttgaactcttgacctcgtgatccgcccgcctcggcctcccaaagtgctgggatttcagacgtgagccacagcgcccggccaatacggaaacttttagtttaggttgggacattaactagaaagaactatatatcactaaagactaagtatcttgtttttcccaccatcaaatctgacaaaattaaaaaggaaaacatccatcatatctattcaaattctcaaatgctaataactgaagagacaaagcactaacgagtaaagttagaacagaatatacgtaatacttaactaaattaccaaatctggtttcgcaacactgcatggtgactaaaagtaacaatttttttttcagtttaacataaaacgtatttttatgcccaaccatacttttaagacgctagtctggaaacaattacatttggcaacaaaggtcaaagatcactgatatagctcaaataaatgaacctgacgttccacaagaaagactggggcggttcctgaggcccaggtggactgtataggtaagcctccacccaagaaacaaaaaaggcggataaacatacctggagaagaccagacaaggccaaagatatccccaaagatcactcacctctggtctagtctccaccttttctccccaatctcattgcctcagggagaactaaatctacaccgcacgtccccagctcaccctcaactccccaccactcaccttctttactaaaatctgggtccccctccctgacatcctctagttcccaccgagttctcagtccagcccgatagatgtctactatgcctgtcttccagtagggtattagtctccttaatccgaactcatttttccgcatcccacttcccctccgccccttcaactccggtcccctcactccgacccttctcccagaatcctccccgaatcgcggatctccggccacttttccctcccacctcctagctccggcgcccttcacctcgctcggccccccatcccgtttcccagtctcccagtaccagcccccctcccccaactccgcccctcttccccctcccccagagggaggcccccctcacctgaatgccgctgctgccgccgtctcagaagccgaaaggtgctggcaccggccggcctcccaggctcggtccccgctgagctcccgacagcccctagggagagcgaacgccaccacctccaactctgcccgctccgggccaggccgtcaccgtagccaccgccagtgccgcagccgccatgttgaagtcctacttccctcctccttcccctcaccgccccactcatttgggcgtctgacgtcatggcgccgcgctccacacgcccggaccaatgggaggagccgacggtgacataactaatctctcttctagcgaggagctactccggcaacatggagcattgcaattggaatgagtaaaccctgctgacctaagggggaaggaggaaaggagggggtcactaagagtgtaagacttgggtttggcgaggcggccaaagcgggaaacccaagagccttgaatcgcgaaggtatgcccaaagagttagcagcgagtcctatttgggaattaagacatctagcttctgttcagggtcagcgacctggtacaactcataccctttctggacctcacttttcccatgtatagaggactaagttgaaaggtgacttctaggccgggcgcagtggctcacgcctgtaactccagcactttgagaggccgaggcaggagggtcgcttgagcccgggaggtcgaggctgcggtagccgtgatcgcgccactgcactccaggtgggcaacggaacgcgactctgtatcaaaagaaaaaaaaacaaaggtgacctctaagtcttccttcaattctgacattctatgggtttaaaccaggtaatcctatcccaagccttcactgccttctgtgggggtttttgttgttgttgttgtttctgtttggggtgttttttgtttttttgagacagggtctcgctctgtcgcctaggctggagtgcagtggcgcgatgttggcgcactgcaaccctgcaacctccacctgtcgggctcaagtgatcctcccacctcagccttctgagtagcttggactatagccacatgccaacacgcccggataatttttattattttatatatatatatggagagacggggtctcaccatgttgcccaggctggtggtaaacttctgggctcaagcctcagtctcccaaattgctgggattgtaggcgtgagccatggcgctggccttctgtgtctttctatgtctgctggaattaggagacagagaattattaattgaataagatgactcttgagcccaggagttcaagaccaatttaagcaacatgagacccccgtctctacaaaaagtttggtaaaaattaggtgagcctgggcaacatagtgagaccttgtctctacaaaaactcaaattatctgggcgtggtggcatgtgcctgtggtcctaactattcaggaggctgagataggaggatcacttgagcctgagaggtcgaggctacagtgagccaggattgtgctggtgtactccaaacatgggtgacagagcaagatcttgtcgcaataaaataaaataaaataaaatgactaggcacgatggctaacgcctgtaatcccagcactttgggaggccaagatggtcagatctcttgagctcaggagtttgagaccagcctgggcaacgtggagaatcttcatctctaacaacaacaaaaaacagttgggcatggtggtacacgactgtagtcccagctattgggttctgcaaatgagaccctgtctaaaaataaaataaaattgtaaaaaattagccagacatggttgtacacatctgtggtcccagctagtcaggaggctgaggtgagaaaatggcctcagcctgggaggttaaggctgctgtgagcaatgatcatgccattgcactctagcctgggcaacagagcaagactctgtctcaaaaaaaaaaaaaaaaaaaaaacaaggtcgggtgtggtggctcacgcctgtaatcccagaactctgggaggctgaggcaggcagatcatctgaggtcaggagtttaagaccagcctacccaacatggtgaaaccccatctctactaaaaatacaaaataaaaattagctaggtgggcgcctgtaatcccagctatgtgggaggctgaggcatgagaatcgcttgaacccaagaggaggaggttacagtgagcgagatcaagccactgcactccagcctgggtgacaaagccagaccctgtctca

SEQ ID NO: 589013 - DNA, 4001 bp, Homo sapiens
caatatagttctaaaggcaactccatgtgactactgctgatccagcccacatttaaagggaggacagaggaaaccagagcagcaggaaacaggcaagagaggcaattaccacaaccctttcccatggcctcattctctcccatgccaccactttcgggcatatttcaatcacaacaaaaaccttccttctctgaaaggtttcataattattgagggtgagaggcaacagggaagcaaatgggggaaatcagcgctgtgggaaaatctctcgtcacacgtatcaactagccataagtaggaaaatcaggagtatgctggcagcaagcaaaagggcagtttgggaaactaatcacttctgcctaatgataagagaagccttcaaagcaatggaaggacaaccctagcgaaggggctccacaggtgagtgtattgaaggaaactatcatctccagggagtggaatacattccctttcctgaggtaaaaggggaacacaccaatgtaggatacgggagagcttaggtatcatgttcaacttccttccacctttcacaaactggcactaaaacggatacacaattcacagtgaaaagtgaggaatgcaataactagtcgcataccccttgttgaaaaaagtgctgtcacaacggaagaggaatataagaactgggttcacccaagaaattatatgcccttcaaataaaagataatctttggataccttatggagacctgaaaaaaccctcaactagctgagcaccgtggtgcacactgtaatcccagatactcaggaggctgaggtgaaagaatcgcttaaacccaggagctggaggccagcctgggcaacatatggagaccatatctctaaaattaatagtaattttttaaaatctctcaactgttaggatacactggtgctgtagaaagacaataagcctaaatactggcaaaccatataccttccttgaatgtgaggtaaaaacaatatccaatagaagtggtagtaaatgactggattacatcaaacaggaaataacagtaataatgatgggatcaacccctaaagcgagcaagcattagagaccagagtggtgacagttgagatgcgtgggcaactaattagactaaaaactcaggggaaaatgtggaaaagccgagtgggaaagtgattcagaggcaaacaactgagttgtaatgcaccaatgaaagaataacattttgagtatgtattattaacagagagagctttgccgtttacaaagcgctcaaaaacctacattaaataatgaactgtgatataaccagactacaggaacggcgggtgtggaggaaaactgagtcccaattgagaccaatgccctacagaattgaaaagaagtagaactgaactgtgactccgggtaagccaggaaaggttagagagcgcataagttggggctataacagggccagtcccaagactagctacgggcgtgaaagcggaaaggtgatgagatgggaccgacagcgtggcggggaagctccagtctactggcaggcaccgaggtgggagagaaaaccacaccctccagggcagaaacccgaaaggggggaggggaggcacccctggggctgggtggggcccagccgacctggacgggggaaagtaggaagaagcacagggcaacgtgaggggaagaggaaggagggagcccgggcctggacgtagagggaccgtggacctggcgagtgaagctcggcccggtcctcacgggtgggcgccggggcagtctgcaggcggtggggtttcagacgagctgaacccagaattagaaagcacacgctgcagcgctcagggccctggaagagggaaggagagggagaggatggcaattaccgctgctgctctcggaggacccaagacccgctgccgccgccgccgctcgttacctgccaatgtgcctcttacaaagcggcggcggcggcacaggctgcccaacccgtcacgtgacctcgcgtcacgggcgaaggaggagccacaacacgtcgctcgtgcgcggcttcagagtcagcctaggcggcgcgcggcctcttccagccaccacctccaccccaaccccgcgaagccaaccgcgtggaggtggggaccacagaaaggaacaaataagggagacttgataatatgtattgtactcggagtcatcaggagagtattacccaccgcatacaaggtgcccacaactgcagctcgtcgtcgcgccgtgatgacctcacaaagcaccacaggttactcccctgtggccgccctgtgctcatcacgtgatgtggtccaaccactcagggcaagcctggcctcccaaatgttgcacgaggggaccacgactcccaacatgctgcacagccaaggcgacccctaccgcagcctttctccagcgggcttctagacgaaccccctagagaccttagagccgagggaaggccgggacggaaagcggactaagctggcttgaaggactaataccattggatgccgcccgccatgtggcggagcgtggtgcctgctgggaggtgtagtcctggcggggggtggggttccgctcccacgttcctgggctcgctctgcgccctgccccctgcgcgggaaaacgccaacggctagcagcgagagcctcggcaaggcggaaggtgcgcccacttttagtctttttcagtgcggttttacttttgccctcccaagccccttctgggtgaaaagactagaatctactgaacgcctactccaagtcagccgtttatttctgttatatcatataatcaactccttgagtccaggattttccctatttaaggatttaaaaaaagaaccttagagttgtttgttgaccgaagagacccaggttttctgtctttagaaaattaatgacctcctctcaataggatctgacctgttgtcaactccaagaattacgaataaataagatgatggtttataattgtagcatggtgttttaaagtattttccatttactggcctgtttggatgtgagggcgttctggctatcttgtcaccccatagatcgccagggctgattcggctgatctggctgtctaggcgggtggccccttcctcccgcacctctccatgtgcgtccctcccgaagctgcatattcggtcgaaaaggaggagcatcccccatagaagaggacaagtcaaggatataggagtagctgcacgcccgtgttaacaagctctcaaggtcctctaaacaagctctcaaggtctacttactggcctgttttatcccaagctagttacatacaaggactttgcagtcccggcatgccttatctcaattggagctttcctctgtaataacacttcaccggcttgtgaaaattaaatgagattatgtaaaatgcctgcttgacacataataaaccctcagtaagtatcagtaatcattttcacactctacccatcgggcccaaaaggtctaagtaaggtagaaaggggaaattagcttatactgaactttgtacagggcactatgctaattactaatttgctagttattaagtaaaacaattgacatcttaaacagccctatctagttcaaataaagcctttgttattcatctgaattaaagaatgctgccgggcgtggtggctcacacctgtaatctcagcactttgggagccggaggagggcggatcacaagatacggagtttgagaccagcctgaccaacacggtgaaaccccgtctctgttaaaaatacaaaaaaatgtccgggcgcggtggctcacgcctgtaatcccaacactttgggaggccaaggcgggccgatcacgaggtcaggagatcgagaccatcctggctaacacggtgaaacccagtctctactaaaaatacaaaaaaattagccgggcgtggtggcgggcgcctgtagtcccagctactcgggaggctgaggcaggagaatggcgtgcggagtttgcagtgggtcgagatcgcgccactgc

SEQ ID NO: 589014 - DNA, 4001 bp, Homo sapiens
aaacttagaaagcaagatgtccccagatggtgcccaggaaatcagaagctcgaaccagatcatgccatcaagacatttcagccaagcaactctagattatcagacactaaaaatcagactgaagccccagctgcatgtgactaagctccaggctccccaagcatggcggaggaagaggaagccgcgcagacacttactgtgtgtgacgtgctcgaggagagggctgcatgtgcagagaggctgctctggtggctggagagcgaactagaagacaaaacagagcgccgtatgtccacctgaacaagtgactccagatgaacaagacgcacgtgggtcagtgagctagattcaaacttatcatagtccctagcacaggaccggcttcagacccatcctcattccttatccccacagagcccagtgatggggtcctggtggacgggaatgactcgccatgaggtctggaaaactccagagccagcttccctcaacgacatccatttgctcctcagatgcgaaaagtgaagacagagttgcactaagaacacggtcatccttgacaatcccattcaatctgtgaacgagggatcaaagttcctatgctcaactccacatgccaattcccatcaaatccacttttgctcctagctaaagagtgatggagaacactcctcagaagacacaggtagcaacgccacccattttcctacaccttgttctaataacatcgtttcttcagccatggaaagttcaagtcagacacctgctcagaaatccatcattctcattccacctcagtgacatgggcccagcgatgcccagagaggctaggctcaggcaccctctggagggtgaagacaggtaggagggagctgctggcctcaccctactcccaggggacccagtgctctgtgccagcagaggcggtacaagcaggcaaggtttccatatctggtggttttaaggaacaacctggccaaaacctaagctacagtcgtaatgcaaaagcccaggacatcacgtcagagacaacaagtgtgctctgttcatgaaagcaaccttctacaggagctccaggacttgccccaaggtacttctcactttgggcccacaccttccccatacctgctaagctgagagagagggctgctagtcaggtcgccagtgtgctgggatgtggacggcagaagtgcagtgcaggaggtggtgctgggcagggagctcacagacgggagggcagagggagggcctgttgtctttggagctggaacagatgaagtagctgtaagaagcagatctgtttatttctaaaaccaatcctaagtgcctgaaaatatgctcaatatcttgtgacatgtcagcctcagttgagacgtccataaagttacattccccaggaaaatgccaagcatatcgccagatagccctttgtctgtcaaacaacactatcaaaggacaccacaccatggtcagctgttcaagatgcagcaaagaataggaaatgacacctttataacccaacctatcctatatggggacatacttttcacacctaaaggaacctaagctgtagatgcatccagaaagaaaaacaggtgctgagcctaatatgtagaattataacgtgaggcaaactcctcaaagggcacagcaagggggagtaagaagctaacaggcaagaccacctacacgtgcttccgccaagtcaggctgactctaccaatgctcacggccaacgtaaggcagattggggttgatgcctatgttgtggagagacacagacacctaacatctgcagtccaactgtccaacacctacttccaaatgcacagtgagcatttccttggtatgtgcttgaatagatgtatctcagagcacataaatgagcttcgtaggcttcagaaaggatgtggagacactcagtcctagctgtggaaagactcagtctcagtgctgtccacacatacaactcagatatgtgcttggaaataaaacatcattgtcttttccagttaggaaagaggagcaaccttgacccttctaaaacccagggaaagcacttgagtctctaaaggaagggcaggtcaaaaacaaacataagcaatgaaagggtcaacttacacctaggtcagttcttacagaggccttctttttattggcagtctcttccatatataaaccttgttcatagataaactgtataaagacaccacagatacacctcacctaaaactaagaccccaaaacataccgccctgggccttgtattatgatgctaacagcttcacaggaagcctctctcaaacaaacaaacaaaatggggagggaaggggaggaggaagtgagggagaagagagtatgggaaatgaaaagtaggttaatgtacactgcttcccagatactttagttctcgacccatgcctagacaaaagaaacctgccactaccactgctagagtcaaaagttcctctgtcatccaacaagctcagaacgaccaacgaatctccaaacagccttggcagcccaacaataccagcaaatgtcaaaccaaaatcctggggctccaaatctgtcattacagtttcaactgaggctcacctcggtctgcttaagttcaatatccgcactcccaggaaatcctatttaaagagtctttctggcttccccacccatttgccttcctgaataaagaaagaaaactactataaaccatcagtcaagctggccaactacagaaaagaagcaattaacggatttacctgcactatctttggtaatcactgagctgttggaagtggcggggggggggggtctcattttctcccaaatgtccacagtgaacatttatctctctttctaagcaacagtccttcaggtcctaaagacaatgagcctatctttcctgaacaagaatagtaaatttttgatttagaagtagtttctttcttttttttttttcttttcagacggagtctcactttgtagcccaagctggctcaagcgattcttgtgcctcagcctcccaagtagctgggattacaggcacgcgccgccaccacacccggctagtttttcgtattttagtagagacagagtttcaccatgttgcccagggtggtctcaaactcctgagcttgggcaatctgcctgccttggccccccaaagcactgggattatgggcatcagccaccccgcctggcccaagcatctttaaaatgcatactgtatgctgcacttgtggtgcagtctgattagggcagaagaatatgagaccaccacctccttcttgctgtggttaagacatttctaataacaccacagccaacacctggtccaaaaacaaaaaagcaaaagggctgctttttaacgaataagccattgaccaactggtgttttccacatcacgtgagctatcctcttcctctgtttggttggcaccagccatgacaagagtagcttgctgctatacttactgtctagtgtctgctgacttcgaccaccaccatgtccattctataaggaaaagaagagaagagaatataaacttacaaaatgaaatcattacctgagtggctttttatactttctacaacatgtagcttaatcaagaaacaattatctcttttattctattttttaataaagggaagataaacaacaaactctcatgcaagaacaaaaatgttcaaaaaaattttttttcacatccccaggttcaggtgatcctcccccttagcctgcctaggagctgggactacaggtgcatcctaccatgcctagctaattcttgtattttctgtagagatggggttttgccatgttgaccaggctggtctccaactcctgggctcaagcaatcctcctgccttggcctccaaaagcacaggattacaggcatgagctaccacacccagacccaaataatttttttttaaaggtaactttttgagatggtgtcttgcgctgtcacccaggctggagtgcaatggcgcatcttaga

SEQ ID NO: 589015 - DNA, 4001 bp, Homo sapiens
agataacccctcccttccaaactaaaattgactcactggcctattttacttaattttgaaaataaaaaaataaaactaaatggattcctaagcactcatttcctctctctgcccccatcatttaaaatattcagactttcaatctgtgattcctccctgcaaaaacactcaagtaaaaacaaaacaaaacaaacactcattatctccaagttaactaccttggagttaaaaaaaaatcattagattctggaatgataaccactgttctaagaccatataaaacaacagaaacaatgtctgtggtcgctaaggaaccatacatcccacccagagaaacgatctcgcctcagatgatacttgtcatctgtgagaccacccctttagctagagttaaccacttgagcaggtttcaattttgtctctgaaagtaggaagctatcagtctccctacatgactcgttccaccctttgtggatacttctacctgtagaaaaaaaggttggcaaacttggtggcatggtgaggacaaagggcattttgaaagaaccagtgactgaggtaagcagagaatgtgaacggaaagagggttaaagttcccccaaatggataatgacaagacgacgcgggcaccctttttttttttttttttttttttaccacccctagggtcccattcttcaccaccacccattggaatgcaaagttggcactaccactacccaagatgcccaacaaatcctcaaaatgtcagggcactcggcagcttctgaaatgacaagctggtgcccctcccccaccccacccccacccccaccccccaaaaaagaaaagtccaatccagtcggtgcaggtcaccctgccctctggggcagttccagcctgcgcagggaggggttccgaccggagaacgaaaaagcacagatagaccaccgctctttccacccaccctcagcgggggaaacaaaggcggcctcctccgcccgtagacactaccctaaccagagaggctctccgatttcccggtgcagcctgccctcccgcccccgcccgagcccccgcccccatgacaaagaaaaggcactcggcgagcaaggccttcctgcctccagggatgggggagggggctgcacgggtgagaagccccctccactcgcccgtgctcatactcctggtcccaggaactgcagaaagcggcggggagccggaggcctcggccgcggaagcagggtccgggaggagggtgagggtaccttgaagtagccgccttcgtagagggtgttggggggtccgaagatggccacctcccagttgtagaggtcggactcgtccaccagggtgatccggaagccctccaccggttcctcctgcagggatttcagctcgagcatcagggccttctgcgagctggtcatctgctgctgggccatcgcggcggcggcggcggcggcggcgccgggcccgggccccagtcctcacgcaccggccgggccggaccaggcccctcccctccgctcgccctccggccgggcagcaccgggccccggtcttcacacacccggcgggccagaccaggccccacacggcccgtgggcccgcccggggtcctcctcacacacgacgcaggccgggccgggcccttctcctcacactcgggccgggcgagaggagaggtcgagggagttaggagaattcgctacgggtcccggtcccgggcctcccccccccggagggggcctcaacttggggggggggagaggaggtggaagcggaggaaggcggcggagggccggcgatggtgaagggagggggccgggccggcccgggaacgccgcgctcgctcgccctctcgttctcttcgggggccgcaggggccggagggcgcgcggggcaggagagggtggggggagagcggcgtgcgggggtctcgcggcggtggcggcgggggctgcgcggggggaggggcgacggcggaggaggaggagagcgagagcgcctcgcgccgcgggagcaacggagccgagaagcagggagggagggagggagggagagagggaggaggggcgcacgccgggtgctgggcggctctcagcggctggcggcccgacgcgcgtgcgcgtgcccctccctcccctccccccaccgtgcctggctctcctccactaccacctcctcctcctcccgtttccacgcctcctctcggtctcccgcgcggtcgcggcgctttgtgacgctggcgcgtgtcccccgcccataaagatcccagaagcagcggggaccaagggcgggcgcagggattgccgtggccccagagtgacggttgtgcggctggacgccgcagttccaaaggcgtgcccgggaagggaacccaggtctcccggctctcggggccctccccactgtggatccaggggcctccgcagccatcctgggacgggcctggtcgctgcaggcccctccccgtgacacccagtctgcggtccctccacttagtagctacttgattaggatgtgctgacaatgtgggtcttttcggtgggaacagaccttcccgcaggccagcccacaggcaagtgtgccctttggcacgttactcaccctgggtgcggcagttccacgtgagaaacggggtgagacaaaaaggtcagcttctgcttcccttcttaactacaaagaggaagttgtgaggaaaaagacaataacaaactgggtctctagcccttctcattgtgatttggggcaagtgctcaggctgcccttcgccttcgccatttgtaaaataaactactgtggttgaacttaggggtcaaagttccctataggtgcttgtggcttgaatgtccaccctggaactgagggactttcgagataatcataaccgaagtgagatgtggggacagtctttggtccccccgtggttcagaatacagtactcctttctcctaggaaggcatgtcctaggataactgcctaaaaaacatttcctagaaaagccagaatattgtgagagttctacacacacagtttcggaactagacagatcttggttccaaccctagttccattacttctccctgtatcatcagttttttgttttttggttttgttttgtttgagacagggtcttgctctgtcacccaggctgtagcacagtggcgcgatcatggcccactgcaacctccgcctcccaggttcaagcgattctcccacctcagcctcccaagtagctaggactacaggtgcatgcctccacacccggctgtttaatcagcttctgtaaaaggggattaattatacccaacacaagcaattgtaatgattaaatgtatgtacagcatttagcgtagtgactggcacatggttaatgattcatagaaacttgaaagaaaaaaactttaaggcatagctgtattctggataccaccactacccaccccttttattgagacagggtcttactctgttgcccaggctggagtacagtagagtgattatagctcactctagcagtaacctcctgggcttaagccatcctctaacctcagtctcccaagtagcaggaccacaggtgtgcacagccatgcccagctaatttttgtatttttagtagagacgggatttcaccatgttggcgaggctggtctccaacccttgacctcaggtgatccgtccacctcagcctcccaaagtgctgggattactggcgtgagccactgtgcccagccaaggacagttttagatttatagaaaaattgaaaagatagtcaagttcccctacacctggcgcccagttcccccttttattaacatattacattagtagagtacatgtattacaattaatgagctaatattgatacatcactgttgactgaagctcatacttccctaatttttacctactgaccttttgctgttccaggatctcatccaggataccagactacattcagttttcctgtttctgtagattcctcttgactgtggcagtttcttagactttg

SEQ ID NO: 589016 - DNA, 4001 bp, Homo sapiens
ataatcgattataataccgtaaaatgctaattgtagatgatggacatatgtgtatccacttcccaattctttcaactttccgcatgcttgaaaatacaaaaatggtaaggaaaatttttacaagcactgggagacaaaaacaaaagtgataattctgttggtggtaaaagtttctctcatttgatgttacacacctcactgcttcacaaaatacactacctttggaactcgttaaaccaataccccaatcacctactgtccctggggaaactgataggtacatttcaggaattgttgtttcctgtcaccaactgttcacgttgtttgcgatcttcagagattaagtcagtaattatggaaaacacgacgtattcaacaatacactaaaattatttgttaaattccaccaagaatcttaattaactgcaagatttgtattcctgaaccaagtttaagtaatattctgcattcactccgattttcttttatttgattgcaaccgctaatatcaacatcgctatcgcccctctaaaatcaaacaaaaacctacccaatgattggcatctaagagatgataaacatactaaaagggaaagagcaagtcatcagtgaaagaaagtcattcacttttctccttaaacctagtactatcactattacttaagatggagctaaaaacagtttctacgtcataatttttttttaaaggttgcaaggtgggaaagatttcaggagttaaaatgcagaactaaatatacacatgcacctcaccccaaaacccaccttaacaagcaggcacgtaaaacaacgaggatcccacccacccctttttaattcatgaaacaaaaccgcagcctgagctaaagcgaaccctcgcccccgcccagcctccaccccgcccggaggctggcggtgggtccctttcctttgtgaggagttggaggggaggcgacggagggcggggaactgggggaggaggctgagggtcggcggataccagagaaggaaggctccgagaaaagcggcatcagcccgtcccacaaacaggccgcgccgccacgccacaaaccattgcggtgtcccaaggcgcaaacccacgaacttgggtgtgatctaatttgggacgacgcccgggagaatggccgaggacgacccctctcccaggcccttccaaaaggtctcctggggcggcgggcggaggtcctgccgccacccccatcccggcccgagccccaggcggcctcacctgctggacggagctattctcgggcacggcgaattcctccttttccttcggggtcttcacggtgactttcatgattttgggctccgcggaggcagcggccgcgggggcgccagcaccttcggctccggcggcgctatcctgggagcccggaggaccgccgctttcaccactctcggccatggctgtggcggcggcggcggcggtgactcaggcaagcaggagggagcaggcgagcaaggaggagccagcagacaccagagccggcaggcctggacagcgaagaatgcagagcacgccgcctcagtagcaacgggcgcagggccaccgtagcgggtgtggggccccggagctcggtgcaggctctggcgcaggcccgggtcaggcgctcggcagccgccgtgtgttcaggcgccgctcgctcacaccgacatccgcagcagccaccgcttcctcctccctgccccttcccccacgtcccttcgccggcgccgcgcggagcacgccgggtaacgcgcctggcggcgtcgccgagtcatccccggctggcgcgactttgagctcagcctgcgtgccttttcctttcccgctccattgcccaaagtgcaggcgaagccagtgtgaaggactaaaagcaaaatggggcggggtaggtcagttcatggtttttttccactcctttcaccaaaaactaaatcgcagtttccagttaagcgctgtaacggcgcaccgagatgacgtcacggttagcgaaattactagaaagggaccagtgggccctgcggccgcggctgcgcctgcgcgcttgctgtccaggtagtctccccaccttacctcatgcccagctgggccgtgttcacccctccgcgctgtcacaatcgccttgccctcccttgcctctctgtctactctgcgttccccgctgggaggagggtctggtgataaaatagcggcgaggtattttgttattttaatatgcttagcgtttgatatttggaggggtcgtattgccctatgcgggggagttggggtaagttaatggtggaaaggcctcagcacaacgaacagaaaatggagtgaacgcccgtgactgccctgcgcaatcctgcggagtcattgcttcatggccagagcttatttaccgccctcgggttagcccggtttggtcagacgatcagtcaggcaacctgtattgacagtggcctctgctgctacgatgacagctgtgcgcgagcgcccccagattatctgtgtgtagggcggaacagggtgcccgaggagtgtccacccaaatgggacaatttaatatagttgaggtgttcgccttatattctatcaaattaagttactggtcaatttcaggctttaagtggcattaaggatagttccaaaattattttcagtgtaatacagagagaaattatctctgagaatcctaatttgaaatgacgtcattggcttttaaagatgacttgcaaggaatgtacaaaccagcccattattaatcaatgttgcacaatttaaatcctgacagcccactatgacccaaatccgcaaagatacattctgcctttctgctcctaagccgtccaaccctgttctgagaataaatactgttacataaacacgactttttagcagagctctatggaatctgggtctaagagaatcctgagggtatcgatttcagtatagacatcatttgatatcacctaaatttctggcagcatggctcaataacaaggccttctgcttaatgaaggatgactacttggttatgtccaggtgtgagatgatcactgcttctaaagctagaaagtgccacaactggacaaccaatcatttggaatttcttccatatgtctaaataaaatttctcctcaacttcattagctcctcattacctgtttttccctgtcatgctgtgtcttacctgcatgctttgcctaggctgccttcctctacctagaatgactttccccttgccttcacctgtctaacttctactcatcctgtatcacatgccccaggaagacttcactccctaccatttagagatatggtttttcccttgattctccaacaaataccgtgtgtgtgtgtgtgtgtgtgtgtgtgtgtgtgtctgtctccctgcatttatggactttgcaattatctgtgtctacattattgtctaaaaatgtttgatgtgtgtgacactataaggtaataagatttacctgtaagaagataccatatagttatccattgttatggcactttttagatataatcctgacctgcatgagaatcggaggtgggggcactatggtgtaaatcagagattagtgaactttctgggagggctagatagtaaatatttggttggtgccaaaaaaaaaaatttgcaaaaaccgcaattatttatgcatcaacctaatattttaggctttgtgagccacaggatctcggtctaaaacactaagctatgcccttgtatcacagagtaatcatagacaatacatacatgaataatcatagctatgtttactaaaaactctacttgcaaaacaaaaacagacataggatctgatttggcctacagaagatagtttgccaaccccaggtctagatgtttatttgtggcattttcttctgaatggtttttgtttgttaaatggtctgtctggagaaaattttaagaacatattttatcacagtatcctaatactgtataatactatattgagcatacaagaataataagactcagttt

SEQ ID NO: 589017 - DNA, 4001 bp, Homo sapiens
gggcgcacggggaaaggggctctgctgcagacacagggtctccaggccacacacacagtcagcttccattgcagggacactgactgtgggaaggggtgggggacccacagaaaccaaccgggggaggcctgccgccaggcaggtctgtgtgagcccgaggggacgtcctagctggcccctctcctcggccctccctagaaccacctgcttaccttgagtgtgtcacaaaatcataggtcggcacctccaccgttttgccctccacgatgttcttcagagtcctgtgcatcaaatcattatcaaaggcatctgcagggttggagacaaaggcaagacaggcagatgccctcgtgcagcggacagcagggaaccctctctgctctggggtcagcacagctgggtgctggggacaccgagaaccctagcacaggtagactaggactacggcagtgtatgtttggtagcaacagtgccctctgcagccctgcagaccacaggatgaccctgtccttgctgttctcgggctgtgccactgcccaagctctgtgcccctgagatgccggaacacaggggttttctgatcagctcttcctgggaggtgggtaggctgggcctctgcttctctctctttctgggactaactggttagactgcggctttgcaggccttcttcccacaagtccttgggaaaaggctgaccatgccagccagccagggtggaatcttctagcagtggcaggtgtctccctgccgcatctgcccgtttacctggcccggagcttcaagccaccagcactagtttacctaccgcctcccacactggcctctctgaggactttgccccaaagcacgggagggcacagtgggcagaggtgtgtgtggagggccctaaaggccccaacgtgggaagggaagatgggaggatttctccaggatcacagttgtggcagggcagggcagggctccccacagtgcaacaggcttcctgactggctccaaccacgctcctggggggacactcagggcccagagaactcagcaaagttcccctgacttcactgtgcagccaactccactgcaggctgcgtggcgagttgggggaacagcccaagcgggtctgcatccatccaaccttgggcccaagcgcagctggttagcggccgcccagaatggggtctgccctccccacatcgttgggctcgcgatttacctggatggtcaaaattgtactgtcctttcaaggccttggccttctgctctgccgtcaggaccttgtagaacctgtcctggctcaggatgaccaccttccgctgccgctgttccacctcgttctgtcccagcaactccatgatcttctcacacacggtcgactggagacacagaagcgggattcccgcctggaaccgctcgtcctgtgacaggcacggggccggcttctggagacactgacccacccgccccctggggggtatgctcggaaggcgggaggacaccaacaggtgtggatggtctcagcggaagggccgcgggggcccaacggggttagcacggacttggggctccgaggagcccggccggcggagaggctgtgggggagccccgaggcccagcgccccaacccctcgcccgccccagcccgccccggcccatcgcggcctgcagccccttcgctcccgcgccctgcccctgcctggcagggggcccctcggccggggctggggtctcctctctggaccgggccgcccgtaggcaccggcgagaggcgagaccccggcccgctcggccccttaccttcccgctggcagtgccgccgctcacccctatcaggaagggccgctggtgcggacggtcggcctccggcgcggggctctcgcagtcttcgcctcccgccgaagccatctcggcctccgctcccgcgcatcgggtccccgcgcccgccccttccccaggcccggcgcgcccgcccagcgccgaggtcggaggcaaccggagcgatcacttccgggaggcgcgcggggcacgccgggagttgtagtccaccgggggggggggggccgcgcatgcgtgagggtgcagggcccgaggccggcacaccaggagcgcccgcgtcccattgcgccgaaagctggctggcagggactgctgcgcccgggcctcgagccggctacaaggtctcagactcaagtggcccggaaggtgcccgttccgcaccccgaggctggggctgcgccttcgtccgagtgcttgcctctgcctcgcgctgcctctgcgccagtcccgggccctcccccggccgcccccgggcctggccccctccagcccaggctcctcttggccatcgaggcctccggactgtccggacgcctcccaccccacccgctgctggagccgtcggggcgccccggaacgtggcgggggctgtcgcctgatgactttaggctcgcgcctacagcgcgccaaggaggcagaggcccatgtgccgggttccatccctgccgcccccccgctccgtgcctggcacagagaacgtgacaggcaaattctgatccattgaaattatggatttccagccgggcgcggtggctcacgcctgtaatcccaacacttttggaggctgaggcgggtagatcacgaggtcaggagatcgagaccatcctggcgaacacggtgaaaccccgcctctactaaaaatgcaacaaatcagctgggcgtggtggcgggcgcctgtaatcccagctacttgggaggctgaggcaggagaatcgcttgaacccgggaggtggaggttgcagtgagccgagatggtgccactgcactccagcctgggccacagagcaagactccgtctcaaaaataaaaaagagagagagatagctaaggctcggggcagagcatgcttttcatatacaaaacagacaaccccgggcggacgcggtggctcacacctgtaatcccagcactttgggaggccgaggcgggtggatcacgaggtcaggagatcgagaccatcctggctaacatggtgaaaccccgtctctactaaaaatacaaaaaattagccgggcatggtggcgggcgcctgtggtcccagctactcgggaggctgaggcaggagaatggtgtgaacccgggaggtggagcttgcagtgagccaagatcacgctactgcactccggcctgggggaaagagtgagactctgtctcaaaaaaaaaaaaaaaaaaaaaaaagaccccaagtctacagccccagctacctccttatctaattctcgcctttggaggcaagattctccctgccctaagtcacccagggccaggtatcaggtgactagagaccactctgcagcccagagcctgctagaattactcaaactagccaattttaaactctttccctgccctgccaggccttttccatggaaaccccaagaaagcctcaggcctgggctctcccctcgcccctgcttctgcctcctgaccaaacctggggttctctactgagaaccgtgcatggcatgggtgccccttctctcaggaaatgcgatcaatcttgcgatggctttggcctctcctcatggtcattcagccgtacctctgtaaattaagccccaggcacagaacagtgcctagcaaacagccacgctgctggcttagatctgtccaggtgtgtgtcccaaaggtggccatcccccaagccaactttgaatttgtatcaagggagagttagacacggtttcttgccatttcttcccctgtggtccagccacgtagcgaaaggcagggaaactagcagagtctgaccaggggctgtccctgatacccctggcctgggtctcgtgtgccctctctggtgactggccacaaggcatgggctgccagggccagtcaggctattgcgtggttccgctcccaaggcaaagggacgctttgggaaggagccactccctgggagcaggcccagcacccaggaagcccacagtccagtaaacaaggcccgggcc

SEQ ID NO: 589018 - DNA, 4001 bp, Homo sapiens
gcacaaaacggcttttcaataaacatttattaaacagatgaactttaaagcaggttacagaacaataatcataatatagtccttttctctcttccctcttcccctccctccttctctctctctcacacacacacacagattggaaggatagtcacaaaaggttaacaaggtaatgtagttttggtgtgtgcatattttaattttctccatctctctctattgcataaattccttacacagtaagcattttttatttttatgacggtaaaaagtaacaatttttttaaagaaaaagaactcacatattttaaatgaactccagaatgtgctgtgactaagctcaccaactccaaaaactaaagtcaacaatatccaagtggcatgttttctttcactttcaaagaaatatcagtataacctgtaccagcatcatctttctcagtaccaggaaatgccacactatactaataaaatacagtgtttccaaaagcaaaggcacactttttccgcagtaaaaaggaaaaaaaaaaaaccaaaaaactaaaagtaactaatttcttaaagtctcttccactaacatacactctattctagttcatggtaacgattactatatacaattgctcttttctccccccagactaaaaatccaagtgaatcgatatcagtaatgtgctctatataattttttcatttctttacagaggcagatttcaccttaaacagtggatataccaaactagccacataacccatgtctctattcacgccatcacccagttctattttacttacacgcttcgtcacaatctcataaccttatttagattttatctgctccttccttctagaatgtaagactcatgaggacaggaattctgtcctgctcaccaccatgtcccctggccaataacagtgaatggtatctagtaggcctcaagaagtatttgttaaacaaaaatgaaaagatgtggccggcacggggagagtacaaatctacataaaacaataaaacgaggaactgaaaaaaggaaagaaaaccacgctgagatgtacaagctgacaggactcaaagctatcatgccagctcggaggtttggtggacatttttcagggtggacaggtgcttcacacctatctaagcgcatagagcccttccaggaagaagaaaatccacagagaggtgtccagatagctgtgagcagctcccagaaaagtggacacaatcaccaccctaacagaaacgtggcccaggtcgggagaaaaaaacaatacaccatacatctcggcccagatgaaaaattacacgaatccccagcacaatcaaaccaagccaccaccttcagcctgacacgtaagagcagtctcctttagcctggctgggcagtcgcctgcaacccagcaaacccttcccacgcccaacacttttccctcgcaaagaccaccgccaccgccggtccgaggggcgagggaacggggggaacagcctgacgatcagctttctccacccccgcccgagcccagtccccttcaaagcgcaaacgtttcccattctcgcctgtctccgaggcccggacccctgccccgagcccctcctgcggtccctcactcacgtgtagatgatagccatgaaatgcatcagccacagcaccaagaagaggacgaacccgaagacggccattccctccaaggccaggtccagcagcgccatcccccggcccgccggaccggcccggcccgctgcggccgccaacacggacaacgctcccgcaggaggaggacagggtgggcgcccggtgcgggggcgcgggaggcgagaggaaggtggggagaggaaagggcggaggggggtggggacggaaggggcgggcagggcctgcgcgcccccgcccgcgcgctctcgcctgcgcgctgtcttcggcgcgctcgcgggcggctgcgggtgctgcggtctcccggctctggtcggggcgaccgcggtcccgcgctccggttcgcctctcccgagcctcgcggccgcccaccagaccctgcgcgcgggcacctccgccgcctctccgtctcgccgccgggctcccggccgagcagctccaccgccgcagctccgcgcactaatcaaaaccggcggctcgcgccccactcctcggcgcgtcccgcccccggaaccgcggcgcccgcctctcccaggggcggtgcccccatcggtccacgcccaccctgtcgcccgcgcgcccgctgcggcgccggcgagagcgcgccggggagatcgtgtcctgctgcccgcaggacgcaggccgggcttcctccggctcctcgctcccgctgccgcccacctaggcggaaagcgctgcagccctgggccgggctccctcggtgtcggtggcagctcgggaccctgtgcctggctggaggctgctctctctccgtctggccctgctgttcctgggtgccccagaaaaagacacgggttccgggcagctgccggagcttgtctagaaatccaacttccaacgccgcgtctgcagcctccccgccgggcactgctactgctcggagcagccaggccctccaggccacgttcctgggcgcaagggatgcccattgccttccctcttactgcttttaatgctgtgggatcttggatcaaaagggaccggagagtaaaataatctccatgcgcctcacagatctctaagcgccttagcgaccgtgtgtattataaaaagaaattctcaaattcagaattaaagaatcagttgatattgaaattccctaagactgccatccaatacggtagccgcatgtggctaagtgagggttggaaaggcagcttgccactctgtggagtaaacagtacaccagatgtggaagaccatctcgttagtaaattttatattgattgcatgttgaaaaggtaatattttggacatactacattaaattaggtaaattattaagttaatttctctttttaaatactttggctagctactagaaaattttaattgtacgtgtggacagcacagctctaaaatgggaagaaatgtcactttgggtagtaaggtaactaagtatttgtcctaattttaagtcatcccaagaagatgctagtactcaatgtttgtgtttcttcaatctagatgagtttatactatttctgcattgttttatgtttattgttgcaagtgatttccttttaaataatccatgacctcccttgagatatttcagaattgaattcaattttgaaaagaagttgtggctgggcgcggtggctcacacctgtagtcccagcactttgggaggcggaggcaggtggagcatgaggtcaggagttcaagaccggcctggcctagatggtgaaaccccgtctctactaaaaatacaaagaattagccgggcgtggtggcaggcgcctgtaatcccagctactccggaggctgaggcagagaattgcttaaacctggaggggcggaggttgcagtgagccgagatcgcgccactgcactccagcctgggcgacagagcgagactctgtctcgaaaaaaaatagatgaatttaaaaaaaagaaaagaagttgtttattattgctgtttatggtagttaatagtcactgaatgatctacctcaatctgcaattaaatgacaaactacaactagaagagttaatgtccgaaccattcctcgattaacatccttggctccactggtgcagaatcagtgggaaagaacaatgcttcaaaatcaaattcccactgttgagagttactggctgataaaaatagcaggatggagggccaggcgcagtggctcatgcctgtaatcccagcagtttgggagactcaggtaggaggattgcttgaggccaggagtttgagaccagcctgggcaacatgatgaaaccctgtctctacaaaaaaaaaaaaaaaaaaaaattagccaggcatggttatggcacctatagtcccagctaccgggaaggctgaggtggtaggatcac

SEQ ID NO: 589019 - DNA, 4001 bp, Homo sapiens
gagtgttgcccaagaacatccttcatttctatctctggtgctgaaatcaccagtgtcctaggaattcatgtactatttgtccccagctagaaaataaaatgcatcaaacgattacatgctttttcacttgtgatcaaaaggaaacggtatcagccacttgaggcacagcaaagcaaatctatgtagtatttaacaagtgtacaattatttcaaaagcaaagcttacaactaaatacctgtttttacaagtcaaacactaagaagtcagtacaaaactggctgcaaacacaaatcaaaggtgctataacattattttaaagagagaaggaaaggggaaaaaaaagctctctccttcccaaagtgtaatttgttactatgaaatttctggacagtcttcgaagactaagcctgtgaaggggaggaaaatattccttttaagtagtttgcaactgtaggctacttctaccaaatcaaagagctacacttatttaaaaccacaggattggagccaaactgtggtctatcaactcaggatgccaactttttagtgtattaacaacaacatgaagacaaagaaaaatacgatgggtctgagtggctagggatatagattgtaagagacttgtggaataggaaaaaaacttagactggccagaccataaaaataccagagatgcccacagacagccttcaagtatgcaccgctggctatgctgcagtgctatgcttaaagcgtgaacgacatgagtattagaaggcgagaagtaagaaaagcaaacagtcttacactccttttcacttcgggaataaaactcttggcttatatagggcattcgtaaacccggcccccggttaaaccgacagtttcttcatgcccaggtctctaacctccctcgagacattccaaacctaggaaaggcggcgagggagagggaccagaagttctggaaacccttcgaatcttcagtttgcgcgaatcctaccacagtcaggaagcagagttagggttcttattcttgagagctcaatgcccgagtttcccctgtttgagagccgaagacgcggaagagccgcggaagccaggcgaacgctcagccgggttagccagctctccgggtctcccgcgcggtggcatggccgccagagccctctgccctccccgccctctgggggccccaggccccgccgagcgcgggaagcgagggacctgggcacccagtgcctacggccgctgtcctaccaaatacaaacggcgagatatttgcgctccggacgccctcacttctgaccccgcgcggcgcacctccagttggggctggcagggacccactccccaccattcggcgggactgggccccgcaccccgcgcctcgcgggggctgcccacccgcagcggagccaggtgagccctgcgcgcgcggcgcacagagccctcggaccggtgcgtccagaggagcccagctgttccggcccccagcctcgctaggggcgcggcgggcgcgcctcacctgcttgccccggtagaagaggcgctggcattcgggccgcacgtcgaacagcgcccacacccgctcgcgcagctcctcaatcgtggctttgcgagacacgtcctcaatggtgcacgtcttggagccatcaatggtgcgaacctgtatccacatcttggcgcctagagaggaaccggtcccctttgtctccccctgagctctgggcgccgcgccccgcccggcccgcgccgctttccctgcggctcgggccctcagcggcaggcgggcgagcgcgcccaccggaccgaccggacgccgggcccgacaggcggcgacgactctcagcgcgcgcgcccgactagccgacttgaggagagacgaccggaaccactctgaggcgctgccgcagacaccgcctcaaagataggaagaggccatgtctgcgccgcgcagagtgtttacttatagagctggagctcccacatggaggtcacggcgccaagccggatctcgcgagatccacgccgggctccgccttaaagaggaagcggcccgggagagggttacagacccgagggaacgaaaatgggcaggcgcggagagggcgggtcggaggggcggggctaccaaaagccgttacttgccccaccgcctgcacctggccactgggcacgccctctagcctttgggtttcggaagattgcgcggctaccacatcggttgccgttttgaggcctcgtttcagagctgagggggcgggtgcctcctcaggcttagcggatatggttctttggtctcaaaaacacaccaaaaataagaaaccctggcgtgcacttgtataatcctggaaagggggcgcgggtgggtgcggcctaaacttccgagaaagaactgaaggaaatgtgtgcgctccaccgcgctcaacaggaaagctcccgccacgcggcctggcgggtcgggtcgcccgggaaaggccccgggggccctcctgcttcgcgaacacgtttcccgcctggccgcaatgctactttcgcgcggaaacccacttccgagggtttcccgtcgcctggcggaggcggcagctccaggcctatcctcaggccgcgggtcccgctgggatcgccctctctggcttgcagcgctcccagccggccctccggccttggagaagtcggggcagctgcccgaaaggccgctctctaactccggacatttccgttcgtagactttccgcgttaggggtgcctttggcctaagggattgcgggtttgcgggaaacagttttaaataatgcagagctacgcgcctccgaagaaagaactccaaagaccctactaggattaaaccctcagaagtgggcccaacgcagcactacctaacagggcttcccccaccccccaccccgccttcttaatccttccctgctacagctggggagtcggggtgggggtgagtgggtttattttattttatttattatgtatgtatgtatgtatgtatgtatgtatttagagacggaatctctctctgtcgcccaggctggagtgcagtggcgcgatctcggctcactgcaagctccgcctcccgggttcacgccattctcctgcctcagcctccctggggtagctgggactacaggcgcccgccaccgcgcccggctaatagtctcgatctcctgacctcgtgatccacccgcctcggccttccaaagtgctgggattacaggcgtgagccaccgcgcccggccaagtgggtttattttaaatgaaaatatgtcttctcaagaagggagagaggatataaacgtaaacaaaacaagacaacttggacttcacatttgccaaaatcggtaacttaaatattcacataggtgctaattattcccataaaggtacagtaccatttttttgtaataaactaataaacagctaaaataattacaagcacagacaaatccagtagtatatcatgaaaaagaagagaaaggccgggcgcagtggctcaggcctgtaatctcagcgctttgggaggccgaggtgggcggatcacttgaggtcaggagttccagaccagcctggccaacatggtgaaaccccatctctactaaaaatattaaaaaactagctgagcatggtggcagttgcctgtagtcccagctactcgggaggctgaggcaggagaattgcttgaacccgggaggcggaggctgcagtgagctgagatcacgccactgcactacagcctgggcgatagagtgagactccatctcaaaaaaaaagagaaaaaaaagatggcccaacacagaagagacagaaaaaattaactgcacatacatattttgggtttctgcccctgtgaaaatttcagtcacctagaacctctaaatataattcacttgtctacccctattttaattaaagcaaatattgagtatttattacatatgtaaatgagatgatatttaggttggtgcaaaagtcattggggttttgccatttctttcggtggcaaaaa

SEQ ID NO: 589020 - DNA, 4001 bp, Homo sapiens
atttctgtaagttttcccaaaatgaatactttgccattcaatatgaatatctgcatataaggtacctgtttgtttcagtatttaaaatcttctagatctctattcaaaaagacaatggcctgctgatctcgtttctccagattcaaaaaagaagaaacttcactaaagtaacattaaaaaggaaagaagttagctaaatagcagaatttctagacaatgaaacctgcctgctattaaaacaaatgaaaacaccagtagttatataaattcagttaaataggaatttctgattcacgagtgctcctgcctaaagagtctttcataaggaccagctctgtaatacagtgtggccgtagagaattaaactgtccaagagacacagcaaagtccaacctctcccaaatcctgctactcagcagcagggatctaaaggaataaatagattcccagctgctgagagaaaatgtcttactaaaagcaaagcaaaattctcattaatgaaaaatcaaccatgaaagaagaaaaactgtatatctcataatcccgggaaatggccaaatccattttggttaatgcagattcaacaaaatagtggaagagaacagagcaaagcagtttcatctgccagtagctgggggaaacatcgttattggagaaatcacaaacaacaacaatgcttctaatctgtagagccaaaagaaatatgaactctccagtaaaagatatcaggtaaaggctctagttgataaatgctctctcattcataatcaagacacatcagatatgataggctgtaacctgaatttcccgagatcaaattcaatggctaatccaaaccctgtgttttcctgatcagataatctctctgaagtcacagtacttgcattcattcaaaaccagcattaagcttctactacgtcagacaccaggaatacaaaaactaataagaaacagtctctacccacatagaacttagttcgcgtaccatgcctcatcttaaaccccaaagctcttgctttaagatatcttcttagatgggtcaagtgtcctcaggggaaaagcaataatggcccttcaccttgagttactgtgaggcaagctaaaataaaaataaaaataaatcatacctcttatcctcaaaagcagtcaccacatcctcccaagtggaacagaagaataatcttagcctatactaccggttagtgttcagggaagtggcaggggacaagacaagcaatagaagggatgtgacagctgtaccactaacgcattcaaagtgtgataaaaagaacctgctactaagcatactgtagcgttacggtgcgaggaggaggaaaagaatgagaggctgcccaccattcacaggcaccaaccatccgcggtcttctaactcgtccactctcactagagaaccccagtcactgtttaataggatctgagcctgcagtccaacaacattgtcacatggctaccagaatggagagctaatcgtcccttgcaggagcttgggggaaaacaagaaagtggaaagaactcaagtgattgttaagtgattgccaaaataatagacccccaaagcacggacgggatgtaaagtttgggtgagacggtcaccggacgtccactggaagggtgcggggacctctacgccgacaccccgcctccccgcctcagtccgcgcactcaccgcgcacgcagagcagtgacatggccgaggatcgggcaagcctctgccgcgccccagccgcgccggaccgctccctctttcctctcagcaggtgccgcgactgctctcgttaccggccccacgggtctggcagctcctcatggtcccggtcgcaggtagcgtcccgccgctgcctcggacccgccccaaatctcaccgtctgagcgaactccgggtagcggtgagtaccggccggcaggctggggactgggcgcggcacagcgacgccatcgctgggaggtaggagctgccgggactccctcccgtcattccacccgggatccgcgcgagcgcctgggcggagccaacccgtggtgccccgccccccagccaattaactcacgcccagtccaccgaccccgcccccccccgcgagcacgtaggaggcggggtccccttcctcctttctttcttgcgatcctgaaggaagctccgcccactaatcaggcttactgcagggagcaaggggttgaccctcagttgtgtgacgcgagaatggaagccctctgttcctcctgcatgagcggggcttccacccaagaacagattcttttcattgaaggatttccactggactttcttagagtctagcggtcatagctgacagcctgtaattttaagttaacgaagtcgcaccgcacagcaaagttaagttttgtttagcaactagggcaaaagacaaaactgagtgggcataaagtatgtctggagacctcagttcttatctagaccgttttttatgctcatcattgtatctccaatgtctggaatagtgcctagtgtatggtaatcagtccgtaaatatttactgaatgaaggatggtaaccacggagggattgtgagtggagatacctctgatctttgacaaatctcctatccatgcttggtaccaacatgagctaactccatggctcaaaccaacaggacaatttgctaaggtctaggagcaccccctccagagaatccctgatctcccaaaatttggtcgagatctaaagttcattttgttgtacaactccctctattattattattattattattattattattattattttggagttttacttgcttccaacaaggaaggcaagttttcctgcttccatgacgagggaaggcaggtaactcttttatggagtttgagctcacttccaacagggaagatgaggggtttttttcctacttctgggatggtagacagccgttttcagcctgagacgcacccctaggtaagtagctgaatagggatttttgtcttggctaaagttaacaaccagctggtcttaatttctgcttaccattagagtgctcagtgatcatattgttgggtttttttttattttgtttgtctttttcccattgaccaactctacttcacttggtcaaatccaagtgagaattccaaattatgggtaacaaggcctatctaatttgagtaaaattcctcacagctgcaaaagaaaaaacaaacagaaaacaaaaaaccatgtatttggtttctgtgtttgcttcctggtcttaaaaattaaactgttcttaggccgggcgcggtggctcacacctgtaatcctagcactttgggaggccgaggcgggcggatcacgaggtcaggagttcaaggccagcctggccaacatagtgaaaccctgtctctactgaaaatacaaaaaaaattagccgggcatggtggcgggtgcctgtaatcccagctactcgggaggctgaggcaggagaattgcttgaaccaggaggcgcaggttgcagtgagtggagatcgagccattgcactccagcctgagctacagtgtgagactctgtctcaaattaaaaaaaaaaaaaaaaaaaattcaattgttcttttgtttacttttcttccaccctatacctccttcaccctttgccatctgcattaccaaaaaatcgagagaaggcttctaatgacttgaacctctttaaagaatttaggccgggcgccatggttcacgcctgtaatcccagcactttgggaggccgaggtgggcggatcacgaggtcaggagttcgagactcagcctcgccaacatgatgaaaccctgtctcgactaaagatacaaaaaaagttagccaggcatggtggcacgtgcctgtaatcccagctactcaggaggcagaggcaggagaatcacttgaacctgggaggcggaggttgcagtgagctgagatcgtgccattgcactccagcctgggtgacagggcaagactctatctcaaaaaaaaaaaaagaatttagaa

SEQ ID NO: 589021 - DNA, 4001 bp, Homo sapiens
caaaaacgtgcatcaacacaaggacaaagagagaaggaacctgggttgagcatcatgttgggcattcctgagaatgctgcaattttcatggaacgctgtgctgtgacaggaggtgatagaaggtgggtgggtgggtgggtgggtggaggaatgttgtcctgccttgccaggggtcattattgctcttggaggtaagggagactgaagttagagatgattgggtcagaaaaagggcaattgtgctggtttgtaagctctggagagcaatggccccatcttcctcacatgacttccccactgagctagcacagtacctagcagagacattgttgataaacaaagaccatgtctgactcatgaggatgaaaggcaagttgtctgcagataaatcttcttttttttttttttggtagagatgaagtctccccatgttgccaaggctggtctcgaattcttgggctcaagcagtcctcctgcccaagcctcccaaagtactaggattacaggcatgagcctccatgcctggcccagataaatcttaacacagcagtctgtggcttctctctttccagctctgctgaggcctgtcaaggaagcagggatcctcctagaatcccaggctttggggagtgtagctgggccaagggtcagtgaggcaaaacagtgaggagtccagaccaatacagttctaattggatccaagcagccagacaatatcaattaaaatgcacttagtcatgagacttaccccccttctaaggggcagaaatgctgaacgctgtagggcacggacagacttctatttatctttgtatcctcagtgtctggcttgctgcccggcacatggtaggcactcaataaatggctggtgaatgaactacccaattaagggaaaacatgaaagaaatgggaggcatccaatgagaagaaaggcactgggcagaggttttagattcccatcccagacttttcctgtcacatagaccttggcttatctacacacacacaggcacacacacacacctacctattccacacacacacacacacatccctacctatttcctcttttccacgtgatactgtaaagtacaccacccatctttcaaggcctgtttctttgccttctctctaagctctgcagtttccctcagctttgaaaccatatgacaaacctgtttgtaggaagcacaaatagtgccttgggtagacttcctccctgctctgtgtttcttcagtaactggtgtgtgtcccaatctctgcatttttcatcttgtgtatactatactgtccctgttagttcccttcagtgtgatttcttatttgtccccgtgtctccacctgactccagttctgcagaaggcaatcagcaagtttactgactgtcctgaaggaggctcaggtctgtttaccatccccaagtcttaggaaagaaaaagaaaaaagtcccgccctggccactacatcccacgagaaacaagaccttaataacagtgtaaaaagaaactgctgcccaaagaatgaaatcagcgggtggagggtggtccttctaggttctaggagctcagatgccaaacagatgggattggtccgagataggaatggaaaagaagagagagaggctgcctgctaacagtcacgacctccgactccggcggagcacagggcaccgagtggtacacagagagcatttccctcccaatgtgcgcctctatttccggacagacggcctcactgccaagagagactggcctctcagactctcctaggcgggtagcgtagctcacagcgggcactgggacacccagtgattcggccgtgtcaggccccacggcagaaggaaaggaattctgggcccgacgacttcaatccatccccacggcgccccagctctgtgactcacccgaactccacctccactgacaagggcgcagccatgttgaggaagccgagctcgcaggaaactcccctcaacttccggcgcgcccgcaaatttccgggcgtctccgggtgccgcggacggaagaggcggtgcccagggatccagcttcgtcagctgttggaggaagtcatcgaggggaggggaggggaggggagggcagcggagggaaaggggtggcagagggactatcaccggcgctgttggggctgtgaatcggtctccttccgtctttcaccgactgggctcagagacccagggtgggaagcgccttgtacgggaccacaagcaggcggaggagagcccccaggttttttgcgacgtgaccgtgagccacgtagctgcttatcttgcatgagttagaatctcttcagtctacacaccgcttgggccagcccatctactcgtctggttggaattataaatgactcccagatctttatttccgacccagaatctctcctgagcgggcgactcgctatccagccgccccctttgctgtcgatttggaagtcactcgttcaacagctgttcattgcgcctccctgtgccaggcattttgatcggtgctagtggtaaaggggatgggcaaggttcctgcctttagggcactcacagtctagcggggagactaactgtaatcaaataagcatactaagacatgtacaacctcaaacttaaataaaggaactgaagttataggaacttcaaaaagaaaactgagtagactggacttgctgggctctaaaacctgagtaaactaggtggctgtgaggggagagaaacctctaggagcattccagtgaggaggacaaaaggcccagaggctctgggtgagaacatgctggaacatggagaggaaggtggaagttagggagcctgactttcatccatctagagagggagctgcaaaggtgctcaggggccaacccctgccttgtaagcaggtaaacatttcagtctctaggagcagtgggagactactgaagggttttgggagacagtgacattttagaattgtgttttaaaatataatttctggctgcaatatggagaatgatttgaggggaataaggaaagagacacggagaccactggagcctgttgcaaaagctcagggcaggccgggcgcggcggctcagggcaggccgggcgcggcggctcacgcctgtcatcccagcaatttgggaggccgaggcaggcggatcacgaggtcaagagatcaagaccatcctggccaacatggcaaaaccctgtctttactaaaaaaatacaaaaattagctggatgtggtggcgtgcgcctgtagtcccagctactcgggaggctgaggcagaagaatcgctggaacccgggaggtggaggttgcagtgagctgacatcgagccactgcactccagcctggtgacagagcaagactctgtctcaaaaaaaaaaaaaagcccagggcagaaatggaatgaagttggccaggcacagtggcttatgcctgtaatcctagcacttcgagaggccacgatgggcggatcacgaggtcaggagttcaagaccagtctagccaacatggtgaaaccctgtctctactaaaaatacaaaaattagccaggcatggtggcagtctcctgtaatcccaactactctggaggcagaggcaggagaatcccttgaacccaggaagcagcagaggttgcagtgagccgagatcgtgccactggactccagcctgggcgacagagtgagacgctaaaaaaaagaaatggaatgaagtagacggcctatgggtatctaaacaccaacacttccaaaactgaactcagcattggtagaggatgatggtgtagcctagtggttaagggcagaatgatgtaatagttaagatctaggagttcaggtggaatgggtgtggcgactcacacctgtaatcccaatgctttgggaggccaaggcaagaggactgcttctggctgggagtttgagaccagcctgggcaacacagcaagtccctatgtctgtaaatgtttcttcaaaaatcagccaggcatggtggagtgtgcctgtccc

SEQ ID NO: 589022 - DNA, 4001 bp, Homo sapiens
ccctgaaccctgaaacaagccaacatttcatctggctccagaaaggagctaggaaaccaaccaaaacctaggttgaatctgtacattttcttaaaacaactgaactcccaaacaagactaagaccttggattcatctttgaactgcatagaacctgtatttctcggagggtccttttgagagacagtctcatcctacgcttaaaagggcccagtgagacttgggctgcagtctcttggcaaagccacttactgccagattcatagctgccactttttcagcattccttttgctaaagagcactcaattagatctgccacagcacaggtggtggttatcactgggtcctctggcctcatggagcaagggtgggagcagctcatctgtaccctgggacttcagctgaggaggagggtccagaaatgcccctggccttcttgccctttccttagtagtgtccagtaccccctggtggatgggctgcttgatgggcagattcagagccacctctgagagcgtgagagctgcagacgttgaccccctggactcctgcagcaattcccaaggagcctctccatcatctgacagggactccgtatccagtgagtgcacgtgcatctgggtttggctgaaccagtctgcagagggcaagactttgagactttaatatatggcttttgaccaaagataaaacgctggtgcaagaagtcccgagtctactattttttccagcccaaggaagagaagaacaatctcagtggagactgttccagagaaaacgtaaggcattctagaaatgctgccctgcttcggaatggtcttccagaaaggggaaccccagacagcccccatcggcccctccccctagccaatgagatgtaacagcagctgcagcagcagcaaacatctactgcactcctaccgtgccaggccctgtgcaaaccgtgcggcagagactgacctgcaaccaattcctgttccacctcctagctgggtaacttgaggcgtgcactgcccctcggagactccgcattctcatttgtaaaacgaaaaacaatctacctcaaaggattgctgggagaattcaatgagatgatgctttgcccagggcctgccacatagtaactgcttaataagaggtagttctcaaagtaagggatgacactgagaaaaggaaaactactgttacttaaggggttcttaaaagtcctagaagccattatttatgcatttaggtatttcctaagcgtttgctgataccagtttttcaaataaactttatcctcacagcatcttcggggtggaaggggcagagggtagagcgacagacctgccgaaggaggaaaaccagacccgtgaaggtccaggggggtggccggcaagcaccgaggaggagtcccccggctcaaaccctcttgcgtggcttcaaaacatcagacgcgcctctcctcgcggagaagctgggggccattatttgtgaggcagtcggcgctgggactctaagtcagcaccgcagagaagtggtcatcttttgttccgaaagaaaaaaacgcacgtcagggctcagagcccgaggaaagaaaagtcagcgcccgagacgcgagacgccacgcggatgctttcaacgctaggtcaggccccggcagaaatgagaggggggcggccccggttctggagaagccacgagcccccagggagctcagagtggggtggtgctggggcccagaggcccccctgggcgccgaccggaggaggggagaggggcggcggcggccgggggggtcccgggctccgctcaccgggccgctgcgtctggcgtacctggcgaagccaggccctgtcagcccggagccgggctggggtcgccaatgctcagaggcccggcccacagaagcagccggtggcggcccggaactcacctgcactcgcaactgcgccgccgccgcctgtcagtcaagcgcgccccctctgaggcgacgcgcagggttgtggggccgtctggcgacgccccacctccttccctctgccgtccaatcggaagaggctgacgccaggagagggggcgtggccacgcggactgtgcgtgccgggggcggggccagacggggcaggcgctctgaccgctctgccgcgcgccggaagcagcctgggccgctgcgcagaggcgcggcggctgtacaactcggccgttgtcaccatgccggtcgtccggaagattttccgtcgccgccggggcgactcggagtcagaggaagatgagcaggactcagaggaggttcggtgcgtttggggcggggctcccataggcttggtaaagatagacttgtttgggggactcaccaccggctcggcgcttcgctgacattgttaactgtgagctcgggtggtggttccttctgcggacgcagaaattgaggctcaaggggtgaggccaccgccccaagctcgaacggttgagagagatgcctccgggatgcgcagtggctctgactcccggtgggtctaggcacaaggtcgtcctctggaccactgtgctggtggctcagtagctgggctgggatgccctcgaaggtgccttattggctctgttagctttggattccgcggggaatcactcagcttatgcattgctgcttcttcttctttttaaagattaaaactggaagagaccagagaggtacagaacttgaggaagaggcccaacggggtgaggtgggtaccacgcggggaggaggaggaggcggcggggacgacagacacatccgcgtccgggtcgctgtcacaaatatctcctcagacgtagatttttctcttgacacactgtacaccttccactgcccaacttggagaacagcgttctttgcaaatgtttaaccaggacatgccctgagctgtgtcgtctcggggtgtgctccagagatacagaaacagatcactaactcgcgttttttattaaaaccaattaattgtgaaatgcatatcgatcgttaagagtttgtataatttagaaaagtatagtcaagacgataaaaagcacccataattctcccatccggaaatgatcagtgttaacattttttttccttgcagagccacccaagaatgcactggtattaatattgaatactctttccaatctgttttttttcgtctctctctctcagattgtgaacaactttctatgtacttttattccctgttcttttcaactcattatgacattgtgggcattcacccatattgtggaatatttttcagaaagccttaatggctgcataatattccaccagatgtgtgtattgtaatttgttaacaaatcccctattttgggacatgtaggtgattttgtaaatttttactatcaaataaggctgcagtggatattctcttaaatttatctttagctgcactttccatgatgagaatatcttagaaatgagatttccaggccaagataatgccaaatggctttacaggaaagtggcaaagtgtaccacttcaccaccagcgcacccttcttccagcatctgcggtgctcgttgagccctgtcttatgcttataggcttttccagccggcttgcctacccacccctcaaatcccacccttgcactaatgttgcaatccgcatacctgagagggttcctccttatctctgaattatgccatttctctctctccccctctcttttttttttggttttgctcagtgctgtggccttgctggtgggagagaaggtacaagaggagaccactctagtggtaagttatggggtcttccctgagtagttatggcagccctccctgcagtgctcttcagtgagtgagcgtgcttcacaaaaaaaaaaattccactaccatgtatttagatgcttcctcttaactgtgtttgctttctgcaggatgatccctttcagatgaagacaggtggtatggtggatatgaagaaactgaaggaaaggggcaaagataagtaagttcaggacaagcttagatgcaaatt

SEQ ID NO: 589023 - DNA, 4001 bp, Homo sapiens
attgctgcctggccaatggctccagagaccccaggaagtctctggcttgaacttccagtgcaggagctgagccaagccacctgccacagccacggccccctcctcttcccatcttcccaaaccacagctggggaggggcagcccccggacccagcgagtccaccaggcaaggctgggctcctcccaagcctcctctgtgcggacccagctgccctgcctctgccctgagccccagcctgcaagcagcagggaatcctgcccgagcaagtcagcctgggcagcccctggaactcatatcaaaggcagccaccttggttcgaggcccagccctgctccccaacagctacccttctcctcagtttctccagccataaaatggagtccagacttcccagtccccgtggggctctgagaacagatccggggaagccctctgcagcagtgaccgccacccccgccacctgcacctgaccactgacatcctgcgggaagaggcgctggctcccagggaggcctctgagggctcctgctaagccggtccaggcagtgctgggtaatcattacccagtgggaaggcggccccttcccctctgggcttgcctttgtcagcgccccccaacccggcagagaaaggcccggtctcctaggaaacgcagtcaccgccaaagggcagaggcctcgctgcccagcctggaatcgctggtgactcactctccctccttcccaggaaccacgtcctaagtcccactggtgaatggtccctctccacatggagttgccactgcgcgcggtgaggggctgctgagctggctggaagaccgcacctcctcggcgctgggtggacccggctgccacccgctctgcctcccccgacctcttctaagctgctcccggtaaggattccgcgacccccggagaacaggacggaagcctcgattctctcaagtcttagccaagttccctcttaagaggccaagaaaagcagcttcgttcggctgggcaggcattttcctgcctggccctgcggccgcacgcgtgcctccgccgcgacaaaggccacactcagcgcccgaaggaggggtgggggtgttgggaaagcgatgggggccaggactggggccaagtggccctggggatcctcgaggcggctcgacccgggagccaggactggcgccaagtggcccgggtccgggtccgggaagaggcggaggccggcgagggggcggtgcccggggccaacccagctccctccggccccgagggctcccgccccgcgcccctcccgggccctccagccgcgccccgggccggcgcagcgaccgcgcccgctcttccaccggcgtccggccaggaggcgcgaggcccaaggatgcgacccacgacgcgcacacccggctcggcaggctccctgggaaatgaggggccactcgcagggccccgcagagcgagcgcagcgccggagcctcccccatcccaggccgcgcagaccgcggaaccggcgcaccagagcagtgcccgcgggcggcggcggcgcgacccaggctgaggggactttggccaacttcgcgcctcctgaggtcgcgtctcggaggcccggggcgcaccctccagccgcccgcccgcgtcccggagcccggccgccccagccagggcgcctgggccgccgccgctgcgacctccgcgttcagtccgcgcgtcgggcagcgcgaacgccgcctccccggggccctcccgcccgccgggcgctcacctgggacatctgcggccggaagttgatgtccttgaggtcgatggagccgggggagaggttgtgcagcagctggcacagaaggaccccgtcgcgcagcgcctgcgccaggtcgaagaccacggccgagggccacaccacccggtggttgggcggcaggaccttgcaatcgatgagccagcggccgcactgccgccactgctccatggcgcccgcgggcccgaccggctcagggcagtgctcgagccaaagtgcagcggccgcggggcatcccgcccgcgcgcgcgcggggctcagggccggggcggggcttcgcgcgggctgccccaggtcccccgctgcgccgccgtgcgtcccctcctcttcctcctcctactcctcgggctcctctcgggccgccgctcccgcccacgtgcggccgcggggcgggcaacgggcagcgcgccggatctccccgcttcacacacgcaagtgcctgcgggccccgggccgggctccacgcagccagtcgccgcagcgctccccaatccgcgccgccgggcgccgcattctgcgctcggggcgccccgcggccgccgcggctcctgccccgcccgagacaaaggcccggcggggtcgctcgctccgcgcgtcccgggcctgggccgcccgcgtcgccgccgctttgttcgccccacccgcagtccccacgcccggcgctgcgactcgacgactcggcggctcggcggctccacggctccggggcgctgggggcgcagggggcgcggccacggccgggcggggcaggggcggggccggagcactcgcctggcacctccccgtgtcccaagcgccgcccccgcccccccacttcctgccccgctaccgcccgcgaaagttgcggtgggcgggggttgcggcgcaggcccaggtccggccgactttctccaagggcgctcggactttggggagcccttctccctgggggagcgacctcgcccgtggagtgatggccgggcgtccccccgggtgcctttggtcctccgtggaggtcaggaggtggtccctgtcgcgctgggcgccctcgcatggccgttcggtaacgacagactcgggagagggcaccgggctgggccgaagcttactgagcccccttggcccatcaagccgccccggcgggatacccgaggctgaggctgaaggcacacgggcccaggactcccagagccctcttcctgtcctccgccctggccgggggcccataggaagacccccgaccctgcataaaggccaggattccccagcttttggccaaagtcctggccactcgcagctgcccagcgggcagttcctggcgtccagggcggaatgcgtgacatgagtgagggcaggaaggtgctctccggcccagggtcgcagccggccccggtgctgatccgccctgatctcccttctaggccacaccctgggtggtgggggcgcggtctgtccagctggcaacgtgtgacggtaggaggggcttcaaggacaaacagattctgcaactgaaattatatggatcctggctcagctgccgggaaccgcgggttttcactgctgattcactgggggacaccaggcaagtccaagcccttctctgagactggctcagcccggaggctggggtgcggtgtctgagggctcccaccctggactccggtggaatcctgggcctgtatgagctggggctgcactgcagcccccggaccccttaccccgtggcttccctgcgcaggggccggaacggggatgcgagcgcagagagggtcccctgggcccagggcctccgatgggggtcctgtcctggaaattggtctctgcagagtcagactcaccccttctccactgaggtggaagcagggggtcccagcttagggtctggcccgtagagagaggtcaggaaggagctggcccctgcagcagtaaactcaggccaggtggctggtgaggcgggggctcaggtctcttgcccttccccgaggaagcagcagtgggcacctttagggcaagggggagagctttcctcaccgaagcaagatggggcagcaggtggacccatcagcatctccctaagaaatcagaaagccaggagtgaaacctgagcggggccctccagccccatctgagagcctacactgatccctcctcctgcaaagcctcatcccctcctctctagagcggggagacccggctcccactggacttgcttgtgaagaatggacggataaattaccca

SEQ ID NO: 589024 - DNA, 4001 bp, Homo sapiens
tgtattttaatctcaaagctgtatcctaggaaaacctccattctgcctaccatcccggactctggctctggagatgagtggtatgcccttttcttaaggtaaagcctctaattccccatctacctactgagatcagatgtggtaatctctaaaagactgaatttggcctgaccatgggccaacagcagttctggacactctttggggcaatcctccattgtcttctgtataagtcaatccctttccagaactgcacaggggactccacgggacttggaagggtttcagctaagagtcatcaaggtgaccaagaggttagaaacagctgatgatgccaggttccaagaattttagatttttacttttgaaaataagaggctgactgcatataaaccaaaagaatactttcagaataagtgactcttttaaataagcaactgagtaatactttatccgaattcagaaacttgagaaaaaggaacacacctcaaaaaactaatctcttcaaggaaggaaggtaatttgcatagagtttccttgggctggctgtgtttttttttttttttttttttttttttttgcctctaaaagctctctattctaaattgaatgggctgaggtagccaagttttatctaacgctttcctaaggatggaggtggggtcagaaagccccagagcccgggtaatttctcaatatagctggttggggaaaggagtgcgcgcacgtttgtgtttttgaagagttagtgcaactctaaactgcacaccacgaaacctggaaatctggaaaggcgcacaaaacacgaactgagattccaactttagcaagaacctaaaatgttaaagaaaaattcctttctccccacccacgagtcataacattaaggaaaactggctcaaactttctagtatgaacaacaggcctaaagtaagaagaccagaagcgaaaggtagggctcgccctctccctaacagtccttcacgactcaggtcacacacagaggatgcccacctccggccccgccgacccggctccaaaaaggcggctgtgagcttccctgagctcggcgggccttccccgaccccgggctccgcctcggtggcagagctcctgaggccttcacatggcgcaaagtccacgcccaccgggcccggctggggcctcgggctcgcggggcctgctctctccggggaccaaaggctttcggcgggtggtaggccggacggcagactggcgccccaaagccccggggcgccgcgccggcggagtgggccggaagacctggccaggcccagacgtccgttctaagggagccaatcgggcgggccggggcctgcatgacacagcacgatccggcccaggctccgacccggacccaacgcaagccccgcctagggggcgcgcgggtgcgcagctggccccagccgggcctgccgggtccacggcccctcactcgccccctagcttcccttccctctttcctggtctccacctctctgacgcgcccacggccaggccccgccgggcctaccctgcgcggctggtcccggtgcgcgccgccgcagcaagcgaacggcgcgcgcacactcactcggctccagaagccatggcgcgcgcctctcccggccggcggctgtggcggcccgcgggtaacggctacgagcggtggcaagcgaccgactgggccggggctcggctcttccaggcggtgggcgagcagcggcgacaaacccgcaagcggcttccctctcgcttcctcccaccggcagcgaggcgtcgggcgaacaacgctggctcctgatccgcgaggtggcagtggcagtggcagcggcagcggcagcgacgactcaaacgacggtcgcagacgcttcgctgagactgagccgagaagagccgaatcatcggaagggaagctgctcccacctcagccaatcagcgcctgccctgcggactctcgcccgcctctccgcgcctctccccagcaacccgcagatcacagccaatcaggaaattcgcttgcggcctggctcccgcctcagtgatgcgacacgcctagtaacgccacgtcaattggccgcaacgctacgcttcctcgacggattggaattctcagccaatcaacgaaaggaatagggcgagatcgattagtgaaaggagaccctttaatcccttagaggcggactctcccacttggctccagttcattggctccggagtttatcctcctggaagaacgtggcacaatagactgaacccttgtattagtctagtcctattgtggtaacccatacacccatcttctcccaaaacctggagatcttctaagacgccatcaccaccctgacacttcttgctccttctcaacgctgcctccaaccacccctactctgaactttctgactagcaccccactcctaccccattgtcactgcaccctctggtaaccccaatcccacagcctttgcagtttctcagcgcttgtgcctttcttcctcccgtcattaatattaataccttataataaggcactcaaatccagagaagtcaaagggcaaccacagaacacacagccaattcagtagaacccaaattagcaagaaaactgcatatgctgggacttgaaaatccttgggccccaaataacaggggtccctgttagtagtcaacaggcagctgttggtgatatgctgactcaattcacctttcaccctgtacccacacagacacatttgactaagacgagtcgaatttctagaatttggaattaggaagggagtgaagagttactctgagagaaacctgcctgtctctaagtaacaggtacctgcccttgtcctgagaggcctatctagaccacccttcagacccaactccactcattgtcactgtcctgggctttggggctctgcattcaggcaatgtgaaggactaaagccactgcctccaaagtgaggattcctgtagccctttcctcatacccagacttcaagttcataaggtagacgatgtcaggaaagggcatcatagacaactagcactcaactagacggtcacaagccttcccacgcaagtatatgtagtaggcagacgagataaatatgaaattttactcgacaacagaaaaggagaaacaggaaaaaaggtgcctcgagcaaagtcaatgacttggtggtggcagagattgtttcctccaaaacgagaatggtagtaactagggcaaatttcacaggcctaccaccaatctcaccagtccaggaattatataggaatggtcacattcctaatgatggtgaagcagaaagccctccccacagagagacagcccactggggacccagctcaagctcttcaaaacgtggcagctacaggtcacaagactttggcagagatgtccgaaattcttcaaggaaggcgtcacgatcagagggacggatccagctcaaatagctttctaggtacagggggagagacctggagagaaagaaggatgatgcctaagggtgaaagattggcagaaagctgggcagccatacccccgctttcagtgttcaccacccacaataggtccaaggactctaggacaccaactgcccctcagccccaagccagcaggcctgagcctcaccacagagcatcttcatgtgaccccttagtttgggcctccagcctccaccagagtgcagtggcctcatccctccgatctagcctcttcagagtctgaagcaggtgaaagtaagtgtctcgattacctgtagccccagcccagagtacagagtcttagaacttgacatagtcttaggcattgttttataaaaagggaaactgaggcctagagagaggaagtatcttgcctacactcacatatggaagcgggggcagatcattcacaaccattcccatcccagtgtccatcatctgccccctactcctgtgcaacccacaacagcagagtcatggtctttgtgtctgaggatatcggggaaaccagggaactcttg

SEQ ID NO: 589025 - DNA, 4001 bp, Homo sapiens
aaagagtccaggcaggggaaggcatttgagagaacagcccgtaagagcctgtggagtctcctactttccattgaaaataacactgcccatgctgcccacttaagagtccgcggaaccatgtgaccaacctaaacgtgatcgcaccgctaaccaatcgcagagggcggaaaggccagtcccagttcacacgctccggacagtggcaaccaaagggcaggggcattcggagacgtaaaaaccccaggcgctgcccgacaggctccttgaccacatgctttaaagttcgctctcacttcaggagcacgtgactgcaggccggcagggcccctgaagccacccggcgacgggagccagggactctggaacgggtgttaagggcctgggcggctttcagtcccaattccctgcagctggcaagcaagcccctcggcgtcacatctgaagatcacttcggggacgcgctaggattccgactgagtcctctcagaaaggcttcctgtcgcctgtccaggaaagttacgaggccccaagtgggaacgtggctgacgaccaggcggggcccccaggcccccgcggcagagtctggggacccgacagtagtcaccgccgcccttcccaacaagacagggccacacgctcgctctcgcgctgctcctttgagctattgtgtagaatgaaggctaattacagtcactagcctaggactcaattcctctcgaggaaacgtcaccgggaaggagggtcagcaaactaacctgattaagtctcccctccactccccctccgcgttcagctacacgggagacccgagcggtttccaaacgccgcccgaggcggggaaaagggagaggagaagcgcccagagcagagtcctgcgtaaagccccgccgctcccctaccccgcacgccggagaggcggccccgcgccgggggagtcgcagtccgggtgccctcggctccgcggagcctcccggccgccgcccaccgaacgtgcgccagctcgcggccgccggaagactctgaagcccggccggcccctggcgctccgcgtccccggaggcgctcaccttctccccccgtccgctcccgcactccccggggttcgagggtgcgcccgaggctgccgcacacgtcttggccctctgcctccttcccaacactgcgcctggcagaggaggcagaaccattgttcaatgctcagaagcccacgcacctcggcgcccgtcaagagggcgagaaacgaggcgaagcagcggctctgggggaggcggagtgaggggcagaagactagttcaggcgaggcgtcggggcaccccgaaccccgctgttccccaagcccggctccctttagcctcggcgctgacagctcagaggcgccaccacggaggggagggagggaaggcgaggagaaccgagaggcgcctcctaggaggcgggtgggcaaacggagacctacgcctcggggtctcccggtgccccggctgggtcccgcccgccggcggaggggcgcgtcctcactcaccggttccggtggcgccgctctcccggggcgcccagcacagcgcgagcagcagccagagcgcccagagcgcggacgtgcccatggtgcccgcctggatggtgccgccgccgccgccgccgccgccgttcgctccgcacgacaagttaccagtccttccgaaaggaggaagaaggtgggggcggggaggggaaagggggagaaggaggggaaggagttggcgggggaagggagcggggaagaagagggcaccccctcccctacaacttgcacagtctcctccccacccacccagccacctccccgggctgcagcagcagtgcaagccgagcctgcgggcagaaaataatgcaggcgctgcagaggaggggaggcaaggggagaggagggaagggagagggggtggggagccgagagcagaagagagcacagaacggagaggagccggtagcggagcacccgcaccggcggcggccggagagcggggtgagcagcggggagggggccggagggggcgtggtcaacgggaggcgcggcgggcgggcgggagcgcggcggcttcggccctcctttccctcgacgcgctcctcttgcacgcgccgggcagccgggtgcccgcgcggggagcgtgcgagtgtgagcgtgcgtgagtgaccgcggtcgtggtcgtggctgccgccgccgccacccggaccgctctaggggcccggctgctccgcgcgttcgcctggggctcacgggggcccggggcgaccgctggttggctcgcgcgccgccctcgcctccaatcccgggtgcctgtcctaatttcctgatccagggaacctgccgccgcagcggctgtgcgctccctacagtcattactgtaccctcccggcagcctccggcagaacacgcagcagcagcagcagttagcgctgatgcaactatcgttgctgttgccaccgcctccccactgacggggcgtgcacctggggggtacttgcagtttccaggggcaacaagcatctctctaccaccctctcctgcgcccctgagagaggctggtaggtagcatcttcttcgggcctcctctatccactcagaaagtgatgaagcggaggggctccaaacgtttgggctgctcaaaagtggggtttgggatgccggtctcaatcgcacgctgagatgccgttttgccgaaaactaaatgtgtctttaagtgagagagtgtgtatgtttgaaagagagtgcgcgcggttgtggctggtcctctgtaatagaacaagactgaaataacccagcctgggatgaggagaagggaaattgctagcgcagctttgcatttgctcatcaacgattatagttaattgctaattgcacaaaatgatagtttgagggcctgtaattaaaagcttaaccttttcttgtttggaagagaggggccccatacgtttattcctcttgatatactttgtaacattcaattacaagaatcgaggaaagaataaaggaagcaaagacaagactcctagaaagggttggttcttcttttgtgcctgacagtacctgagtctataatttgctttttgtgtacttcagttttcttgcacacttagccctggttgaggtgcattgtctgctgtggtctgttgagcatctaaccagagtgggagggcacatcgagcgatttcactttcttaaataaaaggtttttggtattttgaaaaagttgtttttatcttaattcaaacttggaaggtttcaataatatcatattctgactctattctgttggtgatctgaagagcagcgggcactgcctcactgtcttctccttgccctggttctcctggaaatttgtcaaggctagcaatcagaggagatgtttattaggaacttactatatccaggagacacacaggagaggaaaattccagtcaggataggtttctgtgggccaaagatatcctgattgtgactgctaagcatgaaagggcttaactctacgtatggatggtatcttgcactatagctcattttgaatgctattttgcccaccctgtggttacatagttgatacaaactgcagcagccacacaggttgcatgtgaaacaactgaaatttgtttgtatgacatttagtagtgaagatgcatgccggtgttattcacctaatggcattgagatgtgataggaaaaccttagtgcatgatgtctttcatattctcagggttctgaaatgccatctgatgagctactgctttacagaagaggaaaggagtagaagggatgggtggaatcaatacaaaaagaggcagcattaataaacagtcatatgacttgtttttaatactttactcagagatacaggtatactacaagctatacattgatatggtataataagacttaactttgaaaaacgtgtgtgagtactttctaattctccaagggatataaataaactttcagtgaacttagctgcagctctgtattcaat

SEQ ID NO: 589026 - DNA, 4001 bp, Homo sapiens
accagcctggccaacattgcaaaaccccctctctactaaaaattagccgggcgtggtggcggggtgagatcaactgcaaaggagcagctgagagaattcgggaggcttgatgaaccttttatgtgccattattgtggtggtgcatacatgcctcttagcatttgtcaagacagaactgtatcacaagagtgaattttactgcatgtaaattttaaacaaataaataagttgattaatcacactctagacaaacctccaccctgaatgtggaagcaagactccactacagatcaaagttcacctcaagtattcttaaggcttccttctgaggtacatgggagacaaattttattttcactttgcaactaagaagcagcataaacagactgcaagtttcttgtactaatcaaacaggctgagcagctatcactatatccctagcttttgtagtccactcactctccatcatgatactaggtccccacggtagtaacattctttaaaatcaaactaaactacctgtttacattatctcataaacgagaagagtcaaggtaagtattttagaagaagactggaagtgtgtgcacagacaagaataaattactttaaatatatatttaaacacacacacttcacacacaaaattaaccctcactttggcctgggaaattcatttcacaaaggagtctaatttctagcgggtgtttaaaataaacaagcgcataatgcaaaaacagatggaaacactaaaaatgaggctctcactaaggcagaataccacactaaacggacacaaggaaagctcggtccttcaccacctaggcagcgtagggccctgttcagcccggtcttttgcaggtctgagacgttgcaccgcacgccctggtttttctttaaaattcggcaattcactctgacccacatatcctaaagtcttgaaaatgttacacattcctaggtcaggctgttaactgcaaccacacaagcaactgtttgagttactttgcacttgagtttcctttttgttatccgccgaacccaggcgagagagagccggcgtccgggtcctagggccggaagggggagagcagaaagcaccacgggtgaagccaggaattgaggctggggaagcaaggaagcgggcgtccccggtcacagcgccctgccttcacgtgcgaggcagcatgcaacacgcgggggatttctggggccttcgtcataaacccaggggggcaaaggacagggatgggacccagcccaggaaggcgtcgtctcgcctcctcgccccgcgcggctaaagccggaccgtgcggggccaggggtagagaacggcccctcgccgggacttgaacgccagacccacggagcccacggcaagtccgctccgctcggaaaatatagaccttttcatcccgcactcatgaccctctcctttcccccaaaatataaacaactcgagggcggaggccagggaactgccgcccggctttacgtaacttgacccacaggcgggcggcggcaggtggctgcacccggcgagcaaggtgctcgaagccccgagaacgcaggacgccgctcgggcagcgagacggccgggaagcacgagaggccggggagcggcggcggcggcctccttacctttccagatgcccagagagagctgggacgtgtccaagtccaccacatagtcccccaagaaccggttcaacacgtccacgaccaccgactcgaaaaccatgttcctcagccgtggtgggcacggcagccggcccgtgcgctcctcctcccgccgccttccccacgcccctccctcgaggtaattcggttcaccggctccggggcggcttcagctgcggcgcccccgctggcccaacgcgcagccctagcgagcccagcgagagacggaggcggtcgctctcacgacgcgtgcgcaagtctgcgcgcggctggaggcggagcgcggcgcagacctgggcgcgcagccctgagagggaggaaaggcggctgcgcggccgcggctctggagggtgcccttttcgcgccgagcccggctcctctttcctgtcggccccgcctcctccccatcgcctggcaacgggacaccggtctggagctaccggattttttccgaccccgccccctcctgcagatcagcgtccccagcggccccccagggcggggcggttacgcccgacgggaacgcccctccccctagaaggtggtggccgcttccacgcgtatgacagggctcgcccctgagtaagggtgggcggatcccagccccgtcgccagaagcttcaagggggctgtcccagggagcatctcccctcatcattacagggtgggagggtccagccagcctgggtgtcttggtgcctgtaacctccccgcctggtcctccgaccgcctggctctcaggaggagttaacttcctgctgcgagtcgaggatggagttacatagtccctgccctgcatctgagatgagcacccatttttggtcaagtcatttatacggagctgtctttcattccaaagagtaacacgcttccctgcagataagagttggagtcagccggtctggaaactgctgaacaccctccaagaaatactgggagtgctggacccttgacccctatgcctccaccgaaccactgacctaaaataaattacaattacagatctttcgacctgtttggtcttacttagaagtaatcccaaaggcctgaggtcacagagatgctaaatgtgaggtttagagaactgtaattaatcatctgcaggaccgaaaaagtgtacattgagcgttttctctttacacgttaaatgaataatgatggatttctattaattcctgtgtcattttactactttttgtgcatagtcaccgacttttcaaaattaaatgtttagggtgtgcctttgcaagtagaatgcctgacaaaaactgtaagtttttacctgagtttatgaatgtttttcatataattttatatttgaaggacctttatgaggtctccaacctcctagtcttaaatataatgaagctgaagtgttagggatgtgtgcaaggtcatacaaccaatgttctgtggaagaactggaacttggcccttctgattggctaccaccccacctgcttctctctcattcagctaacagtctgcttcagaatacctgcacggagaaacgaatagaggctaaaatgcctaggaaggggaagagctctacataatgaggcattttgccattgcactattaataagaagccagatacacagtagctgcaaaattccgctgttatatctagcgctgcaaattcaaagttacaagaatttccagaactccaaaaatccatcttaagtatcttgcaaacgttttcatattagttttctacgatctaggaaaattttgtggaagtgaggaaggggaagggatgttgctgaaaagttagaggtataagcataaagcaatgaaaaaaaattctgctgaggaagagttagaaataagtggatgcatattgtaaccgaattcttatctagtgttagatgtatatgaacatgctttgtaaatactaaaagacaacattttgcattcagtctttgcattgcttaatccatctaaggaagtttgtaagcaaaaatatattaacatcatcatgtaaaaggtatgctcattaaaccattaaaccaaatttctgttgtaccttgaaaaataagcccaatgactaccataaaaactcgagtttcaaattaggaagtatgtcagtgtatgttattctttctctagatcacaattaaaatgctatacttcattgtttgatcaaatggaaaaacaaaagagggggagagcatctgaatgaccccaaactgcaatatcatctaactttacaataaatctctaactttgcaagtaggacttgcagttttatgtataccttccatgccacagctcttcgtctttaaagttttggtgtactggtagtaatcttggaattttt

SEQ ID NO: 589027 - DNA, 4001 bp, Homo sapiens
ctagaatggactctgacctaagcatcaaaattaatcatcataacgttatcattttatggccccttcttcctatatctggtagcttttaaatgatgaccatgtagataatctttattgtccctctttcagcagacggtattttcttatgctacagtatgactgctaataatacctacacatgttagaaccattctgactcctcaagaatctcatttaactcttattatcagtgaatttatcatcatcccctattttacataaggaaatggggttagaaagaccaaataacattttttcaacatcaaaacactagcttgagatcaagcccagacttggatctgtcgtctgaattccaagctttttgttatttattgatatgttttgttgttttcatgcaataatgcaaatattagcccaaacattttgttagtagtaccaactgtaagtcaccttatcttcatactttgtctttatgtaaacctaaattagatctgtttttgatactgagggaaaaacaagggaatctaacactaaccagcccgtagtgtgtggtcaacactttcgttactttagtatacatcaccccaattgtttgtcttcaccacacactttggagttaggtagtagtatctatttttacaaataagaaaacccaggcacaaaggggttgattagcaattatcttttgaaaagcctgtagttgctcatctgaagaagtgacggaccacctcttatttagtggacagacagtaactagttgagaagacaggggattttgttggcggaaaaaaaattttatcaaaagtcgtcttctatcagggagttttatgagaaaccctagctcctcagttccacagtgggtaactgtaattcattctaggtctgcgatatttcctgcctatccattttgttaactcttcaatgcattccacaaatacctaagtattctttaataatggtgggtttttttttttttttgcatctatgaagttttttcaaattctttttaagtgacaaaacttgtacatgtgtatcgctcaatatttctagtcgacagcactgctttcgagaatgtaaaccgtgcactcccaggaaaatgcagacacagcacgcctctttgggaccgcggtttatactttcgaagtgctcggagcccttcctccagaccgttctcccacaccccgctccagggtctctcccggagttacaagcctcgctgtaggccccgggaacccaaagcggtgtcagagaagtggggtcccctacgagggaccaggagctccgggcgggcagcagctgcggaagagccgcgcgaggcttcccagaacccggcaggggcgggaagacgcaggagtggggaggcggaaccgggaccccgcagagcccgggtccctgcgccccacaagccttggcttccctgctagggccgggcaaggccgggtgcagggcgcggctccagggaggaagctccggggcgagcccaagacgcctccccgagcgcggctccaggaccccgtcgacccggagcgctgtcctgtcgggccgagtcgcgggcctgggcacggaactcacgctcactccgagctcccgacgtgcacacggctcccatccgttgtcttccgagcgtcaggccgcccctacccgtgctttctgctctgcagaccctcttcctagacctccgtcctttgtcccatcgctgccttcccctcaagctcagggccaagctgtccgccaacctcggctcctccgggcagccctcgcccggggtgcgccccggggcaggacccccagcccacgcccagggcccgcccctgccctccagccctacgccttgacccgctttcctgcgtctctcagcctacctgaccttgtctttacctctgtgggcagctcccttgtgatctgcttagttcccacccccctttaagaattcaatagagaagccagacgcaaaactacagatatcgtatgagtccagttttgtgaagtgcctagaatagtcaaaattcacagagacagaagcagtggtcgccaggaatggggaagcaaggcggagttgggcagctcgtgttcaatgggtagagtttcaggctggggtgatggaagggtgctggaaatgagtggtagtgatggcggcacaacggtgtgaatctacttaatcccactgaactgtatgctgaaaaatggtttagacggtgaattttaggttatgtatgttttaccacaatttttaaaaagctagtgaaaagctggtaaaaagaaagaaaagaggcttttttaaaaagttaaatatataaaaagagcatcatcagtccaaagtccagcagttgtccctcctggaatccgttggcttgcctccggcatttttggcccttgccttttagggttgccagattaaaagacaggatgcccagctagtttgaattttagataaacaacgaataatttcgtagcataaatatgtcccaagcttagtttgggacatacttatgctaaaaaacattattggttgtttatctgagattcagaattaagcattttatattttatttgctgcctctggccaccctactctcttcctaacactctctccctctcccagttttgtccgccttccctgcctcctcttctgggggagttagatcgagttgtaacaagaacatgccactgtctcgctggctgcagcgtgtggtccccttaccagaggtaaagaagagatggatctccactcatgttgtagacagaatgtttatgtcctctccaaatgcttatgttgaaaccctaacccctaatgtgatggtatgtggagatgggcctttggtaggtaattacggttagatgaggtcatggggtggggccctcattatagatctggtaagaaaagagagcattgtctctgtgtctccctctctctctctctctctctctctctctcatttctctctatctcatttctctctctctctctatctcatttttctctctctctctttctctcctctgtcttttcccaccaagtgaggatgcgaagagaaggtggctgtctgcaaaccaggaagagagccctcaccaggaacctgtccagctgccaccttgaacttggacttccaagcctccagaactgtgagggataaatgtatgattttaaagtcgcccagtgtgtggtattttgttttgactaatacaacctgaaaacattttcccctcactccacctgagcaatatctgagtggcttaaggtactcaggacacaacaaaggagaaatgtcccatgcacaacgtgcacccatgcctgggtaaagcagcctggcacagagggaagcacacaggctcagggatctgctattcattctttgtgtgaccctgggcaagccatgaatggagcttcagtcaccccatttgtaatgggatttaattgtgcttgccctgcctccttttgagggctgtagagaaaagatgtcaaagtattttgtaatctggctgggcgtggtggctcatgcctgtaatcctagcactttggtaggctgacgcgagaggactgcttgagcccaagagtttgagatcagcctgggcaatattgtgagattccatctctacaaaaataaaataaaatagccagtcatggtgtcacacacctgtagtcccagctacatgggaggctgaggcgggaggatcacttgagcttgggagatcgaggctgcagtgagctatgattgtaccactgcactccaggctgggcgacagagagagaccctgtctcagaaaaaaaaaaaaaagtactttgtaatctgtaaggtttatttcaacacacacaaaaaaagtgtatatgctccacgatgcctgtgaatatacacacacaccacatcatataccaagcctggctgtgtcttctcacaaatgcactgctaggcaccacccccagttctagaatcacaccagccagttcaccctccagatggttcaccctcaacttcataaaagttccctacctaatctactga

SEQ ID NO: 589028 - DNA, 4001 bp, Homo sapiens
gcaattaaaaagtctcaagaacaaagtatatgaatttgggttatatctacgttgttgtaatttatcatgagtagaataagaaataaaagtactactaagttatcttccactatttttattaggaacatgtaatatacttgagaggaggtataatttctggttcatttttgtatctatgatttgaccttagcctaggagaatgaacgcaaggcaaataaatacctgttgaatgagtgaatggaatactaagatgaagagtcggcttggtggtacgctattttttttttttttttctgagatggagtttctctcttgttgcccaggctggagtgcaatggcaccatctcagctcatcacaacctccacctcccaggttcaagcgattctccagcctcagcttcctgagtagctgggattacaggcgcctgccaccacgcccagctaattttgtgtttttagtagagacaggatttctccatattagtcaggctggtctcgaactcccgatctcagttgatccgcccaccttggcctcccaaaatgctgggattacaggtgtgagccaccgtgcccggcccagtggtacactttttagggacccaacaacataagcgcccttttaacctgcccaacaacatatcccttagagagcagtcaccctgtttcatcccaggctccagacccagaaaggctggagaggacatgggaaaatctacagattcagttatggctctggatgtccctgttggttccagttggaaccaggcctcggtctgaatcccatcacttctttctattccaatctgctttccaaaggccttgggatatccagtagtcactctaaaccaccctaaacagaaagcagagaattctcttttaactctccagtgcaatattccttgatatacaccagtacctatccgactgttctattccatgaagaaactgggactcagagggctgtgacttgctgaaggtcacaggggcagagccgggtggactggaccttatttccctggtcccgttaatgcaaatgctgatatcttatctccctccgtctccccaaatctccctctgcacacttctgtcttacactctgggagaccaaggcatctttagtcgccaaaacaatgctcaaagaaagaaaagtatgagtagaaacacctggaagctggtctggttcgaccctctaatggtacagataggggaaaccgaggcccagggaataagagggtcttgcctagagtcacacagggagccagttctaggccaccactctcacggttgcctcaaattttggggacgacttgtgtgcagtttttcctttctgtcgcttcagatggcaaatgctcctctccctgcccattatatgaacaactaaagcttaatttgtttttgtttttgttttcaagagacggagtctcgagtctcgctctgtcacccaggctggagtgcagtggcgcgatctcggctcactgcaacctccgcctcccgggttctagcagttctcctgcttcagcttcccaagtagctacaggcgcacggcaccactcccggctaattttttgtattttagtagagacagggtttcactgtgttgcccaggatggtctcgaactcctgagctcaggcaatccacccgcctcggcctcccacagtgctaggattccaggcgtgagccaccgcgcccggcctaaagcttattttttatgtgtatgtggaaagcggggagaagagtccccgaagatgggaacctagcgccacccagcccaaggttggccctcataaccgctctccgcttcgaccaaagggcgagggttgcccgctcctagtctgccgctatgcccctttctcccacctcaggctcagtacccaccggtgggctgcggggctggagctggggccggcgggaacgcggagcctgggggtgggaacagcctccgagccctcccgcgcctccgcccctagcagcaggcgcacgttgctagggcgggagtgctggagaaaagcctccgggcaccctcgcaggccgccgaaccgcagttccgttcgcctaaagctgggacgggaactgagcgcccggcgctactctcttcgtgatcaggtccagaggagaggacgcttgtgcccaggactccgctgccagaagaatctagacaatccaagcaaaacgggtacctttgtaatagctatggagaaagcacttaataaaggtcatcttttaaattattggtcgctcagacatacgtgttgccgtatttctttggagtttccctgatttcgactagaaattcctcctttggacactcccccagctccccactcctctattcctttcgttttttttttttcattgaaccattacagcctagtaccatagcaagaagagacccctcagtaccttcttgagatccaaatgggaagacagttgtagaaacacagtttttacagctgcggtcgcattgctaccagactagagtctattcatctccgtattcctggtgcacagtatggggcttggtatatagtaggggcttgttgaatgtttgttgaatgaatcaatggcagggatcctagccaacatttatttatttttaagacggagtcttgctctgtcgtccaggctgaagtgcagtcgcgcgatctcggctcactgcaacctctgcctcccaggttcaagcgattctcctgcctcagcctcccaagtagctgggactacaagtgcgcgcctccatgcccggctaattcttgtatttttagtagagatggggtttcatcatgttggccaggctggtctcgaactcctgatctcaggtgatccacctgccacagcctccaaaagtgctgggattacaggcatgagcctccgcgcccggccccaacatttattttgaaccctagtaggtgcctctgcagtgttgatctggcaaaacagccttcaatgaagatttgtggagtttctgaaaattgggtgcctttgagggggtgggaatggtgagagaagtttgcctccacatactggctattgggtctgttttccagtccagggaagggatcccctccatggcatccctgatgaagtatctgtagccctagttgatgctcactctgtaatgatgggctgattactttctaagctagtgacctattgttgggagatttccttctggcaggagaaagtatctacccgtatgccacttgaaactctgatcttcgctcagaaccaatggctctccttacagacttaatccctttcccccacaacagcctggcaagctacaaccaggatagactcactgctttgtcctgggacactgggctaggctcagtgcagctacagaggtgagttactagatctctgcacccaagatgttcctgctctggggatgtttttccctctgagagagaggctttaggcttcaggcacgaaagactcccaaactggtacctgtagccaggcctctccctgagtcggacctgtatatccacctgccacccgcccatctgcaactggcagtttaaaagacacctcattcttgacatgactcatactggaaacatcatcttcccctcaaacctgttccccctcttttccctgtaagtgctgggcactaccattcaccaatcacccaagccaaggatctaggagtcatttgtaactttacccttgcttcctcgttcaagaacaatccccgagacttctcaattctgcctcccaaacattataaaaataaaaaccttctctctacctaccagctggattcaggccaacatcagggtgtgatagattaaaaacgaccacaacttctttgtagctcttcccatcaaggctggctttgtaacttgttttgaccaatagaatgcagcaggagtgacatcgtgggacttctgagtttaagcttcaaaaggccttgcagtttctgctcccatcctcttggcacactgccagcatgggaagaggaccaggctagtctgtttcagagacatggcccatccaatag

SEQ ID NO: 589029 - DNA, 4001 bp, Homo sapiens
tccccaacccagtccttccaatctctcagctttctcttttgtccacggcactattcaccttctaacacactgcataatttacttattaaatatactgttaatgttacagccgttgccactgccccatgtaagctcgaggagggagagatgtccgtcttcttctctgatgagtccccaacccttgaaccgctcctagcacacagcaggtgctcaagctgaaagtccgcacagaccccttgggagaggccttgagcacgcagcatctcatctcatcagagcatctcctttcgtgtgcgtttgattaaacacctggaaaactggcttatctagaatttacaatgcagtttggtcatttaaaagttagcctgggccggcgcggtggctcacacctgtaatcccagcactttgggaggccgaggcgggtggatcacaatgtcaggagatcgagaccatcctggctaacacggtgaaaccccgtctctactaaaaaaaaaaaaaaaaaaaaaaaaaattagccgggcgtggtggcgggcgcctgtagtcccagctactagggaggctgaggcaggagaatggcataaacccgggaggcggagcttgcagtgagcagagatcgcgccattgcactccagcccgggcgacagagcgagactccgtctccaaaaaaaaaaaaaagagaaagaaaccaagtagcgccgaaaccaagtagctggcactactacactccagcctgggcgacagagtgagactctgtctcaaaaaaaagaaaaaaaagaaggccgggcgcggtggctcacgcctgtaatcccagcactttggaaggccgaggagggcggatcacgaggacaggagatggaaaccattctggctaacactgtgaaaccccgtctctactaaaaaatacaaaaaaattagccaggcgtgctggcggccgcctgtagtcccagctactggggaggctggggcaggagaatggcgtgaacctgggaggcggagtttgcagtgagccgagttcgcgccactgcactccagcctgggcgacagagcgagactgtctcaaaaaaaaaaaaaaaaagcctgaacgcggtggctcacacctgtaatcccagcactttgggaggccgaggaaggaggacagcttaagcccaggagttggagaccagccagggcaacacatggagaccccatctctacaagataataaataaataaacagccagcgtggtggcccgcgcctgaggtcccagatactctggatgcgcaggtgggaggatcgctcagcaccgggggctgaggctgcagtgagccgagatcgcaccactgcactccagcctgggcgacagagcgagaccctgttcaaaaaaaaaaacacaaaacaaaaccaaaaaaagttgtttgaaatgcttaaaaactacagttcacacaaaatccttcaaaacgtgggatccttggaggtgttttgtttttccactttttgttgttaaaaaatgggccgaaagtatcctctgggtcagtttctgtggaataaactgtaaaggcaaacggtgggacgcccgaacccgcccggcagccacggtgggacgcccgaacccgcccggcagccacggtgggacgcccgaacccgcccggcagccgcgctgcgaccccgccttcccgcccgcgtcgctccgcgcggggcccgcgccctcaccgtctcccagcggatgccctggacggccctccactgcgagggcacggacgccacacccagggtctcgtcctgcagcggccctggccgccccggccccgggccgctcgcaaccccgactgtcgccagcgccgcaacaccagcgcttcccgcctggctgagtggccccggctgcgcgcgggttgccatggagacggttccgccctctcgtgcggacgcactcaggcgcgacctccgcccctacgccgccatgagcggaaaacggggaatgtgaggctgacggcgccatgtttgaattggtcgcagcgcctcctgcaagacctggaagaaagaaaagtaacgattcttctcggccagagagagaagcatgaccggttttgcataccctgtccccagaaaaagcactctaagagtaggcgcgctactcctgggcgaggaaactgcggaagtgaggcattggtgccaggttcaaagatggcgctgagcagccaagcgcagaagcgaagagagggcggcagcctgcggccgtggccggcccgcgaggtctgggcctgggagcgcagatctggctgagcagctgattcttccagcagatccgagaaccgcgccactcgaacaggctgtcacctcgaagccaagtgatctccctttaatcctcagtctctgtctcaatagaatgatgatgaaaaatattcctacggagatcctaaatgtggttaaaaagctgggaggcccaaatgaggtcttctacagaaacatgcttattaaatcgaaattaaaagcaaataactaaataatgtgcctactgtgtgtcaggcaaagagcccagaacgtctctttcttattaagttctcaccctgaggaaagaattgctttttatactatattatgtcgttctgccattccgcgcgccccaccggaattaaaaaaactggagattctgacctgaggactaaaaaataaaaataaagaataaacaaataggccaggtgcggtggctcacacctgtaatcccggtactttgagaggccaaggcaggaggatcgcttgaagccaggagttcgaaaccagcctgagcaacatagtgagagcccgtctctacaaaaaaaatgttttaaaacttagctgggcatggtggcacgtgcctgtagtcccacctactcggcaggctgagtgtaaagatcccttgagtccagtagtttgaggctgcagtgagctatgattacaccactacactacagcctgagtgatagagcaagaccctatctctaaaaaaataataataggccagacgagatggccagcactttggaaggccaaggcaagaggatcacttgagcccaggagtttgagacctgcctgggcaacacagcaagactccctctctacaaaaaaaaattttttaattggccaggcatagtggcacacacctgtagtcccagctgctccggaggccaaggtgagaggatccctggagtcagggaaattgaggctgcagagagccctgattgaaccacgctgtgctttagcctggacaagagagtgagaccctgtctcaaaataataataataataacaacaaaataataaaaaaattctaaaaaatgatctgggaaggatagatgctactttttttttttttttttaagacagagtctcactctgtcgcccaaggtggagtgcagtggcgtgatctcggctcacagcaacctccacctccccagttcaagcgattctcatgcctcagcctcccaagcagctgggattacaggcacatgccaccacactgggctaatttttgtatttttagtagagaagggtttcaccatgttggccaagctggtctggaactcctgatctcaaatgatctgcccgcctcagcctgccaaagtgctgggattacaggcgtgggccactgcgcccagcctgtttgtttttttttgagacagagtctcgctttgtcgtccaggctggcgtgcagtggcactatcttggctcacaacaacctccacctcccaggctcaagtgattctcctgcctcagcctctcgagtagctgggattacaggcaaccgccaccacgcctggccaattttttgtatttttagtagagatggggtttcaccgtgttggccatgctgctttgaaactcctgacctcaggtgagccacctcacctgacctaatttttttttttttttttttttttgagacagggtctggctgtgtcaccaggctggagtagtggtatgatcatggctcactgcagcctcaacctctccgggctcaggccatccaaccacctcagcctcctaa

SEQ ID NO: 589030 - DNA, 4001 bp, Homo sapiens
caaagtagggacctcccagaaacttgccctaacaaccgctgcctaggttcactgcctcctttgagctccagcccctgattttccctccttgcagcattaaccagactgcctgtaattgcctgatattttttcttgtctcctgaataataattacaatagttatatctattgagtccttactgtgtgctaggtactttgcttgcatcgtgccagtggaaatggctcagcgaggtgacaggacttgaccaagatcacagtcaaaacagtggtaagcacgacatggctgaaccttaagtacatcatgctaagtgaaataagccagtcacaaaaagacaaatactgtgtgactccacttagaggcacccagagaggtcagattcatcgagacaaaaagaaaaacagtggttgtcaggggctgggaggagggagattggggacttgtttagtggggacagaggttcagttctgcaagaggaagagctctggagattggtgtcacgacaatgtgaaggtactggattctctgaactgtacacttaaaaatggacacaacaaagccggtgcagtggctcacgcctttaatcccagcactttgggaggccgaggtgggtggatcacgaggtcaggagttcaagaccagcctggccaagatggtgaaaccccgtctctactaaagatacaaaaaaattagctgggtgtggtagcaggtgtctataattccagctactcgagaggctgaggcagagaattgcttgaacccaggaggcgggggttgcagtgagccgaggttgtccagcctgggtgacagagagcgactctgtcacacacaaaaaaggatgcaacagtaagtattactgtgttacattacagttgtttttgtatgtatgtgtgtgtgtgtgtgtgtttttaaagaaggctgagtccaggcctgttagagtctaagccccagcacccagatatctcgtcccatctcccaacctgcccagccctgccttgcacccgtgcccagctcatcggaggtcactgcagtcagctctgcagcatgccagacccttgtgcctcggtcttcccggccaggtgtgggagccccacctgtgtggccacccagcctccacagcagctgcccactccgggtctcccagccatacacgcagccatcttctgagcctgtgagcagcatctggccatcaggggagaaggcagaagagttgacctagaaacagcacaaaagcggtcccattctggggaagaaacccctgtccgctcatctctgacccctaaacactgccccccaagagcctggggttggagcttgacttcaagcctcactccaccaccagagcccagaacccgggacccactgggccctctctcgagtcccgtaaagccagagcctgcagttggaggcaagagccttctctggaaccagagcctggaaccccagagctaagagcccattccagagccgcagctgacaacggagagtccagaatctactctaagttctgagttcactttagagccagggccccagaaaacaccagagtcagcagggagctttgtgcccctctcgaggcagagcccagagcccggggctctttttacaggcagagcttagaacctagagctgctctggagctggggcccggcactggagctgagaacctacttcgatccttcttgggttagcaaagtctactctggactcaatgtcctgagccactgcccagagaacattctggaacccccactacacagaaccaggaaccactctgcatccaaagccgggagtctgggcagagcccgctggacctcacctccccgccgtgctggccgaagaatttcactctccgcacggccagcgtggccgggaccccgctgttcatgggcacccggccccgccccgccccggcgggctccctcctaggcggccgcgggaccccaggactgggcagaggaaagaggaaactgtgtacaggcggtctccatggtaatcggggcggggcgtgcggccatggtggggtccctgcgaagccacgaggactgacaggcaggccagaccgcttgcagttcggcggaggtggagccgcagcaggcgggaccgcggcgggctgggagaagggacttcccgcgccagcggctgcgcgtccactctagggcagctctcgcgcggggcaacacggcaggcagagcggccactagagggcgcgccagccacacgcaccgcgcggcccagagcccggccccgcgccctgcggactgcgaactgcaaggggtccctgcacctctttgatacaggggagcaacgagcctgtctccccatctgcacaaccgggagcatcagccctgccccacaggactccaggggtgagccaagcacagggcctggcacacggtagatgcccaagagggccccctcaggagccaataccccttccgtccaggagtggccagtactgaggttaaggatgtcccaggagagcgctggggacagtagccagctctgtcctccagggcgtggaagccagaggtagtgtgtgtaaagtacatggcattaaaagtggggtcacgttgctgttaacattcctggcagcacaaaatgtgccatctgaggatggggtggaggctggggctggggggcagttgcccaggagctgccaggatccttaccggatagcgcaatctgaagcttggaacgagcaggacttggtttcattgttaatttacaggtgaagaaactcacccggagagctgggaggacttgctcagagccactcagccagtaggagtggaactgggatttcagcccatggctgtctgactctgggtgtctgtactgggaccacctgccatgaactccagggacctctcagcagatgttgaggtccgcaactcctggtacatctgggaaactgaggtccgaagggggcaggacttggcccagccatctagccggtgcttccatggcagagctggggcaggacccagtctccccactcccacagcaggacagggagggaacagaggaccccccacctgccccgcccatggattctaggctccctgggggcaggggtggagcagctgggctttgggagcttcaaactcaagagttcccagcggcgactcacaccctccccccctaaacctctttgccagaaacttctcaggagatccgctgtgctcctgctattttaagtcccagacagtcaggcgggtgagggagcgacaatgacagctttgaggcagtcccactccatcccagatcccagagggcctaggtcactgtgggacccttctgagctgggcctataaagctgtccccccacacccagatgtggctcccagacacagctccccagagctactattccctggccctctggctctcctgctcaggcacccccccaacccatgccccggccctgggcacattgtctagccacttggttgctcctgctctatccagagggcccagagccaccttccccagcccagcccttcactcccagaaccctcagggtagaccttgtccaccaggcccagtgactgcttggccgaaggggtggagctggggtcgaaacccgtgggcttggctcaggcatctgtaggtggaaccaccaacgtgaatgccagggtccggaggatcatctccgcggatgaagtggtggagaagtttctgccagttttccaccactgactatctcttccttctcctcagggagcctgccgccttctctcctgtatttggccaggctgtccagggagagggctctaccaagatgtccaggatggatgccgcgctggcttttctcactgtcactccattccctgaaggggactggaggtcctggaccagccttgcctctcctcagctacgcatgtcaaccttaaaacaccccacagggccaggcatggtgtttcatgccagcaatcctagctctttgggagaccaaagcaggcagatcatttgaggccaggagttcaagaccagcttgggc

SEQ ID NO: 589031 - DNA, 4001 bp, Homo sapiens
aaaagaaacaaacaaaacaaccttaacttgacttttaagaatatgatggctgggcacagtggctgacgcctgtaatctcagcactttgggaggctgaggtgggcagatcacgaggtcaggaagttcaagaccagcctgaccagcatggagaaaccccctccctactaaaaatacagaaattagccgggtgtggtggtcggtccctgtaatcccagctactcgggaggctgaggcaggagaatcacttgaaaccagaaggcagaaccaagattgcgccactgcactccagcctgggccaaacagtgaaactccgtcggggggtggcggggaatgcaatttcttgacccaacacacccaccaagtttctacgtcggtggggtctaggcttggcgtgttttttttttgtttttgttttttttttgagacacagtccaaagagtccaggtgcacgatctgggctcactacaacctccaccttccgggttcaagtaattcttgcgcctcagcctccagtttagccgggattacaggcgcgtaccactacgcccggccaatcttttgtatttttagtagagacggagtttcgccatgttgcccaggctagtctcgaactcctgacctcaggcaatccgcccgcctcagcctcccaaagtgctaggattacaggcgtgagccaccgcgccgggccaaggcttggcattttcatgaacactcaggtgtctctgtggaacaatccttttgagagaacaggaaggttggagacttgatcttgaggaaagcgggggccaaggttacgggaacggtgatgaattggcggcccctagaccagatgctgcctggctcctcctagcagccactgcttttcatccaggtaagcctgaccacctgaagccgagcaaccaaacctcagtgtgccctcctggactgcatgccacaggccgattcctgagtccctcagtccctgaggtggagcccaggaatctgcctgtgacatgcagtcagaaaagcatactgtgtgcaaagacaggaattaatctgcatcttaaacaccagccgggtggccggcccaacagaggtggggacctggctctccctatctgagatcctggacaggctccccgcctgggtccttcgctttcctgtcttccccaccggctaggacagcacctgcccaggtcacagattaaactagcatttgaggagatgggtaaacggaccggggtgagtggaaacttgcaagcgagacagcagggagtgtcgttagcgatgtaacaggccgacctctgtttggtccgggaacgtaaccgctcaaaatggctctcgcagaccggccaggacaggtctgcggccccgcgcgaggaggcacggtgggcctaccgttcaggaccgaggacccgcaccccaggaccccacctagcgagctgcagcctggctgcctcgggttggggtgagcggcgggagcgggctgggggcgtttctacgaggaggggaagcgcacctcgtccagggactgagtggcttggtgggtctggggtccttccctgaaggggcagtggagggagaggggcgatgtgaggccgggcacgctgcctgcgggaaagaggacccagtgccggcgctctggccttgtcagcggtccgccggggaggcggaggtgggggcgcgagtgggggcggaccgggtggagggaactgcgcgcgcggccgtccaccgaggggccggggcgggggtcccgggcggggccgctgcagcgggagcagcgcccggggctgggcctggcccgaggcccggcggggaacacgtgcggcggccgggtgcggtttggaagcttctggcgccgccccgctgcccgccttgtgttccccgggccgggcggctgcccgcttacctgccgggccgcggcggcggggccgggcgctcggggcgtcgcgtcggccgccgcctgggcgggagcgcggactcagctcgacaaggcggcagctcgggcgggcgccaggcggcgggggcgcagtgcgcgtgcgcgaggggagggggcggtgtccggggggcggggcgagctcacaaagccggcctctcggaggagcgctacgggcagcgacagcggccagaatgcctcgggccggcccaacgctttaaagggacagcacggggcgcgcgcttcccgcttaaaagctttaatccccgaatttgactggtgcaggcccttctaatgcacttcctaaaaactgaagtataataatacatacaggaaagtgctagtgtgccctcgcgtttccacagacagcacgccctgtacacagacaccagcggccctccgggacctgcgcaggtggcgtcgcccggcgttgtctccggagtcgattcgggccggggcacctccccgggcgaccaggccccttcttgatcatcgctggtacggatgagagcggcagtgggcatttggaaagcacctggggccgcgcccgggcgcagtgcccccatgtggcctcccaccccgggcgggcaggacgattcctgcccatctggaagaccaggaacctgcgcgttcacagggttcggaagcccgggctgcgccttcccgcggggccggctgccgggctgggggctcttcccgcctctgcatgcacagagcccgcggtgcacgaacctgctccccgccagccccgcggactggcagggccgctctggagtcacccgcgcccgctccgcagtgcgcaaactcacttcgcagcgggctctcccggggccagcccttccctcctgggcgggcattttcacctccaggtacaagggggtggtccccagaggaggactcaggggcttaaggagaagctgaggcccggtcctctggcctcaacgactgcacattctcgccgcctgcttcacttcttagagccttggaggtaggcatggcctccctatcccctcagctaggcctgtgggtagaataacatacagtcccttattctccaattaaaaatgggaacacagaatatgacacaggaacccatgcaaacaaagggatagagcatttgaaataaaaatgccaaggagggtgaggtgagcggttgtcagagaggtggaaccggaagactggcagttggtctggagtccccttcccaggaaggacacagagaaggcaaggtccctgtctggtccttcagggctccatatggatttgtgtgcccaagaggccggatcccttgggccaggtgccctggagcatggagtggtgacagtcacaggttagcaaacccagttcggatgaagaagcgcatctttatctccgtccacctggccgcctgggccggaatcccgagcccgtgacacgctgctctccttccaccccacctcagctctcagatcgtccacttctctccctccccaccccagccctacctcccacctgggtcttttctaaacctccaaacagagaaactcctaaaaatccagctctgatctgtcactccccagtttaaaactcagaaccagcttcccactgccctcaattccctaattcccactgctcaattcggctaaagtgcttaccagaccccgcctcctcttccaacctagcaccggctcccaaactgcagtcctggttccagccccaaaacaaaaatatttccagcccttcagccctccaggcaaagcaagataaggggcgagaccccagaaccctcagaactcaaaccaagttcccagcttccacttccaggtgaattggtctcaccacctcaccccacccccaggagatagaaccttctagtaaaaatgagaaaatccggccgggcgcggcggctcacgcctgtaatcccagcactttgggaggctgaggcgagtggatcacctgaggtcgggatcacctgaggctgaggctgaggcaaggagaatcgctggaacccaggaaagaggttgcagtgagccgagatcgcaccattgcactccagcctgggcaacaagagcaaaactccgtctcaaaaaaataaaaaagatgttca

SEQ ID NO: 589032 - DNA, 4001 bp, Homo sapiens
tctgcagctctgccagcctcacagacactcctccatggaagtcaaatgttatttgggttaaaagttcaagatgcaaataactataaaaaaattaaaaaacggggaaaacttaaaacctgaacccacagctctcgaagcagccctgaccccttgatcactagagccaccctgttcaacagtcaacttcaccgcacagggctgaaacctaccagcttgtgaccagatatggttttctcaaatttcccatcatacgcgccccaaattttaataagtttatcagcagctgaaagaaaacaaaaggatctgaggctaagagcaggacacaattgtctagtcatccagagtccaaagtctgagcttttcccacatgagtcccaggtgatcagcatgaaccacatggctcagaacccattcagcacggccacatgcctgagaggaccagtccccttcccctccctcccagggtccacgggcaatttcttttctttcttcttcttttgtttttctgagacggtgtctggctctgtcgcccaggctggagtgcagtggcatgatctcagctcactgcaacttctgcctcccaggttcaagcgattctcctgcctcaacctcctgagtagctgggactacaggcatgtgccaccatgcccggctaatctttttttgtatttttaatagagacagggtttcaccatattggccaggctgctctcgaactcctgacctcgtgatccgcctgcctctgcctcccaaagtgctgagattacaggcatgagccaccacgcctggccccccacgggcaatttcaaccagcactgagctcacagttccaggaggagacacacccgcctgctacgtgccccccagcggcctgctacgtctccccagcggtaggtgaggaagcaagccatcccctcgccagctttttgtctgcagctcagaccgcctctcccagcagctaagggcctcagtgctacgtacatgaacttgccagccactctccattcgggctgaatttcacggaggacactgctttggtgtggccagcaagggtgaactttagagcatagtttggcttcacaggtgtaggctgcaggaaagaccagttagcaaaaagtcaccaccactgtacgttccacccgtgaccagtttggattttgactcccaccatttaatttcagctcagatctttagagctccaaatccacatgcccagtgccttccaccaatctctatgtggacagtacctttcaagtggaacacatctgaatctgagcccactacttccccacaagacctcctcttctgtagtctccaaactcagcaccaacagcaccagccgagccagaaacgtgaggcccccctcaatccacctcatccccccacctcaatcccacctgtgatcctgctacagcacaggaggcccccaccagctctggccttggtccagcgccccaccctccgaccccgaacactgaagccctgctccctttgctaaaggtctacgggagggcttgcagaactgcctgtgcgtcaggatcgcagccagggtgggggcaactataaagagatgttttctggttcctacagagactcttacaatcagaaccaagaatctgtatttttgataaaaggctctctcctccaggtgacagatttgggatccctgacacagcaggcaacaagcattcgccagatatgcggtcagtaaataaaaattagcagtgacatttaactgagtagggaagactaggcttatgagcttgagatgtttccgagactctctaagcgtatttgcccccggaaggtgtccaaggggcccctgggcacgcaccttgctctgagtggcggatgacgaaggggttggctgtgctctggcggcctcggtctcgggcttcttctcctccgtcgccatggctctgacgctggccgcacaggagacaagggtggagggacccggtgacagaggcagtctgttgagcgagatgcagaacagggagccaagaaacaaactatattttaaaaaattgatttccaagaaaaaggatgaaaagaaaaacatttgactaccatattgagccctgtagcaaacaaaccattccaaattgaggaccctattaattcccctaagtccttgctaatactttccagctgctccgctgacacccctgcgctctccccttttgtcatcataatgaaagaccccaccctcaagcgtgcttcttattttgttatccagaagtctgtaagaatgcagcagtttgtgcaaacaaaatgcagttttcttcaaagagccctggacacattaaaaaaagaacagcaaaaggtttcctgacagaaagctaacacgccaaatgacagaagactgagcttcagggtgtagaaatttgggatcacatccaaatcctaaaatgcaccccaagtgacgcaatcacgttcacagccacgtttgaaaacacaagcacgggcacccagtggtctacgcctcatgggggggctccagtgcctccatgcacaggctgctggcccgaggctgccttccagcatgctaacagctcacagggctcgcgcactcagtgaggagccacaaaacacagagatgagagcaagccagaggcagctctgcctgctggaatttccacatcctgccttctggaaaagcagcctcaagtacaccaacgatattctacgagcaggactcacactgcaggggaacgaaaaaagactgcagttcaatcggtttcaccttgacaatgaaaattatcccaaatctgtacagtaagcagctagtttcctctaccatgggaatagattcattacttcaatacatctcataaaagcacaacaggttacttggaaaggagggacagcatttttaaaagggaaagccactgagacatgcttgcaaataccactggccatcggaatcccagaagctagcactaccatcaatctaatgagtttacacactgtaaattctagcttggagcttggaactgaaatcttgcacaggctgattgtaacactaacgcgaaatggaaggcattaaaaagcatgtctcaaagtcttcatccaagaggaaggcagagaaattacaacacccactttgcagagaacaggtgtggccaccgctccatttcacctgcagcaaagattccctgcgcaaagatggatcacgctgcatctagggccgagtacagtacaagagagggggagaggaggggcaggccctgtagcgctgcccaggggacaaagtgccagtacaaaaccggtcctcggtaaatgccagctacgtggtacttgtcattagtgcaacctagccatgccaatttaacccaactgctgcattttccttggcaggctggacaaatacagggagagagaggaactaaggaaatccaagcaaaaagctgcaaagtccactataacagtcctagcgttagacagccaggccagggccagagctgagtgaactgtgcccatgccctacccaagcgaaacaccagaggaacagaaggcgaaataggcagctcagaaggccgagcagctcctgtcagcatcaactcacctgggtgagtctagacgcctggaaacaccctcagaggaggaacaacagataggcggtcttacaaaaaaggtgtccagcccctcccagctcaagcccaacctgccccaacctttgggctcaaaaaacatgaacatgtaaaagaaacaaacaaaacaaccttaacttgacttttaagaatatgatggctgggcacagtggctgacgcctgtaatctcagcactttgggaggctgaggtgggcagatcacgaggtcaggaagttcaagaccagcctgaccagcatggagaaaccccctccctactaaaaatacagaaattagccgggtgtggtggtcggtccctgtaatcccagctactcgggaggctgaggcaggagaatcacttgaaaccagaaggcagaaccaagattgcgccactgcactccagcctgggcc

SEQ ID NO: 589033 - DNA, 4001 bp, Homo sapiens
cctgtaccatcagaacctacaggaccatgagggaggggagctgttcagtccctcctaaggacctcacacaatgccactgacccctaacttgaaaagccacatctccaaggcagaaccaaggggtggtggagaggcaggtctctggagctctttgtcttgggagaaaggctgacgacaggtcgacacccaccgaattatccaggcttgcacacacacgcaggccaccctgtcggggccggaggatatagcaattgaatcccacttctgagtcaaaaatgcaagagtcccgcagtgtggccagcggccccagaacacagcttgccccagctagccccagccccgtttcaggcctggactggacagccagctaactttacaggccaacagagtacacttacacctccagccggcactctcccagactggctcacgcctgacagctgcccacctccaaggagggaggcctgtaaacaccccctggacaggcatggcctctgcttcctaggctgtcccaggacagctaaggtggctgtttatataatcttgcagggctggggctgacaccacggtgatggcaggattatgaaaaatgcatgcccagagcctctgcagccaagaaaaacccccacacgcattctgcatgactcggttttaagacctctcacacgtccattttgtgaacaaatggagctctcagagcagcagaggcgactaaccacacttccaggccttgcccagctgtccccagagctctaccaggcaccacctctgggtcacaggccctgggtcagaagaagtctctgcaggtatccctgctggggcagccacggcttgctggacacaggaaagtactaatttatgggcagcccagagcccccaaaacactctgactgcacacaccgggccttgaagcctccacactgttttgcaaagacacaacagtccagactccctgggtcattaaagtaggtcatcgggactggagaagcagcagcctaagagacacagcctccgaggcccactctccaggaccctctctacgcccacagcgtgcacacttacaccaaacgcacaacagaggcctgccctcgccaccagctgactcacaaaccgcaacctgcgcacggacacagccaggccccacatgccgtccgcacacctggtatgcatcctgccagccatccacacagagggtgacacacatggagccccgccgcccccagggcttcttaaggccaggcgcaggagcaaggacaggcccaaggacgcactcgcggacagaccctgcggaaagccccctgcgggctggggcaccctcacctgcagctcacaccaggccacctccacccaggtctccgtgtccagccccttgtagaccgtcttgaaggaaccgcggcccagctcgatgtcgaacttgaggaagcggccgtccagagaggtggccacggccttgaggtcgtcctcgtcgtcctcctcctcttcgggctcgtcccggcgagtgcgcccgggctcaggcttcgcctcggccgccccctcatcctccttcctcacggtcgccgccgcctcctccctggggccgccgtcgggggcaggcgcggtttcgacagcggctgcgatggggtccgggccgggctcctgcgtgcccacgggctcggggccggcgtccgcgggggctccgggggctcccggctgcgctaccagcgctgcgggcgcgggggcggcggggcgtccgcgggcgcgctccgcgatgaggcggcgcgtcttgcagagcagaagcacccggcgctgcaggggctgcgggggctgcgggcccggcgcctcggctgcctccaagcccggcggctcctcctggtccgactctaccacgctgcgccgcagaaagcgctggggccccggccgcgccgccttcgcccgaggctccgccatgcccgcgggccccgcgccgcgcccgggctccatcagcgtgccggggacgtctcggcggccgccatcgccgtccatctctgtgggccaaggacacacaggcccgcgtgagcgccggccctgccgcacctgcccaggccgccggatgagacaacgccgccctaagcccgcaacctgcccagccccggccgcggagagagcctgcgggggccgtctctgggggccctgggaaaggggggctgcagacgggaccagaggcttgggttggggaggaggggtccgtgccctgctcagccccaggctgcggagagggacgggcctgtggtgtccctggaaccctgggagagaggacctgctagggtgtccctgagggccccggaggccggcagagggatctcgcgccctgcccagccctggcccaggagggttctgctaggctgtcccggaggcagctgtaaaggggatagggaagcccgggggtgggaggaaggcagtggcccggcggcggctccacaaaggacgcgggcccggggcgcgggaggggcgcgcggggagggggctgcagcgccgcggcgcgcacacaaaggcggcgagcggcgttgaggggaggctcggcactcacagggcgagcggacgccgtccatgcccgcggcccggcggccagggcgtgcgaggcgggagagatcacgcttcgaggacggggtccgagttccgggcgaggtccgcgctggggtgggggccgtggcgccgctccagctcctgcgcgctgctctctcgggccgggccactgcggggccgcgctcccgcgtgctcctgccggcttcgcgcggctccgctcccgcaccggctccgacccggcgcgcggggagggcggggctccgttcgccccgccccggaccggcgcagggggctgggcctggcacgcccacctggctgcggacgggctggctgactggcaggcgcgcgcggccacctgcgggccggctacctgggctcccacccgcggttctttgctcgaggtagcgctcctgtcctctgaagttctttggaacgccccgcagggctgtcagctgcggaggaccccgtttcttcctgagaggaggcagcaggctcaacgcctcagcacgccgcagcccggcgcgctagacctcaaggccctgtgccaggacagaatgggcaggctaggaagaaaaggaccaggggtaccgccgccctcgggagcccagcctggggctaagcctggtggggctcagcgtgtcctttcctgccctcacttcaccaccaggaaccatgaggacctcatcatcacccagggaggcactggtgatcattatgcccatttcacagtctagagcaaactgaggcgccaaaggcagaagttatatgctctaaatcccagaactttcaagaccgaagctgagctggaatgccttggatgggatatggagaggcttccagaagccccttgacccaaagtgttcttccttcccacctctgccagatgccacctctcccgagaagtcttccatgatctctagctccttcctcctctagacccccacggacaagccctctcttgggcgtctctggccctaatgcagcaggtgacctgtgtcagtaaccatactgctaagttctgagccctgctccaggcaatgccctgagctaacacttcacccttaccccagcctccatgatcctaggtgaggaaactgaggcacaagggagataccagagtattctcatctcagtccccatcccactgggctggcacccccatcagatacacacacacttccagagatgaaaagatgcttgtgggcctgtaggccttggagcccctggcacaaaataactcatgtggcataaaagccagcagaggcgatatctcaccttcacaatgtagagggaagaatatgccaggccaactgttacccagagaagcaggacttcctggagccccgctgggcactggcactggctgaaactaatttgtgaggggcaacagtgaacatcccttcccagctctgggttcagcaatgccaccctgtagcctgaagtcagcaatgctgggagta

SEQ ID NO: 589034 - DNA, 4001 bp, Homo sapiens
tctgacaaatagtaaacattccatgagtaccaactggatggatagaaatgaatgaacctaccagaatatgtaatataaatagcaaagtaaatgaatggaatgacagtaaacacaatgagaattaagaagagggaaagctggagtagtcgagcccatgacttgagcaggatcctaaacaatgctaactcatgcccaaaacaaagtccgatttctctctgctgctatgccttgctgtttccccaggaccttagcaccactcttcgtattctaagcaagttttttcagtctttcatggcatatgtcatggcacacagagaaaaagaaaattgtatagtaccatgaaataaaagtgtcacaaagataaaaatctcagcacttacctaactcttgaaacatggtgggttgtacacaatgctacaatacagttcagttcttggggaactgcctaagaaatcttaaagaatgttcattctaccttgctttccatgatcaaaagtttaatttaatgtcagtttttgctattttgcaccttccgttccacagccatgtcgtagacctggaaacctttatggaatcatgactatgaattaatcagtgcaaatgaactttctgtctgactctagcgtgcctcaagtttagaaaggaataaaaggtaaccactataaagtagaaaggatgagaccagtaccatcaaaagtagctggaatttgcagtttcggtgttagtatgaacatcaagacatgctgccagcctcagactcttctcactctcactacatctggctgataaaaaagagtaatacagctctaaactgtgctcgacaaagggcagtatagagctttaggaacacatgtacttcatgttatagaggcagccctgaagaactgcctgtcaaccaaactatattttaagtatcctgttaaagattattagttgaccccagtggcaaattctataagagaataatctgcaatgagagatcagtccttaatttacttcaatcaataaacacgttttgagcaactagtttttgccaagaaatcgcagaggtcacatgtccaagaaatagactcatggaatctatggattagaatcttaaaggtttactatccagtcccttcttctgattgctgagtaggagattctgattgctgaatctcctctcctccacataagtaagcgttcttccagttcctatttgagcgcttctagtaacgggaagctcatgagaagcaatccattgcacttttggcaactctaattgttgaaagctctccctaacaaacaccaagatctgcctcttccatcaactagttctaggtatagaggccagaatcaagaactagtctaactcctctttccgggacagctgaggccctgacacctggcagtggctgacacctcccggccggggcggctgcatccctaaacgaaaaatcgaagctgccagcagccgaggtgcagcgaagaaggcccggggctgggggtcaggaggcccgcgtgcgacagaggaacgctctgtggtcgtggacaggacgctttgacaaggcggctggctgggcggattccctctccgactcggggagaatctgcacacatacgccagcggagttgacgcgacccccgggccccgggactcggcttgcacgagccagtctggggaccggggaggcggggagagggaaggggaaagcgcggacgcggcccaaacctccagtagccgcagccgccgtcgccgagtagggccgggcagccagccgggcctggcgcagcatcagtgcccgctgccgcttccgctcgatactcgcccgcaccgaggcaggcagctccgcgggttgctctaaagccgccgcctccggcaaagccccgtcggccgccgccatctctggcccactccgaggacctagctcccagctccacgcacgcgcactgcacgccgaggcgagccagccgccctgcaccgcctctgcgctccccgcacccagcggcctttctgagtgagagcgcctgcgcagttaaggggctcggggtggcctgcccgggcgctgggcggagtctgggtatgcgcggacacggagtacccgcctaactacctgctctcttgtcatccgggagaagggtccgtgctgagatcatatctcacgacctggtcacctttaaaataggtctcgcttggtgattcagagtataggctttggagtcaggcctgggttaagtctgagctcttgacagttaaagtctgtgtgaccttgggcaagttatttaaccagagttcagtttcttcagtggtaaaatgaggataattatggaaccatttaccgagtctttgggaggattagattgccaggacaataacctggcacgtagaagacctcaaaaaatggtaacagtgagtagtagtagtgccagtcatagagcccaacagatgatagtcctgattttatgttggatacacggcctagagacacagccttagatttaaaatgagaagacctgggttgaaactcccagttaacttgctgtgtgacctcaggcaaatgcaggacttgctccaaggctgatatgcataaggttggctatctttcccatggaatattccttcagtgaggatgagctactgccaggtagacagtgggtttggatctgggccaaatatcctgacttcccaaaagtgtggctagtgtaacaaaagaaacatagcaggctttcccaaaaatgtatgctttccctttgttacaaataatgcttaattgaaaccagaaaacattaacttctaattactacatgtaccatttaggactggcttttagaaagacaacctcacacactgatgtttcccactaatgttcaatggttaacctttcagaaacacaattcagtgttctaatttatcggtcatatatacataaagctgcaaaacctcgtataaagcagttacctgctgaaatcttaggttgaattggagatagaatctcaagccatccccatctcccttcccctcagatccttctttctccctacccatcaatcttgcccaggtgaaactatttcaaattccataacatcaaaagcacaagcaacaaaagaaaaaaagctggacttcattaaaattaaaaactaggctgggcacagtggttcacacctgtaatctcaacagtttgggaggccaaggcaggaggatgacttgaggtcatgagttcaagacaagctgaggcaacacagtgagaccctgtcactattaaaaaataataataattggcaaggtgcagtggctcatgtctgtaatcccagccctttgggaggccaacacaggaggattgcttgagaccaggagttcaagaccaacctgggcaatgtaacaagaacccatctcaggaggtcaaggctgcagtgagctgtgatggcaccactacactccagcctgggcaacacaataacatcttgtctcaaaaaaaaattaaagtcgtcggcaaagcctgagtcctgtcctctcactctcctccctggacagcataagcttcaccactcgctccaccttctccaccaactaccggtccctgggttctgtccaggcacccagctacggtgtccggctggtcagcagcatagccagcgtctgtacaggcacgggggctctggttcccggatctccatgtcccgctccaccagctacctgagcagcatgggttccgggggcctggccgcggggatggccaggggtctggcaggaatgagaggcatccagaacaagaaggagaccgtgcaaaacctgaacaactgcctggcctcctacctggacagaatgaggagcctggaggccaagaactggaagctggagagtaaaatccaggagcacctgtagaagaagggaccccaggtcagagatgagccattacttcaagaccattgagggcctgaggactcagatcttcacaaatactgtggacaatgcctgcattgttctgcagattgacaatgctggtcttgctgctgatgacttt

SEQ ID NO: 589035 - DNA, 4001 bp, Homo sapiens
tttctgtgtaaactcaaaccactctgcttcaatattcccatctatcaatagtaatttatttcatagggttgttatggaaaataaatgatttaattttttaaagagcttagaacagtgtctggtatgtaccctataagcatgtgttaggtatacaaataaagcctgtcaattttctttgtgaaatgctttaaatgtgtcctatccttattcccatttaacaccaaaccagctgaggtacctaatatttcatagagtatcacctcatcactgtactaaattgctttttaaaaggtcactaatgacctcttcataaagaaatgcaatactctcccctcccccaagtctccagatgctctgcatgaattgatccagtggtctctcctcgaaattcccttctcttgatttctgggtcttcttgcttgctgtaaccctgcactcctacactttattgcctactgctgactactactagctccaattcctctttctgcttcataaatgcaagcattaccctccccccccaaatttccttatttttcaaaattctcttcctgatgccagctattgccatggtttccacttctatgctgataactcaaacttttacctctagctacaatgtttaggctgagctaaagatttgcatttccaactccatgctggacagctctatgtgtctgtctcattagacctttaattcaacatgtccaaaaaatgaattcataatctacactaagcttatggctttatttctgataatggcattaccatccttcagctcagaggtctaaaacctaagaattagatttggtccctcacacttcttcagcattcagttaattatggagtcttgacataatcatctccagtatatttgtctccttaccaatgacaccattataacttatttcaggaattttttgcctctcactaggctgatcccattaccccttcaaaagaatctccgataagcgttcctaacttttagctaaatgtctaaatgcagttaatagaaagtcccttctctatgggctttctacagaacaaaatgatttcctgcagtgcaaatctgaccatatcaatattctgttccgaactcttcaaaaaactacccatctcctttaggattacaccattcaccatctggacctcggtcgactttcccagtctcatatccattctgtgcataggagtccccccatttcctcctcttcccacacaagttatgctcagtcatttctccacagtattgcaactgtcttccctgaaaaactcttcaacactttactctctccaagtacaattcagacatcactttctttctaaagccttctcagcaacggccccttgagcaattaacacatatgtgactgatacatacatacatatatatacacataggagtacttatttgttcagatctggctcccaaacttaatcccgaaaactggaacaatatcttgccaatctccagtgtctggtatagcgccagtaatataaaaggtgctgcgaccagtggccaaataggggaaaaccccagcaaaagggtaacctagcactcacagtggttctcaaagactggcactgaatgcctggtcttgggctggctcccgaggctcgttttcttagggcctcacctctggcacttcttataagatgccagagtcaggcccccaagccaactgctgggccctcagctggggtcctatgaggcggtcccaggggcatcctcaggctccccactccagtcacagggaagggaaaggggcggggcgcagcgtgggccgggccaagggctcctcaagtccccaggggcctaggccagcctctcggctcccatcccagtgcaggtcccggttgatccagggccccaggggggttccattttgagacaccccgcaccccagcccgccgctccggccgtctccgcacttacagacccgggggaaggccgccgtcaggatccggcaccgccaggagctccggcccctcggggctccgggaagggggaggggcaaggaacccgagccaaagggggacccaacggaaccggaagggcagccctggccggacaaagacaacttccaggtcccatggtcctctccgccaatcggaaggctcggaggacaacaggggccccgagagggaatttctgcgttgtgggcggggcgcagacggagggcaccgtactctgggcactagcttcactgcctactaccccgaggtgccttagctcgtaagcgtctgtggctcaggccctgtgcgcctcgcagggacccgctgctcgggacccccgtctcagcggctcttctgtagctgggcctagacggtccgctgcctccttgggcctgaagggctcctctgcacttaaactttggtaagtctttttagcctaggggtgtagactcgtcgcgcgggagcccgaagagcagaaagctctcccctcacttttggatgtgtttttcagggttcttgccttggagttcttcctagggcaaactcttgcactcccatggcttccgttacctacttcatgctgaccattcacaacccaggcagctacatggacgagatctccagctgtcctgatgtgaaagtaccttttaatgatctcaagttcatctcatctcctatccagaccggaaaacttgaggatccttctagagttcttttccttgccaatccagtttactggtttttgaccattcttttcgtttttggtggtggtgaggggctttttattgaggtaaaacatgcgtaatgtttattactttaatcatttgtaagtgtaaaacttgatggtcttgaactctggagttaaagtgatccaccctcctcagcctcccaaagtgctgggattacatgtgtgagccactgctcccagcctttccctctttttaatgtagttatttacaactatacatttcactttgatcactgttttcactacagctcataagtttttgtatgttgtgttattttcattcatttctaagtattttctaatttcccttttgatttcttcttctttttttttcttttttttgagatggagtttcgctcttgttgcccaggctggagtgcaatggtgtgatctcggctcaccgcaacctccgcctcctgggttcaagcggttctcctgcctccgtctctaaagtagctgggattacaggcatgcgccaccacaccgggctaatttgatatttagagatatggagacgtggtttctccgtgttggtcaggctggtgtcgaactcccgacctcaggtgatccacccgccttggcctcccaaagtgctgggattacaggtgtgagccaccgtgcctgaccttgatttcttctttgacccagttgttaagagtgttgtttaactttcagatatttgtgacttttccagttttccttctgttattaatttataacttcatctgtgtggtccgagaagatactttgtatgatatctatcttgtaaaatattatgaaacttgaattgtggcatacagtctggtgaatacctcatgtgctttagagaagaatgtgtattctgctcttgctgggtggaatgttctgtatatgtcttttaagtatagctggtttattatgatgcttagttcctctatttcctcacttatcttctatctgattcttctccccgttactgaaaatggggtattgtagtctcccactattattgtagaactgtttatttctccttttaattctgtccatttttgcttcatgtattttgagagtctgttcctagcgaggtaaatgcctataatttttatataatcttgttgtaatgagccttttattaatatataatgtctttgtctcttataaccttttcaaattttaaaatctattttgtctaatggtagtataactacatcagctctttttcagtaactatttgcatgttatatcttttttcattaaattattattattattattattattattatttgcgagggagtctcactgtgtcacccaggct

SEQ ID NO: 589036 - DNA, 4001 bp, Homo sapiens
gaagtatatctgcagcaggggcttgaaggaagtgaaatggagaatttgcacagaaaagaaaaaggaggccagtgcttcagaagggggaacaacagaagcaaaacccaagaagccgtaactaactcagttctgcaggggacagacttggagaagcagagaataaggttcaggtaggtggggtggggccaaaccacggagagtcttgaaaagacagggtgggcggtggctggacataccgtggcaggcaagaggccactactcagctttgaacagtggtataactgccgtggcctcttaactgatctcctggcctctagcttcttcaccaatgccttcagtagtttcaactttgacctagtgtttgagttgaggaactagccgcggcccacctctcctcctacttccctcctatatgaacccttctctgccaggagactggtctattcactaactccataggatcactgggcctgattcctcttttcctatctgaatgctactcatcctttaacacccggctcaaatcccgcccctcactaaaccctccctaaccactcggcctacagtgacctccatctctccttcttaattctacagcacacagccttgtctcatcaaaattaccttttcataagtaatgtctcagcaccctgtgtaaagctgcctggagactgtaagtgtgccttctactactttcccaccacatggaacagcatcttgccatttaataagcaagcaagcactcaactattttttgacttcctatagtaagtttggctttagcataaaggaaggatgggggaggggggaacctctggagtcagcgaccagcttagaagctgttgcaataatccagatgtgaagcaaagagggcctggactagggaacaaagagaaaatgggcaaatataaacaacaaaaaattctgcatgcaaaaactcggcggaatgtgattaactactactagggacaaaagcaagggatgaatgaggattaaggtgaggtttagaaaacgcttcttgaaatcattttaaagcctgtctgaaacaaaatgcagtaagtggcttaaaaagtccacactgacaaagtcttcagcgaaactgcccagtatcttgaatcagggacagcccttccaatttgagacatacacggaatggcagagccagaagggttcttagagagttaaatgaaaccctcaatgatcacatggggaaactgagtcctagcatggaaggggcttgcggaaggcctcaagacagagactcccagacgagtgccgccctgaaagcacagccacttggcctagaagggcactgtttacaaccccggtcagccccagcccagccctccgcaatggcaggaccaactgagcgcgagtggccacggagacgtctggggccaagcgcaacccgtcgccgccgcctgtttacctggaggaaggcggtggcgtgaggcagcggctccgtggcagccacccgaagggccgacccctggcccggccggctctccagggaactcaaccatctgccctccctccccgtacaaaagggagcgcccccagggctaggggcccggaagctggggatcccgagacgccccgggcggaggctgggagcccagggcagctgcccgagcgcgaccctcagccgggccagcggcgccgggactccaggaccgagcacagctggcccctcggggacgcgcgcctgaccccagcaggtgcccggggcctccggaccccgcccggcctcggctcccgcccgcgccggccgcctgcccgcgggactgaccaggcgcggaggctcccgccccgccgcgcccagagggagccggacagcggcccggggactgccccccgccccgcctgccccgcctgccccgcccgcgcctagcccgctgctcgccgcccccggccagcgtgcctcacctgtccagagcgccgcgctcacatcgcccgcccgcggcgccccctccgccgccgccggcgccaggccagtccccgccgctccggctgccgccccagcccgcgccccccgcccccggaagcgcttcccggccccgccccctggacgcccgcgcttccgggcaggcgccaacccgggtggtggcgttgcgcggcggacctctagccagggcccggggtcctgagtcccgcccggttgtcgtcccagagcctcgccgcgggctagcggcagccttggtctggaccccggagtcccgactccgggaagcggcgtcggctctgccttcagcccgcgctctcctcggcgccccctgctggcgggagaagggcggtgcagtggggcgcgtttcaggggctcccggaatcgaacgggtgggagagagcccaggaccctcgacccccccagcactggggggcctgcccccagcccagccctcccttccaagaccctccctcctgcatctcttcaggcgcatgccacgcacccgagctgctcctggcagggcagctgaaggcagcaaggtgcagtggttagcagcagggctctggggacctgtcatagggggtctcttgacttaccaccttgggcaggttttctctctctcaaaacggaggtggctcccgcctgtaatcccagcactttgggagggcgaggcgggaggatcacttgatcctaggagtttgagaccagcctgggcaacatagggaggccccatttaaatttttaaaacttagccaggcttggtggcacatgcctgtagttccagctattggggaggctgaggtgggagggtcgcttgagtccgggaggtcgaggctgcgatgagccatgatcgtgtcactgtacttcagcagtggtgaaagagcaagaccctgtctcaaaaacaaaacggaggtgaaaattcccaactcactgttataaaacccatgtcacagagcatgcctcaaaaaatgtgcatttccagacccttggggacaccccagtcttcaaaccgttgggtgggagtgggagcctcacccagcgttttcctcccagcattagaccaatgtaacactctttgaagagcttccctttgcattttggtggagtcagtagttgtggcagaggtttattttcctttttctggctttgtaataaaaataaactaggaggcaaagataccagctcctcttcaggatagaaagctgctgagacttcctgatgttacttcatcctttgcaagcaggaactgtctctccaggatctgtccagtggtcatcctccaatagcaacagctaccctttgtcaaacactccatgcagggcactgtgtagacacttgacagccatgacctcatttaacacaacctaaggaggtggcgatctattcccattttaatccaagagggaactgaggctcagagaggttgagtgacttatccaaagtcacacagctagtaaatggcagacttgggatgaactcccttgtctctctgacttcttatagcaacagaacatccaagcataggattttaggcaacctgcctataactgcaggcacctgggcagacaggtagtctcgctcttgaattgctattgcacttgagttgttttcttgagatctgtccccaagggtgagatacgtgtgcacccagggcacaggaatacatcatcttgtcaggtttcctccggactgctgagctgattcttatgcccagaggttttcctacagatcagccttgggcctcatcattttaactgatttttgctaaattcgttgataagagttagggtcttcttggctgtgacacaatatttgcatatcattaagtactataaagactaaaatagttcctgagtttttgaccctcctctgccaagtgtctcaaagttgttggccctctgtctgtccattggatgctgggtatttccctcatagtttatatttactctcccacctaactgggtcaccaaactcatcatttatatatttttccagccccttgcttttttcgttcttgttgtttagctgattgtcatggtctctactaattttagtt

SEQ ID NO: 589037 - DNA, 4001 bp, Homo sapiens
ttgcattataataaaagggctatttttcaaccttatgagttttcttcctgtgaaaagcataattatcaagtatcctacttatgagcacattcttgcactgattccaagaaaggcagagggaggagagccagggcagaaagtaagtagaaagcctgagaaagattttaaccaaattcatttaactaaacttttctaagaacctcagctgtacccactgctgtaaagagagtaggaatcaataaacacaggttcaactgtgttcctaacaactacagaatgaattttgaaaaattacatgtaaaaggagcttattggtttcaggagtctccaatgaatactgtttttgttttttgtattgtataaaatatacataaaactttaagacttaacaattttaagtaattttaagagtccaattcagtgaagtacattcacaatgttgtgcaatcatcacaacccatttccagaccttattcatcatcccccaaaactctgttctgtaacattaagcaataactcctctccccagcccctggtaaactattctactttccgtctcttaattggtttattctaggtacttcatttaagtgctctcaaacaacatttgtccttttgtgtgtggtttatttctcccgtggtgcttttataaagcaaataataaattcccaattattaggtttcttataatttaactgaaaatgctgacacaatctctgaactaagcatgcagttatcccagaaaccctgctactgttccagtagccccaaagacctcagtctgatcctttcttagcctgtagacaggcctgttaaacagctgtaactcaaagagcaggctccagagatccctggagaccatcctgtggtgagtggatagagcgaaggcatttgggaagctgtgcaggcctgagaaaccacaggcgagaaaaggagaggactcatcaagctgctctggccctaaaatgggcctcctgtctccctgacaggctctcctgcactctgacacttatgttgggcgacacctgtcagagttgaggccaaactgcggtcgagtcactgagagtgtcaccagtgcagggaacttcacggggtcatgagtcaccttccatggctcagaggtctgggcagccctgccccacccaaactcaggaaagagagacaagaggcaaaaacaaagttggcagaaagagagaaacagacagatggccaaaaagccagactgacaggccctgaattagagtaagggctgagtggcagagacagggtgaacagacacagaagcaaggtggagacagatataaaacaggatccagataccccgacaaagacaaagtggagagaaatatcaggttgacagcgacctagctgaaagacaaaaagggcaggttacaacaggtgacagagacagcaacaggggatgctgaatgttttacttaaacagaagatcagctaagtccaggcgcagtctttctcccagctcggctcgtcaggcctcaggcattggtggctcgaacccgaggtcgtcaagccgcgcccaccctacgccccgaaaggccagcggacggacgggggcgggatctctaagcgctgtggccggcggagctccgccgccgcgagggtgaccttgggcgagaagctgccccaaaggcctcggtatcgcggtctgcgcgccgtgtgggcagaagactgcgggattcggagctggagcgccgggaccccaacctcccgcgcggggctttggtatgccggtccacggaatgggcctggcggggccagcggcgcgagcgtcggggcctgctgaggagcccttaactcccccaccgacttctcctcccctacccttgccgcccgtggtcctggccacgcagtacctgccaagggctcagcgctcacatcccccgcccaagatatcctctctgccgccggcgcaggcctgttgtagcctcagctgccgcaacagattcagcctgtgccttcagcccccggaaacgcttcccggtcccgccccccgaaactgacagtgcttccgggggtgcgtcagagagaaagcggagtgcgcatgcgggacttaccgtctgagctgggcgtcgggagagagcgcggaggtagcgggcgcctgcgcagtacactctggagcgggtcaattttagggactgactacgctgttgaaaataggggagcagatactgagttctaaaccttcttgaaaccttggcataggccaggcgcggtagcccacgtctgtaatccctgcactttgggaggccgagaggggatgatcgcttgaggctaggagttcgagaccatcctggccaacatggtgaaaccctgtctctacaaaacatacaaaaattagctgagcgtggttgcgcgcgcctgtaatcccagctacttgggaagctgagacaggagaattgcctgaacccgtgaggcagaggttgcagtgagccgagatcacgccgctgcactccagcctgagcacagagcaagactcttaaacaacaacaacaacaacaacaaaacaaacaaaaacaccttgaccttctccgtctcttctctaaacaaacgaacgaaaaccttgacctcagtatgcctggcggagattatctccaaatccgtttctgccttcacagcacccatctcgctttttggcatgtagtagatgctcagtaaatggtcaatgaaaggaccagtgcctttccgtgggctgcattgtgctgggcactggggtcacacagatggtgggacagaaacgatctctctagcctccaattctcccactccctcccaaaacctccatacctcttctcgcccctttcttccccactgcccccccatgttagtgtagaagagagataggtctttagcggtgggactcttacctttggacccgtttacagaccaagtgccctctttgtagaagaactaatttatacctgaaatccaggcagctgaagcgatgtggtcataatgccttctggatttagggtggatgttctcgtggggcctgacatgcctgtttgatattgtctgtctcagtttaagctgattggtttcccagctgttatgcctgtcttgcttgttgttgggccctaggacacaggagtgtagctttcctagagaattctaccaaaaaaatttttttttctagaaaacaaaatgaaagaaaacaaatatggaagcacagaaatgggagtggatgcagaacagcttgtcaaagattctacttcaaacatgtatgctccagctcccccgccttgtggttttgttttgttttgttttgtttttttttggagacgaattcttgctctgttgcccaggctggaatgcagtggcacaatcttggctcactgcaacctccgcctcccaggttcaaacgattctcctgcctcagcctcccgagtagctgagactacaggtgcatgccaccatgcctggctaatttttgtatttttagtagagacggggtttcaccatcttggccaggctggtctcaaactcctgacctcatgatccaaccgcctcggcctcccaaagtgctgggattacaggcgtgagcaactgcacccagcctagttgagtatactctttaagtgttttgccacttttattcctgcctctaagcagacctgaagtttggaagttcaactgccatcatgtgcctatgaagtggtaagtaaatgctaaggctggcaaagcaggaagattgagagaacctaggtcccatatgacattaggccacagttccagctttggacacccttaagtgttttgttgcatgagccaaataaacttcttacttggactttatttctggcaatattgaggactatatatttacaaatattactacaacaaaatatataaaattgctagaagaaatatttagaataccctcttaaacgcatggatacacttgcaaaaaaaaagtcaggaaaattatctgaagctaggaggaaaacaagaacacaagcctgggaagtcaaacaattgatgtt

SEQ ID NO: 589038 - DNA, 4001 bp, Homo sapiens
tacattaaaaaaaaagttgaaagctaacatagaatcaataccttgggttcttttttccatttccaaaacgaatgtgagccagattcaagattctctgtcagcactacaccaggttttgtcaatttcactgaacacaagatattttaaagtctccaattcgatataattcatgctgagttctttaagtactatttgatatcccagtgattttttattacttccactttggggacagtcttgtgagtctcttttgagagcgttcgctcctaagtctgtaagatgcctttcctccaaatcttaccattttcagaattctgctagagacatatcaattaaccaaaatccagcttgccagcatcctcagctaactaaaagttatgttttgacacaacttttagggaaaaggggcaaatctctagtaaacgagttgacttcaggactcttcaaaaaaagagtctgtttattcagcaaaacccaagggcccaaaacaggtccccacccaagtagtcttacctgtaaggtcaccaagctggctgtggtggccaggtcaatcttcccaaatttgatgagatttccataagggttaaaaggaagagtgaacggtttcctttggcttaggggcttttctctaaaattccttgtcttcttcccatctggacttttccctctgaactattagcttactgccaaccaccgtccccacagaaatcacaagagtttaggcaaatgaaaagcaagttctgcccagccttttacatctaagcacaacagcccatactaggacaacaaattaccaatgacttaatgactaaggcacagcattctcttcaacctctaaagaaaagcccgtaatgtcctctacttaatacaagtgaaaaatatgagaacatgttttggaatatttttgcttcaatttttgaaggtgaagagttccttctattaattcaagttaactagagtcagaagatactacttagtaatcaactttactgtgctttcacctaaaatttttcctccaaattatttaggatttgccttctgttcagaaaattagtttccacaatatccttcactatgccagaatgctgactgacttaaaaaaaaatgaccattatgaaaggaaaaaactaaccttcaacaccccttaattcactgccttttattatttacatacaaatctgtcctccaaacaggagaagatgggacggcagtgtcttaccaccgcatcccccacagctcctcgcacgaagcctgggagtagtgggcattcaataaatgcctattaaacacttcagtcctctcataacaagttggggcattccgaaacactggctccacccctccagggtcggccgctggctcccgatggcagtctgcctatggccttgctctggtgaaatgaaacctcgtcgctcaagacccaggatgggggcaagggagccgtccgaccacatcccgcagggcagcagatcctctcttcatcccgccaggccgctggtcctgaggcctttcccaccccattcgggaacctacgtcgccagccggggatccacaggagtaccagcccccgccccaccccgcagacagcctggcgtcgggacaccggggacgcctgcgcagaagaacccgcctggccccttggctccaacggtaacaatgctcccctccgaaagacagccagagtagtccgggggcaccagtacacgtctgcgcgctccccgacgccttggcgcgcccctggtgctcaaccttccccacgtgagcgcgcccgccatcacgatactcgctgacggggtctcctcacctgagtcgggctccgcccccctcctcctcgctgaaggaggcggtgacccctctccgatcggactcggcagtgtcagaggaggtgggaacgtcctgaccagcgtctccgttacgggacttcctcccccttccacccgcccccctcccaccccgcctctagtcccctagctcctccagccagttcgccgcagcactctgagaacacggcggcggcgcccgaggataagcggaagtgacgtaatgcaagagcgcctactccgccccattccgcctctcccagttgggctgcaaccaatcagcaatgggaagggcggggccggggtaggagtgcagccagccggcgcgcggaacctggaggaatttacttagcccccggaaaaactgaccaatccacggtccctgaagtctggttgtgtttactaccgactgaatccgtgagctctctgaccaatcaccctttgccttacaacatgtaaaacggttatcaaatgccttttagggcgggatttatcactaaactgctccaggtttggactatagaaatgcggctgttcgctgcaaccaatcaaaaccctctgtggtttaggctagcgggctttccgcctaaatccgccaatcacaacaacgactgcgtgatgtctgagggcgccggagaggcgggccctcagggcaggccgtaccgccattggctggttctgaaggatttttccaccctcgtggtgcccggcgctttagtgacccagggctcttctccggggtgaattcccttcgctgaacacacacacacacacacacgtagagggctggagattgagttcccacttcatagacgttgggaaagataagattccaaaaagctctttaggtttaactaagccaaagtccagggtgaaaaccgcgaataaaaaacgctgtccatcggatggcagttaggtcggaccccgcccctcgtccagtccgggtggctgcgcgtctggaaacggtggcgccccaggagcccggcgcttggccccgcactcggctgcaggtcaaataagcctgtagtctgcatgcccagatttataatcacctgcactccccccacaaaaaaataggaagcgctaagctctcccactcctgtcccaaacgtggaagggtcgcggacttgtatgggacgcggtctgaaaaaagcgagccccggggcgacgctcgggtttccaggtgcaccctcggagggagaacccgatccctgagcatcggacactggggccagggaagaaaccccctttcctagggtgaggacggcagaagaaagctgccttctccggcgcagcgtgtctgggagcgctgcgtggctctggagacaaaggcaggcccgcgaactcagctgggttcttctgggggtgggggtaagggtcttggaggagctcccagaaaaatggaactcccagccgggcgcgatggctcacgcctataatcgcagcaattgggaaggctgaggcgggcagatcgcccgagatcaggagttcgagaccagcctggccaacatggtgaaaccctgtctctactaaaagtacaaaaattagccgggcgtggtggtgggcgcccgtaatcccaggcaactactcgggaggctgaggcaggagaatcgcttgaacccgggaggcggaggttgcagtgagctgagatcgtgccgctgcactccagcctaggcaacagagtgagatttcgtctggggggaaaaaaaaggaactccccgctttaagaatggaacacaccgaatacccctacagcagattccatcccttcagttactggtcggaagtgttgatttcaaaaagcaacctgtttgcgtggatttctttaagggctcggtggagtctgatgtttaattcttttccttaagattcgctgacactatagccatcacacatattttactgacagattgatcggtaaaataaggaaaatatggaatgatgacagtaagccaggcaataggagagattcttttgcgtatctgtctctcaacggtaaatgccatgacctagattgcctcagatttacaggctggcaaaagttttaaaaattgtatattcagaatttaggagtgtgtggaagtggacacccgctatattgtggacgggggtgtcactgatgccctgtttgacgatcacttcgtagtatctatcaaaatttaaaatatgcatttgttccct

SEQ ID NO: 589039 - DNA, 4001 bp, Homo sapiens
gaaatacatgcttgcttttgaagaggtacaaggctgtgaaaactgcccattttcgacaccagctgtactgatggattctacatgaaggatacaaatttcattgtctttaaaacctatgtctactgtagacagctctggtgacttcatttcctttctctctgatgtcagactctctactgtagactgcaaagcattgctttcctcttctttaacatggaaatctatgtttacaggactatcttctgaaatttcaattatctcacagtctttatcagaattttcatcttcattcttaacatcaggatcagaagactgacacaggtcagtgtgttggttgttgtttttcatagaaagatcaatttccagatactttgacaaagcttctgtgcacttttccacaatgtgaaccatctgaaggtaactggcagcagtcaagtatttcaaaagctctttccttttaacttcaagtgctccagtatagcaagacagtaacaattttctgccaacttctgcactctgtaagatggtgattctgacatgttttgactgtgtgagtaaaaactgatctctcataaaagtggagcaagcagccaaaatcaccttgtgcccctggaactcagtgtcattaatgtaaattgatacatcacaaaataaattctgctgtctcaaaagattcattttctgcaagaccacatctccttgctgttcaaactggaaatgcagaacatcagactcagcagccatgatcacaatctaagcaaaataaaacacaaacattgatgtaataaggatagggaatgctttcccatgctgtaatggtgaaaacaaacgaaaaaccccaaacctgaattaggaagaagaagactcaaagtctaatgtaggtgttatgaacctttatgccaccatctcaaaacgagaactttataatgcacttctctatgatctcatagcacatttttcataactttgttacaacattcattacaatgaattgtagtgaacagtttctagcttgtttcttttgctaaatgttgtgtgccttgtggtcaagaacaatctatcaattttgaatatccaatataagcactgtgaccaccaaaaagttgatttaacataatatatccaattagcaactttaacgtaatctccaaacttcctactccccaccactacaacaggtcctccttccggttcacctggacaactgcaatgtcttccaacaggtcttctttataccacactcttctgtatgccagattacccgcctgagtgccaccaggattaacaacccttattttattttatttttaatttcccttttctgctttaaatcttctatcgttcttctctacctccgggacagtccagatttcttaggaaagaatacgagacccatcacgatttggctctaacccatctttatggctttatcaccttctattctctttttcatactcgaacctcgttcaatactaaatttttccatcattacccagacaaaaagacacgaatacacatttcttacattcgcgtttccagttccttttttcagctagtgattaggctcctttaagcccaaatcaagtaaaactaatatgactccacctcccgtttcaaccagagagagtcagctgctctctgagcaccgcgagatggtgcctgatgcatctgtgttcctgcaccgagctcaggggcccacacagagcaggaggagctcagggaacatctgctgaactgaaaccggatgccaggttcagcacacaggtattctggaggcaaccctgcgaagggccaaggccctgtcggcccagtggttgcagcacaagattagccactccggggccgagcccagctgtcctcctcctcctcctcctcttcctcaggcaccctccacctgaggaatctactttgcactcactcaccgactcagaaaactagagtcaaggattccgcggcagcgtctgcccaagccggaagatggacttagcctggaagaaaacacatccggtgccaaccagctttattctttactggggccctctaggcgccccggaaggacattctgagacggtcttccttcctcacttcccccctcttggaatgacagaaaggctcctgaatgccggcaagccccatctctcttgtcccagtttcggcactcgagccgttttcccccaccatccctttttttttttaagacggagtttcgctcttgttgcccaggctggagtgcaatggcgcgatttcggctcactgcaaccttcgcctcccgggttcaagcgactctcgctccgcagcctcccaagtagctgagattacaggcgcccgccaccacgcccggctcatttttgtatttttagtagagacggggtttcaccatgttggctaggctggtatcgaactcctgacctcaggagatccgcccgcctcggcctccctaaatgctgggattaccgggttgagccaccgcgcccagccgagccatttccttttgtgagtcctcctgaacatccgaattggagacggggtttgaggttcggttacggcacgtctgtcagagtaaccagaccttttatggattattctgggacgattcctctccttattggggccacctacaacttgaaaggtggcagagcagaaactatcataaagatccgtattcgagattgcctagataatgccccatcaggagatggccccaacctctggatctagcttcacacttaaatgcgttcctccatcccaaaacttttggcccagctgtttcctctgacgtgccctagccttttccccaggctttttttttttttttttgagacggagtctctctctgtcgcccaggctggagtgcagcggcaggatctcggctcactgcaagctccgcctcctgggttcacgccattctcctgcctcagcctcccgagtaagctgggacttcaggtgcccgccacttcgcctggctaatttttttttttttgtatttttagtagagacggggtttcaccgtgttagccaggatggtctcgatctcctgacctcgtgatccgcccgccttggcctcccaaagtgctgggattacaggcgtgagccaccgagcccggccttccccaacgtatctttaaagaacccgtttataaatctcatcatcctgaagccatcctgaactgccctaagataattggttcccagtttgaaacctgtaatcccttttcctgccttcattattgcacttaacacgcctgtattaatttgtgcctcatctaggcagagttatttaggacagtggcttactgatctttgtattctcgaagtctagcacttggtaggcatcaagtatttgtgctgaatgaagatatgactgaagaaattctttttcttttttttttgagacagagtctcactctgtggtccaggctggagtgcagtggcacgatctcggcctaccgcaacctccgcctagcaggttcaagcaattctcctgcctcagcctcccgagtagctgggattacaggtgcctgccaccacacccagctactttttgtatttttggtagagacggggtttcaccatgttggccaggccggtctcgaactcctgacctcaggtgatccacccgccttggcctcccaaagtgctgggattacaggcatgagccgccgcgcccggcctctgcaccaattctattcctttttttttttttttttttttttttttgagacaaagtctcgctctgtcgcccagactggagtgcagtggtgcgatcttggctcactgcaagctccgcctctcgggttcacgccattctcctgcctcagcctcccgagtagctgggactaatgccctgccaccaggcccggctaattttttgtatttttagtagagacggggtttcaccgtgttagccaggatggtctcgatctcctgaccttgtgatccacccgcctcggcctcccaaagtgctgggattacaggcgtgagccaccgcgcccggccgcctc

SEQ ID NO: 589040 - DNA, 4001 bp, Homo sapiens
tgaaatgtgttttagctgctcaaatatcatgattactatccttaaaataatcacactaagtgaccatttcttaaaacagaaactgtgaaaaactgaaactaaattgctgaaaataacaaaactcatttggatgaaaaagaataaaacattgctgactctggggttgtgatctgacaagttggaaaacattaccaggacttcctgcttccatttctgacgtggtttctaggcttgttaggtctttatgaaacagtcgtcttacagttctgcagcctcttgtgtcttgccacctataaccatcttcattttcttgaaaggagtcttttctttgtcggtttataacaggaattctaggtccaggtttgaattctctccagttgtctgaattaccagtatgttcatcagacagccatctcttactctgatctttgtggctgtcattcatccaagcgggttgactgtagattgggtttttaaatgcatatggattgctggaaacagcacatggtccttttctgggggtattcccatagttccctggtgttatcttctttttttgaaggcccttttccattttactgccatggcctttagcatggtcatctattattaaataatcttgttgggggtgaccccttctgaagtcatcatcatccatagtcccccggtctttagtgcgcttcacgaaataaggttttgctgtatctcccatggtctttgacttcaattttcttactttgcacctgaaagaaggtattttggggaaatatcaaactatataacaagatatcatacaagtatacaaaataacaatttatcgtacagatgccccaaagcctgtaagaaagaaactccctatttttttaaaataaaaattctatcacattcttaataatcagtgctttaccctagaggttgggaggcttggtcctctaatattcttcatgaaaattaatacttactatttagcatgaagattaaatgtgtgaataagagaagctctataggttccagaactgtagcatagtagaatattactcatatcaagtatggtcggcttttccctctgtaacaaggcgtttctcttcaaagaaaacctcatcccaagccaatattattactaaactaccgaaacagtcttttgttttttaagttggcaattacttgtaagtgttatacaccgaaactttacgtgaaaggagtactacatttctcaactccaattttccgtcccttcaccacccctattctggacagaccggctttgagcgcttaggttacggaggggctgggcttccgaccaaggtgcagctgtaattaaagaggctgggtttccgatcaagggacaactccatctaacctcctcaatccccgttctccaaccccaaacaagtttggttttgtcaggaacagcaattccctgaggaatgacactcctcttcaatccccatctgaccgctccaccaccgatctgccttagtttccacccttttgagcccgacgtggagaaagaggaggcgtccctgcactcctggccaagaagccaccgtggggaccaggaagcaggaagtgacctgctgtctccatggggttccagggttcccccggccggccagggggccagagccgaatgtcttgacccaaatcccgtcttctgcgcccgcagtctgacaaaaagtgaaaacacggactcgaacccgagggctcagcctctgccggcctgggggttcctcggtcacccaaactggtgcgaggaggccggcgggggatggaaccaacgtacctccggggccaggccggacagctactctggagtccaggaaaccaactggagaatcagcccggaggcgagtctggcagggacgttgggagaaggcgcccaagagcactcaccaccttcgccgcggtccccagcctcttcctgtcccggccgggctccctctccgtgttttccttcggccccacttccggcgctcagcgctgtctcattgtgcgcgattgggagccgactgtgcccccgccctagcgctccgccgcgcacaccggaaacgagcgacgcgccccgccccgcggtgccccgcccacgctccgaccccgcctcccgcgcctttgccagcctggcctctcctgtccggcgccccagcgcactcgctccaggtgtcgggcgccgggtctggccaccgggcgcaaccgtcggagcgggctaattactggctcgccggatagccggttcgccggcgcttgggggccaggcccgaacttcttaccagagcggcgcccgccccttttctctcccggcttcgacgctcctctggttcccctctctgctcgggaggctaagtgctcgggagaggcgcgggagccaagacttatgcacccggagagggacgcggagccagcggtcgggcaaagccgcattccccgcgcttggggcctcggctttgcccctgggtgctccccggttacttccagggggagtaaaggctccgaggcctcgtagcgctcttggtgtttttctgataattcgtagtgattaatgttttcgtgaattcttaattgccgaccttgtagaaatgccagcatttaaacatccactgctcacccagatctcaaagtggtcaaggaaaatgctctgcttttttcttaggttgtgtaaggattacttttacttggaaaaaaaaaaaatcagttcatttcgaagaatatgtgtaatggcaagggatgaccagagagcgttacattcgaatttttgagttgaagagtgcacacctcgaactcggggttgctttttctttctttactgtatgaccttccttgctgtttacagtgttctaaatgctttgaaaaacatcaagcaactagtgaaattagggagcgttgggaaaatcgacagttttcatttctctgcttttttaaagcatgtaaattgaaagctgtcaggtcctgtggagcaatggtcttaaaataataacacacaaagttctggctatgccaataactgttttgaaggctttacaaatattaactcctttgttttatatttttgtagagacaggggtctcctatgttgcccaggctgctctccaattcctgacctcaagccatccgcccaacttggcctcccaaagtgttgggattacaggggtggtccaccatacccagccttaacttctttaatcctcacagcttcatgaagactatatcattatcccacttttaaagatgaggacatttagcacttgcagtgaagtaaatggcactgctgcaatccagaccctgaatatgaggctgttattaaccatgtggctatactaaaagtgatataaaacacattcctacaacttttatataattccttacttagatattttgattgtgaaaatacgtgaggatcaaactgatagtctcttcaacaggcagacagtggccttgaaaatatagtccaaaagggagtgtggagatgcatgattacattaattctgagacagcagcgtcaccacgccccacccaaaccagtaattcctgtgcaaaagaactggtttagaaatctgcctccacctagagttctagagtagcagcagaggatacatacttttaaggattttttttttttttttgagatggagtgccactctgttgcccaggctggagtgcagtggcatgatctccgctggctgcaacctttgcctccacctagagttctagagcagcagcagaggatacatctttctaaggatttaattttttttttttgagacagagtcttactgtgttgcccaggctggagtgtagtggtgcgatcttggcttactgcatcctctgcctcccaggttcaagtgattctcctgccccagcctcccaagtagctgggattgcagacaggcaccactatgcctggttaagttttgtatttttagtagagacggggtttcaccatgttggccaggctggtctggaactcctgacctcaagtgatccaccggccttggcctcccaaagtg

SEQ ID NO: 589041 - DNA, 4001 bp, Homo sapiens
tttgccatttaagaatctcccaagttggtactcaaaaactatcaatcccatgaccagaaaagatgtttcctatataacatcttaaaatatcatgcaaatgaaacttatctaagaattaaaataccttaacaaatataaaacagctatagaataactgcaaaggctattaccattcaaaagagggagcagtattcattgactgaattgttttaaactagacaacttaaggcttatttaagctttcagcatttacttaacacagtctttaatcaatccttctgctctcacagtctacctactggtcattctgaccttttgctcttatttacttccaaatatctttagcctccctagatgttccttcttgatgacacacgcatccatctccggccgatttaaatcaaatccacagcctcattttcagtccaattttcattggaatgtgatgaatacactttactttcaaagtaaaatttttcttactcttagtaagctgccctgacaggacagttgaaacacaattgtctaaagggttaaaatgtctgtccatttttcaaatgcgatggccactctgaatcaaatctgattgggatggagaatccaaatgtgtaaaacaaaagtcacaaaagacaaacagagcacagtatttcagtgggggaaaaaaaataagctaaatttagtcacttaagtcccagctcttcttgggatatatatatgatttttacgagaactaatcctatccggaaacatttccttcacctttcccttagcccttttccttcggtcatgcagtctcttaccgtgctaattatcatattaatataatcctcacttgcgatccttcctgactttattccccatgctcagattctcctgaaagcataacgctttcctaagtatacacacaatccatttaaaagtctttgtatgcgacagcctaactattcaaacacgaagtcatttctctaacggtcctagaaaaaattttaaaaagaaaaagaaaaccacaaagtcaagagcttctgaggggacctgaaaagtcatcaaattgaacgctctcgttttatagttggagaaaggagctcagagaaacttattcactgagctaaaaaggccctactaatgcagcccgtaattcaactgtgcaatctgaaataatcttaaattcagcttcaataagagctttctggaatcgccagcgaatccgtgggggagccacggctagaacccaggcctcctgattcccagccacagcttttccaccgaaccagcagctcttcccaaaagttgaaggcaactgtccgctcacaggatgggagggataaagggcgccttagtaaacacagtccaagtctactcgttttacatgaggaaagggtcacagctcccgaaattttggattctactgctgcagctgctgcttctgacagcagaggcgggaggtggcccaggactactcggtcctcaaagactggactctctctcggcgcgccgggacctccgcgcttcactgactggcttccctagaagactgggggccttgcggggaaataaaaagggcagacacgccaccctcaccgaggccctagacgcccagccgctctagaatcacggcattagcccttggaaagccagggagacgcggaccccctagacccgcagcccggccgcgtggggcggcgcgcaggtgacggaccaggagctgcgccctgccacgagtgaggggcggacgggagacgtcgaggccggcgagggggcacgcgctagttccacagcccggcgggcaagaaggagggtaggcaggggtcccgagccgcgggcggcgggggtccgtcacacacatactcactgccgcagctgcgaacaggaagcaccaaccgggaaccaaaacgcgtagagggacggggaggggcgaggacaaatgaggtaaggaggccgcgtccgcgcagacccgggagggaaggcacttccggggacaacacagctctagtcaccgcctttccgtccccgcccacctgccgcgcctgatgtgcgcatgcgtagtgggtgcgaaccgttctctgccccgcccataattattaggtttgccttccttgctttcccccttccccttcccaacttctcttgaagctacctaggctgcatctattatttgaatgactcgtacgaaggagatgctatttaccgggcaaaagccggggagttcgtgccctctacccccgcgaggaaaactacaacccccatgaggacacgggcgaggttgaggccgggctccgcctccttctccctggcgctcggtggacgccttctcagtgccacgtggcgcgggagcctagctgatcgcgtgcatgacgagggccagcgtggctggctgcttggcccgcagacctgggcagcgggaaacgcgtacttgagagcgcatggcttcaagcttctcccttgcgctcatgatcttaggctggtcgctttttcttttaggcggaacacagttcacactgggcgcctccaactctctggaattctaggcaacagattaacactttgtgaatctcgaagagctgcactcctgctaaatattggagttaatgctgatcctttggaagtctctgaaggttgcaagattgtgctgggagcctctggcttcatttgcccttctcacaccttattttaatacaaggtaaacccatctgtagaactttagaaataactgtcgacctaaaggaaaaactgaggcaaagttaatataagtggagaatttatttgggccaagtttgatgagggcaacctgggatcatcaattcaagttgcccttaatatgtgatccgataagcagcagtttcaactgagttctttgtcttgtgaagctccaggcttaaaggtatcgatcctcccacctctgtctcccaaagcactgggatcacaggcatgagccattacacttcttgtagcagctacgagtgaatttttttctttctttatggttttttttttttttttttttttttttttcctgagacggagtttcgcagttgttgcccaggctggagtgcaatggcgcggtctcggctcactgcaacctccgcctcccagattcaagccatcctcctgcctcagcctccgaagtagctgggattacaggcgcctgccaccacgcccagctaatttttgtatttttagtagagtcggggtttcaccatgttggccaggctggtctcgaactcctggcctcgacctgccaaagtgctgggattagaggcgtgagccaccgcgcccggccacgagtgaatttttaaaggaaaaaagaagaggcttttgctaaactacataccaagaattgacactaaaataacataagctatccattggctacacattgttctttctatcacaaattttaggaacacgaagataaagggtgatgcaggtactgggaagaaaagaacaaaatgcctttaaacaattgccacacacccctaccccccacccccacccccaccaccacctacatgggatggtgctaactgaagtaccatactcaagtccctctgggcctgataaagtttgaatgcctgcctggctaatggggtagctctcacctgtttgggagcccgaagtgggaggatagcttaaggccgagaattcgaaaccagccggggtaatatagcaagacgctgtctctacaaaaaaatttaaaaatttaaaaattaactgggcgactgggcgcagtggctcacgcctgtaatcccagcactttgggaggccgaggcgggcggatcacctgaggtcaggagttggagaccagcctgaccaacatggcgaaaccccgtctctagtaaaaatacaaaattagccgggcgtgatggcgcatgcctgtaatcctagccactcctgaggttaaggcaggagaatcgctttaacccggcaggcggaggttgcagtgagccgagattgcgccattgcactccaccctgggcagcaagagagaaactccgtgtcaaaaa

SEQ ID NO: 589042 - DNA, 4001 bp, Homo sapiens
cttcattgcaatatttgcattggttctaacacctaaatttacctcacaaatatccattttatgtcccagcagagtttaaaaactaaatgagacattttaggtgtaaggaaaacacacgtttgtcagtttgccatttaagaatctcccaagttggtactcaaaaactatcaatcccatgaccagaaaagatgtttcctatataacatcttaaaatatcatgcaaatgaaacttatctaagaattaaaataccttaacaaatataaaacagctatagaataactgcaaaggctattaccattcaaaagagggagcagtattcattgactgaattgttttaaactagacaacttaaggcttatttaagctttcagcatttacttaacacagtctttaatcaatccttctgctctcacagtctacctactggtcattctgaccttttgctcttatttacttccaaatatctttagcctccctagatgttccttcttgatgacacacgcatccatctccggccgatttaaatcaaatccacagcctcattttcagtccaattttcattggaatgtgatgaatacactttactttcaaagtaaaatttttcttactcttagtaagctgccctgacaggacagttgaaacacaattgtctaaagggttaaaatgtctgtccatttttcaaatgcgatggccactctgaatcaaatctgattgggatggagaatccaaatgtgtaaaacaaaagtcacaaaagacaaacagagcacagtatttcagtgggggaaaaaaaataagctaaatttagtcacttaagtcccagctcttcttgggatatatatatgatttttacgagaactaatcctatccggaaacatttccttcacctttcccttagcccttttccttcggtcatgcagtctcttaccgtgctaattatcatattaatataatcctcacttgcgatccttcctgactttattccccatgctcagattctcctgaaagcataacgctttcctaagtatacacacaatccatttaaaagtctttgtatgcgacagcctaactattcaaacacgaagtcatttctctaacggtcctagaaaaaattttaaaaagaaaaagaaaaccacaaagtcaagagcttctgaggggacctgaaaagtcatcaaattgaacgctctcgttttatagttggagaaaggagctcagagaaacttattcactgagctaaaaaggccctactaatgcagcccgtaattcaactgtgcaatctgaaataatcttaaattcagcttcaataagagctttctggaatcgccagcgaatccgtgggggagccacggctagaacccaggcctcctgattcccagccacagcttttccaccgaaccagcagctcttcccaaaagttgaaggcaactgtccgctcacaggatgggagggataaagggcgccttagtaaacacagtccaagtctactcgttttacatgaggaaagggtcacagctcccgaaattttggattctactgctgcagctgctgcttctgacagcagaggcgggaggtggcccaggactactcggtcctcaaagactggactctctctcggcgcgccgggacctccgcgcttcactgactggcttccctagaagactgggggccttgcggggaaataaaaagggcagacacgccaccctcaccgaggccctagacgcccagccgctctagaatcacggcattagcccttggaaagccagggagacgcggaccccctagacccgcagcccggccgcgtggggcggcgcgcaggtgacggaccaggagctgcgccctgccacgagtgaggggcggacgggagacgtcgaggccggcgagggggcacgcgctagttccacagcccggcgggcaagaaggagggtaggcaggggtcccgagccgcgggcggcgggggtccgtcacacacatactcactgccgcagctgcgaacaggaagcaccaaccgggaaccaaaacgcgtagagggacggggaggggcgaggacaaatgaggtaaggaggccgcgtccgcgcagacccgggagggaaggcacttccggggacaacacagctctagtcaccgcctttccgtccccgcccacctgccgcgcctgatgtgcgcatgcgtagtgggtgcgaaccgttctctgccccgcccataattattaggtttgccttccttgctttcccccttccccttcccaacttctcttgaagctacctaggctgcatctattatttgaatgactcgtacgaaggagatgctatttaccgggcaaaagccggggagttcgtgccctctacccccgcgaggaaaactacaacccccatgaggacacgggcgaggttgaggccgggctccgcctccttctccctggcgctcggtggacgccttctcagtgccacgtggcgcgggagcctagctgatcgcgtgcatgacgagggccagcgtggctggctgcttggcccgcagacctgggcagcgggaaacgcgtacttgagagcgcatggcttcaagcttctcccttgcgctcatgatcttaggctggtcgctttttcttttaggcggaacacagttcacactgggcgcctccaactctctggaattctaggcaacagattaacactttgtgaatctcgaagagctgcactcctgctaaatattggagttaatgctgatcctttggaagtctctgaaggttgcaagattgtgctgggagcctctggcttcatttgcccttctcacaccttattttaatacaaggtaaacccatctgtagaactttagaaataactgtcgacctaaaggaaaaactgaggcaaagttaatataagtggagaatttatttgggccaagtttgatgagggcaacctgggatcatcaattcaagttgcccttaatatgtgatccgataagcagcagtttcaactgagttctttgtcttgtgaagctccaggcttaaaggtatcgatcctcccacctctgtctcccaaagcactgggatcacaggcatgagccattacacttcttgtagcagctacgagtgaatttttttctttctttatggttttttttttttttttttttttttttttcctgagacggagtttcgcagttgttgcccaggctggagtgcaatggcgcggtctcggctcactgcaacctccgcctcccagattcaagccatcctcctgcctcagcctccgaagtagctgggattacaggcgcctgccaccacgcccagctaatttttgtatttttagtagagtcggggtttcaccatgttggccaggctggtctcgaactcctggcctcgacctgccaaagtgctgggattagaggcgtgagccaccgcgcccggccacgagtgaatttttaaaggaaaaaagaagaggcttttgctaaactacataccaagaattgacactaaaataacataagctatccattggctacacattgttctttctatcacaaattttaggaacacgaagataaagggtgatgcaggtactgggaagaaaagaacaaaatgcctttaaacaattgccacacacccctaccccccacccccacccccaccaccacctacatgggatggtgctaactgaagtaccatactcaagtccctctgggcctgataaagtttgaatgcctgcctggctaatggggtagctctcacctgtttgggagcccgaagtgggaggatagcttaaggccgagaattcgaaaccagccggggtaatatagcaagacgctgtctctacaaaaaaatttaaaaatttaaaaattaactgggcgactgggcgcagtggctcacgcctgtaatcccagcactttgggaggccgaggcgggcggatcacctgaggtcaggagttggagaccagcctgaccaacatggcgaaaccccgtctctagtaaaaatacaaaattagccgggcgtgatggcgcatgcctgta

SEQ ID NO: 589043 - DNA, 4001 bp, Homo sapiens
cagatggcattggcgggcagctcccctaggggccggcttagctctgggtatggagtttgggacccatcccatgcagaatggaggtgtggggtatggcggagcaccctggactgagggcggctgtgtatgtttgcaagtctcttccttctctggggcccagcagtttcctcactactgtagatggggctctaggggtggcaagaggagtcactgaactgctcccacaagagcctgcagcacagagcctggcatggagactggtgctggttgttaggtccctgttggtgagagtaggggcccctggttacctgaggctggggctgcacattcacgtagccagggtccatgagtgacacagcgaggtagagcagcagggagcccagcaccaggagcaggaaggtgaggggcaggagcagctccccctgctcctcccattgccgcagctctggagaggccggagagcacagtgaggctgggccgggtagaacaggagtgggtggggttggggtgcagttggaggtggggaagtgtgttcctggctgagcaaaggcctggagatgttggttccatgagtggctgtgtgtggccagcagttcatctgcacttttatctggagggtcagagggaaccatggaaggttatagagccagatctgttttggaaaacctcattgctaaagaaatggatcaggggaagcctgggggcagagaatctggccaggaggaagaagagagtcgctacaaaggcctggcaggaagtgagggaggaaggaatggacagggggctgctgggtcaagggagccagacctgactggatgtgggagagagggaagaggggtccagcgtctctggctctgcaatggtgagagactggttaggtctgaaatgcctgagagagatacagtgggaagggtgcagctggcaggctcagatgctgcagaggggcatacggaagggtccagcaggcttcagcccagggaggtgacaggattttggggaggtagggtgcagggcaaggagtgagggggcatgagaccaccagacagcagagtgtagacaaatcctgtgtcccttggttgtaagggggagcagagaagaaagggtgggttttgaggggggttttctgatacggagacctgagcaagtttttaggctaaagggtgaaggtggtggaggaggtctgtcttgggaggaaagccagaaggggccccagtccagaaactgaggctggaccgccatggaaggagggctggggtctgctgtgggggacagtgggggaggctgcctgtggcaggtgaggcgctgggtagggggctactaagaggaatgagggaaatggaggtgggtgggtgggtgaatctgtgggaagatgggagacaggccgcaccccatggagtgttctctggcctgagggtttgcctggacttgggcagctagtggccatgggggtgtggggggtgtgggtgtgggcagaatgccaatctttgcatctagttgagcctcctaatcgtatggataggaagatttggggtcagttcctgggaaggatcatgtgggtcccaggatcaggggacatggggctcaagtcggtccttggatctggtgggcaccggctgggtcctgggatggacagggcatttggcaatgatcaggaagatgctgggattaattagggatcaacggggtatcagacagagagcaggtggctcttggaatgatagatggggagagggcttcaggagctggtggagatcgggccaatcccaggatctccagggattaggcgggagacccagtgtgaccagaacgtctggggaagtacgcgggatcgggtgggtccggggtcgctcggggtccggctcaccggtatcgtgcaggaagagcaccagcgtgattccccaggtcagcacggtgtgcccggtccgcaccaggaccccagggctgaggagcgcccagggcgccatcgcctcggcccggggccccacccggaagaagcgcccagaggggcgggccctccgagggaggggaacgccgccgcccggggactggtggatctaggcgttgggcggggccggactgggtcagggaggctgcctattggatggcatctgcggccgaatggaccctcaagccaacaggtgcctgaagaggctgagggtggggccggcgcgcgcgcagctggtaactccctcaactccagccccacccgccaggtaacttttgaaagcgccggagcgcgcgcgcacctcccccgcgctccgctgtgccctcccccgcgttcccctgtgcccgccctcgcagcctcgcgcatgcgcgtagctccctgggcgcttcgaagatccagcggcttgctgtgagtccgggaggcaaaattgtacccatttcaaagatgtgatgactaaagtctcgagagggccaaggctcgcccaaggttgctctgtggtgacagctttacctccttgctatgtattctcagatattgcaaacggacgagagaaaagtggaggtacgtggtgcacattctgactatgggtgatccaacttaggcgggagtcagaaatcccagcactgccccttcctacctgtgtgaccctgggcgagttactgagcccctctgagctgttttctgtctctataagggggattacaatagtgtcttcctcctaaggtgtttgggaggattaaataatggaagcgccttgtctagcacgggactgtcttgcctctcctgctgtgagccaccacctacaggcggactttcctcaccggaggctgcaggctgtcctccttccctgtgtccccagggccttctccactcagccccgcctttccacagcacctcccactgataccagcatcctcctccgcctccctctgattggccccatcccagctcctccaggatactcctctgacatctgttgtttttctcagctcaacatcctttttttggttggggaatcgacttcccatcccatgtgattggagggactgcccctcaccccataggatggcgagcggcaggctgtgggctttcgactctgcagaaccaatcacaggccttccatgagattactgtctagatgctgagaggaaggagcattcttttggatctcaagcctaaggaatgggatataaggcaactgggagccgtctttacgctgggcggagagggcttaccctgtctgtggctggagaaaatgagaccaacttataaagacacatagagatggataagcagcactaaaggagggagcaagagatggtctgaacaacattgtctgagccctctagatccggctgtccctgaagctgatactgactctgcatcccctggttgcaagagtcaatgaatgcccaccttttttttttttttttttttgagacagagcctcactctgttgcctaggctggagtgcagtggcgcgatctgggctcactgcaacctccacctcccaagttcaagtgattctcctgcctcagcctcccaagtagctggggttacaggcacatgccaccacgcccagctaatttttgtatttttagtagagacagggtttcactatgttgtccaggctggtctcgaattcctgacttcaagtgatctgcctaactcagcctctcaaagtgctgggattacaggtgtgagccaccatgcctggccccaattcccacctttgactagcctgagtagatgtttgagttgggtgtctgtcatttgcagctaagtcttgactactgcactgggtgcaggatctgatgtgctcagtggggacatccagcacattatccactcagcacataattctgaagcttccgtgggttaggcactgtgctagtatcaaacatcccaacactagttcaaatagtaaggccagattttaattaacaatatactactgatagggcggagagcccagtgtgaaccaactgaaacttctgtttgtgcagaggtgactgatgttttttgtggttttggttttctgctttcttgagatggg

SEQ ID NO: 589044 - DNA, 4001 bp, Homo sapiens
aatgaggcagtaggcaaataagaagtacatgttatgattcattgattcttgtctcagaacttcctgttaagctgattatatgtctgcatttttaaatgcttagatttctcttattaaacaaagtacctcgtaggcaaaagtgacacggtcctcatcattttctttaaatgacgctctatttcatttattccaactacagcttctcaagtatgttaacagaaatctcagtagtgtcaaaggatctaatagaattgtttccatcgaaaatgatgaattctggaagagtactacaccaaaacaattatggaattatacattttaacttatattttcatattttactaatacttcgtatatgtttttaatgtaccttcaaaccacgttaaagggtcttatttaaaaacattttccaagtaagcatggaaaagctaaaataagccttaaataatttagtctggctctctgatggtatagagaaaataacatgggtcattgccctacctgtaaacccacagctggatagtgacagaaatgggactagaatctagtttttctttccacgacaccaaatctcatttggctctttctttccagtggatttctcacctcaattcttcaaatatctttttgcttttaagagatggcacaaactaaggaaaaacagagcatctctccgaattttacctttaaaataagtaaaatctaaagagttggaagaatttaatattacaccaaaagccttttaatccaggaatggcgcatactaagcagtcatcaaatggtgactgttattaatattattcttaccacaaggaaagcagtgaatttttaaaagtgcatatattagcatagtaggctgaggacctatttaacacatctttttaaattgcacttaattatccttagtcgcctttggactgtaactttacaatataatttatgacccgcccacaatgaccttgatttttttttctcttctacttttagagactgctatattgcaatattttaaagtaataattggtcatgtcctctcagccctggtgatacagacatccaccctgactctcaagggatcttaaaatgtgacccacatatagcttgaaaaagaccgtaacttaaatggactctgcagttacaatccagcgacctgttacagtgaacagtaacaagtgcaaactgctgccatccataagccattttccgaaaacctctttggatcaagaggagaggagtgagaaggtcaataaaggagcaaactgtttgtcctctctgcagcttcacaccagaagtctggaatgaatgaaaagctctggaatagcacagagaaacccgggatcccagtgcaggtctccagacgggggtgcggggagagaaactgtagtttacaagcgagaaactcaggatacagatttaaaataaataaataaataactagccaacatcgtctcgactagagcaggaaccccccacccccagttgagggaggagcacttagcaaggggctgtagctctagcagaagacgctctgaaaaaggccaggcctggggcggggaggcaccgagaaacccccgggttccaaacagagcaggtgcagggggcgtgcaggaacaggtgagggcgtcccggcgcggaggagcggcgggcgggcccggcagagcggagcgggggccggggatgggggtgggggtgcggatggggatgggggtgggggcggccgcttcgcccccgcgcctgcacactcaccgtcgccgctggctcgcctctcgctgccgccgctctcccgaccgccagcagctctttcccctcctcctgccgcgccacctccgcctcctccggcgccgccgcccaggccgggccgctctccccttccgcttccgggagcctgagggcctggaccggccgagtgggtgtccgcatgcccgcgcgcccgcgtggggagggacgactgccgccgtcgccgtctcgcttagctcccgggagccgcgatgggagccgctgagggccgaaactcctgcaatcgcgccgcagccccagagccgcggacccaggcagaccgcactctccagagcgcttgcacctggcgcgcctgggcgcctctgcccctccccagccctacttgagccgtccttctcattgtccccatatcctcactgctcacctctcccgagagacaggatgggggccttagcttaaaagattgcatgtatcctttcttcgggggatgtggccagcaggcctctctccccgcaggtgttctgggatgtcccatggtaccttgcttcaaagcgcggtctgcagcatcagcatcctctgggaactcacaatctttgaaatgcacaatttcaggcctgctgaatcagtacatgcacttcagcaagatcaccaggtgactcctggggtgcaccgtaaagatggaaaagcattgcactgtagtgcatggtctcgtccacttcagaccctctattgggttgcctcagacatcccaggatatttcctgttcctgtcctcaacctaaatccacacccaaacaatcttttcttatattttgggagacctccaaaagtttcctgctttcccatccctgcaaaagccgacaacttttggactcagcgatgcaagtaatccacctctcagtctaacttggtatcttcaccaaacaccagagatctactaactttcccacctcactccggctgaacagtatttggggaaggttaaaccgtttgcagtaatgtggagctagatctttctgcccacgtgccacaggaggagacagtgtgttggtggaagaaatattacctgttgtataaaatctgtattccttataagatgtgcttaaaagccctccacagacacatccctacctacctctccagtcttagctccaactaatttggttcatttccccattctagaatgccctgctctctgatgatcttaaccctatccagatttgagagtggaaatcttgccaaaccagagttctctcaccactgcccttatatagtgcacattgttgcctgtttggggcctcatattaccttgtattgctaaggatttttaaacatgttgtgtcctggtttctgaactaattataaacaccttgtgaccttaaaaactttggtcagtggttatcaaagtgggatccctagaccagcagcatcggtatcacctgtcaacttgtgagaaatccatattcttttgccccatcccagatctactgtagtagaaactgtttaggtgtagcccagcaatccgtgatgtaacaagccttttaggtgatcctaatacacactcaagttttagaattactgacctagattactagatattcccaaaagaacccagtggtaggaattgatttacccataagcagattttattgcctttcaggttaacaaatacactccccgatatatgcatagcgaggttgaaagactagtcacgattgcttttgatagaattacctttatttttcataaatcatttgatgtagtaggatttttgtaactttctctgtttgaaaagaaggagatatttcatataaacaatcactttgaaggaagaggaaatgtggaatcctcccaccggaatccagctacctgattgcgtattcaatgtgaatcccttctacccaaatccagctacctgattgcatattaaatgtggactcctccctacccgaatccagctaccagaattgcatattaaatgtaaaatcccccccccacccaaatccagctacccaattgcatattaaaagtagaatcccctccacctgaatccagctacatgaattgcatattattttgctttctcttcagatacccctgtgagagggaataatttgtgacaagtgatctcaaaactgccaaaataagaattagttgacaggtccatgattgcacatgacaattggaagtgcatggatttttcagtccctttttaaaataagttagcctgtcttttatcagccaaatcaattccacagagaattt

SEQ ID NO: 589045 - DNA, 4001 bp, Homo sapiens
ctccaaccaccagacacttcaacaagtacggttctgaaagggtgtcccattagacaccctgtgaccctgtatcacaaggacagcccctgatgtcttccccacctttttctggtccccactgttctctgactttcttgccaaccactcttccctttcttcaacctgctccagtcccccatcctcccactgtttctttcttttttttgagacagagtctcactcttgtcacccaggctggaatgcaatgggcacaatctcggctcactgcaacctccacctctcaggttcaaataattctcctgcctcagcctcctgagtaacttggattacagacatgagccaccacggccagctaattttttttttggtacttttagtagagatggggtttcaccatgtcggccaggctggtcttgaactcctgacctcaggtgatccggctgcctcagcctcccaaagtgctgggattacaagcgtgagcccttatgctgtttcttcaaatcaccaggcatatgaccacaggacctttgcatttgctgcggaatgctctgccacaagagaactacctggcttgctccctcacttatctctgctcaaaggtcaccttactagagaccttccctgaacaccctctataaaatgacaactcccaactccttccccatggtccttccttctctatttttctccaaaccacttattacctccttacatatcatgtttattatttgctgaatgaacaaatgaaccaaagtagcgaggcccttcacccctggccaccactttctgctctaagtatagcctcccgtgacccttttcaaggctatgcttttatgctcatcctaaccagtttgaagtctgaagagaaacattctgtgaaagatcatatatggaaggattttcccaagacatcagacattccattcccctcccccttaaaaatcaaatgcactagctgagcgcggtggctcatgcctgtatttccagcacttttggaggctggagcgggcggatcacttgagcccaggagttcgagaccagcttgggtaacatagtgagaccccatctctatttaaagaaaaacaaaacaaaacaaaacgaatggactgacaaacacaggcaaagactggaaatcttgggctctttcggtcaaagagcagccaagacaagttccacccagagagctatagtggccagcacagtcagtttcactatcaactcacctgtcgggctcccttggccctccggttgcaacctcaccctgttggatttccctatactttgtgtcatcccttttgggagctgatccagaatccaagtcgtccttgagcttctaagcacttctctgggggaacttaagctcatccaacaggtaggaggggcagagggtggccctttcagccctacaccgatcccccatcttgtaggggcaaacgacagagcgtcattttctttctggaggaagggagctcagttttaaagacacgattctcagacctggcggcagggatagagaaaggaaccctcccaccactggcggagatggacctcagagagtggttgcagcggcgatgcttaggccccgtaggcaggaggcgaaggaggaggacgcaggtacgtcccttggcccggggtccgggacctaccctggacggggctgccctcagcgtcgggaagcggacgtgatgcttcgcaggcgaggaggagcagagaatgcagcccgggagaatccggggccagagcacctcaggaggttggggatctcgtcaggctagagccggggtccaggggagacgggggtcggcggggcggagcttgggatcccggggacgggagctccgggagggagggggtcgcgacggggaccccgtggcggttaccttgcccttagggctgccggcggggctgaggctcctgggcccggcccctcccccgatccggctcctacggctcggagcctgcagccgccgccgcctccgctgtcaacaaacccggggcgcgtcacttccggggccgccccttagcaacagcgatcgggttcccccgacccgtcccgcggctaacgcgggcggcggcggcagaaggttccggggaccggcgggcggctcctttccccgggcccggcacgttacgccggtggaggaagccgcgggatgccccccccaggccacccgagagaacgcgtcattcagggctctccctggcctccgaggggcctgttcgtgggaccctaggatcggtgcccgccctggcgctgcggttcacctgagcccaacactgctgaatagcaggactgactctgggcgccagccccctccatccagcgccctgttgaacatgtcttgcgttctccacgggtggctcacactcgcgtgtcaacccgcagtcatcaccgtcccccaaaaggtgctcctaacctccatctagggcatgcgccaccaggcaaccgagcttccaaatgggaaattgggcggcgacctcggcccctacattttcctgggcccctcgtccagtctccaagtcctaaggatcctgtcaaaccagttccttctggccgagcgcagtggctcacgcctgtaatcccagcactttgggaggccgaggcacgcggatcacctgaggtcaagagttcgagaccagcctggccaacatggtgaaacgccgtctttactaaaaatacaaaaattagccgagcgtggtggtgcgcgcctctaatcccagctactcaggagactgaagcaggagaatcgtttgaacccaggaggcagagcttgcagtaagctgagatcgcaccactgcactccagcctgggcgacagaggaagactccatctcaaaacaccatcatttcttctctggatttctcttttttttttttttttttgagagacggagtttctctctcttgttgcccaggctggcgggcaatggccctcagctcactgcagactccccgggttcaagcaattctcctgcctcagcctccaagtagctgggattacaggcgcctactatcacgtctggctaatttttgtatttttagtagagatggggtttcgccatgttgggcaggctggtctcaaactcttgacctcaggtgatgcgcccacctcagcctcccaaagtgctgggattacaggcgtgagctaccacaccctagctagatgctcctttcttgaggaaccctttcttgacaggtgcctcagttccattccaagaactaattttgtggatttcttttttcttgcatagcaccttttaatctttgaccagctacaactatgttcgtacagtcttgaatccttaaaaaagctgttgggcttggcacagtgactcacaacctataatctcagcagatggggttgtcgaggctgaggcttgagcccaggagttggagatcagcctgggcaacatagggagaccccatttctacaaaaattagcagggcatggtggtgcgcatctgtagtcccagctactcgggaggctgaagttggaggattgcttgagcccaggaggtggggaggtacggttttatgctccttaagatggacatcatcagagagacaataacaaatgttgacgaggatatggctagatgggaactctcatattaatacattgcttgggccaggcgtcgtggctcaagcctgttatatcagcactttggaaggccaaggcaggcagatcacgaggtcaagagtttgagaccagcctggccaacatggtgaaaccccgtctctactaaaaatacaaaaattagctgggcatagtggcgcacgcctgtaatcccagctacttgggaacttgggagactgaggtaggagaatcgcttgaacctgggaggcagagtttgcagtgagccaagattgtgccattgcactccagccagggcaacaggagtgaaactctgtttcacaagaaaaaaaaaaaaagcccggtttggtggctcacgcctgtaatcccagcactttgggaggctgaggtggcctgattgcctgag

SEQ ID NO: 589046 - DNA, 4001 bp, Homo sapiens
gtaattagcaacttgagcatgcacgtgtcagctctatcaggtatagctagaatgcagattttataaagtttatggcttcctctaacttacagcttaaaaaaacacccgagtgtaactgaacaattctccaattccaattctgaacaaagagcttttacacctatggaatacagttctttcaggtgcacatgatgtgatgagatggcatgaattcccactcacctgggaatggagacctgagttcaagtctctagtctgccactaagtcagtgaccttgggcaagtccttactttccagatttcagttccctctttgccaaatggagtagaattgacttttaaaggctccttttcagggcctgggagatagaaaacaggagacaactacaaagaatccttaattttttaggggggtgtggggaaacattttaacaaaaaacttcaaagataaaattgcagtattttcaccaactgagttctgaaagcctactctttaaaaaaaatcctaaaaataaggaataaaatacattcgtttatgtttttagaagtctgtatctaaatcccaggtttaagaacggggatgtgtgacctatatgttcctttatcttggtatctccttagatgctatcccttaggagacactcaatcaataaagataatccgacccttccccgaaaacacacctccacggagtgcgtggaaagcgagcaaaaaatttcacattcatcagcctaaatgcaccaaacaaaggaggtgttccatttcctccatgaaaacggatctcaggataaaaacgcagcgacgtcgagaagcccaaaagacgacgccgagaacccccggccccatgttccaatggattttggaacaagttcgggtcccactgataccccatccccctctaagcaaaggcctcactcaataaagcccaacagggccctctccgaaaaccactgagtcatgcagaacagcagctcagcaggcccggccagcccttcgcctgcaggccccacgcggatccccgacccccgacccccgaccccgaacggctcctcttaggggagagctagggggggctgcaacgggcagggggcgcggccgccgcctcggcctctttgtttctctgggtcgtggtgcccacgccgggcgccgccgcggaggcgagcggcctagaggccggccccgcagaggcggcacgccgtgcattgtttcccgaccgtgctgtggagcgagccagggacgccgggagccaggtctcgggccacgacgacaggatgacgcctccgtctttgtgcttcctgggctggcgggcgggctcccctcccccggacgccgccatccgcggcctgctccggcttcgccattggcccgcggcgccccggtcccttcactcccgcccccggcccggcaacaaggagcccggctcccacccgcagccccgtatcactcaccctgcagggtcccaaatgcgaaagccgggttcgcgcgcgaagccggcacgatgaggccgggccgaggcctccgggaaggctgagccgggcgccctggtgccgccgccgcgggccgggagcgggtcggagcagcaggcggaggtggcgccgccgccgccgcggggtcttcctttgttcctgcagcagcgtcgagcgtggccgggacacgccggagctcgggaagtgggaggagggaagcgagggggggccgaggaggaggtggagggaggaccggcggccgcagcggctaacgctgctcgaggcgctcgcctgtcgtcgcctcacgcctccacaggccgcaggttgggcggacgaggagggcgagcggaccgcgcgccgcgaggcctggggccgtaagggcccgctgatggcgctcttcgccgctcctgccaccgccggggaagctgcgcggctcccgggagcgagcgagcccgcgtaggagatgcacacagctccgcgtcccggccgactaacgcactcgccgcccggcgcccgggctgtgagggaaaagagggggagggggcgggacccgtgcgtcagcgaaaaccccggcggcggcggcggcggcggggagcgcggtgacgtcgcgggcccaaggccacgcccccggtgccctgtcagtaggtccaggaggcggggccgagacgggttgctgtgccttctcgcggagcccagccactggcctggcagtcggcccctagggtggagctgggaagagcgagtcctgtggaggatgcgtttctatttttaacccaattgtccgccctcagcctccctccttcggattttctcattcaaacccgtttttcgccatcctagttctcacgctttgtctccagccctgggcagacattccctcccccaagaatcgtaaggattcacccccagaaaaggaaaagaattgccttatggcttcgaggtcttttctgtttatgaaacctcctcactccccacacccattttgagctccgaagtccagcccgagcgtggccctgacgcagctggcggcgtgcgttcgctcgcccaaggtcacgggtggttgtgcggagtgaggaaacgcgcggccgcccagggctgccaatgccccggcggcgctgttctgaacaaactgttttggccagcctgtgaaatccctggaaattgacgattccagcaaagcgtcgtgaactgggaaagcaccaaatgttctactcaaaagccgcgaagggacaaaacaagctagacccgaggcccagatgaagcgggaggaggaggcttgcgagaggaagttcaaggggggaggtactaggcgggcagttcaggcacgaggcacaggtcccccatgggtgaaaggatgactttacccggaacactgggaaccttttcagagcacaaacaaaaaacattttcaactgaccgctccaagtgaatttcagttcaactcaaaataacaaaattactaagtcggaaaggacttctgaaattttctagtaaacaacggtctaacgaatacatagaaatgatgtttagggtttatattagccacatatagaatggagaagaggtcccttcagtgtttctcaaagttggtaatcagaaaaaaaatcacctggggtgattaaagattcctacgcatctcccctggatatggttttggttgttccggggtgggagcgggggtgggggggggcccatattgcgcttcaggtggtccttatttataatctgtatttgggggaatgctatactgatagcttgagccaccactgccaaatcaaacagttctccgccacagttagcaaagtacctggagcataacaaccttttgttttgttttttaacaaattcgggtttattactgtgatcaattaatgtattagagatttaagtagtttgggtcactggtcccacgaccactgcaatttatttccttaaattagcagatgaattagtaaaaaaaaaaaaaaaatagcagctaccatttacaggccattttcagtgccaactattttccatttagggtctcattttatcctcacagcaattcactgagataggtactattatcatgtccctttctacagataaagaaacaatgactaaaaaggcttgcccagggcactgaagggcagggaggcaatggaggtgattattattgagaacaaaaataacttgaattttaacttgaatttttttctttctctagaattggagttatagtgagtgaaacaagataattcctgaagaagcatactttaaaaaaagtctaagggtaatgaggcaagctcattattgaatagtgtattccataatattatgtcaccttctgataattcatcttctctatcacccatttataattttctctgagactgtttcaatcaagaatgttgcaggtattggacctaaacataccaagattcctttttagcagctattttctagtggttctcaaaatgtggtctccagactacctgggaacttattagaaatacagattctcaggccccagcaccaaacctgtggagtcacaaa

SEQ ID NO: 589047 - DNA, 4001 bp, Homo sapiens
gagataacaaagtattccaactttgcttcagagaacatgtctaccttcatttcattataaataactttcaactgcgagacacacaagaggtaccaggacatgagtcttctacatgggttcccatcttttagatttttttcccctagaaagccagcttttaaatgccatcacatgtgcacagcttgctttaatatttctcagaagctcagatcacatgggagggcgcttcagcctgtcacaaggctgcaatgtgacaagctgagctggatggaggctctcacataaagcctagtcaacaggggcctctgaaatcagcttctatttatatctcaaagcctgccaactcctacacaaccccaagaactaaggatgcagcgttcatatatctaacataagaaaacaaaaaaagggctgctagttttttcctaatgtaggaaaaactacagaacaatctcaatctagaagatgaaagcatagtcaaagctaaaatggtcaaggttgttgataaaaaactaagcacagtggagacagtgtaaaaaagaatcctcatttagtgaggatttaggggatgaagtgggggatgtgtgttcccattaggtattgcattccccttgtattttagaaaaaaataccattactatttattgcctttaaagtaattagcaacttgagcatgcacgtgtcagctctatcaggtatagctagaatgcagattttataaagtttatggcttcctctaacttacagcttaaaaaaacacccgagtgtaactgaacaattctccaattccaattctgaacaaagagcttttacacctatggaatacagttctttcaggtgcacatgatgtgatgagatggcatgaattcccactcacctgggaatggagacctgagttcaagtctctagtctgccactaagtcagtgaccttgggcaagtccttactttccagatttcagttccctctttgccaaatggagtagaattgacttttaaaggctccttttcagggcctgggagatagaaaacaggagacaactacaaagaatccttaattttttaggggggtgtggggaaacattttaacaaaaaacttcaaagataaaattgcagtattttcaccaactgagttctgaaagcctactctttaaaaaaaatcctaaaaataaggaataaaatacattcgtttatgtttttagaagtctgtatctaaatcccaggtttaagaacggggatgtgtgacctatatgttcctttatcttggtatctccttagatgctatcccttaggagacactcaatcaataaagataatccgacccttccccgaaaacacacctccacggagtgcgtggaaagcgagcaaaaaatttcacattcatcagcctaaatgcaccaaacaaaggaggtgttccatttcctccatgaaaacggatctcaggataaaaacgcagcgacgtcgagaagcccaaaagacgacgccgagaacccccggccccatgttccaatggattttggaacaagttcgggtcccactgataccccatccccctctaagcaaaggcctcactcaataaagcccaacagggccctctccgaaaaccactgagtcatgcagaacagcagctcagcaggcccggccagcccttcgcctgcaggccccacgcggatccccgacccccgacccccgaccccgaacggctcctcttaggggagagctagggggggctgcaacgggcagggggcgcggccgccgcctcggcctctttgtttctctgggtcgtggtgcccacgccgggcgccgccgcggaggcgagcggcctagaggccggccccgcagaggcggcacgccgtgcattgtttcccgaccgtgctgtggagcgagccagggacgccgggagccaggtctcgggccacgacgacaggatgacgcctccgtctttgtgcttcctgggctggcgggcgggctcccctcccccggacgccgccatccgcggcctgctccggcttcgccattggcccgcggcgccccggtcccttcactcccgcccccggcccggcaacaaggagcccggctcccacccgcagccccgtatcactcaccctgcagggtcccaaatgcgaaagccgggttcgcgcgcgaagccggcacgatgaggccgggccgaggcctccgggaaggctgagccgggcgccctggtgccgccgccgcgggccgggagcgggtcggagcagcaggcggaggtggcgccgccgccgccgcggggtcttcctttgttcctgcagcagcgtcgagcgtggccgggacacgccggagctcgggaagtgggaggagggaagcgagggggggccgaggaggaggtggagggaggaccggcggccgcagcggctaacgctgctcgaggcgctcgcctgtcgtcgcctcacgcctccacaggccgcaggttgggcggacgaggagggcgagcggaccgcgcgccgcgaggcctggggccgtaagggcccgctgatggcgctcttcgccgctcctgccaccgccggggaagctgcgcggctcccgggagcgagcgagcccgcgtaggagatgcacacagctccgcgtcccggccgactaacgcactcgccgcccggcgcccgggctgtgagggaaaagagggggagggggcgggacccgtgcgtcagcgaaaaccccggcggcggcggcggcggcggggagcgcggtgacgtcgcgggcccaaggccacgcccccggtgccctgtcagtaggtccaggaggcggggccgagacgggttgctgtgccttctcgcggagcccagccactggcctggcagtcggcccctagggtggagctgggaagagcgagtcctgtggaggatgcgtttctatttttaacccaattgtccgccctcagcctccctccttcggattttctcattcaaacccgtttttcgccatcctagttctcacgctttgtctccagccctgggcagacattccctcccccaagaatcgtaaggattcacccccagaaaaggaaaagaattgccttatggcttcgaggtcttttctgtttatgaaacctcctcactccccacacccattttgagctccgaagtccagcccgagcgtggccctgacgcagctggcggcgtgcgttcgctcgcccaaggtcacgggtggttgtgcggagtgaggaaacgcgcggccgcccagggctgccaatgccccggcggcgctgttctgaacaaactgttttggccagcctgtgaaatccctggaaattgacgattccagcaaagcgtcgtgaactgggaaagcaccaaatgttctactcaaaagccgcgaagggacaaaacaagctagacccgaggcccagatgaagcgggaggaggaggcttgcgagaggaagttcaaggggggaggtactaggcgggcagttcaggcacgaggcacaggtcccccatgggtgaaaggatgactttacccggaacactgggaaccttttcagagcacaaacaaaaaacattttcaactgaccgctccaagtgaatttcagttcaactcaaaataacaaaattactaagtcggaaaggacttctgaaattttctagtaaacaacggtctaacgaatacatagaaatgatgtttagggtttatattagccacatatagaatggagaagaggtcccttcagtgtttctcaaagttggtaatcagaaaaaaaatcacctggggtgattaaagattcctacgcatctcccctggatatggttttggttgttccggggtgggagcgggggtgggggggggcccatattgcgcttcaggtggtccttatttataatctgtatttgggggaatgctatactgatagcttgagccaccactgccaaatcaaacagttctccgccacagttagcaaagtacctggagcataacaaccttttgttttgttttttaacaaattcgggtttattactgtgatcaattaatgtattag

SEQ ID NO: 589048 - DNA, 4001 bp, Homo sapiens
ttcattttgctgctacaactctattctaaatcaccataatctcttgtctttgactattgcaaaaagttcctaactgacctccctatatctacctactcttgcccctctgcagtccgtcttccatgaggtagccatggtgatcttttcaaggtgtcagtcagaacagatcattcccctgcttaaactcaatggcttctcactgcatctagaataaaatccaaatccttacactagccaataaaatcctacattatctgataccttcctaccactatgattcacagctttctactttccctctgactgtgctccaacagcactaatcttccttctcttttttaagcacaccaagtttactcctaccccaggtcctttgcagttgatgtttatttcttcctgaaacactctttcttcagatctctgcatggctgcctccttgtgatgatttatgcctcaacccaactgtcatttgctaaggaaagctttccatgactaacctggctaaagtcatgcactccctaccctcaatcactctgtaccacaccatcctcttttacttacttcagcacttattagtgtctggaataattttatttgtttatattttatgatatctttcatatttctataatgtaagtcattgagggagggattctggttttgtttcctggtgtgtctccagcatttaaaacattccctggttttgaggacaaagcagggactgcaaaacaacaacaccaaacaaataaaataaaaaataccccctggcataaaataaatgctcatcttacagactgttcctactgttcctgcaagttttcaatcactgacacccaaatactccccaatcactaaccttcacaaacttctcccaattatggatctctgcaagttcccaactatcactctccacagaacaatcattaacctccacagatctccaatcactgaccaccaaagaaccctcaatcattaaatgcagcaatcccctcaaactcctgacccccttagacttctagtcacagaatcatagaggatcttcaatcattaattcctactaatcacctcattactcaaagcacagttattactgctagacaccacctaattattgacctgcatacatccccaattaccttttctccccagatgacatacaaatcatctaccatccccagagacacctcaacattgactccccaaactccaacagtcatattcccccctcactggccccccgattcctccattacccactgaccctcaaagatactgctaatcaaacttccacagacatcaccgtcactgactcccaagccccaatctctgatgctcccagatgctcccaatcactgaatttcccaaatcctaacactgaccctctttgataacccaggctctaaccaccacaggcacccataatcgctggctcccatagacatcccaaaccgccaacccccacggtccttccctatctctgacacatcacaaagcctccatttctgatctccttccaaactccgacactcggtgactgccacagacgcctccccatcattgtctctgcagatccctcctaatactgatatcctaaagccaaatcattaaccccacagataactcagaacaccgacctcccaaaagaccatctagcatcgattccaccaattcccaaatcacctatcgtcacagactactccaatcactgccccgcaagtacaccatctctgaccgccaaaacaccctgtctcatcacagctctcaccgcggcgctggcctcgggctcggacacagccatctccagtggtcgcccggcctctttggtcgtttccgcacttctcctccggtccacggtctctggctttgtcagaatctggacgccgctggagaccgacatggcggctacccggagggcggccttagcgggtccggcagccgcgatggcggcgcccttcggtaatagcgcacgggcgcggccatcttggcaaacactcagccgtacagcggaagtgcggggacttctgggacaattagatcgggaggtggaagctggcgagggcgttacttgcaggatgcaggagtgatgcgatcagagccagccggaaccgagttccgttacgcactacaggactgacctgggcctgacaacccactgccggagttcggatcgcatcactgccggaagatattttacagaatttggaattgcttttccgaatacatgtcagtgcggccagcggctagaagtccgggaatcacaacgcttagtgcggactttagaaaggcaggatgcgagaaattggaagcataacggagaaaagcctgatcgaacaaataacattattttatagggagaggacgttaatctttgagatatacgataaatcttttcatatatagtataagaacaataagaaaaactgaaacagaaacttaagtaaacacaccactcctccgtgagagcccgggtttggtgaagatatttcaccagaataatcaagcacttggagaaataattccttaatgcgccatttcatgcattaattgcattcattgaatatgtgcaggttaggtgctgcgctatgcaaggtactggaaaaagagtggagaggggtagggatgatgtaagtccagagtccaaaggccagaaaaccagggtctccaatgtcaaaaggcagaagatgaatgtcccagctcaagaaaaaagaaaaggtgggagggaagtggggatacttaacgggtttttaaaaaaaaagaaaagaaagaaggaataagacctagtatttgatagcactacaggtgtatatatccaataataatttagttgtacatttcgaaataacaaagtataaatggattgtaacacagaagataaatgcttgaggggatagataccccattttccatgatgtgattattgcactgtgcatgcctgtatcaaactacttcatgtaccccataaatatactcacctactatgtacccacaaaagttaaagattaaaaaaaaatagaaaagaggattcacccttccttttcctttttgtcctttcaggccctcagtggattaggtggtggccacccacattggtgggggcttttttattcagtttgctaattcaaatgctaatcttttcccagaaacacactaacaaacccagaaacaatgtttcaccagttttctgggcatcctttagcccagtcaagttgaccgataaaattaaccatcaccctaaccatgatatacacagacttccaggttacagaatctgtgagataataggtttgtgatactttaatccactaaagctggtgataatttgttatccagcaatactaaactaaggactcagtgaagactgaaaaataattgatggcttgaaattactcttcacctacttaagacacggccccctacactgtgttcctgacagagtattctttgagcgtcacctttgtacggataggcaattgctttgtttctgcctcagatatggtcctgactttaattgttcctgatattagagtcgtaaaaaggtacaatatttttttcaatacctctcctttcctttcttcctcacaaatcagaaagaggggcagttcagtttctcaaggattttcttgaaaccaacatatatatacataatatatacatatatatacatatacacatatatacacatgtatacatatatacacatatatacatatatacatatatacacatatatacatatatacacatatatacacacatatatatacatatatacacacatatatatatacatatatatacacatatatatatatgtggtagggatgagttagtacggaggatcagaacataatgttgtactgttgagtatattcattcgagtagacctgaaaattctcccgacagggacaggggaagcaagtgcggcgataactgtgtgaattcggctgattctagtgaattccctaatgaagaggtcacacacggtaaatatgtatggtatt

SEQ ID NO: 589049 - DNA, 4001 bp, Homo sapiens
ctgcagggccacggctcgaagtggggctgacggctcagggctcacaggccagcaccagttgtccacttgtggggccgcctgctcttgcagcacaggggagagagctcgttcctcgtgaccctcctgggcactgaccacgagcatcaggggagggaacagccatccttacttacctcaaaggagtagctctccaccagcgggatgtcctgctcatcgatcagcgtgtatttggtctggaagttaaccacatgtttcaaatcattacatttgggatctgcgtgaggtgcagtaaccttataaccagaacaggcaggagcctgttgcattttcctgtgaagtggaaagtaactacaggcctcttcagaccaagacagctcagcacatgggggcctcattccaccgtttggggtggtgcagtctacgacaaaacacaggcagacaggttaaaagccagctgcccactttagtctgcgccagaggagctggtatcaggcttcatcctcgcagggctaaccccaacagtggcactgaacattcaacgcaccaataaacctaggcaaagactgtttcactgagctgagggaggggccggggctgaggcagaagagccagaaggttttgattagggtgtgtttattaagctgagctactcactgattaccctttttagctttttgtccatctgaaatgttccaaagaaaagctgtaagggatgacaatgccatcatgggtggagttagaaggggtctctggtctccgacctgactggagagcccacccttccctggtggaaaaaagcctcctccccagcaggccctgcctatgctcttgcagcaggggcaggaaacaggaacaggtcccagaacgggccagtctccctcttggcagtttttcttctgggatctgaacctgttttacctgacgccgcctgacactgcctcggctcctctctcccaccaaaagccgcagccgctggtgacgggaacagggctcccatccgggtaaggaccctggctggtgcagctgcacaggtggctccgagaaaccgccaagcctcaatgcccacaggtgccatggaatccccagcctcaaacgtggagcgtgggggccaagtaagaagagaagtcgaggaaggccctgagtctgcagcatcagggcccaggcttcttcctctctgctccgagtctgaggctcagcctaacgtggccaacccctggcagcgttaaaacgagcctgaagccctgctgagaactgggaggcacagaagagcccacaccagacccgcctcggcgagaggtgtggaagtggcgctgcctcggaaagggcgctgtgtttaaaccgtgtggccgcactggcagcccggacgccgcgctaggccccggatcgccgacaccactgggagggctccgggagaacgcggctcgggctcgagccacgcatctccgcacccggctcgggacagggccgtggcctccacctccggcagggcagggccgagggtggccaggtgcaccccagagccgaggggtgcgtgcccgccggcctgcgagaggaagctgcacccgcgcggggccagcagccgggcccgcgcagcgtcccccgccccgctggggcccatcccgggctccgcgcccccgccccggccgccgcccgcacaaccgcccccggccccgcgcggaggcctggacgggcgagacgggccgggtcgcgggctccgcgccgctcaccttcccggccacccggccgagccgcacgatacccaatttgaagtcggtcatggccgggcctgcgctctcggccggcagcgccgctccctcgggaggcgccgagcgggggccggggcgaggccgcggcgcgccgggacaggacgggaccggagccggggtcggggtagcagccaggcgggctccgggcgggacgaggctgggccgggctcgggcctccgccgccgcctcgcgcccgccggacctgccacgcgccgccgccgccgccgccaccgccaccgcgcgcaccacagcgagcggagcggaggggcggggcgcagccccggacacaccccccggcccgccgccgctcggccaatggctaggcgcgcacggcgccgaccggcgcgcgccgccccgcaacaaccaataggaggagggcgagtgcgccggcgctctggggagcggggcgagcgcgggggaggggcgaggccgggggcggtgcctgcgcgcgccgacgtcagtttcgcgggaagctttgtgcgggcagcggcgccgcgcctagaggggcagtgcggagtgtggctggggactcgcgccgggtccgtggagctctgcgagctggctgcttttcgcctcccttgcggtagcctccgtaagctgtttcccgccgccgtcctggccccgagcgcggaaggaggaggtggacggagctcgtgcggggccctctgggcgggcggggagcgggcgaggcgggctaggaagaggccgttgccgcgggacgcgggtgtttctggagagacagcggacgcccggcccacgcgacccggagggcgcggcctcccgcgcagccttctccgagccgccggctcttcagcctcgggggcggctgacctccagagcagcctggtccaaggcgtctggaaacggaactccagtgaggcccattaggctccgcgggaaagccgagacccgctcagggagggactgggtacgccgtggtgggcagcgtggctcccctgcagcctggagcgaacggggctaggtcctgcgtcctgctccgccggtgtccagtcgcccgtgaggaggcctcaccctgcctcaagggcgactcctgcacctgaggagctgcacaggctcctttctggcttgctgggttccgttttcttttcttgctttttttttttttttttttgagtcagagttttgctctgtcacccaggctagagtgcagtggcacgatctcggctcactgcagcctctgcctctcgggttcaagcgactctcctgcctcagcctcccgagtagctgggactacaggcacgcgccaccatgtccggctaatttttgtatttttagtagaagtgaggtttttccatattggccaggatggtctcgaactcccaacctgaggtgatcggcccacctcggcctcccaaagtgctgggattacaggcatgagccaccgtgccccagcctgcaaagggtgtacatgagtgagcccagacgttccatctctgggtcccctggtacttgccagtaccccagacaccctagaggactgaaggggctgatgagtcctggcctgcctgagacacacattggggttcaggctgggccttgctcaaaacatgcctgtccgaccgcgcgcggtggctcatgcctgtaatcctagcactttgggaggccgaggcgggcagatcacgaggtcaggagctggagaccatcctggctaacacggtgaaaccccacctctactaaaaatacaaaaaaaaaagccgggcgtggtggcgggtgcctgtagtcccagctacttgggaggctgaggcaagagaatggcttgaacccgggaggcagagcttgcagtgagccgagatcgtgccactgcactccaggttgggcgacagagcgagactccgtctcaaaaaaaaaaaaaaaagtacctgccctaccaatctcaacctcatggagttgcaagggtgtgatgagattatgagcaactgctttgtgaaaagaagtggagcttggtgggtgctccctagggtagttgaaaagcactggtgtcatagtccaggttcccccagaggttgacttgaaatggattcgagtccaaattttgtccgggcctggtggctcatacctgtaatcccagcactttgggaggccgaggcaagtggatcacctgaggtcaggagttcaagaccagcttggccaacagggtgaaatcccgtttctactaaaaatacaaaaattagcggatgtggtggcacacacttgtattcccagctacttgggagg

SEQ ID NO: 589050 - DNA, 4001 bp, Homo sapiens
cggatcacgaggtcgggagatcgagaccatcctagccaacatggtaaaaacacaaaaattagccaggtgtggtagcgcgtgcctgtagtcccagctactcgggaggctgaggcaggagaataccttgaacccgggaggcggagtttgcagtgagccgagatcgcgccgcgccaccccactgcactccagcctggcgacagagcaagactccctctcaaaacaaacaaacaaacaaacaaacaaaaaacaaaccccgtctctactaaaaatacaaaaaaaattagccgggcgtggtggcgggcgcctgtggtaccagctactcaggagcctgaggcagagaattgcttgaacccgggaggccgtggttgcagtgagctgagatcactccactgcactccagcctgggcgacagagtgagacttcatctcaaaaaaaaaaaaaaaaaaaaaaaaaatgtaggtttggatgccttccacccaacttcttcccccacctccaggaattcaaggagtcactcaacagccccctgaggcttgagaaaaatgttccttggccctatgggcaccattctgcttgttgcaacccatgctcccggaagggtccccaagtccgagggagccacacagctgcagaagccgacaatctggatacaagcacgcccccatgcaacccacaacccagggatgtctaactccaggcaagcccttctcaactcaccaacttgggtccccaggccccaaggctactgacccgagtcgcacggccctagccgtccccccccccactatcaagaccaagtctggatgtctacccacaaacaatcctcccccacaaacccgggtcctagtggccaagctgcaccatcaccaccacagtgcaccagccatccacaagagccctaataactggactgaggttgggcacggtggctcacgcctgtaatcccagtactttgggaggccgaggcggggggattacttgaggtcaggagttcgagaccagccttgccaacatggtgaaaccccgtctctactaaaacacaaaatattagccgggcgtggtggcgtgcgcctgtagtcccagctactcgggagcctgaggcaggggaatcacgccactgcactccagcctgggcgacaagagcgaaactctgtctcaaaaaaacaaaacaaaacaaaaaccaaaaaattagccgggcgtggtggcgggtgcctgtaatcccagctgctcgggaggctgacgcgggagcatggcttgaacccggcggctggggtggggcgcggagattgcagtgaaccgagattgcgccactgcactccagcctgggcgacagagagagactctgtttcaaaaataaataaataaataaataaaatttaataaataaacaaataaacaacccgactgatgcccaagccgcgtgcctcccactaatggggaagtttgctccaaccgaggatatcatgtcctccaaaggcacatttgctggcccagagacctccgaggcgcgatggtggggaggggatggcgggatactagtggcaggatgctgtctgggtaccccaggcagagcccactcagcggcccccgaagtaccggggacgcacctgcgaagtagctcgggaagtcggtcccaggcctgcactggcccctccaggtcaacatactgggcccaaagtcccgccagaagcacgcgacaacgccaacgccccctccccaccagaggacctccgccaagacctctctccggggtggaccacgcacgcccagaccccacagccgaaactcaaaacaccaaggaacatgtggccacgacatggactgcccatgccagctttcccgaccttccttccagtggaaggcccgcgaaagcggggaccacctccgggctagctcaccagaactgtgaaaggacactcaccacgcaccaggcgacgatgccggaacgcggaagtacgcgagccggactgcccctgggcacggaactacactacccagactgccacggggcgcgcaactaccctaccgtggatgccctggagcgagggactacaacatccagaatgctgcgaggggcgggaccgcagcatccaggagaaattgtgaaaaatcagaaagtaaaatctaactttcgggtctatgagaagggtggtcaggtgagcagtaagtcttctttaactttttatacggtccttctaattttttttttttttaaaaagatgttacatgtcctccatcctgcaaattcacacctgtgattgtacacccctgaactttatctacttacttattttttgagaaggggtcttgctctgtcggccaggctgcagtacaatggtgtgatcatagctcactgcagcctcaaacccctggccaagcaatcctctcacctcaactttctgagtagctgggaatacaggtgcatagcaccacaccgggctaattttttgttttgttttttagaatctgggtctcgcggccgggcgcggtggctcacgcctgtaatcccagcactttgggaggctgaggcgggcggatcagaggtcaggagttcgagagcagcctggccaatgtggtaaaatcccgtctctactaaaaatacaaaaattacctgggcgtcgtgatgggcgcctgtagtcccggctactcaggagggtgaggcaggagaatcactttgaactcgggaggtggaggttgcagtgagccaagatcgcaccactgtactccagcctggacaacagagtgagattccttctcaagggggaaaaaaaaaaaaaagaatctgggtctcgctatgttgaccaggctggtctggaactcctggcctcaagcaattttcccacttcaggctcccaaagtgctgggattacaggcgtgagccgtccttgtggcccaggctgcctttcgagtttatttagggccctctagccagaggtggtgagattggcagtaactcaaattccaactgctgggataggtgattctcctcgggctaaggctggtgtaaatactccctccatgcgtgagaatcagctgtgtttgatccagttttgctttctggtataacagggcagcactgagttcaatgcaatgtctcatcattgctgtgcttgccgtctcccaagaacatagattctctctccgcaccacagagccactgctgggggatgggtcaggggcattggtgattcaagactgtctttcctaccttttcagtgcctctttcagtcatatgaagtaaaaaccaggtactgcgagtgcttacctgatttttggttcttgtgaaggtgcttttgtgtgtaaatagttgttaacttgtttttcttacaagggggaatgatcagtggagccttccattccaccatcttgctccacctcccacccccatgttttaaatgacagtgtgtatgaatgtacttctaaaaatgccaaaaatactggggttttttttcctgttataaagaagaagattctgaagttttttttttaattccaattgattacaagaagataaggaaaaactaaacttgaggacatttaacactatagcaattaaagttatcttactaatgcaaagattgtttattagatgtaacagaataatacgctcaaaaacataccaaagtctttgcaaaatgagttatactctttttctaagaatttgataaaaagtggtatttttaagttacttcctatttgcttcttctcaaaatgaagtaacaggaaccagatttagcccttcaccttaatcaacatttaaaaggacaaaatatatgaaacatttgaagacatttgacatcagacaatgaagagcagtggaaatcatggaggtgagcctttgaacttcccgcagatggagagaatttccaagtcatagcacagagaagggaaactcaagtgaagcatggagttcaacttgaggagatggaactgggaatctgaggaggcatatgcatctagagttcacagggcagagtacagaaagggagagagagcgccag

SEQ ID NO: 589051 - DNA, 4001 bp, Homo sapiens
ggttaccctcgtctagtcacagtcaataaacttccatttccgaataactggtcagagaatagggtattgggatttacgatttgcctgttatgacaaaactggtatgatcaatgatgtaaggtgctgagtaaaagtggaaagcagggtccctgaagatccactgaggctgaagtattaactgggtcatccatggcacgagttaaaatagactatgaaacatgtgacaaagttatgtgtgaaggaccaaactaaaagttgacagatagtgaaaaggaattgagtggaaaaagcaagactgctgagacctcaaagaaggagagattttgtttgaaggtggaaaactaatgctttggggacagcatttaaaagctgagtgaacaataacttcccccttccaacattgagacaaaggatggggaaggaggaggatgtgggagaataagcagcccccacttgaaaaactgccagagaaacgttgtccttgggatagtgccaggtttcagttaaggccaggagggaaggaacattatgtgaagacgaacaggggttccagaacgcagagtgaaaaggggtgggaggaaagctgtgggaggatgagccaggacggaaagtacagaacaatatgggaatgagattatgaagacaggatgcccgaaaggcttgcagtttggtcacctcaaggaagctagggatgagagttatggaaacaattaatggctaaaaggtttgaatcagaactttggaacaaagcagttttggtactggtttccgtccaaatgttctgttagtctgatttctctctaccttcttagatattttaattagagaaacagcagattcttacccagtgagaccaggtttccataattctccatcatgacatctttatacaggcttctctgagctgggtccagataatcccactcctcctgggtaaaaaacacagccacatcctcaaatgtcagcaacccctgaaatagtatgatttctgtagtcagttcctgttgtctcaaggacaattctaccactaaaagtgacagaggcaatcacttattgtggccaagtaggctaggaggaacatgataactgaaagttccatatgttgcccaattctgggaacgaactgtaactgacagacatctcagactagaaaggacctacggataaggcttttctgatttattatgccctgagagtttaattttagtaaactgccccaaggcctctccaagcttccctcacctcattgcctacttcaattttccatttgcactggcttgtgactctattcaattcaattccttgaggttctctaagcgtgtaccttggggtccaggcactgtgccaggaacagaagacacaagggaaggtcaaaaatggtgcttcacctggagaactcacaaatgagagagctagtctggagcattacttattttctcaggccgatttatcaagtctctctagaaaaagaaaaaaaaaaagggagccagtgggcagtttgttcgcgaaccgcaccccaatgcactagtggggagttccttgcaaggcgctggccctaaagaggcggtcaggaggttggtggggggcctgggggagaaagcagtggtgcggcctagctggggtagcggcgagacaaccgggatccccgggggggtgcttacttaccttcgactccggcggggggctcggggaagccatctcccaggcagagaataggggcaggaattgggggcggcctcacggaaaggagcctctggtgaggcctacccggctgctggaaattaggctcgacgaatacgaggatccctggctgggtctggccagtgcctgcctcggcccccagacggtcacgaccccaacagcatatcagacgcgatccctggctgtcccccaaccccgaaccccaacccctactcctgcctggttacgcagcctttcaggcctcgctagagcctcctccccgctgccagttcctcctccttgcagccaagtaacgctatgaccgcccgcccccggaccagaaggcgtcacccagattcttcccgaggccccctcaactacaactcccgtcatgctcggaaagagcgccgcggtccagacgccgccagcaacagctactggactacatttcccagcgtgcaaagggcgagggagcctacaggaaaaagaaagctcttgccactgggattgtatccgattggctggtctgggcgcgtcactgctggctgaaggctgcgctcaggcccgtggatctcatcgaagatggcggcgcgatctgtgtcgggcattaccagaagagtcttcatgtggacagtctcagggacaccatgtagagaattttggtctcgattcaggtaaagctttatggtggacggtgggtcatgttcaaggaaagttaaggaggattagggacgaattcaaaatagagtgttacgccatcgtggtcccgcgcctgatcagagcaaggacaaggaggtccggttagggtcccgagttgagaagcactcattgagtggtgggacccagtctcttccactctcggccttagttttctcattttataacggaaataccaccccctttccttttcacttcactcattcatttatttattaagcaagcaggattaacctcgtgtgcgagacaccgagtgtgttgtctgcaaacacatgaaagcgcttggtaaactaaactcatttgccggctgtgtttcttcacaagcaaggttcagtaatgaagtactgcctcctccttttgtttgttcattcattcagtcattcaacagatttcttagggccagcattactctaagcgcctaggatacagcaggaaaaacaaaatccattctcatcctcgaggtactccaacatatgaggaaacaggcccacaggagggaagtgattttcccaaagtcacaaagcaagttaattgcaaagctggatctagaacatatgtctcctaactccccatctactgctttttctgctgcacggctgcaccatgtgtaattgtttgaaggtaaatctaatttgacttagatagtgtttaggaaatcaaaacgtatggtaggaaccctagggagcaatgtatgctctcttaggtttaaaacaaaaaccactacaattaggaaagatctttttcatcagttcagatattagctttccctcttctttggtcaatatttgttattatctctcaaatctcttccaagtttgttttattcattcactcaacaaatattttttaggctgtttactatatgccaggctatatcttaggtgttgtaagaatacagtggttactaaaacagaccaaatttttgttctcgtagggcatatgttctaatggaggaagaaatgaacaaatgtgtaatgtaatttcagaaagtggtaaattatgaagaaaactagaggaaatagattactgagaatgatgattatattttctttactattttaaaaattttatatatttaagatatacaacttgatgttgattattagtcaagataattatcatattcatctcttcacatactttctgttttgttttgttttagagaaaggagttctcactatgttgcacaggctggtcttgaactcctggactcaagtaattttcccaccttggcctcccaaattgctgggattccaggggtgagccaccacacctggccagttagaatttttgtgtgtgtggtgaaaacacttaagatttactctcagaagatttcaagtatacagtacagtattattaatgatcgtcaccatggtgtacattagatctctggaacttattcattctacataatttaaattttacctttgtccaacgtctcttcatttccgccacccctggtagccaccatcctactctctgtttctatgaatttgactttttttttgtttgtgttggagatggagtctcactctgtctccaggctggagtgcagtggcgctatcttggctcactgcaacctccgcctcccaggttcaagcgat

SEQ ID NO: 589052 - DNA, 4001 bp, Homo sapiens
ggttctgttctttcaaatgtttactgaggtgcagtttcaagagctgaagtgtataaaaacctatagttttataaccttataattatttaataataatgccacataaaatatatcaatttcctcaaaacccaaacaatgtagtttcaacatccttgtgactgcatgtaaaatgatcaaactcgtttcaacttatacattatgtgctgatacagatgcagttatccactatgtgatttacttgttatctcttgcaaattgcttatcttatacagccacttaacaaatggaacctggatattacccttctgttagcaccattcattcattacacaaatattttttgagcacctttattgagcatttacagaatgtaaggtagtaaagtcatatagtcttctagatagaaatactcctggctcacctggagcttacagtctacagagttcagtataagtcagcagaaagtcaccccaaacacatgcaggactaaaagccacaaaacctcgacctagtccccgctcttccactactgagctgtgccatcgtgggaaggtcgcctcactaatcactgtaagccccagctgcctgatctgtaaaataggtttgaaccagtggtaacgaccttcccagctttaagcagtcggagactgcaagcaattttagcgtcccattccactatgtgctctcaacacctagcaagtagtatgctggataaatgaaaggcagcgaaggcacaacttcagccgcagaacaggcccagaagtcctttcttgctcttcggctgtctctgcagggcatcttttaacagggcgagggcgatctgcagtaatggagcaaacactgtgcgctccctgccctctcgcagtcggtggaacaactcaaggccctcatccctctcgtttcctctcggaactgaggactcggcagcccgccgggaggatgtcagtggccgttgacccggcctccccagcgaccccgggccgcgctcccgcccactgcacctgccgcaaggacggtctcccgcgccgctcccgcctgtcacgtgacaggccccccccgactggggccggtttttggcgcgcggcagtgacgtcagcatcctgtcagccgcagcccccgccgtagccggatcgacctcgcgttttcaactccgccccgcccgccgcaccgttaacgggccccggctgccccacgtcccgcccgcccgcccgcccgcgccgctcaccttgaggtggccgctgtctgggctgctcgcttcctcctcgtcctcacctcccgaggcggcggcggaggccgaggcggcgggcgggggcgcgccccggccacgaagccccgagtgctcggcggctgcggctgcaggcagggcggccgaggcggcggcccccgcggccccagggctgagcgtcacgttgtgtgcgttctcgccccagcgccacgggtacaccatgaagtcgctgaagccggggctggtggggatgagcggcggcggcggctccggctcccctccaccgccgcacgttggcttgatcggggtcgtcctgatgaccgacaccagcacccgcttcggggagtcgtggcagaagatgacgggcggcggcggcggcggcgggttctccgccatgggcgcctcgaagccccggatcatcgcccggcccgacccccagctccggcggccccgggccgcactcctgagcaccgctctgcccctcactcgctctgctccgagtcgcaggctcagtcctgccggctcatggcagactgacgtttcccggaatcctgcgcagcagccacctaactagttgagcagacggcaccggcgggcagggctggaccccagccccaggtcaagcgcgccctccgctctttgtactccgcagcgcaggctgcaggggtgggaagcagcgggcggcccggcccttgcggtgacaggaaagcaggacgcgcggcgctgagcccccaaaaataacaacctgccgccgcggtgcctgccccggcttttcccgcgttacatttcgcgcctgggcggaaccagtcaccgcgaggccgctgcccgctggccgcaccggcgagtgacaggcggcgcgagccaatggccaggcctggccttctttccagccggccggggcggggccgggtctgcgcgcgggtccttcccacctcgccattggccgccgctcttatatttttttctgtctggagggccaacagcgttcgaaactccagtggagcgcgcggcgtctccactcgcccggacacacccgcctgccgccccgccccgccgtccctccgcgtggttagtccgggccagggagacaagggcggcggggagggcggcaagagggcggctgattggacagcggcggggcggggtcggggggggtggtgatcgttgggcggtggaggcgcgcgccccgctcggccccgcccgccgttggttgttgggccgcggttcccgcgcgcagggagtttaaagggctggggccccgccgcccgccccgccctcggtcccaccacccgcccggcggctggagtctctgctgcccgaggtcctgatgggcacccggcgtgcctggtttcttaatcgagttccgtctgctcagctgttgcacgctctgtgaaccagccctgtcagcaccgccctgactcctccgggccgattgtgggcctccggttccccatctgtggaaaggggagagtccaggaagtggcctccgaagtccctgcgggccgctcgcggcgcggaggccacaagagccgggcgagagtagacactctcaccctggactgatgccccgaagttgcctcggggatctccccaccccggcgaccccgctctaccgagcggctgctccgggagtcggggcagcgccctactttgctcggcccccacctgccccggccgcgtcctagtactcgcgccgggacgcgcggagccccaacgtcctctgcccgccccgccccagccccgcctggctggcgccgaccgcggcccgggtggggctcgcaggctgcagaggaaggaccgggcggaggggttgcccggcttcctacccgctagatgtggcctggggagctgcgttttgttcttgggaatacagattcccaggcaccgcctgattcgcggtaggggctcaataaatatttgctgaatggatgaatgaatatccattggttaagggttaggattggtaattaagttagaacacgactgtataataacagataactaagctgaatagcttttctctctgtgaaagacacacaaatgcacagctatgactaaattaagccacaattgtttaaaaacaaataaaggaaactgtactgatatgaacaatttcaaaaatgtatttttattttaaaaggcaaaacaagcaatagtgtgattttatgtaaaattgttaaagtggggaaaatacgtttttacttttagacgtacataaaatatctggcaagatgcaaaagaaacatggatcatggagggaaattgtgtggctgggaacagaagtgaaaagatttcaagaaatacaatatataactatcttttgaactttgaaccaagtgaaagtatccttttaagaaatgaaacagtatatagcctccattttctggaggcctactacaaaaatagcatatatgtactgatacacaataatacatatggatgtttcacagttcactcaacaattgggtaaggaagatatttttcccattttataaatgagaaaagttgaggcttgtacaagattacataataaatcctttggaagaataagtctgtactgcctgtggattatattcagtgtctgctgagcaaaaggaggaaaaggctgaaaaatgggactcacacatttctcggtcccgtttctcatattccaaaactttcagggtttaggggcaaatttcatattgtaatggttgatctagaaagttgaaagttcagccctactttcacctaatttagtaaacatacattttgtttttacagtttaataccaaaa

SEQ ID NO: 589053 - DNA, 4001 bp, Homo sapiens
atgaatagacagtgaggaaccaccacaaggtttccctctggaaagagagaaggagtaggcaagcaagcctcctcctcctccagccatcaccaacagagcttcaaaatggagacatccataattttataaacacttctcatctcagctttgtctcctggaaacccgctctcctccattttctggtggagttacaacatgacacggcttacctgactcagttcccagctcttaaccaaactagtcacttcctccaaaaacctgcaagcaacctccagaaacaaaaccaaagcaaaccaaacagccaacacagacactcagacacagcccccgggagccctgggagaaagccccaactggttggtctttccccatcccagacgcgtgcttaaaaatgaaacttttttttttcttggttggggaggaatataaaaggaactccaggcagcctccctccctccctctctgtaggttagaagccacaatgaaaagaaaacgagggttccttcaggaatggtgaacagcctggagaatgaacgtgagaaggagctttgtgttttggagtctggactggaaccaaagcagacagcttgcaaatggaggacagggagataaagaaagggaaagaggggctgctccaatggggggcggctgcggcttcccctcgtgcctggaaggagggcagacccctgggaactgcaccaggagtgagacgcccccccaggcccctgccttcctttctcccttcctcagaggagagccaagcgtgtgtaatggcttctcctctccagaaaccgttgtcctcctccaccagacgcttctgaacctccagcctggagacagctcctcagccgctcctgaacctgcgccccccacccggccggtgccccccgctcctcgcctctctgttcaccagcagcaccggcaccagcagctgcagcagccaccccccgacacatcccgaccccgcatcccaacttcggggagagggagagagagagagagagagagagagagagagagagagagagagagagagagagagagagagagagagagagccaaatacctgaggaagaggggggctgccaatccgcacggctttgccatcgggcgggggacaggcagacagaagggggaaaggaaggagagggacagagaaagaaagaggtcaacccgctcaggtcggggccgctcgcacggagctctccctcctctgaccctcgctcgctccctctggctctcggctcaggtctccggcctcccgccctccgcccccctctgtccctactcctgtccccacactcggagcatccgtcctaagcctccagctctcttctcactcatctttcattttctcttctcttcatagaactacacgaaattaattaagccaccgcgctcactccccccagcaggagcagcagccagcaggaaaagcacagccacctccactgccaccactaccaccttctcctcctcttcctcctcctcctcttcctccctcgcttctcctcctcctcttcctcctccccctcctgctctccctcctccccctcctcctcttctctctcgcttcttctcctcttccaacagccagtccatgcaggggacttcctctcctccccgctcctccaaccctccttggccgaatgaatgagcgcgtttgtgcctccaccaccccgcgctctcttccccggagcactcggaccaccccgaggtggttgttaattgcagtaacttacagaagaagcgtcccggcgccgggaggtgcttcgggttctccagccccaccgcctccttatcctctttctctttctcctcttcctgctcgggttattgttgtggaagttgtttgggagtctcatgtgcttctgccgggtctcagcaatggaggatcgccatcttccctgccttcctcggctcctcagactcgctgcagctgcagatgacctgagatatccgtctctctccctctctctctctctccctccctccctctccctctcactctctctctcccctctctctcctcttctctctcctctcctccctctccctcgcgcgctctctctctctccctccctctgtgtctctctctgaataatgagcaaccagggggagagagaaagcaagacagaaagagagaaggaagacaatcttctcctgccacacaaaacgccggagcaccagggggtgcgcgaagcctttctaataacaacaacaacgtgcagcagagaggaaggaaaaaaagaaagaaagaaagaaatgaggaaaaaggctaggggaaaaaagaggaagaattatccaagagctcgagaagagcagaaggagaagctggaggagatgctgaggctgctgctgctgttccccctcccccctgctgaaccccagaaggaggcaaggtggttgcaaagttaaggctgggacattgtctttgtcactcagagccaggccagtgagatgcaagaggaggaggtggcggcggcagaggaggaggaggtggtggtggaggagggggaggaagaggaggagaaggaggcaaaggagaaggaggcaaaggagaaggagaaggggaagagggagatgagatgatgaataaagacctgcggagaaggcggtgcgaggagcgcggccgccgggccgaggcgtgcgcgctcgcgtcccggtggcgcccggcagccctggcccgcagaggaagcccccggtgaggaccctgcccggcagctcatagcgctcccaacgtcagccctgcccgaggcgccgagcccgagccccagagggtcccttacttgcatccatctagaggccaacctttgcaaagaacatacgtggggaactggaggttgcaagtataaacccagatcaaccacgtggggctttttaatccctttccagcttgcggtgtgagtatttccagtgaaaagctcaaattgtccattactggcacgtattttgaagtcttctctcctgaaataaaggctcattgtgcgttttatttctttcctgatatggaaggtgggggggtggaggaggaaaagagcccatcattccgagcttcggaaccaccactttcttttcctaacttgtgaaatgttttgactgcgcaccaaaagaaaaaaagaacgcctgcttaaataactttacaccctccagccccgcgttgtttgcactttctggctgatcatctaaaggctcggaaagtaacaatcagcgctcttaatgataaggtgtcatggtgttgaagacacgcgagccaagatgaagctttcacaccttgaatttttatttagtgtaatctctcccgtatcattctgaactatctcttttgcaaaggagtggttccccccctccaccaccaggtcgaaagtctcctacggttttaattggactgggagcggtgggggttggggatgggggttctacagtatcaaaaaaatcaatgcagcaagtcaggagcaattgaagttcaagggcatgggctgattgtaccatttctatttcttggatcttggagttggacatcaacagcctcaggagagagaaacgcgcagcgcgcggggcagaaagagaccttaattaaagtttcttttgtccgcgtctgaattggggatgttgctggattcctttgcattgaggagcgcgcatccggtgaaggcgcggtgttaaggatcctgggcaagtctgtcctctttaaatactcgccctttctcctccctccccccaagcaacagtccgagaagatatatacctataaatccatacaataaaggaagaggaggagacgcgcgcggagttggttcccatccgatagcggggcttcataaacagatctaaatcctcattttccaagattttcccgaccctatattcctgagcagaatctctcaccccgaggcacgatttcacccacttccagtcaacacttcctgcccttttctcctcccactcacattgaaaagctcgggatccctaaaagggtgttgatggcgggggtgataaat

SEQ ID NO: 589054 - DNA, 4001 bp, Homo sapiens
aaaggcctagaaaagccctgctcaattaaaaggataactttctttctttttttttttgagacggagtttcgctcttggtgcccaggctggagtgaagtggtgcgatctcggctcactgcaacctctgccccggctgggttcaagtgattctcctacctcagcctcttgagtagctgggattataggcgcccaccaccatgcctggctaatttttgtatttttagtagagacggggtttcgccatgttggccaggctagtcttgaactcctgacttcaggcgatccacccacctcagcctcccaaagtgtcaggattacaggcgtgagccactgtgcccagccataattttctttatagtcaaaaaccagggagctacttaagggttaaggaaacagttgctttagattgaatactcctcctaaacaaaatgttatcagaaaaggttcacaaggggacccagtcacaaagctatttaacaactcctaccctttcttaatgaaagggcacacatttctcactagttgctcaactcagaagcccaatttaatatttgactttcaaatttctcttcctccttacttctcccatcaatcgccaagttctggcgattttatttcctaagaacctctccattctatccttctgaaactgcctaagtacagggttcttcactccagtctcacactgtggccaaaaaattccttctaacatgcaaaatatgatcttatcactccccggcttacagtccctcaccagccaccgaactgtctctcgataaagttcacatgcagggaccatggcattgtgatctagagacactgtctgatgacctcacctcttgagctctagctacccgattgacactacagccataaattagtatctcctctctctctacatactctcctagcctttgcaccaaggctattccctctcctcggaatgttgctttctttctcctaccaaacttttattcgtctttaaagcctgactcctttcaactgtcacttctggtgtgatgctctgcttgatcccaaagcactcctttgcacacagactgccctgtgttgcattcattcattcattctataagtgacggagcaactacaatgagctggaacgagaccaggggccatgagctgcggggccaggcgtggacaggcctgaaagggtcctcacgctcacagagggtccaggaaatgacaatacagccggagcgggactacaatgcgacaagtgaaggatgtgacagcctcgcattgcaactaccataccaataacaacccacttccgagtacagcgcccggcacacagcagcatgacgtcatttattcctctgccaaatattaggcgcccaccacgtacctggcgccgtgctgagcacctggggctccgcgatgactaagacactcggctccgtctacagggagtttacataggaggcccggtgaaaatgtgacgcagccagaggatctcaaccagagggaagaaaaaaggagagatttcaccccccagcggtcctctggcaatgtctggacacatttttggttagctcgactaggacgagaggtggtactgttatctaacgggcagaaccagtgacgctgttaaacatcctgccacaacgggagagcctccccctcaccgccacaccacaaacaaaacaaggcattatcccgcccaaaatgtcaacagtgcccaagtggcgcagggagggatggagggaagccaacagccccatcccgcagcggagtgcgcacctcccacagaagcagcagcagcgcagcgcacagcccgttggtaggctgctcccggcccccatcccgccccaagtgcgccctcggagccggcgacccggccacggccccgaaactcggggcccgggacgaccagtacctgcatcagcatccgcaaacagcaccaacgccaccgcaaagagcttccagaagcttgtcccgcagcgagtgcgcgcgcaagcctgcgggaaccactgcgcctgcgcagaggcgctgaaccggactccccgaacgcgctcgtgcagctttccgaaagtccgcgctttccataggctcccacctgcctgttgcgcatggtcactgggaagcggctagtgggctcggctgcagaattattgctgcgccagaggctcagaggcctagaatcgtatgaggtttgcagatccaggaggctccatctgtttagtaacctcagaccttccctacccgctcccatcacttccattccctgaaatctaaggtggaaaaatccaccgcagaagcatattaccgatgcatttaatgcaagccataattaatgccacaacttgagttaaacacatattaatcttatgacttccacacctgcccccatggtccagtccaccctcatggctcacctggattattgcaatagcttcttgattataccttacttctcttggctattctccacagccagacggacgttttaaaaacgtcaaattatgaccctcctttgcttaaaaccctgcaatggtttcccatttcactcagagttaaaacccaagtctttatagtggcctacaaggcctgatggaatctagcccctgtaacctcccgcacctcttccccactttcctgctccaatcttgatagaccccttcctcttcttgtaacctgccaggtacttccggctgacctgctccttccctaagtggccatacggcccgctctctcatcccttcaggtcttctcaatgaagctctcccaccattccacttaaataggaatcccaccttactcttgtttcctcttctaacatgccctataggtttgttaatttttttttttactacttgtccgccttctccagtagaatactaatttcagaagagtaagtatttttatttcatttgttctaggttgtgtgtttaggtcctggaacaggacttggcccatggcaggcactcaatagatatttgttgagcttatgaatgagtatttgcatggattattgggggcattgcaaaaagggccaaagaactccagaaaaattgtttggagggttctaataactggatgatccctgaaggggtggagttaggagagaaagactagattcattctagactgaaggagcaaggtgattcaaggccctgagacttcaaaagggcagagcaagctcaactaaatgaaccactcctctcaaaaggagtgggcttatcacaggcagcaagtcaagctgaagagacagggctgagaatggccgggcgcggtggctcatgcttgtaatcccagcactttgggaggctgaggcgggtggatcacctgaggtcgggagtttgagaccagcctgacccacgcggagaaaccctgtctctactaaaaatacaaaaaattagccaggtgtggtggcacatgcctataatcccagctactcgggaggctgaggcaggagaatcacttgaatccgggaggtggaggttgtgaagagctgagatcaggccattgcgctttagcctgagtaacgagtgaaactccgtctcaaaaaaaaaaaaagagaaaaaaaagaaacagggctgagaatgaagacaaaagttttctcagtcccgagtcccatggcatattctcctttacccacctccccttggctggctttagacgcatcaggaagaagctggagaaggcaaaggaataggaaatgtctattggctcattattttaaccaggcaagtcagaggcactttacttagtaaagcttactcaagctttactgtactttagaatcacatggtgttctttatttgaatacagattttggaaccttctggccctccccacccatcaacttgttgcaggtgatcttgtattttgagaaacacagtactagttgaaatattctgtaagtaaatgacatgctacctatgaataaattaccaggaaagaatggcatctttttggaactggtagtcaaactataacttttgattaaaagtaaccatcatggtaaggagtgatggact

SEQ ID NO: 589055 - DNA, 4001 bp, Homo sapiens
gaaacactggaagaagtccaaataaatgtaaaatgaaccacacaataaatcttgaataggaaaatattgtttagcaataattcttgcaaaagatatataattataaaaaaggacaatgtgacaatgtgataaagaggccactaaagagaaaattaataataccctatgataaaacattcctaataatctcaggaaaaaaacagaaaaaatggggtgcagaatggaaacaatgagcagaaatttcatcaatccaatgaaaatattatgtaaagaaaaggcagaaaataaaaagagctaaatagtaaacatcaaatggaaggcataaaatcagataaatcattatcacactaaactgagatgtaaaattctatcaacagagactataaattggatttgaaaaaagcaaaagtatctattgtaaacaaataggtaatctgacacagagacaaataggatacaaaataaagctctgggcaaagacatcatccaaatgcaatgaaagtaaaaacaagggtggcaatgtgagtatcaacgtggaattcgatgttaaaaagtgtttttcttggaattcgatgttaaaaagtgtttttcttttttctttttggttgaaaaaagggatcctataataataccacttaatacatgaaaaaggataaaaaatgcactaaccattaagtgtatgtatgcccatccctcagatgcacaaataaaattagcaaaaaagcacatataactgcaaaatgaactattaaaagtgatttttattgtatctcctccagaatatgaaacaagtagatcaaaattaggaaagataaagatttgaaaaataccaacaagcaagacttaattaaagagaattttggtccatacaacaaaatataatttttcttttatatctgttgaacaaagttcattgagtaacttggcttcaaggaaaatcttgataaattgttaaaagttgagacttgatagtctgcattttctgacaatacaataaaataaaaaacagctaaaacatactttaataatttgggaatgaataaactctcctaaataactaagattcaaagggaaacatcaaaatgaacttatgcatttcataaagatgtacttaaagaaactttacaaccctaaatgtatcccgcataaaacttaagaaaataagggaaagaacaacaaattacatcaaaaagtgggaaaaagagaaagtacctaaaaagaaaaagagaaaaaaattaatattaaaagagtagggagtattttattggacatttcaaaatgtccaatgaaacagataaacctttcagacgcttgattctttttaaatagagaaagaatgaatgatatataaatataataaccgtaatgataaaggagctactagtctggatatgaaagagaacaaaatggaaatggaaacatgcaattctatgtaatatattctttaaatctttagcaaaatatatcattataatgaaacagaaacgaaaatataaacagatcggtacgtataaaagagaggaaactaattaagatgtgcatcattcacactcctcagatccctccttagttcccatagtcatcctcccccacaaccccacagtccgccctcactccgccctcagatccaccaccagacagagacccccagtccgtcctcactccgcctgcagatccaccaccagagacccctcagtgccccctcactcctccctcagatccaccatcagagatcgctccgacttccactattccatccactgaccgaccccatcactgaccggaaggctcaggacagacatcagagattcttcttgctcagtccacagatgctgccatccctctactcacctgcccctcacccacgtcctctcaggacagtggtcatttgcctcgggaggtgactatagtcgcaagaaccagaacaggacccacttcctttttctcaatgcctcccaggcctagaggtacttcttacagcgctgcctgggtttgcgcatgctcagcagtcttcatggcctgaaggttgccagtaatcaacatggcgctttgccaaacacgctcccgtttcagcggcttaggctgggcgccagtatggcggcgcccatgtagacactctggcctgtgggcggccatgttgaggtcatgtagagactgagaggctgagggttgtccaaaggaaaggaagcaagcagaggtgtgtcccatcatactaagccaggacacaatcaaagcctatcacctcaggttacagtctttctccaatgcttctgtggacacaacaacactgttaatcaacaggaactaatcagcatttatgtaacaccgcaaacgcagccgaatacacattttattcgtgtcgatgggacatttagcaagatatgaagtaacctgggtcataaaacaaatctcagcaaatttgaaacaactgaaatcatacagtttgttctctgaacacaatagaattaaactagaaatcaataacaggaagataaaaggaaaatctccaaacacgtgaaaacacatgctaaataatccattgttcagagagaaagtctcaaatttttaaaatacattgaaatgaatgaaagtgaaagtgaatgaatttttaaaatacattgaaatgaatgacagtgaaacacaacatatcaaaatttgtgggatgtggctaaatcagtggtgagagaaaaatgtatataccactaagggcttacattagaaaagaaaaaaatttcaaagcaataaccaagctccctcacatactagaaaaagaagagcaaaataaaccgaaggcaagtgaaagaaaggaaataataaggataagaagatgactcaataaaatgtaaaaagaaaaatagagaaaaaccgattaaacaaaagctggttctgtaaatgttaataaaattgacaaatctgtagaggagacacaaaatatcaatatccagaatgaaacaggagataccactgtagaccatgacgaaatcaaaagaataaagagaatactacaaacaactctacaaacataaatttcacaacatagatgaaatgcactaattcttgaaaaagcacaaattctctcttacatgaaatagttatgttgaatagccctagaactgaagtcataatttgaaatatctgaaaaagaaatcttaaggcctggatagctagatcagagaattctaacaaacatttaaaggttaacacgaattatatccagtctcttccagaataaaaaaagaatagaaagaagacaatagaaagatattccaactcatgaggccagtgttactctgatatcagagctaaagacagaagaagaagaaatcagtattcttcatgaatatagatggaaaaattctcaaccaaataatagcaaaaataattcaacaatatataaaaataactacaaaccatgaacaagtgatatttattccaggaataaaaagctgttttggtattcaaaaatcaatttgtgtaaccccccacattagcaagctaaagataagcatattacatgattatatcaatgcaggaaaagaatttgagaaaattcaacacccatttataatgaaaaaaaaactttcaggaattaggaacagaggtaaactttctaacttttaagttagaaaaaaatctacagctaatgtcaaactaaaagatgaaaaagactgaatgctttcctgttcagtttgggaagaaggaaaatatgtctgtgctcatcatttttattctacacagttctggaagacccagtcagctgacaaaaattctctccataaccagactctagccatgctcctttgaactctcttgtcaactaaaccctggcttttgggcttttgtgttgtctgtgaattgcccaatattagtaagaatcctagcaaggcaatttagtcagaatcctccatcttcgtatctgatcaccattgatatctaattggttttcttattgtctactatccccaggtgatatctgatcactctggcatggcttcagcaag

SEQ ID NO: 589056 - DNA, 4001 bp, Homo sapiens
atggcttctggatgtggcgacatcaccaagtctggtgctctctgggcaaggggatgaagaagtgccgctggttgggcaaatcaagacctgctcctttctgggttcttctgcatctgtttggaagccctggtgaggaggtctctgttctgtcagagagcagttcttcggtgggactcctgttcctggggctccctccttcctgcaacataaagagctgctttgctccagagaagctggggctgatgcctgggtaacaaatttattttagttgaaactttcatggaaaacagtgttcttcacgtcagcacaacttccattttgggctggataatcctctgacataaggagtggtcctgtgcattgcaggatgtttaagagcatttctaaacatgcactagacactaggacaccccttctccctgttgtgacaatcagaaacgtctccaggccgggcgtggtggctcacgcctgtaatcccaggactgtgggaggccaaggcaggtggatcacctgaggtcaggagttcaagataagcctggccaatatggtgaaaccccacctctactaaaaatacaaaaaattagctgggcatggccatgcatgcttgtaattccagctgagattacaagctgggaggctggggcaggagaatcagttgaacctgggaggtggaggttgcagtgagccaagatcacaccactgccctccagcctgggcgacagagagaaactcagtcccctctccccccaccaaaaaagtctccaacatttccaaagttccctagggagcaaaatcctcctggtgaagaagtgacctaaggccttaaacctgattctcttggcattaattagaaccctgctatccatgactacagcctccaatcacatcaactactgagcactggaaatgtggctaggaccacatgttgaaataacattttggatacactgagaaaaccacagtatgttcttaaaattaatttcatgttttagattttcatgtagctactagtttaacatttaaaattacgtatgtgactcatcttcactgccctagaatatcagactgacttctaaagacagagacaggagggacagcacaggaggtggcaggggcctcagtctaacccagaggctctggagacatcccagaaaccccacaacaaatacacttgccacatagtaagattctgtccacactgacttcacaatcattgtcctggggttttggggacaatcactcagtgctgtgaaggctgcaatgctgggttaggtaggtaggccattacaaacagcctgattcggggagtaaagtgtttatgtattgacatcctagctctctcatcctttgtgagcttggctctatcttttcactcctccttcttcatttttaatgatataaatagggtggttgtgagaattaaacgaaatactacatgaaaagaacaaagtgtcttccaaatataacgggaatcaacatttacatgctgcttagtaactagcgcttagctaaatgctttacaggggatggcttacctctgaacgacacaaagcagtttttactaatatcctcattttcaaacgctcaagtgacagagccaaaattcacgaggtccttctagctcctaggctcggcctctcaccgcagacccacgggctgtacgcgctttgtggcaggttcatggtcaatacaataaacgcgcattcccctcctgaagccagcaccgcgttttccgacgcctggctgcattctggcgcccatacctcggcccgcaccgagcatcttccaactaggactcagccccacctaacgcccccggagcccgcccccaccggcccttctcaggctgaggtcccgggccggccgaggcacagggagcgacggcctgctttgggggagttcccgggacgtcgcgttcccgccccctggacactagcacatccctccctgcaggtccgcaatccgcgtggaggcccggcgctctcacctgagctgcgaaccctctgcaccagcaaacactaacagggagaagccggaaagtggggttgactgcacatgcgcagacgaaaacgcgcatatccgttcccagcatgctgcgcggtaacccataacatgcaagactacgtttcacatgcagtacggcgccagctgtcagtgtttttttgtttgtttttcccccaagatttatggcgtaataacatggaccgtcctgataactggagcccgggttctgtcagagccccagaggttgtgggttagacttgatgacataacagcaaatgcagcgtgtggttacagaaagcaagagccgcggaagacgtttgaaaacaattgggaaaatttgtatacggactggaaattagaattattaattaattgtggcagcattgggattatgtaggtaatcttgcttattcataaagagatgtctatgtaagtatttaggattgtattatgtttgtaagtttttgggttttttggtttttttttttttttttgagacggagtcttactctgtcgcccaggctggagtgcagtggcgcgatctcggctaactgcaacctccgcctcccgggttcaagcgattctcctgcctcagcctcccaagtagctgggactacaggcgcccgccactacgcccagctaatttttgtatttttagtagagacggggtttcaccatgttggccaggctggtctcgaactcctcacctcaagtgatccgcctgccttggcctcccaaagtgctgggtatacaggcgtgagctaccactcccggcccgtttgtaagttctttttaaaaaataattagaaatgggaagtatggcaaaatgttaagaatatctacttctagaatatggacatgcttattgactatgtgttggaaaattttataatataaagttgataaagggaaaattgggactgtaatgttacaagtgtgccttttaacttagagctgccacaaaaatacataaacagctttgtgaataaagccgtaaaatgtaacaaatactagaaaatggaaaccattattaacataaaagaataatatttgtgatcctcagtttatctctggggggaaaaaaagaaaaagcaagtaagctgttcagcattacataatacctgaagtacacacaatcccaactaagaaaaccgttatccacaaattatgcatctcctagagatgagcttgcttaaatcttatgtggtatgcttctgaaatcaggaaccaaattaggaacctctcagcacagtattttatgacactctttttagtaacacacatacactcacacacacacggttgatactttctaacaggttattttatatggcaatgataagttttgattagcaagaaaaaagattaatggcaacagtaaactagtgcagtatatatgaatcaaggtataaaattttactgttgacactgaaaaacactttaatagatactggaggaaaagactaacatttgtttttaaaaattctaatcatctatgttttctaagtatatattttctttttttgacatttatatattttgcctgttttcctaaaggaactattccaattttcattctaataaaaacttatggtaatgatcagaaaagaattgaaaatgcatagcaatatctctatatttactatgtatactatcactaaatatttaaaaatttatcctggtgcagtaaaagttcaactatatgaaaaagaaagaatgtagtatgtatcagctggcttttaaagcagtggaaagagaaccttcagtaaccttgttaggacaatgagataggtgctgggacaaaggacatatccatggcactaacattacaatcaataattttcacaaggattcattcaacaataagcaattaataatatcaaagttttaaatttttaaattatacatttcttaagtttttaagagaaacaggtgttttaaaaagataaaccctttaattcctttccaaggaaagtctcgcccttcacatctgtctg

SEQ ID NO: 589057 - DNA, 4001 bp, Homo sapiens
aagatggataagaatcagaattttcatctcctttttgcccatccctcttttatctttttcttgttaagtcagtaaaatttgtgcattttttttttttggtcacaaaccccccaaaatgatcaaggctaatggatttttccccctttgaaagtaatcaggtttttgaaaaataacaaatattgataaactaccaaccccacatcacaatcaaagaggcctgaaaccaatctaaattttttttaagtaataaatttttcaaattggaagggtgaacaagacagaaaagggaaaattttcttccttaccaaggattcctcaatccttgtcttcatcaattgattcagttgcatgtcataaaaaatgagcttctgtgaatccactgttagttttttcataataatgttaattatgcatatcttattttaatggcggtctctcctacaaatctgtgggctactcaatttgtataatgtatgaatttacattttttccacttaatattgctcaaaaaaggttcctgacattttctggataaaacaacaacaaaaaagaaatgcctagacctttcaggaaacaaaatcagaaaacagtcttaattattccatcaaaacaaaaaaaacacacacacacacaaaacccaacaaatacagaaaaaaagaaagaaaggatttcactgtaacttttctagtttctgttttctttagaatcttaggatttaaatgcagtaaaatgtaaatgcaaaattaaaaaaaaaaaactacaatttttgggtgtgtccaaagccaacattttaggttctattttctcttttaaatccttcgttcgtggaaatagaaaaactttaaatattgccatatagagaaattagtctttttttgcccgctgagctaaacaagttccaaattacaatgaagtacaatttctaattgcttcataaagccaattctctcagttttccctaaactcaacaatttccctcctttctttattccaattagtttttttctcaaactaaaatgagttgggtacccaaactgactttgcttttaggaggttttttgctttctcccctccaagaactaaattcattcaaattccagcttaattttcatttacatattatctggatttggcttcagaaataaaaattgtctccatgcttctggaaagatcaaagtgaaaattttcacccgaaaaaagaaaaaaaaagaatctcttacccctccactgcctggtagtgcaaacttttgaaaaaataagaaataaaaaatatttcttttcaattttaatttcttttttatttacaaaatagtatcctctaggtggcgtcgttttaatgggaaaaaactaccgtttgaagaaaaattagaaaaaaaaaattgagaaaggaaaatatggcctaaaaaaaaagattgttgcaaaaatgggggacctggggggaaagacctcccggggggtcatcggggaccccgagcgcagagagggtcaggggaaaattgcaaatttgggggggagggggcagagctggaaggggttgcatttttgcaaaatgtgaattgtccaaactgaaatggctgctctgttctctcgccgctttgttttctgggctccggtccgagcccggggccggagggggcgctgggtgggggccccaaaagaccccctcgtcacccccaccctcctcgcaccccgcagcgcccgggggggtgctctccggaccccgaccctcccgattgcgcccacaaaaagcccgcaaacgtgcccaggcactttgcattttgcaaatcttgcaatgaagtggcgcagcgccccgggccccggccccccggggtcccccgcgcggtgcatgcccccggccccccgtcgtacctgcggagccgccgcgccgcccggctggttcatgggtccgtgcgggaggaggcggccccggcgcgtcctgctcctcccgggccgggctgctggtgcgcgcacaatgccgccgccgccgccgccgccgccgccgccgctccctcctccgcccgccccgctcaggccgggggggcgggggcgctgggggcgcgcggggggggcgccggccctcgcccccacccccggcccgcaccggccgcgccgcggcagccgctgccgccgagccgcccctcgcggggccgccgccgccccccgccgccctgcccgcccccgggccggcctcgccgtgcggcccgcgagctcggggcctcggcctcggcctccgcgctgccggcctccgcgtggcacacaaagccggccggtccaggggcgcgcccgccctcccgtccgccagccccagtgccgcggcacacccgcccccccaaactttcccgcgccgcgccctgccctccccgcgccccccgcgcccgctccccggctcccttctgccctcccccagtcccccagcccctcggaaatgtcattttcacgctggaaaaaaagttcagggagccggctctcggcggaacgcaagaggttaatgggaactctgtaccccgctgtacccccccgccaaaaaaaaaccagattgatttttgaaataaaagttttcaagagctggcttgctggaagactggaaggcttattgggaatattctattgccctgccactcctcccaaaaaaactaatgtaataaaataaaagtttgaaggactggccccatgtccgacaagagtggttaaggggactctagccccccagccagactgatttttaaaataaatacttgaggagccgcttttatgtgaaatgccagtgaagcggctgtttctgcctatccttgccaaattaaaatatatatatgtatttctaaataaaagtttgaaaaactggtcctacagtaagacaagaggggttaaaggttaagggatattagcgccccccacccccatatcccccagttaggttgatttagagaaggaaaatttgagaaacttgcatgtgaaataaaacgtgaaccaggatatttctttccaacaccccaaaatagccagtttttttgttgttgttattgttgtttttttttttttaacttgagcaactgcctccttgtgacttgggaaagtttaaaagggatttttttttctattctcttccctattctcctaaaaaatccgattttttaaaaattgaaagtatgaaggacctgccctattatagagacaaggagggattactggatccatcctacatctcccacaactggttgatttttggaataaaaatgttaagaattgctcttctatgagatgcaaggtgaacagaaatccttctttgcccctccccaaaagaaaactgcaagggtacttttcaaaaataaaagcattggaaattaagagtaaccaggtatcttctctctgcccccaccttcaaaaatcaaatgttcttttttgtaatgtttaaagaactggagcaatatgagacaggaaaggttacagaaatgttttccctacaatcctcaaaaaagttatttttaaaattttaggaaacggaggcactgtgtagaagacacctcctttccctaataagttaaattgggagtttagccctatatgggagacatgaaattaagaaacacaactcttgccccccttaacaaacactcataacacaagacgttaaaaggagtcttctggccgggagtggtggctcacgcaaataatccttttgggaggccaaggcgggtagatcacgaggtcaggaattggagaccagcctggccaacatagtgaaccccttctccactaaatatacaaaaattagccaggtgtggtggcacacaccagccagtagtcccaggtactcaggaggctgaggcaggagaattgcttgaacccgggaggcggaggttgcagtgagccgagaccacgccattgcactccagcctgggtgacagagtgggactccgtctcaaaaaaaaaaaaaaaagaggagtcttctaaccacttcctcccagacccctaaaagttggagattccttaaaaattgaaat

SEQ ID NO: 589058 - DNA, 4001 bp, Homo sapiens
tccaatataggaaattcttcctctactacccggaaagaggcagcattagtatcactctaaatgccacatgtggtgatgaacacggtgtgagagggactcacaatgtggaagaagtgaaggcagaaaggaaactaggctgccgtttgggatctggacagctgattacatcttccctggatatcatgacctaaccagccctccagtaaagtgtctttttccacccagcttgatagtcactcatccctctcaacccctgggaattgccttctgcaagttagtccacagcaaagtcacacggtctgtgatggcttctggatgtggcaacatcacaaaatctgatgcatatatagggagtcaacaactgcctctggggaagcaatcaggacctgctcctttctagaatcttctgcctctgctctgacgctctagaagaggtctcggtcatatgggctgttcttctatggcagtagtccctaggactccctcttgactgcctcataggagctgctttgctccagaggggctgggacttaggcctgagaaacaaactcaattgaaaccttcacctaataccctaaacctgactcttgagattcactagaaatgtgctatccagcactgcagccatcagccacatagaaccattgaacacctgaagtttggccagtgctacaagtcgaatatttaggaaggaatgagttaagtaaaataaagcagtaaaactgactttgcctgcctcttctttttactgtagctactgaaaaattctaaacttttttttcttttttgagacagagtctcactctgtcactcaggctggagtgcagtggtgcaatcttggctcactgcagcgtccgcctcgggttcgagcgattctcctgcctcagcctcccaagtagctgggattacaggagtgcaccaccacgcccggctaatttttttatttttgtagagatgggcttttgccatgatggccaggctggtctcgaactcctggcctcaagtgatccactggcctaggcctcccaaagtgctgggattacaggcatgagccaccgcacctggccaaaaattctgatttatatttgtgttttgccttatctttctattggacagcacagcaccagaatatcaatctgtgcctttgaggagacagcgggaacagtacaagaggattcaggagcctcagcctgaatcagagacccgacaaatcgcagaatgtatctaccacttggtgagattctgtccacatttacttcacaatcatctacacagatctggtgacaggccactctgcataagcgctctgaaggctttaggcaggtactggcaagtctgggtttcaggcagacagcatgttagaacgagcaggacagggagtcacatctctcagcatttgcatctcacctactagtgtgtgccctggggtacccatccccatgaactttcgtccatttttttaaaatggaacgtttataccaaagaggtcgttgtgagggtcaggtgaaataccaaacgatgagaataagtgtctcataattgtgagagcagcttacatttcacatagtgactattacagacacttaacaaaatgctttacaggtgacaacttatttaattttcagaataggaacacgagttactagtaacctcctcctgttcgccgtcaacctcatccacgcacatttcctcttcccggcccgcaaccccgcggggcccggcagcccctacacctgcggacaggactcggcctgggcccgcgcactgggccggggaggagaggggagggccatcctggggactcctgagactgcctgctgctgtcctccgcacacaagcccgcccgtccccaggttcctgggccgcgcggagccctgtcaccgacgctctcaccccaggtgcgcagcctcggctcccgcgcagacctaaagactcggacaccgtgtccctttcaggcccgggagggcagacggcaggaggtggggctgggtttacacatgcgcagagcgagccccgaaaccccattcccaaagtgctgcgcggtaggcgcgttaacattgaaaactacagtaactacagttcccgtaagcccgtgcgtccgaaggaagtactataattttttctgctgctttgaccggctgggagggaccttcggagcccagggatttcccaaattcccggaggttgtcagcatgaccacaaactgcgaagtgtggttcttgatgcgatcctggttggagaaaaaagcaccttaaacagacattaacaattggggaaacatgactatcgacaggacattagaaatattaaagaaaattaccgttactttgagaataatagctagacgatgtaggacattgttcttatatttaaaagatatgtacagaaacatttacaattgtatgcttgtagtttaattgaaatacttcaaaaatttctcaaaacaatgaaagcagatatagtaataagtgaagaattgttaaatctgtataatacgtgcttatgatgctcattttactattttctaccattctgagggtctgattttttttttttcatactcagtaaaagacgtgtggggcagtgcagtgcagggggagtggagaggctttactatcccttcggaagtatgccgttaaattcaaagttgccaagggaagtaaaagtacataaaaatagctttatgaataaggttgtgaaatcgaacaaatactagaaaacataaacgagtaacatctgtgatcagcagggtttatgggggttggaggaggaagctagctgttcaaaatacatatgtgatgcgtgaaaacacatgcaacccaaaatatgaaaatgattattacaccaaccttgcattttcatgaggaaaccttttttgaaacgtgtatacccatctgactgtttaaagaattaggaatagataggtactataactttttttttaattaatagacttttcttattttattttattttattttatttttttgagatgggttttgctctgccgcccaggctggagtgcagtggcgctgtctcggcccactgcaacctccgtctccgggctcaagctactctcccacttcagcctcctgagtagctgagactgcaggtgtgggccaccatgcctggctaattttttttttttctttcgagacggattttcactcttgttgcccaggctgcagtgcaattctcggctcaccacaacctccgccccctgggttcaaacgattctcctgcctcagcctcccaagtagctgggattacaggcatgtgccaccacgcccagataattttttgcatttttagtagagacagggtttcaccatgttggccaagctggtctcaaactcctgacctcacgtaatccaccttgcctcggcctcccaaagtgctgggattacagacgtgggccactgtgcctggccttttgtattttttttttgtagagatggggtttcactatgttgcccaggctggtctcaaactactggggtcaagcgatctgtccacctcagcctcccaaagtgctgggatattaatagatgtacagagcagttttaggtatacagaaatattgagcagaaagcacagagttcccatatacctccgctcatcaacccacacacagtttcccctattattaatatattgcattagtttagtacatttaaaatacatagtttatattagctttcattctgtctgttctacagttctgagttttgccaaatgcatgtcttttagtgcgatttccaccaatgcaatgatgtaatatccaccattacagtatcataaaaaatagtttcactgcctgatatggtttggatttgtgtccccacccaaatctcatgtcaaattaaaggaggggcctgatgggaggcgattggatcatggaacagatttcccccttgctgttctggtgatagtgggttctcacaagatctgatggtttaaaagtgtgtggcacttcccccttcgttctctcttttgctttg

SEQ ID NO: 589059 - DNA, 4001 bp, Homo sapiens
aggtaacagggcccttcaggccttgaaaaggcatgagaagcaccacgtagaggtggcactgtctacgacaactctgaaataattatggggcttaaactgctgttttttattgagtgaacataaacttttcccaattgatttaacaatgcacatgtgcttctaacacacacacaaaaataaagacaatacaggattagttgaattaaagtacaccacagggtaagacactattctttcattaaaattaacctagcaggtactgtggttcaagcctgtaaccccagcacttcgggaggccaaagagggaggacagcttgagctcaggagttcaagaccaacctgggcaacatggcatgaccttgtctctacagaaaataaaaacttaaaaaattagccaggtgtggtggcatgcgcctgtggtccctgctacttgggaggctgaggcaggaggatcacttgagcccaggaggtagaggctgcagtgagccatgtttgtgccactgcactcctgcctggacaacaggatgagactctgtctccaaaacacaaaattaacttagcagaaaaatattcagtgtgcatcatttaactatttttcttagtaatattatttacccttggtatagacaatccacagaaagtcttataaaagagatgagatactttaaggcaaagagttttagatgttttaactgggatgtatttctcaaaaggccctttggataagatgcttttggtgactcacctgtgaaagaatgaacggaactgttttcctcctggctctaccacaaacgagggatccccggaaactcactgaacctttcatgcccaatgtctttaaagctttcaaaagaatcagaagtagatagccacggaaaacccttcatgtatcatcatgcatgggattctatgaggtagggacaaagtctccagtgtcacatatgttaacagcagtatggcatctgtaaagagtggagaacaaagcgactgggggctactttgggatctggggacagaatctccggttacccctaccctcagacctatgcaatgatgtggcctttcctgagcagcctgtccctggccaccacctagcccattttgctcttctcaaagctggcccaaaccacccactgtcacccattgtgtggtggcttctggaggcttcaccaagtctggctcattctgggaaggaggatcaagaactgcttctgaccatacacatctaggatctgctcctctgtgggctcttctgcctctgctctgaagctcgggagggaggcctaggtctgagaggtgttctcttccaggtaaaactgttcacagagacccctgcttcccacctcgcaagggctgctctgttcaaggagcctgcgacctgacctgagaaaccatgttagtggcaaaaatctgactcttagaattctttacatcagacttaaaagagagacaccctgacaatgcagaaggggccaggaacctgtctgacccaagagatctgaagacacaccagaaatccagactacatttgacacatggtaagattccatctacatccactccctgagtatttggggacatgacattctgctaagtgctgtgaaggctgcaatgctggttttaggcaggtgtgatattagcgcctgaaacgggaaataaatcacacctgcctttgaaccccagctccctcactgctagcttgtgacctgagcctcagttatatttaatgcagatgtggttgtgaggtatacataggcacccaacgaatggaacaaagtgtcttctaaatataacagcagcagtccgctcatggcttagtagcctacagtcggctgtttgctttacaggtggtgacttaaagttttaaaccaacgccatgaagcagtcattattaataccctcactttcagatgagaaacctgactctcatccacgtccctacattcgcctcggcttccagttgacagagatggaacttacccgggtttttccagctccagagctcggggtctcgatgcagacccaccgtccggggatttcgggcacgttgtcgcccgcgttacaaatgcgctttccccacccccgccgccgctcgcgccgggctccggtcccgcacaccgcggcccgcacccggcacctgctccggaccaacgctcagcctcagccgccccgggagccagcggccgaagtccctctccagcggccgggaaggccgagggcccgcccggtcgcatccactgacacagggggcggggatcccacaaacttcccgcttcctctcccgcttccgggcacaaacgctgtcctcccgccccagctgcgccccctctactttccgagccgacccccgagcttcccaaaccgcttcccgggagtctcgagaacccaaatgaggaggcggggctctggctgcacaggcgcagaaggagcccaggagccccatcccagagtgctgcgcggcgaaccagactcattcaggactacatttcccataagctcttgcgtccgccttcgacgtgactcctcacgtttcggcgattcagaattggcggggatggagtttttatgaagtctcccgctcaggctctccaagaacagggagaagttaaaggttaaaacttaaacgctactgacaaatacaaagagtagccctccattggttcccggttgaaccaacattttttttttccgtaagactttcggagacaattgggaagctgaatatggattgggaattgcaaatattgaaaaaaagtaccattacttttgtgaactgtgaaaaaaaattaagaattttgtagaaattttttttttaaaaaaagggatcactactgaagtatttagcattgaaatgatataactttgaatttactttacaattttatacattttcaacctggaacctccaccttgtctctttacagcctacccgacccattgacctgtgagccctgtcctggcgcccccaggcgtgagggttctaaggcgggtcgagcccggtgctgcaggtgttagagaaaagcttttggtttttatcccttaacattgcttcttgccgaattctcttattgattcaacatatttaaatttaatgttaattatcttaggtttccatgcgcattaacgaattttcttgctttttgctgattgttttttatttccgtaggttattggggaacagatggtgtttggttacatgagtaagttctttagtggcgatttgtgagattttggtgcacccatcacctgagcagtatacactgcaccccatttgtagtcttttatcccttgccccgctgccctccgccattccccgccaagtccccaaagcccattgtgttattcttatgcctttgcattctcatagcttagctcccacttatgagtgagaactacgatgtttggtttttccactcctgagttacttcacttagaataatagtctccaatctcattcaggtcgctgcaaatgccattaattcattcctttttatggctaagtagtatatcatcagatacataccacagtttctttatccagttgttgattgatgggtatttgggttggttccacgtttttgcaatcgcaaattgtgctgctataaccatgcatgtgcaagtatctttttcatataatgacttcttttcctctgggtagatacccagtagtgggattgctggatccaatggtagttctacttttagttctttaaagaatctccacactgttttccattgtggttgtactagtttacattcccaccggcagtgtagaagttttccctgttcactgcagccatgccagcatcaactattttttgattttttgattatggccattcttgcaggagtaaggtggttttgatttggatttctcttatcattagtgatgttgagcattttttcatatgtttgttggccatttgtatatcttttttgagaattgtctattcatgtccttagcccactttttgatgggattgtttgttttttttctttga

SEQ ID NO: 589060 - DNA, 4001 bp, Homo sapiens
aagtcacatattatgagtccacttatttgaaatgtcctaggcaaatccatagtgacagaaagcagattagtggttgccagtgacttgtggagaaatgagggactggggagtcactgctacaggctatggggtttcttcttcagataacaaaaatgttctggaattaaatagtgatggttgcaagactttgtgaaaatactaaaaaccactgaattgttcactttaaaagggtgaatattatggtatgtgaatgatatctgaataaaataaataaatagatctggatcctgatcttaggacagaccttctgttactgagagttatctaacctgacagcacttcctttcctgttttgcagtatggggaagatgacgacccatctgctctgctttcccaggtgtctggggaagataacacaaaatactggatgtgaaattgcactctctactcttcaagtgcaagaccaaatataaggatctcttggccaggagcagtggctcacgcctgtaatcccagcactttgggatgccgaagccagtggatcacttgaggtcaggagtttgaggccagcttggccaacatggtgaaaccccgtctctactaaaaatacaaaaattagctggacttggtgtcgggcacctgtagtcccagctactcaggaggctgaggcaggagaatcgcttgaacctgggaggcggaggttgcagtgagctgagattgcgccactgcactccagcctcggcgacagagcgagactctgtctcaaaaacaaaacaaaacaaacaaaaaaaaacaaatacaaggacctcttgatcttggggacagcaccaaattctggatgtaaaattgcacttgtagagtaaaagaccaaatacagttgatctaggggtgaacagcagaggtgttggtggttaagacttaaaagaggttgcctgcttacacatttgttctgtaccacattcagggtgctttcaaaagtgttatttcatttgagaattacaattctcagaggtaaacaaagtagttaacattattttgtcctttcttccatggagaaatacaggttaagagacctggctggtacctcacagctttcacaagaacctgtgccttctaactgcaaattcccctgtcctccacaacttcacaatcctactgggctggcctgcccccaaactttcccgggcttccaggcattcctggctgcttcgagaagggctagaaggagaaaagtgacagaggagtccccaggaacccacttctccctactctccactgtcattggtccatctgggcagactggggtacgtggtacaatactcagaaatcacgcagtctgaggtcctcaaacttttttgacccccgaattctttactcaaaaaaggactgtaggggcacatgttctcaggatctcctggggctgtgtcatgggcaaagaaagaaaaaatgattgtctccaactacctgtaggagagataaagagagttctgattcggctcacacagcggcagtcgtgggcaaacgaagcagcagccgatctcttgacaatcgctccctctaccactcctcacctccttcctccagcatttgagtcccgcctcgcgccacagcctcccagcagttctctgggcgtaagggtctatctacagcagcccccaccccgttctgcagggctgctctgacggctcccaggccggactcttcctctccagcctctccccgcagaggcacggtctgatcctgcggtgctgggtcgcgggagctgtccgggcctgcccagccgggtgttccactccgtctcccgagtcacagccactctttggctcggcctcaagcagaacccggtgaaaaagccgctgccagctttccgaaaaacgactggcaactggcaactggcaacaatctaccggcaaccgcgagagctcaagaaccgctgtccaagtaccgcccaacgccaggtcctggctccagcgccagagggacgcgcctgattggcgccacttccggtcatgcgcacatgccccgcggcggccacaccggactccatttcccagaagtcgccgcggggctctgtttctggccaaagtctttttcattcctgcagcccggtttatgatacacacacgctcagggattgtacttcccagagaggcttccgcctgtgcttgctcccggaatctattatccatcgtgcttttttgttgcacacgtctttaaagtccaccagaatccaacgaaatggagcctcgaggaaaagaagagatttagccgcgaaggattctgggaatgctgggcttacaggggcgccgatcttcgctggcgctaggcgcttggtttcctctccgcagctctctgcgcacggtacgcctgtccctcgttggccttccactcagggcaatcaccagccactctcagggtcctcttgagccgtactaaaagtttgggaagactaaaggaaatcagaagtccctcagtctgaacaggacagccgtgagtgggtggcctgggaccctcaaagtataaaaacctatcggccggcgggaactgcttcagtcatttcaggggcagtgtttgatcagcacttctgcgggaggagattcctgaatcctgtgttccttaagggcttccctgctgcaggctggggatgtttcaatggactttccctcgagccctttggaaattacttcttaagcaatttttcgatgatcagctcctttttataggcattttgtcgttaaggggaggggactgggttacccaggaaataagtgagtatggggattctaaggctccttttcattttgtcttgtctctttccctttcaatcacagccggtggcatttttgccagtgtaagtttcttaattttgtgggtcttcctatgaatcttaatgggattggctccatcggagaagccacactcacaaatgtctttgagctagcccttctctatattgggcagctgtagtttggggcttacagttttgtaagaagtctgaagtgggtctcactgggctaaaatcaaggtgtcgacagtgctgcattccttctggaggttccaggggagaatcttttcttgccttttccaacttccagaggctgcctgcatccttgactcgcagccccttcttccaacttcaaagtagcaacctcagccagagtccgtccattgctgccctctgtatggttctctctcctccgcagccctcttccacttttaaggaccctcatggttaacactgggctcacccagctaattgaggagaatcgttaaggccagctgattagcaaccttaattccatttgcaattttattcccttttgtcatgtaacctaacatattcagaggttccggggattaggacatgtatatctttggggggtggtattctgctgaccacagcaggattagaaaaccagatggaagtgaatggataccgggaatctaggatccagctggctgtcaggctggcagaggtatcccagacctgtcagctctcaggaaagctgcatccagagtgctttttggatcactgggggatacctggcctcactctagactcactgccgtggtcgtttcagaattgaatccgtgatcaggaaatgttcccagtgttgctaatgtactcctcccacacttgagagtcctgaatcccatctcctgagaagaggcgttgggctcaagtggctagagagaagtttcttgtcagagaaatcttgctaccttgaggagaggaagcataactagactgggatggataggacacttagggaagaggaagtgtttcatatccctgggaccaggaggccagaatgaggcaaacttgcccctctgtctggcctcctgtgttgaggaggcctgaggtggcagaaggaagatgggagaagggcccccaagaaagctctggccagcctcaggctgtccccaccccgctgatatagcgtatgtggagataagggagcacccaggagcaagtgtcacccctccccttccaacagcag

SEQ ID NO: 589061 - DNA, 4001 bp, Homo sapiens
aattttccctccctctggacagaggtgatatttcaggaaataaaaaatacagcagagctgcgttacagacacacatgtatattttatttgtacaaatctgcccaacaggctcaagaaagtatgttatctaaaggtaagagtgagatgggagaatctcctgtttcctcagtctcacttcttacagccctctcgtaagtgagcatcttgctatgctgagttattttaatgtttaaagaacatagtcggggtacatttacacatgtatattattgcatggttgtatacacattacatgtgcatacacgttatgaactattgttcataacaatgtattcttgaaaattgctatgagagcagtttaagtgctctcaccacaaaaaatgaaaagtacgtgaggtgatgcatgttcattagcttgatttagccattctactacgtatacatatttcaaaacaacatgttacacatgatgaatatataaaatttttatttgtcagttataaagaaaaattaggccgggcacggtgactcacacctgtaatcccagcactttgggaggctgaggtgggcagatcacgaggtcaggagtttgagaccaggatgcccaacatggtgaaaccccatctctactaaaaatacaaaaattagccgggcgtggtggtgcacgcctgtaattccagctactcaggaggctgaggcagaagaatcgcttgaacccaggaggcagaggttgcagtgagccaagatcgtgcactgcactccagcctgggcaactggacgagaccttgtctcaaaaaaaaaaaaaaaaaaaaattgagagcaaataatgagcaataaaagagattatcaagggacgtttaattgcatatgatttttccacactgcaagatggaactttagaaattaaacccagcttaaggtacaaatgccttgaaaagttttgctcaccaaagaccatgtagtcaggggccagtggtcaggtccttcttcttgatgccatcttatataagtaagtagagacctgagaaagcagagctgaaaaaggaaaggggccctgagaaatcaggactgtctttatgagaagcctgtctgactacctggatataacccacaccctctgtaaaaatgtcagaatgaatctaggaacagattctttccctgcagagtacaaagtgaaaggccacttacattcctctctctggtcactggtccaatctgacaaaccagaaacagggctaactttatcctcccatgatgggtggcaccgagtgcaccagctccctctttgtttgttaacaatacttgtaaagcatatacaatttttcgaagtgcattcacaaatgccatctcaaagaacaaacaattgctcttcgtcgcccgcagagtgtagggaatcaattccacagttctttatagaagagacttcagaaatttaccagtaaaacgaaacaagctatctctagagaggaggtgagtttctgaggaaagagcaagaactggatgtcgggaaacctaaattctagttggcactaaatacgtatatcacggttttcttgcaattcccaggtctacctaccaccaaggtctggggtggttgcccctccccagataaactgccccccatcacagtcaaagcaaggcccaaaagctctgagctctgttctcatgactctccaacccagaagagaacccaagcccctgactgttaaggctgggatgagcagacacggctttgcctcctcctcaccctgaagcgggatgctggcccaggtcaccaccacccctccactgcaacgtgaaccaaatacccagcctgacctaatcggctttcctccgcccccgggcccggccaatgcattctcaggcctctcccgacccgcccgaatggttgtgtttgaaggggacctctctccccacctcccacacgagtgcaagggtcgggaaagaaaaagctcacctgctccaccgaaaaataaagagcacggtcgggcgatgtggttcccaagccaggaagtacgcctgcgcacgcggccgccaggaactacatttcccagcatcttctgcaaagcgccctcttgagctgcgtctttcaccggtgtctttctaatgctttgcgggttgcgaacgtgcgtcgtttccatcgttgtttacatgaaaagaagaaaaaaggaaaagattttttcttttgctataaacaactgtaaatccaaagagatgcaaagtttgcgttaacaacaccccagacacaaaagtaatacctattcactacattaatagatgatttataaataactctttattcaacagataaaaaaccaaactacccagatggattcattgcagaaatatttattaacgcagtgattaatattttttagcattctaaaagtaaatctctgatttatagctagcttctttgttatgagtgtgtgttgaggggacggtggcgggggggcggggcgggcagagacagggggcagagagagagacagcgagcaagcaccagagagattccatccaagaatgaggtcatacttttggggtagatttttttctagcttttttcttcctgttaggaacttaggttatgatcccttcagtgctaccaaaaatagtatactgatgaacatccttgtagagtaatctgttcactcctccacatctgttcttgacaaaaacgtccgaaaaacgaatataatgaagagggaatatgtatatctaacttttttcttaaacaaacgaatatagatagatagacagattgtagataacagagaatagaggtaaggaaaaagaacaaaattagtcagataaaagttcactccaagatactccctattatatatttaaatatgtaatttctatgcatatatatacaaattctgtataattagatattctcaagtataaaactatacatactttaaaaaattgctttattgagctatgattgatataactgtacacagttaatatacacaacttgatgtgtttggaggtaagtatatatacctgtgaaaccattaagccatcatgccatcaatcccataaattcatctatcacttccaaaagtttccacccctttgggcttcccccaccttttgtggtaagaacacttaatgtgagatctaccctctttacttatttttaagtatataatacactattgtgaatcataggctctttatggtaagaagacatccagatcttatttattgtgtataaataaatactgaaactttgtactctttgaccaaaacctgcctatttctccctcaccagccccttcaccattttactttctgtttctatgtatttccctatttttgattccacatataagtgagatcatgcaatatttgtctttctgtgcctaacttctttcacttagcataatatcctccagtttcatccatggtgtcataaatgacaggatttcattgttaataaggctgaataatattccattatatgtatataccacattttctttacttgtccaccaatagatatttaggttgtttccatatcttggctactgtgaatactgctgcaataaacgtggaagtgcagatatctctttgagatccagatttccattcctccggatatatacccaaaagtgagattgctggatcaaagggtaattctatatttagaggtacatttatattgatttccatagtggctggaccaatttacattcctactaatagtacacagggtttgtttcctctacatcatctgttatgtatttatttttataatagctattttaacagaagtatggtgataactcattgtggttttgatttgcatttccctgattactagtgatactgagcacttgttcatatacctgttggctatttgtatgtcttctttggaaaaatgactatgcagatgcttcacccaattttaattgggttatttgttttttgccattgatgcataggaattcctttgtcaggcagatattaactctctggatattaacctc

SEQ ID NO: 589062 - RNA, 19 nt, Artificial Sequence
  Description of Artificial Sequence: Synthetic oligonucleotide
  Sense strand starting at position 132 of SEQ ID NO: 584785
guaggagauccagagccuu

SEQ ID NO: 589063 - RNA, 19 nt, Artificial Sequence
  Description of Artificial Sequence: Synthetic oligonucleotide
  Antisense strand to SEQ ID NO: 589062
aaggcucuggaucuccuac

SEQ ID NO: 589064 - RNA, 19 nt, Artificial Sequence
  Description of Artificial Sequence: Synthetic oligonucleotide
  Sense strand starting at position 143 of SEQ ID NO: 584785
agagccuuuccucagggau

SEQ ID NO: 589065 - RNA, 19 nt, Artificial Sequence
  Description of Artificial Sequence: Synthetic oligonucleotide
  Antisense strand to SEQ ID NO: 589064
aucccugaggaaaggcucu

SEQ ID NO: 589066 - RNA, 19 nt, Artificial Sequence
  Description of Artificial Sequence: Synthetic oligonucleotide
  Sense strand starting at position 271 of SEQ ID NO: 584785
guaaucaagccacaugagu

SEQ ID NO: 589067 - RNA, 19 nt, Artificial Sequence
  Description of Artificial Sequence: Synthetic oligonucleotide
  Antisense strand to SEQ ID NO: 589066
acucauguggcuugauuac

SEQ ID NO: 589068 - RNA, 19 nt, Artificial Sequence
  Description of Artificial Sequence: Synthetic oligonucleotide
  Sense strand starting at position 287 of SEQ ID NO: 584785
aguuuagcucccgacuuaa

SEQ ID NO: 589069 - RNA, 19 nt, Artificial Sequence
  Description of Artificial Sequence: Synthetic oligonucleotide
  Antisense strand to SEQ ID NO: 589068
uuaagucgggagcuaaacu

SEQ ID NO: 589070 - RNA, 19 nt, Artificial Sequence
  Description of Artificial Sequence: Synthetic oligonucleotide
  Sense strand starting at position 463 of SEQ ID NO: 584785
uacucuagccuagagugau

SEQ ID NO: 589071 - RNA, 19 nt, Artificial Sequence
  Description of Artificial Sequence: Synthetic oligonucleotide
  Antisense strand to SEQ ID NO: 589070
aucacucuaggcuagagua

SEQ ID NO: 589072 - RNA, 19 nt, Artificial Sequence
  Description of Artificial Sequence: Synthetic oligonucleotide
  Sense strand starting at position 469 of SEQ ID NO: 584785
agccuagagugaucuuuaa

SEQ ID NO: 589073 - RNA, 19 nt, Artificial Sequence
  Description of Artificial Sequence: Synthetic oligonucleotide
  Antisense strand to SEQ ID NO: 589072
uuaaagaucacucuaggcu

SEQ ID NO: 589074 - RNA, 19 nt, Artificial Sequence
  Description of Artificial Sequence: Synthetic oligonucleotide
  Sense strand starting at position 476 of SEQ ID NO: 584785
agugaucuuuaacuccagu

SEQ ID NO: 589075 - RNA, 19 nt, Artificial Sequence
  Description of Artificial Sequence: Synthetic oligonucleotide
  Antisense strand to SEQ ID NO: 589074
acuggaguuaaagaucacu

SEQ ID NO: 589076 - RNA, 19 nt, Artificial Sequence
  Description of Artificial Sequence: Synthetic oligonucleotide
  Sense strand starting at position 507 of SEQ ID NO: 584785
auugcuguuugaccauuua

SEQ ID NO: 589077 - RNA, 19 nt, Artificial Sequence
  Description of Artificial Sequence: Synthetic oligonucleotide
  Antisense strand to SEQ ID NO: 589076
uaaauggucaaacagcaau

SEQ ID NO: 589078 - RNA, 19 nt, Artificial Sequence
  Description of Artificial Sequence: Synthetic oligonucleotide
  Sense strand starting at position 541 of SEQ ID NO: 584785
uugagugaucauuaggcag

SEQ ID NO: 589079 - RNA, 19 nt, Artificial Sequence
  Description of Artificial Sequence: Synthetic oligonucleotide
  Antisense strand to SEQ ID NO: 589078
cugccuaaugaucacucaa

SEQ ID NO: 589080 - RNA, 19 nt, Artificial Sequence
  Description of Artificial Sequence: Synthetic oligonucleotide
  Sense strand starting at position 544 of SEQ ID NO: 584785
agugaucauuaggcagaaa

SEQ ID NO: 589081 - RNA, 19 nt, Artificial Sequence
  Description of Artificial Sequence: Synthetic oligonucleotide
  Antisense strand to SEQ ID NO: 589080
uuucugccuaaugaucacu

SEQ ID NO: 589082 - RNA, 19 nt, Artificial Sequence
  Description of Artificial Sequence: Synthetic oligonucleotide
  Sense strand starting at position 918 of SEQ ID NO: 584785
cccagaaagauuggcuuga

SEQ ID NO: 589083 - RNA, 19 nt, Artificial Sequence
  Description of Artificial Sequence: Synthetic oligonucleotide
  Antisense strand to SEQ ID NO: 589082
ucaagccaaucuuucuggg

SEQ ID NO: 589084 - RNA, 19 nt, Artificial Sequence
  Description of Artificial Sequence: Synthetic oligonucleotide
  Sense strand starting at position 919 of SEQ ID NO: 584785
ccagaaagauuggcuugaa

SEQ ID NO: 589085 - RNA, 19 nt, Artificial Sequence
  Description of Artificial Sequence: Synthetic oligonucleotide
  Antisense strand to SEQ ID NO: 589084
uucaagccaaucuuucugg

SEQ ID NO: 589086 - RNA, 19 nt, Artificial Sequence
  Description of Artificial Sequence: Synthetic oligonucleotide
  Sense strand starting at position 920 of SEQ ID NO: 584785
cagaaagauuggcuugaac

SEQ ID NO: 589087 - RNA, 19 nt, Artificial Sequence
  Description of Artificial Sequence: Synthetic oligonucleotide
  Antisense strand to SEQ ID NO: 589086
guucaagccaaucuuucug

SEQ ID NO: 589088 - RNA, 19 nt, Artificial Sequence
  Description of Artificial Sequence: Synthetic oligonucleotide
  Sense strand starting at position 922 of SEQ ID NO: 584785
gaaagauuggcuugaacug

SEQ ID NO: 589089 - RNA, 19 nt, Artificial Sequence
  Description of Artificial Sequence: Synthetic oligonucleotide
  Antisense strand to SEQ ID NO: 589088
caguucaagccaaucuuuc

SEQ ID NO: 589090 - RNA, 19 nt, Artificial Sequence
  Description of Artificial Sequence: Synthetic oligonucleotide
  Sense strand starting at position 1052 of SEQ ID NO: 584785
gagagugcaguguaaucuu

SEQ ID NO: 589091 - RNA, 19 nt, Artificial Sequence
  Description of Artificial Sequence: Synthetic oligonucleotide
  Antisense strand to SEQ ID NO: 589090
aagauuacacugcacucuc

SEQ ID NO: 589092 - RNA, 19 nt, Artificial Sequence
  Description of Artificial Sequence: Synthetic oligonucleotide
  Sense strand starting at position 1065 of SEQ ID NO: 584785
aaucuuggucuaugaggac

SEQ ID NO: 589093 - RNA, 19 nt, Artificial Sequence
  Description of Artificial Sequence: Synthetic oligonucleotide
  Antisense strand to SEQ ID NO: 589092
guccucauagaccaagauu

SEQ ID NO: 589094 - RNA, 19 nt, Artificial Sequence
  Description of Artificial Sequence: Synthetic oligonucleotide
  Sense strand starting at position 1156 of SEQ ID NO: 584785
agacccucugccuaguaaa

SEQ ID NO: 589095 - RNA, 19 nt, Artificial Sequence
  Description of Artificial Sequence: Synthetic oligonucleotide
  Antisense strand to SEQ ID NO: 589094
uuuacuaggcagagggucu

SEQ ID NO: 589096 - RNA, 19 nt, Artificial Sequence
  Description of Artificial Sequence: Synthetic oligonucleotide
  Sense strand starting at position 1200 of SEQ ID NO: 584785
uguguugggagcuggaaau

SEQ ID NO: 589097 - RNA, 19 nt, Artificial Sequence
  Description of Artificial Sequence: Synthetic oligonucleotide
  Antisense strand to SEQ ID NO: 589096
auuuccagcucccaacaca

SEQ ID NO: 589098 - RNA, 19 nt, Artificial Sequence
  Description of Artificial Sequence: Synthetic oligonucleotide
  Sense strand starting at position 1317 of SEQ ID NO: 584785
ggccucuaagguuaacuua

SEQ ID NO: 589099 - RNA, 19 nt, Artificial Sequence
  Description of Artificial Sequence: Synthetic oligonucleotide
  Antisense strand to SEQ ID NO: 589098
uaaguuaaccuuagaggcc

SEQ ID NO: 589100 - RNA, 19 nt, Artificial Sequence
  Description of Artificial Sequence: Synthetic oligonucleotide
  Sense strand starting at position 1408 of SEQ ID NO: 584785
agagaauaguacucagcaa

SEQ ID NO: 589101 - RNA, 19 nt, Artificial Sequence
  Description of Artificial Sequence: Synthetic oligonucleotide
  Antisense strand to SEQ ID NO: 589100
uugcugaguacuauucucu

SEQ ID NO: 589102 - RNA, 19 nt, Artificial Sequence
  Description of Artificial Sequence: Synthetic oligonucleotide
  Sense strand starting at position 1450 of SEQ ID NO: 584785
uaaugaaagcguuaucuuu

SEQ ID NO: 589103 - RNA, 19 nt, Artificial Sequence
  Description of Artificial Sequence: Synthetic oligonucleotide
  Antisense strand to SEQ ID NO: 589102
aaagauaacgcuuucauua

SEQ ID NO: 589104 - RNA, 19 nt, Artificial Sequence
  Description of Artificial Sequence: Synthetic oligonucleotide
  Sense strand starting at position 1494 of SEQ ID NO: 584785
agacuucucccucgggauu

SEQ ID NO: 589105 - RNA, 19 nt, Artificial Sequence
  Description of Artificial Sequence: Synthetic oligonucleotide
  Antisense strand to SEQ ID NO: 589104
aaucccgagggagaagucu

SEQ ID NO: 589106 - RNA, 19 nt, Artificial Sequence
  Description of Artificial Sequence: Synthetic oligonucleotide
  Sense strand starting at position 1838 of SEQ ID NO: 584785
ggcggucccgaaagaaguu

SEQ ID NO: 589107 - RNA, 19 nt, Artificial Sequence
  Description of Artificial Sequence: Synthetic oligonucleotide
  Antisense strand to SEQ ID NO: 589106
aacuucuuucgggaccgcc

SEQ ID NO: 589108 - RNA, 19 nt, Artificial Sequence
  Description of Artificial Sequence: Synthetic oligonucleotide
  Sense strand starting at position 2014 of SEQ ID NO: 584785
gacuuuacguggucaaaga

SEQ ID NO: 589109 - RNA, 19 nt, Artificial Sequence
  Description of Artificial Sequence: Synthetic oligonucleotide
  Antisense strand to SEQ ID NO: 589108
ucuuugaccacguaaaguc

SEQ ID NO: 589110 - RNA, 19 nt, Artificial Sequence
  Description of Artificial Sequence: Synthetic oligonucleotide
  Sense strand starting at position 2297 of SEQ ID NO: 584785
guaauugcuguugugcuua

SEQ ID NO: 589111 - RNA, 19 nt, Artificial Sequence
  Description of Artificial Sequence: Synthetic oligonucleotide
  Antisense strand to SEQ ID NO: 589110
uaagcacaacagcaauuac

SEQ ID NO: 589112 - RNA, 19 nt, Artificial Sequence
  Description of Artificial Sequence: Synthetic oligonucleotide
  Sense strand starting at position 2300 of SEQ ID NO: 584785
auugcuguugugcuuauua

SEQ ID NO: 589113 - RNA, 19 nt, Artificial Sequence
  Description of Artificial Sequence: Synthetic oligonucleotide
  Antisense strand to SEQ ID NO: 589112
uaauaagcacaacagcaau

SEQ ID NO: 589114 - RNA, 19 nt, Artificial Sequence
  Description of Artificial Sequence: Synthetic oligonucleotide
  Sense strand starting at position 2344 of SEQ ID NO: 584785
gcaauaaacagguguggau

SEQ ID NO: 589115 - RNA, 19 nt, Artificial Sequence
  Description of Artificial Sequence: Synthetic oligonucleotide
  Antisense strand to SEQ ID NO: 589114
auccacaccuguuuauugc

SEQ ID NO: 589116 - RNA, 19 nt, Artificial Sequence
  Description of Artificial Sequence: Synthetic oligonucleotide
  Sense strand starting at position 2709 of SEQ ID NO: 584785
ggcuaauagcugcagagau

SEQ ID NO: 589117 - RNA, 19 nt, Artificial Sequence
  Description of Artificial Sequence: Synthetic oligonucleotide
  Antisense strand to SEQ ID NO: 589116
aucucugcagcuauuagcc

SEQ ID NO: 589118 - RNA, 19 nt, Artificial Sequence
  Description of Artificial Sequence: Synthetic oligonucleotide
  Sense strand starting at position 2742 of SEQ ID NO: 584785
cuucuaaugcccuaagguu

SEQ ID NO: 589119 - RNA, 19 nt, Artificial Sequence
  Description of Artificial Sequence: Synthetic oligonucleotide
  Antisense strand to SEQ ID NO: 589118
aaccuuagggcauuagaag

SEQ ID NO: 589120 - RNA, 19 nt, Artificial Sequence
  Description of Artificial Sequence: Synthetic oligonucleotide
  Sense strand starting at position 2785 of SEQ ID NO: 584785
agauauaccuguucuaccu

SEQ ID NO: 589121 - RNA, 19 nt, Artificial Sequence
  Description of Artificial Sequence: Synthetic oligonucleotide
  Antisense strand to SEQ ID NO: 589120
agguagaacagguauaucu

SEQ ID NO: 589122 - RNA, 19 nt, Artificial Sequence
  Description of Artificial Sequence: Synthetic oligonucleotide
  Sense strand starting at position 2810 of SEQ ID NO: 584785
ucugucuuuccauaguaac

SEQ ID NO: 589123 - RNA, 19 nt, Artificial Sequence
  Description of Artificial Sequence: Synthetic oligonucleotide
  Antisense strand to SEQ ID NO: 589122
guuacuauggaaagacaga

SEQ ID NO: 589124 - RNA, 19 nt, Artificial Sequence
  Description of Artificial Sequence: Synthetic oligonucleotide
  Sense strand starting at position 2894 of SEQ ID NO: 584785
augcccuuggcuugggaaa

SEQ ID NO: 589125 - RNA, 19 nt, Artificial Sequence
  Description of Artificial Sequence: Synthetic oligonucleotide
  Antisense strand to SEQ ID NO: 589124
uuucccaagccaagggcau

SEQ ID NO: 589126 - RNA, 19 nt, Artificial Sequence
  Description of Artificial Sequence: Synthetic oligonucleotide
  Sense strand starting at position 2994 of SEQ ID NO: 584785
ccgagaaggccuuagccau

SEQ ID NO: 589127 - RNA, 19 nt, Artificial Sequence
  Description of Artificial Sequence: Synthetic oligonucleotide
  Antisense strand to SEQ ID NO: 589126
auggcuaaggccuucucgg

SEQ ID NO: 589128 - RNA, 19 nt, Artificial Sequence
  Description of Artificial Sequence: Synthetic oligonucleotide
  Sense strand starting at position 3061 of SEQ ID NO: 584785
ggucuuuguauacauaguu

SEQ ID NO: 589129 - RNA, 19 nt, Artificial Sequence
  Description of Artificial Sequence: Synthetic oligonucleotide
  Antisense strand to SEQ ID NO: 589128
aacuauguauacaaagacc

SEQ ID NO: 589130 - RNA, 19 nt, Artificial Sequence
  Description of Artificial Sequence: Synthetic oligonucleotide
  Sense strand starting at position 3076 of SEQ ID NO: 584785
aguuucucugcggaaucua

SEQ ID NO: 589131 - RNA, 19 nt, Artificial Sequence
  Description of Artificial Sequence: Synthetic oligonucleotide
  Antisense strand to SEQ ID NO: 589130
uagauuccgcagagaaacu

SEQ ID NO: 589132 - RNA, 19 nt, Artificial Sequence
  Description of Artificial Sequence: Synthetic oligonucleotide
  Sense strand starting at position 3086 of SEQ ID NO: 584785
cggaaucuacauuggacuu

SEQ ID NO: 589133 - RNA, 19 nt, Artificial Sequence
  Description of Artificial Sequence: Synthetic oligonucleotide
  Antisense strand to SEQ ID NO: 589132
aaguccaauguagauuccg

SEQ ID NO: 589134 - RNA, 19 nt, Artificial Sequence
  Description of Artificial Sequence: Synthetic oligonucleotide
  Sense strand starting at position 3197 of SEQ ID NO: 584785
auagauuaaagguguuguu

SEQ ID NO: 589135 - RNA, 19 nt, Artificial Sequence
  Description of Artificial Sequence: Synthetic oligonucleotide
  Antisense strand to SEQ ID NO: 589134
aacaacaccuuuaaucuau

SEQ ID NO: 589136 - RNA, 19 nt, Artificial Sequence
  Description of Artificial Sequence: Synthetic oligonucleotide
  Sense strand starting at position 3590 of SEQ ID NO: 584785
cccagcugagauugaugau

SEQ ID NO: 589137 - RNA, 19 nt, Artificial Sequence
  Description of Artificial Sequence: Synthetic oligonucleotide
  Antisense strand to SEQ ID NO: 589136
aucaucaaucucagcuggg

SEQ ID NO: 589138 - RNA, 19 nt, Artificial Sequence
  Description of Artificial Sequence: Synthetic oligonucleotide
  Sense strand starting at position 3724 of SEQ ID NO: 584785
ccagaaagucauuguguua

SEQ ID NO: 589139 - RNA, 19 nt, Artificial Sequence
  Description of Artificial Sequence: Synthetic oligonucleotide
  Antisense strand to SEQ ID NO: 589138
uaacacaaugacuuucugg

SEQ ID NO: 589140 - RNA, 19 nt, Artificial Sequence
  Description of Artificial Sequence: Synthetic oligonucleotide
  Sense strand starting at position 3727 of SEQ ID NO: 584785
gaaagucauuguguuacau

SEQ ID NO: 589141 - RNA, 19 nt, Artificial Sequence
  Description of Artificial Sequence: Synthetic oligonucleotide
  Antisense strand to SEQ ID NO: 589140
auguaacacaaugacuuuc

SEQ ID NO: 589142 - RNA, 19 nt, Artificial Sequence
  Description of Artificial Sequence: Synthetic oligonucleotide
  Sense strand starting at position 406 of SEQ ID NO: 584786
gcccuuuccugucuuagau

SEQ ID NO: 589143 - RNA, 19 nt, Artificial Sequence
  Description of Artificial Sequence: Synthetic oligonucleotide
  Antisense strand to SEQ ID NO: 589142
aucuaagacaggaaagggc

SEQ ID NO: 589144 - RNA, 19 nt, Artificial Sequence
  Description of Artificial Sequence: Synthetic oligonucleotide
  Sense strand starting at position 415 of SEQ ID NO: 584786
ugucuuagauucucgaucu

SEQ ID NO: 589145 - RNA, 19 nt, Artificial Sequence
  Description of Artificial Sequence: Synthetic oligonucleotide
  Antisense strand to SEQ ID NO: 589144
agaucgagaaucuaagaca

SEQ ID NO: 589146 - RNA, 19 nt, Artificial Sequence
  Description of Artificial Sequence: Synthetic oligonucleotide
  Sense strand starting at position 470 of SEQ ID NO: 584786
agugaagugaagcacaauu

SEQ ID NO: 589147 - RNA, 19 nt, Artificial Sequence
  Description of Artificial Sequence: Synthetic oligonucleotide
  Antisense strand to SEQ ID NO: 589146
aauugugcuucacuucacu

SEQ ID NO: 589148 - RNA, 19 nt, Artificial Sequence
  Description of Artificial Sequence: Synthetic oligonucleotide
  Sense strand starting at position 488 of SEQ ID NO: 584786
uucuauugaucacaugaug

SEQ ID NO: 589149 - RNA, 19 nt, Artificial Sequence
  Description of Artificial Sequence: Synthetic oligonucleotide
  Antisense strand to SEQ ID NO: 589148
caucaugugaucaauagaa

SEQ ID NO: 589150 - RNA, 19 nt, Artificial Sequence
  Description of Artificial Sequence: Synthetic oligonucleotide
  Sense strand starting at position 529 of SEQ ID NO: 584786
gcggaugaaucccuuccuu

SEQ ID NO: 589151 - RNA, 19 nt, Artificial Sequence
  Description of Artificial Sequence: Synthetic oligonucleotide
  Antisense strand to SEQ ID NO: 589150
aaggaagggauucauccgc

SEQ ID NO: 589152 - RNA, 19 nt, Artificial Sequence
  Description of Artificial Sequence: Synthetic oligonucleotide
  Sense strand starting at position 568 of SEQ ID NO: 584786
ccgcuuggucugggaggaa

SEQ ID NO: 589153 - RNA, 19 nt, Artificial Sequence
  Description of Artificial Sequence: Synthetic oligonucleotide
  Antisense strand to SEQ ID NO: 589152
uuccucccagaccaagcgg

SEQ ID NO: 589154 - RNA, 19 nt, Artificial Sequence
  Description of Artificial Sequence: Synthetic oligonucleotide
  Sense strand starting at position 590 of SEQ ID NO: 584786
ugauuuguuucuuacacag

SEQ ID NO: 589155 - RNA, 19 nt, Artificial Sequence
  Description of Artificial Sequence: Synthetic oligonucleotide
  Antisense strand to SEQ ID NO: 589154
cuguguaagaaacaaauca

SEQ ID NO: 589156 - RNA, 19 nt, Artificial Sequence
  Description of Artificial Sequence: Synthetic oligonucleotide
  Sense strand starting at position 592 of SEQ ID NO: 584786
auuuguuucuuacacagag

SEQ ID NO: 589157 - RNA, 19 nt, Artificial Sequence
  Description of Artificial Sequence: Synthetic oligonucleotide
  Antisense strand to SEQ ID NO: 589156
cucuguguaagaaacaaau

SEQ ID NO: 589158 - RNA, 19 nt, Artificial Sequence
  Description of Artificial Sequence: Synthetic oligonucleotide
  Sense strand starting at position 624 of SEQ ID NO: 584786
aggguuuaaucaccuagca

SEQ ID NO: 589159 - RNA, 19 nt, Artificial Sequence
  Description of Artificial Sequence: Synthetic oligonucleotide
  Antisense strand to SEQ ID NO: 589158
ugcuaggugauuaaacccu

SEQ ID NO: 589160 - RNA, 19 nt, Artificial Sequence
  Description of Artificial Sequence: Synthetic oligonucleotide
  Sense strand starting at position 810 of SEQ ID NO: 584786
gaaugagacuaacuuuagu

SEQ ID NO: 589161 - RNA, 19 nt, Artificial Sequence
  Description of Artificial Sequence: Synthetic oligonucleotide
  Antisense strand to SEQ ID NO: 589160
acuaaaguuagucucauuc

SEQ ID NO: 589162 - RNA, 19 nt, Artificial Sequence
  Description of Artificial Sequence: Synthetic oligonucleotide
  Sense strand starting at position 823 of SEQ ID NO: 584786
uuuagucaucucuagccau

SEQ ID NO: 589163 - RNA, 19 nt, Artificial Sequence
  Description of Artificial Sequence: Synthetic oligonucleotide
  Antisense strand to SEQ ID NO: 589162
auggcuagagaugacuaaa

SEQ ID NO: 589164 - RNA, 19 nt, Artificial Sequence
  Description of Artificial Sequence: Synthetic oligonucleotide
  Sense strand starting at position 924 of SEQ ID NO: 584786
ugcucuucuugucuaucua

SEQ ID NO: 589165 - RNA, 19 nt, Artificial Sequence
  Description of Artificial Sequence: Synthetic oligonucleotide
  Antisense strand to SEQ ID NO: 589164
uagauagacaagaagagca

SEQ ID NO: 589166 - RNA, 19 nt, Artificial Sequence
  Description of Artificial Sequence: Synthetic oligonucleotide
  Sense strand starting at position 1003 of SEQ ID NO: 584786
auggguugcaguggugaga

SEQ ID NO: 589167 - RNA, 19 nt, Artificial Sequence
  Description of Artificial Sequence: Synthetic oligonucleotide
  Antisense strand to SEQ ID NO: 589166
ucucaccacugcaacccau

SEQ ID NO: 589168 - RNA, 19 nt, Artificial Sequence
  Description of Artificial Sequence: Synthetic oligonucleotide
  Sense strand starting at position 1122 of SEQ ID NO: 584786
auggacaauucugaugauu

SEQ ID NO: 589169 - RNA, 19 nt, Artificial Sequence
  Description of Artificial Sequence: Synthetic oligonucleotide
  Antisense strand to SEQ ID NO: 589168
aaucaucagaauuguccau

SEQ ID NO: 589170 - RNA, 19 nt, Artificial Sequence
  Description of Artificial Sequence: Synthetic oligonucleotide
  Sense strand starting at position 1124 of SEQ ID NO: 584786
ggacaauucugaugauuuc

SEQ ID NO: 589171 - RNA, 19 nt, Artificial Sequence
  Description of Artificial Sequence: Synthetic oligonucleotide
  Antisense strand to SEQ ID NO: 589170
gaaaucaucagaauugucc

SEQ ID NO: 589172 - RNA, 19 nt, Artificial Sequence
  Description of Artificial Sequence: Synthetic oligonucleotide
  Sense strand starting at position 1131 of SEQ ID NO: 584786
ucugaugauuucugauacu

SEQ ID NO: 589173 - RNA, 19 nt, Artificial Sequence
  Description of Artificial Sequence: Synthetic oligonucleotide
  Antisense strand to SEQ ID NO: 589172
aguaucagaaaucaucaga

SEQ ID NO: 589174 - RNA, 19 nt, Artificial Sequence
  Description of Artificial Sequence: Synthetic oligonucleotide
  Sense strand starting at position 1177 of SEQ ID NO: 584786
gcugcacuauaugcuuaaa

SEQ ID NO: 589175 - RNA, 19 nt, Artificial Sequence
  Description of Artificial Sequence: Synthetic oligonucleotide
  Antisense strand to SEQ ID NO: 589174
uuuaagcauauagugcagc

SEQ ID NO: 589176 - RNA, 19 nt, Artificial Sequence
  Description of Artificial Sequence: Synthetic oligonucleotide
  Sense strand starting at position 1240 of SEQ ID NO: 584786
gcagguacuugcccaagaa

SEQ ID NO: 589177 - RNA, 19 nt, Artificial Sequence
  Description of Artificial Sequence: Synthetic oligonucleotide
  Antisense strand to SEQ ID NO: 589176
uucuugggcaaguaccugc

SEQ ID NO: 589178 - RNA, 19 nt, Artificial Sequence
  Description of Artificial Sequence: Synthetic oligonucleotide
  Sense strand starting at position 1334 of SEQ ID NO: 584786
ggugacacugccggaagau

SEQ ID NO: 589179 - RNA, 19 nt, Artificial Sequence
  Description of Artificial Sequence: Synthetic oligonucleotide
  Antisense strand to SEQ ID NO: 589178
aucuuccggcagugucacc

SEQ ID NO: 589180 - RNA, 19 nt, Artificial Sequence
  Description of Artificial Sequence: Synthetic oligonucleotide
  Sense strand starting at position 2114 of SEQ ID NO: 584786
ccugacuugcguuaaggau

SEQ ID NO: 589181 - RNA, 19 nt, Artificial Sequence
  Description of Artificial Sequence: Synthetic oligonucleotide
  Antisense strand to SEQ ID NO: 589180
auccuuaacgcaagucagg

SEQ ID NO: 589182 - RNA, 19 nt, Artificial Sequence
  Description of Artificial Sequence: Synthetic oligonucleotide
  Sense strand starting at position 2141 of SEQ ID NO: 584786
cccuuagugcaacgucauu

SEQ ID NO: 589183 - RNA, 19 nt, Artificial Sequence
  Description of Artificial Sequence: Synthetic oligonucleotide
  Antisense strand to SEQ ID NO: 589182
aaugacguugcacuaaggg

SEQ ID NO: 589184 - RNA, 19 nt, Artificial Sequence
  Description of Artificial Sequence: Synthetic oligonucleotide
  Sense strand starting at position 2146 of SEQ ID NO: 584786
agugcaacgucauuuauaa

SEQ ID NO: 589185 - RNA, 19 nt, Artificial Sequence
  Description of Artificial Sequence: Synthetic oligonucleotide
  Antisense strand to SEQ ID NO: 589184
uuauaaaugacguugcacu

SEQ ID NO: 589186 - RNA, 19 nt, Artificial Sequence
  Description of Artificial Sequence: Synthetic oligonucleotide
  Sense strand starting at position 2164 of SEQ ID NO: 584786
accucucacguggaguauu

SEQ ID NO: 589187 - RNA, 19 nt, Artificial Sequence
  Description of Artificial Sequence: Synthetic oligonucleotide
  Antisense strand to SEQ ID NO: 589186
aauacuccacgugagaggu

SEQ ID NO: 589188 - RNA, 19 nt, Artificial Sequence
  Description of Artificial Sequence: Synthetic oligonucleotide
  Sense strand starting at position 2172 of SEQ ID NO: 584786
cguggaguauucgcucaca

SEQ ID NO: 589189 - RNA, 19 nt, Artificial Sequence
  Description of Artificial Sequence: Synthetic oligonucleotide
  Antisense strand to SEQ ID NO: 589188
ugugagcgaauacuccacg

SEQ ID NO: 589190 - RNA, 19 nt, Artificial Sequence
  Description of Artificial Sequence: Synthetic oligonucleotide
  Sense strand starting at position 2175 of SEQ ID NO: 584786
ggaguauucgcucacaacu

SEQ ID NO: 589191 - RNA, 19 nt, Artificial Sequence
  Description of Artificial Sequence: Synthetic oligonucleotide
  Antisense strand to SEQ ID NO: 589190
aguugugagcgaauacucc

SEQ ID NO: 589192 - RNA, 19 nt, Artificial Sequence
  Description of Artificial Sequence: Synthetic oligonucleotide
  Sense strand starting at position 2185 of SEQ ID NO: 584786
cucacaacuguguaagcuu

SEQ ID NO: 589193 - RNA, 19 nt, Artificial Sequence
  Description of Artificial Sequence: Synthetic oligonucleotide
  Antisense strand to SEQ ID NO: 589192
aagcuuacacaguugugag

SEQ ID NO: 589194 - RNA, 19 nt, Artificial Sequence
  Description of Artificial Sequence: Synthetic oligonucleotide
  Sense strand starting at position 2226 of SEQ ID NO: 584786
aucuccauuucuugaagag

SEQ ID NO: 589195 - RNA, 19 nt, Artificial Sequence
  Description of Artificial Sequence: Synthetic oligonucleotide
  Antisense strand to SEQ ID NO: 589194
cucuucaagaaauggagau

SEQ ID NO: 589196 - RNA, 19 nt, Artificial Sequence
  Description of Artificial Sequence: Synthetic oligonucleotide
  Sense strand starting at position 2872 of SEQ ID NO: 584786
uguugagagaguugaauaa

SEQ ID NO: 589197 - RNA, 19 nt, Artificial Sequence
  Description of Artificial Sequence: Synthetic oligonucleotide
  Antisense strand to SEQ ID NO: 589196
uuauucaacucucucaaca

SEQ ID NO: 589198 - RNA, 19 nt, Artificial Sequence
  Description of Artificial Sequence: Synthetic oligonucleotide
  Sense strand starting at position 2912 of SEQ ID NO: 584786
aagugcuuugccuagggua

SEQ ID NO: 589199 - RNA, 19 nt, Artificial Sequence
  Description of Artificial Sequence: Synthetic oligonucleotide
  Antisense strand to SEQ ID NO: 589198
uacccuaggcaaagcacuu

SEQ ID NO: 589200 - RNA, 19 nt, Artificial Sequence
  Description of Artificial Sequence: Synthetic oligonucleotide
  Sense strand starting at position 2928 of SEQ ID NO: 584786
guaguccuccaauaaaucu

SEQ ID NO: 589201 - RNA, 19 nt, Artificial Sequence
  Description of Artificial Sequence: Synthetic oligonucleotide
  Antisense strand to SEQ ID NO: 589200
agauuuauuggaggacuac

SEQ ID NO: 589202 - RNA, 19 nt, Artificial Sequence
  Description of Artificial Sequence: Synthetic oligonucleotide
  Sense strand starting at position 3029 of SEQ ID NO: 584786
agguuacuucugcaucuuu

SEQ ID NO: 589203 - RNA, 19 nt, Artificial Sequence
  Description of Artificial Sequence: Synthetic oligonucleotide
  Antisense strand to SEQ ID NO: 589202
aaagaugcagaaguaaccu

SEQ ID NO: 589204 - RNA, 19 nt, Artificial Sequence
  Description of Artificial Sequence: Synthetic oligonucleotide
  Sense strand starting at position 3051 of SEQ ID NO: 584786
uuauuauguuugucaggca

SEQ ID NO: 589205 - RNA, 19 nt, Artificial Sequence
  Description of Artificial Sequence: Synthetic oligonucleotide
  Antisense strand to SEQ ID NO: 589204
ugccugacaaacauaauaa

SEQ ID NO: 589206 - RNA, 19 nt, Artificial Sequence
  Description of Artificial Sequence: Synthetic oligonucleotide
  Sense strand starting at position 3084 of SEQ ID NO: 584786
gccuuuacauaggugugua

SEQ ID NO: 589207 - RNA, 19 nt, Artificial Sequence
  Description of Artificial Sequence: Synthetic oligonucleotide
  Antisense strand to SEQ ID NO: 589206
uacacaccuauguaaaggc

SEQ ID NO: 589208 - RNA, 19 nt, Artificial Sequence
  Description of Artificial Sequence: Synthetic oligonucleotide
  Sense strand starting at position 3097 of SEQ ID NO: 584786
uguguacagugcuugaaga

SEQ ID NO: 589209 - RNA, 19 nt, Artificial Sequence
  Description of Artificial Sequence: Synthetic oligonucleotide
  Antisense strand to SEQ ID NO: 589208
ucuucaagcacuguacaca

SEQ ID NO: 589210 - RNA, 19 nt, Artificial Sequence
  Description of Artificial Sequence: Synthetic oligonucleotide
  Sense strand starting at position 3098 of SEQ ID NO: 584786
guguacagugcuugaagaa

SEQ ID NO: 589211 - RNA, 19 nt, Artificial Sequence
  Description of Artificial Sequence: Synthetic oligonucleotide
  Antisense strand to SEQ ID NO: 589210
uucuucaagcacuguacac

SEQ ID NO: 589212 - RNA, 19 nt, Artificial Sequence
  Description of Artificial Sequence: Synthetic oligonucleotide
  Sense strand starting at position 3099 of SEQ ID NO: 584786
uguacagugcuugaagaag

SEQ ID NO: 589213 - RNA, 19 nt, Artificial Sequence
  Description of Artificial Sequence: Synthetic oligonucleotide
  Antisense strand to SEQ ID NO: 589212
cuucuucaagcacuguaca

SEQ ID NO: 589214 - RNA, 19 nt, Artificial Sequence
  Description of Artificial Sequence: Synthetic oligonucleotide
  Sense strand starting at position 3176 of SEQ ID NO: 584786
aucccucaacgucaagaau

SEQ ID NO: 589215 - RNA, 19 nt, Artificial Sequence
  Description of Artificial Sequence: Synthetic oligonucleotide
  Antisense strand to SEQ ID NO: 589214
auucuugacguugagggau

SEQ ID NO: 589216 - RNA, 19 nt, Artificial Sequence
  Description of Artificial Sequence: Synthetic oligonucleotide
  Sense strand starting at position 3434 of SEQ ID NO: 584786
cacugaugucuugaagguc

SEQ ID NO: 589217 - RNA, 19 nt, Artificial Sequence
  Description of Artificial Sequence: Synthetic oligonucleotide
  Antisense strand to SEQ ID NO: 589216
gaccuucaagacaucagug

SEQ ID NO: 589218 - RNA, 19 nt, Artificial Sequence
  Description of Artificial Sequence: Synthetic oligonucleotide
  Sense strand starting at position 3448 of SEQ ID NO: 584786
agguccauccgugaagguu

SEQ ID NO: 589219 - RNA, 19 nt, Artificial Sequence
  Description of Artificial Sequence: Synthetic oligonucleotide
  Antisense strand to SEQ ID NO: 589218
aaccuucacggauggaccu

SEQ ID NO: 589220 - RNA, 19 nt, Artificial Sequence
  Description of Artificial Sequence: Synthetic oligonucleotide
  Sense strand starting at position 3488 of SEQ ID NO: 584786
ucuguuaauguugauauac

SEQ ID NO: 589221 - RNA, 19 nt, Artificial Sequence
  Description of Artificial Sequence: Synthetic oligonucleotide
  Antisense strand to SEQ ID NO: 589220
guauaucaacauuaacaga

SEQ ID NO: 589222 - RNA, 19 nt, Artificial Sequence
  Description of Artificial Sequence: Synthetic oligonucleotide
  Sense strand starting at position 80 of SEQ ID NO: 584787
cagagcuuacuuugugacu

SEQ ID NO: 589223 - RNA, 19 nt, Artificial Sequence
  Description of Artificial Sequence: Synthetic oligonucleotide
  Antisense strand to SEQ ID NO: 589222
agucacaaaguaagcucug

SEQ ID NO: 589224 - RNA, 19 nt, Artificial Sequence
  Description of Artificial Sequence: Synthetic oligonucleotide
  Sense strand starting at position 111 of SEQ ID NO: 584787
agcauuaucucaugagauc

SEQ ID NO: 589225 - RNA, 19 nt, Artificial Sequence
  Description of Artificial Sequence: Synthetic oligonucleotide
  Antisense strand to SEQ ID NO: 589224
gaucucaugagauaaugcu

SEQ ID NO: 589226 - RNA, 19 nt, Artificial Sequence
  Description of Artificial Sequence: Synthetic oligonucleotide
  Sense strand starting at position 112 of SEQ ID NO: 584787
gcauuaucucaugagaucc

SEQ ID NO: 589227 - RNA, 19 nt, Artificial Sequence
  Description of Artificial Sequence: Synthetic oligonucleotide
  Antisense strand to SEQ ID NO: 589226
ggaucucaugagauaaugc

SEQ ID NO: 589228 - RNA, 19 nt, Artificial Sequence
  Description of Artificial Sequence: Synthetic oligonucleotide
  Sense strand starting at position 188 of SEQ ID NO: 584787
gcccaaauagguuaaguga

SEQ ID NO: 589229 - RNA, 19 nt, Artificial Sequence
  Description of Artificial Sequence: Synthetic oligonucleotide
  Antisense strand to SEQ ID NO: 589228
ucacuuaaccuauuugggc

SEQ ID NO: 589230 - RNA, 19 nt, Artificial Sequence
  Description of Artificial Sequence: Synthetic oligonucleotide
  Sense strand starting at position 201 of SEQ ID NO: 584787
aagugacuugucugaagug

SEQ ID NO: 589231 - RNA, 19 nt, Artificial Sequence
  Description of Artificial Sequence: Synthetic oligonucleotide
  Antisense strand to SEQ ID NO: 589230
cacuucagacaagucacuu

SEQ ID NO: 589232 - RNA, 19 nt, Artificial Sequence
  Description of Artificial Sequence: Synthetic oligonucleotide
  Sense strand starting at position 202 of SEQ ID NO: 584787
agugacuugucugaaguga

SEQ ID NO: 589233 - RNA, 19 nt, Artificial Sequence
  Description of Artificial Sequence: Synthetic oligonucleotide
  Antisense strand to SEQ ID NO: 589232
ucacuucagacaagucacu

SEQ ID NO: 589234 - RNA, 19 nt, Artificial Sequence
  Description of Artificial Sequence: Synthetic oligonucleotide
  Sense strand starting at position 206 of SEQ ID NO: 584787
acuugucugaagugauuga

SEQ ID NO: 589235 - RNA, 19 nt, Artificial Sequence
  Description of Artificial Sequence: Synthetic oligonucleotide
  Antisense strand to SEQ ID NO: 589234
ucaaucacuucagacaagu

SEQ ID NO: 589236 - RNA, 19 nt, Artificial Sequence
  Description of Artificial Sequence: Synthetic oligonucleotide
  Sense strand starting at position 207 of SEQ ID NO: 584787
cuugucugaagugauugaa

SEQ ID NO: 589237 - RNA, 19 nt, Artificial Sequence
  Description of Artificial Sequence: Synthetic oligonucleotide
  Antisense strand to SEQ ID NO: 589236
uucaaucacuucagacaag

SEQ ID NO: 589238 - RNA, 19 nt, Artificial Sequence
  Description of Artificial Sequence: Synthetic oligonucleotide
  Sense strand starting at position 210 of SEQ ID NO: 584787
gucugaagugauugaacca

SEQ ID NO: 589239 - RNA, 19 nt, Artificial Sequence
  Description of Artificial Sequence: Synthetic oligonucleotide
  Antisense strand to SEQ ID NO: 589238
ugguucaaucacuucagac

SEQ ID NO: 589240 - RNA, 19 nt, Artificial Sequence
  Description of Artificial Sequence: Synthetic oligonucleotide
  Sense strand starting at position 279 of SEQ ID NO: 584787
gcucuuaacuuugagguca

SEQ ID NO: 589241 - RNA, 19 nt, Artificial Sequence
  Description of Artificial Sequence: Synthetic oligonucleotide
  Antisense strand to SEQ ID NO: 589240
ugaccucaaaguuaagagc

SEQ ID NO: 589242 - RNA, 19 nt, Artificial Sequence
  Description of Artificial Sequence: Synthetic oligonucleotide
  Sense strand starting at position 281 of SEQ ID NO: 584787
ucuuaacuuugaggucacu

SEQ ID NO: 589243 - RNA, 19 nt, Artificial Sequence
  Description of Artificial Sequence: Synthetic oligonucleotide
  Antisense strand to SEQ ID NO: 589242
agugaccucaaaguuaaga

SEQ ID NO: 589244 - RNA, 19 nt, Artificial Sequence
  Description of Artificial Sequence: Synthetic oligonucleotide
  Sense strand starting at position 312 of SEQ ID NO: 584787
gguagugugcaugggaaga

SEQ ID NO: 589245 - RNA, 19 nt, Artificial Sequence
  Description of Artificial Sequence: Synthetic oligonucleotide
  Antisense strand to SEQ ID NO: 589244
ucuucccaugcacacuacc

SEQ ID NO: 589246 - RNA, 19 nt, Artificial Sequence
  Description of Artificial Sequence: Synthetic oligonucleotide
  Sense strand starting at position 2050 of SEQ ID NO: 584787
gcacauaugccucaugaau

SEQ ID NO: 589247 - RNA, 19 nt, Artificial Sequence
  Description of Artificial Sequence: Synthetic oligonucleotide
  Antisense strand to SEQ ID NO: 589246
auucaugaggcauaugugc

SEQ ID NO: 589248 - RNA, 19 nt, Artificial Sequence
  Description of Artificial Sequence: Synthetic oligonucleotide
  Sense strand starting at position 2526 of SEQ ID NO: 584787
cuaauaugguagccuaaac

SEQ ID NO: 589249 - RNA, 19 nt, Artificial Sequence
  Description of Artificial Sequence: Synthetic oligonucleotide
  Antisense strand to SEQ ID NO: 589248
guuuaggcuaccauauuag

SEQ ID NO: 589250 - RNA, 19 nt, Artificial Sequence
  Description of Artificial Sequence: Synthetic oligonucleotide
  Sense strand starting at position 2545 of SEQ ID NO: 584787
uuuauaaaggcuuggaaua

SEQ ID NO: 589251 - RNA, 19 nt, Artificial Sequence
  Description of Artificial Sequence: Synthetic oligonucleotide
  Antisense strand to SEQ ID NO: 589250
uauuccaagccuuuauaaa

SEQ ID NO: 589252 - RNA, 19 nt, Artificial Sequence
  Description of Artificial Sequence: Synthetic oligonucleotide
  Sense strand starting at position 2546 of SEQ ID NO: 584787
uuauaaaggcuuggaauau

SEQ ID NO: 589253 - RNA, 19 nt, Artificial Sequence
  Description of Artificial Sequence: Synthetic oligonucleotide
  Antisense strand to SEQ ID NO: 589252
auauuccaagccuuuauaa

SEQ ID NO: 589254 - RNA, 19 nt, Artificial Sequence
  Description of Artificial Sequence: Synthetic oligonucleotide
  Sense strand starting at position 2609 of SEQ ID NO: 584787
uugcgacuccuuuagcuaa

SEQ ID NO: 589255 - RNA, 19 nt, Artificial Sequence
  Description of Artificial Sequence: Synthetic oligonucleotide
  Antisense strand to SEQ ID NO: 589254
uuagcuaaaggagucgcaa

SEQ ID NO: 589256 - RNA, 19 nt, Artificial Sequence
  Description of Artificial Sequence: Synthetic oligonucleotide
  Sense strand starting at position 2612 of SEQ ID NO: 584787
cgacuccuuuagcuaaaga

SEQ ID NO: 589257 - RNA, 19 nt, Artificial Sequence
  Description of Artificial Sequence: Synthetic oligonucleotide
  Antisense strand to SEQ ID NO: 589256
ucuuuagcuaaaggagucg

SEQ ID NO: 589258 - RNA, 19 nt, Artificial Sequence
  Description of Artificial Sequence: Synthetic oligonucleotide
  Sense strand starting at position 2652 of SEQ ID NO: 584787
guuuauaucuucuuggcau

SEQ ID NO: 589259 - RNA, 19 nt, Artificial Sequence
  Description of Artificial Sequence: Synthetic oligonucleotide
  Antisense strand to SEQ ID NO: 589258
augccaagaagauauaaac

SEQ ID NO: 589260 - RNA, 19 nt, Artificial Sequence
  Description of Artificial Sequence: Synthetic oligonucleotide
  Sense strand starting at position 2695 of SEQ ID NO: 584787
aggugaucugucugcauua

SEQ ID NO: 589261 - RNA, 19 nt, Artificial Sequence
  Description of Artificial Sequence: Synthetic oligonucleotide
  Antisense strand to SEQ ID NO: 589260
uaaugcagacagaucaccu

SEQ ID NO: 589262 - RNA, 19 nt, Artificial Sequence
  Description of Artificial Sequence: Synthetic oligonucleotide
  Sense strand starting at position 2696 of SEQ ID NO: 584787
ggugaucugucugcauuaa

SEQ ID NO: 589263 - RNA, 19 nt, Artificial Sequence
  Description of Artificial Sequence: Synthetic oligonucleotide
  Antisense strand to SEQ ID NO: 589262
uuaaugcagacagaucacc

SEQ ID NO: 589264 - RNA, 19 nt, Artificial Sequence
  Description of Artificial Sequence: Synthetic oligonucleotide
  Sense strand starting at position 2697 of SEQ ID NO: 584787
gugaucugucugcauuaag

SEQ ID NO: 589265 - RNA, 19 nt, Artificial Sequence
  Description of Artificial Sequence: Synthetic oligonucleotide
  Antisense strand to SEQ ID NO: 589264
cuuaaugcagacagaucac

SEQ ID NO: 589266 - RNA, 19 nt, Artificial Sequence
  Description of Artificial Sequence: Synthetic oligonucleotide
  Sense strand starting at position 2700 of SEQ ID NO: 584787
aucugucugcauuaagaau

SEQ ID NO: 589267 - RNA, 19 nt, Artificial Sequence
  Description of Artificial Sequence: Synthetic oligonucleotide
  Antisense strand to SEQ ID NO: 589266
auucuuaaugcagacagau

SEQ ID NO: 589268 - RNA, 19 nt, Artificial Sequence
  Description of Artificial Sequence: Synthetic oligonucleotide
  Sense strand starting at position 3057 of SEQ ID NO: 584787
ugaguaucaggaugucuug

SEQ ID NO: 589269 - RNA, 19 nt, Artificial Sequence
  Description of Artificial Sequence: Synthetic oligonucleotide
  Antisense strand to SEQ ID NO: 589268
caagacauccugauacuca

SEQ ID NO: 589270 - RNA, 19 nt, Artificial Sequence
  Description of Artificial Sequence: Synthetic oligonucleotide
  Sense strand starting at position 3060 of SEQ ID NO: 584787
guaucaggaugucuugaaa

SEQ ID NO: 589271 - RNA, 19 nt, Artificial Sequence
  Description of Artificial Sequence: Synthetic oligonucleotide
  Antisense strand to SEQ ID NO: 589270
uuucaagacauccugauac

SEQ ID NO: 589272 - RNA, 19 nt, Artificial Sequence
  Description of Artificial Sequence: Synthetic oligonucleotide
  Sense strand starting at position 3063 of SEQ ID NO: 584787
ucaggaugucuugaaaguu

SEQ ID NO: 589273 - RNA, 19 nt, Artificial Sequence
  Description of Artificial Sequence: Synthetic oligonucleotide
  Antisense strand to SEQ ID NO: 589272
aacuuucaagacauccuga

SEQ ID NO: 589274 - RNA, 19 nt, Artificial Sequence
  Description of Artificial Sequence: Synthetic oligonucleotide
  Sense strand starting at position 3092 of SEQ ID NO: 584787
gaggacugagucuguuaca

SEQ ID NO: 589275 - RNA, 19 nt, Artificial Sequence
  Description of Artificial Sequence: Synthetic oligonucleotide
  Antisense strand to SEQ ID NO: 589274
uguaacagacucaguccuc

SEQ ID NO: 589276 - RNA, 19 nt, Artificial Sequence
  Description of Artificial Sequence: Synthetic oligonucleotide
  Sense strand starting at position 3300 of SEQ ID NO: 584787
gacaguuauuuguagggau

SEQ ID NO: 589277 - RNA, 19 nt, Artificial Sequence
  Description of Artificial Sequence: Synthetic oligonucleotide
  Antisense strand to SEQ ID NO: 589276
aucccuacaaauaacuguc

SEQ ID NO: 589278 - RNA, 19 nt, Artificial Sequence
  Description of Artificial Sequence: Synthetic oligonucleotide
  Sense strand starting at position 3303 of SEQ ID NO: 584787
aguuauuuguagggauuua

SEQ ID NO: 589279 - RNA, 19 nt, Artificial Sequence
  Description of Artificial Sequence: Synthetic oligonucleotide
  Antisense strand to SEQ ID NO: 589278
uaaaucccuacaaauaacu

SEQ ID NO: 589280 - RNA, 19 nt, Artificial Sequence
  Description of Artificial Sequence: Synthetic oligonucleotide
  Sense strand starting at position 3449 of SEQ ID NO: 584787
gccuguguaacacagugaa

SEQ ID NO: 589281 - RNA, 19 nt, Artificial Sequence
  Description of Artificial Sequence: Synthetic oligonucleotide
  Antisense strand to SEQ ID NO: 589280
uucacuguguuacacaggc

SEQ ID NO: 589282 - RNA, 19 nt, Artificial Sequence
  Description of Artificial Sequence: Synthetic oligonucleotide
  Sense strand starting at position 109 of SEQ ID NO: 584788
ucuacuagucacuggguua

SEQ ID NO: 589283 - RNA, 19 nt, Artificial Sequence
  Description of Artificial Sequence: Synthetic oligonucleotide
  Antisense strand to SEQ ID NO: 589282
uaacccagugacuaguaga

SEQ ID NO: 589284 - RNA, 19 nt, Artificial Sequence
  Description of Artificial Sequence: Synthetic oligonucleotide
  Sense strand starting at position 114 of SEQ ID NO: 584788
uagucacuggguuacuuaa

SEQ ID NO: 589285 - RNA, 19 nt, Artificial Sequence
  Description of Artificial Sequence: Synthetic oligonucleotide
  Antisense strand to SEQ ID NO: 589284
uuaaguaacccagugacua

SEQ ID NO: 589286 - RNA, 19 nt, Artificial Sequence
  Description of Artificial Sequence: Synthetic oligonucleotide
  Sense strand starting at position 121 of SEQ ID NO: 584788
uggguuacuuaagugucaa

SEQ ID NO: 589287 - RNA, 19 nt, Artificial Sequence
  Description of Artificial Sequence: Synthetic oligonucleotide
  Antisense strand to SEQ ID NO: 589286
uugacacuuaaguaaccca

SEQ ID NO: 589288 - RNA, 19 nt, Artificial Sequence
  Description of Artificial Sequence: Synthetic oligonucleotide
  Sense strand starting at position 122 of SEQ ID NO: 584788
ggguuacuuaagugucaac

SEQ ID NO: 589289 - RNA, 19 nt, Artificial Sequence
  Description of Artificial Sequence: Synthetic oligonucleotide
  Antisense strand to SEQ ID NO: 589288
guugacacuuaaguaaccc

SEQ ID NO: 589290 - RNA, 19 nt, Artificial Sequence
  Description of Artificial Sequence: Synthetic oligonucleotide
  Sense strand starting at position 380 of SEQ ID NO: 584788
uucuuaaugucuuuaggau

SEQ ID NO: 589291 - RNA, 19 nt, Artificial Sequence
  Description of Artificial Sequence: Synthetic oligonucleotide
  Antisense strand to SEQ ID NO: 589290
auccuaaagacauuaagaa

SEQ ID NO: 589292 - RNA, 19 nt, Artificial Sequence
  Description of Artificial Sequence: Synthetic oligonucleotide
  Sense strand starting at position 381 of SEQ ID NO: 584788
ucuuaaugucuuuaggauu

SEQ ID NO: 589293 - RNA, 19 nt, Artificial Sequence
  Description of Artificial Sequence: Synthetic oligonucleotide
  Antisense strand to SEQ ID NO: 589292
aauccuaaagacauuaaga

SEQ ID NO: 589294 - RNA, 19 nt, Artificial Sequence
  Description of Artificial Sequence: Synthetic oligonucleotide
  Sense strand starting at position 395 of SEQ ID NO: 584788
ggauuaaacuccucggaau

SEQ ID NO: 589295 - RNA, 19 nt, Artificial Sequence
  Description of Artificial Sequence: Synthetic oligonucleotide
  Antisense strand to SEQ ID NO: 589294
auuccgaggaguuuaaucc

SEQ ID NO: 589296 - RNA, 19 nt, Artificial Sequence
  Description of Artificial Sequence: Synthetic oligonucleotide
  Sense strand starting at position 396 of SEQ ID NO: 584788
gauuaaacuccucggaaug

SEQ ID NO: 589297 - RNA, 19 nt, Artificial Sequence
  Description of Artificial Sequence: Synthetic oligonucleotide
  Antisense strand to SEQ ID NO: 589296
cauuccgaggaguuuaauc

SEQ ID NO: 589298 - RNA, 19 nt, Artificial Sequence
  Description of Artificial Sequence: Synthetic oligonucleotide
  Sense strand starting at position 443 of SEQ ID NO: 584788
cugagcaucuuucugacuu

SEQ ID NO: 589299 - RNA, 19 nt, Artificial Sequence
  Description of Artificial Sequence: Synthetic oligonucleotide
  Antisense strand to SEQ ID NO: 589298
aagucagaaagaugcucag

SEQ ID NO: 589300 - RNA, 19 nt, Artificial Sequence
  Description of Artificial Sequence: Synthetic oligonucleotide
  Sense strand starting at position 777 of SEQ ID NO: 584788
gcaggaagauccuuuaaac

SEQ ID NO: 589301 - RNA, 19 nt, Artificial Sequence
  Description of Artificial Sequence: Synthetic oligonucleotide
  Antisense strand to SEQ ID NO: 589300
guuuaaaggaucuuccugc

SEQ ID NO: 589302 - RNA, 19 nt, Artificial Sequence
  Description of Artificial Sequence: Synthetic oligonucleotide
  Sense strand starting at position 922 of SEQ ID NO: 584788
ucccuuaccugucugagua

SEQ ID NO: 589303 - RNA, 19 nt, Artificial Sequence
  Description of Artificial Sequence: Synthetic oligonucleotide
  Antisense strand to SEQ ID NO: 589302
uacucagacagguaaggga

SEQ ID NO: 589304 - RNA, 19 nt, Artificial Sequence
  Description of Artificial Sequence: Synthetic oligonucleotide
  Sense strand starting at position 926 of SEQ ID NO: 584788
uuaccugucugaguagaug

SEQ ID NO: 589305 - RNA, 19 nt, Artificial Sequence
  Description of Artificial Sequence: Synthetic oligonucleotide
  Antisense strand to SEQ ID NO: 589304
caucuacucagacagguaa

SEQ ID NO: 589306 - RNA, 19 nt, Artificial Sequence
  Description of Artificial Sequence: Synthetic oligonucleotide
  Sense strand starting at position 1044 of SEQ ID NO: 584788
uggguugucccuugaggga

SEQ ID NO: 589307 - RNA, 19 nt, Artificial Sequence
  Description of Artificial Sequence: Synthetic oligonucleotide
  Antisense strand to SEQ ID NO: 589306
ucccucaagggacaaccca

SEQ ID NO: 589308 - RNA, 19 nt, Artificial Sequence
  Description of Artificial Sequence: Synthetic oligonucleotide
  Sense strand starting at position 1145 of SEQ ID NO: 584788
auuaguuacuguguaccua

SEQ ID NO: 589309 - RNA, 19 nt, Artificial Sequence
  Description of Artificial Sequence: Synthetic oligonucleotide
  Antisense strand to SEQ ID NO: 589308
uagguacacaguaacuaau

SEQ ID NO: 589310 - RNA, 19 nt, Artificial Sequence
  Description of Artificial Sequence: Synthetic oligonucleotide
  Sense strand starting at position 1169 of SEQ ID NO: 584788
guuaguuguguccauuuau

SEQ ID NO: 589311 - RNA, 19 nt, Artificial Sequence
  Description of Artificial Sequence: Synthetic oligonucleotide
  Antisense strand to SEQ ID NO: 589310
auaaauggacacaacuaac

SEQ ID NO: 589312 - RNA, 19 nt, Artificial Sequence
  Description of Artificial Sequence: Synthetic oligonucleotide
  Sense strand starting at position 1257 of SEQ ID NO: 584788
caguauauagagugcuuaa

SEQ ID NO: 589313 - RNA, 19 nt, Artificial Sequence
  Description of Artificial Sequence: Synthetic oligonucleotide
  Antisense strand to SEQ ID NO: 589312
uuaagcacucuauauacug

SEQ ID NO: 589314 - RNA, 19 nt, Artificial Sequence
  Description of Artificial Sequence: Synthetic oligonucleotide
  Sense strand starting at position 1403 of SEQ ID NO: 584788
gagucacccucucuugaga

SEQ ID NO: 589315 - RNA, 19 nt, Artificial Sequence
  Description of Artificial Sequence: Synthetic oligonucleotide
  Antisense strand to SEQ ID NO: 589314
ucucaagagagggugacuc

SEQ ID NO: 589316 - RNA, 19 nt, Artificial Sequence
  Description of Artificial Sequence: Synthetic oligonucleotide
  Sense strand starting at position 1482 of SEQ ID NO: 584788
cgaggcagggcucauauau

SEQ ID NO: 589317 - RNA, 19 nt, Artificial Sequence
  Description of Artificial Sequence: Synthetic oligonucleotide
  Antisense strand to SEQ ID NO: 589316
auauaugagcccugccucg

SEQ ID NO: 589318 - RNA, 19 nt, Artificial Sequence
  Description of Artificial Sequence: Synthetic oligonucleotide
  Sense strand starting at position 2222 of SEQ ID NO: 584788
guaugaaggaguugaggca

SEQ ID NO: 589319 - RNA, 19 nt, Artificial Sequence
  Description of Artificial Sequence: Synthetic oligonucleotide
  Antisense strand to SEQ ID NO: 589318
ugccucaacuccuucauac

SEQ ID NO: 589320 - RNA, 19 nt, Artificial Sequence
  Description of Artificial Sequence: Synthetic oligonucleotide
  Sense strand starting at position 2281 of SEQ ID NO: 584788
agcauauucuaguuucuau

SEQ ID NO: 589321 - RNA, 19 nt, Artificial Sequence
  Description of Artificial Sequence: Synthetic oligonucleotide
  Antisense strand to SEQ ID NO: 589320
auagaaacuagaauaugcu

SEQ ID NO: 589322 - RNA, 19 nt, Artificial Sequence
  Description of Artificial Sequence: Synthetic oligonucleotide
  Sense strand starting at position 2288 of SEQ ID NO: 584788
ucuaguuucuaucuguaac

SEQ ID NO: 589323 - RNA, 19 nt, Artificial Sequence
  Description of Artificial Sequence: Synthetic oligonucleotide
  Antisense strand to SEQ ID NO: 589322
guuacagauagaaacuaga

SEQ ID NO: 589324 - RNA, 19 nt, Artificial Sequence
  Description of Artificial Sequence: Synthetic oligonucleotide
  Sense strand starting at position 2313 of SEQ ID NO: 584788
cuaguucugccaccgcgau

SEQ ID NO: 589325 - RNA, 19 nt, Artificial Sequence
  Description of Artificial Sequence: Synthetic oligonucleotide
  Antisense strand to SEQ ID NO: 589324
aucgcgguggcagaacuag

SEQ ID NO: 589326 - RNA, 19 nt, Artificial Sequence
  Description of Artificial Sequence: Synthetic oligonucleotide
  Sense strand starting at position 2485 of SEQ ID NO: 584788
gcgagacugacugggucau

SEQ ID NO: 589327 - RNA, 19 nt, Artificial Sequence
  Description of Artificial Sequence: Synthetic oligonucleotide
  Antisense strand to SEQ ID NO: 589326
augacccagucagucucgc

SEQ ID NO: 589328 - RNA, 19 nt, Artificial Sequence
  Description of Artificial Sequence: Synthetic oligonucleotide
  Sense strand starting at position 2556 of SEQ ID NO: 584788
aguguugaaaugugucaca

SEQ ID NO: 589329 - RNA, 19 nt, Artificial Sequence
  Description of Artificial Sequence: Synthetic oligonucleotide
  Antisense strand to SEQ ID NO: 589328
ugugacacauuucaacacu

SEQ ID NO: 589330 - RNA, 19 nt, Artificial Sequence
  Description of Artificial Sequence: Synthetic oligonucleotide
  Sense strand starting at position 2901 of SEQ ID NO: 584788
uugccaccauugucugaau

SEQ ID NO: 589331 - RNA, 19 nt, Artificial Sequence
  Description of Artificial Sequence: Synthetic oligonucleotide
  Antisense strand to SEQ ID NO: 589330
auucagacaaugguggcaa

SEQ ID NO: 589332 - RNA, 19 nt, Artificial Sequence
  Description of Artificial Sequence: Synthetic oligonucleotide
  Sense strand starting at position 2966 of SEQ ID NO: 584788
cccaucaauguuugauaga

SEQ ID NO: 589333 - RNA, 19 nt, Artificial Sequence
  Description of Artificial Sequence: Synthetic oligonucleotide
  Antisense strand to SEQ ID NO: 589332
ucuaucaaacauugauggg

SEQ ID NO: 589334 - RNA, 19 nt, Artificial Sequence
  Description of Artificial Sequence: Synthetic oligonucleotide
  Sense strand starting at position 3054 of SEQ ID NO: 584788
ugggcuucuccugaagucu

SEQ ID NO: 589335 - RNA, 19 nt, Artificial Sequence
  Description of Artificial Sequence: Synthetic oligonucleotide
  Antisense strand to SEQ ID NO: 589334
agacuucaggagaagccca

SEQ ID NO: 589336 - RNA, 19 nt, Artificial Sequence
  Description of Artificial Sequence: Synthetic oligonucleotide
  Sense strand starting at position 3060 of SEQ ID NO: 584788
ucuccugaagucuaaaugu

SEQ ID NO: 589337 - RNA, 19 nt, Artificial Sequence
  Description of Artificial Sequence: Synthetic oligonucleotide
  Antisense strand to SEQ ID NO: 589336
acauuuagacuucaggaga

SEQ ID NO: 589338 - RNA, 19 nt, Artificial Sequence
  Description of Artificial Sequence: Synthetic oligonucleotide
  Sense strand starting at position 3091 of SEQ ID NO: 584788
gggcuaaaucuuugacacu

SEQ ID NO: 589339 - RNA, 19 nt, Artificial Sequence
  Description of Artificial Sequence: Synthetic oligonucleotide
  Antisense strand to SEQ ID NO: 589338
agugucaaagauuuagccc

SEQ ID NO: 589340 - RNA, 19 nt, Artificial Sequence
  Description of Artificial Sequence: Synthetic oligonucleotide
  Sense strand starting at position 3213 of SEQ ID NO: 584788
gagcuccaggcucaugaau

SEQ ID NO: 589341 - RNA, 19 nt, Artificial Sequence
  Description of Artificial Sequence: Synthetic oligonucleotide
  Antisense strand to SEQ ID NO: 589340
auucaugagccuggagcuc

SEQ ID NO: 589342 - RNA, 19 nt, Artificial Sequence
  Description of Artificial Sequence: Synthetic oligonucleotide
  Sense strand starting at position 3243 of SEQ ID NO: 584788
ugggacaucuucucugaga

SEQ ID NO: 589343 - RNA, 19 nt, Artificial Sequence
  Description of Artificial Sequence: Synthetic oligonucleotide
  Antisense strand to SEQ ID NO: 589342
ucucagagaagauguccca

SEQ ID NO: 589344 - RNA, 19 nt, Artificial Sequence
  Description of Artificial Sequence: Synthetic oligonucleotide
  Sense strand starting at position 3244 of SEQ ID NO: 584788
gggacaucuucucugagau

SEQ ID NO: 589345 - RNA, 19 nt, Artificial Sequence
  Description of Artificial Sequence: Synthetic oligonucleotide
  Antisense strand to SEQ ID NO: 589344
aucucagagaagauguccc

SEQ ID NO: 589346 - RNA, 19 nt, Artificial Sequence
  Description of Artificial Sequence: Synthetic oligonucleotide
  Sense strand starting at position 3384 of SEQ ID NO: 584788
acugaaaggucaucauccu

SEQ ID NO: 589347 - RNA, 19 nt, Artificial Sequence
  Description of Artificial Sequence: Synthetic oligonucleotide
  Antisense strand to SEQ ID NO: 589346
aggaugaugaccuuucagu

SEQ ID NO: 589348 - RNA, 19 nt, Artificial Sequence
  Description of Artificial Sequence: Synthetic oligonucleotide
  Sense strand starting at position 3441 of SEQ ID NO: 584788
agcuaagucugccucauuu

SEQ ID NO: 589349 - RNA, 19 nt, Artificial Sequence
  Description of Artificial Sequence: Synthetic oligonucleotide
  Antisense strand to SEQ ID NO: 589348
aaaugaggcagacuuagcu

SEQ ID NO: 589350 - RNA, 19 nt, Artificial Sequence
  Description of Artificial Sequence: Synthetic oligonucleotide
  Sense strand starting at position 3550 of SEQ ID NO: 584788
aaagaucucugauuagguu

SEQ ID NO: 589351 - RNA, 19 nt, Artificial Sequence
  Description of Artificial Sequence: Synthetic oligonucleotide
  Antisense strand to SEQ ID NO: 589350
aaccuaaucagagaucuuu

SEQ ID NO: 589352 - RNA, 19 nt, Artificial Sequence
  Description of Artificial Sequence: Synthetic oligonucleotide
  Sense strand starting at position 3729 of SEQ ID NO: 584788
gccuuucuagcauaagaaa

SEQ ID NO: 589353 - RNA, 19 nt, Artificial Sequence
  Description of Artificial Sequence: Synthetic oligonucleotide
  Antisense strand to SEQ ID NO: 589352
uuucuuaugcuagaaaggc

SEQ ID NO: 589354 - RNA, 19 nt, Artificial Sequence
  Description of Artificial Sequence: Synthetic oligonucleotide
  Sense strand starting at position 3753 of SEQ ID NO: 584788
ggaguaaagcccugugaca

SEQ ID NO: 589355 - RNA, 19 nt, Artificial Sequence
  Description of Artificial Sequence: Synthetic oligonucleotide
  Antisense strand to SEQ ID NO: 589354
ugucacagggcuuuacucc

SEQ ID NO: 589356 - RNA, 19 nt, Artificial Sequence
  Description of Artificial Sequence: Synthetic oligonucleotide
  Sense strand starting at position 3831 of SEQ ID NO: 584788
acgagugagccagaguugu

SEQ ID NO: 589357 - RNA, 19 nt, Artificial Sequence
  Description of Artificial Sequence: Synthetic oligonucleotide
  Antisense strand to SEQ ID NO: 589356
acaacucuggcucacucgu

SEQ ID NO: 589358 - RNA, 19 nt, Artificial Sequence
  Description of Artificial Sequence: Synthetic oligonucleotide
  Sense strand starting at position 3844 of SEQ ID NO: 584788
aguugugggaaaggugaaa

SEQ ID NO: 589359 - RNA, 19 nt, Artificial Sequence
  Description of Artificial Sequence: Synthetic oligonucleotide
  Antisense strand to SEQ ID NO: 589358
uuucaccuuucccacaacu

SEQ ID NO: 589360 - RNA, 19 nt, Artificial Sequence
  Description of Artificial Sequence: Synthetic oligonucleotide
  Sense strand starting at position 3956 of SEQ ID NO: 584788
gaguucugagcagagugau

SEQ ID NO: 589361 - RNA, 19 nt, Artificial Sequence
  Description of Artificial Sequence: Synthetic oligonucleotide
  Antisense strand to SEQ ID NO: 589360
aucacucugcucagaacuc

SEQ ID NO: 589362 - RNA, 19 nt, Artificial Sequence
  Description of Artificial Sequence: Synthetic oligonucleotide
  Sense strand starting at position 197 of SEQ ID NO: 584789
ugaccuuuccuguacaagu

SEQ ID NO: 589363 - RNA, 19 nt, Artificial Sequence
  Description of Artificial Sequence: Synthetic oligonucleotide
  Antisense strand to SEQ ID NO: 589362
acuuguacaggaaagguca

SEQ ID NO: 589364 - RNA, 19 nt, Artificial Sequence
  Description of Artificial Sequence: Synthetic oligonucleotide
  Sense strand starting at position 356 of SEQ ID NO: 584789
uggacaaccugagggauau

SEQ ID NO: 589365 - RNA, 19 nt, Artificial Sequence
  Description of Artificial Sequence: Synthetic oligonucleotide
  Antisense strand to SEQ ID NO: 589364
auaucccucagguugucca

SEQ ID NO: 589366 - RNA, 19 nt, Artificial Sequence
  Description of Artificial Sequence: Synthetic oligonucleotide
  Sense strand starting at position 368 of SEQ ID NO: 584789
gggauaucauaucauauuu

SEQ ID NO: 589367 - RNA, 19 nt, Artificial Sequence
  Description of Artificial Sequence: Synthetic oligonucleotide
  Antisense strand to SEQ ID NO: 589366
aaauaugauaugauauccc

SEQ ID NO: 589368 - RNA, 19 nt, Artificial Sequence
  Description of Artificial Sequence: Synthetic oligonucleotide
  Sense strand starting at position 377 of SEQ ID NO: 584789
uaucauauuugguguauga

SEQ ID NO: 589369 - RNA, 19 nt, Artificial Sequence
  Description of Artificial Sequence: Synthetic oligonucleotide
  Antisense strand to SEQ ID NO: 589368
ucauacaccaaauaugaua

SEQ ID NO: 589370 - RNA, 19 nt, Artificial Sequence
  Description of Artificial Sequence: Synthetic oligonucleotide
  Sense strand starting at position 414 of SEQ ID NO: 584789
ugcucaguauuuguugaaa

SEQ ID NO: 589371 - RNA, 19 nt, Artificial Sequence
  Description of Artificial Sequence: Synthetic oligonucleotide
  Antisense strand to SEQ ID NO: 589370
uuucaacaaauacugagca

SEQ ID NO: 589372 - RNA, 19 nt, Artificial Sequence
  Description of Artificial Sequence: Synthetic oligonucleotide
  Sense strand starting at position 446 of SEQ ID NO: 584789
uguaauggaggcugggaaa

SEQ ID NO: 589373 - RNA, 19 nt, Artificial Sequence
  Description of Artificial Sequence: Synthetic oligonucleotide
  Antisense strand to SEQ ID NO: 589372
uuucccagccuccauuaca

SEQ ID NO: 589374 - RNA, 19 nt, Artificial Sequence
  Description of Artificial Sequence: Synthetic oligonucleotide
  Sense strand starting at position 512 of SEQ ID NO: 584789
ugucuuccaucuccagaca

SEQ ID NO: 589375 - RNA, 19 nt, Artificial Sequence
  Description of Artificial Sequence: Synthetic oligonucleotide
  Antisense strand to SEQ ID NO: 589374
ugucuggagauggaagaca

SEQ ID NO: 589376 - RNA, 19 nt, Artificial Sequence
  Description of Artificial Sequence: Synthetic oligonucleotide
  Sense strand starting at position 513 of SEQ ID NO: 584789
gucuuccaucuccagacau

SEQ ID NO: 589377 - RNA, 19 nt, Artificial Sequence
  Description of Artificial Sequence: Synthetic oligonucleotide
  Antisense strand to SEQ ID NO: 589376
augucuggagauggaagac

SEQ ID NO: 589378 - RNA, 19 nt, Artificial Sequence
  Description of Artificial Sequence: Synthetic oligonucleotide
  Sense strand starting at position 556 of SEQ ID NO: 584789
cucucugucuacucaaguu

SEQ ID NO: 589379 - RNA, 19 nt, Artificial Sequence
  Description of Artificial Sequence: Synthetic oligonucleotide
  Antisense strand to SEQ ID NO: 589378
aacuugaguagacagagag

SEQ ID NO: 589380 - RNA, 19 nt, Artificial Sequence
  Description of Artificial Sequence: Synthetic oligonucleotide
  Sense strand starting at position 692 of SEQ ID NO: 584789
gguuaguugccagggagga

SEQ ID NO: 589381 - RNA, 19 nt, Artificial Sequence
  Description of Artificial Sequence: Synthetic oligonucleotide
  Antisense strand to SEQ ID NO: 589380
uccucccuggcaacuaacc

SEQ ID NO: 589382 - RNA, 19 nt, Artificial Sequence
  Description of Artificial Sequence: Synthetic oligonucleotide
  Sense strand starting at position 731 of SEQ ID NO: 584789
ggacuuagcaccugcagau

SEQ ID NO: 589383 - RNA, 19 nt, Artificial Sequence
  Description of Artificial Sequence: Synthetic oligonucleotide
  Antisense strand to SEQ ID NO: 589382
aucugcaggugcuaagucc

SEQ ID NO: 589384 - RNA, 19 nt, Artificial Sequence
  Description of Artificial Sequence: Synthetic oligonucleotide
  Sense strand starting at position 794 of SEQ ID NO: 584789
cagagaaagcagugcuaca

SEQ ID NO: 589385 - RNA, 19 nt, Artificial Sequence
  Description of Artificial Sequence: Synthetic oligonucleotide
  Antisense strand to SEQ ID NO: 589384
uguagcacugcuuucucug

SEQ ID NO: 589386 - RNA, 19 nt, Artificial Sequence
  Description of Artificial Sequence: Synthetic oligonucleotide
  Sense strand starting at position 952 of SEQ ID NO: 584789
acaggugggucugaaagau

SEQ ID NO: 589387 - RNA, 19 nt, Artificial Sequence
  Description of Artificial Sequence: Synthetic oligonucleotide
  Antisense strand to SEQ ID NO: 589386
aucuuucagacccaccugu

SEQ ID NO: 589388 - RNA, 19 nt, Artificial Sequence
  Description of Artificial Sequence: Synthetic oligonucleotide
  Sense strand starting at position 1009 of SEQ ID NO: 584789
ggaugcugucagcauguuu

SEQ ID NO: 589389 - RNA, 19 nt, Artificial Sequence
  Description of Artificial Sequence: Synthetic oligonucleotide
  Antisense strand to SEQ ID NO: 589388
aaacaugcugacagcaucc

SEQ ID NO: 589390 - RNA, 19 nt, Artificial Sequence
  Description of Artificial Sequence: Synthetic oligonucleotide
  Sense strand starting at position 1145 of SEQ ID NO: 584789
guucuagucucguugacua

SEQ ID NO: 589391 - RNA, 19 nt, Artificial Sequence
  Description of Artificial Sequence: Synthetic oligonucleotide
  Antisense strand to SEQ ID NO: 589390
uagucaacgagacuagaac

SEQ ID NO: 589392 - RNA, 19 nt, Artificial Sequence
  Description of Artificial Sequence: Synthetic oligonucleotide
  Sense strand starting at position 1362 of SEQ ID NO: 584789
aaggguuaguuugagaaga

SEQ ID NO: 589393 - RNA, 19 nt, Artificial Sequence
  Description of Artificial Sequence: Synthetic oligonucleotide
  Antisense strand to SEQ ID NO: 589392
ucuucucaaacuaacccuu

SEQ ID NO: 589394 - RNA, 19 nt, Artificial Sequence
  Description of Artificial Sequence: Synthetic oligonucleotide
  Sense strand starting at position 1364 of SEQ ID NO: 584789
ggguuaguuugagaagaaa

SEQ ID NO: 589395 - RNA, 19 nt, Artificial Sequence
  Description of Artificial Sequence: Synthetic oligonucleotide
  Antisense strand to SEQ ID NO: 589394
uuucuucucaaacuaaccc

SEQ ID NO: 589396 - RNA, 19 nt, Artificial Sequence
  Description of Artificial Sequence: Synthetic oligonucleotide
  Sense strand starting at position 1434 of SEQ ID NO: 584789
guaguugacuaagaagaga

SEQ ID NO: 589397 - RNA, 19 nt, Artificial Sequence
  Description of Artificial Sequence: Synthetic oligonucleotide
  Antisense strand to SEQ ID NO: 589396
ucucuucuuagucaacuac

SEQ ID NO: 589398 - RNA, 19 nt, Artificial Sequence
  Description of Artificial Sequence: Synthetic oligonucleotide
  Sense strand starting at position 1545 of SEQ ID NO: 584789
ccgccagcucuccagaaua

SEQ ID NO: 589399 - RNA, 19 nt, Artificial Sequence
  Description of Artificial Sequence: Synthetic oligonucleotide
  Antisense strand to SEQ ID NO: 589398
uauucuggagagcuggcgg

SEQ ID NO: 589400 - RNA, 19 nt, Artificial Sequence
  Description of Artificial Sequence: Synthetic oligonucleotide
  Sense strand starting at position 1547 of SEQ ID NO: 584789
gccagcucuccagaauaca

SEQ ID NO: 589401 - RNA, 19 nt, Artificial Sequence
  Description of Artificial Sequence: Synthetic oligonucleotide
  Antisense strand to SEQ ID NO: 589400
uguauucuggagagcuggc

SEQ ID NO: 589402 - RNA, 19 nt, Artificial Sequence
  Description of Artificial Sequence: Synthetic oligonucleotide
  Sense strand starting at position 1765 of SEQ ID NO: 584789
ggucucuucccgggacuca

SEQ ID NO: 589403 - RNA, 19 nt, Artificial Sequence
  Description of Artificial Sequence: Synthetic oligonucleotide
  Antisense strand to SEQ ID NO: 589402
ugagucccgggaagagacc

SEQ ID NO: 589404 - RNA, 19 nt, Artificial Sequence
  Description of Artificial Sequence: Synthetic oligonucleotide
  Sense strand starting at position 1766 of SEQ ID NO: 584789
gucucuucccgggacucaa

SEQ ID NO: 589405 - RNA, 19 nt, Artificial Sequence
  Description of Artificial Sequence: Synthetic oligonucleotide
  Antisense strand to SEQ ID NO: 589404
uugagucccgggaagagac

SEQ ID NO: 589406 - RNA, 19 nt, Artificial Sequence
  Description of Artificial Sequence: Synthetic oligonucleotide
  Sense strand starting at position 1915 of SEQ ID NO: 584789
gcgugacuuuaacucagga

SEQ ID NO: 589407 - RNA, 19 nt, Artificial Sequence
  Description of Artificial Sequence: Synthetic oligonucleotide
  Antisense strand to SEQ ID NO: 589406
uccugaguuaaagucacgc

SEQ ID NO: 589408 - RNA, 19 nt, Artificial Sequence
  Description of Artificial Sequence: Synthetic oligonucleotide
  Sense strand starting at position 1955 of SEQ ID NO: 584789
gcggauaacuggcuugaca

SEQ ID NO: 589409 - RNA, 19 nt, Artificial Sequence
  Description of Artificial Sequence: Synthetic oligonucleotide
  Antisense strand to SEQ ID NO: 589408
ugucaagccaguuauccgc

SEQ ID NO: 589410 - RNA, 19 nt, Artificial Sequence
  Description of Artificial Sequence: Synthetic oligonucleotide
  Sense strand starting at position 1957 of SEQ ID NO: 584789
ggauaacuggcuugacaag

SEQ ID NO: 589411 - RNA, 19 nt, Artificial Sequence
  Description of Artificial Sequence: Synthetic oligonucleotide
  Antisense strand to SEQ ID NO: 589410
cuugucaagccaguuaucc

SEQ ID NO: 589412 - RNA, 19 nt, Artificial Sequence
  Description of Artificial Sequence: Synthetic oligonucleotide
  Sense strand starting at position 2356 of SEQ ID NO: 584789
agaguuucgcgcaguugga

SEQ ID NO: 589413 - RNA, 19 nt, Artificial Sequence
  Description of Artificial Sequence: Synthetic oligonucleotide
  Antisense strand to SEQ ID NO: 589412
uccaacugcgcgaaacucu

SEQ ID NO: 589414 - RNA, 19 nt, Artificial Sequence
  Description of Artificial Sequence: Synthetic oligonucleotide
  Sense strand starting at position 2384 of SEQ ID NO: 584789
acagcagugguccgaaacu

SEQ ID NO: 589415 - RNA, 19 nt, Artificial Sequence
  Description of Artificial Sequence: Synthetic oligonucleotide
  Antisense strand to SEQ ID NO: 589414
aguuucggaccacugcugu

SEQ ID NO: 589416 - RNA, 19 nt, Artificial Sequence
  Description of Artificial Sequence: Synthetic oligonucleotide
  Sense strand starting at position 2412 of SEQ ID NO: 584789
ccacuagaacgcggagaau

SEQ ID NO: 589417 - RNA, 19 nt, Artificial Sequence
  Description of Artificial Sequence: Synthetic oligonucleotide
  Antisense strand to SEQ ID NO: 589416
auucuccgcguucuagugg

SEQ ID NO: 589418 - RNA, 19 nt, Artificial Sequence
  Description of Artificial Sequence: Synthetic oligonucleotide
  Sense strand starting at position 2468 of SEQ ID NO: 584789
gucucauuauuggcagacu

SEQ ID NO: 589419 - RNA, 19 nt, Artificial Sequence
  Description of Artificial Sequence: Synthetic oligonucleotide
  Antisense strand to SEQ ID NO: 589418
agucugccaauaaugagac

SEQ ID NO: 589420 - RNA, 19 nt, Artificial Sequence
  Description of Artificial Sequence: Synthetic oligonucleotide
  Sense strand starting at position 2471 of SEQ ID NO: 584789
ucauuauuggcagacucua

SEQ ID NO: 589421 - RNA, 19 nt, Artificial Sequence
  Description of Artificial Sequence: Synthetic oligonucleotide
  Antisense strand to SEQ ID NO: 589420
uagagucugccaauaauga

SEQ ID NO: 589422 - RNA, 19 nt, Artificial Sequence
  Description of Artificial Sequence: Synthetic oligonucleotide
  Sense strand starting at position 2519 of SEQ ID NO: 584789
aggaguacuugauaagagu

SEQ ID NO: 589423 - RNA, 19 nt, Artificial Sequence
  Description of Artificial Sequence: Synthetic oligonucleotide
  Antisense strand to SEQ ID NO: 589422
acucuuaucaaguacuccu

SEQ ID NO: 589424 - RNA, 19 nt, Artificial Sequence
  Description of Artificial Sequence: Synthetic oligonucleotide
  Sense strand starting at position 2545 of SEQ ID NO: 584789
aacauaaggugucuaggaa

SEQ ID NO: 589425 - RNA, 19 nt, Artificial Sequence
  Description of Artificial Sequence: Synthetic oligonucleotide
  Antisense strand to SEQ ID NO: 589424
uuccuagacaccuuauguu

SEQ ID NO: 589426 - RNA, 19 nt, Artificial Sequence
  Description of Artificial Sequence: Synthetic oligonucleotide
  Sense strand starting at position 2557 of SEQ ID NO: 584789
cuaggaauguaucuaguac

SEQ ID NO: 589427 - RNA, 19 nt, Artificial Sequence
  Description of Artificial Sequence: Synthetic oligonucleotide
  Antisense strand to SEQ ID NO: 589426
guacuagauacauuccuag

SEQ ID NO: 589428 - RNA, 19 nt, Artificial Sequence
  Description of Artificial Sequence: Synthetic oligonucleotide
  Sense strand starting at position 2561 of SEQ ID NO: 584789
gaauguaucuaguacaaga

SEQ ID NO: 589429 - RNA, 19 nt, Artificial Sequence
  Description of Artificial Sequence: Synthetic oligonucleotide
  Antisense strand to SEQ ID NO: 589428
ucuuguacuagauacauuc

SEQ ID NO: 589430 - RNA, 19 nt, Artificial Sequence
  Description of Artificial Sequence: Synthetic oligonucleotide
  Sense strand starting at position 3236 of SEQ ID NO: 584789
ggaguuugagaucgcucca

SEQ ID NO: 589431 - RNA, 19 nt, Artificial Sequence
  Description of Artificial Sequence: Synthetic oligonucleotide
  Antisense strand to SEQ ID NO: 589430
uggagcgaucucaaacucc

SEQ ID NO: 589432 - RNA, 19 nt, Artificial Sequence
  Description of Artificial Sequence: Synthetic oligonucleotide
  Sense strand starting at position 3399 of SEQ ID NO: 584789
acaguaagauaugcggaau

SEQ ID NO: 589433 - RNA, 19 nt, Artificial Sequence
  Description of Artificial Sequence: Synthetic oligonucleotide
  Antisense strand to SEQ ID NO: 589432
auuccgcauaucuuacugu

SEQ ID NO: 589434 - RNA, 19 nt, Artificial Sequence
  Description of Artificial Sequence: Synthetic oligonucleotide
  Sense strand starting at position 3402 of SEQ ID NO: 584789
guaagauaugcggaauauu

SEQ ID NO: 589435 - RNA, 19 nt, Artificial Sequence
  Description of Artificial Sequence: Synthetic oligonucleotide
  Antisense strand to SEQ ID NO: 589434
aauauuccgcauaucuuac

SEQ ID NO: 589436 - RNA, 19 nt, Artificial Sequence
  Description of Artificial Sequence: Synthetic oligonucleotide
  Sense strand starting at position 3446 of SEQ ID NO: 584789
uacuguuaugcaugaacug

SEQ ID NO: 589437 - RNA, 19 nt, Artificial Sequence
  Description of Artificial Sequence: Synthetic oligonucleotide
  Antisense strand to SEQ ID NO: 589436
caguucaugcauaacagua

SEQ ID NO: 589438 - RNA, 19 nt, Artificial Sequence
  Description of Artificial Sequence: Synthetic oligonucleotide
  Sense strand starting at position 3509 of SEQ ID NO: 584789
gaauguauacgugauacua

SEQ ID NO: 589439 - RNA, 19 nt, Artificial Sequence
  Description of Artificial Sequence: Synthetic oligonucleotide
  Antisense strand to SEQ ID NO: 589438
uaguaucacguauacauuc

SEQ ID NO: 589440 - RNA, 19 nt, Artificial Sequence
  Description of Artificial Sequence: Synthetic oligonucleotide
  Sense strand starting at position 3591 of SEQ ID NO: 584789
ucagaauugugguuacaca

SEQ ID NO: 589441 - RNA, 19 nt, Artificial Sequence
  Description of Artificial Sequence: Synthetic oligonucleotide
  Antisense strand to SEQ ID NO: 589440
uguguaaccacaauucuga

SEQ ID NO: 589442 - RNA, 19 nt, Artificial Sequence
  Description of Artificial Sequence: Synthetic oligonucleotide
  Sense strand starting at position 69 of SEQ ID NO: 584790
uggacaaccugagggauau

SEQ ID NO: 589443 - RNA, 19 nt, Artificial Sequence
  Description of Artificial Sequence: Synthetic oligonucleotide
  Antisense strand to SEQ ID NO: 589442
auaucccucagguugucca

SEQ ID NO: 589444 - RNA, 19 nt, Artificial Sequence
  Description of Artificial Sequence: Synthetic oligonucleotide
  Sense strand starting at position 81 of SEQ ID NO: 584790
gggauaucauaucauauuu

SEQ ID NO: 589445 - RNA, 19 nt, Artificial Sequence
  Description of Artificial Sequence: Synthetic oligonucleotide
  Antisense strand to SEQ ID NO: 589444
aaauaugauaugauauccc

SEQ ID NO: 589446 - RNA, 19 nt, Artificial Sequence
  Description of Artificial Sequence: Synthetic oligonucleotide
  Sense strand starting at position 90 of SEQ ID NO: 584790
uaucauauuugguguauga

SEQ ID NO: 589447 - RNA, 19 nt, Artificial Sequence
  Description of Artificial Sequence: Synthetic oligonucleotide
  Antisense strand to SEQ ID NO: 589446
ucauacaccaaauaugaua

SEQ ID NO: 589448 - RNA, 19 nt, Artificial Sequence
  Description of Artificial Sequence: Synthetic oligonucleotide
  Sense strand starting at position 127 of SEQ ID NO: 584790
ugcucaguauuuguugaaa

SEQ ID NO: 589449 - RNA, 19 nt, Artificial Sequence
  Description of Artificial Sequence: Synthetic oligonucleotide
  Antisense strand to SEQ ID NO: 589448
uuucaacaaauacugagca

SEQ ID NO: 589450 - RNA, 19 nt, Artificial Sequence
  Description of Artificial Sequence: Synthetic oligonucleotide
  Sense strand starting at position 159 of SEQ ID NO: 584790
uguaauggaggcugggaaa

SEQ ID NO: 589451 - RNA, 19 nt, Artificial Sequence
  Description of Artificial Sequence: Synthetic oligonucleotide
  Antisense strand to SEQ ID NO: 589450
uuucccagccuccauuaca

SEQ ID NO: 589452 - RNA, 19 nt, Artificial Sequence
  Description of Artificial Sequence: Synthetic oligonucleotide
  Sense strand starting at position 225 of SEQ ID NO: 584790
ugucuuccaucuccagaca

SEQ ID NO: 589453 - RNA, 19 nt, Artificial Sequence
  Description of Artificial Sequence: Synthetic oligonucleotide
  Antisense strand to SEQ ID NO: 589452
ugucuggagauggaagaca

SEQ ID NO: 589454 - RNA, 19 nt, Artificial Sequence
  Description of Artificial Sequence: Synthetic oligonucleotide
  Sense strand starting at position 226 of SEQ ID NO: 584790
gucuuccaucuccagacau

SEQ ID NO: 589455 - RNA, 19 nt, Artificial Sequence
  Description of Artificial Sequence: Synthetic oligonucleotide
  Antisense strand to SEQ ID NO: 589454
augucuggagauggaagac

SEQ ID NO: 589456 - RNA, 19 nt, Artificial Sequence
  Description of Artificial Sequence: Synthetic oligonucleotide
  Sense strand starting at position 269 of SEQ ID NO: 584790
cucucugucuacucaaguu

SEQ ID NO: 589457 - RNA, 19 nt, Artificial Sequence
  Description of Artificial Sequence: Synthetic oligonucleotide
  Antisense strand to SEQ ID NO: 589456
aacuugaguagacagagag

SEQ ID NO: 589458 - RNA, 19 nt, Artificial Sequence
  Description of Artificial Sequence: Synthetic oligonucleotide
  Sense strand starting at position 405 of SEQ ID NO: 584790
gguuaguugccagggagga

SEQ ID NO: 589459 - RNA, 19 nt, Artificial Sequence
  Description of Artificial Sequence: Synthetic oligonucleotide
  Antisense strand to SEQ ID NO: 589458
uccucccuggcaacuaacc

SEQ ID NO: 589460 - RNA, 19 nt, Artificial Sequence
  Description of Artificial Sequence: Synthetic oligonucleotide
  Sense strand starting at position 444 of SEQ ID NO: 584790
ggacuuagcaccugcagau

SEQ ID NO: 589461 - RNA, 19 nt, Artificial Sequence
  Description of Artificial Sequence: Synthetic oligonucleotide
  Antisense strand to SEQ ID NO: 589460
aucugcaggugcuaagucc

SEQ ID NO: 589462 - RNA, 19 nt, Artificial Sequence
  Description of Artificial Sequence: Synthetic oligonucleotide
  Sense strand starting at position 507 of SEQ ID NO: 584790
cagagaaagcagugcuaca

SEQ ID NO: 589463 - RNA, 19 nt, Artificial Sequence
  Description of Artificial Sequence: Synthetic oligonucleotide
  Antisense strand to SEQ ID NO: 589462
uguagcacugcuuucucug

SEQ ID NO: 589464 - RNA, 19 nt, Artificial Sequence
  Description of Artificial Sequence: Synthetic oligonucleotide
  Sense strand starting at position 665 of SEQ ID NO: 584790
acaggugggucugaaagau

SEQ ID NO: 589465 - RNA, 19 nt, Artificial Sequence
  Description of Artificial Sequence: Synthetic oligonucleotide
  Antisense strand to SEQ ID NO: 589464
aucuuucagacccaccugu

SEQ ID NO: 589466 - RNA, 19 nt, Artificial Sequence
  Description of Artificial Sequence: Synthetic oligonucleotide
  Sense strand starting at position 722 of SEQ ID NO: 584790
ggaugcugucagcauguuu

SEQ ID NO: 589467 - RNA, 19 nt, Artificial Sequence
  Description of Artificial Sequence: Synthetic oligonucleotide
  Antisense strand to SEQ ID NO: 589466
aaacaugcugacagcaucc

SEQ ID NO: 589468 - RNA, 19 nt, Artificial Sequence
  Description of Artificial Sequence: Synthetic oligonucleotide
  Sense strand starting at position 858 of SEQ ID NO: 584790
guucuagucucguugacua

SEQ ID NO: 589469 - RNA, 19 nt, Artificial Sequence
  Description of Artificial Sequence: Synthetic oligonucleotide
  Antisense strand to SEQ ID NO: 589468
uagucaacgagacuagaac

SEQ ID NO: 589470 - RNA, 19 nt, Artificial Sequence
  Description of Artificial Sequence: Synthetic oligonucleotide
  Sense strand starting at position 1075 of SEQ ID NO: 584790
aaggguuaguuugagaaga

SEQ ID NO: 589471 - RNA, 19 nt, Artificial Sequence
  Description of Artificial Sequence: Synthetic oligonucleotide
  Antisense strand to SEQ ID NO: 589470
ucuucucaaacuaacccuu

SEQ ID NO: 589472 - RNA, 19 nt, Artificial Sequence
  Description of Artificial Sequence: Synthetic oligonucleotide
  Sense strand starting at position 1077 of SEQ ID NO: 584790
ggguuaguuugagaagaaa

SEQ ID NO: 589473 - RNA, 19 nt, Artificial Sequence
  Description of Artificial Sequence: Synthetic oligonucleotide
  Antisense strand to SEQ ID NO: 589472
uuucuucucaaacuaaccc

SEQ ID NO: 589474 - RNA, 19 nt, Artificial Sequence
  Description of Artificial Sequence: Synthetic oligonucleotide
  Sense strand starting at position 1147 of SEQ ID NO: 584790
guaguugacuaagaagaga

SEQ ID NO: 589475 - RNA, 19 nt, Artificial Sequence
  Description of Artificial Sequence: Synthetic oligonucleotide
  Antisense strand to SEQ ID NO: 589474
ucucuucuuagucaacuac

SEQ ID NO: 589476 - RNA, 19 nt, Artificial Sequence
  Description of Artificial Sequence: Synthetic oligonucleotide
  Sense strand starting at position 1258 of SEQ ID NO: 584790
ccgccagcucuccagaaua

SEQ ID NO: 589477 - RNA, 19 nt, Artificial Sequence
  Description of Artificial Sequence: Synthetic oligonucleotide
  Antisense strand to SEQ ID NO: 589476
uauucuggagagcuggcgg

SEQ ID NO: 589478 - RNA, 19 nt, Artificial Sequence
  Description of Artificial Sequence: Synthetic oligonucleotide
  Sense strand starting at position 1260 of SEQ ID NO: 584790
gccagcucuccagaauaca

SEQ ID NO: 589479 - RNA, 19 nt, Artificial Sequence
  Description of Artificial Sequence: Synthetic oligonucleotide
  Antisense strand to SEQ ID NO: 589478
uguauucuggagagcuggc

SEQ ID NO: 589480 - RNA, 19 nt, Artificial Sequence
  Description of Artificial Sequence: Synthetic oligonucleotide
  Sense strand starting at position 1478 of SEQ ID NO: 584790
ggucucuucccgggacuca

SEQ ID NO: 589481 - RNA, 19 nt, Artificial Sequence
  Description of Artificial Sequence: Synthetic oligonucleotide
  Antisense strand to SEQ ID NO: 589480
ugagucccgggaagagacc

SEQ ID NO: 589482 - RNA, 19 nt, Artificial Sequence
  Description of Artificial Sequence: Synthetic oligonucleotide
  Sense strand starting at position 1479 of SEQ ID NO: 584790
gucucuucccgggacucaa

SEQ ID NO: 589483 - RNA, 19 nt, Artificial Sequence
  Description of Artificial Sequence: Synthetic oligonucleotide
  Antisense strand to SEQ ID NO: 589482
uugagucccgggaagagac

SEQ ID NO: 589484 - RNA, 19 nt, Artificial Sequence
  Description of Artificial Sequence: Synthetic oligonucleotide
  Sense strand starting at position 1628 of SEQ ID NO: 584790
gcgugacuuuaacucagga

SEQ ID NO: 589485 - RNA, 19 nt, Artificial Sequence
  Description of Artificial Sequence: Synthetic oligonucleotide
  Antisense strand to SEQ ID NO: 589484
uccugaguuaaagucacgc

SEQ ID NO: 589486 - RNA, 19 nt, Artificial Sequence
  Description of Artificial Sequence: Synthetic oligonucleotide
  Sense strand starting at position 1668 of SEQ ID NO: 584790
gcggauaacuggcuugaca

SEQ ID NO: 589487 - RNA, 19 nt, Artificial Sequence
  Description of Artificial Sequence: Synthetic oligonucleotide
  Antisense strand to SEQ ID NO: 589486
ugucaagccaguuauccgc

SEQ ID NO: 589488 - RNA, 19 nt, Artificial Sequence
  Description of Artificial Sequence: Synthetic oligonucleotide
  Sense strand starting at position 1670 of SEQ ID NO: 584790
ggauaacuggcuugacaag

SEQ ID NO: 589489 - RNA, 19 nt, Artificial Sequence
  Description of Artificial Sequence: Synthetic oligonucleotide
  Antisense strand to SEQ ID NO: 589488
cuugucaagccaguuaucc

SEQ ID NO: 589490 - RNA, 19 nt, Artificial Sequence
  Description of Artificial Sequence: Synthetic oligonucleotide
  Sense strand starting at position 2069 of SEQ ID NO: 584790
agaguuucgcgcaguugga

SEQ ID NO: 589491 - RNA, 19 nt, Artificial Sequence
  Description of Artificial Sequence: Synthetic oligonucleotide
  Antisense strand to SEQ ID NO: 589490
uccaacugcgcgaaacucu

SEQ ID NO: 589492 - RNA, 19 nt, Artificial Sequence
  Description of Artificial Sequence: Synthetic oligonucleotide
  Sense strand starting at position 2097 of SEQ ID NO: 584790
acagcagugguccgaaacu

SEQ ID NO: 589493 - RNA, 19 nt, Artificial Sequence
  Description of Artificial Sequence: Synthetic oligonucleotide
  Antisense strand to SEQ ID NO: 589492
aguuucggaccacugcugu

SEQ ID NO: 589494 - RNA, 19 nt, Artificial Sequence
  Description of Artificial Sequence: Synthetic oligonucleotide
  Sense strand starting at position 2125 of SEQ ID NO: 584790
ccacuagaacgcggagaau

SEQ ID NO: 589495 - RNA, 19 nt, Artificial Sequence
  Description of Artificial Sequence: Synthetic oligonucleotide
  Antisense strand to SEQ ID NO: 589494
auucuccgcguucuagugg

SEQ ID NO: 589496 - RNA, 19 nt, Artificial Sequence
  Description of Artificial Sequence: Synthetic oligonucleotide
  Sense strand starting at position 2181 of SEQ ID NO: 584790
gucucauuauuggcagacu

SEQ ID NO: 589497 - RNA, 19 nt, Artificial Sequence
  Description of Artificial Sequence: Synthetic oligonucleotide
  Antisense strand to SEQ ID NO: 589496
agucugccaauaaugagac

SEQ ID NO: 589498 - RNA, 19 nt, Artificial Sequence
  Description of Artificial Sequence: Synthetic oligonucleotide
  Sense strand starting at position 2184 of SEQ ID NO: 584790
ucauuauuggcagacucua

SEQ ID NO: 589499 - RNA, 19 nt, Artificial Sequence
  Description of Artificial Sequence: Synthetic oligonucleotide
  Antisense strand to SEQ ID NO: 589498
uagagucugccaauaauga

SEQ ID NO: 589500 - RNA, 19 nt, Artificial Sequence
  Description of Artificial Sequence: Synthetic oligonucleotide
  Sense strand starting at position 2232 of SEQ ID NO: 584790
aggaguacuugauaagagu

SEQ ID NO: 589501 - RNA, 19 nt, Artificial Sequence
  Description of Artificial Sequence: Synthetic oligonucleotide
  Antisense strand to SEQ ID NO: 589500
acucuuaucaaguacuccu

SEQ ID NO: 589502 - RNA, 19 nt, Artificial Sequence
  Description of Artificial Sequence: Synthetic oligonucleotide
  Sense strand starting at position 2258 of SEQ ID NO: 584790
aacauaaggugucuaggaa

SEQ ID NO: 589503 - RNA, 19 nt, Artificial Sequence
  Description of Artificial Sequence: Synthetic oligonucleotide
  Antisense strand to SEQ ID NO: 589502
uuccuagacaccuuauguu

SEQ ID NO: 589504 - RNA, 19 nt, Artificial Sequence
  Description of Artificial Sequence: Synthetic oligonucleotide
  Sense strand starting at position 2270 of SEQ ID NO: 584790
cuaggaauguaucuaguac

SEQ ID NO: 589505 - RNA, 19 nt, Artificial Sequence
  Description of Artificial Sequence: Synthetic oligonucleotide
  Antisense strand to SEQ ID NO: 589504
guacuagauacauuccuag

SEQ ID NO: 589506 - RNA, 19 nt, Artificial Sequence
  Description of Artificial Sequence: Synthetic oligonucleotide
  Sense strand starting at position 2949 of SEQ ID NO: 584790
ggaguuugagaucgcucca

SEQ ID NO: 589507 - RNA, 19 nt, Artificial Sequence
  Description of Artificial Sequence: Synthetic oligonucleotide
  Antisense strand to SEQ ID NO: 589506
uggagcgaucucaaacucc

SEQ ID NO: 589508 - RNA, 19 nt, Artificial Sequence
  Description of Artificial Sequence: Synthetic oligonucleotide
  Sense strand starting at position 3112 of SEQ ID NO: 584790
acaguaagauaugcggaau

SEQ ID NO: 589509 - RNA, 19 nt, Artificial Sequence
  Description of Artificial Sequence: Synthetic oligonucleotide
  Antisense strand to SEQ ID NO: 589508
auuccgcauaucuuacugu

SEQ ID NO: 589510 - RNA, 19 nt, Artificial Sequence
  Description of Artificial Sequence: Synthetic oligonucleotide
  Sense strand starting at position 3115 of SEQ ID NO: 584790
guaagauaugcggaauauu

SEQ ID NO: 589511 - RNA, 19 nt, Artificial Sequence
  Description of Artificial Sequence: Synthetic oligonucleotide
  Antisense strand to SEQ ID NO: 589510
aauauuccgcauaucuuac

SEQ ID NO: 589512 - RNA, 19 nt, Artificial Sequence
  Description of Artificial Sequence: Synthetic oligonucleotide
  Sense strand starting at position 3159 of SEQ ID NO: 584790
uacuguuaugcaugaacug

SEQ ID NO: 589513 - RNA, 19 nt, Artificial Sequence
  Description of Artificial Sequence: Synthetic oligonucleotide
  Antisense strand to SEQ ID NO: 589512
caguucaugcauaacagua

SEQ ID NO: 589514 - RNA, 19 nt, Artificial Sequence
  Description of Artificial Sequence: Synthetic oligonucleotide
  Sense strand starting at position 3222 of SEQ ID NO: 584790
gaauguauacgugauacua

SEQ ID NO: 589515 - RNA, 19 nt, Artificial Sequence
  Description of Artificial Sequence: Synthetic oligonucleotide
  Antisense strand to SEQ ID NO: 589514
uaguaucacguauacauuc

SEQ ID NO: 589516 - RNA, 19 nt, Artificial Sequence
  Description of Artificial Sequence: Synthetic oligonucleotide
  Sense strand starting at position 3304 of SEQ ID NO: 584790
ucagaauugugguuacaca

SEQ ID NO: 589517 - RNA, 19 nt, Artificial Sequence
  Description of Artificial Sequence: Synthetic oligonucleotide
  Antisense strand to SEQ ID NO: 589516
uguguaaccacaauucuga

SEQ ID NO: 589518 - RNA, 19 nt, Artificial Sequence
  Description of Artificial Sequence: Synthetic oligonucleotide
  Sense strand starting at position 3962 of SEQ ID NO: 584790
ccgaguccggccuggaaua

SEQ ID NO: 589519 - RNA, 19 nt, Artificial Sequence
  Description of Artificial Sequence: Synthetic oligonucleotide
  Antisense strand to SEQ ID NO: 589518
uauuccaggccggacucgg

SEQ ID NO: 589520 - RNA, 19 nt, Artificial Sequence
  Description of Artificial Sequence: Synthetic oligonucleotide
  Sense strand starting at position 3964 of SEQ ID NO: 584790
gaguccggccuggaauauu

SEQ ID NO: 589521 - RNA, 19 nt, Artificial Sequence
  Description of Artificial Sequence: Synthetic oligonucleotide
  Antisense strand to SEQ ID NO: 589520
aauauuccaggccggacuc

SEQ ID NO: 589522 - RNA, 19 nt, Artificial Sequence
  Description of Artificial Sequence: Synthetic oligonucleotide
  Sense strand starting at position 7 of SEQ ID NO: 584791
agcucuuaccaaggcagaa

SEQ ID NO: 589523 - RNA, 19 nt, Artificial Sequence
  Description of Artificial Sequence: Synthetic oligonucleotide
  Antisense strand to SEQ ID NO: 589522
uucugccuugguaagagcu

SEQ ID NO: 589524 - RNA, 19 nt, Artificial Sequence
  Description of Artificial Sequence: Synthetic oligonucleotide
  Sense strand starting at position 173 of SEQ ID NO: 584791
gugacacaauccuuuaaag

SEQ ID NO: 589525 - RNA, 19 nt, Artificial Sequence
  Description of Artificial Sequence: Synthetic oligonucleotide
  Antisense strand to SEQ ID NO: 589524
cuuuaaaggauugugucac

SEQ ID NO: 589526 - RNA, 19 nt, Artificial Sequence
  Description of Artificial Sequence: Synthetic oligonucleotide
  Sense strand starting at position 312 of SEQ ID NO: 584791
ugguguugcauugaucagu

SEQ ID NO: 589527 - RNA, 19 nt, Artificial Sequence
  Description of Artificial Sequence: Synthetic oligonucleotide
  Antisense strand to SEQ ID NO: 589526
acugaucaaugcaacacca

SEQ ID NO: 589528 - RNA, 19 nt, Artificial Sequence
  Description of Artificial Sequence: Synthetic oligonucleotide
  Sense strand starting at position 347 of SEQ ID NO: 584791
acauuaauggauuguacac

SEQ ID NO: 589529 - RNA, 19 nt, Artificial Sequence
  Description of Artificial Sequence: Synthetic oligonucleotide
  Antisense strand to SEQ ID NO: 589528
guguacaauccauuaaugu

SEQ ID NO: 589530 - RNA, 19 nt, Artificial Sequence
  Description of Artificial Sequence: Synthetic oligonucleotide
  Sense strand starting at position 379 of SEQ ID NO: 584791
aaagcaaguuaaguugaau

SEQ ID NO: 589531 - RNA, 19 nt, Artificial Sequence
  Description of Artificial Sequence: Synthetic oligonucleotide
  Antisense strand to SEQ ID NO: 589530
auucaacuuaacuugcuuu

SEQ ID NO: 589532 - RNA, 19 nt, Artificial Sequence
  Description of Artificial Sequence: Synthetic oligonucleotide
  Sense strand starting at position 382 of SEQ ID NO: 584791
gcaaguuaaguugaauguu

SEQ ID NO: 589533 - RNA, 19 nt, Artificial Sequence
  Description of Artificial Sequence: Synthetic oligonucleotide
  Antisense strand to SEQ ID NO: 589532
aacauucaacuuaacuugc

SEQ ID NO: 589534 - RNA, 19 nt, Artificial Sequence
  Description of Artificial Sequence: Synthetic oligonucleotide
  Sense strand starting at position 452 of SEQ ID NO: 584791
cugauuugguuauacgaau

SEQ ID NO: 589535 - RNA, 19 nt, Artificial Sequence
  Description of Artificial Sequence: Synthetic oligonucleotide
  Antisense strand to SEQ ID NO: 589534
auucguauaaccaaaucag

SEQ ID NO: 589536 - RNA, 19 nt, Artificial Sequence
  Description of Artificial Sequence: Synthetic oligonucleotide
  Sense strand starting at position 458 of SEQ ID NO: 584791
ugguuauacgaauguaaca

SEQ ID NO: 589537 - RNA, 19 nt, Artificial Sequence
  Description of Artificial Sequence: Synthetic oligonucleotide
  Antisense strand to SEQ ID NO: 589536
uguuacauucguauaacca

SEQ ID NO: 589538 - RNA, 19 nt, Artificial Sequence
  Description of Artificial Sequence: Synthetic oligonucleotide
  Sense strand starting at position 482 of SEQ ID NO: 584791
ucacgaguaccgugaaacu

SEQ ID NO: 589539 - RNA, 19 nt, Artificial Sequence
  Description of Artificial Sequence: Synthetic oligonucleotide
  Antisense strand to SEQ ID NO: 589538
aguuucacgguacucguga

SEQ ID NO: 589540 - RNA, 19 nt, Artificial Sequence
  Description of Artificial Sequence: Synthetic oligonucleotide
  Sense strand starting at position 491 of SEQ ID NO: 584791
ccgugaaacuaugucuaag

SEQ ID NO: 589541 - RNA, 19 nt, Artificial Sequence
  Description of Artificial Sequence: Synthetic oligonucleotide
  Antisense strand to SEQ ID NO: 589540
cuuagacauaguuucacgg

SEQ ID NO: 589542 - RNA, 19 nt, Artificial Sequence
  Description of Artificial Sequence: Synthetic oligonucleotide
  Sense strand starting at position 493 of SEQ ID NO: 584791
gugaaacuaugucuaagaa

SEQ ID NO: 589543 - RNA, 19 nt, Artificial Sequence
  Description of Artificial Sequence: Synthetic oligonucleotide
  Antisense strand to SEQ ID NO: 589542
uucuuagacauaguuucac

SEQ ID NO: 589544 - RNA, 19 nt, Artificial Sequence
  Description of Artificial Sequence: Synthetic oligonucleotide
  Sense strand starting at position 646 of SEQ ID NO: 584791
cuaauugucgcagaaucga

SEQ ID NO: 589545 - RNA, 19 nt, Artificial Sequence
  Description of Artificial Sequence: Synthetic oligonucleotide
  Antisense strand to SEQ ID NO: 589544
ucgauucugcgacaauuag

SEQ ID NO: 589546 - RNA, 19 nt, Artificial Sequence
  Description of Artificial Sequence: Synthetic oligonucleotide
  Sense strand starting at position 767 of SEQ ID NO: 584791
cccucagggcauuguuauu

SEQ ID NO: 589547 - RNA, 19 nt, Artificial Sequence
  Description of Artificial Sequence: Synthetic oligonucleotide
  Antisense strand to SEQ ID NO: 589546
aauaacaaugcccugaggg

SEQ ID NO: 589548 - RNA, 19 nt, Artificial Sequence
  Description of Artificial Sequence: Synthetic oligonucleotide
  Sense strand starting at position 798 of SEQ ID NO: 584791
ggaggcaaugcauggagau

SEQ ID NO: 589549 - RNA, 19 nt, Artificial Sequence
  Description of Artificial Sequence: Synthetic oligonucleotide
  Antisense strand to SEQ ID NO: 589548
aucuccaugcauugccucc

SEQ ID NO: 589550 - RNA, 19 nt, Artificial Sequence
  Description of Artificial Sequence: Synthetic oligonucleotide
  Sense strand starting at position 799 of SEQ ID NO: 584791
gaggcaaugcauggagauu

SEQ ID NO: 589551 - RNA, 19 nt, Artificial Sequence
  Description of Artificial Sequence: Synthetic oligonucleotide
  Antisense strand to SEQ ID NO: 589550
aaucuccaugcauugccuc

SEQ ID NO: 589552 - RNA, 19 nt, Artificial Sequence
  Description of Artificial Sequence: Synthetic oligonucleotide
  Sense strand starting at position 851 of SEQ ID NO: 584791
uagguauguccggaaucag

SEQ ID NO: 589553 - RNA, 19 nt, Artificial Sequence
  Description of Artificial Sequence: Synthetic oligonucleotide
  Antisense strand to SEQ ID NO: 589552
cugauuccggacauaccua

SEQ ID NO: 589554 - RNA, 19 nt, Artificial Sequence
  Description of Artificial Sequence: Synthetic oligonucleotide
  Sense strand starting at position 986 of SEQ ID NO: 584791
gcgcgcucacuccauauuu

SEQ ID NO: 589555 - RNA, 19 nt, Artificial Sequence
  Description of Artificial Sequence: Synthetic oligonucleotide
  Antisense strand to SEQ ID NO: 589554
aaauauggagugagcgcgc

SEQ ID NO: 589556 - RNA, 19 nt, Artificial Sequence
  Description of Artificial Sequence: Synthetic oligonucleotide
  Sense strand starting at position 2187 of SEQ ID NO: 584791
ucgauuuccugauggauuu

SEQ ID NO: 589557 - RNA, 19 nt, Artificial Sequence
  Description of Artificial Sequence: Synthetic oligonucleotide
  Antisense strand to SEQ ID NO: 589556
aaauccaucaggaaaucga

SEQ ID NO: 589558 - RNA, 19 nt, Artificial Sequence
  Description of Artificial Sequence: Synthetic oligonucleotide
  Sense strand starting at position 2203 of SEQ ID NO: 584791
uuucucucccaacguaaga

SEQ ID NO: 589559 - RNA, 19 nt, Artificial Sequence
  Description of Artificial Sequence: Synthetic oligonucleotide
  Antisense strand to SEQ ID NO: 589558
ucuuacguugggagagaaa

SEQ ID NO: 589560 - RNA, 19 nt, Artificial Sequence
  Description of Artificial Sequence: Synthetic oligonucleotide
  Sense strand starting at position 2252 of SEQ ID NO: 584791
cuagaaagaacguggcauu

SEQ ID NO: 589561 - RNA, 19 nt, Artificial Sequence
  Description of Artificial Sequence: Synthetic oligonucleotide
  Antisense strand to SEQ ID NO: 589560
aaugccacguucuuucuag

SEQ ID NO: 589562 - RNA, 19 nt, Artificial Sequence
  Description of Artificial Sequence: Synthetic oligonucleotide
  Sense strand starting at position 2393 of SEQ ID NO: 584791
ggacauagauaguuguuga

SEQ ID NO: 589563 - RNA, 19 nt, Artificial Sequence
  Description of Artificial Sequence: Synthetic oligonucleotide
  Antisense strand to SEQ ID NO: 589562
ucaacaacuaucuaugucc

SEQ ID NO: 589564 - RNA, 19 nt, Artificial Sequence
  Description of Artificial Sequence: Synthetic oligonucleotide
  Sense strand starting at position 2677 of SEQ ID NO: 584791
gagugaucgcgugacccaa

SEQ ID NO: 589565 - RNA, 19 nt, Artificial Sequence
  Description of Artificial Sequence: Synthetic oligonucleotide
  Antisense strand to SEQ ID NO: 589564
uugggucacgcgaucacuc

SEQ ID NO: 589566 - RNA, 19 nt, Artificial Sequence
  Description of Artificial Sequence: Synthetic oligonucleotide
  Sense strand starting at position 2707 of SEQ ID NO: 584791
ccgugauguagucaucauc

SEQ ID NO: 589567 - RNA, 19 nt, Artificial Sequence
  Description of Artificial Sequence: Synthetic oligonucleotide
  Antisense strand to SEQ ID NO: 589566
gaugaugacuacaucacgg

SEQ ID NO: 589568 - RNA, 19 nt, Artificial Sequence
  Description of Artificial Sequence: Synthetic oligonucleotide
  Sense strand starting at position 2717 of SEQ ID NO: 584791
gucaucauccugugaggug

SEQ ID NO: 589569 - RNA, 19 nt, Artificial Sequence
  Description of Artificial Sequence: Synthetic oligonucleotide
  Antisense strand to SEQ ID NO: 589568
caccucacaggaugaugac

SEQ ID NO: 589570 - RNA, 19 nt, Artificial Sequence
  Description of Artificial Sequence: Synthetic oligonucleotide
  Sense strand starting at position 2765 of SEQ ID NO: 584791
ggacucugauaguuaguaa

SEQ ID NO: 589571 - RNA, 19 nt, Artificial Sequence
  Description of Artificial Sequence: Synthetic oligonucleotide
  Antisense strand to SEQ ID NO: 589570
uuacuaacuaucagagucc

SEQ ID NO: 589572 - RNA, 19 nt, Artificial Sequence
  Description of Artificial Sequence: Synthetic oligonucleotide
  Sense strand starting at position 2833 of SEQ ID NO: 584791
agcugucugauguaagaga

SEQ ID NO: 589573 - RNA, 19 nt, Artificial Sequence
  Description of Artificial Sequence: Synthetic oligonucleotide
  Antisense strand to SEQ ID NO: 589572
ucucuuacaucagacagcu

SEQ ID NO: 589574 - RNA, 19 nt, Artificial Sequence
  Description of Artificial Sequence: Synthetic oligonucleotide
  Sense strand starting at position 3100 of SEQ ID NO: 584791
uagucuuuacggugaauac

SEQ ID NO: 589575 - RNA, 19 nt, Artificial Sequence
  Description of Artificial Sequence: Synthetic oligonucleotide
  Antisense strand to SEQ ID NO: 589574
guauucaccguaaagacua

SEQ ID NO: 589576 - RNA, 19 nt, Artificial Sequence
  Description of Artificial Sequence: Synthetic oligonucleotide
  Sense strand starting at position 3138 of SEQ ID NO: 584791
gaaggagucucuguucugu

SEQ ID NO: 589577 - RNA, 19 nt, Artificial Sequence
  Description of Artificial Sequence: Synthetic oligonucleotide
  Antisense strand to SEQ ID NO: 589576
acagaacagagacuccuuc

SEQ ID NO: 589578 - RNA, 19 nt, Artificial Sequence
  Description of Artificial Sequence: Synthetic oligonucleotide
  Sense strand starting at position 3140 of SEQ ID NO: 584791
aggagucucuguucuguaa

SEQ ID NO: 589579 - RNA, 19 nt, Artificial Sequence
  Description of Artificial Sequence: Synthetic oligonucleotide
  Antisense strand to SEQ ID NO: 589578
uuacagaacagagacuccu

SEQ ID NO: 589580 - RNA, 19 nt, Artificial Sequence
  Description of Artificial Sequence: Synthetic oligonucleotide
  Sense strand starting at position 3144 of SEQ ID NO: 584791
gucucuguucuguaaucuu

SEQ ID NO: 589581 - RNA, 19 nt, Artificial Sequence
  Description of Artificial Sequence: Synthetic oligonucleotide
  Antisense strand to SEQ ID NO: 589580
aagauuacagaacagagac

SEQ ID NO: 589582 - RNA, 19 nt, Artificial Sequence
  Description of Artificial Sequence: Synthetic oligonucleotide
  Sense strand starting at position 3162 of SEQ ID NO: 584791
ucaacaaaggucugauucu

SEQ ID NO: 589583 - RNA, 19 nt, Artificial Sequence
  Description of Artificial Sequence: Synthetic oligonucleotide
  Antisense strand to SEQ ID NO: 589582
agaaucagaccuuuguuga

SEQ ID NO: 589584 - RNA, 19 nt, Artificial Sequence
  Description of Artificial Sequence: Synthetic oligonucleotide
  Sense strand starting at position 3169 of SEQ ID NO: 584791
aggucugauucuucuaagu

SEQ ID NO: 589585 - RNA, 19 nt, Artificial Sequence
  Description of Artificial Sequence: Synthetic oligonucleotide
  Antisense strand to SEQ ID NO: 589584
acuuagaagaaucagaccu

SEQ ID NO: 589586 - RNA, 19 nt, Artificial Sequence
  Description of Artificial Sequence: Synthetic oligonucleotide
  Sense strand starting at position 3187 of SEQ ID NO: 584791
ugucucauggcagauaaag

SEQ ID NO: 589587 - RNA, 19 nt, Artificial Sequence
  Description of Artificial Sequence: Synthetic oligonucleotide
  Antisense strand to SEQ ID NO: 589586
cuuuaucugccaugagaca

SEQ ID NO: 589588 - RNA, 19 nt, Artificial Sequence
  Description of Artificial Sequence: Synthetic oligonucleotide
  Sense strand starting at position 3301 of SEQ ID NO: 584791
aaagaaaggugagaaguua

SEQ ID NO: 589589 - RNA, 19 nt, Artificial Sequence
  Description of Artificial Sequence: Synthetic oligonucleotide
  Antisense strand to SEQ ID NO: 589588
uaacuucucaccuuucuuu

SEQ ID NO: 589590 - RNA, 19 nt, Artificial Sequence
  Description of Artificial Sequence: Synthetic oligonucleotide
  Sense strand starting at position 3414 of SEQ ID NO: 584791
gccugugacagggaucaca

SEQ ID NO: 589591 - RNA, 19 nt, Artificial Sequence
  Description of Artificial Sequence: Synthetic oligonucleotide
  Antisense strand to SEQ ID NO: 589590
ugugaucccugucacaggc

SEQ ID NO: 589592 - RNA, 19 nt, Artificial Sequence
  Description of Artificial Sequence: Synthetic oligonucleotide
  Sense strand starting at position 3451 of SEQ ID NO: 584791
auccaaugauaggaauaau

SEQ ID NO: 589593 - RNA, 19 nt, Artificial Sequence
  Description of Artificial Sequence: Synthetic oligonucleotide
  Antisense strand to SEQ ID NO: 589592
auuauuccuaucauuggau

SEQ ID NO: 589594 - RNA, 19 nt, Artificial Sequence
  Description of Artificial Sequence: Synthetic oligonucleotide
  Sense strand starting at position 3488 of SEQ ID NO: 584791
uucuguuaugauuagguaa

SEQ ID NO: 589595 - RNA, 19 nt, Artificial Sequence
  Description of Artificial Sequence: Synthetic oligonucleotide
  Antisense strand to SEQ ID NO: 589594
uuaccuaaucauaacagaa

SEQ ID NO: 589596 - RNA, 19 nt, Artificial Sequence
  Description of Artificial Sequence: Synthetic oligonucleotide
  Sense strand starting at position 3545 of SEQ ID NO: 584791
agguuacuuuaccuaaaga

SEQ ID NO: 589597 - RNA, 19 nt, Artificial Sequence
  Description of Artificial Sequence: Synthetic oligonucleotide
  Antisense strand to SEQ ID NO: 589596
ucuuuagguaaaguaaccu

SEQ ID NO: 589598 - RNA, 19 nt, Artificial Sequence
  Description of Artificial Sequence: Synthetic oligonucleotide
  Sense strand starting at position 3564 of SEQ ID NO: 584791
aguaaacauccuuguuaau

SEQ ID NO: 589599 - RNA, 19 nt, Artificial Sequence
  Description of Artificial Sequence: Synthetic oligonucleotide
  Antisense strand to SEQ ID NO: 589598
auuaacaaggauguuuacu

SEQ ID NO: 589600 - RNA, 19 nt, Artificial Sequence
  Description of Artificial Sequence: Synthetic oligonucleotide
  Sense strand starting at position 3623 of SEQ ID NO: 584791
gugcuaaacuaaguauaac

SEQ ID NO: 589601 - RNA, 19 nt, Artificial Sequence
  Description of Artificial Sequence: Synthetic oligonucleotide
  Antisense strand to SEQ ID NO: 589600
guuauacuuaguuuagcac

SEQ ID NO: 589602 - RNA, 19 nt, Artificial Sequence
  Description of Artificial Sequence: Synthetic oligonucleotide
  Sense strand starting at position 673 of SEQ ID NO: 584792
gcaaguacugugggcagaa

SEQ ID NO: 589603 - RNA, 19 nt, Artificial Sequence
  Description of Artificial Sequence: Synthetic oligonucleotide
  Antisense strand to SEQ ID NO: 589602
uucugcccacaguacuugc

SEQ ID NO: 589604 - RNA, 19 nt, Artificial Sequence
  Description of Artificial Sequence: Synthetic oligonucleotide
  Sense strand starting at position 674 of SEQ ID NO: 584792
caaguacugugggcagaaa

SEQ ID NO: 589605 - RNA, 19 nt, Artificial Sequence
  Description of Artificial Sequence: Synthetic oligonucleotide
  Antisense strand to SEQ ID NO: 589604
uuucugcccacaguacuug

SEQ ID NO: 589606 - RNA, 19 nt, Artificial Sequence
  Description of Artificial Sequence: Synthetic oligonucleotide
  Sense strand starting at position 767 of SEQ ID NO: 584792
ggauacuugggccagaguu

SEQ ID NO: 589607 - RNA, 19 nt, Artificial Sequence
  Description of Artificial Sequence: Synthetic oligonucleotide
  Antisense strand to SEQ ID NO: 589606
aacucuggcccaaguaucc

SEQ ID NO: 589608 - RNA, 19 nt, Artificial Sequence
  Description of Artificial Sequence: Synthetic oligonucleotide
  Sense strand starting at position 1264 of SEQ ID NO: 584792
aguccucagccucaaugua

SEQ ID NO: 589609 - RNA, 19 nt, Artificial Sequence
  Description of Artificial Sequence: Synthetic oligonucleotide
  Antisense strand to SEQ ID NO: 589608
uacauugaggcugaggacu

SEQ ID NO: 589610 - RNA, 19 nt, Artificial Sequence
  Description of Artificial Sequence: Synthetic oligonucleotide
  Sense strand starting at position 1717 of SEQ ID NO: 584792
uuacccucagccugaaaga

SEQ ID NO: 589611 - RNA, 19 nt, Artificial Sequence
  Description of Artificial Sequence: Synthetic oligonucleotide
  Antisense strand to SEQ ID NO: 589610
ucuuucaggcugaggguaa

SEQ ID NO: 589612 - RNA, 19 nt, Artificial Sequence
  Description of Artificial Sequence: Synthetic oligonucleotide
  Sense strand starting at position 1988 of SEQ ID NO: 584792
ccguaaagugccuugccaa

SEQ ID NO: 589613 - RNA, 19 nt, Artificial Sequence
  Description of Artificial Sequence: Synthetic oligonucleotide
  Antisense strand to SEQ ID NO: 589612
uuggcaaggcacuuuacgg

SEQ ID NO: 589614 - RNA, 19 nt, Artificial Sequence
  Description of Artificial Sequence: Synthetic oligonucleotide
  Sense strand starting at position 2073 of SEQ ID NO: 584792
aggaaaugauugggcaaua

SEQ ID NO: 589615 - RNA, 19 nt, Artificial Sequence
  Description of Artificial Sequence: Synthetic oligonucleotide
  Antisense strand to SEQ ID NO: 589614
uauugcccaaucauuuccu

SEQ ID NO: 589616 - RNA, 19 nt, Artificial Sequence
  Description of Artificial Sequence: Synthetic oligonucleotide
  Sense strand starting at position 2151 of SEQ ID NO: 584792
ccugauucagagcguggaa

SEQ ID NO: 589617 - RNA, 19 nt, Artificial Sequence
  Description of Artificial Sequence: Synthetic oligonucleotide
  Antisense strand to SEQ ID NO: 589616
uuccacgcucugaaucagg

SEQ ID NO: 589618 - RNA, 19 nt, Artificial Sequence
  Description of Artificial Sequence: Synthetic oligonucleotide
  Sense strand starting at position 2204 of SEQ ID NO: 584792
cggucagaucuccaacuca

SEQ ID NO: 589619 - RNA, 19 nt, Artificial Sequence
  Description of Artificial Sequence: Synthetic oligonucleotide
  Antisense strand to SEQ ID NO: 589618
ugaguuggagaucugaccg

SEQ ID NO: 589620 - RNA, 19 nt, Artificial Sequence
  Description of Artificial Sequence: Synthetic oligonucleotide
  Sense strand starting at position 2275 of SEQ ID NO: 584792
acgccuugucgagacgcua

SEQ ID NO: 589621 - RNA, 19 nt, Artificial Sequence
  Description of Artificial Sequence: Synthetic oligonucleotide
  Antisense strand to SEQ ID NO: 589620
uagcgucucgacaaggcgu

SEQ ID NO: 589622 - RNA, 19 nt, Artificial Sequence
  Description of Artificial Sequence: Synthetic oligonucleotide
  Sense strand starting at position 2344 of SEQ ID NO: 584792
agaaguuucuauguguucu

SEQ ID NO: 589623 - RNA, 19 nt, Artificial Sequence
  Description of Artificial Sequence: Synthetic oligonucleotide
  Antisense strand to SEQ ID NO: 589622
agaacacauagaaacuucu

SEQ ID NO: 589624 - RNA, 19 nt, Artificial Sequence
  Description of Artificial Sequence: Synthetic oligonucleotide
  Sense strand starting at position 2354 of SEQ ID NO: 584792
auguguucuagcgaucaaa

SEQ ID NO: 589625 - RNA, 19 nt, Artificial Sequence
  Description of Artificial Sequence: Synthetic oligonucleotide
  Antisense strand to SEQ ID NO: 589624
uuugaucgcuagaacacau

SEQ ID NO: 589626 - RNA, 19 nt, Artificial Sequence
  Description of Artificial Sequence: Synthetic oligonucleotide
  Sense strand starting at position 2399 of SEQ ID NO: 584792
ugcgauuccagcugaggaa

SEQ ID NO: 589627 - RNA, 19 nt, Artificial Sequence
  Description of Artificial Sequence: Synthetic oligonucleotide
  Antisense strand to SEQ ID NO: 589626
uuccucagcuggaaucgca

SEQ ID NO: 589628 - RNA, 19 nt, Artificial Sequence
  Description of Artificial Sequence: Synthetic oligonucleotide
  Sense strand starting at position 2400 of SEQ ID NO: 584792
gcgauuccagcugaggaau

SEQ ID NO: 589629 - RNA, 19 nt, Artificial Sequence
  Description of Artificial Sequence: Synthetic oligonucleotide
  Antisense strand to SEQ ID NO: 589628
auuccucagcuggaaucgc

SEQ ID NO: 589630 - RNA, 19 nt, Artificial Sequence
  Description of Artificial Sequence: Synthetic oligonucleotide
  Sense strand starting at position 2656 of SEQ ID NO: 584792
aagaauuuguuuggcaucu

SEQ ID NO: 589631 - RNA, 19 nt, Artificial Sequence
  Description of Artificial Sequence: Synthetic oligonucleotide
  Antisense strand to SEQ ID NO: 589630
agaugccaaacaaauucuu

SEQ ID NO: 589632 - RNA, 19 nt, Artificial Sequence
  Description of Artificial Sequence: Synthetic oligonucleotide
  Sense strand starting at position 2658 of SEQ ID NO: 584792
gaauuuguuuggcaucuau

SEQ ID NO: 589633 - RNA, 19 nt, Artificial Sequence
  Description of Artificial Sequence: Synthetic oligonucleotide
  Antisense strand to SEQ ID NO: 589632
auagaugccaaacaaauuc

SEQ ID NO: 589634 - RNA, 19 nt, Artificial Sequence
  Description of Artificial Sequence: Synthetic oligonucleotide
  Sense strand starting at position 2671 of SEQ ID NO: 584792
aucuauuacacguguguau

SEQ ID NO: 589635 - RNA, 19 nt, Artificial Sequence
  Description of Artificial Sequence: Synthetic oligonucleotide
  Antisense strand to SEQ ID NO: 589634
auacacacguguaauagau

SEQ ID NO: 589636 - RNA, 19 nt, Artificial Sequence
  Description of Artificial Sequence: Synthetic oligonucleotide
  Sense strand starting at position 2673 of SEQ ID NO: 584792
cuauuacacguguguauug

SEQ ID NO: 589637 - RNA, 19 nt, Artificial Sequence
  Description of Artificial Sequence: Synthetic oligonucleotide
  Antisense strand to SEQ ID NO: 589636
caauacacacguguaauag

SEQ ID NO: 589638 - RNA, 19 nt, Artificial Sequence
  Description of Artificial Sequence: Synthetic oligonucleotide
  Sense strand starting at position 2675 of SEQ ID NO: 584792
auuacacguguguauugau

SEQ ID NO: 589639 - RNA, 19 nt, Artificial Sequence
  Description of Artificial Sequence: Synthetic oligonucleotide
  Antisense strand to SEQ ID NO: 589638
aucaauacacacguguaau

SEQ ID NO: 589640 - RNA, 19 nt, Artificial Sequence
  Description of Artificial Sequence: Synthetic oligonucleotide
  Sense strand starting at position 2793 of SEQ ID NO: 584792
cugggucuguccucagauu

SEQ ID NO: 589641 - RNA, 19 nt, Artificial Sequence
  Description of Artificial Sequence: Synthetic oligonucleotide
  Antisense strand to SEQ ID NO: 589640
aaucugaggacagacccag

SEQ ID NO: 589642 - RNA, 19 nt, Artificial Sequence
  Description of Artificial Sequence: Synthetic oligonucleotide
  Sense strand starting at position 3088 of SEQ ID NO: 584792
aaguaauccgguuagcuuu

SEQ ID NO: 589643 - RNA, 19 nt, Artificial Sequence
  Description of Artificial Sequence: Synthetic oligonucleotide
  Antisense strand to SEQ ID NO: 589642
aaagcuaaccggauuacuu

SEQ ID NO: 589644 - RNA, 19 nt, Artificial Sequence
  Description of Artificial Sequence: Synthetic oligonucleotide
  Sense strand starting at position 3124 of SEQ ID NO: 584792
cgaguuugaugacuaucaa

SEQ ID NO: 589645 - RNA, 19 nt, Artificial Sequence
  Description of Artificial Sequence: Synthetic oligonucleotide
  Antisense strand to SEQ ID NO: 589644
uugauagucaucaaacucg

SEQ ID NO: 589646 - RNA, 19 nt, Artificial Sequence
  Description of Artificial Sequence: Synthetic oligonucleotide
  Sense strand starting at position 3155 of SEQ ID NO: 584792
cuugcugcggccugacaaa

SEQ ID NO: 589647 - RNA, 19 nt, Artificial Sequence
  Description of Artificial Sequence: Synthetic oligonucleotide
  Antisense strand to SEQ ID NO: 589646
uuugucaggccgcagcaag

SEQ ID NO: 589648 - RNA, 19 nt, Artificial Sequence
  Description of Artificial Sequence: Synthetic oligonucleotide
  Sense strand starting at position 3223 of SEQ ID NO: 584792
gggaguaaauguguccacu

SEQ ID NO: 589649 - RNA, 19 nt, Artificial Sequence
  Description of Artificial Sequence: Synthetic oligonucleotide
  Antisense strand to SEQ ID NO: 589648
aguggacacauuuacuccc

SEQ ID NO: 589650 - RNA, 19 nt, Artificial Sequence
  Description of Artificial Sequence: Synthetic oligonucleotide
  Sense strand starting at position 3225 of SEQ ID NO: 584792
gaguaaauguguccacuau

SEQ ID NO: 589651 - RNA, 19 nt, Artificial Sequence
  Description of Artificial Sequence: Synthetic oligonucleotide
  Antisense strand to SEQ ID NO: 589650
auaguggacacauuuacuc

SEQ ID NO: 589652 - RNA, 19 nt, Artificial Sequence
  Description of Artificial Sequence: Synthetic oligonucleotide
  Sense strand starting at position 3226 of SEQ ID NO: 584792
aguaaauguguccacuauu

SEQ ID NO: 589653 - RNA, 19 nt, Artificial Sequence
  Description of Artificial Sequence: Synthetic oligonucleotide
  Antisense strand to SEQ ID NO: 589652
aauaguggacacauuuacu

SEQ ID NO: 589654 - RNA, 19 nt, Artificial Sequence
  Description of Artificial Sequence: Synthetic oligonucleotide
  Sense strand starting at position 3335 of SEQ ID NO: 584792
auaauagacuucucgaauu

SEQ ID NO: 589655 - RNA, 19 nt, Artificial Sequence
  Description of Artificial Sequence: Synthetic oligonucleotide
  Antisense strand to SEQ ID NO: 589654
aauucgagaagucuauuau

SEQ ID NO: 589656 - RNA, 19 nt, Artificial Sequence
  Description of Artificial Sequence: Synthetic oligonucleotide
  Sense strand starting at position 3384 of SEQ ID NO: 584792
agagaacuuucugucaggu

SEQ ID NO: 589657 - RNA, 19 nt, Artificial Sequence
  Description of Artificial Sequence: Synthetic oligonucleotide
  Antisense strand to SEQ ID NO: 589656
accugacagaaaguucucu

SEQ ID NO: 589658 - RNA, 19 nt, Artificial Sequence
  Description of Artificial Sequence: Synthetic oligonucleotide
  Sense strand starting at position 3438 of SEQ ID NO: 584792
guacgaugagagcgauaaa

SEQ ID NO: 589659 - RNA, 19 nt, Artificial Sequence
  Description of Artificial Sequence: Synthetic oligonucleotide
  Antisense strand to SEQ ID NO: 589658
uuuaucgcucucaucguac

SEQ ID NO: 589660 - RNA, 19 nt, Artificial Sequence
  Description of Artificial Sequence: Synthetic oligonucleotide
  Sense strand starting at position 3441 of SEQ ID NO: 584792
cgaugagagcgauaaacuc

SEQ ID NO: 589661 - RNA, 19 nt, Artificial Sequence
  Description of Artificial Sequence: Synthetic oligonucleotide
  Antisense strand to SEQ ID NO: 589660
gaguuuaucgcucucaucg

SEQ ID NO: 589662 - RNA, 19 nt, Artificial Sequence
  Description of Artificial Sequence: Synthetic oligonucleotide
  Sense strand starting at position 3449 of SEQ ID NO: 584792
gcgauaaacuccgucuacu

SEQ ID NO: 589663 - RNA, 19 nt, Artificial Sequence
  Description of Artificial Sequence: Synthetic oligonucleotide
  Antisense strand to SEQ ID NO: 589662
aguagacggaguuuaucgc

SEQ ID NO: 589664 - RNA, 19 nt, Artificial Sequence
  Description of Artificial Sequence: Synthetic oligonucleotide
  Sense strand starting at position 3567 of SEQ ID NO: 584792
gggcaugauggaugcaaga

SEQ ID NO: 589665 - RNA, 19 nt, Artificial Sequence
  Description of Artificial Sequence: Synthetic oligonucleotide
  Antisense strand to SEQ ID NO: 589664
ucuugcauccaucaugccc

SEQ ID NO: 589666 - RNA, 19 nt, Artificial Sequence
  Description of Artificial Sequence: Synthetic oligonucleotide
  Sense strand starting at position 3569 of SEQ ID NO: 584792
gcaugauggaugcaagagu

SEQ ID NO: 589667 - RNA, 19 nt, Artificial Sequence
  Description of Artificial Sequence: Synthetic oligonucleotide
  Antisense strand to SEQ ID NO: 589666
acucuugcauccaucaugc

SEQ ID NO: 589668 - RNA, 19 nt, Artificial Sequence
  Description of Artificial Sequence: Synthetic oligonucleotide
  Sense strand starting at position 3580 of SEQ ID NO: 584792
gcaagagugucgguaaguu

SEQ ID NO: 589669 - RNA, 19 nt, Artificial Sequence
  Description of Artificial Sequence: Synthetic oligonucleotide
  Antisense strand to SEQ ID NO: 589668
aacuuaccgacacucuugc

SEQ ID NO: 589670 - RNA, 19 nt, Artificial Sequence
  Description of Artificial Sequence: Synthetic oligonucleotide
  Sense strand starting at position 3590 of SEQ ID NO: 584792
cgguaaguugugccagugu

SEQ ID NO: 589671 - RNA, 19 nt, Artificial Sequence
  Description of Artificial Sequence: Synthetic oligonucleotide
  Antisense strand to SEQ ID NO: 589670
acacuggcacaacuuaccg

SEQ ID NO: 589672 - RNA, 19 nt, Artificial Sequence
  Description of Artificial Sequence: Synthetic oligonucleotide
  Sense strand starting at position 3710 of SEQ ID NO: 584792
gugcuaaaggaccgugaaa

SEQ ID NO: 589673 - RNA, 19 nt, Artificial Sequence
  Description of Artificial Sequence: Synthetic oligonucleotide
  Antisense strand to SEQ ID NO: 589672
uuucacgguccuuuagcac

SEQ ID NO: 589674 - RNA, 19 nt, Artificial Sequence
  Description of Artificial Sequence: Synthetic oligonucleotide
  Sense strand starting at position 3797 of SEQ ID NO: 584792
ccuucucaacuuggugaaa

SEQ ID NO: 589675 - RNA, 19 nt, Artificial Sequence
  Description of Artificial Sequence: Synthetic oligonucleotide
  Antisense strand to SEQ ID NO: 589674
uuucaccaaguugagaagg

SEQ ID NO: 589676 - RNA, 19 nt, Artificial Sequence
  Description of Artificial Sequence: Synthetic oligonucleotide
  Sense strand starting at position 3824 of SEQ ID NO: 584792
ccacucaacugucugugaa

SEQ ID NO: 589677 - RNA, 19 nt, Artificial Sequence
  Description of Artificial Sequence: Synthetic oligonucleotide
  Antisense strand to SEQ ID NO: 589676
uucacagacaguugagugg

SEQ ID NO: 589678 - RNA, 19 nt, Artificial Sequence
  Description of Artificial Sequence: Synthetic oligonucleotide
  Sense strand starting at position 3825 of SEQ ID NO: 584792
cacucaacugucugugaag

SEQ ID NO: 589679 - RNA, 19 nt, Artificial Sequence
  Description of Artificial Sequence: Synthetic oligonucleotide
  Antisense strand to SEQ ID NO: 589678
cuucacagacaguugagug

SEQ ID NO: 589680 - RNA, 19 nt, Artificial Sequence
  Description of Artificial Sequence: Synthetic oligonucleotide
  Sense strand starting at position 3922 of SEQ ID NO: 584792
acaugcguucuccaaguuu

SEQ ID NO: 589681 - RNA, 19 nt, Artificial Sequence
  Description of Artificial Sequence: Synthetic oligonucleotide
  Antisense strand to SEQ ID NO: 589680
aaacuuggagaacgcaugu

SEQ ID NO: 589682 - RNA, 19 nt, Artificial Sequence
  Description of Artificial Sequence: Synthetic oligonucleotide
  Sense strand starting at position 352 of SEQ ID NO: 584793
gguguaggucaguggucua

SEQ ID NO: 589683 - RNA, 19 nt, Artificial Sequence
  Description of Artificial Sequence: Synthetic oligonucleotide
  Antisense strand to SEQ ID NO: 589682
uagaccacugaccuacacc

SEQ ID NO: 589684 - RNA, 19 nt, Artificial Sequence
  Description of Artificial Sequence: Synthetic oligonucleotide
  Sense strand starting at position 355 of SEQ ID NO: 584793
guaggucaguggucuaagu

SEQ ID NO: 589685 - RNA, 19 nt, Artificial Sequence
  Description of Artificial Sequence: Synthetic oligonucleotide
  Antisense strand to SEQ ID NO: 589684
acuuagaccacugaccuac

SEQ ID NO: 589686 - RNA, 19 nt, Artificial Sequence
  Description of Artificial Sequence: Synthetic oligonucleotide
  Sense strand starting at position 357 of SEQ ID NO: 584793
aggucaguggucuaaguuc

SEQ ID NO: 589687 - RNA, 19 nt, Artificial Sequence
  Description of Artificial Sequence: Synthetic oligonucleotide
  Antisense strand to SEQ ID NO: 589686
gaacuuagaccacugaccu

SEQ ID NO: 589688 - RNA, 19 nt, Artificial Sequence
  Description of Artificial Sequence: Synthetic oligonucleotide
  Sense strand starting at position 686 of SEQ ID NO: 584793
ccaagaagcugagucucaa

SEQ ID NO: 589689 - RNA, 19 nt, Artificial Sequence
  Description of Artificial Sequence: Synthetic oligonucleotide
  Antisense strand to SEQ ID NO: 589688
uugagacucagcuucuugg

SEQ ID NO: 589690 - RNA, 19 nt, Artificial Sequence
  Description of Artificial Sequence: Synthetic oligonucleotide
  Sense strand starting at position 696 of SEQ ID NO: 584793
gagucucaagcuggauaga

SEQ ID NO: 589691 - RNA, 19 nt, Artificial Sequence
  Description of Artificial Sequence: Synthetic oligonucleotide
  Antisense strand to SEQ ID NO: 589690
ucuauccagcuugagacuc

SEQ ID NO: 589692 - RNA, 19 nt, Artificial Sequence
  Description of Artificial Sequence: Synthetic oligonucleotide
  Sense strand starting at position 788 of SEQ ID NO: 584793
gaggcaagaacuugaguga

SEQ ID NO: 589693 - RNA, 19 nt, Artificial Sequence
  Description of Artificial Sequence: Synthetic oligonucleotide
  Antisense strand to SEQ ID NO: 589692
ucacucaaguucuugccuc

SEQ ID NO: 589694 - RNA, 19 nt, Artificial Sequence
  Description of Artificial Sequence: Synthetic oligonucleotide
  Sense strand starting at position 792 of SEQ ID NO: 584793
caagaacuugagugaguga

SEQ ID NO: 589695 - RNA, 19 nt, Artificial Sequence
  Description of Artificial Sequence: Synthetic oligonucleotide
  Antisense strand to SEQ ID NO: 589694
ucacucacucaaguucuug

SEQ ID NO: 589696 - RNA, 19 nt, Artificial Sequence
  Description of Artificial Sequence: Synthetic oligonucleotide
  Sense strand starting at position 875 of SEQ ID NO: 584793
cugacuucuccuggaauca

SEQ ID NO: 589697 - RNA, 19 nt, Artificial Sequence
  Description of Artificial Sequence: Synthetic oligonucleotide
  Antisense strand to SEQ ID NO: 589696
ugauuccaggagaagucag

SEQ ID NO: 589698 - RNA, 19 nt, Artificial Sequence
  Description of Artificial Sequence: Synthetic oligonucleotide
  Sense strand starting at position 1393 of SEQ ID NO: 584793
acuucuagccauuguguga

SEQ ID NO: 589699 - RNA, 19 nt, Artificial Sequence
  Description of Artificial Sequence: Synthetic oligonucleotide
  Antisense strand to SEQ ID NO: 589698
ucacacaauggcuagaagu

SEQ ID NO: 589700 - RNA, 19 nt, Artificial Sequence
  Description of Artificial Sequence: Synthetic oligonucleotide
  Sense strand starting at position 2261 of SEQ ID NO: 584793
aucuuaggguuucucgaaa

SEQ ID NO: 589701 - RNA, 19 nt, Artificial Sequence
  Description of Artificial Sequence: Synthetic oligonucleotide
  Antisense strand to SEQ ID NO: 589700
uuucgagaaacccuaagau

SEQ ID NO: 589702 - RNA, 19 nt, Artificial Sequence
  Description of Artificial Sequence: Synthetic oligonucleotide
  Sense strand starting at position 2268 of SEQ ID NO: 584793
gguuucucgaaacaguaaa

SEQ ID NO: 589703 - RNA, 19 nt, Artificial Sequence
  Description of Artificial Sequence: Synthetic oligonucleotide
  Antisense strand to SEQ ID NO: 589702
uuuacuguuucgagaaacc

SEQ ID NO: 589704 - RNA, 19 nt, Artificial Sequence
  Description of Artificial Sequence: Synthetic oligonucleotide
  Sense strand starting at position 2513 of SEQ ID NO: 584793
gaucaacucuggcugugaa

SEQ ID NO: 589705 - RNA, 19 nt, Artificial Sequence
  Description of Artificial Sequence: Synthetic oligonucleotide
  Antisense strand to SEQ ID NO: 589704
uucacagccagaguugauc

SEQ ID NO: 589706 - RNA, 19 nt, Artificial Sequence
  Description of Artificial Sequence: Synthetic oligonucleotide
  Sense strand starting at position 2548 of SEQ ID NO: 584793
gagcgucuuagcgucacaa

SEQ ID NO: 589707 - RNA, 19 nt, Artificial Sequence
  Description of Artificial Sequence: Synthetic oligonucleotide
  Antisense strand to SEQ ID NO: 589706
uugugacgcuaagacgcuc

SEQ ID NO: 589708 - RNA, 19 nt, Artificial Sequence
  Description of Artificial Sequence: Synthetic oligonucleotide
  Sense strand starting at position 2549 of SEQ ID NO: 584793
agcgucuuagcgucacaaa

SEQ ID NO: 589709 - RNA, 19 nt, Artificial Sequence
  Description of Artificial Sequence: Synthetic oligonucleotide
  Antisense strand to SEQ ID NO: 589708
uuugugacgcuaagacgcu

SEQ ID NO: 589710 - RNA, 19 nt, Artificial Sequence
  Description of Artificial Sequence: Synthetic oligonucleotide
  Sense strand starting at position 2593 of SEQ ID NO: 584793
gugaaaggagcauguaaca

SEQ ID NO: 589711 - RNA, 19 nt, Artificial Sequence
  Description of Artificial Sequence: Synthetic oligonucleotide
  Antisense strand to SEQ ID NO: 589710
uguuacaugcuccuuucac

SEQ ID NO: 589712 - RNA, 19 nt, Artificial Sequence
  Description of Artificial Sequence: Synthetic oligonucleotide
  Sense strand starting at position 2652 of SEQ ID NO: 584793
gccucuuacugggcaaagu

SEQ ID NO: 589713 - RNA, 19 nt, Artificial Sequence
  Description of Artificial Sequence: Synthetic oligonucleotide
  Antisense strand to SEQ ID NO: 589712
acuuugcccaguaagaggc

SEQ ID NO: 589714 - RNA, 19 nt, Artificial Sequence
  Description of Artificial Sequence: Synthetic oligonucleotide
  Sense strand starting at position 2653 of SEQ ID NO: 584793
ccucuuacugggcaaaguu

SEQ ID NO: 589715 - RNA, 19 nt, Artificial Sequence
  Description of Artificial Sequence: Synthetic oligonucleotide
  Antisense strand to SEQ ID NO: 589714
aacuuugcccaguaagagg

SEQ ID NO: 589716 - RNA, 19 nt, Artificial Sequence
  Description of Artificial Sequence: Synthetic oligonucleotide
  Sense strand starting at position 2739 of SEQ ID NO: 584793
uugggaacaccuggauagu

SEQ ID NO: 589717 - RNA, 19 nt, Artificial Sequence
  Description of Artificial Sequence: Synthetic oligonucleotide
  Antisense strand to SEQ ID NO: 589716
acuauccagguguucccaa

SEQ ID NO: 589718 - RNA, 19 nt, Artificial Sequence
  Description of Artificial Sequence: Synthetic oligonucleotide
  Sense strand starting at position 2761 of SEQ ID NO: 584793
acaagaaagcuuugucaca

SEQ ID NO: 589719 - RNA, 19 nt, Artificial Sequence
  Description of Artificial Sequence: Synthetic oligonucleotide
  Antisense strand to SEQ ID NO: 589718
ugugacaaagcuuucuugu

SEQ ID NO: 589720 - RNA, 19 nt, Artificial Sequence
  Description of Artificial Sequence: Synthetic oligonucleotide
  Sense strand starting at position 2812 of SEQ ID NO: 584793
ggagaaucuuccugaagaa

SEQ ID NO: 589721 - RNA, 19 nt, Artificial Sequence
  Description of Artificial Sequence: Synthetic oligonucleotide
  Antisense strand to SEQ ID NO: 589720
uucuucaggaagauucucc

SEQ ID NO: 589722 - RNA, 19 nt, Artificial Sequence
  Description of Artificial Sequence: Synthetic oligonucleotide
  Sense strand starting at position 2831 of SEQ ID NO: 584793
cuuuaaaguugauugaaag

SEQ ID NO: 589723 - RNA, 19 nt, Artificial Sequence
  Description of Artificial Sequence: Synthetic oligonucleotide
  Antisense strand to SEQ ID NO: 589722
cuuucaaucaacuuuaaag

SEQ ID NO: 589724 - RNA, 19 nt, Artificial Sequence
  Description of Artificial Sequence: Synthetic oligonucleotide
  Sense strand starting at position 2872 of SEQ ID NO: 584793
acauuaagacuuugcagag

SEQ ID NO: 589725 - RNA, 19 nt, Artificial Sequence
  Description of Artificial Sequence: Synthetic oligonucleotide
  Antisense strand to SEQ ID NO: 589724
cucugcaaagucuuaaugu

SEQ ID NO: 589726 - RNA, 19 nt, Artificial Sequence
  Description of Artificial Sequence: Synthetic oligonucleotide
  Sense strand starting at position 2886 of SEQ ID NO: 584793
cagagauaugcggaugggu

SEQ ID NO: 589727 - RNA, 19 nt, Artificial Sequence
  Description of Artificial Sequence: Synthetic oligonucleotide
  Antisense strand to SEQ ID NO: 589726
acccauccgcauaucucug

SEQ ID NO: 589728 - RNA, 19 nt, Artificial Sequence
  Description of Artificial Sequence: Synthetic oligonucleotide
  Sense strand starting at position 2888 of SEQ ID NO: 584793
gagauaugcggauggguca

SEQ ID NO: 589729 - RNA, 19 nt, Artificial Sequence
  Description of Artificial Sequence: Synthetic oligonucleotide
  Antisense strand to SEQ ID NO: 589728
ugacccauccgcauaucuc

SEQ ID NO: 589730 - RNA, 19 nt, Artificial Sequence
  Description of Artificial Sequence: Synthetic oligonucleotide
  Sense strand starting at position 2968 of SEQ ID NO: 584793
auugcauaacagugcaauu

SEQ ID NO: 589731 - RNA, 19 nt, Artificial Sequence
  Description of Artificial Sequence: Synthetic oligonucleotide
  Antisense strand to SEQ ID NO: 589730
aauugcacuguuaugcaau

SEQ ID NO: 589732 - RNA, 19 nt, Artificial Sequence
  Description of Artificial Sequence: Synthetic oligonucleotide
  Sense strand starting at position 3017 of SEQ ID NO: 584793
ggugaaaucagcugucuac

SEQ ID NO: 589733 - RNA, 19 nt, Artificial Sequence
  Description of Artificial Sequence: Synthetic oligonucleotide
  Antisense strand to SEQ ID NO: 589732
guagacagcugauuucacc

SEQ ID NO: 589734 - RNA, 19 nt, Artificial Sequence
  Description of Artificial Sequence: Synthetic oligonucleotide
  Sense strand starting at position 3027 of SEQ ID NO: 584793
gcugucuacucugcuaaga

SEQ ID NO: 589735 - RNA, 19 nt, Artificial Sequence
  Description of Artificial Sequence: Synthetic oligonucleotide
  Antisense strand to SEQ ID NO: 589734
ucuuagcagaguagacagc

SEQ ID NO: 589736 - RNA, 19 nt, Artificial Sequence
  Description of Artificial Sequence: Synthetic oligonucleotide
  Sense strand starting at position 3106 of SEQ ID NO: 584793
aucugaguccaaggaauuc

SEQ ID NO: 589737 - RNA, 19 nt, Artificial Sequence
  Description of Artificial Sequence: Synthetic oligonucleotide
  Antisense strand to SEQ ID NO: 589736
gaauuccuuggacucagau

SEQ ID NO: 589738 - RNA, 19 nt, Artificial Sequence
  Description of Artificial Sequence: Synthetic oligonucleotide
  Sense strand starting at position 3191 of SEQ ID NO: 584793
gagucuuugugggcuuacu

SEQ ID NO: 589739 - RNA, 19 nt, Artificial Sequence
  Description of Artificial Sequence: Synthetic oligonucleotide
  Antisense strand to SEQ ID NO: 589738
aguaagcccacaaagacuc

SEQ ID NO: 589740 - RNA, 19 nt, Artificial Sequence
  Description of Artificial Sequence: Synthetic oligonucleotide
  Sense strand starting at position 3251 of SEQ ID NO: 584793
accagcucccuggguaaua

SEQ ID NO: 589741 - RNA, 19 nt, Artificial Sequence
  Description of Artificial Sequence: Synthetic oligonucleotide
  Antisense strand to SEQ ID NO: 589740
uauuacccagggagcuggu

SEQ ID NO: 589742 - RNA, 19 nt, Artificial Sequence
  Description of Artificial Sequence: Synthetic oligonucleotide
  Sense strand starting at position 3271 of SEQ ID NO: 584793
cagucauuccuacggcauc

SEQ ID NO: 589743 - RNA, 19 nt, Artificial Sequence
  Description of Artificial Sequence: Synthetic oligonucleotide
  Antisense strand to SEQ ID NO: 589742
gaugccguaggaaugacug

SEQ ID NO: 589744 - RNA, 19 nt, Artificial Sequence
  Description of Artificial Sequence: Synthetic oligonucleotide
  Sense strand starting at position 3274 of SEQ ID NO: 584793
ucauuccuacggcaucaau

SEQ ID NO: 589745 - RNA, 19 nt, Artificial Sequence
  Description of Artificial Sequence: Synthetic oligonucleotide
  Antisense strand to SEQ ID NO: 589744
auugaugccguaggaauga

SEQ ID NO: 589746 - RNA, 19 nt, Artificial Sequence
  Description of Artificial Sequence: Synthetic oligonucleotide
  Sense strand starting at position 3730 of SEQ ID NO: 584793
ccuguuucuucuguaaucu

SEQ ID NO: 589747 - RNA, 19 nt, Artificial Sequence
  Description of Artificial Sequence: Synthetic oligonucleotide
  Antisense strand to SEQ ID NO: 589746
agauuacagaagaaacagg

SEQ ID NO: 589748 - RNA, 19 nt, Artificial Sequence
  Description of Artificial Sequence: Synthetic oligonucleotide
  Sense strand starting at position 3739 of SEQ ID NO: 584793
ucuguaaucucagugagca

SEQ ID NO: 589749 - RNA, 19 nt, Artificial Sequence
  Description of Artificial Sequence: Synthetic oligonucleotide
  Antisense strand to SEQ ID NO: 589748
ugcucacugagauuacaga

SEQ ID NO: 589750 - RNA, 19 nt, Artificial Sequence
  Description of Artificial Sequence: Synthetic oligonucleotide
  Sense strand starting at position 3740 of SEQ ID NO: 584793
cuguaaucucagugagcag

SEQ ID NO: 589751 - RNA, 19 nt, Artificial Sequence
  Description of Artificial Sequence: Synthetic oligonucleotide
  Antisense strand to SEQ ID NO: 589750
cugcucacugagauuacag

SEQ ID NO: 589752 - RNA, 19 nt, Artificial Sequence
  Description of Artificial Sequence: Synthetic oligonucleotide
  Sense strand starting at position 3741 of SEQ ID NO: 584793
uguaaucucagugagcagu

SEQ ID NO: 589753 - RNA, 19 nt, Artificial Sequence
  Description of Artificial Sequence: Synthetic oligonucleotide
  Antisense strand to SEQ ID NO: 589752
acugcucacugagauuaca

SEQ ID NO: 589754 - RNA, 19 nt, Artificial Sequence
  Description of Artificial Sequence: Synthetic oligonucleotide
  Sense strand starting at position 3747 of SEQ ID NO: 584793
cucagugagcagugaaacu

SEQ ID NO: 589755 - RNA, 19 nt, Artificial Sequence
  Description of Artificial Sequence: Synthetic oligonucleotide
  Antisense strand to SEQ ID NO: 589754
aguuucacugcucacugag

SEQ ID NO: 589756 - RNA, 19 nt, Artificial Sequence
  Description of Artificial Sequence: Synthetic oligonucleotide
  Sense strand starting at position 3758 of SEQ ID NO: 584793
gugaaacuaucuucuguua

SEQ ID NO: 589757 - RNA, 19 nt, Artificial Sequence
  Description of Artificial Sequence: Synthetic oligonucleotide
  Antisense strand to SEQ ID NO: 589756
uaacagaagauaguuucac

SEQ ID NO: 589758 - RNA, 19 nt, Artificial Sequence
  Description of Artificial Sequence: Synthetic oligonucleotide
  Sense strand starting at position 3895 of SEQ ID NO: 584793
uguaauuccuaguuuaucu

SEQ ID NO: 589759 - RNA, 19 nt, Artificial Sequence
  Description of Artificial Sequence: Synthetic oligonucleotide
  Antisense strand to SEQ ID NO: 589758
agauaaacuaggaauuaca

SEQ ID NO: 589760 - RNA, 19 nt, Artificial Sequence
  Description of Artificial Sequence: Synthetic oligonucleotide
  Sense strand starting at position 3930 of SEQ ID NO: 584793
acauaagcuuuccaagaug

SEQ ID NO: 589761 - RNA, 19 nt, Artificial Sequence
  Description of Artificial Sequence: Synthetic oligonucleotide
  Antisense strand to SEQ ID NO: 589760
caucuuggaaagcuuaugu

SEQ ID NO: 589762 - RNA, 19 nt, Artificial Sequence
  Description of Artificial Sequence: Synthetic oligonucleotide
  Sense strand starting at position 168 of SEQ ID NO: 584794
accucugauugguugcaaa

SEQ ID NO: 589763 - RNA, 19 nt, Artificial Sequence
  Description of Artificial Sequence: Synthetic oligonucleotide
  Antisense strand to SEQ ID NO: 589762
uuugcaaccaaucagaggu

SEQ ID NO: 589764 - RNA, 19 nt, Artificial Sequence
  Description of Artificial Sequence: Synthetic oligonucleotide
  Sense strand starting at position 203 of SEQ ID NO: 584794
agaaguaaguuaucccuua

SEQ ID NO: 589765 - RNA, 19 nt, Artificial Sequence
  Description of Artificial Sequence: Synthetic oligonucleotide
  Antisense strand to SEQ ID NO: 589764
uaagggauaacuuacuucu

SEQ ID NO: 589766 - RNA, 19 nt, Artificial Sequence
  Description of Artificial Sequence: Synthetic oligonucleotide
  Sense strand starting at position 255 of SEQ ID NO: 584794
uucccauaggaguguaacu

SEQ ID NO: 589767 - RNA, 19 nt, Artificial Sequence
  Description of Artificial Sequence: Synthetic oligonucleotide
  Antisense strand to SEQ ID NO: 589766
aguuacacuccuaugggaa

SEQ ID NO: 589768 - RNA, 19 nt, Artificial Sequence
  Description of Artificial Sequence: Synthetic oligonucleotide
  Sense strand starting at position 257 of SEQ ID NO: 584794
cccauaggaguguaacuau

SEQ ID NO: 589769 - RNA, 19 nt, Artificial Sequence
  Description of Artificial Sequence: Synthetic oligonucleotide
  Antisense strand to SEQ ID NO: 589768
auaguuacacuccuauggg

SEQ ID NO: 589770 - RNA, 19 nt, Artificial Sequence
  Description of Artificial Sequence: Synthetic oligonucleotide
  Sense strand starting at position 260 of SEQ ID NO: 584794
auaggaguguaacuaugua

SEQ ID NO: 589771 - RNA, 19 nt, Artificial Sequence
  Description of Artificial Sequence: Synthetic oligonucleotide
  Antisense strand to SEQ ID NO: 589770
uacauaguuacacuccuau

SEQ ID NO: 589772 - RNA, 19 nt, Artificial Sequence
  Description of Artificial Sequence: Synthetic oligonucleotide
  Sense strand starting at position 264 of SEQ ID NO: 584794
gaguguaacuauguaacuu

SEQ ID NO: 589773 - RNA, 19 nt, Artificial Sequence
  Description of Artificial Sequence: Synthetic oligonucleotide
  Antisense strand to SEQ ID NO: 589772
aaguuacauaguuacacuc

SEQ ID NO: 589774 - RNA, 19 nt, Artificial Sequence
  Description of Artificial Sequence: Synthetic oligonucleotide
  Sense strand starting at position 300 of SEQ ID NO: 584794
ccacgucuucguuugcaua

SEQ ID NO: 589775 - RNA, 19 nt, Artificial Sequence
  Description of Artificial Sequence: Synthetic oligonucleotide
  Antisense strand to SEQ ID NO: 589774
uaugcaaacgaagacgugg

SEQ ID NO: 589776 - RNA, 19 nt, Artificial Sequence
  Description of Artificial Sequence: Synthetic oligonucleotide
  Sense strand starting at position 390 of SEQ ID NO: 584794
ucauuuacaugagaugagu

SEQ ID NO: 589777 - RNA, 19 nt, Artificial Sequence
  Description of Artificial Sequence: Synthetic oligonucleotide
  Antisense strand to SEQ ID NO: 589776
acucaucucauguaaauga

SEQ ID NO: 589778 - RNA, 19 nt, Artificial Sequence
  Description of Artificial Sequence: Synthetic oligonucleotide
  Sense strand starting at position 1099 of SEQ ID NO: 584794
ggcgaaaccucauccuaaa

SEQ ID NO: 589779 - RNA, 19 nt, Artificial Sequence
  Description of Artificial Sequence: Synthetic oligonucleotide
  Antisense strand to SEQ ID NO: 589778
uuuaggaugagguuucgcc

SEQ ID NO: 589780 - RNA, 19 nt, Artificial Sequence
  Description of Artificial Sequence: Synthetic oligonucleotide
  Sense strand starting at position 1360 of SEQ ID NO: 584794
gccuuaaaugcagagguuu

SEQ ID NO: 589781 - RNA, 19 nt, Artificial Sequence
  Description of Artificial Sequence: Synthetic oligonucleotide
  Antisense strand to SEQ ID NO: 589780
aaaccucugcauuuaaggc

SEQ ID NO: 589782 - RNA, 19 nt, Artificial Sequence
  Description of Artificial Sequence: Synthetic oligonucleotide
  Sense strand starting at position 1451 of SEQ ID NO: 584794
uggaacugucuccacgagu

SEQ ID NO: 589783 - RNA, 19 nt, Artificial Sequence
  Description of Artificial Sequence: Synthetic oligonucleotide
  Antisense strand to SEQ ID NO: 589782
acucguggagacaguucca

SEQ ID NO: 589784 - RNA, 19 nt, Artificial Sequence
  Description of Artificial Sequence: Synthetic oligonucleotide
  Sense strand starting at position 1454 of SEQ ID NO: 584794
aacugucuccacgagucau

SEQ ID NO: 589785 - RNA, 19 nt, Artificial Sequence
  Description of Artificial Sequence: Synthetic oligonucleotide
  Antisense strand to SEQ ID NO: 589784
augacucguggagacaguu

SEQ ID NO: 589786 - RNA, 19 nt, Artificial Sequence
  Description of Artificial Sequence: Synthetic oligonucleotide
  Sense strand starting at position 1508 of SEQ ID NO: 584794
gcguucgacccagcauauu

SEQ ID NO: 589787 - RNA, 19 nt, Artificial Sequence
  Description of Artificial Sequence: Synthetic oligonucleotide
  Antisense strand to SEQ ID NO: 589786
aauaugcugggucgaacgc

SEQ ID NO: 589788 - RNA, 19 nt, Artificial Sequence
  Description of Artificial Sequence: Synthetic oligonucleotide
  Sense strand starting at position 1563 of SEQ ID NO: 584794
ggugaauuuacaggcguac

SEQ ID NO: 589789 - RNA, 19 nt, Artificial Sequence
  Description of Artificial Sequence: Synthetic oligonucleotide
  Antisense strand to SEQ ID NO: 589788
guacgccuguaaauucacc

SEQ ID NO: 589790 - RNA, 19 nt, Artificial Sequence
  Description of Artificial Sequence: Synthetic oligonucleotide
  Sense strand starting at position 2316 of SEQ ID NO: 584794
ccgagaacgacugggagau

SEQ ID NO: 589791 - RNA, 19 nt, Artificial Sequence
  Description of Artificial Sequence: Synthetic oligonucleotide
  Antisense strand to SEQ ID NO: 589790
aucucccagucguucucgg

SEQ ID NO: 589792 - RNA, 19 nt, Artificial Sequence
  Description of Artificial Sequence: Synthetic oligonucleotide
  Sense strand starting at position 2785 of SEQ ID NO: 584794
auaaguaagcgagagguuu

SEQ ID NO: 589793 - RNA, 19 nt, Artificial Sequence
  Description of Artificial Sequence: Synthetic oligonucleotide
  Antisense strand to SEQ ID NO: 589792
aaaccucucgcuuacuuau

SEQ ID NO: 589794 - RNA, 19 nt, Artificial Sequence
  Description of Artificial Sequence: Synthetic oligonucleotide
  Sense strand starting at position 2791 of SEQ ID NO: 584794
aagcgagagguuugaaaca

SEQ ID NO: 589795 - RNA, 19 nt, Artificial Sequence
  Description of Artificial Sequence: Synthetic oligonucleotide
  Antisense strand to SEQ ID NO: 589794
uguuucaaaccucucgcuu

SEQ ID NO: 589796 - RNA, 19 nt, Artificial Sequence
  Description of Artificial Sequence: Synthetic oligonucleotide
  Sense strand starting at position 2800 of SEQ ID NO: 584794
guuugaaacaaaugaacga

SEQ ID NO: 589797 - RNA, 19 nt, Artificial Sequence
  Description of Artificial Sequence: Synthetic oligonucleotide
  Antisense strand to SEQ ID NO: 589796
ucguucauuuguuucaaac

SEQ ID NO: 589798 - RNA, 19 nt, Artificial Sequence
  Description of Artificial Sequence: Synthetic oligonucleotide
  Sense strand starting at position 2905 of SEQ ID NO: 584794
gccagaauaacagguuugu

SEQ ID NO: 589799 - RNA, 19 nt, Artificial Sequence
  Description of Artificial Sequence: Synthetic oligonucleotide
  Antisense strand to SEQ ID NO: 589798
acaaaccuguuauucuggc

SEQ ID NO: 589800 - RNA, 19 nt, Artificial Sequence
  Description of Artificial Sequence: Synthetic oligonucleotide
  Sense strand starting at position 2909 of SEQ ID NO: 584794
gaauaacagguuuguuguu

SEQ ID NO: 589801 - RNA, 19 nt, Artificial Sequence
  Description of Artificial Sequence: Synthetic oligonucleotide
  Antisense strand to SEQ ID NO: 589800
aacaacaaaccuguuauuc

SEQ ID NO: 589802 - RNA, 19 nt, Artificial Sequence
  Description of Artificial Sequence: Synthetic oligonucleotide
  Sense strand starting at position 3060 of SEQ ID NO: 584794
agguuccaggccuaucaaa

SEQ ID NO: 589803 - RNA, 19 nt, Artificial Sequence
  Description of Artificial Sequence: Synthetic oligonucleotide
  Antisense strand to SEQ ID NO: 589802
uuugauaggccuggaaccu

SEQ ID NO: 589804 - RNA, 19 nt, Artificial Sequence
  Description of Artificial Sequence: Synthetic oligonucleotide
  Sense strand starting at position 3114 of SEQ ID NO: 584794
cuuugaaacuucguaaaga

SEQ ID NO: 589805 - RNA, 19 nt, Artificial Sequence
  Description of Artificial Sequence: Synthetic oligonucleotide
  Antisense strand to SEQ ID NO: 589804
ucuuuacgaaguuucaaag

SEQ ID NO: 589806 - RNA, 19 nt, Artificial Sequence
  Description of Artificial Sequence: Synthetic oligonucleotide
  Sense strand starting at position 3124 of SEQ ID NO: 584794
ucguaaagaucuuuauuac

SEQ ID NO: 589807 - RNA, 19 nt, Artificial Sequence
  Description of Artificial Sequence: Synthetic oligonucleotide
  Antisense strand to SEQ ID NO: 589806
guaauaaagaucuuuacga

SEQ ID NO: 589808 - RNA, 19 nt, Artificial Sequence
  Description of Artificial Sequence: Synthetic oligonucleotide
  Sense strand starting at position 3125 of SEQ ID NO: 584794
cguaaagaucuuuauuacc

SEQ ID NO: 589809 - RNA, 19 nt, Artificial Sequence
  Description of Artificial Sequence: Synthetic oligonucleotide
  Antisense strand to SEQ ID NO: 589808
gguaauaaagaucuuuacg

SEQ ID NO: 589810 - RNA, 19 nt, Artificial Sequence
  Description of Artificial Sequence: Synthetic oligonucleotide
  Sense strand starting at position 3139 of SEQ ID NO: 584794
uuaccugugccuggaauuu

SEQ ID NO: 589811 - RNA, 19 nt, Artificial Sequence
  Description of Artificial Sequence: Synthetic oligonucleotide
  Antisense strand to SEQ ID NO: 589810
aaauuccaggcacagguaa

SEQ ID NO: 589812 - RNA, 19 nt, Artificial Sequence
  Description of Artificial Sequence: Synthetic oligonucleotide
  Sense strand starting at position 3237 of SEQ ID NO: 584794
auguccuaagucuggguaa

SEQ ID NO: 589813 - RNA, 19 nt, Artificial Sequence
  Description of Artificial Sequence: Synthetic oligonucleotide
  Antisense strand to SEQ ID NO: 589812
uuacccagacuuaggacau

SEQ ID NO: 589814 - RNA, 19 nt, Artificial Sequence
  Description of Artificial Sequence: Synthetic oligonucleotide
  Sense strand starting at position 3239 of SEQ ID NO: 584794
guccuaagucuggguaaga

SEQ ID NO: 589815 - RNA, 19 nt, Artificial Sequence
  Description of Artificial Sequence: Synthetic oligonucleotide
  Antisense strand to SEQ ID NO: 589814
ucuuacccagacuuaggac

SEQ ID NO: 589816 - RNA, 19 nt, Artificial Sequence
  Description of Artificial Sequence: Synthetic oligonucleotide
  Sense strand starting at position 3240 of SEQ ID NO: 584794
uccuaagucuggguaagag

SEQ ID NO: 589817 - RNA, 19 nt, Artificial Sequence
  Description of Artificial Sequence: Synthetic oligonucleotide
  Antisense strand to SEQ ID NO: 589816
cucuuacccagacuuagga

SEQ ID NO: 589818 - RNA, 19 nt, Artificial Sequence
  Description of Artificial Sequence: Synthetic oligonucleotide
  Sense strand starting at position 3365 of SEQ ID NO: 584794
ucuaguaaggaguaucugu

SEQ ID NO: 589819 - RNA, 19 nt, Artificial Sequence
  Description of Artificial Sequence: Synthetic oligonucleotide
  Antisense strand to SEQ ID NO: 589818
acagauacuccuuacuaga

SEQ ID NO: 589820 - RNA, 19 nt, Artificial Sequence
  Description of Artificial Sequence: Synthetic oligonucleotide
  Sense strand starting at position 3543 of SEQ ID NO: 584794
gcuacacuggcuuacagau

SEQ ID NO: 589821 - RNA, 19 nt, Artificial Sequence
  Description of Artificial Sequence: Synthetic oligonucleotide
  Antisense strand to SEQ ID NO: 589820
aucuguaagccaguguagc

SEQ ID NO: 589822 - RNA, 19 nt, Artificial Sequence
  Description of Artificial Sequence: Synthetic oligonucleotide
  Sense strand starting at position 3549 of SEQ ID NO: 584794
cuggcuuacagaugugaua

SEQ ID NO: 589823 - RNA, 19 nt, Artificial Sequence
  Description of Artificial Sequence: Synthetic oligonucleotide
  Antisense strand to SEQ ID NO: 589822
uaucacaucuguaagccag

SEQ ID NO: 589824 - RNA, 19 nt, Artificial Sequence
  Description of Artificial Sequence: Synthetic oligonucleotide
  Sense strand starting at position 3551 of SEQ ID NO: 584794
ggcuuacagaugugauaag

SEQ ID NO: 589825 - RNA, 19 nt, Artificial Sequence
  Description of Artificial Sequence: Synthetic oligonucleotide
  Antisense strand to SEQ ID NO: 589824
cuuaucacaucuguaagcc

SEQ ID NO: 589826 - RNA, 19 nt, Artificial Sequence
  Description of Artificial Sequence: Synthetic oligonucleotide
  Sense strand starting at position 3612 of SEQ ID NO: 584794
ggaauuguuuacucaccca

SEQ ID NO: 589827 - RNA, 19 nt, Artificial Sequence
  Description of Artificial Sequence: Synthetic oligonucleotide
  Antisense strand to SEQ ID NO: 589826
ugggugaguaaacaauucc

SEQ ID NO: 589828 - RNA, 19 nt, Artificial Sequence
  Description of Artificial Sequence: Synthetic oligonucleotide
  Sense strand starting at position 3746 of SEQ ID NO: 584794
gagagucaagucugagucu

SEQ ID NO: 589829 - RNA, 19 nt, Artificial Sequence
  Description of Artificial Sequence: Synthetic oligonucleotide
  Antisense strand to SEQ ID NO: 589828
agacucagacuugacucuc

SEQ ID NO: 589830 - RNA, 19 nt, Artificial Sequence
  Description of Artificial Sequence: Synthetic oligonucleotide
  Sense strand starting at position 3753 of SEQ ID NO: 584794
aagucugagucuuccuaug

SEQ ID NO: 589831 - RNA, 19 nt, Artificial Sequence
  Description of Artificial Sequence: Synthetic oligonucleotide
  Antisense strand to SEQ ID NO: 589830
cauaggaagacucagacuu

SEQ ID NO: 589832 - RNA, 19 nt, Artificial Sequence
  Description of Artificial Sequence: Synthetic oligonucleotide
  Sense strand starting at position 3755 of SEQ ID NO: 584794
gucugagucuuccuaugga

SEQ ID NO: 589833 - RNA, 19 nt, Artificial Sequence
  Description of Artificial Sequence: Synthetic oligonucleotide
  Antisense strand to SEQ ID NO: 589832
uccauaggaagacucagac

SEQ ID NO: 589834 - RNA, 19 nt, Artificial Sequence
  Description of Artificial Sequence: Synthetic oligonucleotide
  Sense strand starting at position 3783 of SEQ ID NO: 584794
guaacauguuaacuuagca

SEQ ID NO: 589835 - RNA, 19 nt, Artificial Sequence
  Description of Artificial Sequence: Synthetic oligonucleotide
  Antisense strand to SEQ ID NO: 589834
ugcuaaguuaacauguuac

SEQ ID NO: 589836 - RNA, 19 nt, Artificial Sequence
  Description of Artificial Sequence: Synthetic oligonucleotide
  Sense strand starting at position 3883 of SEQ ID NO: 584794
gaaguugaaguguaggauu

SEQ ID NO: 589837 - RNA, 19 nt, Artificial Sequence
  Description of Artificial Sequence: Synthetic oligonucleotide
  Antisense strand to SEQ ID NO: 589836
aauccuacacuucaacuuc

SEQ ID NO: 589838 - RNA, 19 nt, Artificial Sequence
  Description of Artificial Sequence: Synthetic oligonucleotide
  Sense strand starting at position 3885 of SEQ ID NO: 584794
aguugaaguguaggauuga

SEQ ID NO: 589839 - RNA, 19 nt, Artificial Sequence
  Description of Artificial Sequence: Synthetic oligonucleotide
  Antisense strand to SEQ ID NO: 589838
ucaauccuacacuucaacu

SEQ ID NO: 589840 - RNA, 19 nt, Artificial Sequence
  Description of Artificial Sequence: Synthetic oligonucleotide
  Sense strand starting at position 3926 of SEQ ID NO: 584794
ccuuaaacauggcuguauu

SEQ ID NO: 589841 - RNA, 19 nt, Artificial Sequence
  Description of Artificial Sequence: Synthetic oligonucleotide
  Antisense strand to SEQ ID NO: 589840
aauacagccauguuuaagg

SEQ ID NO: 589842 - RNA, 19 nt, Artificial Sequence
  Description of Artificial Sequence: Synthetic oligonucleotide
  Sense strand starting at position 281 of SEQ ID NO: 584795
cgaagugauaacggaagga

SEQ ID NO: 589843 - RNA, 19 nt, Artificial Sequence
  Description of Artificial Sequence: Synthetic oligonucleotide
  Antisense strand to SEQ ID NO: 589842
uccuuccguuaucacuucg

SEQ ID NO: 589844 - RNA, 19 nt, Artificial Sequence
  Description of Artificial Sequence: Synthetic oligonucleotide
  Sense strand starting at position 686 of SEQ ID NO: 584795
ucaucuauuugugcugcga

SEQ ID NO: 589845 - RNA, 19 nt, Artificial Sequence
  Description of Artificial Sequence: Synthetic oligonucleotide
  Antisense strand to SEQ ID NO: 589844
ucgcagcacaaauagauga

SEQ ID NO: 589846 - RNA, 19 nt, Artificial Sequence
  Description of Artificial Sequence: Synthetic oligonucleotide
  Sense strand starting at position 690 of SEQ ID NO: 584795
cuauuugugcugcgauaaa

SEQ ID NO: 589847 - RNA, 19 nt, Artificial Sequence
  Description of Artificial Sequence: Synthetic oligonucleotide
  Antisense strand to SEQ ID NO: 589846
uuuaucgcagcacaaauag

SEQ ID NO: 589848 - RNA, 19 nt, Artificial Sequence
  Description of Artificial Sequence: Synthetic oligonucleotide
  Sense strand starting at position 761 of SEQ ID NO: 584795
aguucuccagacuguacaa

SEQ ID NO: 589849 - RNA, 19 nt, Artificial Sequence
  Description of Artificial Sequence: Synthetic oligonucleotide
  Antisense strand to SEQ ID NO: 589848
uuguacagucuggagaacu

SEQ ID NO: 589850 - RNA, 19 nt, Artificial Sequence
  Description of Artificial Sequence: Synthetic oligonucleotide
  Sense strand starting at position 772 of SEQ ID NO: 584795
cuguacaagaaguauggua

SEQ ID NO: 589851 - RNA, 19 nt, Artificial Sequence
  Description of Artificial Sequence: Synthetic oligonucleotide
  Antisense strand to SEQ ID NO: 589850
uaccauacuucuuguacag

SEQ ID NO: 589852 - RNA, 19 nt, Artificial Sequence
  Description of Artificial Sequence: Synthetic oligonucleotide
  Sense strand starting at position 774 of SEQ ID NO: 584795
guacaagaaguaugguauc

SEQ ID NO: 589853 - RNA, 19 nt, Artificial Sequence
  Description of Artificial Sequence: Synthetic oligonucleotide
  Antisense strand to SEQ ID NO: 589852
gauaccauacuucuuguac

SEQ ID NO: 589854 - RNA, 19 nt, Artificial Sequence
  Description of Artificial Sequence: Synthetic oligonucleotide
  Sense strand starting at position 892 of SEQ ID NO: 584795
gaugguauauucucaugau

SEQ ID NO: 589855 - RNA, 19 nt, Artificial Sequence
  Description of Artificial Sequence: Synthetic oligonucleotide
  Antisense strand to SEQ ID NO: 589854
aucaugagaauauaccauc

SEQ ID NO: 589856 - RNA, 19 nt, Artificial Sequence
  Description of Artificial Sequence: Synthetic oligonucleotide
  Sense strand starting at position 992 of SEQ ID NO: 584795
cuacuaauaccagggauuc

SEQ ID NO: 589857 - RNA, 19 nt, Artificial Sequence
  Description of Artificial Sequence: Synthetic oligonucleotide
  Antisense strand to SEQ ID NO: 589856
gaaucccugguauuaguag

SEQ ID NO: 589858 - RNA, 19 nt, Artificial Sequence
  Description of Artificial Sequence: Synthetic oligonucleotide
  Sense strand starting at position 1129 of SEQ ID NO: 584795
acaucauuagccgguagag

SEQ ID NO: 589859 - RNA, 19 nt, Artificial Sequence
  Description of Artificial Sequence: Synthetic oligonucleotide
  Antisense strand to SEQ ID NO: 589858
cucuaccggcuaaugaugu

SEQ ID NO: 589860 - RNA, 19 nt, Artificial Sequence
  Description of Artificial Sequence: Synthetic oligonucleotide
  Sense strand starting at position 1131 of SEQ ID NO: 584795
aucauuagccgguagagaa

SEQ ID NO: 589861 - RNA, 19 nt, Artificial Sequence
  Description of Artificial Sequence: Synthetic oligonucleotide
  Antisense strand to SEQ ID NO: 589860
uucucuaccggcuaaugau

SEQ ID NO: 589862 - RNA, 19 nt, Artificial Sequence
  Description of Artificial Sequence: Synthetic oligonucleotide
  Sense strand starting at position 1139 of SEQ ID NO: 584795
ccgguagagaaaugucaac

SEQ ID NO: 589863 - RNA, 19 nt, Artificial Sequence
  Description of Artificial Sequence: Synthetic oligonucleotide
  Antisense strand to SEQ ID NO: 589862
guugacauuucucuaccgg

SEQ ID NO: 589864 - RNA, 19 nt, Artificial Sequence
  Description of Artificial Sequence: Synthetic oligonucleotide
  Sense strand starting at position 1261 of SEQ ID NO: 584795
auauacugcuggucggaau

SEQ ID NO: 589865 - RNA, 19 nt, Artificial Sequence
  Description of Artificial Sequence: Synthetic oligonucleotide
  Antisense strand to SEQ ID NO: 589864
auuccgaccagcaguauau

SEQ ID NO: 589866 - RNA, 19 nt, Artificial Sequence
  Description of Artificial Sequence: Synthetic oligonucleotide
  Sense strand starting at position 1262 of SEQ ID NO: 584795
uauacugcuggucggaaua

SEQ ID NO: 589867 - RNA, 19 nt, Artificial Sequence
  Description of Artificial Sequence: Synthetic oligonucleotide
  Antisense strand to SEQ ID NO: 589866
uauuccgaccagcaguaua

SEQ ID NO: 589868 - RNA, 19 nt, Artificial Sequence
  Description of Artificial Sequence: Synthetic oligonucleotide
  Sense strand starting at position 1748 of SEQ ID NO: 584795
uccaguggugguuauacaa

SEQ ID NO: 589869 - RNA, 19 nt, Artificial Sequence
  Description of Artificial Sequence: Synthetic oligonucleotide
  Antisense strand to SEQ ID NO: 589868
uuguauaaccaccacugga

SEQ ID NO: 589870 - RNA, 19 nt, Artificial Sequence
  Description of Artificial Sequence: Synthetic oligonucleotide
  Sense strand starting at position 1953 of SEQ ID NO: 584795
ggguccucccaguauauua

SEQ ID NO: 589871 - RNA, 19 nt, Artificial Sequence
  Description of Artificial Sequence: Synthetic oligonucleotide
  Antisense strand to SEQ ID NO: 589870
uaauauacugggaggaccc

SEQ ID NO: 589872 - RNA, 19 nt, Artificial Sequence
  Description of Artificial Sequence: Synthetic oligonucleotide
  Sense strand starting at position 2066 of SEQ ID NO: 584795
aagagauguuuagugaguu

SEQ ID NO: 589873 - RNA, 19 nt, Artificial Sequence
  Description of Artificial Sequence: Synthetic oligonucleotide
  Antisense strand to SEQ ID NO: 589872
aacucacuaaacaucucuu

SEQ ID NO: 589874 - RNA, 19 nt, Artificial Sequence
  Description of Artificial Sequence: Synthetic oligonucleotide
  Sense strand starting at position 2070 of SEQ ID NO: 584795
gauguuuagugaguuuaga

SEQ ID NO: 589875 - RNA, 19 nt, Artificial Sequence
  Description of Artificial Sequence: Synthetic oligonucleotide
  Antisense strand to SEQ ID NO: 589874
ucuaaacucacuaaacauc

SEQ ID NO: 589876 - RNA, 19 nt, Artificial Sequence
  Description of Artificial Sequence: Synthetic oligonucleotide
  Sense strand starting at position 2185 of SEQ ID NO: 584795
guggaaugguggagaugaa

SEQ ID NO: 589877 - RNA, 19 nt, Artificial Sequence
  Description of Artificial Sequence: Synthetic oligonucleotide
  Antisense strand to SEQ ID NO: 589876
uucaucuccaccauuccac

SEQ ID NO: 589878 - RNA, 19 nt, Artificial Sequence
  Description of Artificial Sequence: Synthetic oligonucleotide
  Sense strand starting at position 2210 of SEQ ID NO: 584795
uagcuugaacagugacuua

SEQ ID NO: 589879 - RNA, 19 nt, Artificial Sequence
  Description of Artificial Sequence: Synthetic oligonucleotide
  Antisense strand to SEQ ID NO: 589878
uaagucacuguucaagcua

SEQ ID NO: 589880 - RNA, 19 nt, Artificial Sequence
  Description of Artificial Sequence: Synthetic oligonucleotide
  Sense strand starting at position 2275 of SEQ ID NO: 584795
ccucuuaagagagguaaug

SEQ ID NO: 589881 - RNA, 19 nt, Artificial Sequence
  Description of Artificial Sequence: Synthetic oligonucleotide
  Antisense strand to SEQ ID NO: 589880
cauuaccucucuuaagagg

SEQ ID NO: 589882 - RNA, 19 nt, Artificial Sequence
  Description of Artificial Sequence: Synthetic oligonucleotide
  Sense strand starting at position 2353 of SEQ ID NO: 584795
auugaaagcuuacuuugau

SEQ ID NO: 589883 - RNA, 19 nt, Artificial Sequence
  Description of Artificial Sequence: Synthetic oligonucleotide
  Antisense strand to SEQ ID NO: 589882
aucaaaguaagcuuucaau

SEQ ID NO: 589884 - RNA, 19 nt, Artificial Sequence
  Description of Artificial Sequence: Synthetic oligonucleotide
  Sense strand starting at position 2354 of SEQ ID NO: 584795
uugaaagcuuacuuugauc

SEQ ID NO: 589885 - RNA, 19 nt, Artificial Sequence
  Description of Artificial Sequence: Synthetic oligonucleotide
  Antisense strand to SEQ ID NO: 589884
gaucaaaguaagcuuucaa

SEQ ID NO: 589886 - RNA, 19 nt, Artificial Sequence
  Description of Artificial Sequence: Synthetic oligonucleotide
  Sense strand starting at position 2359 of SEQ ID NO: 584795
agcuuacuuugauccagga

SEQ ID NO: 589887 - RNA, 19 nt, Artificial Sequence
  Description of Artificial Sequence: Synthetic oligonucleotide
  Antisense strand to SEQ ID NO: 589886
uccuggaucaaaguaagcu

SEQ ID NO: 589888 - RNA, 19 nt, Artificial Sequence
  Description of Artificial Sequence: Synthetic oligonucleotide
  Sense strand starting at position 2672 of SEQ ID NO: 584795
cugcuuuaucaggguuuga

SEQ ID NO: 589889 - RNA, 19 nt, Artificial Sequence
  Description of Artificial Sequence: Synthetic oligonucleotide
  Antisense strand to SEQ ID NO: 589888
ucaaacccugauaaagcag

SEQ ID NO: 589890 - RNA, 19 nt, Artificial Sequence
  Description of Artificial Sequence: Synthetic oligonucleotide
  Sense strand starting at position 2676 of SEQ ID NO: 584795
uuuaucaggguuugaguuu

SEQ ID NO: 589891 - RNA, 19 nt, Artificial Sequence
  Description of Artificial Sequence: Synthetic oligonucleotide
  Antisense strand to SEQ ID NO: 589890
aaacucaaacccugauaaa

SEQ ID NO: 589892 - RNA, 19 nt, Artificial Sequence
  Description of Artificial Sequence: Synthetic oligonucleotide
  Sense strand starting at position 2687 of SEQ ID NO: 584795
uugaguuuagagugaauca

SEQ ID NO: 589893 - RNA, 19 nt, Artificial Sequence
  Description of Artificial Sequence: Synthetic oligonucleotide
  Antisense strand to SEQ ID NO: 589892
ugauucacucuaaacucaa

SEQ ID NO: 589894 - RNA, 19 nt, Artificial Sequence
  Description of Artificial Sequence: Synthetic oligonucleotide
  Sense strand starting at position 2777 of SEQ ID NO: 584795
agaggaguucaaggcugua

SEQ ID NO: 589895 - RNA, 19 nt, Artificial Sequence
  Description of Artificial Sequence: Synthetic oligonucleotide
  Antisense strand to SEQ ID NO: 589894
uacagccuugaacuccucu

SEQ ID NO: 589896 - RNA, 19 nt, Artificial Sequence
  Description of Artificial Sequence: Synthetic oligonucleotide
  Sense strand starting at position 3208 of SEQ ID NO: 584795
gaggccaugugaucaggau

SEQ ID NO: 589897 - RNA, 19 nt, Artificial Sequence
  Description of Artificial Sequence: Synthetic oligonucleotide
  Antisense strand to SEQ ID NO: 589896
auccugaucacauggccuc

SEQ ID NO: 589898 - RNA, 19 nt, Artificial Sequence
  Description of Artificial Sequence: Synthetic oligonucleotide
  Sense strand starting at position 3209 of SEQ ID NO: 584795
aggccaugugaucaggauu

SEQ ID NO: 589899 - RNA, 19 nt, Artificial Sequence
  Description of Artificial Sequence: Synthetic oligonucleotide
  Antisense strand to SEQ ID NO: 589898
aauccugaucacauggccu

SEQ ID NO: 589900 - RNA, 19 nt, Artificial Sequence
  Description of Artificial Sequence: Synthetic oligonucleotide
  Sense strand starting at position 3244 of SEQ ID NO: 584795
ccugaagagcucuacauug

SEQ ID NO: 589901 - RNA, 19 nt, Artificial Sequence
  Description of Artificial Sequence: Synthetic oligonucleotide
  Antisense strand to SEQ ID NO: 589900
caauguagagcucuucagg

SEQ ID NO: 589902 - RNA, 19 nt, Artificial Sequence
  Description of Artificial Sequence: Synthetic oligonucleotide
  Sense strand starting at position 3352 of SEQ ID NO: 584795
cugcaaguucugucuuguu

SEQ ID NO: 589903 - RNA, 19 nt, Artificial Sequence
  Description of Artificial Sequence: Synthetic oligonucleotide
  Antisense strand to SEQ ID NO: 589902
aacaagacagaacuugcag

SEQ ID NO: 589904 - RNA, 19 nt, Artificial Sequence
  Description of Artificial Sequence: Synthetic oligonucleotide
  Sense strand starting at position 3559 of SEQ ID NO: 584795
gcaaauaugagcgaucgga

SEQ ID NO: 589905 - RNA, 19 nt, Artificial Sequence
  Description of Artificial Sequence: Synthetic oligonucleotide
  Antisense strand to SEQ ID NO: 589904
uccgaucgcucauauuugc

SEQ ID NO: 589906 - RNA, 19 nt, Artificial Sequence
  Description of Artificial Sequence: Synthetic oligonucleotide
  Sense strand starting at position 3563 of SEQ ID NO: 584795
auaugagcgaucggaauau

SEQ ID NO: 589907 - RNA, 19 nt, Artificial Sequence
  Description of Artificial Sequence: Synthetic oligonucleotide
  Antisense strand to SEQ ID NO: 589906
auauuccgaucgcucauau

SEQ ID NO: 589908 - RNA, 19 nt, Artificial Sequence
  Description of Artificial Sequence: Synthetic oligonucleotide
  Sense strand starting at position 3590 of SEQ ID NO: 584795
gacaaauaacgucauuguu

SEQ ID NO: 589909 - RNA, 19 nt, Artificial Sequence
  Description of Artificial Sequence: Synthetic oligonucleotide
  Antisense strand to SEQ ID NO: 589908
aacaaugacguuauuuguc

SEQ ID NO: 589910 - RNA, 19 nt, Artificial Sequence
  Description of Artificial Sequence: Synthetic oligonucleotide
  Sense strand starting at position 3592 of SEQ ID NO: 584795
caaauaacgucauuguuga

SEQ ID NO: 589911 - RNA, 19 nt, Artificial Sequence
  Description of Artificial Sequence: Synthetic oligonucleotide
  Antisense strand to SEQ ID NO: 589910
ucaacaaugacguuauuug

SEQ ID NO: 589912 - RNA, 19 nt, Artificial Sequence
  Description of Artificial Sequence: Synthetic oligonucleotide
  Sense strand starting at position 3597 of SEQ ID NO: 584795
aacgucauuguugaggaau

SEQ ID NO: 589913 - RNA, 19 nt, Artificial Sequence
  Description of Artificial Sequence: Synthetic oligonucleotide
  Antisense strand to SEQ ID NO: 589912
auuccucaacaaugacguu

SEQ ID NO: 589914 - RNA, 19 nt, Artificial Sequence
  Description of Artificial Sequence: Synthetic oligonucleotide
  Sense strand starting at position 3777 of SEQ ID NO: 584795
uuuaauuaagcuggaaauc

SEQ ID NO: 589915 - RNA, 19 nt, Artificial Sequence
  Description of Artificial Sequence: Synthetic oligonucleotide
  Antisense strand to SEQ ID NO: 589914
gauuuccagcuuaauuaaa

SEQ ID NO: 589916 - RNA, 19 nt, Artificial Sequence
  Description of Artificial Sequence: Synthetic oligonucleotide
  Sense strand starting at position 3847 of SEQ ID NO: 584795
ugucaagucugaucacuuc

SEQ ID NO: 589917 - RNA, 19 nt, Artificial Sequence
  Description of Artificial Sequence: Synthetic oligonucleotide
  Antisense strand to SEQ ID NO: 589916
gaagugaucagacuugaca

SEQ ID NO: 589918 - RNA, 19 nt, Artificial Sequence
  Description of Artificial Sequence: Synthetic oligonucleotide
  Sense strand starting at position 3902 of SEQ ID NO: 584795
gaaauuugugcagguagcu

SEQ ID NO: 589919 - RNA, 19 nt, Artificial Sequence
  Description of Artificial Sequence: Synthetic oligonucleotide
  Antisense strand to SEQ ID NO: 589918
agcuaccugcacaaauuuc

SEQ ID NO: 589920 - RNA, 19 nt, Artificial Sequence
  Description of Artificial Sequence: Synthetic oligonucleotide
  Sense strand starting at position 3956 of SEQ ID NO: 584795
agaccaagaucagauacua

SEQ ID NO: 589921 - RNA, 19 nt, Artificial Sequence
  Description of Artificial Sequence: Synthetic oligonucleotide
  Antisense strand to SEQ ID NO: 589920
uaguaucugaucuuggucu

SEQ ID NO: 589922 - RNA, 19 nt, Artificial Sequence
  Description of Artificial Sequence: Synthetic oligonucleotide
  Sense strand starting at position 209 of SEQ ID NO: 584796
ucaguauuaggguauacau

SEQ ID NO: 589923 - RNA, 19 nt, Artificial Sequence
  Description of Artificial Sequence: Synthetic oligonucleotide
  Antisense strand to SEQ ID NO: 589922
auguauacccuaauacuga

SEQ ID NO: 589924 - RNA, 19 nt, Artificial Sequence
  Description of Artificial Sequence: Synthetic oligonucleotide
  Sense strand starting at position 240 of SEQ ID NO: 584796
gucggaaaguacuuagauu

SEQ ID NO: 589925 - RNA, 19 nt, Artificial Sequence
  Description of Artificial Sequence: Synthetic oligonucleotide
  Antisense strand to SEQ ID NO: 589924
aaucuaaguacuuuccgac

SEQ ID NO: 589926 - RNA, 19 nt, Artificial Sequence
  Description of Artificial Sequence: Synthetic oligonucleotide
  Sense strand starting at position 270 of SEQ ID NO: 584796
auaugcuacgguuauuaaa

SEQ ID NO: 589927 - RNA, 19 nt, Artificial Sequence
  Description of Artificial Sequence: Synthetic oligonucleotide
  Antisense strand to SEQ ID NO: 589926
uuuaauaaccguagcauau

SEQ ID NO: 589928 - RNA, 19 nt, Artificial Sequence
  Description of Artificial Sequence: Synthetic oligonucleotide
  Sense strand starting at position 742 of SEQ ID NO: 584796
aacaccuagggaugugauu

SEQ ID NO: 589929 - RNA, 19 nt, Artificial Sequence
  Description of Artificial Sequence: Synthetic oligonucleotide
  Antisense strand to SEQ ID NO: 589928
aaucacaucccuagguguu

SEQ ID NO: 589930 - RNA, 19 nt, Artificial Sequence
  Description of Artificial Sequence: Synthetic oligonucleotide
  Sense strand starting at position 969 of SEQ ID NO: 584796
agugcuagcgagcuucuua

SEQ ID NO: 589931 - RNA, 19 nt, Artificial Sequence
  Description of Artificial Sequence: Synthetic oligonucleotide
  Antisense strand to SEQ ID NO: 589930
uaagaagcucgcuagcacu

SEQ ID NO: 589932 - RNA, 19 nt, Artificial Sequence
  Description of Artificial Sequence: Synthetic oligonucleotide
  Sense strand starting at position 970 of SEQ ID NO: 584796
gugcuagcgagcuucuuaa

SEQ ID NO: 589933 - RNA, 19 nt, Artificial Sequence
  Description of Artificial Sequence: Synthetic oligonucleotide
  Antisense strand to SEQ ID NO: 589932
uuaagaagcucgcuagcac

SEQ ID NO: 589934 - RNA, 19 nt, Artificial Sequence
  Description of Artificial Sequence: Synthetic oligonucleotide
  Sense strand starting at position 980 of SEQ ID NO: 584796
gcuucuuaacugggauaaa

SEQ ID NO: 589935 - RNA, 19 nt, Artificial Sequence
  Description of Artificial Sequence: Synthetic oligonucleotide
  Antisense strand to SEQ ID NO: 589934
uuuaucccaguuaagaagc

SEQ ID NO: 589936 - RNA, 19 nt, Artificial Sequence
  Description of Artificial Sequence: Synthetic oligonucleotide
  Sense strand starting at position 1065 of SEQ ID NO: 584796
gaaaguguuuagcccagaa

SEQ ID NO: 589937 - RNA, 19 nt, Artificial Sequence
  Description of Artificial Sequence: Synthetic oligonucleotide
  Antisense strand to SEQ ID NO: 589936
uucugggcuaaacacuuuc

SEQ ID NO: 589938 - RNA, 19 nt, Artificial Sequence
  Description of Artificial Sequence: Synthetic oligonucleotide
  Sense strand starting at position 1189 of SEQ ID NO: 584796
gggcuaaggugaguagauu

SEQ ID NO: 589939 - RNA, 19 nt, Artificial Sequence
  Description of Artificial Sequence: Synthetic oligonucleotide
  Antisense strand to SEQ ID NO: 589938
aaucuacucaccuuagccc

SEQ ID NO: 589940 - RNA, 19 nt, Artificial Sequence
  Description of Artificial Sequence: Synthetic oligonucleotide
  Sense strand starting at position 1206 of SEQ ID NO: 584796
uuuaaugcuccaggauaac

SEQ ID NO: 589941 - RNA, 19 nt, Artificial Sequence
  Description of Artificial Sequence: Synthetic oligonucleotide
  Antisense strand to SEQ ID NO: 589940
guuauccuggagcauuaaa

SEQ ID NO: 589942 - RNA, 19 nt, Artificial Sequence
  Description of Artificial Sequence: Synthetic oligonucleotide
  Sense strand starting at position 1225 of SEQ ID NO: 584796
gaccuuuaccgacagguca

SEQ ID NO: 589943 - RNA, 19 nt, Artificial Sequence
  Description of Artificial Sequence: Synthetic oligonucleotide
  Antisense strand to SEQ ID NO: 589942
ugaccugucgguaaagguc

SEQ ID NO: 589944 - RNA, 19 nt, Artificial Sequence
  Description of Artificial Sequence: Synthetic oligonucleotide
  Sense strand starting at position 1425 of SEQ ID NO: 584796
gcgagacgccgauuguaca

SEQ ID NO: 589945 - RNA, 19 nt, Artificial Sequence
  Description of Artificial Sequence: Synthetic oligonucleotide
  Antisense strand to SEQ ID NO: 589944
uguacaaucggcgucucgc

SEQ ID NO: 589946 - RNA, 19 nt, Artificial Sequence
  Description of Artificial Sequence: Synthetic oligonucleotide
  Sense strand starting at position 1443 of SEQ ID NO: 584796
agggacuuguuuccauacu

SEQ ID NO: 589947 - RNA, 19 nt, Artificial Sequence
  Description of Artificial Sequence: Synthetic oligonucleotide
  Antisense strand to SEQ ID NO: 589946
aguauggaaacaagucccu

SEQ ID NO: 589948 - RNA, 19 nt, Artificial Sequence
  Description of Artificial Sequence: Synthetic oligonucleotide
  Sense strand starting at position 1551 of SEQ ID NO: 584796
gagagugugugaccacaga

SEQ ID NO: 589949 - RNA, 19 nt, Artificial Sequence
  Description of Artificial Sequence: Synthetic oligonucleotide
  Antisense strand to SEQ ID NO: 589948
ucuguggucacacacucuc

SEQ ID NO: 589950 - RNA, 19 nt, Artificial Sequence
  Description of Artificial Sequence: Synthetic oligonucleotide
  Sense strand starting at position 1738 of SEQ ID NO: 584796
agaacaucugacugccaua

SEQ ID NO: 589951 - RNA, 19 nt, Artificial Sequence
  Description of Artificial Sequence: Synthetic oligonucleotide
  Antisense strand to SEQ ID NO: 589950
uauggcagucagauguucu

SEQ ID NO: 589952 - RNA, 19 nt, Artificial Sequence
  Description of Artificial Sequence: Synthetic oligonucleotide
  Sense strand starting at position 1773 of SEQ ID NO: 584796
gaaagaacguuugcucaaa

SEQ ID NO: 589953 - RNA, 19 nt, Artificial Sequence
  Description of Artificial Sequence: Synthetic oligonucleotide
  Antisense strand to SEQ ID NO: 589952
uuugagcaaacguucuuuc

SEQ ID NO: 589954 - RNA, 19 nt, Artificial Sequence
  Description of Artificial Sequence: Synthetic oligonucleotide
  Sense strand starting at position 1801 of SEQ ID NO: 584796
cggguugagggcuggagaa

SEQ ID NO: 589955 - RNA, 19 nt, Artificial Sequence
  Description of Artificial Sequence: Synthetic oligonucleotide
  Antisense strand to SEQ ID NO: 589954
uucuccagcccucaacccg

SEQ ID NO: 589956 - RNA, 19 nt, Artificial Sequence
  Description of Artificial Sequence: Synthetic oligonucleotide
  Sense strand starting at position 1802 of SEQ ID NO: 584796
ggguugagggcuggagaaa

SEQ ID NO: 589957 - RNA, 19 nt, Artificial Sequence
  Description of Artificial Sequence: Synthetic oligonucleotide
  Antisense strand to SEQ ID NO: 589956
uuucuccagcccucaaccc

SEQ ID NO: 589958 - RNA, 19 nt, Artificial Sequence
  Description of Artificial Sequence: Synthetic oligonucleotide
  Sense strand starting at position 2459 of SEQ ID NO: 584796
agaggugacuucuucuaaa

SEQ ID NO: 589959 - RNA, 19 nt, Artificial Sequence
  Description of Artificial Sequence: Synthetic oligonucleotide
  Antisense strand to SEQ ID NO: 589958
uuuagaagaagucaccucu

SEQ ID NO: 589960 - RNA, 19 nt, Artificial Sequence
  Description of Artificial Sequence: Synthetic oligonucleotide
  Sense strand starting at position 2495 of SEQ ID NO: 584796
gauccuagucugggauaug

SEQ ID NO: 589961 - RNA, 19 nt, Artificial Sequence
  Description of Artificial Sequence: Synthetic oligonucleotide
  Antisense strand to SEQ ID NO: 589960
cauaucccagacuaggauc

SEQ ID NO: 589962 - RNA, 19 nt, Artificial Sequence
  Description of Artificial Sequence: Synthetic oligonucleotide
  Sense strand starting at position 2505 of SEQ ID NO: 584796
ugggauauguagagggagu

SEQ ID NO: 589963 - RNA, 19 nt, Artificial Sequence
  Description of Artificial Sequence: Synthetic oligonucleotide
  Antisense strand to SEQ ID NO: 589962
acucccucuacauauccca

SEQ ID NO: 589964 - RNA, 19 nt, Artificial Sequence
  Description of Artificial Sequence: Synthetic oligonucleotide
  Sense strand starting at position 2506 of SEQ ID NO: 584796
gggauauguagagggaguu

SEQ ID NO: 589965 - RNA, 19 nt, Artificial Sequence
  Description of Artificial Sequence: Synthetic oligonucleotide
  Antisense strand to SEQ ID NO: 589964
aacucccucuacauauccc

SEQ ID NO: 589966 - RNA, 19 nt, Artificial Sequence
  Description of Artificial Sequence: Synthetic oligonucleotide
  Sense strand starting at position 2575 of SEQ ID NO: 584796
aucucugcaguugagaaau

SEQ ID NO: 589967 - RNA, 19 nt, Artificial Sequence
  Description of Artificial Sequence: Synthetic oligonucleotide
  Antisense strand to SEQ ID NO: 589966
auuucucaacugcagagau

SEQ ID NO: 589968 - RNA, 19 nt, Artificial Sequence
  Description of Artificial Sequence: Synthetic oligonucleotide
  Sense strand starting at position 2746 of SEQ ID NO: 584796
cugugagauucugcauuuc

SEQ ID NO: 589969 - RNA, 19 nt, Artificial Sequence
  Description of Artificial Sequence: Synthetic oligonucleotide
  Antisense strand to SEQ ID NO: 589968
gaaaugcagaaucucacag

SEQ ID NO: 589970 - RNA, 19 nt, Artificial Sequence
  Description of Artificial Sequence: Synthetic oligonucleotide
  Sense strand starting at position 2757 of SEQ ID NO: 584796
ugcauuucuccuuggcacu

SEQ ID NO: 589971 - RNA, 19 nt, Artificial Sequence
  Description of Artificial Sequence: Synthetic oligonucleotide
  Antisense strand to SEQ ID NO: 589970
agugccaaggagaaaugca

SEQ ID NO: 589972 - RNA, 19 nt, Artificial Sequence
  Description of Artificial Sequence: Synthetic oligonucleotide
  Sense strand starting at position 2910 of SEQ ID NO: 584796
agauauggauuagauaaag

SEQ ID NO: 589973 - RNA, 19 nt, Artificial Sequence
  Description of Artificial Sequence: Synthetic oligonucleotide
  Antisense strand to SEQ ID NO: 589972
cuuuaucuaauccauaucu

SEQ ID NO: 589974 - RNA, 19 nt, Artificial Sequence
  Description of Artificial Sequence: Synthetic oligonucleotide
  Sense strand starting at position 3002 of SEQ ID NO: 584796
agggauguugugcaaucuu

SEQ ID NO: 589975 - RNA, 19 nt, Artificial Sequence
  Description of Artificial Sequence: Synthetic oligonucleotide
  Antisense strand to SEQ ID NO: 589974
aagauugcacaacaucccu

SEQ ID NO: 589976 - RNA, 19 nt, Artificial Sequence
  Description of Artificial Sequence: Synthetic oligonucleotide
  Sense strand starting at position 3012 of SEQ ID NO: 584796
ugcaaucuuccucaggauc

SEQ ID NO: 589977 - RNA, 19 nt, Artificial Sequence
  Description of Artificial Sequence: Synthetic oligonucleotide
  Antisense strand to SEQ ID NO: 589976
gauccugaggaagauugca

SEQ ID NO: 589978 - RNA, 19 nt, Artificial Sequence
  Description of Artificial Sequence: Synthetic oligonucleotide
  Sense strand starting at position 3033 of SEQ ID NO: 584796
caagguugggaucauugua

SEQ ID NO: 589979 - RNA, 19 nt, Artificial Sequence
  Description of Artificial Sequence: Synthetic oligonucleotide
  Antisense strand to SEQ ID NO: 589978
uacaaugaucccaaccuug

SEQ ID NO: 589980 - RNA, 19 nt, Artificial Sequence
  Description of Artificial Sequence: Synthetic oligonucleotide
  Sense strand starting at position 3048 of SEQ ID NO: 584796
uguaaucuagcugacauaa

SEQ ID NO: 589981 - RNA, 19 nt, Artificial Sequence
  Description of Artificial Sequence: Synthetic oligonucleotide
  Antisense strand to SEQ ID NO: 589980
uuaugucagcuagauuaca

SEQ ID NO: 589982 - RNA, 19 nt, Artificial Sequence
  Description of Artificial Sequence: Synthetic oligonucleotide
  Sense strand starting at position 3133 of SEQ ID NO: 584796
ucauacaaugcucauguga

SEQ ID NO: 589983 - RNA, 19 nt, Artificial Sequence
  Description of Artificial Sequence: Synthetic oligonucleotide
  Antisense strand to SEQ ID NO: 589982
ucacaugagcauuguauga

SEQ ID NO: 589984 - RNA, 19 nt, Artificial Sequence
  Description of Artificial Sequence: Synthetic oligonucleotide
  Sense strand starting at position 3226 of SEQ ID NO: 584796
gaggaaauuuguuagaacu

SEQ ID NO: 589985 - RNA, 19 nt, Artificial Sequence
  Description of Artificial Sequence: Synthetic oligonucleotide
  Antisense strand to SEQ ID NO: 589984
aguucuaacaaauuuccuc

SEQ ID NO: 589986 - RNA, 19 nt, Artificial Sequence
  Description of Artificial Sequence: Synthetic oligonucleotide
  Sense strand starting at position 3228 of SEQ ID NO: 584796
ggaaauuuguuagaacuug

SEQ ID NO: 589987 - RNA, 19 nt, Artificial Sequence
  Description of Artificial Sequence: Synthetic oligonucleotide
  Antisense strand to SEQ ID NO: 589986
caaguucuaacaaauuucc

SEQ ID NO: 589988 - RNA, 19 nt, Artificial Sequence
  Description of Artificial Sequence: Synthetic oligonucleotide
  Sense strand starting at position 3384 of SEQ ID NO: 584796
ugaaauuaacaguacguau

SEQ ID NO: 589989 - RNA, 19 nt, Artificial Sequence
  Description of Artificial Sequence: Synthetic oligonucleotide
  Antisense strand to SEQ ID NO: 589988
auacguacuguuaauuuca

SEQ ID NO: 589990 - RNA, 19 nt, Artificial Sequence
  Description of Artificial Sequence: Synthetic oligonucleotide
  Sense strand starting at position 3531 of SEQ ID NO: 584796
gucucugaggucuaucaca

SEQ ID NO: 589991 - RNA, 19 nt, Artificial Sequence
  Description of Artificial Sequence: Synthetic oligonucleotide
  Antisense strand to SEQ ID NO: 589990
ugugauagaccucagagac

SEQ ID NO: 589992 - RNA, 19 nt, Artificial Sequence
  Description of Artificial Sequence: Synthetic oligonucleotide
  Sense strand starting at position 3574 of SEQ ID NO: 584796
uuugaacaccuucgagaaa

SEQ ID NO: 589993 - RNA, 19 nt, Artificial Sequence
  Description of Artificial Sequence: Synthetic oligonucleotide
  Antisense strand to SEQ ID NO: 589992
uuucucgaagguguucaaa

SEQ ID NO: 589994 - RNA, 19 nt, Artificial Sequence
  Description of Artificial Sequence: Synthetic oligonucleotide
  Sense strand starting at position 3700 of SEQ ID NO: 584796
auauaugugugauugaaga

SEQ ID NO: 589995 - RNA, 19 nt, Artificial Sequence
  Description of Artificial Sequence: Synthetic oligonucleotide
  Antisense strand to SEQ ID NO: 589994
ucuucaaucacacauauau

SEQ ID NO: 589996 - RNA, 19 nt, Artificial Sequence
  Description of Artificial Sequence: Synthetic oligonucleotide
  Sense strand starting at position 3739 of SEQ ID NO: 584796
gcguuuacugaaggaagga

SEQ ID NO: 589997 - RNA, 19 nt, Artificial Sequence
  Description of Artificial Sequence: Synthetic oligonucleotide
  Antisense strand to SEQ ID NO: 589996
uccuuccuucaguaaacgc

SEQ ID NO: 589998 - RNA, 19 nt, Artificial Sequence
  Description of Artificial Sequence: Synthetic oligonucleotide
  Sense strand starting at position 3802 of SEQ ID NO: 584796
auggaacaacuuuguagua

SEQ ID NO: 589999 - RNA, 19 nt, Artificial Sequence
  Description of Artificial Sequence: Synthetic oligonucleotide
  Antisense strand to SEQ ID NO: 589998
uacuacaaaguuguuccau

SEQ ID NO: 590000 - RNA, 19 nt, Artificial Sequence
  Description of Artificial Sequence: Synthetic oligonucleotide
  Sense strand starting at position 3889 of SEQ ID NO: 584796
agagcuuuauaguuacaga

SEQ ID NO: 590001 - RNA, 19 nt, Artificial Sequence
  Description of Artificial Sequence: Synthetic oligonucleotide
  Antisense strand to SEQ ID NO: 590000
ucuguaacuauaaagcucu

SEQ ID NO: 590002 - RNA, 19 nt, Artificial Sequence
  Description of Artificial Sequence: Synthetic oligonucleotide
  Sense strand starting at position 21 of SEQ ID NO: 584797
gugacuuaguuauuugugu

SEQ ID NO: 590003 - RNA, 19 nt, Artificial Sequence
  Description of Artificial Sequence: Synthetic oligonucleotide
  Antisense strand to SEQ ID NO: 590002
acacaaauaacuaagucac

SEQ ID NO: 590004 - RNA, 19 nt, Artificial Sequence
  Description of Artificial Sequence: Synthetic oligonucleotide
  Sense strand starting at position 173 of SEQ ID NO: 584797
uacuauguaugaucuugga

SEQ ID NO: 590005 - RNA, 19 nt, Artificial Sequence
  Description of Artificial Sequence: Synthetic oligonucleotide
  Antisense strand to SEQ ID NO: 590004
uccaagaucauacauagua

SEQ ID NO: 590006 - RNA, 19 nt, Artificial Sequence
  Description of Artificial Sequence: Synthetic oligonucleotide
  Sense strand starting at position 177 of SEQ ID NO: 584797
auguaugaucuuggaacua

SEQ ID NO: 590007 - RNA, 19 nt, Artificial Sequence
  Description of Artificial Sequence: Synthetic oligonucleotide
  Antisense strand to SEQ ID NO: 590006
uaguuccaagaucauacau

SEQ ID NO: 590008 - RNA, 19 nt, Artificial Sequence
  Description of Artificial Sequence: Synthetic oligonucleotide
  Sense strand starting at position 400 of SEQ ID NO: 584797
cagagaaguagagguugua

SEQ ID NO: 590009 - RNA, 19 nt, Artificial Sequence
  Description of Artificial Sequence: Synthetic oligonucleotide
  Antisense strand to SEQ ID NO: 590008
uacaaccucuacuucucug

SEQ ID NO: 590010 - RNA, 19 nt, Artificial Sequence
  Description of Artificial Sequence: Synthetic oligonucleotide
  Sense strand starting at position 403 of SEQ ID NO: 584797
agaaguagagguuguaacu

SEQ ID NO: 590011 - RNA, 19 nt, Artificial Sequence
  Description of Artificial Sequence: Synthetic oligonucleotide
  Antisense strand to SEQ ID NO: 590010
aguuacaaccucuacuucu

SEQ ID NO: 590012 - RNA, 19 nt, Artificial Sequence
  Description of Artificial Sequence: Synthetic oligonucleotide
  Sense strand starting at position 605 of SEQ ID NO: 584797
aguggaagguaacuuuaga

SEQ ID NO: 590013 - RNA, 19 nt, Artificial Sequence
  Description of Artificial Sequence: Synthetic oligonucleotide
  Antisense strand to SEQ ID NO: 590012
ucuaaaguuaccuuccacu

SEQ ID NO: 590014 - RNA, 19 nt, Artificial Sequence
  Description of Artificial Sequence: Synthetic oligonucleotide
  Sense strand starting at position 623 of SEQ ID NO: 584797
agaaguaauacaggccuga

SEQ ID NO: 590015 - RNA, 19 nt, Artificial Sequence
  Description of Artificial Sequence: Synthetic oligonucleotide
  Antisense strand to SEQ ID NO: 590014
ucaggccuguauuacuucu

SEQ ID NO: 590016 - RNA, 19 nt, Artificial Sequence
  Description of Artificial Sequence: Synthetic oligonucleotide
  Sense strand starting at position 848 of SEQ ID NO: 584797
cuggaaaccugcuuaugag

SEQ ID NO: 590017 - RNA, 19 nt, Artificial Sequence
  Description of Artificial Sequence: Synthetic oligonucleotide
  Antisense strand to SEQ ID NO: 590016
cucauaagcagguuuccag

SEQ ID NO: 590018 - RNA, 19 nt, Artificial Sequence
  Description of Artificial Sequence: Synthetic oligonucleotide
  Sense strand starting at position 856 of SEQ ID NO: 584797
cugcuuaugagagagguua

SEQ ID NO: 590019 - RNA, 19 nt, Artificial Sequence
  Description of Artificial Sequence: Synthetic oligonucleotide
  Antisense strand to SEQ ID NO: 590018
uaaccucucucauaagcag

SEQ ID NO: 590020 - RNA, 19 nt, Artificial Sequence
  Description of Artificial Sequence: Synthetic oligonucleotide
  Sense strand starting at position 858 of SEQ ID NO: 584797
gcuuaugagagagguuaga

SEQ ID NO: 590021 - RNA, 19 nt, Artificial Sequence
  Description of Artificial Sequence: Synthetic oligonucleotide
  Antisense strand to SEQ ID NO: 590020
ucuaaccucucucauaagc

SEQ ID NO: 590022 - RNA, 19 nt, Artificial Sequence
  Description of Artificial Sequence: Synthetic oligonucleotide
  Sense strand starting at position 942 of SEQ ID NO: 584797
guuuaaauccuagggauca

SEQ ID NO: 590023 - RNA, 19 nt, Artificial Sequence
  Description of Artificial Sequence: Synthetic oligonucleotide
  Antisense strand to SEQ ID NO: 590022
ugaucccuaggauuuaaac

SEQ ID NO: 590024 - RNA, 19 nt, Artificial Sequence
  Description of Artificial Sequence: Synthetic oligonucleotide
  Sense strand starting at position 972 of SEQ ID NO: 584797
ggaucaguccaauguggaa

SEQ ID NO: 590025 - RNA, 19 nt, Artificial Sequence
  Description of Artificial Sequence: Synthetic oligonucleotide
  Antisense strand to SEQ ID NO: 590024
uuccacauuggacugaucc

SEQ ID NO: 590026 - RNA, 19 nt, Artificial Sequence
  Description of Artificial Sequence: Synthetic oligonucleotide
  Sense strand starting at position 1021 of SEQ ID NO: 584797
aggcaucaaggauguaaga

SEQ ID NO: 590027 - RNA, 19 nt, Artificial Sequence
  Description of Artificial Sequence: Synthetic oligonucleotide
  Antisense strand to SEQ ID NO: 590026
ucuuacauccuugaugccu

SEQ ID NO: 590028 - RNA, 19 nt, Artificial Sequence
  Description of Artificial Sequence: Synthetic oligonucleotide
  Sense strand starting at position 1048 of SEQ ID NO: 584797
ugaaaugauugauugcauc

SEQ ID NO: 590029 - RNA, 19 nt, Artificial Sequence
  Description of Artificial Sequence: Synthetic oligonucleotide
  Antisense strand to SEQ ID NO: 590028
gaugcaaucaaucauuuca

SEQ ID NO: 590030 - RNA, 19 nt, Artificial Sequence
  Description of Artificial Sequence: Synthetic oligonucleotide
  Sense strand starting at position 1133 of SEQ ID NO: 584797
auucucucacagugggaau

SEQ ID NO: 590031 - RNA, 19 nt, Artificial Sequence
  Description of Artificial Sequence: Synthetic oligonucleotide
  Antisense strand to SEQ ID NO: 590030
auucccacugugagagaau

SEQ ID NO: 590032 - RNA, 19 nt, Artificial Sequence
  Description of Artificial Sequence: Synthetic oligonucleotide
  Sense strand starting at position 1157 of SEQ ID NO: 584797
uuagaaaugguguaaguuc

SEQ ID NO: 590033 - RNA, 19 nt, Artificial Sequence
  Description of Artificial Sequence: Synthetic oligonucleotide
  Antisense strand to SEQ ID NO: 590032
gaacuuacaccauuucuaa

SEQ ID NO: 590034 - RNA, 19 nt, Artificial Sequence
  Description of Artificial Sequence: Synthetic oligonucleotide
  Sense strand starting at position 1331 of SEQ ID NO: 584797
acuuucucagaguaaaugu

SEQ ID NO: 590035 - RNA, 19 nt, Artificial Sequence
  Description of Artificial Sequence: Synthetic oligonucleotide
  Antisense strand to SEQ ID NO: 590034
acauuuacucugagaaagu

SEQ ID NO: 590036 - RNA, 19 nt, Artificial Sequence
  Description of Artificial Sequence: Synthetic oligonucleotide
  Sense strand starting at position 1340 of SEQ ID NO: 584797
gaguaaauguuaguaacau

SEQ ID NO: 590037 - RNA, 19 nt, Artificial Sequence
  Description of Artificial Sequence: Synthetic oligonucleotide
  Antisense strand to SEQ ID NO: 590036
auguuacuaacauuuacuc

SEQ ID NO: 590038 - RNA, 19 nt, Artificial Sequence
  Description of Artificial Sequence: Synthetic oligonucleotide
  Sense strand starting at position 1403 of SEQ ID NO: 584797
gucugacuauaucugauua

SEQ ID NO: 590039 - RNA, 19 nt, Artificial Sequence
  Description of Artificial Sequence: Synthetic oligonucleotide
  Antisense strand to SEQ ID NO: 590038
uaaucagauauagucagac

SEQ ID NO: 590040 - RNA, 19 nt, Artificial Sequence
  Description of Artificial Sequence: Synthetic oligonucleotide
  Sense strand starting at position 1535 of SEQ ID NO: 584797
uguggcuuuaaccagaagu

SEQ ID NO: 590041 - RNA, 19 nt, Artificial Sequence
  Description of Artificial Sequence: Synthetic oligonucleotide
  Antisense strand to SEQ ID NO: 590040
acuucugguuaaagccaca

SEQ ID NO: 590042 - RNA, 19 nt, Artificial Sequence
  Description of Artificial Sequence: Synthetic oligonucleotide
  Sense strand starting at position 1537 of SEQ ID NO: 584797
uggcuuuaaccagaaguau

SEQ ID NO: 590043 - RNA, 19 nt, Artificial Sequence
  Description of Artificial Sequence: Synthetic oligonucleotide
  Antisense strand to SEQ ID NO: 590042
auacuucugguuaaagcca

SEQ ID NO: 590044 - RNA, 19 nt, Artificial Sequence
  Description of Artificial Sequence: Synthetic oligonucleotide
  Sense strand starting at position 1546 of SEQ ID NO: 584797
ccagaaguauuugagauau

SEQ ID NO: 590045 - RNA, 19 nt, Artificial Sequence
  Description of Artificial Sequence: Synthetic oligonucleotide
  Antisense strand to SEQ ID NO: 590044
auaucucaaauacuucugg

SEQ ID NO: 590046 - RNA, 19 nt, Artificial Sequence
  Description of Artificial Sequence: Synthetic oligonucleotide
  Sense strand starting at position 1600 of SEQ ID NO: 584797
gccugagagggcuaugaag

SEQ ID NO: 590047 - RNA, 19 nt, Artificial Sequence
  Description of Artificial Sequence: Synthetic oligonucleotide
  Antisense strand to SEQ ID NO: 590046
cuucauagcccucucaggc

SEQ ID NO: 590048 - RNA, 19 nt, Artificial Sequence
  Description of Artificial Sequence: Synthetic oligonucleotide
  Sense strand starting at position 1740 of SEQ ID NO: 584797
ggaucugguuuaccagaga

SEQ ID NO: 590049 - RNA, 19 nt, Artificial Sequence
  Description of Artificial Sequence: Synthetic oligonucleotide
  Antisense strand to SEQ ID NO: 590048
ucucugguaaaccagaucc

SEQ ID NO: 590050 - RNA, 19 nt, Artificial Sequence
  Description of Artificial Sequence: Synthetic oligonucleotide
  Sense strand starting at position 1769 of SEQ ID NO: 584797
cgaggaggccacuaaacuu

SEQ ID NO: 590051 - RNA, 19 nt, Artificial Sequence
  Description of Artificial Sequence: Synthetic oligonucleotide
  Antisense strand to SEQ ID NO: 590050
aaguuuaguggccuccucg

SEQ ID NO: 590052 - RNA, 19 nt, Artificial Sequence
  Description of Artificial Sequence: Synthetic oligonucleotide
  Sense strand starting at position 2180 of SEQ ID NO: 584797
gggagaaaucgagguucug

SEQ ID NO: 590053 - RNA, 19 nt, Artificial Sequence
  Description of Artificial Sequence: Synthetic oligonucleotide
  Antisense strand to SEQ ID NO: 590052
cagaaccucgauuucuccc

SEQ ID NO: 590054 - RNA, 19 nt, Artificial Sequence
  Description of Artificial Sequence: Synthetic oligonucleotide
  Sense strand starting at position 2224 of SEQ ID NO: 584797
cugggcagcccugauuaau

SEQ ID NO: 590055 - RNA, 19 nt, Artificial Sequence
  Description of Artificial Sequence: Synthetic oligonucleotide
  Antisense strand to SEQ ID NO: 590054
auuaaucagggcugcccag

SEQ ID NO: 590056 - RNA, 19 nt, Artificial Sequence
  Description of Artificial Sequence: Synthetic oligonucleotide
  Sense strand starting at position 2514 of SEQ ID NO: 584797
aggugaugauaucuguaau

SEQ ID NO: 590057 - RNA, 19 nt, Artificial Sequence
  Description of Artificial Sequence: Synthetic oligonucleotide
  Antisense strand to SEQ ID NO: 590056
auuacagauaucaucaccu

SEQ ID NO: 590058 - RNA, 19 nt, Artificial Sequence
  Description of Artificial Sequence: Synthetic oligonucleotide
  Sense strand starting at position 2515 of SEQ ID NO: 584797
ggugaugauaucuguaaua

SEQ ID NO: 590059 - RNA, 19 nt, Artificial Sequence
  Description of Artificial Sequence: Synthetic oligonucleotide
  Antisense strand to SEQ ID NO: 590058
uauuacagauaucaucacc

SEQ ID NO: 590060 - RNA, 19 nt, Artificial Sequence
  Description of Artificial Sequence: Synthetic oligonucleotide
  Sense strand starting at position 2551 of SEQ ID NO: 584797
uguuguucgaaugaaagag

SEQ ID NO: 590061 - RNA, 19 nt, Artificial Sequence
  Description of Artificial Sequence: Synthetic oligonucleotide
  Antisense strand to SEQ ID NO: 590060
cucuuucauucgaacaaca

SEQ ID NO: 590062 - RNA, 19 nt, Artificial Sequence
  Description of Artificial Sequence: Synthetic oligonucleotide
  Sense strand starting at position 2599 of SEQ ID NO: 584797
uuugcagacuuuccagaaa

SEQ ID NO: 590063 - RNA, 19 nt, Artificial Sequence
  Description of Artificial Sequence: Synthetic oligonucleotide
  Antisense strand to SEQ ID NO: 590062
uuucuggaaagucugcaaa

SEQ ID NO: 590064 - RNA, 19 nt, Artificial Sequence
  Description of Artificial Sequence: Synthetic oligonucleotide
  Sense strand starting at position 2696 of SEQ ID NO: 584797
aguggugauuuguuaguua

SEQ ID NO: 590065 - RNA, 19 nt, Artificial Sequence
  Description of Artificial Sequence: Synthetic oligonucleotide
  Antisense strand to SEQ ID NO: 590064
uaacuaacaaaucaccacu

SEQ ID NO: 590066 - RNA, 19 nt, Artificial Sequence
  Description of Artificial Sequence: Synthetic oligonucleotide
  Sense strand starting at position 2699 of SEQ ID NO: 584797
ggugauuuguuaguuaucu

SEQ ID NO: 590067 - RNA, 19 nt, Artificial Sequence
  Description of Artificial Sequence: Synthetic oligonucleotide
  Antisense strand to SEQ ID NO: 590066
agauaacuaacaaaucacc

SEQ ID NO: 590068 - RNA, 19 nt, Artificial Sequence
  Description of Artificial Sequence: Synthetic oligonucleotide
  Sense strand starting at position 2700 of SEQ ID NO: 584797
gugauuuguuaguuaucuu

SEQ ID NO: 590069 - RNA, 19 nt, Artificial Sequence
  Description of Artificial Sequence: Synthetic oligonucleotide
  Antisense strand to SEQ ID NO: 590068
aagauaacuaacaaaucac

SEQ ID NO: 590070 - RNA, 19 nt, Artificial Sequence
  Description of Artificial Sequence: Synthetic oligonucleotide
  Sense strand starting at position 2916 of SEQ ID NO: 584797
gaaugaaguuggccaggua

SEQ ID NO: 590071 - RNA, 19 nt, Artificial Sequence
  Description of Artificial Sequence: Synthetic oligonucleotide
  Antisense strand to SEQ ID NO: 590070
uaccuggccaacuucauuc

SEQ ID NO: 590072 - RNA, 19 nt, Artificial Sequence
  Description of Artificial Sequence: Synthetic oligonucleotide
  Sense strand starting at position 2917 of SEQ ID NO: 584797
aaugaaguuggccagguaa

SEQ ID NO: 590073 - RNA, 19 nt, Artificial Sequence
  Description of Artificial Sequence: Synthetic oligonucleotide
  Antisense strand to SEQ ID NO: 590072
uuaccuggccaacuucauu

SEQ ID NO: 590074 - RNA, 19 nt, Artificial Sequence
  Description of Artificial Sequence: Synthetic oligonucleotide
  Sense strand starting at position 2945 of SEQ ID NO: 584797
aguggauacuaugcuuaac

SEQ ID NO: 590075 - RNA, 19 nt, Artificial Sequence
  Description of Artificial Sequence: Synthetic oligonucleotide
  Antisense strand to SEQ ID NO: 590074
guuaagcauaguauccacu

SEQ ID NO: 590076 - RNA, 19 nt, Artificial Sequence
  Description of Artificial Sequence: Synthetic oligonucleotide
  Sense strand starting at position 2968 of SEQ ID NO: 584797
acaugcuuagacugcaaga

SEQ ID NO: 590077 - RNA, 19 nt, Artificial Sequence
  Description of Artificial Sequence: Synthetic oligonucleotide
  Antisense strand to SEQ ID NO: 590076
ucuugcagucuaagcaugu

SEQ ID NO: 590078 - RNA, 19 nt, Artificial Sequence
  Description of Artificial Sequence: Synthetic oligonucleotide
  Sense strand starting at position 3567 of SEQ ID NO: 584797
uugucagaguaaucaaauu

SEQ ID NO: 590079 - RNA, 19 nt, Artificial Sequence
  Description of Artificial Sequence: Synthetic oligonucleotide
  Antisense strand to SEQ ID NO: 590078
aauuugauuacucugacaa

SEQ ID NO: 590080 - RNA, 19 nt, Artificial Sequence
  Description of Artificial Sequence: Synthetic oligonucleotide
  Sense strand starting at position 3696 of SEQ ID NO: 584797
uguuaauggcugcaagaug

SEQ ID NO: 590081 - RNA, 19 nt, Artificial Sequence
  Description of Artificial Sequence: Synthetic oligonucleotide
  Antisense strand to SEQ ID NO: 590080
caucuugcagccauuaaca

SEQ ID NO: 590082 - RNA, 19 nt, Artificial Sequence
  Description of Artificial Sequence: Synthetic oligonucleotide
  Sense strand starting at position 60 of SEQ ID NO: 584798
cugaucaaucagggaagca

SEQ ID NO: 590083 - RNA, 19 nt, Artificial Sequence
  Description of Artificial Sequence: Synthetic oligonucleotide
  Antisense strand to SEQ ID NO: 590082
ugcuucccugauugaucag

SEQ ID NO: 590084 - RNA, 19 nt, Artificial Sequence
  Description of Artificial Sequence: Synthetic oligonucleotide
  Sense strand starting at position 159 of SEQ ID NO: 584798
uggaaauguaggugagcua

SEQ ID NO: 590085 - RNA, 19 nt, Artificial Sequence
  Description of Artificial Sequence: Synthetic oligonucleotide
  Antisense strand to SEQ ID NO: 590084
uagcucaccuacauuucca

SEQ ID NO: 590086 - RNA, 19 nt, Artificial Sequence
  Description of Artificial Sequence: Synthetic oligonucleotide
  Sense strand starting at position 162 of SEQ ID NO: 584798
aaauguaggugagcuagaa

SEQ ID NO: 590087 - RNA, 19 nt, Artificial Sequence
  Description of Artificial Sequence: Synthetic oligonucleotide
  Antisense strand to SEQ ID NO: 590086
uucuagcucaccuacauuu

SEQ ID NO: 590088 - RNA, 19 nt, Artificial Sequence
  Description of Artificial Sequence: Synthetic oligonucleotide
  Sense strand starting at position 166 of SEQ ID NO: 584798
guaggugagcuagaauuaa

SEQ ID NO: 590089 - RNA, 19 nt, Artificial Sequence
  Description of Artificial Sequence: Synthetic oligonucleotide
  Antisense strand to SEQ ID NO: 590088
uuaauucuagcucaccuac

SEQ ID NO: 590090 - RNA, 19 nt, Artificial Sequence
  Description of Artificial Sequence: Synthetic oligonucleotide
  Sense strand starting at position 229 of SEQ ID NO: 584798
agguaagggagcuaguuaa

SEQ ID NO: 590091 - RNA, 19 nt, Artificial Sequence
  Description of Artificial Sequence: Synthetic oligonucleotide
  Antisense strand to SEQ ID NO: 590090
uuaacuagcucccuuaccu

SEQ ID NO: 590092 - RNA, 19 nt, Artificial Sequence
  Description of Artificial Sequence: Synthetic oligonucleotide
  Sense strand starting at position 275 of SEQ ID NO: 584798
ccacacauagugugaggua

SEQ ID NO: 590093 - RNA, 19 nt, Artificial Sequence
  Description of Artificial Sequence: Synthetic oligonucleotide
  Antisense strand to SEQ ID NO: 590092
uaccucacacuaugugugg

SEQ ID NO: 590094 - RNA, 19 nt, Artificial Sequence
  Description of Artificial Sequence: Synthetic oligonucleotide
  Sense strand starting at position 320 of SEQ ID NO: 584798
auuagaaagucaguccuaa

SEQ ID NO: 590095 - RNA, 19 nt, Artificial Sequence
  Description of Artificial Sequence: Synthetic oligonucleotide
  Antisense strand to SEQ ID NO: 590094
uuaggacugacuuucuaau

SEQ ID NO: 590096 - RNA, 19 nt, Artificial Sequence
  Description of Artificial Sequence: Synthetic oligonucleotide
  Sense strand starting at position 538 of SEQ ID NO: 584798
aguagucaccuugaaguuu

SEQ ID NO: 590097 - RNA, 19 nt, Artificial Sequence
  Description of Artificial Sequence: Synthetic oligonucleotide
  Antisense strand to SEQ ID NO: 590096
aaacuucaaggugacuacu

SEQ ID NO: 590098 - RNA, 19 nt, Artificial Sequence
  Description of Artificial Sequence: Synthetic oligonucleotide
  Sense strand starting at position 1103 of SEQ ID NO: 584798
uuagauaaaucuguuaguc

SEQ ID NO: 590099 - RNA, 19 nt, Artificial Sequence
  Description of Artificial Sequence: Synthetic oligonucleotide
  Antisense strand to SEQ ID NO: 590098
gacuaacagauuuaucuaa

SEQ ID NO: 590100 - RNA, 19 nt, Artificial Sequence
  Description of Artificial Sequence: Synthetic oligonucleotide
  Sense strand starting at position 1244 of SEQ ID NO: 584798
uaguuaaucccauggugaa

SEQ ID NO: 590101 - RNA, 19 nt, Artificial Sequence
  Description of Artificial Sequence: Synthetic oligonucleotide
  Antisense strand to SEQ ID NO: 590100
uucaccaugggauuaacua

SEQ ID NO: 590102 - RNA, 19 nt, Artificial Sequence
  Description of Artificial Sequence: Synthetic oligonucleotide
  Sense strand starting at position 1245 of SEQ ID NO: 584798
aguuaaucccauggugaaa

SEQ ID NO: 590103 - RNA, 19 nt, Artificial Sequence
  Description of Artificial Sequence: Synthetic oligonucleotide
  Antisense strand to SEQ ID NO: 590102
uuucaccaugggauuaacu

SEQ ID NO: 590104 - RNA, 19 nt, Artificial Sequence
  Description of Artificial Sequence: Synthetic oligonucleotide
  Sense strand starting at position 1256 of SEQ ID NO: 584798
uggugaaaccauuagcaug

SEQ ID NO: 590105 - RNA, 19 nt, Artificial Sequence
  Description of Artificial Sequence: Synthetic oligonucleotide
  Antisense strand to SEQ ID NO: 590104
caugcuaaugguuucacca

SEQ ID NO: 590106 - RNA, 19 nt, Artificial Sequence
  Description of Artificial Sequence: Synthetic oligonucleotide
  Sense strand starting at position 1279 of SEQ ID NO: 584798
ccucuuugagcucaucuga

SEQ ID NO: 590107 - RNA, 19 nt, Artificial Sequence
  Description of Artificial Sequence: Synthetic oligonucleotide
  Antisense strand to SEQ ID NO: 590106
ucagaugagcucaaagagg

SEQ ID NO: 590108 - RNA, 19 nt, Artificial Sequence
  Description of Artificial Sequence: Synthetic oligonucleotide
  Sense strand starting at position 1300 of SEQ ID NO: 584798
agagcuccaagaugagauu

SEQ ID NO: 590109 - RNA, 19 nt, Artificial Sequence
  Description of Artificial Sequence: Synthetic oligonucleotide
  Antisense strand to SEQ ID NO: 590108
aaucucaucuuggagcucu

SEQ ID NO: 590110 - RNA, 19 nt, Artificial Sequence
  Description of Artificial Sequence: Synthetic oligonucleotide
  Sense strand starting at position 1388 of SEQ ID NO: 584798
gguuuaucagagcaaauug

SEQ ID NO: 590111 - RNA, 19 nt, Artificial Sequence
  Description of Artificial Sequence: Synthetic oligonucleotide
  Antisense strand to SEQ ID NO: 590110
caauuugcucugauaaacc

SEQ ID NO: 590112 - RNA, 19 nt, Artificial Sequence
  Description of Artificial Sequence: Synthetic oligonucleotide
  Sense strand starting at position 1395 of SEQ ID NO: 584798
cagagcaaauuguuaagua

SEQ ID NO: 590113 - RNA, 19 nt, Artificial Sequence
  Description of Artificial Sequence: Synthetic oligonucleotide
  Antisense strand to SEQ ID NO: 590112
uacuuaacaauuugcucug

SEQ ID NO: 590114 - RNA, 19 nt, Artificial Sequence
  Description of Artificial Sequence: Synthetic oligonucleotide
  Sense strand starting at position 1399 of SEQ ID NO: 584798
gcaaauuguuaaguaaaca

SEQ ID NO: 590115 - RNA, 19 nt, Artificial Sequence
  Description of Artificial Sequence: Synthetic oligonucleotide
  Antisense strand to SEQ ID NO: 590114
uguuuacuuaacaauuugc

SEQ ID NO: 590116 - RNA, 19 nt, Artificial Sequence
  Description of Artificial Sequence: Synthetic oligonucleotide
  Sense strand starting at position 1520 of SEQ ID NO: 584798
gagaaauggaucgguuccu

SEQ ID NO: 590117 - RNA, 19 nt, Artificial Sequence
  Description of Artificial Sequence: Synthetic oligonucleotide
  Antisense strand to SEQ ID NO: 590116
aggaaccgauccauuucuc

SEQ ID NO: 590118 - RNA, 19 nt, Artificial Sequence
  Description of Artificial Sequence: Synthetic oligonucleotide
  Sense strand starting at position 1533 of SEQ ID NO: 584798
guuccugguacggacauau

SEQ ID NO: 590119 - RNA, 19 nt, Artificial Sequence
  Description of Artificial Sequence: Synthetic oligonucleotide
  Antisense strand to SEQ ID NO: 590118
auauguccguaccaggaac

SEQ ID NO: 590120 - RNA, 19 nt, Artificial Sequence
  Description of Artificial Sequence: Synthetic oligonucleotide
  Sense strand starting at position 1572 of SEQ ID NO: 584798
cgucauauauuuccaccuu

SEQ ID NO: 590121 - RNA, 19 nt, Artificial Sequence
  Description of Artificial Sequence: Synthetic oligonucleotide
  Antisense strand to SEQ ID NO: 590120
aagguggaaauauaugacg

SEQ ID NO: 590122 - RNA, 19 nt, Artificial Sequence
  Description of Artificial Sequence: Synthetic oligonucleotide
  Sense strand starting at position 1677 of SEQ ID NO: 584798
aaggaagugguauaugcau

SEQ ID NO: 590123 - RNA, 19 nt, Artificial Sequence
  Description of Artificial Sequence: Synthetic oligonucleotide
  Antisense strand to SEQ ID NO: 590122
augcauauaccacuuccuu

SEQ ID NO: 590124 - RNA, 19 nt, Artificial Sequence
  Description of Artificial Sequence: Synthetic oligonucleotide
  Sense strand starting at position 1685 of SEQ ID NO: 584798
gguauaugcauguagaagu

SEQ ID NO: 590125 - RNA, 19 nt, Artificial Sequence
  Description of Artificial Sequence: Synthetic oligonucleotide
  Antisense strand to SEQ ID NO: 590124
acuucuacaugcauauacc

SEQ ID NO: 590126 - RNA, 19 nt, Artificial Sequence
  Description of Artificial Sequence: Synthetic oligonucleotide
  Sense strand starting at position 1737 of SEQ ID NO: 584798
gaaugucuugaguacuuuc

SEQ ID NO: 590127 - RNA, 19 nt, Artificial Sequence
  Description of Artificial Sequence: Synthetic oligonucleotide
  Antisense strand to SEQ ID NO: 590126
gaaaguacucaagacauuc

SEQ ID NO: 590128 - RNA, 19 nt, Artificial Sequence
  Description of Artificial Sequence: Synthetic oligonucleotide
  Sense strand starting at position 1845 of SEQ ID NO: 584798
ggcugaauuugguucucuu

SEQ ID NO: 590129 - RNA, 19 nt, Artificial Sequence
  Description of Artificial Sequence: Synthetic oligonucleotide
  Antisense strand to SEQ ID NO: 590128
aagagaaccaaauucagcc

SEQ ID NO: 590130 - RNA, 19 nt, Artificial Sequence
  Description of Artificial Sequence: Synthetic oligonucleotide
  Sense strand starting at position 1935 of SEQ ID NO: 584798
gauagauaaucuguagauu

SEQ ID NO: 590131 - RNA, 19 nt, Artificial Sequence
  Description of Artificial Sequence: Synthetic oligonucleotide
  Antisense strand to SEQ ID NO: 590130
aaucuacagauuaucuauc

SEQ ID NO: 590132 - RNA, 19 nt, Artificial Sequence
  Description of Artificial Sequence: Synthetic oligonucleotide
  Sense strand starting at position 1967 of SEQ ID NO: 584798
acaugugggcuuugagaag

SEQ ID NO: 590133 - RNA, 19 nt, Artificial Sequence
  Description of Artificial Sequence: Synthetic oligonucleotide
  Antisense strand to SEQ ID NO: 590132
cuucucaaagcccacaugu

SEQ ID NO: 590134 - RNA, 19 nt, Artificial Sequence
  Description of Artificial Sequence: Synthetic oligonucleotide
  Sense strand starting at position 2049 of SEQ ID NO: 584798
gguuaaaugaaguaagcau

SEQ ID NO: 590135 - RNA, 19 nt, Artificial Sequence
  Description of Artificial Sequence: Synthetic oligonucleotide
  Antisense strand to SEQ ID NO: 590134
augcuuacuucauuuaacc

SEQ ID NO: 590136 - RNA, 19 nt, Artificial Sequence
  Description of Artificial Sequence: Synthetic oligonucleotide
  Sense strand starting at position 2127 of SEQ ID NO: 584798
ugcauauaacaaggaaguu

SEQ ID NO: 590137 - RNA, 19 nt, Artificial Sequence
  Description of Artificial Sequence: Synthetic oligonucleotide
  Antisense strand to SEQ ID NO: 590136
aacuuccuuguuauaugca

SEQ ID NO: 590138 - RNA, 19 nt, Artificial Sequence
  Description of Artificial Sequence: Synthetic oligonucleotide
  Sense strand starting at position 2168 of SEQ ID NO: 584798
ggaggagcagguugauaaa

SEQ ID NO: 590139 - RNA, 19 nt, Artificial Sequence
  Description of Artificial Sequence: Synthetic oligonucleotide
  Antisense strand to SEQ ID NO: 590138
uuuaucaaccugcuccucc

SEQ ID NO: 590140 - RNA, 19 nt, Artificial Sequence
  Description of Artificial Sequence: Synthetic oligonucleotide
  Sense strand starting at position 2248 of SEQ ID NO: 584798
uccugaggucucugagauu

SEQ ID NO: 590141 - RNA, 19 nt, Artificial Sequence
  Description of Artificial Sequence: Synthetic oligonucleotide
  Antisense strand to SEQ ID NO: 590140
aaucucagagaccucagga

SEQ ID NO: 590142 - RNA, 19 nt, Artificial Sequence
  Description of Artificial Sequence: Synthetic oligonucleotide
  Sense strand starting at position 2266 of SEQ ID NO: 584798
ucuagaaagucugcaacaa

SEQ ID NO: 590143 - RNA, 19 nt, Artificial Sequence
  Description of Artificial Sequence: Synthetic oligonucleotide
  Antisense strand to SEQ ID NO: 590142
uuguugcagacuuucuaga

SEQ ID NO: 590144 - RNA, 19 nt, Artificial Sequence
  Description of Artificial Sequence: Synthetic oligonucleotide
  Sense strand starting at position 2624 of SEQ ID NO: 584798
gugacaucgccagcuuguu

SEQ ID NO: 590145 - RNA, 19 nt, Artificial Sequence
  Description of Artificial Sequence: Synthetic oligonucleotide
  Antisense strand to SEQ ID NO: 590144
aacaagcuggcgaugucac

SEQ ID NO: 590146 - RNA, 19 nt, Artificial Sequence
  Description of Artificial Sequence: Synthetic oligonucleotide
  Sense strand starting at position 2732 of SEQ ID NO: 584798
augacuuaaccagggcuua

SEQ ID NO: 590147 - RNA, 19 nt, Artificial Sequence
  Description of Artificial Sequence: Synthetic oligonucleotide
  Antisense strand to SEQ ID NO: 590146
uaagcccugguuaagucau

SEQ ID NO: 590148 - RNA, 19 nt, Artificial Sequence
  Description of Artificial Sequence: Synthetic oligonucleotide
  Sense strand starting at position 2733 of SEQ ID NO: 584798
ugacuuaaccagggcuuaa

SEQ ID NO: 590149 - RNA, 19 nt, Artificial Sequence
  Description of Artificial Sequence: Synthetic oligonucleotide
  Antisense strand to SEQ ID NO: 590148
uuaagcccugguuaaguca

SEQ ID NO: 590150 - RNA, 19 nt, Artificial Sequence
  Description of Artificial Sequence: Synthetic oligonucleotide
  Sense strand starting at position 3603 of SEQ ID NO: 584798
ucaacuugauugguucgaa

SEQ ID NO: 590151 - RNA, 19 nt, Artificial Sequence
  Description of Artificial Sequence: Synthetic oligonucleotide
  Antisense strand to SEQ ID NO: 590150
uucgaaccaaucaaguuga

SEQ ID NO: 590152 - RNA, 19 nt, Artificial Sequence
  Description of Artificial Sequence: Synthetic oligonucleotide
  Sense strand starting at position 3604 of SEQ ID NO: 584798
caacuugauugguucgaag

SEQ ID NO: 590153 - RNA, 19 nt, Artificial Sequence
  Description of Artificial Sequence: Synthetic oligonucleotide
  Antisense strand to SEQ ID NO: 590152
cuucgaaccaaucaaguug

SEQ ID NO: 590154 - RNA, 19 nt, Artificial Sequence
  Description of Artificial Sequence: Synthetic oligonucleotide
  Sense strand starting at position 3606 of SEQ ID NO: 584798
acuugauugguucgaagga

SEQ ID NO: 590155 - RNA, 19 nt, Artificial Sequence
  Description of Artificial Sequence: Synthetic oligonucleotide
  Antisense strand to SEQ ID NO: 590154
uccuucgaaccaaucaagu

SEQ ID NO: 590156 - RNA, 19 nt, Artificial Sequence
  Description of Artificial Sequence: Synthetic oligonucleotide
  Sense strand starting at position 3608 of SEQ ID NO: 584798
uugauugguucgaaggaug

SEQ ID NO: 590157 - RNA, 19 nt, Artificial Sequence
  Description of Artificial Sequence: Synthetic oligonucleotide
  Antisense strand to SEQ ID NO: 590156
cauccuucgaaccaaucaa

SEQ ID NO: 590158 - RNA, 19 nt, Artificial Sequence
  Description of Artificial Sequence: Synthetic oligonucleotide
  Sense strand starting at position 3879 of SEQ ID NO: 584798
uuuggacuccuagauguau

SEQ ID NO: 590159 - RNA, 19 nt, Artificial Sequence
  Description of Artificial Sequence: Synthetic oligonucleotide
  Antisense strand to SEQ ID NO: 590158
auacaucuaggaguccaaa

SEQ ID NO: 590160 - RNA, 19 nt, Artificial Sequence
  Description of Artificial Sequence: Synthetic oligonucleotide
  Sense strand starting at position 3891 of SEQ ID NO: 584798
gauguauaccaaugguuug

SEQ ID NO: 590161 - RNA, 19 nt, Artificial Sequence
  Description of Artificial Sequence: Synthetic oligonucleotide
  Antisense strand to SEQ ID NO: 590160
caaaccauugguauacauc

SEQ ID NO: 590162 - RNA, 19 nt, Artificial Sequence
  Description of Artificial Sequence: Synthetic oligonucleotide
  Sense strand starting at position 12 of SEQ ID NO: 584799
gcccuaucucagggaggau

SEQ ID NO: 590163 - RNA, 19 nt, Artificial Sequence
  Description of Artificial Sequence: Synthetic oligonucleotide
  Antisense strand to SEQ ID NO: 590162
auccucccugagauagggc

SEQ ID NO: 590164 - RNA, 19 nt, Artificial Sequence
  Description of Artificial Sequence: Synthetic oligonucleotide
  Sense strand starting at position 403 of SEQ ID NO: 584799
gagaguuacacuugugagu

SEQ ID NO: 590165 - RNA, 19 nt, Artificial Sequence
  Description of Artificial Sequence: Synthetic oligonucleotide
  Antisense strand to SEQ ID NO: 590164
acucacaaguguaacucuc

SEQ ID NO: 590166 - RNA, 19 nt, Artificial Sequence
  Description of Artificial Sequence: Synthetic oligonucleotide
  Sense strand starting at position 412 of SEQ ID NO: 584799
acuugugagugaucccagu

SEQ ID NO: 590167 - RNA, 19 nt, Artificial Sequence
  Description of Artificial Sequence: Synthetic oligonucleotide
  Antisense strand to SEQ ID NO: 590166
acugggaucacucacaagu

SEQ ID NO: 590168 - RNA, 19 nt, Artificial Sequence
  Description of Artificial Sequence: Synthetic oligonucleotide
  Sense strand starting at position 418 of SEQ ID NO: 584799
gagugaucccaguggccau

SEQ ID NO: 590169 - RNA, 19 nt, Artificial Sequence
  Description of Artificial Sequence: Synthetic oligonucleotide
  Antisense strand to SEQ ID NO: 590168
auggccacugggaucacuc

SEQ ID NO: 590170 - RNA, 19 nt, Artificial Sequence
  Description of Artificial Sequence: Synthetic oligonucleotide
  Sense strand starting at position 463 of SEQ ID NO: 584799
gucagacuuccagaacgug

SEQ ID NO: 590171 - RNA, 19 nt, Artificial Sequence
  Description of Artificial Sequence: Synthetic oligonucleotide
  Antisense strand to SEQ ID NO: 590170
cacguucuggaagucugac

SEQ ID NO: 590172 - RNA, 19 nt, Artificial Sequence
  Description of Artificial Sequence: Synthetic oligonucleotide
  Sense strand starting at position 722 of SEQ ID NO: 584799
aaauuaucccagggugggu

SEQ ID NO: 590173 - RNA, 19 nt, Artificial Sequence
  Description of Artificial Sequence: Synthetic oligonucleotide
  Antisense strand to SEQ ID NO: 590172
acccacccugggauaauuu

SEQ ID NO: 590174 - RNA, 19 nt, Artificial Sequence
  Description of Artificial Sequence: Synthetic oligonucleotide
  Sense strand starting at position 822 of SEQ ID NO: 584799
ccaagugccagcuaagagu

SEQ ID NO: 590175 - RNA, 19 nt, Artificial Sequence
  Description of Artificial Sequence: Synthetic oligonucleotide
  Antisense strand to SEQ ID NO: 590174
acucuuagcuggcacuugg

SEQ ID NO: 590176 - RNA, 19 nt, Artificial Sequence
  Description of Artificial Sequence: Synthetic oligonucleotide
  Sense strand starting at position 850 of SEQ ID NO: 584799
guagcuucccucugacaca

SEQ ID NO: 590177 - RNA, 19 nt, Artificial Sequence
  Description of Artificial Sequence: Synthetic oligonucleotide
  Antisense strand to SEQ ID NO: 590176
ugugucagagggaagcuac

SEQ ID NO: 590178 - RNA, 19 nt, Artificial Sequence
  Description of Artificial Sequence: Synthetic oligonucleotide
  Sense strand starting at position 994 of SEQ ID NO: 584799
uccacuaccuuauugggaa

SEQ ID NO: 590179 - RNA, 19 nt, Artificial Sequence
  Description of Artificial Sequence: Synthetic oligonucleotide
  Antisense strand to SEQ ID NO: 590178
uucccaauaagguagugga

SEQ ID NO: 590180 - RNA, 19 nt, Artificial Sequence
  Description of Artificial Sequence: Synthetic oligonucleotide
  Sense strand starting at position 1057 of SEQ ID NO: 584799
ccaggaaucucugaaggag

SEQ ID NO: 590181 - RNA, 19 nt, Artificial Sequence
  Description of Artificial Sequence: Synthetic oligonucleotide
  Antisense strand to SEQ ID NO: 590180
cuccuucagagauuccugg

SEQ ID NO: 590182 - RNA, 19 nt, Artificial Sequence
  Description of Artificial Sequence: Synthetic oligonucleotide
  Sense strand starting at position 1083 of SEQ ID NO: 584799
ccagucagaggcuguaauu

SEQ ID NO: 590183 - RNA, 19 nt, Artificial Sequence
  Description of Artificial Sequence: Synthetic oligonucleotide
  Antisense strand to SEQ ID NO: 590182
aauuacagccucugacugg

SEQ ID NO: 590184 - RNA, 19 nt, Artificial Sequence
  Description of Artificial Sequence: Synthetic oligonucleotide
  Sense strand starting at position 1100 of SEQ ID NO: 584799
uugugaagguucucaaacu

SEQ ID NO: 590185 - RNA, 19 nt, Artificial Sequence
  Description of Artificial Sequence: Synthetic oligonucleotide
  Antisense strand to SEQ ID NO: 590184
aguuugagaaccuucacaa

SEQ ID NO: 590186 - RNA, 19 nt, Artificial Sequence
  Description of Artificial Sequence: Synthetic oligonucleotide
  Sense strand starting at position 1223 of SEQ ID NO: 584799
gaauucuuacgguagacac

SEQ ID NO: 590187 - RNA, 19 nt, Artificial Sequence
  Description of Artificial Sequence: Synthetic oligonucleotide
  Antisense strand to SEQ ID NO: 590186
gugucuaccguaagaauuc

SEQ ID NO: 590188 - RNA, 19 nt, Artificial Sequence
  Description of Artificial Sequence: Synthetic oligonucleotide
  Sense strand starting at position 1457 of SEQ ID NO: 584799
gugcaaggccuuugggaaa

SEQ ID NO: 590189 - RNA, 19 nt, Artificial Sequence
  Description of Artificial Sequence: Synthetic oligonucleotide
  Antisense strand to SEQ ID NO: 590188
uuucccaaaggccuugcac

SEQ ID NO: 590190 - RNA, 19 nt, Artificial Sequence
  Description of Artificial Sequence: Synthetic oligonucleotide
  Sense strand starting at position 1670 of SEQ ID NO: 584799
gagauagcaccaugguaga

SEQ ID NO: 590191 - RNA, 19 nt, Artificial Sequence
  Description of Artificial Sequence: Synthetic oligonucleotide
  Antisense strand to SEQ ID NO: 590190
ucuaccauggugcuaucuc

SEQ ID NO: 590192 - RNA, 19 nt, Artificial Sequence
  Description of Artificial Sequence: Synthetic oligonucleotide
  Sense strand starting at position 2002 of SEQ ID NO: 584799
cgucuugucacagggaaug

SEQ ID NO: 590193 - RNA, 19 nt, Artificial Sequence
  Description of Artificial Sequence: Synthetic oligonucleotide
  Antisense strand to SEQ ID NO: 590192
cauucccugugacaagacg

SEQ ID NO: 590194 - RNA, 19 nt, Artificial Sequence
  Description of Artificial Sequence: Synthetic oligonucleotide
  Sense strand starting at position 2012 of SEQ ID NO: 584799
cagggaaugcuaggaauuc

SEQ ID NO: 590195 - RNA, 19 nt, Artificial Sequence
  Description of Artificial Sequence: Synthetic oligonucleotide
  Antisense strand to SEQ ID NO: 590194
gaauuccuagcauucccug

SEQ ID NO: 590196 - RNA, 19 nt, Artificial Sequence
  Description of Artificial Sequence: Synthetic oligonucleotide
  Sense strand starting at position 2031 of SEQ ID NO: 584799
augccuuugggacaagagu

SEQ ID NO: 590197 - RNA, 19 nt, Artificial Sequence
  Description of Artificial Sequence: Synthetic oligonucleotide
  Antisense strand to SEQ ID NO: 590196
acucuugucccaaaggcau

SEQ ID NO: 590198 - RNA, 19 nt, Artificial Sequence
  Description of Artificial Sequence: Synthetic oligonucleotide
  Sense strand starting at position 2040 of SEQ ID NO: 584799
ggacaagaguccuucaggu

SEQ ID NO: 590199 - RNA, 19 nt, Artificial Sequence
  Description of Artificial Sequence: Synthetic oligonucleotide
  Antisense strand to SEQ ID NO: 590198
accugaaggacucuugucc

SEQ ID NO: 590200 - RNA, 19 nt, Artificial Sequence
  Description of Artificial Sequence: Synthetic oligonucleotide
  Sense strand starting at position 2266 of SEQ ID NO: 584799
gacuguugucugcaagggu

SEQ ID NO: 590201 - RNA, 19 nt, Artificial Sequence
  Description of Artificial Sequence: Synthetic oligonucleotide
  Antisense strand to SEQ ID NO: 590200
acccuugcagacaacaguc

SEQ ID NO: 590202 - RNA, 19 nt, Artificial Sequence
  Description of Artificial Sequence: Synthetic oligonucleotide
  Sense strand starting at position 2327 of SEQ ID NO: 584799
gagaaaccuguuuggaacu

SEQ ID NO: 590203 - RNA, 19 nt, Artificial Sequence
  Description of Artificial Sequence: Synthetic oligonucleotide
  Antisense strand to SEQ ID NO: 590202
aguuccaaacagguuucuc

SEQ ID NO: 590204 - RNA, 19 nt, Artificial Sequence
  Description of Artificial Sequence: Synthetic oligonucleotide
  Sense strand starting at position 2605 of SEQ ID NO: 584799
aaauccugagaaugucuga

SEQ ID NO: 590205 - RNA, 19 nt, Artificial Sequence
  Description of Artificial Sequence: Synthetic oligonucleotide
  Antisense strand to SEQ ID NO: 590204
ucagacauucucaggauuu

SEQ ID NO: 590206 - RNA, 19 nt, Artificial Sequence
  Description of Artificial Sequence: Synthetic oligonucleotide
  Sense strand starting at position 2640 of SEQ ID NO: 584799
cuaguucagggcugaggau

SEQ ID NO: 590207 - RNA, 19 nt, Artificial Sequence
  Description of Artificial Sequence: Synthetic oligonucleotide
  Antisense strand to SEQ ID NO: 590206
auccucagcccugaacuag

SEQ ID NO: 590208 - RNA, 19 nt, Artificial Sequence
  Description of Artificial Sequence: Synthetic oligonucleotide
  Sense strand starting at position 2658 of SEQ ID NO: 584799
ugggacaguguugauguua

SEQ ID NO: 590209 - RNA, 19 nt, Artificial Sequence
  Description of Artificial Sequence: Synthetic oligonucleotide
  Antisense strand to SEQ ID NO: 590208
uaacaucaacacuguccca

SEQ ID NO: 590210 - RNA, 19 nt, Artificial Sequence
  Description of Artificial Sequence: Synthetic oligonucleotide
  Sense strand starting at position 3346 of SEQ ID NO: 584799
gauggaucccaggguuucu

SEQ ID NO: 590211 - RNA, 19 nt, Artificial Sequence
  Description of Artificial Sequence: Synthetic oligonucleotide
  Antisense strand to SEQ ID NO: 590210
agaaacccugggauccauc

SEQ ID NO: 590212 - RNA, 19 nt, Artificial Sequence
  Description of Artificial Sequence: Synthetic oligonucleotide
  Sense strand starting at position 3434 of SEQ ID NO: 584799
cucccuccgagguagauau

SEQ ID NO: 590213 - RNA, 19 nt, Artificial Sequence
  Description of Artificial Sequence: Synthetic oligonucleotide
  Antisense strand to SEQ ID NO: 590212
auaucuaccucggagggag

SEQ ID NO: 590214 - RNA, 19 nt, Artificial Sequence
  Description of Artificial Sequence: Synthetic oligonucleotide
  Sense strand starting at position 3438 of SEQ ID NO: 584799
cuccgagguagauaucuga

SEQ ID NO: 590215 - RNA, 19 nt, Artificial Sequence
  Description of Artificial Sequence: Synthetic oligonucleotide
  Antisense strand to SEQ ID NO: 590214
ucagauaucuaccucggag

SEQ ID NO: 590216 - RNA, 19 nt, Artificial Sequence
  Description of Artificial Sequence: Synthetic oligonucleotide
  Sense strand starting at position 3442 of SEQ ID NO: 584799
gagguagauaucugaguca

SEQ ID NO: 590217 - RNA, 19 nt, Artificial Sequence
  Description of Artificial Sequence: Synthetic oligonucleotide
  Antisense strand to SEQ ID NO: 590216
ugacucagauaucuaccuc

SEQ ID NO: 590218 - RNA, 19 nt, Artificial Sequence
  Description of Artificial Sequence: Synthetic oligonucleotide
  Sense strand starting at position 3445 of SEQ ID NO: 584799
guagauaucugagucagac

SEQ ID NO: 590219 - RNA, 19 nt, Artificial Sequence
  Description of Artificial Sequence: Synthetic oligonucleotide
  Antisense strand to SEQ ID NO: 590218
gucugacucagauaucuac

SEQ ID NO: 590220 - RNA, 19 nt, Artificial Sequence
  Description of Artificial Sequence: Synthetic oligonucleotide
  Sense strand starting at position 3478 of SEQ ID NO: 584799
agcgauucuauugguuuaa

SEQ ID NO: 590221 - RNA, 19 nt, Artificial Sequence
  Description of Artificial Sequence: Synthetic oligonucleotide
  Antisense strand to SEQ ID NO: 590220
uuaaaccaauagaaucgcu

SEQ ID NO: 590222 - RNA, 19 nt, Artificial Sequence
  Description of Artificial Sequence: Synthetic oligonucleotide
  Sense strand starting at position 3479 of SEQ ID NO: 584799
gcgauucuauugguuuaag

SEQ ID NO: 590223 - RNA, 19 nt, Artificial Sequence
  Description of Artificial Sequence: Synthetic oligonucleotide
  Antisense strand to SEQ ID NO: 590222
cuuaaaccaauagaaucgc

SEQ ID NO: 590224 - RNA, 19 nt, Artificial Sequence
  Description of Artificial Sequence: Synthetic oligonucleotide
  Sense strand starting at position 3480 of SEQ ID NO: 584799
cgauucuauugguuuaaga

SEQ ID NO: 590225 - RNA, 19 nt, Artificial Sequence
  Description of Artificial Sequence: Synthetic oligonucleotide
  Antisense strand to SEQ ID NO: 590224
ucuuaaaccaauagaaucg

SEQ ID NO: 590226 - RNA, 19 nt, Artificial Sequence
  Description of Artificial Sequence: Synthetic oligonucleotide
  Sense strand starting at position 3503 of SEQ ID NO: 584799
cugcguaugagguaaguaa

SEQ ID NO: 590227 - RNA, 19 nt, Artificial Sequence
  Description of Artificial Sequence: Synthetic oligonucleotide
  Antisense strand to SEQ ID NO: 590226
uuacuuaccucauacgcag

SEQ ID NO: 590228 - RNA, 19 nt, Artificial Sequence
  Description of Artificial Sequence: Synthetic oligonucleotide
  Sense strand starting at position 3568 of SEQ ID NO: 584799
guccucuguccagaaguca

SEQ ID NO: 590229 - RNA, 19 nt, Artificial Sequence
  Description of Artificial Sequence: Synthetic oligonucleotide
  Antisense strand to SEQ ID NO: 590228
ugacuucuggacagaggac

SEQ ID NO: 590230 - RNA, 19 nt, Artificial Sequence
  Description of Artificial Sequence: Synthetic oligonucleotide
  Sense strand starting at position 3768 of SEQ ID NO: 584799
gucugagaaauagguuucu

SEQ ID NO: 590231 - RNA, 19 nt, Artificial Sequence
  Description of Artificial Sequence: Synthetic oligonucleotide
  Antisense strand to SEQ ID NO: 590230
agaaaccuauuucucagac

SEQ ID NO: 590232 - RNA, 19 nt, Artificial Sequence
  Description of Artificial Sequence: Synthetic oligonucleotide
  Sense strand starting at position 3773 of SEQ ID NO: 584799
agaaauagguuucucggua

SEQ ID NO: 590233 - RNA, 19 nt, Artificial Sequence
  Description of Artificial Sequence: Synthetic oligonucleotide
  Antisense strand to SEQ ID NO: 590232
uaccgagaaaccuauuucu

SEQ ID NO: 590234 - RNA, 19 nt, Artificial Sequence
  Description of Artificial Sequence: Synthetic oligonucleotide
  Sense strand starting at position 3774 of SEQ ID NO: 584799
gaaauagguuucucgguau

SEQ ID NO: 590235 - RNA, 19 nt, Artificial Sequence
  Description of Artificial Sequence: Synthetic oligonucleotide
  Antisense strand to SEQ ID NO: 590234
auaccgagaaaccuauuuc

SEQ ID NO: 590236 - RNA, 19 nt, Artificial Sequence
  Description of Artificial Sequence: Synthetic oligonucleotide
  Sense strand starting at position 3795 of SEQ ID NO: 584799
guauguuucuguguaagaa

SEQ ID NO: 590237 - RNA, 19 nt, Artificial Sequence
  Description of Artificial Sequence: Synthetic oligonucleotide
  Antisense strand to SEQ ID NO: 590236
uucuuacacagaaacauac

SEQ ID NO: 590238 - RNA, 19 nt, Artificial Sequence
  Description of Artificial Sequence: Synthetic oligonucleotide
  Sense strand starting at position 3796 of SEQ ID NO: 584799
uauguuucuguguaagaaa

SEQ ID NO: 590239 - RNA, 19 nt, Artificial Sequence
  Description of Artificial Sequence: Synthetic oligonucleotide
  Antisense strand to SEQ ID NO: 590238
uuucuuacacagaaacaua

SEQ ID NO: 590240 - RNA, 19 nt, Artificial Sequence
  Description of Artificial Sequence: Synthetic oligonucleotide
  Sense strand starting at position 3914 of SEQ ID NO: 584799
cagagagucucguuaggga

SEQ ID NO: 590241 - RNA, 19 nt, Artificial Sequence
  Description of Artificial Sequence: Synthetic oligonucleotide
  Antisense strand to SEQ ID NO: 590240
ucccuaacgagacucucug

SEQ ID NO: 590242 - RNA, 19 nt, Artificial Sequence
  Description of Artificial Sequence: Synthetic oligonucleotide
  Sense strand starting at position 101 of SEQ ID NO: 584800
cccauagagccacaguuaa

SEQ ID NO: 590243 - RNA, 19 nt, Artificial Sequence
  Description of Artificial Sequence: Synthetic oligonucleotide
  Antisense strand to SEQ ID NO: 590242
uuaacuguggcucuauggg

SEQ ID NO: 590244 - RNA, 19 nt, Artificial Sequence
  Description of Artificial Sequence: Synthetic oligonucleotide
  Sense strand starting at position 130 of SEQ ID NO: 584800
ggcgguucugaucacaaau

SEQ ID NO: 590245 - RNA, 19 nt, Artificial Sequence
  Description of Artificial Sequence: Synthetic oligonucleotide
  Antisense strand to SEQ ID NO: 590244
auuugugaucagaaccgcc

SEQ ID NO: 590246 - RNA, 19 nt, Artificial Sequence
  Description of Artificial Sequence: Synthetic oligonucleotide
  Sense strand starting at position 147 of SEQ ID NO: 584800
auuagauaguuauccucuu

SEQ ID NO: 590247 - RNA, 19 nt, Artificial Sequence
  Description of Artificial Sequence: Synthetic oligonucleotide
  Antisense strand to SEQ ID NO: 590246
aagaggauaacuaucuaau

SEQ ID NO: 590248 - RNA, 19 nt, Artificial Sequence
  Description of Artificial Sequence: Synthetic oligonucleotide
  Sense strand starting at position 154 of SEQ ID NO: 584800
aguuauccucuugaguaga

SEQ ID NO: 590249 - RNA, 19 nt, Artificial Sequence
  Description of Artificial Sequence: Synthetic oligonucleotide
  Antisense strand to SEQ ID NO: 590248
ucuacucaagaggauaacu

SEQ ID NO: 590250 - RNA, 19 nt, Artificial Sequence
  Description of Artificial Sequence: Synthetic oligonucleotide
  Sense strand starting at position 157 of SEQ ID NO: 584800
uauccucuugaguagaagu

SEQ ID NO: 590251 - RNA, 19 nt, Artificial Sequence
  Description of Artificial Sequence: Synthetic oligonucleotide
  Antisense strand to SEQ ID NO: 590250
acuucuacucaagaggaua

SEQ ID NO: 590252 - RNA, 19 nt, Artificial Sequence
  Description of Artificial Sequence: Synthetic oligonucleotide
  Sense strand starting at position 159 of SEQ ID NO: 584800
uccucuugaguagaaguga

SEQ ID NO: 590253 - RNA, 19 nt, Artificial Sequence
  Description of Artificial Sequence: Synthetic oligonucleotide
  Antisense strand to SEQ ID NO: 590252
ucacuucuacucaagagga

SEQ ID NO: 590254 - RNA, 19 nt, Artificial Sequence
  Description of Artificial Sequence: Synthetic oligonucleotide
  Sense strand starting at position 433 of SEQ ID NO: 584800
caggauugacccugugaca

SEQ ID NO: 590255 - RNA, 19 nt, Artificial Sequence
  Description of Artificial Sequence: Synthetic oligonucleotide
  Antisense strand to SEQ ID NO: 590254
ugucacagggucaauccug

SEQ ID NO: 590256 - RNA, 19 nt, Artificial Sequence
  Description of Artificial Sequence: Synthetic oligonucleotide
  Sense strand starting at position 491 of SEQ ID NO: 584800
gaaagauaauguuugugua

SEQ ID NO: 590257 - RNA, 19 nt, Artificial Sequence
  Description of Artificial Sequence: Synthetic oligonucleotide
  Antisense strand to SEQ ID NO: 590256
uacacaaacauuaucuuuc

SEQ ID NO: 590258 - RNA, 19 nt, Artificial Sequence
  Description of Artificial Sequence: Synthetic oligonucleotide
  Sense strand starting at position 492 of SEQ ID NO: 584800
aaagauaauguuuguguag

SEQ ID NO: 590259 - RNA, 19 nt, Artificial Sequence
  Description of Artificial Sequence: Synthetic oligonucleotide
  Antisense strand to SEQ ID NO: 590258
cuacacaaacauuaucuuu

SEQ ID NO: 590260 - RNA, 19 nt, Artificial Sequence
  Description of Artificial Sequence: Synthetic oligonucleotide
  Sense strand starting at position 493 of SEQ ID NO: 584800
aagauaauguuuguguaga

SEQ ID NO: 590261 - RNA, 19 nt, Artificial Sequence
  Description of Artificial Sequence: Synthetic oligonucleotide
  Antisense strand to SEQ ID NO: 590260
ucuacacaaacauuaucuu

SEQ ID NO: 590262 - RNA, 19 nt, Artificial Sequence
  Description of Artificial Sequence: Synthetic oligonucleotide
  Sense strand starting at position 495 of SEQ ID NO: 584800
gauaauguuuguguagaga

SEQ ID NO: 590263 - RNA, 19 nt, Artificial Sequence
  Description of Artificial Sequence: Synthetic oligonucleotide
  Antisense strand to SEQ ID NO: 590262
ucucuacacaaacauuauc

SEQ ID NO: 590264 - RNA, 19 nt, Artificial Sequence
  Description of Artificial Sequence: Synthetic oligonucleotide
  Sense strand starting at position 550 of SEQ ID NO: 584800
agggaugguucuuugcaga

SEQ ID NO: 590265 - RNA, 19 nt, Artificial Sequence
  Description of Artificial Sequence: Synthetic oligonucleotide
  Antisense strand to SEQ ID NO: 590264
ucugcaaagaaccaucccu

SEQ ID NO: 590266 - RNA, 19 nt, Artificial Sequence
  Description of Artificial Sequence: Synthetic oligonucleotide
  Sense strand starting at position 610 of SEQ ID NO: 584800
aagugacccucuuuggaga

SEQ ID NO: 590267 - RNA, 19 nt, Artificial Sequence
  Description of Artificial Sequence: Synthetic oligonucleotide
  Antisense strand to SEQ ID NO: 590266
ucuccaaagagggucacuu

SEQ ID NO: 590268 - RNA, 19 nt, Artificial Sequence
  Description of Artificial Sequence: Synthetic oligonucleotide
  Sense strand starting at position 611 of SEQ ID NO: 584800
agugacccucuuuggagaa

SEQ ID NO: 590269 - RNA, 19 nt, Artificial Sequence
  Description of Artificial Sequence: Synthetic oligonucleotide
  Antisense strand to SEQ ID NO: 590268
uucuccaaagagggucacu

SEQ ID NO: 590270 - RNA, 19 nt, Artificial Sequence
  Description of Artificial Sequence: Synthetic oligonucleotide
  Sense strand starting at position 734 of SEQ ID NO: 584800
guuacaucaguguaucaug

SEQ ID NO: 590271 - RNA, 19 nt, Artificial Sequence
  Description of Artificial Sequence: Synthetic oligonucleotide
  Antisense strand to SEQ ID NO: 590270
caugauacacugauguaac

SEQ ID NO: 590272 - RNA, 19 nt, Artificial Sequence
  Description of Artificial Sequence: Synthetic oligonucleotide
  Sense strand starting at position 776 of SEQ ID NO: 584800
ugugaacugugacugggaa

SEQ ID NO: 590273 - RNA, 19 nt, Artificial Sequence
  Description of Artificial Sequence: Synthetic oligonucleotide
  Antisense strand to SEQ ID NO: 590272
uucccagucacaguucaca

SEQ ID NO: 590274 - RNA, 19 nt, Artificial Sequence
  Description of Artificial Sequence: Synthetic oligonucleotide
  Sense strand starting at position 777 of SEQ ID NO: 584800
gugaacugugacugggaaa

SEQ ID NO: 590275 - RNA, 19 nt, Artificial Sequence
  Description of Artificial Sequence: Synthetic oligonucleotide
  Antisense strand to SEQ ID NO: 590274
uuucccagucacaguucac

SEQ ID NO: 590276 - RNA, 19 nt, Artificial Sequence
  Description of Artificial Sequence: Synthetic oligonucleotide
  Sense strand starting at position 896 of SEQ ID NO: 584800
ggacaugucagccaaagca

SEQ ID NO: 590277 - RNA, 19 nt, Artificial Sequence
  Description of Artificial Sequence: Synthetic oligonucleotide
  Antisense strand to SEQ ID NO: 590276
ugcuuuggcugacaugucc

SEQ ID NO: 590278 - RNA, 19 nt, Artificial Sequence
  Description of Artificial Sequence: Synthetic oligonucleotide
  Sense strand starting at position 1122 of SEQ ID NO: 584800
uauggauagcauugggaca

SEQ ID NO: 590279 - RNA, 19 nt, Artificial Sequence
  Description of Artificial Sequence: Synthetic oligonucleotide
  Antisense strand to SEQ ID NO: 590278
ugucccaaugcuauccaua

SEQ ID NO: 590280 - RNA, 19 nt, Artificial Sequence
  Description of Artificial Sequence: Synthetic oligonucleotide
  Sense strand starting at position 1211 of SEQ ID NO: 584800
aaggcauuugugugucagu

SEQ ID NO: 590281 - RNA, 19 nt, Artificial Sequence
  Description of Artificial Sequence: Synthetic oligonucleotide
  Antisense strand to SEQ ID NO: 590280
acugacacacaaaugccuu

SEQ ID NO: 590282 - RNA, 19 nt, Artificial Sequence
  Description of Artificial Sequence: Synthetic oligonucleotide
  Sense strand starting at position 1212 of SEQ ID NO: 584800
aggcauuugugugucagua

SEQ ID NO: 590283 - RNA, 19 nt, Artificial Sequence
  Description of Artificial Sequence: Synthetic oligonucleotide
  Antisense strand to SEQ ID NO: 590282
uacugacacacaaaugccu

SEQ ID NO: 590284 - RNA, 19 nt, Artificial Sequence
  Description of Artificial Sequence: Synthetic oligonucleotide
  Sense strand starting at position 1225 of SEQ ID NO: 584800
ucaguaagggucuagcagu

SEQ ID NO: 590285 - RNA, 19 nt, Artificial Sequence
  Description of Artificial Sequence: Synthetic oligonucleotide
  Antisense strand to SEQ ID NO: 590284
acugcuagacccuuacuga

SEQ ID NO: 590286 - RNA, 19 nt, Artificial Sequence
  Description of Artificial Sequence: Synthetic oligonucleotide
  Sense strand starting at position 1244 of SEQ ID NO: 584800
guggaaggccacugagaaa

SEQ ID NO: 590287 - RNA, 19 nt, Artificial Sequence
  Description of Artificial Sequence: Synthetic oligonucleotide
  Antisense strand to SEQ ID NO: 590286
uuucucaguggccuuccac

SEQ ID NO: 590288 - RNA, 19 nt, Artificial Sequence
  Description of Artificial Sequence: Synthetic oligonucleotide
  Sense strand starting at position 1403 of SEQ ID NO: 584800
ggaauucccucuccaggau

SEQ ID NO: 590289 - RNA, 19 nt, Artificial Sequence
  Description of Artificial Sequence: Synthetic oligonucleotide
  Antisense strand to SEQ ID NO: 590288
auccuggagagggaauucc

SEQ ID NO: 590290 - RNA, 19 nt, Artificial Sequence
  Description of Artificial Sequence: Synthetic oligonucleotide
  Sense strand starting at position 2277 of SEQ ID NO: 584800
uccgguuaucugcugcuua

SEQ ID NO: 590291 - RNA, 19 nt, Artificial Sequence
  Description of Artificial Sequence: Synthetic oligonucleotide
  Antisense strand to SEQ ID NO: 590290
uaagcagcagauaaccgga

SEQ ID NO: 590292 - RNA, 19 nt, Artificial Sequence
  Description of Artificial Sequence: Synthetic oligonucleotide
  Sense strand starting at position 2279 of SEQ ID NO: 584800
cgguuaucugcugcuuauu

SEQ ID NO: 590293 - RNA, 19 nt, Artificial Sequence
  Description of Artificial Sequence: Synthetic oligonucleotide
  Antisense strand to SEQ ID NO: 590292
aauaagcagcagauaaccg

SEQ ID NO: 590294 - RNA, 19 nt, Artificial Sequence
  Description of Artificial Sequence: Synthetic oligonucleotide
  Sense strand starting at position 2539 of SEQ ID NO: 584800
gagaucucuuuggccuuau

SEQ ID NO: 590295 - RNA, 19 nt, Artificial Sequence
  Description of Artificial Sequence: Synthetic oligonucleotide
  Antisense strand to SEQ ID NO: 590294
auaaggccaaagagaucuc

SEQ ID NO: 590296 - RNA, 19 nt, Artificial Sequence
  Description of Artificial Sequence: Synthetic oligonucleotide
  Sense strand starting at position 2550 of SEQ ID NO: 584800
ggccuuaucccugacccuu

SEQ ID NO: 590297 - RNA, 19 nt, Artificial Sequence
  Description of Artificial Sequence: Synthetic oligonucleotide
  Antisense strand to SEQ ID NO: 590296
aagggucagggauaaggcc

SEQ ID NO: 590298 - RNA, 19 nt, Artificial Sequence
  Description of Artificial Sequence: Synthetic oligonucleotide
  Sense strand starting at position 2746 of SEQ ID NO: 584800
aaugccgauuccucuggaa

SEQ ID NO: 590299 - RNA, 19 nt, Artificial Sequence
  Description of Artificial Sequence: Synthetic oligonucleotide
  Antisense strand to SEQ ID NO: 590298
uuccagaggaaucggcauu

SEQ ID NO: 590300 - RNA, 19 nt, Artificial Sequence
  Description of Artificial Sequence: Synthetic oligonucleotide
  Sense strand starting at position 2778 of SEQ ID NO: 584800
uuaauuugguagccaugua

SEQ ID NO: 590301 - RNA, 19 nt, Artificial Sequence
  Description of Artificial Sequence: Synthetic oligonucleotide
  Antisense strand to SEQ ID NO: 590300
uacauggcuaccaaauuaa

SEQ ID NO: 590302 - RNA, 19 nt, Artificial Sequence
  Description of Artificial Sequence: Synthetic oligonucleotide
  Sense strand starting at position 2980 of SEQ ID NO: 584800
ccuuacucuugagucacau

SEQ ID NO: 590303 - RNA, 19 nt, Artificial Sequence
  Description of Artificial Sequence: Synthetic oligonucleotide
  Antisense strand to SEQ ID NO: 590302
augugacucaagaguaagg

SEQ ID NO: 590304 - RNA, 19 nt, Artificial Sequence
  Description of Artificial Sequence: Synthetic oligonucleotide
  Sense strand starting at position 2986 of SEQ ID NO: 584800
ucuugagucacaugggauc

SEQ ID NO: 590305 - RNA, 19 nt, Artificial Sequence
  Description of Artificial Sequence: Synthetic oligonucleotide
  Antisense strand to SEQ ID NO: 590304
gaucccaugugacucaaga

SEQ ID NO: 590306 - RNA, 19 nt, Artificial Sequence
  Description of Artificial Sequence: Synthetic oligonucleotide
  Sense strand starting at position 2988 of SEQ ID NO: 584800
uugagucacaugggaucuu

SEQ ID NO: 590307 - RNA, 19 nt, Artificial Sequence
  Description of Artificial Sequence: Synthetic oligonucleotide
  Antisense strand to SEQ ID NO: 590306
aagaucccaugugacucaa

SEQ ID NO: 590308 - RNA, 19 nt, Artificial Sequence
  Description of Artificial Sequence: Synthetic oligonucleotide
  Sense strand starting at position 3032 of SEQ ID NO: 584800
accuuuacccugcauuagu

SEQ ID NO: 590309 - RNA, 19 nt, Artificial Sequence
  Description of Artificial Sequence: Synthetic oligonucleotide
  Antisense strand to SEQ ID NO: 590308
acuaaugcaggguaaaggu

SEQ ID NO: 590310 - RNA, 19 nt, Artificial Sequence
  Description of Artificial Sequence: Synthetic oligonucleotide
  Sense strand starting at position 3051 of SEQ ID NO: 584800
uuacaugcccucgggaaga

SEQ ID NO: 590311 - RNA, 19 nt, Artificial Sequence
  Description of Artificial Sequence: Synthetic oligonucleotide
  Antisense strand to SEQ ID NO: 590310
ucuucccgagggcauguaa

SEQ ID NO: 590312 - RNA, 19 nt, Artificial Sequence
  Description of Artificial Sequence: Synthetic oligonucleotide
  Sense strand starting at position 3082 of SEQ ID NO: 584800
ggaggacuguuaccuaauu

SEQ ID NO: 590313 - RNA, 19 nt, Artificial Sequence
  Description of Artificial Sequence: Synthetic oligonucleotide
  Antisense strand to SEQ ID NO: 590312
aauuagguaacaguccucc

SEQ ID NO: 590314 - RNA, 19 nt, Artificial Sequence
  Description of Artificial Sequence: Synthetic oligonucleotide
  Sense strand starting at position 3121 of SEQ ID NO: 584800
agggucagugauuguagga

SEQ ID NO: 590315 - RNA, 19 nt, Artificial Sequence
  Description of Artificial Sequence: Synthetic oligonucleotide
  Antisense strand to SEQ ID NO: 590314
uccuacaaucacugacccu

SEQ ID NO: 590316 - RNA, 19 nt, Artificial Sequence
  Description of Artificial Sequence: Synthetic oligonucleotide
  Sense strand starting at position 3342 of SEQ ID NO: 584800
cuacucuguguacaacauu

SEQ ID NO: 590317 - RNA, 19 nt, Artificial Sequence
  Description of Artificial Sequence: Synthetic oligonucleotide
  Antisense strand to SEQ ID NO: 590316
aauguuguacacagaguag

SEQ ID NO: 590318 - RNA, 19 nt, Artificial Sequence
  Description of Artificial Sequence: Synthetic oligonucleotide
  Sense strand starting at position 3467 of SEQ ID NO: 584800
cgauguucccacuauccaa

SEQ ID NO: 590319 - RNA, 19 nt, Artificial Sequence
  Description of Artificial Sequence: Synthetic oligonucleotide
  Antisense strand to SEQ ID NO: 590318
uuggauagugggaacaucg

SEQ ID NO: 590320 - RNA, 19 nt, Artificial Sequence
  Description of Artificial Sequence: Synthetic oligonucleotide
  Sense strand starting at position 3755 of SEQ ID NO: 584800
ucaccauggcgacaagaua

SEQ ID NO: 590321 - RNA, 19 nt, Artificial Sequence
  Description of Artificial Sequence: Synthetic oligonucleotide
  Antisense strand to SEQ ID NO: 590320
uaucuugucgccaugguga

SEQ ID NO: 590322 - RNA, 19 nt, Artificial Sequence
  Description of Artificial Sequence: Synthetic oligonucleotide
  Sense strand starting at position 305 of SEQ ID NO: 584801
uccgguuaucugcugcuua

SEQ ID NO: 590323 - RNA, 19 nt, Artificial Sequence
  Description of Artificial Sequence: Synthetic oligonucleotide
  Antisense strand to SEQ ID NO: 590322
uaagcagcagauaaccgga

SEQ ID NO: 590324 - RNA, 19 nt, Artificial Sequence
  Description of Artificial Sequence: Synthetic oligonucleotide
  Sense strand starting at position 307 of SEQ ID NO: 584801
cgguuaucugcugcuuauu

SEQ ID NO: 590325 - RNA, 19 nt, Artificial Sequence
  Description of Artificial Sequence: Synthetic oligonucleotide
  Antisense strand to SEQ ID NO: 590324
aauaagcagcagauaaccg

SEQ ID NO: 590326 - RNA, 19 nt, Artificial Sequence
  Description of Artificial Sequence: Synthetic oligonucleotide
  Sense strand starting at position 567 of SEQ ID NO: 584801
gagaucucuuuggccuuau

SEQ ID NO: 590327 - RNA, 19 nt, Artificial Sequence
  Description of Artificial Sequence: Synthetic oligonucleotide
  Antisense strand to SEQ ID NO: 590326
auaaggccaaagagaucuc

SEQ ID NO: 590328 - RNA, 19 nt, Artificial Sequence
  Description of Artificial Sequence: Synthetic oligonucleotide
  Sense strand starting at position 578 of SEQ ID NO: 584801
ggccuuaucccugacccuu

SEQ ID NO: 590329 - RNA, 19 nt, Artificial Sequence
  Description of Artificial Sequence: Synthetic oligonucleotide
  Antisense strand to SEQ ID NO: 590328
aagggucagggauaaggcc

SEQ ID NO: 590330 - RNA, 19 nt, Artificial Sequence
  Description of Artificial Sequence: Synthetic oligonucleotide
  Sense strand starting at position 774 of SEQ ID NO: 584801
aaugccgauuccucuggaa

SEQ ID NO: 590331 - RNA, 19 nt, Artificial Sequence
  Description of Artificial Sequence: Synthetic oligonucleotide
  Antisense strand to SEQ ID NO: 590330
uuccagaggaaucggcauu

SEQ ID NO: 590332 - RNA, 19 nt, Artificial Sequence
  Description of Artificial Sequence: Synthetic oligonucleotide
  Sense strand starting at position 806 of SEQ ID NO: 584801
uuaauuugguagccaugua

SEQ ID NO: 590333 - RNA, 19 nt, Artificial Sequence
  Description of Artificial Sequence: Synthetic oligonucleotide
  Antisense strand to SEQ ID NO: 590332
uacauggcuaccaaauuaa

SEQ ID NO: 590334 - RNA, 19 nt, Artificial Sequence
  Description of Artificial Sequence: Synthetic oligonucleotide
  Sense strand starting at position 1008 of SEQ ID NO: 584801
ccuuacucuugagucacau

SEQ ID NO: 590335 - RNA, 19 nt, Artificial Sequence
  Description of Artificial Sequence: Synthetic oligonucleotide
  Antisense strand to SEQ ID NO: 590334
augugacucaagaguaagg

SEQ ID NO: 590336 - RNA, 19 nt, Artificial Sequence
  Description of Artificial Sequence: Synthetic oligonucleotide
  Sense strand starting at position 1014 of SEQ ID NO: 584801
ucuugagucacaugggauc

SEQ ID NO: 590337 - RNA, 19 nt, Artificial Sequence
  Description of Artificial Sequence: Synthetic oligonucleotide
  Antisense strand to SEQ ID NO: 590336
gaucccaugugacucaaga

SEQ ID NO: 590338 - RNA, 19 nt, Artificial Sequence
  Description of Artificial Sequence: Synthetic oligonucleotide
  Sense strand starting at position 1016 of SEQ ID NO: 584801
uugagucacaugggaucuu

SEQ ID NO: 590339 - RNA, 19 nt, Artificial Sequence
  Description of Artificial Sequence: Synthetic oligonucleotide
  Antisense strand to SEQ ID NO: 590338
aagaucccaugugacucaa

SEQ ID NO: 590340 - RNA, 19 nt, Artificial Sequence
  Description of Artificial Sequence: Synthetic oligonucleotide
  Sense strand starting at position 1060 of SEQ ID NO: 584801
accuuuacccugcauuagu

SEQ ID NO: 590341 - RNA, 19 nt, Artificial Sequence
  Description of Artificial Sequence: Synthetic oligonucleotide
  Antisense strand to SEQ ID NO: 590340
acuaaugcaggguaaaggu

SEQ ID NO: 590342 - RNA, 19 nt, Artificial Sequence
  Description of Artificial Sequence: Synthetic oligonucleotide
  Sense strand starting at position 1079 of SEQ ID NO: 584801
uuacaugcccucgggaaga

SEQ ID NO: 590343 - RNA, 19 nt, Artificial Sequence
  Description of Artificial Sequence: Synthetic oligonucleotide
  Antisense strand to SEQ ID NO: 590342
ucuucccgagggcauguaa

SEQ ID NO: 590344 - RNA, 19 nt, Artificial Sequence
  Description of Artificial Sequence: Synthetic oligonucleotide
  Sense strand starting at position 1110 of SEQ ID NO: 584801
ggaggacuguuaccuaauu

SEQ ID NO: 590345 - RNA, 19 nt, Artificial Sequence
  Description of Artificial Sequence: Synthetic oligonucleotide
  Antisense strand to SEQ ID NO: 590344
aauuagguaacaguccucc

SEQ ID NO: 590346 - RNA, 19 nt, Artificial Sequence
  Description of Artificial Sequence: Synthetic oligonucleotide
  Sense strand starting at position 1149 of SEQ ID NO: 584801
agggucagugauuguagga

SEQ ID NO: 590347 - RNA, 19 nt, Artificial Sequence
  Description of Artificial Sequence: Synthetic oligonucleotide
  Antisense strand to SEQ ID NO: 590346
uccuacaaucacugacccu

SEQ ID NO: 590348 - RNA, 19 nt, Artificial Sequence
  Description of Artificial Sequence: Synthetic oligonucleotide
  Sense strand starting at position 1370 of SEQ ID NO: 584801
cuacucuguguacaacauu

SEQ ID NO: 590349 - RNA, 19 nt, Artificial Sequence
  Description of Artificial Sequence: Synthetic oligonucleotide
  Antisense strand to SEQ ID NO: 590348
aauguuguacacagaguag

SEQ ID NO: 590350 - RNA, 19 nt, Artificial Sequence
  Description of Artificial Sequence: Synthetic oligonucleotide
  Sense strand starting at position 1495 of SEQ ID NO: 584801
cgauguucccacuauccaa

SEQ ID NO: 590351 - RNA, 19 nt, Artificial Sequence
  Description of Artificial Sequence: Synthetic oligonucleotide
  Antisense strand to SEQ ID NO: 590350
uuggauagugggaacaucg

SEQ ID NO: 590352 - RNA, 19 nt, Artificial Sequence
  Description of Artificial Sequence: Synthetic oligonucleotide
  Sense strand starting at position 1783 of SEQ ID NO: 584801
ucaccauggcgacaagaua

SEQ ID NO: 590353 - RNA, 19 nt, Artificial Sequence
  Description of Artificial Sequence: Synthetic oligonucleotide
  Antisense strand to SEQ ID NO: 590352
uaucuugucgccaugguga

SEQ ID NO: 590354 - RNA, 19 nt, Artificial Sequence
  Description of Artificial Sequence: Synthetic oligonucleotide
  Sense strand starting at position 2013 of SEQ ID NO: 584801
gggcgaggucuauagguag

SEQ ID NO: 590355 - RNA, 19 nt, Artificial Sequence
  Description of Artificial Sequence: Synthetic oligonucleotide
  Antisense strand to SEQ ID NO: 590354
cuaccuauagaccucgccc

SEQ ID NO: 590356 - RNA, 19 nt, Artificial Sequence
  Description of Artificial Sequence: Synthetic oligonucleotide
  Sense strand starting at position 2024 of SEQ ID NO: 584801
auagguagucccgagcaaa

SEQ ID NO: 590357 - RNA, 19 nt, Artificial Sequence
  Description of Artificial Sequence: Synthetic oligonucleotide
  Antisense strand to SEQ ID NO: 590356
uuugcucgggacuaccuau

SEQ ID NO: 590358 - RNA, 19 nt, Artificial Sequence
  Description of Artificial Sequence: Synthetic oligonucleotide
  Sense strand starting at position 2036 of SEQ ID NO: 584801
gagcaaauugcuuauggcu

SEQ ID NO: 590359 - RNA, 19 nt, Artificial Sequence
  Description of Artificial Sequence: Synthetic oligonucleotide
  Antisense strand to SEQ ID NO: 590358
agccauaagcaauuugcuc

SEQ ID NO: 590360 - RNA, 19 nt, Artificial Sequence
  Description of Artificial Sequence: Synthetic oligonucleotide
  Sense strand starting at position 2054 of SEQ ID NO: 584801
uuugguuaugacugacaac

SEQ ID NO: 590361 - RNA, 19 nt, Artificial Sequence
  Description of Artificial Sequence: Synthetic oligonucleotide
  Antisense strand to SEQ ID NO: 590360
guugucagucauaaccaaa

SEQ ID NO: 590362 - RNA, 19 nt, Artificial Sequence
  Description of Artificial Sequence: Synthetic oligonucleotide
  Sense strand starting at position 2110 of SEQ ID NO: 584801
gcguguagcgaguuauuac

SEQ ID NO: 590363 - RNA, 19 nt, Artificial Sequence
  Description of Artificial Sequence: Synthetic oligonucleotide
  Antisense strand to SEQ ID NO: 590362
guaauaacucgcuacacgc

SEQ ID NO: 590364 - RNA, 19 nt, Artificial Sequence
  Description of Artificial Sequence: Synthetic oligonucleotide
  Sense strand starting at position 2531 of SEQ ID NO: 584801
accuguacuggugagaauc

SEQ ID NO: 590365 - RNA, 19 nt, Artificial Sequence
  Description of Artificial Sequence: Synthetic oligonucleotide
  Antisense strand to SEQ ID NO: 590364
gauucucaccaguacaggu

SEQ ID NO: 590366 - RNA, 19 nt, Artificial Sequence
  Description of Artificial Sequence: Synthetic oligonucleotide
  Sense strand starting at position 2593 of SEQ ID NO: 584801
gaggcuaggagcgaauaau

SEQ ID NO: 590367 - RNA, 19 nt, Artificial Sequence
  Description of Artificial Sequence: Synthetic oligonucleotide
  Antisense strand to SEQ ID NO: 590366
auuauucgcuccuagccuc

SEQ ID NO: 590368 - RNA, 19 nt, Artificial Sequence
  Description of Artificial Sequence: Synthetic oligonucleotide
  Sense strand starting at position 2668 of SEQ ID NO: 584801
gacauaagacuuugcuggu

SEQ ID NO: 590369 - RNA, 19 nt, Artificial Sequence
  Description of Artificial Sequence: Synthetic oligonucleotide
  Antisense strand to SEQ ID NO: 590368
accagcaaagucuuauguc

SEQ ID NO: 590370 - RNA, 19 nt, Artificial Sequence
  Description of Artificial Sequence: Synthetic oligonucleotide
  Sense strand starting at position 2669 of SEQ ID NO: 584801
acauaagacuuugcuggua

SEQ ID NO: 590371 - RNA, 19 nt, Artificial Sequence
  Description of Artificial Sequence: Synthetic oligonucleotide
  Antisense strand to SEQ ID NO: 590370
uaccagcaaagucuuaugu

SEQ ID NO: 590372 - RNA, 19 nt, Artificial Sequence
  Description of Artificial Sequence: Synthetic oligonucleotide
  Sense strand starting at position 2699 of SEQ ID NO: 584801
gaguauaacggucgagauc

SEQ ID NO: 590373 - RNA, 19 nt, Artificial Sequence
  Description of Artificial Sequence: Synthetic oligonucleotide
  Antisense strand to SEQ ID NO: 590372
gaucucgaccguuauacuc

SEQ ID NO: 590374 - RNA, 19 nt, Artificial Sequence
  Description of Artificial Sequence: Synthetic oligonucleotide
  Sense strand starting at position 2700 of SEQ ID NO: 584801
aguauaacggucgagaucu

SEQ ID NO: 590375 - RNA, 19 nt, Artificial Sequence
  Description of Artificial Sequence: Synthetic oligonucleotide
  Antisense strand to SEQ ID NO: 590374
agaucucgaccguuauacu

SEQ ID NO: 590376 - RNA, 19 nt, Artificial Sequence
  Description of Artificial Sequence: Synthetic oligonucleotide
  Sense strand starting at position 2708 of SEQ ID NO: 584801
ggucgagaucuguggaaag

SEQ ID NO: 590377 - RNA, 19 nt, Artificial Sequence
  Description of Artificial Sequence: Synthetic oligonucleotide
  Antisense strand to SEQ ID NO: 590376
cuuuccacagaucucgacc

SEQ ID NO: 590378 - RNA, 19 nt, Artificial Sequence
  Description of Artificial Sequence: Synthetic oligonucleotide
  Sense strand starting at position 2718 of SEQ ID NO: 584801
uguggaaagaaaggucuua

SEQ ID NO: 590379 - RNA, 19 nt, Artificial Sequence
  Description of Artificial Sequence: Synthetic oligonucleotide
  Antisense strand to SEQ ID NO: 590378
uaagaccuuucuuuccaca

SEQ ID NO: 590380 - RNA, 19 nt, Artificial Sequence
  Description of Artificial Sequence: Synthetic oligonucleotide
  Sense strand starting at position 2755 of SEQ ID NO: 584801
acgugaugugcugagaaga

SEQ ID NO: 590381 - RNA, 19 nt, Artificial Sequence
  Description of Artificial Sequence: Synthetic oligonucleotide
  Antisense strand to SEQ ID NO: 590380
ucuucucagcacaucacgu

SEQ ID NO: 590382 - RNA, 19 nt, Artificial Sequence
  Description of Artificial Sequence: Synthetic oligonucleotide
  Sense strand starting at position 2980 of SEQ ID NO: 584801
gcagacuugaaagguuaaa

SEQ ID NO: 590383 - RNA, 19 nt, Artificial Sequence
  Description of Artificial Sequence: Synthetic oligonucleotide
  Antisense strand to SEQ ID NO: 590382
uuuaaccuuucaagucugc

SEQ ID NO: 590384 - RNA, 19 nt, Artificial Sequence
  Description of Artificial Sequence: Synthetic oligonucleotide
  Sense strand starting at position 3014 of SEQ ID NO: 584801
ggacauuauugagcuugaa

SEQ ID NO: 590385 - RNA, 19 nt, Artificial Sequence
  Description of Artificial Sequence: Synthetic oligonucleotide
  Antisense strand to SEQ ID NO: 590384
uucaagcucaauaaugucc

SEQ ID NO: 590386 - RNA, 19 nt, Artificial Sequence
  Description of Artificial Sequence: Synthetic oligonucleotide
  Sense strand starting at position 3017 of SEQ ID NO: 584801
cauuauugagcuugaaagu

SEQ ID NO: 590387 - RNA, 19 nt, Artificial Sequence
  Description of Artificial Sequence: Synthetic oligonucleotide
  Antisense strand to SEQ ID NO: 590386
acuuucaagcucaauaaug

SEQ ID NO: 590388 - RNA, 19 nt, Artificial Sequence
  Description of Artificial Sequence: Synthetic oligonucleotide
  Sense strand starting at position 3018 of SEQ ID NO: 584801
auuauugagcuugaaagug

SEQ ID NO: 590389 - RNA, 19 nt, Artificial Sequence
  Description of Artificial Sequence: Synthetic oligonucleotide
  Antisense strand to SEQ ID NO: 590388
cacuuucaagcucaauaau

SEQ ID NO: 590390 - RNA, 19 nt, Artificial Sequence
  Description of Artificial Sequence: Synthetic oligonucleotide
  Sense strand starting at position 3023 of SEQ ID NO: 584801
ugagcuugaaagugaguaa

SEQ ID NO: 590391 - RNA, 19 nt, Artificial Sequence
  Description of Artificial Sequence: Synthetic oligonucleotide
  Antisense strand to SEQ ID NO: 590390
uuacucacuuucaagcuca

SEQ ID NO: 590392 - RNA, 19 nt, Artificial Sequence
  Description of Artificial Sequence: Synthetic oligonucleotide
  Sense strand starting at position 3287 of SEQ ID NO: 584801
caugguagagguugcagaa

SEQ ID NO: 590393 - RNA, 19 nt, Artificial Sequence
  Description of Artificial Sequence: Synthetic oligonucleotide
  Antisense strand to SEQ ID NO: 590392
uucugcaaccucuaccaug

SEQ ID NO: 590394 - RNA, 19 nt, Artificial Sequence
  Description of Artificial Sequence: Synthetic oligonucleotide
  Sense strand starting at position 3449 of SEQ ID NO: 584801
gugcguacucaggagauga

SEQ ID NO: 590395 - RNA, 19 nt, Artificial Sequence
  Description of Artificial Sequence: Synthetic oligonucleotide
  Antisense strand to SEQ ID NO: 590394
ucaucuccugaguacgcac

SEQ ID NO: 590396 - RNA, 19 nt, Artificial Sequence
  Description of Artificial Sequence: Synthetic oligonucleotide
  Sense strand starting at position 3662 of SEQ ID NO: 584801
uggagguguugcuuaggga

SEQ ID NO: 590397 - RNA, 19 nt, Artificial Sequence
  Description of Artificial Sequence: Synthetic oligonucleotide
  Antisense strand to SEQ ID NO: 590396
ucccuaagcaacaccucca

SEQ ID NO: 590398 - RNA, 19 nt, Artificial Sequence
  Description of Artificial Sequence: Synthetic oligonucleotide
  Sense strand starting at position 3663 of SEQ ID NO: 584801
ggagguguugcuuagggaa

SEQ ID NO: 590399 - RNA, 19 nt, Artificial Sequence
  Description of Artificial Sequence: Synthetic oligonucleotide
  Antisense strand to SEQ ID NO: 590398
uucccuaagcaacaccucc

SEQ ID NO: 590400 - RNA, 19 nt, Artificial Sequence
  Description of Artificial Sequence: Synthetic oligonucleotide
  Sense strand starting at position 3842 of SEQ ID NO: 584801
ugucccuuccuugacagau

SEQ ID NO: 590401 - RNA, 19 nt, Artificial Sequence
  Description of Artificial Sequence: Synthetic oligonucleotide
  Antisense strand to SEQ ID NO: 590400
aucugucaaggaagggaca

SEQ ID NO: 590402 - RNA, 19 nt, Artificial Sequence
  Description of Artificial Sequence: Synthetic oligonucleotide
  Sense strand starting at position 186 of SEQ ID NO: 584802
uugcucaagguuuauaagu

SEQ ID NO: 590403 - RNA, 19 nt, Artificial Sequence
  Description of Artificial Sequence: Synthetic oligonucleotide
  Antisense strand to SEQ ID NO: 590402
acuuauaaaccuugagcaa

SEQ ID NO: 590404 - RNA, 19 nt, Artificial Sequence
  Description of Artificial Sequence: Synthetic oligonucleotide
  Sense strand starting at position 191 of SEQ ID NO: 584802
caagguuuauaaguaauga

SEQ ID NO: 590405 - RNA, 19 nt, Artificial Sequence
  Description of Artificial Sequence: Synthetic oligonucleotide
  Antisense strand to SEQ ID NO: 590404
ucauuacuuauaaaccuug

SEQ ID NO: 590406 - RNA, 19 nt, Artificial Sequence
  Description of Artificial Sequence: Synthetic oligonucleotide
  Sense strand starting at position 230 of SEQ ID NO: 584802
agguaugagggcuaaguga

SEQ ID NO: 590407 - RNA, 19 nt, Artificial Sequence
  Description of Artificial Sequence: Synthetic oligonucleotide
  Antisense strand to SEQ ID NO: 590406
ucacuuagcccucauaccu

SEQ ID NO: 590408 - RNA, 19 nt, Artificial Sequence
  Description of Artificial Sequence: Synthetic oligonucleotide
  Sense strand starting at position 298 of SEQ ID NO: 584802
ugggauuacuacuuaucua

SEQ ID NO: 590409 - RNA, 19 nt, Artificial Sequence
  Description of Artificial Sequence: Synthetic oligonucleotide
  Antisense strand to SEQ ID NO: 590408
uagauaaguaguaauccca

SEQ ID NO: 590410 - RNA, 19 nt, Artificial Sequence
  Description of Artificial Sequence: Synthetic oligonucleotide
  Sense strand starting at position 351 of SEQ ID NO: 584802
gaagaaugguaucccuuau

SEQ ID NO: 590411 - RNA, 19 nt, Artificial Sequence
  Description of Artificial Sequence: Synthetic oligonucleotide
  Antisense strand to SEQ ID NO: 590410
auaagggauaccauucuuc

SEQ ID NO: 590412 - RNA, 19 nt, Artificial Sequence
  Description of Artificial Sequence: Synthetic oligonucleotide
  Sense strand starting at position 434 of SEQ ID NO: 584802
gucuuucuaagagaugugu

SEQ ID NO: 590413 - RNA, 19 nt, Artificial Sequence
  Description of Artificial Sequence: Synthetic oligonucleotide
  Antisense strand to SEQ ID NO: 590412
acacaucucuuagaaagac

SEQ ID NO: 590414 - RNA, 19 nt, Artificial Sequence
  Description of Artificial Sequence: Synthetic oligonucleotide
  Sense strand starting at position 480 of SEQ ID NO: 584802
gcuuauuacuaaguagaua

SEQ ID NO: 590415 - RNA, 19 nt, Artificial Sequence
  Description of Artificial Sequence: Synthetic oligonucleotide
  Antisense strand to SEQ ID NO: 590414
uaucuacuuaguaauaagc

SEQ ID NO: 590416 - RNA, 19 nt, Artificial Sequence
  Description of Artificial Sequence: Synthetic oligonucleotide
  Sense strand starting at position 698 of SEQ ID NO: 584802
aacugagagucguugacua

SEQ ID NO: 590417 - RNA, 19 nt, Artificial Sequence
  Description of Artificial Sequence: Synthetic oligonucleotide
  Antisense strand to SEQ ID NO: 590416
uagucaacgacucucaguu

SEQ ID NO: 590418 - RNA, 19 nt, Artificial Sequence
  Description of Artificial Sequence: Synthetic oligonucleotide
  Sense strand starting at position 700 of SEQ ID NO: 584802
cugagagucguugacuaau

SEQ ID NO: 590419 - RNA, 19 nt, Artificial Sequence
  Description of Artificial Sequence: Synthetic oligonucleotide
  Antisense strand to SEQ ID NO: 590418
auuagucaacgacucucag

SEQ ID NO: 590420 - RNA, 19 nt, Artificial Sequence
  Description of Artificial Sequence: Synthetic oligonucleotide
  Sense strand starting at position 702 of SEQ ID NO: 584802
gagagucguugacuaauca

SEQ ID NO: 590421 - RNA, 19 nt, Artificial Sequence
  Description of Artificial Sequence: Synthetic oligonucleotide
  Antisense strand to SEQ ID NO: 590420
ugauuagucaacgacucuc

SEQ ID NO: 590422 - RNA, 19 nt, Artificial Sequence
  Description of Artificial Sequence: Synthetic oligonucleotide
  Sense strand starting at position 706 of SEQ ID NO: 584802
gucguugacuaaucacaga

SEQ ID NO: 590423 - RNA, 19 nt, Artificial Sequence
  Description of Artificial Sequence: Synthetic oligonucleotide
  Antisense strand to SEQ ID NO: 590422
ucugugauuagucaacgac

SEQ ID NO: 590424 - RNA, 19 nt, Artificial Sequence
  Description of Artificial Sequence: Synthetic oligonucleotide
  Sense strand starting at position 845 of SEQ ID NO: 584802
gcaguuaauuuguuacuca

SEQ ID NO: 590425 - RNA, 19 nt, Artificial Sequence
  Description of Artificial Sequence: Synthetic oligonucleotide
  Antisense strand to SEQ ID NO: 590424
ugaguaacaaauuaacugc

SEQ ID NO: 590426 - RNA, 19 nt, Artificial Sequence
  Description of Artificial Sequence: Synthetic oligonucleotide
  Sense strand starting at position 874 of SEQ ID NO: 584802
acuuaagauuuggagcuaa

SEQ ID NO: 590427 - RNA, 19 nt, Artificial Sequence
  Description of Artificial Sequence: Synthetic oligonucleotide
  Antisense strand to SEQ ID NO: 590426
uuagcuccaaaucuuaagu

SEQ ID NO: 590428 - RNA, 19 nt, Artificial Sequence
  Description of Artificial Sequence: Synthetic oligonucleotide
  Sense strand starting at position 888 of SEQ ID NO: 584802
gcuaaauaagugcagauga

SEQ ID NO: 590429 - RNA, 19 nt, Artificial Sequence
  Description of Artificial Sequence: Synthetic oligonucleotide
  Antisense strand to SEQ ID NO: 590428
ucaucugcacuuauuuagc

SEQ ID NO: 590430 - RNA, 19 nt, Artificial Sequence
  Description of Artificial Sequence: Synthetic oligonucleotide
  Sense strand starting at position 965 of SEQ ID NO: 584802
cacauuuaucagugcgaau

SEQ ID NO: 590431 - RNA, 19 nt, Artificial Sequence
  Description of Artificial Sequence: Synthetic oligonucleotide
  Antisense strand to SEQ ID NO: 590430
auucgcacugauaaaugug

SEQ ID NO: 590432 - RNA, 19 nt, Artificial Sequence
  Description of Artificial Sequence: Synthetic oligonucleotide
  Sense strand starting at position 967 of SEQ ID NO: 584802
cauuuaucagugcgaauuc

SEQ ID NO: 590433 - RNA, 19 nt, Artificial Sequence
  Description of Artificial Sequence: Synthetic oligonucleotide
  Antisense strand to SEQ ID NO: 590432
gaauucgcacugauaaaug

SEQ ID NO: 590434 - RNA, 19 nt, Artificial Sequence
  Description of Artificial Sequence: Synthetic oligonucleotide
  Sense strand starting at position 1017 of SEQ ID NO: 584802
ucucaccuccuguaaggaa

SEQ ID NO: 590435 - RNA, 19 nt, Artificial Sequence
  Description of Artificial Sequence: Synthetic oligonucleotide
  Antisense strand to SEQ ID NO: 590434
uuccuuacaggaggugaga

SEQ ID NO: 590436 - RNA, 19 nt, Artificial Sequence
  Description of Artificial Sequence: Synthetic oligonucleotide
  Sense strand starting at position 1077 of SEQ ID NO: 584802
uuaagaaguguuuagguuu

SEQ ID NO: 590437 - RNA, 19 nt, Artificial Sequence
  Description of Artificial Sequence: Synthetic oligonucleotide
  Antisense strand to SEQ ID NO: 590436
aaaccuaaacacuucuuaa

SEQ ID NO: 590438 - RNA, 19 nt, Artificial Sequence
  Description of Artificial Sequence: Synthetic oligonucleotide
  Sense strand starting at position 1335 of SEQ ID NO: 584802
agcagaaagcugcaaacua

SEQ ID NO: 590439 - RNA, 19 nt, Artificial Sequence
  Description of Artificial Sequence: Synthetic oligonucleotide
  Antisense strand to SEQ ID NO: 590438
uaguuugcagcuuucugcu

SEQ ID NO: 590440 - RNA, 19 nt, Artificial Sequence
  Description of Artificial Sequence: Synthetic oligonucleotide
  Sense strand starting at position 1441 of SEQ ID NO: 584802
gaacauguugcaugacaca

SEQ ID NO: 590441 - RNA, 19 nt, Artificial Sequence
  Description of Artificial Sequence: Synthetic oligonucleotide
  Antisense strand to SEQ ID NO: 590440
ugugucaugcaacauguuc

SEQ ID NO: 590442 - RNA, 19 nt, Artificial Sequence
  Description of Artificial Sequence: Synthetic oligonucleotide
  Sense strand starting at position 1580 of SEQ ID NO: 584802
ggaacagcagcuugaaauc

SEQ ID NO: 590443 - RNA, 19 nt, Artificial Sequence
  Description of Artificial Sequence: Synthetic oligonucleotide
  Antisense strand to SEQ ID NO: 590442
gauuucaagcugcuguucc

SEQ ID NO: 590444 - RNA, 19 nt, Artificial Sequence
  Description of Artificial Sequence: Synthetic oligonucleotide
  Sense strand starting at position 1930 of SEQ ID NO: 584802
agaaauugccacuaguuua

SEQ ID NO: 590445 - RNA, 19 nt, Artificial Sequence
  Description of Artificial Sequence: Synthetic oligonucleotide
  Antisense strand to SEQ ID NO: 590444
uaaacuaguggcaauuucu

SEQ ID NO: 590446 - RNA, 19 nt, Artificial Sequence
  Description of Artificial Sequence: Synthetic oligonucleotide
  Sense strand starting at position 1935 of SEQ ID NO: 584802
uugccacuaguuuauaaga

SEQ ID NO: 590447 - RNA, 19 nt, Artificial Sequence
  Description of Artificial Sequence: Synthetic oligonucleotide
  Antisense strand to SEQ ID NO: 590446
ucuuauaaacuaguggcaa

SEQ ID NO: 590448 - RNA, 19 nt, Artificial Sequence
  Description of Artificial Sequence: Synthetic oligonucleotide
  Sense strand starting at position 1946 of SEQ ID NO: 584802
uuauaagagcuguaaguca

SEQ ID NO: 590449 - RNA, 19 nt, Artificial Sequence
  Description of Artificial Sequence: Synthetic oligonucleotide
  Antisense strand to SEQ ID NO: 590448
ugacuuacagcucuuauaa

SEQ ID NO: 590450 - RNA, 19 nt, Artificial Sequence
  Description of Artificial Sequence: Synthetic oligonucleotide
  Sense strand starting at position 2149 of SEQ ID NO: 584802
uuccaauuaguguaaggca

SEQ ID NO: 590451 - RNA, 19 nt, Artificial Sequence
  Description of Artificial Sequence: Synthetic oligonucleotide
  Antisense strand to SEQ ID NO: 590450
ugccuuacacuaauuggaa

SEQ ID NO: 590452 - RNA, 19 nt, Artificial Sequence
  Description of Artificial Sequence: Synthetic oligonucleotide
  Sense strand starting at position 2200 of SEQ ID NO: 584802
uuugaaaucuggcucggga

SEQ ID NO: 590453 - RNA, 19 nt, Artificial Sequence
  Description of Artificial Sequence: Synthetic oligonucleotide
  Antisense strand to SEQ ID NO: 590452
ucccgagccagauuucaaa

SEQ ID NO: 590454 - RNA, 19 nt, Artificial Sequence
  Description of Artificial Sequence: Synthetic oligonucleotide
  Sense strand starting at position 2202 of SEQ ID NO: 584802
ugaaaucuggcucgggaag

SEQ ID NO: 590455 - RNA, 19 nt, Artificial Sequence
  Description of Artificial Sequence: Synthetic oligonucleotide
  Antisense strand to SEQ ID NO: 590454
cuucccgagccagauuuca

SEQ ID NO: 590456 - RNA, 19 nt, Artificial Sequence
  Description of Artificial Sequence: Synthetic oligonucleotide
  Sense strand starting at position 2360 of SEQ ID NO: 584802
ccuggaaauuguccucagu

SEQ ID NO: 590457 - RNA, 19 nt, Artificial Sequence
  Description of Artificial Sequence: Synthetic oligonucleotide
  Antisense strand to SEQ ID NO: 590456
acugaggacaauuuccagg

SEQ ID NO: 590458 - RNA, 19 nt, Artificial Sequence
  Description of Artificial Sequence: Synthetic oligonucleotide
  Sense strand starting at position 2362 of SEQ ID NO: 584802
uggaaauuguccucaguug

SEQ ID NO: 590459 - RNA, 19 nt, Artificial Sequence
  Description of Artificial Sequence: Synthetic oligonucleotide
  Antisense strand to SEQ ID NO: 590458
caacugaggacaauuucca

SEQ ID NO: 590460 - RNA, 19 nt, Artificial Sequence
  Description of Artificial Sequence: Synthetic oligonucleotide
  Sense strand starting at position 2538 of SEQ ID NO: 584802
gauguuaugaagugggaug

SEQ ID NO: 590461 - RNA, 19 nt, Artificial Sequence
  Description of Artificial Sequence: Synthetic oligonucleotide
  Antisense strand to SEQ ID NO: 590460
caucccacuucauaacauc

SEQ ID NO: 590462 - RNA, 19 nt, Artificial Sequence
  Description of Artificial Sequence: Synthetic oligonucleotide
  Sense strand starting at position 2539 of SEQ ID NO: 584802
auguuaugaagugggauga

SEQ ID NO: 590463 - RNA, 19 nt, Artificial Sequence
  Description of Artificial Sequence: Synthetic oligonucleotide
  Antisense strand to SEQ ID NO: 590462
ucaucccacuucauaacau

SEQ ID NO: 590464 - RNA, 19 nt, Artificial Sequence
  Description of Artificial Sequence: Synthetic oligonucleotide
  Sense strand starting at position 2540 of SEQ ID NO: 584802
uguuaugaagugggaugaa

SEQ ID NO: 590465 - RNA, 19 nt, Artificial Sequence
  Description of Artificial Sequence: Synthetic oligonucleotide
  Antisense strand to SEQ ID NO: 590464
uucaucccacuucauaaca

SEQ ID NO: 590466 - RNA, 19 nt, Artificial Sequence
  Description of Artificial Sequence: Synthetic oligonucleotide
  Sense strand starting at position 2699 of SEQ ID NO: 584802
ugggcagaccuuuauagua

SEQ ID NO: 590467 - RNA, 19 nt, Artificial Sequence
  Description of Artificial Sequence: Synthetic oligonucleotide
  Antisense strand to SEQ ID NO: 590466
uacuauaaaggucugccca

SEQ ID NO: 590468 - RNA, 19 nt, Artificial Sequence
  Description of Artificial Sequence: Synthetic oligonucleotide
  Sense strand starting at position 2761 of SEQ ID NO: 584802
ccagaaaugccaggaucua

SEQ ID NO: 590469 - RNA, 19 nt, Artificial Sequence
  Description of Artificial Sequence: Synthetic oligonucleotide
  Antisense strand to SEQ ID NO: 590468
uagauccuggcauuucugg

SEQ ID NO: 590470 - RNA, 19 nt, Artificial Sequence
  Description of Artificial Sequence: Synthetic oligonucleotide
  Sense strand starting at position 2868 of SEQ ID NO: 584802
acuugacuccuggguuaac

SEQ ID NO: 590471 - RNA, 19 nt, Artificial Sequence
  Description of Artificial Sequence: Synthetic oligonucleotide
  Antisense strand to SEQ ID NO: 590470
guuaacccaggagucaagu

SEQ ID NO: 590472 - RNA, 19 nt, Artificial Sequence
  Description of Artificial Sequence: Synthetic oligonucleotide
  Sense strand starting at position 2991 of SEQ ID NO: 584802
gugugucaugaagacagaa

SEQ ID NO: 590473 - RNA, 19 nt, Artificial Sequence
  Description of Artificial Sequence: Synthetic oligonucleotide
  Antisense strand to SEQ ID NO: 590472
uucugucuucaugacacac

SEQ ID NO: 590474 - RNA, 19 nt, Artificial Sequence
  Description of Artificial Sequence: Synthetic oligonucleotide
  Sense strand starting at position 3404 of SEQ ID NO: 584802
uugaauucugaaugguaau

SEQ ID NO: 590475 - RNA, 19 nt, Artificial Sequence
  Description of Artificial Sequence: Synthetic oligonucleotide
  Antisense strand to SEQ ID NO: 590474
auuaccauucagaauucaa

SEQ ID NO: 590476 - RNA, 19 nt, Artificial Sequence
  Description of Artificial Sequence: Synthetic oligonucleotide
  Sense strand starting at position 3532 of SEQ ID NO: 584802
uccugaucucaguacuuua

SEQ ID NO: 590477 - RNA, 19 nt, Artificial Sequence
  Description of Artificial Sequence: Synthetic oligonucleotide
  Antisense strand to SEQ ID NO: 590476
uaaaguacugagaucagga

SEQ ID NO: 590478 - RNA, 19 nt, Artificial Sequence
  Description of Artificial Sequence: Synthetic oligonucleotide
  Sense strand starting at position 3632 of SEQ ID NO: 584802
agucccaguuaucucagau

SEQ ID NO: 590479 - RNA, 19 nt, Artificial Sequence
  Description of Artificial Sequence: Synthetic oligonucleotide
  Antisense strand to SEQ ID NO: 590478
aucugagauaacugggacu

SEQ ID NO: 590480 - RNA, 19 nt, Artificial Sequence
  Description of Artificial Sequence: Synthetic oligonucleotide
  Sense strand starting at position 3904 of SEQ ID NO: 584802
uuugguugagacgaaguuu

SEQ ID NO: 590481 - RNA, 19 nt, Artificial Sequence
  Description of Artificial Sequence: Synthetic oligonucleotide
  Antisense strand to SEQ ID NO: 590480
aaacuucgucucaaccaaa

SEQ ID NO: 590482 - RNA, 19 nt, Artificial Sequence
  Description of Artificial Sequence: Synthetic oligonucleotide
  Sense strand starting at position 29 of SEQ ID NO: 584803
gcucuagugucaccacuua

SEQ ID NO: 590483 - RNA, 19 nt, Artificial Sequence
  Description of Artificial Sequence: Synthetic oligonucleotide
  Antisense strand to SEQ ID NO: 590482
uaaguggugacacuagagc

SEQ ID NO: 590484 - RNA, 19 nt, Artificial Sequence
  Description of Artificial Sequence: Synthetic oligonucleotide
  Sense strand starting at position 95 of SEQ ID NO: 584803
uuccuugucugggaauuua

SEQ ID NO: 590485 - RNA, 19 nt, Artificial Sequence
  Description of Artificial Sequence: Synthetic oligonucleotide
  Antisense strand to SEQ ID NO: 590484
uaaauucccagacaaggaa

SEQ ID NO: 590486 - RNA, 19 nt, Artificial Sequence
  Description of Artificial Sequence: Synthetic oligonucleotide
  Sense strand starting at position 642 of SEQ ID NO: 584803
ugcgcucagccaucucuaa

SEQ ID NO: 590487 - RNA, 19 nt, Artificial Sequence
  Description of Artificial Sequence: Synthetic oligonucleotide
  Antisense strand to SEQ ID NO: 590486
uuagagauggcugagcgca

SEQ ID NO: 590488 - RNA, 19 nt, Artificial Sequence
  Description of Artificial Sequence: Synthetic oligonucleotide
  Sense strand starting at position 690 of SEQ ID NO: 584803
agaauuaacggcuaauauu

SEQ ID NO: 590489 - RNA, 19 nt, Artificial Sequence
  Description of Artificial Sequence: Synthetic oligonucleotide
  Antisense strand to SEQ ID NO: 590488
aauauuagccguuaauucu

SEQ ID NO: 590490 - RNA, 19 nt, Artificial Sequence
  Description of Artificial Sequence: Synthetic oligonucleotide
  Sense strand starting at position 815 of SEQ ID NO: 584803
gcgucuaagagauauuaca

SEQ ID NO: 590491 - RNA, 19 nt, Artificial Sequence
  Description of Artificial Sequence: Synthetic oligonucleotide
  Antisense strand to SEQ ID NO: 590490
uguaauaucucuuagacgc

SEQ ID NO: 590492 - RNA, 19 nt, Artificial Sequence
  Description of Artificial Sequence: Synthetic oligonucleotide
  Sense strand starting at position 894 of SEQ ID NO: 584803
gccaauauguggcucaaua

SEQ ID NO: 590493 - RNA, 19 nt, Artificial Sequence
  Description of Artificial Sequence: Synthetic oligonucleotide
  Antisense strand to SEQ ID NO: 590492
uauugagccacauauuggc

SEQ ID NO: 590494 - RNA, 19 nt, Artificial Sequence
  Description of Artificial Sequence: Synthetic oligonucleotide
  Sense strand starting at position 904 of SEQ ID NO: 584803
ggcucaauaucauugggag

SEQ ID NO: 590495 - RNA, 19 nt, Artificial Sequence
  Description of Artificial Sequence: Synthetic oligonucleotide
  Antisense strand to SEQ ID NO: 590494
cucccaaugauauugagcc

SEQ ID NO: 590496 - RNA, 19 nt, Artificial Sequence
  Description of Artificial Sequence: Synthetic oligonucleotide
  Sense strand starting at position 905 of SEQ ID NO: 584803
gcucaauaucauugggaga

SEQ ID NO: 590497 - RNA, 19 nt, Artificial Sequence
  Description of Artificial Sequence: Synthetic oligonucleotide
  Antisense strand to SEQ ID NO: 590496
ucucccaaugauauugagc

SEQ ID NO: 590498 - RNA, 19 nt, Artificial Sequence
  Description of Artificial Sequence: Synthetic oligonucleotide
  Sense strand starting at position 927 of SEQ ID NO: 584803
aacugagaggcuugauaau

SEQ ID NO: 590499 - RNA, 19 nt, Artificial Sequence
  Description of Artificial Sequence: Synthetic oligonucleotide
  Antisense strand to SEQ ID NO: 590498
auuaucaagccucucaguu

SEQ ID NO: 590500 - RNA, 19 nt, Artificial Sequence
  Description of Artificial Sequence: Synthetic oligonucleotide
  Sense strand starting at position 937 of SEQ ID NO: 584803
cuugauaauucgcuccuua

SEQ ID NO: 590501 - RNA, 19 nt, Artificial Sequence
  Description of Artificial Sequence: Synthetic oligonucleotide
  Antisense strand to SEQ ID NO: 590500
uaaggagcgaauuaucaag

SEQ ID NO: 590502 - RNA, 19 nt, Artificial Sequence
  Description of Artificial Sequence: Synthetic oligonucleotide
  Sense strand starting at position 1081 of SEQ ID NO: 584803
acaagauucuagguauggu

SEQ ID NO: 590503 - RNA, 19 nt, Artificial Sequence
  Description of Artificial Sequence: Synthetic oligonucleotide
  Antisense strand to SEQ ID NO: 590502
accauaccuagaaucuugu

SEQ ID NO: 590504 - RNA, 19 nt, Artificial Sequence
  Description of Artificial Sequence: Synthetic oligonucleotide
  Sense strand starting at position 1084 of SEQ ID NO: 584803
agauucuagguaugguuua

SEQ ID NO: 590505 - RNA, 19 nt, Artificial Sequence
  Description of Artificial Sequence: Synthetic oligonucleotide
  Antisense strand to SEQ ID NO: 590504
uaaaccauaccuagaaucu

SEQ ID NO: 590506 - RNA, 19 nt, Artificial Sequence
  Description of Artificial Sequence: Synthetic oligonucleotide
  Sense strand starting at position 1150 of SEQ ID NO: 584803
uucccagaguacucauaag

SEQ ID NO: 590507 - RNA, 19 nt, Artificial Sequence
  Description of Artificial Sequence: Synthetic oligonucleotide
  Antisense strand to SEQ ID NO: 590506
cuuaugaguacucugggaa

SEQ ID NO: 590508 - RNA, 19 nt, Artificial Sequence
  Description of Artificial Sequence: Synthetic oligonucleotide
  Sense strand starting at position 1209 of SEQ ID NO: 584803
guuaaugcaacaggugaaa

SEQ ID NO: 590509 - RNA, 19 nt, Artificial Sequence
  Description of Artificial Sequence: Synthetic oligonucleotide
  Antisense strand to SEQ ID NO: 590508
uuucaccuguugcauuaac

SEQ ID NO: 590510 - RNA, 19 nt, Artificial Sequence
  Description of Artificial Sequence: Synthetic oligonucleotide
  Sense strand starting at position 1233 of SEQ ID NO: 584803
guuggcaucucuuucucaa

SEQ ID NO: 590511 - RNA, 19 nt, Artificial Sequence
  Description of Artificial Sequence: Synthetic oligonucleotide
  Antisense strand to SEQ ID NO: 590510
uugagaaagagaugccaac

SEQ ID NO: 590512 - RNA, 19 nt, Artificial Sequence
  Description of Artificial Sequence: Synthetic oligonucleotide
  Sense strand starting at position 2442 of SEQ ID NO: 584803
acgcgaucgcgcccacaaa

SEQ ID NO: 590513 - RNA, 19 nt, Artificial Sequence
  Description of Artificial Sequence: Synthetic oligonucleotide
  Antisense strand to SEQ ID NO: 590512
uuugugggcgcgaucgcgu

SEQ ID NO: 590514 - RNA, 19 nt, Artificial Sequence
  Description of Artificial Sequence: Synthetic oligonucleotide
  Sense strand starting at position 2701 of SEQ ID NO: 584803
cgugaauacacucgugaau

SEQ ID NO: 590515 - RNA, 19 nt, Artificial Sequence
  Description of Artificial Sequence: Synthetic oligonucleotide
  Antisense strand to SEQ ID NO: 590514
auucacgaguguauucacg

SEQ ID NO: 590516 - RNA, 19 nt, Artificial Sequence
  Description of Artificial Sequence: Synthetic oligonucleotide
  Sense strand starting at position 2852 of SEQ ID NO: 584803
cccuaaauccugugaggaa

SEQ ID NO: 590517 - RNA, 19 nt, Artificial Sequence
  Description of Artificial Sequence: Synthetic oligonucleotide
  Antisense strand to SEQ ID NO: 590516
uuccucacaggauuuaggg

SEQ ID NO: 590518 - RNA, 19 nt, Artificial Sequence
  Description of Artificial Sequence: Synthetic oligonucleotide
  Sense strand starting at position 2997 of SEQ ID NO: 584803
acaguagaguauccuaaau

SEQ ID NO: 590519 - RNA, 19 nt, Artificial Sequence
  Description of Artificial Sequence: Synthetic oligonucleotide
  Antisense strand to SEQ ID NO: 590518
auuuaggauacucuacugu

SEQ ID NO: 590520 - RNA, 19 nt, Artificial Sequence
  Description of Artificial Sequence: Synthetic oligonucleotide
  Sense strand starting at position 3203 of SEQ ID NO: 584803
augauuacuuugccuagga

SEQ ID NO: 590521 - RNA, 19 nt, Artificial Sequence
  Description of Artificial Sequence: Synthetic oligonucleotide
  Antisense strand to SEQ ID NO: 590520
uccuaggcaaaguaaucau

SEQ ID NO: 590522 - RNA, 19 nt, Artificial Sequence
  Description of Artificial Sequence: Synthetic oligonucleotide
  Sense strand starting at position 3204 of SEQ ID NO: 584803
ugauuacuuugccuaggau

SEQ ID NO: 590523 - RNA, 19 nt, Artificial Sequence
  Description of Artificial Sequence: Synthetic oligonucleotide
  Antisense strand to SEQ ID NO: 590522
auccuaggcaaaguaauca

SEQ ID NO: 590524 - RNA, 19 nt, Artificial Sequence
  Description of Artificial Sequence: Synthetic oligonucleotide
  Sense strand starting at position 3205 of SEQ ID NO: 584803
gauuacuuugccuaggaua

SEQ ID NO: 590525 - RNA, 19 nt, Artificial Sequence
  Description of Artificial Sequence: Synthetic oligonucleotide
  Antisense strand to SEQ ID NO: 590524
uauccuaggcaaaguaauc

SEQ ID NO: 590526 - RNA, 19 nt, Artificial Sequence
  Description of Artificial Sequence: Synthetic oligonucleotide
  Sense strand starting at position 3207 of SEQ ID NO: 584803
uuacuuugccuaggauaca

SEQ ID NO: 590527 - RNA, 19 nt, Artificial Sequence
  Description of Artificial Sequence: Synthetic oligonucleotide
  Antisense strand to SEQ ID NO: 590526
uguauccuaggcaaaguaa

SEQ ID NO: 590528 - RNA, 19 nt, Artificial Sequence
  Description of Artificial Sequence: Synthetic oligonucleotide
  Sense strand starting at position 3233 of SEQ ID NO: 584803
ccaucucccugacuaguuu

SEQ ID NO: 590529 - RNA, 19 nt, Artificial Sequence
  Description of Artificial Sequence: Synthetic oligonucleotide
  Antisense strand to SEQ ID NO: 590528
aaacuagucagggagaugg

SEQ ID NO: 590530 - RNA, 19 nt, Artificial Sequence
  Description of Artificial Sequence: Synthetic oligonucleotide
  Sense strand starting at position 3289 of SEQ ID NO: 584803
auugaaucauguguaccau

SEQ ID NO: 590531 - RNA, 19 nt, Artificial Sequence
  Description of Artificial Sequence: Synthetic oligonucleotide
  Antisense strand to SEQ ID NO: 590530
augguacacaugauucaau

SEQ ID NO: 590532 - RNA, 19 nt, Artificial Sequence
  Description of Artificial Sequence: Synthetic oligonucleotide
  Sense strand starting at position 3323 of SEQ ID NO: 584803
auugaauuauguguaccau

SEQ ID NO: 590533 - RNA, 19 nt, Artificial Sequence
  Description of Artificial Sequence: Synthetic oligonucleotide
  Antisense strand to SEQ ID NO: 590532
augguacacauaauucaau

SEQ ID NO: 590534 - RNA, 19 nt, Artificial Sequence
  Description of Artificial Sequence: Synthetic oligonucleotide
  Sense strand starting at position 3324 of SEQ ID NO: 584803
uugaauuauguguaccaug

SEQ ID NO: 590535 - RNA, 19 nt, Artificial Sequence
  Description of Artificial Sequence: Synthetic oligonucleotide
  Antisense strand to SEQ ID NO: 590534
caugguacacauaauucaa

SEQ ID NO: 590536 - RNA, 19 nt, Artificial Sequence
  Description of Artificial Sequence: Synthetic oligonucleotide
  Sense strand starting at position 3431 of SEQ ID NO: 584803
gccaaauguuguccauccu

SEQ ID NO: 590537 - RNA, 19 nt, Artificial Sequence
  Description of Artificial Sequence: Synthetic oligonucleotide
  Antisense strand to SEQ ID NO: 590536
aggauggacaacauuuggc

SEQ ID NO: 590538 - RNA, 19 nt, Artificial Sequence
  Description of Artificial Sequence: Synthetic oligonucleotide
  Sense strand starting at position 3432 of SEQ ID NO: 584803
ccaaauguuguccauccuu

SEQ ID NO: 590539 - RNA, 19 nt, Artificial Sequence
  Description of Artificial Sequence: Synthetic oligonucleotide
  Antisense strand to SEQ ID NO: 590538
aaggauggacaacauuugg

SEQ ID NO: 590540 - RNA, 19 nt, Artificial Sequence
  Description of Artificial Sequence: Synthetic oligonucleotide
  Sense strand starting at position 3437 of SEQ ID NO: 584803
uguuguccauccuuugaau

SEQ ID NO: 590541 - RNA, 19 nt, Artificial Sequence
  Description of Artificial Sequence: Synthetic oligonucleotide
  Antisense strand to SEQ ID NO: 590540
auucaaaggauggacaaca

SEQ ID NO: 590542 - RNA, 19 nt, Artificial Sequence
  Description of Artificial Sequence: Synthetic oligonucleotide
  Sense strand starting at position 3495 of SEQ ID NO: 584803
ccuauuagacuucggauac

SEQ ID NO: 590543 - RNA, 19 nt, Artificial Sequence
  Description of Artificial Sequence: Synthetic oligonucleotide
  Antisense strand to SEQ ID NO: 590542
guauccgaagucuaauagg

SEQ ID NO: 590544 - RNA, 19 nt, Artificial Sequence
  Description of Artificial Sequence: Synthetic oligonucleotide
  Sense strand starting at position 3499 of SEQ ID NO: 584803
uuagacuucggauacucau

SEQ ID NO: 590545 - RNA, 19 nt, Artificial Sequence
  Description of Artificial Sequence: Synthetic oligonucleotide
  Antisense strand to SEQ ID NO: 590544
augaguauccgaagucuaa

SEQ ID NO: 590546 - RNA, 19 nt, Artificial Sequence
  Description of Artificial Sequence: Synthetic oligonucleotide
  Sense strand starting at position 3505 of SEQ ID NO: 584803
uucggauacucauucuaua

SEQ ID NO: 590547 - RNA, 19 nt, Artificial Sequence
  Description of Artificial Sequence: Synthetic oligonucleotide
  Antisense strand to SEQ ID NO: 590546
uauagaaugaguauccgaa

SEQ ID NO: 590548 - RNA, 19 nt, Artificial Sequence
  Description of Artificial Sequence: Synthetic oligonucleotide
  Sense strand starting at position 3532 of SEQ ID NO: 584803
uuuggaugcucauucuaua

SEQ ID NO: 590549 - RNA, 19 nt, Artificial Sequence
  Description of Artificial Sequence: Synthetic oligonucleotide
  Antisense strand to SEQ ID NO: 590548
uauagaaugagcauccaaa

SEQ ID NO: 590550 - RNA, 19 nt, Artificial Sequence
  Description of Artificial Sequence: Synthetic oligonucleotide
  Sense strand starting at position 3661 of SEQ ID NO: 584803
gagcuccuucuaggaggua

SEQ ID NO: 590551 - RNA, 19 nt, Artificial Sequence
  Description of Artificial Sequence: Synthetic oligonucleotide
  Antisense strand to SEQ ID NO: 590550
uaccuccuagaaggagcuc

SEQ ID NO: 590552 - RNA, 19 nt, Artificial Sequence
  Description of Artificial Sequence: Synthetic oligonucleotide
  Sense strand starting at position 3670 of SEQ ID NO: 584803
cuaggagguaugcauugua

SEQ ID NO: 590553 - RNA, 19 nt, Artificial Sequence
  Description of Artificial Sequence: Synthetic oligonucleotide
  Antisense strand to SEQ ID NO: 590552
uacaaugcauaccuccuag

SEQ ID NO: 590554 - RNA, 19 nt, Artificial Sequence
  Description of Artificial Sequence: Synthetic oligonucleotide
  Sense strand starting at position 3673 of SEQ ID NO: 584803
ggagguaugcauuguaggu

SEQ ID NO: 590555 - RNA, 19 nt, Artificial Sequence
  Description of Artificial Sequence: Synthetic oligonucleotide
  Antisense strand to SEQ ID NO: 590554
accuacaaugcauaccucc

SEQ ID NO: 590556 - RNA, 19 nt, Artificial Sequence
  Description of Artificial Sequence: Synthetic oligonucleotide
  Sense strand starting at position 3809 of SEQ ID NO: 584803
cagacuagcggauguguaa

SEQ ID NO: 590557 - RNA, 19 nt, Artificial Sequence
  Description of Artificial Sequence: Synthetic oligonucleotide
  Antisense strand to SEQ ID NO: 590556
uuacacauccgcuagucug

SEQ ID NO: 590558 - RNA, 19 nt, Artificial Sequence
  Description of Artificial Sequence: Synthetic oligonucleotide
  Sense strand starting at position 3945 of SEQ ID NO: 584803
uguagaguuguccagguua

SEQ ID NO: 590559 - RNA, 19 nt, Artificial Sequence
  Description of Artificial Sequence: Synthetic oligonucleotide
  Antisense strand to SEQ ID NO: 590558
uaaccuggacaacucuaca

SEQ ID NO: 590560 - RNA, 19 nt, Artificial Sequence
  Description of Artificial Sequence: Synthetic oligonucleotide
  Sense strand starting at position 3947 of SEQ ID NO: 584803
uagaguuguccagguuagg

SEQ ID NO: 590561 - RNA, 19 nt, Artificial Sequence
  Description of Artificial Sequence: Synthetic oligonucleotide
  Antisense strand to SEQ ID NO: 590560
ccuaaccuggacaacucua

SEQ ID NO: 590562 - RNA, 19 nt, Artificial Sequence
  Description of Artificial Sequence: Synthetic oligonucleotide
  Sense strand starting at position 5 of SEQ ID NO: 584804
ugaguaccuuguuuggaca

SEQ ID NO: 590563 - RNA, 19 nt, Artificial Sequence
  Description of Artificial Sequence: Synthetic oligonucleotide
  Antisense strand to SEQ ID NO: 590562
uguccaaacaagguacuca

SEQ ID NO: 590564 - RNA, 19 nt, Artificial Sequence
  Description of Artificial Sequence: Synthetic oligonucleotide
  Sense strand starting at position 12 of SEQ ID NO: 584804
cuuguuuggacauguguuu

SEQ ID NO: 590565 - RNA, 19 nt, Artificial Sequence
  Description of Artificial Sequence: Synthetic oligonucleotide
  Antisense strand to SEQ ID NO: 590564
aaacacauguccaaacaag

SEQ ID NO: 590566 - RNA, 19 nt, Artificial Sequence
  Description of Artificial Sequence: Synthetic oligonucleotide
  Sense strand starting at position 38 of SEQ ID NO: 584804
gccugcauucuuugagguu

SEQ ID NO: 590567 - RNA, 19 nt, Artificial Sequence
  Description of Artificial Sequence: Synthetic oligonucleotide
  Antisense strand to SEQ ID NO: 590566
aaccucaaagaaugcaggc

SEQ ID NO: 590568 - RNA, 19 nt, Artificial Sequence
  Description of Artificial Sequence: Synthetic oligonucleotide
  Sense strand starting at position 39 of SEQ ID NO: 584804
ccugcauucuuugagguua

SEQ ID NO: 590569 - RNA, 19 nt, Artificial Sequence
  Description of Artificial Sequence: Synthetic oligonucleotide
  Antisense strand to SEQ ID NO: 590568
uaaccucaaagaaugcagg

SEQ ID NO: 590570 - RNA, 19 nt, Artificial Sequence
  Description of Artificial Sequence: Synthetic oligonucleotide
  Sense strand starting at position 41 of SEQ ID NO: 584804
ugcauucuuugagguuaag

SEQ ID NO: 590571 - RNA, 19 nt, Artificial Sequence
  Description of Artificial Sequence: Synthetic oligonucleotide
  Antisense strand to SEQ ID NO: 590570
cuuaaccucaaagaaugca

SEQ ID NO: 590572 - RNA, 19 nt, Artificial Sequence
  Description of Artificial Sequence: Synthetic oligonucleotide
  Sense strand starting at position 50 of SEQ ID NO: 584804
ugagguuaaggcugucuua

SEQ ID NO: 590573 - RNA, 19 nt, Artificial Sequence
  Description of Artificial Sequence: Synthetic oligonucleotide
  Antisense strand to SEQ ID NO: 590572
uaagacagccuuaaccuca

SEQ ID NO: 590574 - RNA, 19 nt, Artificial Sequence
  Description of Artificial Sequence: Synthetic oligonucleotide
  Sense strand starting at position 53 of SEQ ID NO: 584804
gguuaaggcugucuuacac

SEQ ID NO: 590575 - RNA, 19 nt, Artificial Sequence
  Description of Artificial Sequence: Synthetic oligonucleotide
  Antisense strand to SEQ ID NO: 590574
guguaagacagccuuaacc

SEQ ID NO: 590576 - RNA, 19 nt, Artificial Sequence
  Description of Artificial Sequence: Synthetic oligonucleotide
  Sense strand starting at position 91 of SEQ ID NO: 584804
gcgugaaaccaucugcugu

SEQ ID NO: 590577 - RNA, 19 nt, Artificial Sequence
  Description of Artificial Sequence: Synthetic oligonucleotide
  Antisense strand to SEQ ID NO: 590576
acagcagaugguuucacgc

SEQ ID NO: 590578 - RNA, 19 nt, Artificial Sequence
  Description of Artificial Sequence: Synthetic oligonucleotide
  Sense strand starting at position 92 of SEQ ID NO: 584804
cgugaaaccaucugcugua

SEQ ID NO: 590579 - RNA, 19 nt, Artificial Sequence
  Description of Artificial Sequence: Synthetic oligonucleotide
  Antisense strand to SEQ ID NO: 590578
uacagcagaugguuucacg

SEQ ID NO: 590580 - RNA, 19 nt, Artificial Sequence
  Description of Artificial Sequence: Synthetic oligonucleotide
  Sense strand starting at position 117 of SEQ ID NO: 584804
acacuauagcguuguugau

SEQ ID NO: 590581 - RNA, 19 nt, Artificial Sequence
  Description of Artificial Sequence: Synthetic oligonucleotide
  Antisense strand to SEQ ID NO: 590580
aucaacaacgcuauagugu

SEQ ID NO: 590582 - RNA, 19 nt, Artificial Sequence
  Description of Artificial Sequence: Synthetic oligonucleotide
  Sense strand starting at position 230 of SEQ ID NO: 584804
gcugacuugaucuggagga

SEQ ID NO: 590583 - RNA, 19 nt, Artificial Sequence
  Description of Artificial Sequence: Synthetic oligonucleotide
  Antisense strand to SEQ ID NO: 590582
uccuccagaucaagucagc

SEQ ID NO: 590584 - RNA, 19 nt, Artificial Sequence
  Description of Artificial Sequence: Synthetic oligonucleotide
  Sense strand starting at position 2088 of SEQ ID NO: 584804
ucagguucugcugacacua

SEQ ID NO: 590585 - RNA, 19 nt, Artificial Sequence
  Description of Artificial Sequence: Synthetic oligonucleotide
  Antisense strand to SEQ ID NO: 590584
uagugucagcagaaccuga

SEQ ID NO: 590586 - RNA, 19 nt, Artificial Sequence
  Description of Artificial Sequence: Synthetic oligonucleotide
  Sense strand starting at position 2129 of SEQ ID NO: 584804
ccuggugugaaaugcagau

SEQ ID NO: 590587 - RNA, 19 nt, Artificial Sequence
  Description of Artificial Sequence: Synthetic oligonucleotide
  Antisense strand to SEQ ID NO: 590586
aucugcauuucacaccagg

SEQ ID NO: 590588 - RNA, 19 nt, Artificial Sequence
  Description of Artificial Sequence: Synthetic oligonucleotide
  Sense strand starting at position 2131 of SEQ ID NO: 584804
uggugugaaaugcagauua

SEQ ID NO: 590589 - RNA, 19 nt, Artificial Sequence
  Description of Artificial Sequence: Synthetic oligonucleotide
  Antisense strand to SEQ ID NO: 590588
uaaucugcauuucacacca

SEQ ID NO: 590590 - RNA, 19 nt, Artificial Sequence
  Description of Artificial Sequence: Synthetic oligonucleotide
  Sense strand starting at position 2133 of SEQ ID NO: 584804
gugugaaaugcagauuaga

SEQ ID NO: 590591 - RNA, 19 nt, Artificial Sequence
  Description of Artificial Sequence: Synthetic oligonucleotide
  Antisense strand to SEQ ID NO: 590590
ucuaaucugcauuucacac

SEQ ID NO: 590592 - RNA, 19 nt, Artificial Sequence
  Description of Artificial Sequence: Synthetic oligonucleotide
  Sense strand starting at position 2189 of SEQ ID NO: 584804
cagugugcgcaugaaacaa

SEQ ID NO: 590593 - RNA, 19 nt, Artificial Sequence
  Description of Artificial Sequence: Synthetic oligonucleotide
  Antisense strand to SEQ ID NO: 590592
uuguuucaugcgcacacug

SEQ ID NO: 590594 - RNA, 19 nt, Artificial Sequence
  Description of Artificial Sequence: Synthetic oligonucleotide
  Sense strand starting at position 2193 of SEQ ID NO: 584804
gugcgcaugaaacaaauau

SEQ ID NO: 590595 - RNA, 19 nt, Artificial Sequence
  Description of Artificial Sequence: Synthetic oligonucleotide
  Antisense strand to SEQ ID NO: 590594
auauuuguuucaugcgcac

SEQ ID NO: 590596 - RNA, 19 nt, Artificial Sequence
  Description of Artificial Sequence: Synthetic oligonucleotide
  Sense strand starting at position 2398 of SEQ ID NO: 584804
ugcucuguagaucggagaa

SEQ ID NO: 590597 - RNA, 19 nt, Artificial Sequence
  Description of Artificial Sequence: Synthetic oligonucleotide
  Antisense strand to SEQ ID NO: 590596
uucuccgaucuacagagca

SEQ ID NO: 590598 - RNA, 19 nt, Artificial Sequence
  Description of Artificial Sequence: Synthetic oligonucleotide
  Sense strand starting at position 2400 of SEQ ID NO: 584804
cucuguagaucggagaaga

SEQ ID NO: 590599 - RNA, 19 nt, Artificial Sequence
  Description of Artificial Sequence: Synthetic oligonucleotide
  Antisense strand to SEQ ID NO: 590598
ucuucuccgaucuacagag

SEQ ID NO: 590600 - RNA, 19 nt, Artificial Sequence
  Description of Artificial Sequence: Synthetic oligonucleotide
  Sense strand starting at position 2559 of SEQ ID NO: 584804
uuugcuuuagaaugugcaa

SEQ ID NO: 590601 - RNA, 19 nt, Artificial Sequence
  Description of Artificial Sequence: Synthetic oligonucleotide
  Antisense strand to SEQ ID NO: 590600
uugcacauucuaaagcaaa

SEQ ID NO: 590602 - RNA, 19 nt, Artificial Sequence
  Description of Artificial Sequence: Synthetic oligonucleotide
  Sense strand starting at position 2630 of SEQ ID NO: 584804
ucaggaauuuaagaguuua

SEQ ID NO: 590603 - RNA, 19 nt, Artificial Sequence
  Description of Artificial Sequence: Synthetic oligonucleotide
  Antisense strand to SEQ ID NO: 590602
uaaacucuuaaauuccuga

SEQ ID NO: 590604 - RNA, 19 nt, Artificial Sequence
  Description of Artificial Sequence: Synthetic oligonucleotide
  Sense strand starting at position 2641 of SEQ ID NO: 584804
agaguuuaaguagauucuu

SEQ ID NO: 590605 - RNA, 19 nt, Artificial Sequence
  Description of Artificial Sequence: Synthetic oligonucleotide
  Antisense strand to SEQ ID NO: 590604
aagaaucuacuuaaacucu

SEQ ID NO: 590606 - RNA, 19 nt, Artificial Sequence
  Description of Artificial Sequence: Synthetic oligonucleotide
  Sense strand starting at position 2649 of SEQ ID NO: 584804
aguagauucuuuggaggaa

SEQ ID NO: 590607 - RNA, 19 nt, Artificial Sequence
  Description of Artificial Sequence: Synthetic oligonucleotide
  Antisense strand to SEQ ID NO: 590606
uuccuccaaagaaucuacu

SEQ ID NO: 590608 - RNA, 19 nt, Artificial Sequence
  Description of Artificial Sequence: Synthetic oligonucleotide
  Sense strand starting at position 2650 of SEQ ID NO: 584804
guagauucuuuggaggaac

SEQ ID NO: 590609 - RNA, 19 nt, Artificial Sequence
  Description of Artificial Sequence: Synthetic oligonucleotide
  Antisense strand to SEQ ID NO: 590608
guuccuccaaagaaucuac

SEQ ID NO: 590610 - RNA, 19 nt, Artificial Sequence
  Description of Artificial Sequence: Synthetic oligonucleotide
  Sense strand starting at position 2666 of SEQ ID NO: 584804
aacugaaagugguacuuaa

SEQ ID NO: 590611 - RNA, 19 nt, Artificial Sequence
  Description of Artificial Sequence: Synthetic oligonucleotide
  Antisense strand to SEQ ID NO: 590610
uuaaguaccacuuucaguu

SEQ ID NO: 590612 - RNA, 19 nt, Artificial Sequence
  Description of Artificial Sequence: Synthetic oligonucleotide
  Sense strand starting at position 2691 of SEQ ID NO: 584804
agcguuuguggacagaaga

SEQ ID NO: 590613 - RNA, 19 nt, Artificial Sequence
  Description of Artificial Sequence: Synthetic oligonucleotide
  Antisense strand to SEQ ID NO: 590612
ucuucuguccacaaacgcu

SEQ ID NO: 590614 - RNA, 19 nt, Artificial Sequence
  Description of Artificial Sequence: Synthetic oligonucleotide
  Sense strand starting at position 2763 of SEQ ID NO: 584804
gcaggcauguuugugugau

SEQ ID NO: 590615 - RNA, 19 nt, Artificial Sequence
  Description of Artificial Sequence: Synthetic oligonucleotide
  Antisense strand to SEQ ID NO: 590614
aucacacaaacaugccugc

SEQ ID NO: 590616 - RNA, 19 nt, Artificial Sequence
  Description of Artificial Sequence: Synthetic oligonucleotide
  Sense strand starting at position 2764 of SEQ ID NO: 584804
caggcauguuugugugaug

SEQ ID NO: 590617 - RNA, 19 nt, Artificial Sequence
  Description of Artificial Sequence: Synthetic oligonucleotide
  Antisense strand to SEQ ID NO: 590616
caucacacaaacaugccug

SEQ ID NO: 590618 - RNA, 19 nt, Artificial Sequence
  Description of Artificial Sequence: Synthetic oligonucleotide
  Sense strand starting at position 2767 of SEQ ID NO: 584804
gcauguuugugugauggug

SEQ ID NO: 590619 - RNA, 19 nt, Artificial Sequence
  Description of Artificial Sequence: Synthetic oligonucleotide
  Antisense strand to SEQ ID NO: 590618
caccaucacacaaacaugc

SEQ ID NO: 590620 - RNA, 19 nt, Artificial Sequence
  Description of Artificial Sequence: Synthetic oligonucleotide
  Sense strand starting at position 2815 of SEQ ID NO: 584804
gaugauagccucugacaca

SEQ ID NO: 590621 - RNA, 19 nt, Artificial Sequence
  Description of Artificial Sequence: Synthetic oligonucleotide
  Antisense strand to SEQ ID NO: 590620
ugugucagaggcuaucauc

SEQ ID NO: 590622 - RNA, 19 nt, Artificial Sequence
  Description of Artificial Sequence: Synthetic oligonucleotide
  Sense strand starting at position 2816 of SEQ ID NO: 584804
augauagccucugacacau

SEQ ID NO: 590623 - RNA, 19 nt, Artificial Sequence
  Description of Artificial Sequence: Synthetic oligonucleotide
  Antisense strand to SEQ ID NO: 590622
augugucagaggcuaucau

SEQ ID NO: 590624 - RNA, 19 nt, Artificial Sequence
  Description of Artificial Sequence: Synthetic oligonucleotide
  Sense strand starting at position 2878 of SEQ ID NO: 584804
gccagucgcuucuuggaga

SEQ ID NO: 590625 - RNA, 19 nt, Artificial Sequence
  Description of Artificial Sequence: Synthetic oligonucleotide
  Antisense strand to SEQ ID NO: 590624
ucuccaagaagcgacuggc

SEQ ID NO: 590626 - RNA, 19 nt, Artificial Sequence
  Description of Artificial Sequence: Synthetic oligonucleotide
  Sense strand starting at position 2883 of SEQ ID NO: 584804
ucgcuucuuggagagguga

SEQ ID NO: 590627 - RNA, 19 nt, Artificial Sequence
  Description of Artificial Sequence: Synthetic oligonucleotide
  Antisense strand to SEQ ID NO: 590626
ucaccucuccaagaagcga

SEQ ID NO: 590628 - RNA, 19 nt, Artificial Sequence
  Description of Artificial Sequence: Synthetic oligonucleotide
  Sense strand starting at position 3555 of SEQ ID NO: 584804
acugaaugcuuacuauaug

SEQ ID NO: 590629 - RNA, 19 nt, Artificial Sequence
  Description of Artificial Sequence: Synthetic oligonucleotide
  Antisense strand to SEQ ID NO: 590628
cauauaguaagcauucagu

SEQ ID NO: 590630 - RNA, 19 nt, Artificial Sequence
  Description of Artificial Sequence: Synthetic oligonucleotide
  Sense strand starting at position 2 of SEQ ID NO: 584805
ugcauucuuugagguuaag

SEQ ID NO: 590631 - RNA, 19 nt, Artificial Sequence
  Description of Artificial Sequence: Synthetic oligonucleotide
  Antisense strand to SEQ ID NO: 590630
cuuaaccucaaagaaugca

SEQ ID NO: 590632 - RNA, 19 nt, Artificial Sequence
  Description of Artificial Sequence: Synthetic oligonucleotide
  Sense strand starting at position 11 of SEQ ID NO: 584805
ugagguuaaggcugucuua

SEQ ID NO: 590633 - RNA, 19 nt, Artificial Sequence
  Description of Artificial Sequence: Synthetic oligonucleotide
  Antisense strand to SEQ ID NO: 590632
uaagacagccuuaaccuca

SEQ ID NO: 590634 - RNA, 19 nt, Artificial Sequence
  Description of Artificial Sequence: Synthetic oligonucleotide
  Sense strand starting at position 14 of SEQ ID NO: 584805
gguuaaggcugucuuacac

SEQ ID NO: 590635 - RNA, 19 nt, Artificial Sequence
  Description of Artificial Sequence: Synthetic oligonucleotide
  Antisense strand to SEQ ID NO: 590634
guguaagacagccuuaacc

SEQ ID NO: 590636 - RNA, 19 nt, Artificial Sequence
  Description of Artificial Sequence: Synthetic oligonucleotide
  Sense strand starting at position 52 of SEQ ID NO: 584805
gcgugaaaccaucugcugu

SEQ ID NO: 590637 - RNA, 19 nt, Artificial Sequence
  Description of Artificial Sequence: Synthetic oligonucleotide
  Antisense strand to SEQ ID NO: 590636
acagcagaugguuucacgc

SEQ ID NO: 590638 - RNA, 19 nt, Artificial Sequence
  Description of Artificial Sequence: Synthetic oligonucleotide
  Sense strand starting at position 53 of SEQ ID NO: 584805
cgugaaaccaucugcugua

SEQ ID NO: 590639 - RNA, 19 nt, Artificial Sequence
  Description of Artificial Sequence: Synthetic oligonucleotide
  Antisense strand to SEQ ID NO: 590638
uacagcagaugguuucacg

SEQ ID NO: 590640 - RNA, 19 nt, Artificial Sequence
  Description of Artificial Sequence: Synthetic oligonucleotide
  Sense strand starting at position 78 of SEQ ID NO: 584805
acacuauagcguuguugau

SEQ ID NO: 590641 - RNA, 19 nt, Artificial Sequence
  Description of Artificial Sequence: Synthetic oligonucleotide
  Antisense strand to SEQ ID NO: 590640
aucaacaacgcuauagugu

SEQ ID NO: 590642 - RNA, 19 nt, Artificial Sequence
  Description of Artificial Sequence: Synthetic oligonucleotide
  Sense strand starting at position 191 of SEQ ID NO: 584805
gcugacuugaucuggagga

SEQ ID NO: 590643 - RNA, 19 nt, Artificial Sequence
  Description of Artificial Sequence: Synthetic oligonucleotide
  Antisense strand to SEQ ID NO: 590642
uccuccagaucaagucagc

SEQ ID NO: 590644 - RNA, 19 nt, Artificial Sequence
  Description of Artificial Sequence: Synthetic oligonucleotide
  Sense strand starting at position 2049 of SEQ ID NO: 584805
ucagguucugcugacacua

SEQ ID NO: 590645 - RNA, 19 nt, Artificial Sequence
  Description of Artificial Sequence: Synthetic oligonucleotide
  Antisense strand to SEQ ID NO: 590644
uagugucagcagaaccuga

SEQ ID NO: 590646 - RNA, 19 nt, Artificial Sequence
  Description of Artificial Sequence: Synthetic oligonucleotide
  Sense strand starting at position 2090 of SEQ ID NO: 584805
ccuggugugaaaugcagau

SEQ ID NO: 590647 - RNA, 19 nt, Artificial Sequence
  Description of Artificial Sequence: Synthetic oligonucleotide
  Antisense strand to SEQ ID NO: 590646
aucugcauuucacaccagg

SEQ ID NO: 590648 - RNA, 19 nt, Artificial Sequence
  Description of Artificial Sequence: Synthetic oligonucleotide
  Sense strand starting at position 2092 of SEQ ID NO: 584805
uggugugaaaugcagauua

SEQ ID NO: 590649 - RNA, 19 nt, Artificial Sequence
  Description of Artificial Sequence: Synthetic oligonucleotide
  Antisense strand to SEQ ID NO: 590648
uaaucugcauuucacacca

SEQ ID NO: 590650 - RNA, 19 nt, Artificial Sequence
  Description of Artificial Sequence: Synthetic oligonucleotide
  Sense strand starting at position 2094 of SEQ ID NO: 584805
gugugaaaugcagauuaga

SEQ ID NO: 590651 - RNA, 19 nt, Artificial Sequence
  Description of Artificial Sequence: Synthetic oligonucleotide
  Antisense strand to SEQ ID NO: 590650
ucuaaucugcauuucacac

SEQ ID NO: 590652 - RNA, 19 nt, Artificial Sequence
  Description of Artificial Sequence: Synthetic oligonucleotide
  Sense strand starting at position 2150 of SEQ ID NO: 584805
cagugugcgcaugaaacaa

SEQ ID NO: 590653 - RNA, 19 nt, Artificial Sequence
  Description of Artificial Sequence: Synthetic oligonucleotide
  Antisense strand to SEQ ID NO: 590652
uuguuucaugcgcacacug

SEQ ID NO: 590654 - RNA, 19 nt, Artificial Sequence
  Description of Artificial Sequence: Synthetic oligonucleotide
  Sense strand starting at position 2154 of SEQ ID NO: 584805
gugcgcaugaaacaaauau

SEQ ID NO: 590655 - RNA, 19 nt, Artificial Sequence
  Description of Artificial Sequence: Synthetic oligonucleotide
  Antisense strand to SEQ ID NO: 590654
auauuuguuucaugcgcac

SEQ ID NO: 590656 - RNA, 19 nt, Artificial Sequence
  Description of Artificial Sequence: Synthetic oligonucleotide
  Sense strand starting at position 2359 of SEQ ID NO: 584805
ugcucuguagaucggagaa

SEQ ID NO: 590657 - RNA, 19 nt, Artificial Sequence
  Description of Artificial Sequence: Synthetic oligonucleotide
  Antisense strand to SEQ ID NO: 590656
uucuccgaucuacagagca

SEQ ID NO: 590658 - RNA, 19 nt, Artificial Sequence
  Description of Artificial Sequence: Synthetic oligonucleotide
  Sense strand starting at position 2361 of SEQ ID NO: 584805
cucuguagaucggagaaga

SEQ ID NO: 590659 - RNA, 19 nt, Artificial Sequence
  Description of Artificial Sequence: Synthetic oligonucleotide
  Antisense strand to SEQ ID NO: 590658
ucuucuccgaucuacagag

SEQ ID NO: 590660 - RNA, 19 nt, Artificial Sequence
  Description of Artificial Sequence: Synthetic oligonucleotide
  Sense strand starting at position 2520 of SEQ ID NO: 584805
uuugcuuuagaaugugcaa

SEQ ID NO: 590661 - RNA, 19 nt, Artificial Sequence
  Description of Artificial Sequence: Synthetic oligonucleotide
  Antisense strand to SEQ ID NO: 590660
uugcacauucuaaagcaaa

SEQ ID NO: 590662 - RNA, 19 nt, Artificial Sequence
  Description of Artificial Sequence: Synthetic oligonucleotide
  Sense strand starting at position 2591 of SEQ ID NO: 584805
ucaggaauuuaagaguuua

SEQ ID NO: 590663 - RNA, 19 nt, Artificial Sequence
  Description of Artificial Sequence: Synthetic oligonucleotide
  Antisense strand to SEQ ID NO: 590662
uaaacucuuaaauuccuga

SEQ ID NO: 590664 - RNA, 19 nt, Artificial Sequence
  Description of Artificial Sequence: Synthetic oligonucleotide
  Sense strand starting at position 2602 of SEQ ID NO: 584805
agaguuuaaguagauucuu

SEQ ID NO: 590665 - RNA, 19 nt, Artificial Sequence
  Description of Artificial Sequence: Synthetic oligonucleotide
  Antisense strand to SEQ ID NO: 590664
aagaaucuacuuaaacucu

SEQ ID NO: 590666 - RNA, 19 nt, Artificial Sequence
  Description of Artificial Sequence: Synthetic oligonucleotide
  Sense strand starting at position 2610 of SEQ ID NO: 584805
aguagauucuuuggaggaa

SEQ ID NO: 590667 - RNA, 19 nt, Artificial Sequence
  Description of Artificial Sequence: Synthetic oligonucleotide
  Antisense strand to SEQ ID NO: 590666
uuccuccaaagaaucuacu

SEQ ID NO: 590668 - RNA, 19 nt, Artificial Sequence
  Description of Artificial Sequence: Synthetic oligonucleotide
  Sense strand starting at position 2611 of SEQ ID NO: 584805
guagauucuuuggaggaac

SEQ ID NO: 590669 - RNA, 19 nt, Artificial Sequence
  Description of Artificial Sequence: Synthetic oligonucleotide
  Antisense strand to SEQ ID NO: 590668
guuccuccaaagaaucuac

SEQ ID NO: 590670 - RNA, 19 nt, Artificial Sequence
  Description of Artificial Sequence: Synthetic oligonucleotide
  Sense strand starting at position 2627 of SEQ ID NO: 584805
aacugaaagugguacuuaa

SEQ ID NO: 590671 - RNA, 19 nt, Artificial Sequence
  Description of Artificial Sequence: Synthetic oligonucleotide
  Antisense strand to SEQ ID NO: 590670
uuaaguaccacuuucaguu

SEQ ID NO: 590672 - RNA, 19 nt, Artificial Sequence
  Description of Artificial Sequence: Synthetic oligonucleotide
  Sense strand starting at position 2652 of SEQ ID NO: 584805
agcguuuguggacagaaga

SEQ ID NO: 590673 - RNA, 19 nt, Artificial Sequence
  Description of Artificial Sequence: Synthetic oligonucleotide
  Antisense strand to SEQ ID NO: 590672
ucuucuguccacaaacgcu

SEQ ID NO: 590674 - RNA, 19 nt, Artificial Sequence
  Description of Artificial Sequence: Synthetic oligonucleotide
  Sense strand starting at position 2724 of SEQ ID NO: 584805
gcaggcauguuugugugau

SEQ ID NO: 590675 - RNA, 19 nt, Artificial Sequence
  Description of Artificial Sequence: Synthetic oligonucleotide
  Antisense strand to SEQ ID NO: 590674
aucacacaaacaugccugc

SEQ ID NO: 590676 - RNA, 19 nt, Artificial Sequence
  Description of Artificial Sequence: Synthetic oligonucleotide
  Sense strand starting at position 2725 of SEQ ID NO: 584805
caggcauguuugugugaug

SEQ ID NO: 590677 - RNA, 19 nt, Artificial Sequence
  Description of Artificial Sequence: Synthetic oligonucleotide
  Antisense strand to SEQ ID NO: 590676
caucacacaaacaugccug

SEQ ID NO: 590678 - RNA, 19 nt, Artificial Sequence
  Description of Artificial Sequence: Synthetic oligonucleotide
  Sense strand starting at position 2728 of SEQ ID NO: 584805
gcauguuugugugauggug

SEQ ID NO: 590679 - RNA, 19 nt, Artificial Sequence
  Description of Artificial Sequence: Synthetic oligonucleotide
  Antisense strand to SEQ ID NO: 590678
caccaucacacaaacaugc

SEQ ID NO: 590680 - RNA, 19 nt, Artificial Sequence
  Description of Artificial Sequence: Synthetic oligonucleotide
  Sense strand starting at position 2776 of SEQ ID NO: 584805
gaugauagccucugacaca

SEQ ID NO: 590681 - RNA, 19 nt, Artificial Sequence
  Description of Artificial Sequence: Synthetic oligonucleotide
  Antisense strand to SEQ ID NO: 590680
ugugucagaggcuaucauc

SEQ ID NO: 590682 - RNA, 19 nt, Artificial Sequence
  Description of Artificial Sequence: Synthetic oligonucleotide
  Sense strand starting at position 2777 of SEQ ID NO: 584805
augauagccucugacacau

SEQ ID NO: 590683 - RNA, 19 nt, Artificial Sequence
  Description of Artificial Sequence: Synthetic oligonucleotide
  Antisense strand to SEQ ID NO: 590682
augugucagaggcuaucau

SEQ ID NO: 590684 - RNA, 19 nt, Artificial Sequence
  Description of Artificial Sequence: Synthetic oligonucleotide
  Sense strand starting at position 2839 of SEQ ID NO: 584805
gccagucgcuucuuggaga

SEQ ID NO: 590685 - RNA, 19 nt, Artificial Sequence
  Description of Artificial Sequence: Synthetic oligonucleotide
  Antisense strand to SEQ ID NO: 590684
ucuccaagaagcgacuggc

SEQ ID NO: 590686 - RNA, 19 nt, Artificial Sequence
  Description of Artificial Sequence: Synthetic oligonucleotide
  Sense strand starting at position 2844 of SEQ ID NO: 584805
ucgcuucuuggagagguga

SEQ ID NO: 590687 - RNA, 19 nt, Artificial Sequence
  Description of Artificial Sequence: Synthetic oligonucleotide
  Antisense strand to SEQ ID NO: 590686
ucaccucuccaagaagcga

SEQ ID NO: 590688 - RNA, 19 nt, Artificial Sequence
  Description of Artificial Sequence: Synthetic oligonucleotide
  Sense strand starting at position 3516 of SEQ ID NO: 584805
acugaaugcuuacuauaug

SEQ ID NO: 590689 - RNA, 19 nt, Artificial Sequence
  Description of Artificial Sequence: Synthetic oligonucleotide
  Antisense strand to SEQ ID NO: 590688
cauauaguaagcauucagu

SEQ ID NO: 590690 - RNA, 19 nt, Artificial Sequence
  Description of Artificial Sequence: Synthetic oligonucleotide
  Sense strand starting at position 193 of SEQ ID NO: 584806
agcuguaaauucuuugcuu

SEQ ID NO: 590691 - RNA, 19 nt, Artificial Sequence
  Description of Artificial Sequence: Synthetic oligonucleotide
  Antisense strand to SEQ ID NO: 590690
aagcaaagaauuuacagcu

SEQ ID NO: 590692 - RNA, 19 nt, Artificial Sequence
  Description of Artificial Sequence: Synthetic oligonucleotide
  Sense strand starting at position 194 of SEQ ID NO: 584806
gcuguaaauucuuugcuuu

SEQ ID NO: 590693 - RNA, 19 nt, Artificial Sequence
  Description of Artificial Sequence: Synthetic oligonucleotide
  Antisense strand to SEQ ID NO: 590692
aaagcaaagaauuuacagc

SEQ ID NO: 590694 - RNA, 19 nt, Artificial Sequence
  Description of Artificial Sequence: Synthetic oligonucleotide
  Sense strand starting at position 604 of SEQ ID NO: 584806
uaugauaugucaggcacaa

SEQ ID NO: 590695 - RNA, 19 nt, Artificial Sequence
  Description of Artificial Sequence: Synthetic oligonucleotide
  Antisense strand to SEQ ID NO: 590694
uugugccugacauaucaua

SEQ ID NO: 590696 - RNA, 19 nt, Artificial Sequence
  Description of Artificial Sequence: Synthetic oligonucleotide
  Sense strand starting at position 696 of SEQ ID NO: 584806
gcuuauagugguggagaau

SEQ ID NO: 590697 - RNA, 19 nt, Artificial Sequence
  Description of Artificial Sequence: Synthetic oligonucleotide
  Antisense strand to SEQ ID NO: 590696
auucuccaccacuauaagc

SEQ ID NO: 590698 - RNA, 19 nt, Artificial Sequence
  Description of Artificial Sequence: Synthetic oligonucleotide
  Sense strand starting at position 705 of SEQ ID NO: 584806
gguggagaauguugguuca

SEQ ID NO: 590699 - RNA, 19 nt, Artificial Sequence
  Description of Artificial Sequence: Synthetic oligonucleotide
  Antisense strand to SEQ ID NO: 590698
ugaaccaacauucuccacc

SEQ ID NO: 590700 - RNA, 19 nt, Artificial Sequence
  Description of Artificial Sequence: Synthetic oligonucleotide
  Sense strand starting at position 707 of SEQ ID NO: 584806
uggagaauguugguucaug

SEQ ID NO: 590701 - RNA, 19 nt, Artificial Sequence
  Description of Artificial Sequence: Synthetic oligonucleotide
  Antisense strand to SEQ ID NO: 590700
caugaaccaacauucucca

SEQ ID NO: 590702 - RNA, 19 nt, Artificial Sequence
  Description of Artificial Sequence: Synthetic oligonucleotide
  Sense strand starting at position 761 of SEQ ID NO: 584806
ugaguaccuuguuuggaca

SEQ ID NO: 590703 - RNA, 19 nt, Artificial Sequence
  Description of Artificial Sequence: Synthetic oligonucleotide
  Antisense strand to SEQ ID NO: 590702
uguccaaacaagguacuca

SEQ ID NO: 590704 - RNA, 19 nt, Artificial Sequence
  Description of Artificial Sequence: Synthetic oligonucleotide
  Sense strand starting at position 768 of SEQ ID NO: 584806
cuuguuuggacauguguuu

SEQ ID NO: 590705 - RNA, 19 nt, Artificial Sequence
  Description of Artificial Sequence: Synthetic oligonucleotide
  Antisense strand to SEQ ID NO: 590704
aaacacauguccaaacaag

SEQ ID NO: 590706 - RNA, 19 nt, Artificial Sequence
  Description of Artificial Sequence: Synthetic oligonucleotide
  Sense strand starting at position 794 of SEQ ID NO: 584806
gccugcauucuuugagguu

SEQ ID NO: 590707 - RNA, 19 nt, Artificial Sequence
  Description of Artificial Sequence: Synthetic oligonucleotide
  Antisense strand to SEQ ID NO: 590706
aaccucaaagaaugcaggc

SEQ ID NO: 590708 - RNA, 19 nt, Artificial Sequence
  Description of Artificial Sequence: Synthetic oligonucleotide
  Sense strand starting at position 795 of SEQ ID NO: 584806
ccugcauucuuugagguua

SEQ ID NO: 590709 - RNA, 19 nt, Artificial Sequence
  Description of Artificial Sequence: Synthetic oligonucleotide
  Antisense strand to SEQ ID NO: 590708
uaaccucaaagaaugcagg

SEQ ID NO: 590710 - RNA, 19 nt, Artificial Sequence
  Description of Artificial Sequence: Synthetic oligonucleotide
  Sense strand starting at position 797 of SEQ ID NO: 584806
ugcauucuuugagguuaag

SEQ ID NO: 590711 - RNA, 19 nt, Artificial Sequence
  Description of Artificial Sequence: Synthetic oligonucleotide
  Antisense strand to SEQ ID NO: 590710
cuuaaccucaaagaaugca

SEQ ID NO: 590712 - RNA, 19 nt, Artificial Sequence
  Description of Artificial Sequence: Synthetic oligonucleotide
  Sense strand starting at position 806 of SEQ ID NO: 584806
ugagguuaaggcugucuua

SEQ ID NO: 590713 - RNA, 19 nt, Artificial Sequence
  Description of Artificial Sequence: Synthetic oligonucleotide
  Antisense strand to SEQ ID NO: 590712
uaagacagccuuaaccuca

SEQ ID NO: 590714 - RNA, 19 nt, Artificial Sequence
  Description of Artificial Sequence: Synthetic oligonucleotide
  Sense strand starting at position 809 of SEQ ID NO: 584806
gguuaaggcugucuuacac

SEQ ID NO: 590715 - RNA, 19 nt, Artificial Sequence
  Description of Artificial Sequence: Synthetic oligonucleotide
  Antisense strand to SEQ ID NO: 590714
guguaagacagccuuaacc

SEQ ID NO: 590716 - RNA, 19 nt, Artificial Sequence
  Description of Artificial Sequence: Synthetic oligonucleotide
  Sense strand starting at position 847 of SEQ ID NO: 584806
gcgugaaaccaucugcugu

SEQ ID NO: 590717 - RNA, 19 nt, Artificial Sequence
  Description of Artificial Sequence: Synthetic oligonucleotide
  Antisense strand to SEQ ID NO: 590716
acagcagaugguuucacgc

SEQ ID NO: 590718 - RNA, 19 nt, Artificial Sequence
  Description of Artificial Sequence: Synthetic oligonucleotide
  Sense strand starting at position 848 of SEQ ID NO: 584806
cgugaaaccaucugcugua

SEQ ID NO: 590719 - RNA, 19 nt, Artificial Sequence
  Description of Artificial Sequence: Synthetic oligonucleotide
  Antisense strand to SEQ ID NO: 590718
uacagcagaugguuucacg

SEQ ID NO: 590720 - RNA, 19 nt, Artificial Sequence
  Description of Artificial Sequence: Synthetic oligonucleotide
  Sense strand starting at position 873 of SEQ ID NO: 584806
acacuauagcguuguugau

SEQ ID NO: 590721 - RNA, 19 nt, Artificial Sequence
  Description of Artificial Sequence: Synthetic oligonucleotide
  Antisense strand to SEQ ID NO: 590720
aucaacaacgcuauagugu

SEQ ID NO: 590722 - RNA, 19 nt, Artificial Sequence
  Description of Artificial Sequence: Synthetic oligonucleotide
  Sense strand starting at position 986 of SEQ ID NO: 584806
gcugacuugaucuggagga

SEQ ID NO: 590723 - RNA, 19 nt, Artificial Sequence
  Description of Artificial Sequence: Synthetic oligonucleotide
  Antisense strand to SEQ ID NO: 590722
uccuccagaucaagucagc

SEQ ID NO: 590724 - RNA, 19 nt, Artificial Sequence
  Description of Artificial Sequence: Synthetic oligonucleotide
  Sense strand starting at position 2844 of SEQ ID NO: 584806
ucagguucugcugacacua

SEQ ID NO: 590725 - RNA, 19 nt, Artificial Sequence
  Description of Artificial Sequence: Synthetic oligonucleotide
  Antisense strand to SEQ ID NO: 590724
uagugucagcagaaccuga

SEQ ID NO: 590726 - RNA, 19 nt, Artificial Sequence
  Description of Artificial Sequence: Synthetic oligonucleotide
  Sense strand starting at position 2885 of SEQ ID NO: 584806
ccuggugugaaaugcagau

SEQ ID NO: 590727 - RNA, 19 nt, Artificial Sequence
  Description of Artificial Sequence: Synthetic oligonucleotide
  Antisense strand to SEQ ID NO: 590726
aucugcauuucacaccagg

SEQ ID NO: 590728 - RNA, 19 nt, Artificial Sequence
  Description of Artificial Sequence: Synthetic oligonucleotide
  Sense strand starting at position 2887 of SEQ ID NO: 584806
uggugugaaaugcagauua

SEQ ID NO: 590729 - RNA, 19 nt, Artificial Sequence
  Description of Artificial Sequence: Synthetic oligonucleotide
  Antisense strand to SEQ ID NO: 590728
uaaucugcauuucacacca

SEQ ID NO: 590730 - RNA, 19 nt, Artificial Sequence
  Description of Artificial Sequence: Synthetic oligonucleotide
  Sense strand starting at position 2889 of SEQ ID NO: 584806
gugugaaaugcagauuaga

SEQ ID NO: 590731 - RNA, 19 nt, Artificial Sequence
  Description of Artificial Sequence: Synthetic oligonucleotide
  Antisense strand to SEQ ID NO: 590730
ucuaaucugcauuucacac

SEQ ID NO: 590732 - RNA, 19 nt, Artificial Sequence
  Description of Artificial Sequence: Synthetic oligonucleotide
  Sense strand starting at position 2945 of SEQ ID NO: 584806
cagugugcgcaugaaacaa

SEQ ID NO: 590733 - RNA, 19 nt, Artificial Sequence
  Description of Artificial Sequence: Synthetic oligonucleotide
  Antisense strand to SEQ ID NO: 590732
uuguuucaugcgcacacug

SEQ ID NO: 590734 - RNA, 19 nt, Artificial Sequence
  Description of Artificial Sequence: Synthetic oligonucleotide
  Sense strand starting at position 2949 of SEQ ID NO: 584806
gugcgcaugaaacaaauau

SEQ ID NO: 590735 - RNA, 19 nt, Artificial Sequence
  Description of Artificial Sequence: Synthetic oligonucleotide
  Antisense strand to SEQ ID NO: 590734
auauuuguuucaugcgcac

SEQ ID NO: 590736 - RNA, 19 nt, Artificial Sequence
  Description of Artificial Sequence: Synthetic oligonucleotide
  Sense strand starting at position 3154 of SEQ ID NO: 584806
ugcucuguagaucggagaa

SEQ ID NO: 590737 - RNA, 19 nt, Artificial Sequence
  Description of Artificial Sequence: Synthetic oligonucleotide
  Antisense strand to SEQ ID NO: 590736
uucuccgaucuacagagca

SEQ ID NO: 590738 - RNA, 19 nt, Artificial Sequence
  Description of Artificial Sequence: Synthetic oligonucleotide
  Sense strand starting at position 3156 of SEQ ID NO: 584806
cucuguagaucggagaaga

SEQ ID NO: 590739 - RNA, 19 nt, Artificial Sequence
  Description of Artificial Sequence: Synthetic oligonucleotide
  Antisense strand to SEQ ID NO: 590738
ucuucuccgaucuacagag

SEQ ID NO: 590740 - RNA, 19 nt, Artificial Sequence
  Description of Artificial Sequence: Synthetic oligonucleotide
  Sense strand starting at position 3315 of SEQ ID NO: 584806
uuugcuuuagaaugugcaa

SEQ ID NO: 590741 - RNA, 19 nt, Artificial Sequence
  Description of Artificial Sequence: Synthetic oligonucleotide
  Antisense strand to SEQ ID NO: 590740
uugcacauucuaaagcaaa

SEQ ID NO: 590742 - RNA, 19 nt, Artificial Sequence
  Description of Artificial Sequence: Synthetic oligonucleotide
  Sense strand starting at position 3386 of SEQ ID NO: 584806
ucaggaauuuaagaguuua

SEQ ID NO: 590743 - RNA, 19 nt, Artificial Sequence
  Description of Artificial Sequence: Synthetic oligonucleotide
  Antisense strand to SEQ ID NO: 590742
uaaacucuuaaauuccuga

SEQ ID NO: 590744 - RNA, 19 nt, Artificial Sequence
  Description of Artificial Sequence: Synthetic oligonucleotide
  Sense strand starting at position 3397 of SEQ ID NO: 584806
agaguuuaaguagauucuu

SEQ ID NO: 590745 - RNA, 19 nt, Artificial Sequence
  Description of Artificial Sequence: Synthetic oligonucleotide
  Antisense strand to SEQ ID NO: 590744
aagaaucuacuuaaacucu

SEQ ID NO: 590746 - RNA, 19 nt, Artificial Sequence
  Description of Artificial Sequence: Synthetic oligonucleotide
  Sense strand starting at position 3405 of SEQ ID NO: 584806
aguagauucuuuggaggaa

SEQ ID NO: 590747 - RNA, 19 nt, Artificial Sequence
  Description of Artificial Sequence: Synthetic oligonucleotide
  Antisense strand to SEQ ID NO: 590746
uuccuccaaagaaucuacu

SEQ ID NO: 590748 - RNA, 19 nt, Artificial Sequence
  Description of Artificial Sequence: Synthetic oligonucleotide
  Sense strand starting at position 3406 of SEQ ID NO: 584806
guagauucuuuggaggaac

SEQ ID NO: 590749 - RNA, 19 nt, Artificial Sequence
  Description of Artificial Sequence: Synthetic oligonucleotide
  Antisense strand to SEQ ID NO: 590748
guuccuccaaagaaucuac

SEQ ID NO: 590750 - RNA, 19 nt, Artificial Sequence
  Description of Artificial Sequence: Synthetic oligonucleotide
  Sense strand starting at position 3422 of SEQ ID NO: 584806
aacugaaagugguacuuaa

SEQ ID NO: 590751 - RNA, 19 nt, Artificial Sequence
  Description of Artificial Sequence: Synthetic oligonucleotide
  Antisense strand to SEQ ID NO: 590750
uuaaguaccacuuucaguu

SEQ ID NO: 590752 - RNA, 19 nt, Artificial Sequence
  Description of Artificial Sequence: Synthetic oligonucleotide
  Sense strand starting at position 3447 of SEQ ID NO: 584806
agcguuuguggacagaaga

SEQ ID NO: 590753 - RNA, 19 nt, Artificial Sequence
  Description of Artificial Sequence: Synthetic oligonucleotide
  Antisense strand to SEQ ID NO: 590752
ucuucuguccacaaacgcu

SEQ ID NO: 590754 - RNA, 19 nt, Artificial Sequence
  Description of Artificial Sequence: Synthetic oligonucleotide
  Sense strand starting at position 3519 of SEQ ID NO: 584806
gcaggcauguuugugugau

SEQ ID NO: 590755 - RNA, 19 nt, Artificial Sequence
  Description of Artificial Sequence: Synthetic oligonucleotide
  Antisense strand to SEQ ID NO: 590754
aucacacaaacaugccugc

SEQ ID NO: 590756 - RNA, 19 nt, Artificial Sequence
  Description of Artificial Sequence: Synthetic oligonucleotide
  Sense strand starting at position 3520 of SEQ ID NO: 584806
caggcauguuugugugaug

SEQ ID NO: 590757 - RNA, 19 nt, Artificial Sequence
  Description of Artificial Sequence: Synthetic oligonucleotide
  Antisense strand to SEQ ID NO: 590756
caucacacaaacaugccug

SEQ ID NO: 590758 - RNA, 19 nt, Artificial Sequence
  Description of Artificial Sequence: Synthetic oligonucleotide
  Sense strand starting at position 3523 of SEQ ID NO: 584806
gcauguuugugugauggug

SEQ ID NO: 590759 - RNA, 19 nt, Artificial Sequence
  Description of Artificial Sequence: Synthetic oligonucleotide
  Antisense strand to SEQ ID NO: 590758
caccaucacacaaacaugc

SEQ ID NO: 590760 - RNA, 19 nt, Artificial Sequence
  Description of Artificial Sequence: Synthetic oligonucleotide
  Sense strand starting at position 3571 of SEQ ID NO: 584806
gaugauagccucugacaca

SEQ ID NO: 590761 - RNA, 19 nt, Artificial Sequence
  Description of Artificial Sequence: Synthetic oligonucleotide
  Antisense strand to SEQ ID NO: 590760
ugugucagaggcuaucauc

SEQ ID NO: 590762 - RNA, 19 nt, Artificial Sequence
  Description of Artificial Sequence: Synthetic oligonucleotide
  Sense strand starting at position 3572 of SEQ ID NO: 584806
augauagccucugacacau

SEQ ID NO: 590763 - RNA, 19 nt, Artificial Sequence
  Description of Artificial Sequence: Synthetic oligonucleotide
  Antisense strand to SEQ ID NO: 590762
augugucagaggcuaucau

SEQ ID NO: 590764 - RNA, 19 nt, Artificial Sequence
  Description of Artificial Sequence: Synthetic oligonucleotide
  Sense strand starting at position 3634 of SEQ ID NO: 584806
gccagucgcuucuuggaga

SEQ ID NO: 590765 - RNA, 19 nt, Artificial Sequence
  Description of Artificial Sequence: Synthetic oligonucleotide
  Antisense strand to SEQ ID NO: 590764
ucuccaagaagcgacuggc

SEQ ID NO: 590766 - RNA, 19 nt, Artificial Sequence
  Description of Artificial Sequence: Synthetic oligonucleotide
  Sense strand starting at position 3639 of SEQ ID NO: 584806
ucgcuucuuggagagguga

SEQ ID NO: 590767 - RNA, 19 nt, Artificial Sequence
  Description of Artificial Sequence: Synthetic oligonucleotide
  Antisense strand to SEQ ID NO: 590766
ucaccucuccaagaagcga

SEQ ID NO: 590768 - RNA, 19 nt, Artificial Sequence
  Description of Artificial Sequence: Synthetic oligonucleotide
  Sense strand starting at position 87 of SEQ ID NO: 584807
cagguaacggugagugguu

SEQ ID NO: 590769 - RNA, 19 nt, Artificial Sequence
  Description of Artificial Sequence: Synthetic oligonucleotide
  Antisense strand to SEQ ID NO: 590768
aaccacucaccguuaccug

SEQ ID NO: 590770 - RNA, 19 nt, Artificial Sequence
  Description of Artificial Sequence: Synthetic oligonucleotide
  Sense strand starting at position 92 of SEQ ID NO: 584807
aacggugagugguucagaa

SEQ ID NO: 590771 - RNA, 19 nt, Artificial Sequence
  Description of Artificial Sequence: Synthetic oligonucleotide
  Antisense strand to SEQ ID NO: 590770
uucugaaccacucaccguu

SEQ ID NO: 590772 - RNA, 19 nt, Artificial Sequence
  Description of Artificial Sequence: Synthetic oligonucleotide
  Sense strand starting at position 288 of SEQ ID NO: 584807
acggccuuaccagaucaau

SEQ ID NO: 590773 - RNA, 19 nt, Artificial Sequence
  Description of Artificial Sequence: Synthetic oligonucleotide
  Antisense strand to SEQ ID NO: 590772
auugaucugguaaggccgu

SEQ ID NO: 590774 - RNA, 19 nt, Artificial Sequence
  Description of Artificial Sequence: Synthetic oligonucleotide
  Sense strand starting at position 1028 of SEQ ID NO: 584807
ggguguaaacccgagcaca

SEQ ID NO: 590775 - RNA, 19 nt, Artificial Sequence
  Description of Artificial Sequence: Synthetic oligonucleotide
  Antisense strand to SEQ ID NO: 590774
ugugcucggguuuacaccc

SEQ ID NO: 590776 - RNA, 19 nt, Artificial Sequence
  Description of Artificial Sequence: Synthetic oligonucleotide
  Sense strand starting at position 1096 of SEQ ID NO: 584807
uugacaaacgacugucaau

SEQ ID NO: 590777 - RNA, 19 nt, Artificial Sequence
  Description of Artificial Sequence: Synthetic oligonucleotide
  Antisense strand to SEQ ID NO: 590776
auugacagucguuugucaa

SEQ ID NO: 590778 - RNA, 19 nt, Artificial Sequence
  Description of Artificial Sequence: Synthetic oligonucleotide
  Sense strand starting at position 1105 of SEQ ID NO: 584807
gacugucaaucacuaggaa

SEQ ID NO: 590779 - RNA, 19 nt, Artificial Sequence
  Description of Artificial Sequence: Synthetic oligonucleotide
  Antisense strand to SEQ ID NO: 590778
uuccuagugauugacaguc

SEQ ID NO: 590780 - RNA, 19 nt, Artificial Sequence
  Description of Artificial Sequence: Synthetic oligonucleotide
  Sense strand starting at position 1108 of SEQ ID NO: 584807
ugucaaucacuaggaaacu

SEQ ID NO: 590781 - RNA, 19 nt, Artificial Sequence
  Description of Artificial Sequence: Synthetic oligonucleotide
  Antisense strand to SEQ ID NO: 590780
aguuuccuagugauugaca

SEQ ID NO: 590782 - RNA, 19 nt, Artificial Sequence
  Description of Artificial Sequence: Synthetic oligonucleotide
  Sense strand starting at position 1229 of SEQ ID NO: 584807
acaagagguuuauagauaa

SEQ ID NO: 590783 - RNA, 19 nt, Artificial Sequence
  Description of Artificial Sequence: Synthetic oligonucleotide
  Antisense strand to SEQ ID NO: 590782
uuaucuauaaaccucuugu

SEQ ID NO: 590784 - RNA, 19 nt, Artificial Sequence
  Description of Artificial Sequence: Synthetic oligonucleotide
  Sense strand starting at position 1333 of SEQ ID NO: 584807
cccugcguguaauuuaaua

SEQ ID NO: 590785 - RNA, 19 nt, Artificial Sequence
  Description of Artificial Sequence: Synthetic oligonucleotide
  Antisense strand to SEQ ID NO: 590784
uauuaaauuacacgcaggg

SEQ ID NO: 590786 - RNA, 19 nt, Artificial Sequence
  Description of Artificial Sequence: Synthetic oligonucleotide
  Sense strand starting at position 1352 of SEQ ID NO: 584807
cuaaucaucugguuguuaa

SEQ ID NO: 590787 - RNA, 19 nt, Artificial Sequence
  Description of Artificial Sequence: Synthetic oligonucleotide
  Antisense strand to SEQ ID NO: 590786
uuaacaaccagaugauuag

SEQ ID NO: 590788 - RNA, 19 nt, Artificial Sequence
  Description of Artificial Sequence: Synthetic oligonucleotide
  Sense strand starting at position 1355 of SEQ ID NO: 584807
aucaucugguuguuaaacu

SEQ ID NO: 590789 - RNA, 19 nt, Artificial Sequence
  Description of Artificial Sequence: Synthetic oligonucleotide
  Antisense strand to SEQ ID NO: 590788
aguuuaacaaccagaugau

SEQ ID NO: 590790 - RNA, 19 nt, Artificial Sequence
  Description of Artificial Sequence: Synthetic oligonucleotide
  Sense strand starting at position 1451 of SEQ ID NO: 584807
ccugccuuccaguaaaugu

SEQ ID NO: 590791 - RNA, 19 nt, Artificial Sequence
  Description of Artificial Sequence: Synthetic oligonucleotide
  Antisense strand to SEQ ID NO: 590790
acauuuacuggaaggcagg

SEQ ID NO: 590792 - RNA, 19 nt, Artificial Sequence
  Description of Artificial Sequence: Synthetic oligonucleotide
  Sense strand starting at position 1488 of SEQ ID NO: 584807
ucagucugugggcaacauu

SEQ ID NO: 590793 - RNA, 19 nt, Artificial Sequence
  Description of Artificial Sequence: Synthetic oligonucleotide
  Antisense strand to SEQ ID NO: 590792
aauguugcccacagacuga

SEQ ID NO: 590794 - RNA, 19 nt, Artificial Sequence
  Description of Artificial Sequence: Synthetic oligonucleotide
  Sense strand starting at position 1527 of SEQ ID NO: 584807
gcagguucggauuaugaaa

SEQ ID NO: 590795 - RNA, 19 nt, Artificial Sequence
  Description of Artificial Sequence: Synthetic oligonucleotide
  Antisense strand to SEQ ID NO: 590794
uuucauaauccgaaccugc

SEQ ID NO: 590796 - RNA, 19 nt, Artificial Sequence
  Description of Artificial Sequence: Synthetic oligonucleotide
  Sense strand starting at position 1594 of SEQ ID NO: 584807
ucaaauagucucugaguca

SEQ ID NO: 590797 - RNA, 19 nt, Artificial Sequence
  Description of Artificial Sequence: Synthetic oligonucleotide
  Antisense strand to SEQ ID NO: 590796
ugacucagagacuauuuga

SEQ ID NO: 590798 - RNA, 19 nt, Artificial Sequence
  Description of Artificial Sequence: Synthetic oligonucleotide
  Sense strand starting at position 1643 of SEQ ID NO: 584807
agcauagugcuagagguaa

SEQ ID NO: 590799 - RNA, 19 nt, Artificial Sequence
  Description of Artificial Sequence: Synthetic oligonucleotide
  Antisense strand to SEQ ID NO: 590798
uuaccucuagcacuaugcu

SEQ ID NO: 590800 - RNA, 19 nt, Artificial Sequence
  Description of Artificial Sequence: Synthetic oligonucleotide
  Sense strand starting at position 1645 of SEQ ID NO: 584807
cauagugcuagagguaaag

SEQ ID NO: 590801 - RNA, 19 nt, Artificial Sequence
  Description of Artificial Sequence: Synthetic oligonucleotide
  Antisense strand to SEQ ID NO: 590800
cuuuaccucuagcacuaug

SEQ ID NO: 590802 - RNA, 19 nt, Artificial Sequence
  Description of Artificial Sequence: Synthetic oligonucleotide
  Sense strand starting at position 1774 of SEQ ID NO: 584807
uagaacugaugucagaaga

SEQ ID NO: 590803 - RNA, 19 nt, Artificial Sequence
  Description of Artificial Sequence: Synthetic oligonucleotide
  Antisense strand to SEQ ID NO: 590802
ucuucugacaucaguucua

SEQ ID NO: 590804 - RNA, 19 nt, Artificial Sequence
  Description of Artificial Sequence: Synthetic oligonucleotide
  Sense strand starting at position 1811 of SEQ ID NO: 584807
aacgauguauuauugauga

SEQ ID NO: 590805 - RNA, 19 nt, Artificial Sequence
  Description of Artificial Sequence: Synthetic oligonucleotide
  Antisense strand to SEQ ID NO: 590804
ucaucaauaauacaucguu

SEQ ID NO: 590806 - RNA, 19 nt, Artificial Sequence
  Description of Artificial Sequence: Synthetic oligonucleotide
  Sense strand starting at position 1813 of SEQ ID NO: 584807
cgauguauuauugaugauu

SEQ ID NO: 590807 - RNA, 19 nt, Artificial Sequence
  Description of Artificial Sequence: Synthetic oligonucleotide
  Antisense strand to SEQ ID NO: 590806
aaucaucaauaauacaucg

SEQ ID NO: 590808 - RNA, 19 nt, Artificial Sequence
  Description of Artificial Sequence: Synthetic oligonucleotide
  Sense strand starting at position 1883 of SEQ ID NO: 584807
cuugguacaugguuauaaa

SEQ ID NO: 590809 - RNA, 19 nt, Artificial Sequence
  Description of Artificial Sequence: Synthetic oligonucleotide
  Antisense strand to SEQ ID NO: 590808
uuuauaaccauguaccaag

SEQ ID NO: 590810 - RNA, 19 nt, Artificial Sequence
  Description of Artificial Sequence: Synthetic oligonucleotide
  Sense strand starting at position 1884 of SEQ ID NO: 584807
uugguacaugguuauaaac

SEQ ID NO: 590811 - RNA, 19 nt, Artificial Sequence
  Description of Artificial Sequence: Synthetic oligonucleotide
  Antisense strand to SEQ ID NO: 590810
guuuauaaccauguaccaa

SEQ ID NO: 590812 - RNA, 19 nt, Artificial Sequence
  Description of Artificial Sequence: Synthetic oligonucleotide
  Sense strand starting at position 1986 of SEQ ID NO: 584807
guagauuaguggucucagu

SEQ ID NO: 590813 - RNA, 19 nt, Artificial Sequence
  Description of Artificial Sequence: Synthetic oligonucleotide
  Antisense strand to SEQ ID NO: 590812
acugagaccacuaaucuac

SEQ ID NO: 590814 - RNA, 19 nt, Artificial Sequence
  Description of Artificial Sequence: Synthetic oligonucleotide
  Sense strand starting at position 2029 of SEQ ID NO: 584807
cuuggugguaaguguuaca

SEQ ID NO: 590815 - RNA, 19 nt, Artificial Sequence
  Description of Artificial Sequence: Synthetic oligonucleotide
  Antisense strand to SEQ ID NO: 590814
uguaacacuuaccaccaag

SEQ ID NO: 590816 - RNA, 19 nt, Artificial Sequence
  Description of Artificial Sequence: Synthetic oligonucleotide
  Sense strand starting at position 2076 of SEQ ID NO: 584807
gagcgauagcaagguuuau

SEQ ID NO: 590817 - RNA, 19 nt, Artificial Sequence
  Description of Artificial Sequence: Synthetic oligonucleotide
  Antisense strand to SEQ ID NO: 590816
auaaaccuugcuaucgcuc

SEQ ID NO: 590818 - RNA, 19 nt, Artificial Sequence
  Description of Artificial Sequence: Synthetic oligonucleotide
  Sense strand starting at position 2196 of SEQ ID NO: 584807
uccaguguucuguuucugu

SEQ ID NO: 590819 - RNA, 19 nt, Artificial Sequence
  Description of Artificial Sequence: Synthetic oligonucleotide
  Antisense strand to SEQ ID NO: 590818
acagaaacagaacacugga

SEQ ID NO: 590820 - RNA, 19 nt, Artificial Sequence
  Description of Artificial Sequence: Synthetic oligonucleotide
  Sense strand starting at position 2203 of SEQ ID NO: 584807
uucuguuucuguccuauga

SEQ ID NO: 590821 - RNA, 19 nt, Artificial Sequence
  Description of Artificial Sequence: Synthetic oligonucleotide
  Antisense strand to SEQ ID NO: 590820
ucauaggacagaaacagaa

SEQ ID NO: 590822 - RNA, 19 nt, Artificial Sequence
  Description of Artificial Sequence: Synthetic oligonucleotide
  Sense strand starting at position 2207 of SEQ ID NO: 584807
guuucuguccuaugagagu

SEQ ID NO: 590823 - RNA, 19 nt, Artificial Sequence
  Description of Artificial Sequence: Synthetic oligonucleotide
  Antisense strand to SEQ ID NO: 590822
acucucauaggacagaaac

SEQ ID NO: 590824 - RNA, 19 nt, Artificial Sequence
  Description of Artificial Sequence: Synthetic oligonucleotide
  Sense strand starting at position 2464 of SEQ ID NO: 584807
augugauauuugcaaaguu

SEQ ID NO: 590825 - RNA, 19 nt, Artificial Sequence
  Description of Artificial Sequence: Synthetic oligonucleotide
  Antisense strand to SEQ ID NO: 590824
aacuuugcaaauaucacau

SEQ ID NO: 590826 - RNA, 19 nt, Artificial Sequence
  Description of Artificial Sequence: Synthetic oligonucleotide
  Sense strand starting at position 2989 of SEQ ID NO: 584807
ugccaaccaugaucagaua

SEQ ID NO: 590827 - RNA, 19 nt, Artificial Sequence
  Description of Artificial Sequence: Synthetic oligonucleotide
  Antisense strand to SEQ ID NO: 590826
uaucugaucaugguuggca

SEQ ID NO: 590828 - RNA, 19 nt, Artificial Sequence
  Description of Artificial Sequence: Synthetic oligonucleotide
  Sense strand starting at position 3024 of SEQ ID NO: 584807
aaaugaagcguuuguauaa

SEQ ID NO: 590829 - RNA, 19 nt, Artificial Sequence
  Description of Artificial Sequence: Synthetic oligonucleotide
  Antisense strand to SEQ ID NO: 590828
uuauacaaacgcuucauuu

SEQ ID NO: 590830 - RNA, 19 nt, Artificial Sequence
  Description of Artificial Sequence: Synthetic oligonucleotide
  Sense strand starting at position 3025 of SEQ ID NO: 584807
aaugaagcguuuguauaaa

SEQ ID NO: 590831 - RNA, 19 nt, Artificial Sequence
  Description of Artificial Sequence: Synthetic oligonucleotide
  Antisense strand to SEQ ID NO: 590830
uuuauacaaacgcuucauu

SEQ ID NO: 590832 - RNA, 19 nt, Artificial Sequence
  Description of Artificial Sequence: Synthetic oligonucleotide
  Sense strand starting at position 3090 of SEQ ID NO: 584807
ggaacuucuugauaacuau

SEQ ID NO: 590833 - RNA, 19 nt, Artificial Sequence
  Description of Artificial Sequence: Synthetic oligonucleotide
  Antisense strand to SEQ ID NO: 590832
auaguuaucaagaaguucc

SEQ ID NO: 590834 - RNA, 19 nt, Artificial Sequence
  Description of Artificial Sequence: Synthetic oligonucleotide
  Sense strand starting at position 3150 of SEQ ID NO: 584807
cuaacaaucuuagucaugu

SEQ ID NO: 590835 - RNA, 19 nt, Artificial Sequence
  Description of Artificial Sequence: Synthetic oligonucleotide
  Antisense strand to SEQ ID NO: 590834
acaugacuaagauuguuag

SEQ ID NO: 590836 - RNA, 19 nt, Artificial Sequence
  Description of Artificial Sequence: Synthetic oligonucleotide
  Sense strand starting at position 3660 of SEQ ID NO: 584807
agaaauaccugugauugga

SEQ ID NO: 590837 - RNA, 19 nt, Artificial Sequence
  Description of Artificial Sequence: Synthetic oligonucleotide
  Antisense strand to SEQ ID NO: 590836
uccaaucacagguauuucu

SEQ ID NO: 590838 - RNA, 19 nt, Artificial Sequence
  Description of Artificial Sequence: Synthetic oligonucleotide
  Sense strand starting at position 3662 of SEQ ID NO: 584807
aaauaccugugauuggaua

SEQ ID NO: 590839 - RNA, 19 nt, Artificial Sequence
  Description of Artificial Sequence: Synthetic oligonucleotide
  Antisense strand to SEQ ID NO: 590838
uauccaaucacagguauuu

SEQ ID NO: 590840 - RNA, 19 nt, Artificial Sequence
  Description of Artificial Sequence: Synthetic oligonucleotide
  Sense strand starting at position 3663 of SEQ ID NO: 584807
aauaccugugauuggauaa

SEQ ID NO: 590841 - RNA, 19 nt, Artificial Sequence
  Description of Artificial Sequence: Synthetic oligonucleotide
  Antisense strand to SEQ ID NO: 590840
uuauccaaucacagguauu

SEQ ID NO: 590842 - RNA, 19 nt, Artificial Sequence
  Description of Artificial Sequence: Synthetic oligonucleotide
  Sense strand starting at position 3919 of SEQ ID NO: 584807
cccuacaaugcguggagau

SEQ ID NO: 590843 - RNA, 19 nt, Artificial Sequence
  Description of Artificial Sequence: Synthetic oligonucleotide
  Antisense strand to SEQ ID NO: 590842
aucuccacgcauuguaggg

SEQ ID NO: 590844 - RNA, 19 nt, Artificial Sequence
  Description of Artificial Sequence: Synthetic oligonucleotide
  Sense strand starting at position 3920 of SEQ ID NO: 584807
ccuacaaugcguggagauu

SEQ ID NO: 590845 - RNA, 19 nt, Artificial Sequence
  Description of Artificial Sequence: Synthetic oligonucleotide
  Antisense strand to SEQ ID NO: 590844
aaucuccacgcauuguagg

SEQ ID NO: 590846 - RNA, 19 nt, Artificial Sequence
  Description of Artificial Sequence: Synthetic oligonucleotide
  Sense strand starting at position 3921 of SEQ ID NO: 584807
cuacaaugcguggagauua

SEQ ID NO: 590847 - RNA, 19 nt, Artificial Sequence
  Description of Artificial Sequence: Synthetic oligonucleotide
  Antisense strand to SEQ ID NO: 590846
uaaucuccacgcauuguag

SEQ ID NO: 590848 - RNA, 19 nt, Artificial Sequence
  Description of Artificial Sequence: Synthetic oligonucleotide
  Sense strand starting at position 187 of SEQ ID NO: 584808
guugcagauuuagcucauu

SEQ ID NO: 590849 - RNA, 19 nt, Artificial Sequence
  Description of Artificial Sequence: Synthetic oligonucleotide
  Antisense strand to SEQ ID NO: 590848
aaugagcuaaaucugcaac

SEQ ID NO: 590850 - RNA, 19 nt, Artificial Sequence
  Description of Artificial Sequence: Synthetic oligonucleotide
  Sense strand starting at position 247 of SEQ ID NO: 584808
gccaauccucauugacaag

SEQ ID NO: 590851 - RNA, 19 nt, Artificial Sequence
  Description of Artificial Sequence: Synthetic oligonucleotide
  Antisense strand to SEQ ID NO: 590850
cuugucaaugaggauuggc

SEQ ID NO: 590852 - RNA, 19 nt, Artificial Sequence
  Description of Artificial Sequence: Synthetic oligonucleotide
  Sense strand starting at position 294 of SEQ ID NO: 584808
aggcaacuccgacauuguu

SEQ ID NO: 590853 - RNA, 19 nt, Artificial Sequence
  Description of Artificial Sequence: Synthetic oligonucleotide
  Antisense strand to SEQ ID NO: 590852
aacaaugucggaguugccu

SEQ ID NO: 590854 - RNA, 19 nt, Artificial Sequence
  Description of Artificial Sequence: Synthetic oligonucleotide
  Sense strand starting at position 327 of SEQ ID NO: 584808
aaagauagcccuggugaca

SEQ ID NO: 590855 - RNA, 19 nt, Artificial Sequence
  Description of Artificial Sequence: Synthetic oligonucleotide
  Antisense strand to SEQ ID NO: 590854
ugucaccagggcuaucuuu

SEQ ID NO: 590856 - RNA, 19 nt, Artificial Sequence
  Description of Artificial Sequence: Synthetic oligonucleotide
  Sense strand starting at position 462 of SEQ ID NO: 584808
gcauguucagagggaaauu

SEQ ID NO: 590857 - RNA, 19 nt, Artificial Sequence
  Description of Artificial Sequence: Synthetic oligonucleotide
  Antisense strand to SEQ ID NO: 590856
aauuucccucugaacaugc

SEQ ID NO: 590858 - RNA, 19 nt, Artificial Sequence
  Description of Artificial Sequence: Synthetic oligonucleotide
  Sense strand starting at position 534 of SEQ ID NO: 584808
uucuauacccugugaaguc

SEQ ID NO: 590859 - RNA, 19 nt, Artificial Sequence
  Description of Artificial Sequence: Synthetic oligonucleotide
  Antisense strand to SEQ ID NO: 590858
gacuucacaggguauagaa

SEQ ID NO: 590860 - RNA, 19 nt, Artificial Sequence
  Description of Artificial Sequence: Synthetic oligonucleotide
  Sense strand starting at position 546 of SEQ ID NO: 584808
ugaagucuugugggccuaa

SEQ ID NO: 590861 - RNA, 19 nt, Artificial Sequence
  Description of Artificial Sequence: Synthetic oligonucleotide
  Antisense strand to SEQ ID NO: 590860
uuaggcccacaagacuuca

SEQ ID NO: 590862 - RNA, 19 nt, Artificial Sequence
  Description of Artificial Sequence: Synthetic oligonucleotide
  Sense strand starting at position 672 of SEQ ID NO: 584808
ucugcauuucuuugaggca

SEQ ID NO: 590863 - RNA, 19 nt, Artificial Sequence
  Description of Artificial Sequence: Synthetic oligonucleotide
  Antisense strand to SEQ ID NO: 590862
ugccucaaagaaaugcaga

SEQ ID NO: 590864 - RNA, 19 nt, Artificial Sequence
  Description of Artificial Sequence: Synthetic oligonucleotide
  Sense strand starting at position 690 of SEQ ID NO: 584808
auccuaagccuuuggaaau

SEQ ID NO: 590865 - RNA, 19 nt, Artificial Sequence
  Description of Artificial Sequence: Synthetic oligonucleotide
  Antisense strand to SEQ ID NO: 590864
auuuccaaaggcuuaggau

SEQ ID NO: 590866 - RNA, 19 nt, Artificial Sequence
  Description of Artificial Sequence: Synthetic oligonucleotide
  Sense strand starting at position 789 of SEQ ID NO: 584808
cuguauagucuuggauaaa

SEQ ID NO: 590867 - RNA, 19 nt, Artificial Sequence
  Description of Artificial Sequence: Synthetic oligonucleotide
  Antisense strand to SEQ ID NO: 590866
uuuauccaagacuauacag

SEQ ID NO: 590868 - RNA, 19 nt, Artificial Sequence
  Description of Artificial Sequence: Synthetic oligonucleotide
  Sense strand starting at position 813 of SEQ ID NO: 584808
cagggagucccaggaauug

SEQ ID NO: 590869 - RNA, 19 nt, Artificial Sequence
  Description of Artificial Sequence: Synthetic oligonucleotide
  Antisense strand to SEQ ID NO: 590868
caauuccugggacucccug

SEQ ID NO: 590870 - RNA, 19 nt, Artificial Sequence
  Description of Artificial Sequence: Synthetic oligonucleotide
  Sense strand starting at position 844 of SEQ ID NO: 584808
cucugagugcuuuagaacu

SEQ ID NO: 590871 - RNA, 19 nt, Artificial Sequence
  Description of Artificial Sequence: Synthetic oligonucleotide
  Antisense strand to SEQ ID NO: 590870
aguucuaaagcacucagag

SEQ ID NO: 590872 - RNA, 19 nt, Artificial Sequence
  Description of Artificial Sequence: Synthetic oligonucleotide
  Sense strand starting at position 927 of SEQ ID NO: 584808
cugaaauuccuagguccau

SEQ ID NO: 590873 - RNA, 19 nt, Artificial Sequence
  Description of Artificial Sequence: Synthetic oligonucleotide
  Antisense strand to SEQ ID NO: 590872
auggaccuaggaauuucag

SEQ ID NO: 590874 - RNA, 19 nt, Artificial Sequence
  Description of Artificial Sequence: Synthetic oligonucleotide
  Sense strand starting at position 978 of SEQ ID NO: 584808
uucuguucuccagggaggu

SEQ ID NO: 590875 - RNA, 19 nt, Artificial Sequence
  Description of Artificial Sequence: Synthetic oligonucleotide
  Antisense strand to SEQ ID NO: 590874
accucccuggagaacagaa

SEQ ID NO: 590876 - RNA, 19 nt, Artificial Sequence
  Description of Artificial Sequence: Synthetic oligonucleotide
  Sense strand starting at position 979 of SEQ ID NO: 584808
ucuguucuccagggagguu

SEQ ID NO: 590877 - RNA, 19 nt, Artificial Sequence
  Description of Artificial Sequence: Synthetic oligonucleotide
  Antisense strand to SEQ ID NO: 590876
aaccucccuggagaacaga

SEQ ID NO: 590878 - RNA, 19 nt, Artificial Sequence
  Description of Artificial Sequence: Synthetic oligonucleotide
  Sense strand starting at position 1091 of SEQ ID NO: 584808
agaggagcugcuuaugcaa

SEQ ID NO: 590879 - RNA, 19 nt, Artificial Sequence
  Description of Artificial Sequence: Synthetic oligonucleotide
  Antisense strand to SEQ ID NO: 590878
uugcauaagcagcuccucu

SEQ ID NO: 590880 - RNA, 19 nt, Artificial Sequence
  Description of Artificial Sequence: Synthetic oligonucleotide
  Sense strand starting at position 1120 of SEQ ID NO: 584808
auuuguacaugggaagaca

SEQ ID NO: 590881 - RNA, 19 nt, Artificial Sequence
  Description of Artificial Sequence: Synthetic oligonucleotide
  Antisense strand to SEQ ID NO: 590880
ugucuucccauguacaaau

SEQ ID NO: 590882 - RNA, 19 nt, Artificial Sequence
  Description of Artificial Sequence: Synthetic oligonucleotide
  Sense strand starting at position 1149 of SEQ ID NO: 584808
uacagucaccuuggaaaug

SEQ ID NO: 590883 - RNA, 19 nt, Artificial Sequence
  Description of Artificial Sequence: Synthetic oligonucleotide
  Antisense strand to SEQ ID NO: 590882
cauuuccaaggugacugua

SEQ ID NO: 590884 - RNA, 19 nt, Artificial Sequence
  Description of Artificial Sequence: Synthetic oligonucleotide
  Sense strand starting at position 1161 of SEQ ID NO: 584808
ggaaaugcacuuugaacau

SEQ ID NO: 590885 - RNA, 19 nt, Artificial Sequence
  Description of Artificial Sequence: Synthetic oligonucleotide
  Antisense strand to SEQ ID NO: 590884
auguucaaagugcauuucc

SEQ ID NO: 590886 - RNA, 19 nt, Artificial Sequence
  Description of Artificial Sequence: Synthetic oligonucleotide
  Sense strand starting at position 1566 of SEQ ID NO: 584808
cagguaacggugagugguu

SEQ ID NO: 590887 - RNA, 19 nt, Artificial Sequence
  Description of Artificial Sequence: Synthetic oligonucleotide
  Antisense strand to SEQ ID NO: 590886
aaccacucaccguuaccug

SEQ ID NO: 590888 - RNA, 19 nt, Artificial Sequence
  Description of Artificial Sequence: Synthetic oligonucleotide
  Sense strand starting at position 1571 of SEQ ID NO: 584808
aacggugagugguucagaa

SEQ ID NO: 590889 - RNA, 19 nt, Artificial Sequence
  Description of Artificial Sequence: Synthetic oligonucleotide
  Antisense strand to SEQ ID NO: 590888
uucugaaccacucaccguu

SEQ ID NO: 590890 - RNA, 19 nt, Artificial Sequence
  Description of Artificial Sequence: Synthetic oligonucleotide
  Sense strand starting at position 1767 of SEQ ID NO: 584808
acggccuuaccagaucaau

SEQ ID NO: 590891 - RNA, 19 nt, Artificial Sequence
  Description of Artificial Sequence: Synthetic oligonucleotide
  Antisense strand to SEQ ID NO: 590890
auugaucugguaaggccgu

SEQ ID NO: 590892 - RNA, 19 nt, Artificial Sequence
  Description of Artificial Sequence: Synthetic oligonucleotide
  Sense strand starting at position 2507 of SEQ ID NO: 584808
ggguguaaacccgagcaca

SEQ ID NO: 590893 - RNA, 19 nt, Artificial Sequence
  Description of Artificial Sequence: Synthetic oligonucleotide
  Antisense strand to SEQ ID NO: 590892
ugugcucggguuuacaccc

SEQ ID NO: 590894 - RNA, 19 nt, Artificial Sequence
  Description of Artificial Sequence: Synthetic oligonucleotide
  Sense strand starting at position 2575 of SEQ ID NO: 584808
uugacaaacgacugucaau

SEQ ID NO: 590895 - RNA, 19 nt, Artificial Sequence
  Description of Artificial Sequence: Synthetic oligonucleotide
  Antisense strand to SEQ ID NO: 590894
auugacagucguuugucaa

SEQ ID NO: 590896 - RNA, 19 nt, Artificial Sequence
  Description of Artificial Sequence: Synthetic oligonucleotide
  Sense strand starting at position 2584 of SEQ ID NO: 584808
gacugucaaucacuaggaa

SEQ ID NO: 590897 - RNA, 19 nt, Artificial Sequence
  Description of Artificial Sequence: Synthetic oligonucleotide
  Antisense strand to SEQ ID NO: 590896
uuccuagugauugacaguc

SEQ ID NO: 590898 - RNA, 19 nt, Artificial Sequence
  Description of Artificial Sequence: Synthetic oligonucleotide
  Sense strand starting at position 2587 of SEQ ID NO: 584808
ugucaaucacuaggaaacu

SEQ ID NO: 590899 - RNA, 19 nt, Artificial Sequence
  Description of Artificial Sequence: Synthetic oligonucleotide
  Antisense strand to SEQ ID NO: 590898
aguuuccuagugauugaca

SEQ ID NO: 590900 - RNA, 19 nt, Artificial Sequence
  Description of Artificial Sequence: Synthetic oligonucleotide
  Sense strand starting at position 2812 of SEQ ID NO: 584808
cccugcguguaauuuaaua

SEQ ID NO: 590901 - RNA, 19 nt, Artificial Sequence
  Description of Artificial Sequence: Synthetic oligonucleotide
  Antisense strand to SEQ ID NO: 590900
uauuaaauuacacgcaggg

SEQ ID NO: 590902 - RNA, 19 nt, Artificial Sequence
  Description of Artificial Sequence: Synthetic oligonucleotide
  Sense strand starting at position 2831 of SEQ ID NO: 584808
cuaaucaucugguuguuaa

SEQ ID NO: 590903 - RNA, 19 nt, Artificial Sequence
  Description of Artificial Sequence: Synthetic oligonucleotide
  Antisense strand to SEQ ID NO: 590902
uuaacaaccagaugauuag

SEQ ID NO: 590904 - RNA, 19 nt, Artificial Sequence
  Description of Artificial Sequence: Synthetic oligonucleotide
  Sense strand starting at position 2834 of SEQ ID NO: 584808
aucaucugguuguuaaacu

SEQ ID NO: 590905 - RNA, 19 nt, Artificial Sequence
  Description of Artificial Sequence: Synthetic oligonucleotide
  Antisense strand to SEQ ID NO: 590904
aguuuaacaaccagaugau

SEQ ID NO: 590906 - RNA, 19 nt, Artificial Sequence
  Description of Artificial Sequence: Synthetic oligonucleotide
  Sense strand starting at position 2930 of SEQ ID NO: 584808
ccugccuuccaguaaaugu

SEQ ID NO: 590907 - RNA, 19 nt, Artificial Sequence
  Description of Artificial Sequence: Synthetic oligonucleotide
  Antisense strand to SEQ ID NO: 590906
acauuuacuggaaggcagg

SEQ ID NO: 590908 - RNA, 19 nt, Artificial Sequence
  Description of Artificial Sequence: Synthetic oligonucleotide
  Sense strand starting at position 2967 of SEQ ID NO: 584808
ucagucugugggcaacauu

SEQ ID NO: 590909 - RNA, 19 nt, Artificial Sequence
  Description of Artificial Sequence: Synthetic oligonucleotide
  Antisense strand to SEQ ID NO: 590908
aauguugcccacagacuga

SEQ ID NO: 590910 - RNA, 19 nt, Artificial Sequence
  Description of Artificial Sequence: Synthetic oligonucleotide
  Sense strand starting at position 3006 of SEQ ID NO: 584808
gcagguucggauuaugaaa

SEQ ID NO: 590911 - RNA, 19 nt, Artificial Sequence
  Description of Artificial Sequence: Synthetic oligonucleotide
  Antisense strand to SEQ ID NO: 590910
uuucauaauccgaaccugc

SEQ ID NO: 590912 - RNA, 19 nt, Artificial Sequence
  Description of Artificial Sequence: Synthetic oligonucleotide
  Sense strand starting at position 3073 of SEQ ID NO: 584808
ucaaauagucucugaguca

SEQ ID NO: 590913 - RNA, 19 nt, Artificial Sequence
  Description of Artificial Sequence: Synthetic oligonucleotide
  Antisense strand to SEQ ID NO: 590912
ugacucagagacuauuuga

SEQ ID NO: 590914 - RNA, 19 nt, Artificial Sequence
  Description of Artificial Sequence: Synthetic oligonucleotide
  Sense strand starting at position 3122 of SEQ ID NO: 584808
agcauagugcuagagguaa

SEQ ID NO: 590915 - RNA, 19 nt, Artificial Sequence
  Description of Artificial Sequence: Synthetic oligonucleotide
  Antisense strand to SEQ ID NO: 590914
uuaccucuagcacuaugcu

SEQ ID NO: 590916 - RNA, 19 nt, Artificial Sequence
  Description of Artificial Sequence: Synthetic oligonucleotide
  Sense strand starting at position 3124 of SEQ ID NO: 584808
cauagugcuagagguaaag

SEQ ID NO: 590917 - RNA, 19 nt, Artificial Sequence
  Description of Artificial Sequence: Synthetic oligonucleotide
  Antisense strand to SEQ ID NO: 590916
cuuuaccucuagcacuaug

SEQ ID NO: 590918 - RNA, 19 nt, Artificial Sequence
  Description of Artificial Sequence: Synthetic oligonucleotide
  Sense strand starting at position 3290 of SEQ ID NO: 584808
aacgauguauuauugauga

SEQ ID NO: 590919 - RNA, 19 nt, Artificial Sequence
  Description of Artificial Sequence: Synthetic oligonucleotide
  Antisense strand to SEQ ID NO: 590918
ucaucaauaauacaucguu

SEQ ID NO: 590920 - RNA, 19 nt, Artificial Sequence
  Description of Artificial Sequence: Synthetic oligonucleotide
  Sense strand starting at position 3292 of SEQ ID NO: 584808
cgauguauuauugaugauu

SEQ ID NO: 590921 - RNA, 19 nt, Artificial Sequence
  Description of Artificial Sequence: Synthetic oligonucleotide
  Antisense strand to SEQ ID NO: 590920
aaucaucaauaauacaucg

SEQ ID NO: 590922 - RNA, 19 nt, Artificial Sequence
  Description of Artificial Sequence: Synthetic oligonucleotide
  Sense strand starting at position 3362 of SEQ ID NO: 584808
cuugguacaugguuauaaa

SEQ ID NO: 590923 - RNA, 19 nt, Artificial Sequence
  Description of Artificial Sequence: Synthetic oligonucleotide
  Antisense strand to SEQ ID NO: 590922
uuuauaaccauguaccaag

SEQ ID NO: 590924 - RNA, 19 nt, Artificial Sequence
  Description of Artificial Sequence: Synthetic oligonucleotide
  Sense strand starting at position 3363 of SEQ ID NO: 584808
uugguacaugguuauaaac

SEQ ID NO: 590925 - RNA, 19 nt, Artificial Sequence
  Description of Artificial Sequence: Synthetic oligonucleotide
  Antisense strand to SEQ ID NO: 590924
guuuauaaccauguaccaa

SEQ ID NO: 590926 - RNA, 19 nt, Artificial Sequence
  Description of Artificial Sequence: Synthetic oligonucleotide
  Sense strand starting at position 3675 of SEQ ID NO: 584808
uccaguguucuguuucugu

SEQ ID NO: 590927 - RNA, 19 nt, Artificial Sequence
  Description of Artificial Sequence: Synthetic oligonucleotide
  Antisense strand to SEQ ID NO: 590926
acagaaacagaacacugga

SEQ ID NO: 590928 - RNA, 19 nt, Artificial Sequence
  Description of Artificial Sequence: Synthetic oligonucleotide
  Sense strand starting at position 78 of SEQ ID NO: 584809
ggcuuaggccaauaaugca

SEQ ID NO: 590929 - RNA, 19 nt, Artificial Sequence
  Description of Artificial Sequence: Synthetic oligonucleotide
  Antisense strand to SEQ ID NO: 590928
ugcauuauuggccuaagcc

SEQ ID NO: 590930 - RNA, 19 nt, Artificial Sequence
  Description of Artificial Sequence: Synthetic oligonucleotide
  Sense strand starting at position 389 of SEQ ID NO: 584809
gcuacuggaucguauuuaa

SEQ ID NO: 590931 - RNA, 19 nt, Artificial Sequence
  Description of Artificial Sequence: Synthetic oligonucleotide
  Antisense strand to SEQ ID NO: 590930
uuaaauacgauccaguagc

SEQ ID NO: 590932 - RNA, 19 nt, Artificial Sequence
  Description of Artificial Sequence: Synthetic oligonucleotide
  Sense strand starting at position 410 of SEQ ID NO: 584809
uguuacuguuugcuccaua

SEQ ID NO: 590933 - RNA, 19 nt, Artificial Sequence
  Description of Artificial Sequence: Synthetic oligonucleotide
  Antisense strand to SEQ ID NO: 590932
uauggagcaaacaguaaca

SEQ ID NO: 590934 - RNA, 19 nt, Artificial Sequence
  Description of Artificial Sequence: Synthetic oligonucleotide
  Sense strand starting at position 411 of SEQ ID NO: 584809
guuacuguuugcuccauau

SEQ ID NO: 590935 - RNA, 19 nt, Artificial Sequence
  Description of Artificial Sequence: Synthetic oligonucleotide
  Antisense strand to SEQ ID NO: 590934
auauggagcaaacaguaac

SEQ ID NO: 590936 - RNA, 19 nt, Artificial Sequence
  Description of Artificial Sequence: Synthetic oligonucleotide
  Sense strand starting at position 470 of SEQ ID NO: 584809
uuggaacacccuuguacau

SEQ ID NO: 590937 - RNA, 19 nt, Artificial Sequence
  Description of Artificial Sequence: Synthetic oligonucleotide
  Antisense strand to SEQ ID NO: 590936
auguacaaggguguuccaa

SEQ ID NO: 590938 - RNA, 19 nt, Artificial Sequence
  Description of Artificial Sequence: Synthetic oligonucleotide
  Sense strand starting at position 472 of SEQ ID NO: 584809
ggaacacccuuguacauuu

SEQ ID NO: 590939 - RNA, 19 nt, Artificial Sequence
  Description of Artificial Sequence: Synthetic oligonucleotide
  Antisense strand to SEQ ID NO: 590938
aaauguacaaggguguucc

SEQ ID NO: 590940 - RNA, 19 nt, Artificial Sequence
  Description of Artificial Sequence: Synthetic oligonucleotide
  Sense strand starting at position 501 of SEQ ID NO: 584809
auagaaucagcucauguca

SEQ ID NO: 590941 - RNA, 19 nt, Artificial Sequence
  Description of Artificial Sequence: Synthetic oligonucleotide
  Antisense strand to SEQ ID NO: 590940
ugacaugagcugauucuau

SEQ ID NO: 590942 - RNA, 19 nt, Artificial Sequence
  Description of Artificial Sequence: Synthetic oligonucleotide
  Sense strand starting at position 543 of SEQ ID NO: 584809
cuacauaaacguugagcuu

SEQ ID NO: 590943 - RNA, 19 nt, Artificial Sequence
  Description of Artificial Sequence: Synthetic oligonucleotide
  Antisense strand to SEQ ID NO: 590942
aagcucaacguuuauguag

SEQ ID NO: 590944 - RNA, 19 nt, Artificial Sequence
  Description of Artificial Sequence: Synthetic oligonucleotide
  Sense strand starting at position 647 of SEQ ID NO: 584809
cuuaaaucuugacugugua

SEQ ID NO: 590945 - RNA, 19 nt, Artificial Sequence
  Description of Artificial Sequence: Synthetic oligonucleotide
  Antisense strand to SEQ ID NO: 590944
uacacagucaagauuuaag

SEQ ID NO: 590946 - RNA, 19 nt, Artificial Sequence
  Description of Artificial Sequence: Synthetic oligonucleotide
  Sense strand starting at position 648 of SEQ ID NO: 584809
uuaaaucuugacuguguaa

SEQ ID NO: 590947 - RNA, 19 nt, Artificial Sequence
  Description of Artificial Sequence: Synthetic oligonucleotide
  Antisense strand to SEQ ID NO: 590946
uuacacagucaagauuuaa

SEQ ID NO: 590948 - RNA, 19 nt, Artificial Sequence
  Description of Artificial Sequence: Synthetic oligonucleotide
  Sense strand starting at position 701 of SEQ ID NO: 584809
gggaaaguucagugaccag

SEQ ID NO: 590949 - RNA, 19 nt, Artificial Sequence
  Description of Artificial Sequence: Synthetic oligonucleotide
  Antisense strand to SEQ ID NO: 590948
cuggucacugaacuuuccc

SEQ ID NO: 590950 - RNA, 19 nt, Artificial Sequence
  Description of Artificial Sequence: Synthetic oligonucleotide
  Sense strand starting at position 715 of SEQ ID NO: 584809
accagacguuucuuccaca

SEQ ID NO: 590951 - RNA, 19 nt, Artificial Sequence
  Description of Artificial Sequence: Synthetic oligonucleotide
  Antisense strand to SEQ ID NO: 590950
uguggaagaaacgucuggu

SEQ ID NO: 590952 - RNA, 19 nt, Artificial Sequence
  Description of Artificial Sequence: Synthetic oligonucleotide
  Sense strand starting at position 716 of SEQ ID NO: 584809
ccagacguuucuuccacaa

SEQ ID NO: 590953 - RNA, 19 nt, Artificial Sequence
  Description of Artificial Sequence: Synthetic oligonucleotide
  Antisense strand to SEQ ID NO: 590952
uuguggaagaaacgucugg

SEQ ID NO: 590954 - RNA, 19 nt, Artificial Sequence
  Description of Artificial Sequence: Synthetic oligonucleotide
  Sense strand starting at position 720 of SEQ ID NO: 584809
acguuucuuccacaaugca

SEQ ID NO: 590955 - RNA, 19 nt, Artificial Sequence
  Description of Artificial Sequence: Synthetic oligonucleotide
  Antisense strand to SEQ ID NO: 590954
ugcauuguggaagaaacgu

SEQ ID NO: 590956 - RNA, 19 nt, Artificial Sequence
  Description of Artificial Sequence: Synthetic oligonucleotide
  Sense strand starting at position 1989 of SEQ ID NO: 584809
ggugguggcaucugggaaa

SEQ ID NO: 590957 - RNA, 19 nt, Artificial Sequence
  Description of Artificial Sequence: Synthetic oligonucleotide
  Antisense strand to SEQ ID NO: 590956
uuucccagaugccaccacc

SEQ ID NO: 590958 - RNA, 19 nt, Artificial Sequence
  Description of Artificial Sequence: Synthetic oligonucleotide
  Sense strand starting at position 2213 of SEQ ID NO: 584809
ucaguuggcugcucugaga

SEQ ID NO: 590959 - RNA, 19 nt, Artificial Sequence
  Description of Artificial Sequence: Synthetic oligonucleotide
  Antisense strand to SEQ ID NO: 590958
ucucagagcagccaacuga

SEQ ID NO: 590960 - RNA, 19 nt, Artificial Sequence
  Description of Artificial Sequence: Synthetic oligonucleotide
  Sense strand starting at position 2273 of SEQ ID NO: 584809
cuaccacaucuuugggaga

SEQ ID NO: 590961 - RNA, 19 nt, Artificial Sequence
  Description of Artificial Sequence: Synthetic oligonucleotide
  Antisense strand to SEQ ID NO: 590960
ucucccaaagaugugguag

SEQ ID NO: 590962 - RNA, 19 nt, Artificial Sequence
  Description of Artificial Sequence: Synthetic oligonucleotide
  Sense strand starting at position 2288 of SEQ ID NO: 584809
gagagagugguuuggcauu

SEQ ID NO: 590963 - RNA, 19 nt, Artificial Sequence
  Description of Artificial Sequence: Synthetic oligonucleotide
  Antisense strand to SEQ ID NO: 590962
aaugccaaaccacucucuc

SEQ ID NO: 590964 - RNA, 19 nt, Artificial Sequence
  Description of Artificial Sequence: Synthetic oligonucleotide
  Sense strand starting at position 2301 of SEQ ID NO: 584809
ggcauuugaucugguggga

SEQ ID NO: 590965 - RNA, 19 nt, Artificial Sequence
  Description of Artificial Sequence: Synthetic oligonucleotide
  Antisense strand to SEQ ID NO: 590964
ucccaccagaucaaaugcc

SEQ ID NO: 590966 - RNA, 19 nt, Artificial Sequence
  Description of Artificial Sequence: Synthetic oligonucleotide
  Sense strand starting at position 2413 of SEQ ID NO: 584809
gguugugcucuggacugaa

SEQ ID NO: 590967 - RNA, 19 nt, Artificial Sequence
  Description of Artificial Sequence: Synthetic oligonucleotide
  Antisense strand to SEQ ID NO: 590966
uucaguccagagcacaacc

SEQ ID NO: 590968 - RNA, 19 nt, Artificial Sequence
  Description of Artificial Sequence: Synthetic oligonucleotide
  Sense strand starting at position 2478 of SEQ ID NO: 584809
cccuuagacguacauuaca

SEQ ID NO: 590969 - RNA, 19 nt, Artificial Sequence
  Description of Artificial Sequence: Synthetic oligonucleotide
  Antisense strand to SEQ ID NO: 590968
uguaauguacgucuaaggg

SEQ ID NO: 590970 - RNA, 19 nt, Artificial Sequence
  Description of Artificial Sequence: Synthetic oligonucleotide
  Sense strand starting at position 2520 of SEQ ID NO: 584809
agaccagaguuucuaauug

SEQ ID NO: 590971 - RNA, 19 nt, Artificial Sequence
  Description of Artificial Sequence: Synthetic oligonucleotide
  Antisense strand to SEQ ID NO: 590970
caauuagaaacucuggucu

SEQ ID NO: 590972 - RNA, 19 nt, Artificial Sequence
  Description of Artificial Sequence: Synthetic oligonucleotide
  Sense strand starting at position 2627 of SEQ ID NO: 584809
ucuggcaguagucagaaua

SEQ ID NO: 590973 - RNA, 19 nt, Artificial Sequence
  Description of Artificial Sequence: Synthetic oligonucleotide
  Antisense strand to SEQ ID NO: 590972
uauucugacuacugccaga

SEQ ID NO: 590974 - RNA, 19 nt, Artificial Sequence
  Description of Artificial Sequence: Synthetic oligonucleotide
  Sense strand starting at position 2693 of SEQ ID NO: 584809
cgguccaaauaaucacaua

SEQ ID NO: 590975 - RNA, 19 nt, Artificial Sequence
  Description of Artificial Sequence: Synthetic oligonucleotide
  Antisense strand to SEQ ID NO: 590974
uaugugauuauuuggaccg

SEQ ID NO: 590976 - RNA, 19 nt, Artificial Sequence
  Description of Artificial Sequence: Synthetic oligonucleotide
  Sense strand starting at position 2909 of SEQ ID NO: 584809
gcagccuucuccuccagaa

SEQ ID NO: 590977 - RNA, 19 nt, Artificial Sequence
  Description of Artificial Sequence: Synthetic oligonucleotide
  Antisense strand to SEQ ID NO: 590976
uucuggaggagaaggcugc

SEQ ID NO: 590978 - RNA, 19 nt, Artificial Sequence
  Description of Artificial Sequence: Synthetic oligonucleotide
  Sense strand starting at position 3041 of SEQ ID NO: 584809
gcgcgcgagcguucaaaca

SEQ ID NO: 590979 - RNA, 19 nt, Artificial Sequence
  Description of Artificial Sequence: Synthetic oligonucleotide
  Antisense strand to SEQ ID NO: 590978
uguuugaacgcucgcgcgc

SEQ ID NO: 590980 - RNA, 19 nt, Artificial Sequence
  Description of Artificial Sequence: Synthetic oligonucleotide
  Sense strand starting at position 3111 of SEQ ID NO: 584809
gaguuccuaccaugugaac

SEQ ID NO: 590981 - RNA, 19 nt, Artificial Sequence
  Description of Artificial Sequence: Synthetic oligonucleotide
  Antisense strand to SEQ ID NO: 590980
guucacaugguaggaacuc

SEQ ID NO: 590982 - RNA, 19 nt, Artificial Sequence
  Description of Artificial Sequence: Synthetic oligonucleotide
  Sense strand starting at position 3215 of SEQ ID NO: 584809
gaaggaugcgcuugggacu

SEQ ID NO: 590983 - RNA, 19 nt, Artificial Sequence
  Description of Artificial Sequence: Synthetic oligonucleotide
  Antisense strand to SEQ ID NO: 590982
agucccaagcgcauccuuc

SEQ ID NO: 590984 - RNA, 19 nt, Artificial Sequence
  Description of Artificial Sequence: Synthetic oligonucleotide
  Sense strand starting at position 3386 of SEQ ID NO: 584809
cuuauaucuccuggagcaa

SEQ ID NO: 590985 - RNA, 19 nt, Artificial Sequence
  Description of Artificial Sequence: Synthetic oligonucleotide
  Antisense strand to SEQ ID NO: 590984
uugcuccaggagauauaag

SEQ ID NO: 590986 - RNA, 19 nt, Artificial Sequence
  Description of Artificial Sequence: Synthetic oligonucleotide
  Sense strand starting at position 3617 of SEQ ID NO: 584809
agggaaguguauuugcgua

SEQ ID NO: 590987 - RNA, 19 nt, Artificial Sequence
  Description of Artificial Sequence: Synthetic oligonucleotide
  Antisense strand to SEQ ID NO: 590986
uacgcaaauacacuucccu

SEQ ID NO: 590988 - RNA, 19 nt, Artificial Sequence
  Description of Artificial Sequence: Synthetic oligonucleotide
  Sense strand starting at position 3619 of SEQ ID NO: 584809
ggaaguguauuugcguaag

SEQ ID NO: 590989 - RNA, 19 nt, Artificial Sequence
  Description of Artificial Sequence: Synthetic oligonucleotide
  Antisense strand to SEQ ID NO: 590988
cuuacgcaaauacacuucc

SEQ ID NO: 590990 - RNA, 19 nt, Artificial Sequence
  Description of Artificial Sequence: Synthetic oligonucleotide
  Sense strand starting at position 3621 of SEQ ID NO: 584809
aaguguauuugcguaagga

SEQ ID NO: 590991 - RNA, 19 nt, Artificial Sequence
  Description of Artificial Sequence: Synthetic oligonucleotide
  Antisense strand to SEQ ID NO: 590990
uccuuacgcaaauacacuu

SEQ ID NO: 590992 - RNA, 19 nt, Artificial Sequence
  Description of Artificial Sequence: Synthetic oligonucleotide
  Sense strand starting at position 3622 of SEQ ID NO: 584809
aguguauuugcguaaggac

SEQ ID NO: 590993 - RNA, 19 nt, Artificial Sequence
  Description of Artificial Sequence: Synthetic oligonucleotide
  Antisense strand to SEQ ID NO: 590992
guccuuacgcaaauacacu

SEQ ID NO: 590994 - RNA, 19 nt, Artificial Sequence
  Description of Artificial Sequence: Synthetic oligonucleotide
  Sense strand starting at position 3665 of SEQ ID NO: 584809
cggcuacuguauuucuuaa

SEQ ID NO: 590995 - RNA, 19 nt, Artificial Sequence
  Description of Artificial Sequence: Synthetic oligonucleotide
  Antisense strand to SEQ ID NO: 590994
uuaagaaauacaguagccg

SEQ ID NO: 590996 - RNA, 19 nt, Artificial Sequence
  Description of Artificial Sequence: Synthetic oligonucleotide
  Sense strand starting at position 3819 of SEQ ID NO: 584809
gcuccauugcguuugaguu

SEQ ID NO: 590997 - RNA, 19 nt, Artificial Sequence
  Description of Artificial Sequence: Synthetic oligonucleotide
  Antisense strand to SEQ ID NO: 590996
aacucaaacgcaauggagc

SEQ ID NO: 590998 - RNA, 19 nt, Artificial Sequence
  Description of Artificial Sequence: Synthetic oligonucleotide
  Sense strand starting at position 3823 of SEQ ID NO: 584809
cauugcguuugaguuacau

SEQ ID NO: 590999 - RNA, 19 nt, Artificial Sequence
  Description of Artificial Sequence: Synthetic oligonucleotide
  Antisense strand to SEQ ID NO: 590998
auguaacucaaacgcaaug

SEQ ID NO: 591000 - RNA, 19 nt, Artificial Sequence
  Description of Artificial Sequence: Synthetic oligonucleotide
  Sense strand starting at position 3829 of SEQ ID NO: 584809
guuugaguuacaugcagca

SEQ ID NO: 591001 - RNA, 19 nt, Artificial Sequence
  Description of Artificial Sequence: Synthetic oligonucleotide
  Antisense strand to SEQ ID NO: 591000
ugcugcauguaacucaaac

SEQ ID NO: 591002 - RNA, 19 nt, Artificial Sequence
  Description of Artificial Sequence: Synthetic oligonucleotide
  Sense strand starting at position 3851 of SEQ ID NO: 584809
ggacuuuggcgaugggaaa

SEQ ID NO: 591003 - RNA, 19 nt, Artificial Sequence
  Description of Artificial Sequence: Synthetic oligonucleotide
  Antisense strand to SEQ ID NO: 591002
uuucccaucgccaaagucc

SEQ ID NO: 591004 - RNA, 19 nt, Artificial Sequence
  Description of Artificial Sequence: Synthetic oligonucleotide
  Sense strand starting at position 3852 of SEQ ID NO: 584809
gacuuuggcgaugggaaau

SEQ ID NO: 591005 - RNA, 19 nt, Artificial Sequence
  Description of Artificial Sequence: Synthetic oligonucleotide
  Antisense strand to SEQ ID NO: 591004
auuucccaucgccaaaguc

SEQ ID NO: 591006 - RNA, 19 nt, Artificial Sequence
  Description of Artificial Sequence: Synthetic oligonucleotide
  Sense strand starting at position 3902 of SEQ ID NO: 584809
acaagcauuuguugagaca

SEQ ID NO: 591007 - RNA, 19 nt, Artificial Sequence
  Description of Artificial Sequence: Synthetic oligonucleotide
  Antisense strand to SEQ ID NO: 591006
ugucucaacaaaugcuugu

SEQ ID NO: 591008 - RNA, 19 nt, Artificial Sequence
  Description of Artificial Sequence: Synthetic oligonucleotide
  Sense strand starting at position 29 of SEQ ID NO: 584810
aaagaauuaggguggcaug

SEQ ID NO: 591009 - RNA, 19 nt, Artificial Sequence
  Description of Artificial Sequence: Synthetic oligonucleotide
  Antisense strand to SEQ ID NO: 591008
caugccacccuaauucuuu

SEQ ID NO: 591010 - RNA, 19 nt, Artificial Sequence
  Description of Artificial Sequence: Synthetic oligonucleotide
  Sense strand starting at position 258 of SEQ ID NO: 584810
gaaguucuagggcaucaau

SEQ ID NO: 591011 - RNA, 19 nt, Artificial Sequence
  Description of Artificial Sequence: Synthetic oligonucleotide
  Antisense strand to SEQ ID NO: 591010
auugaugcccuagaacuuc

SEQ ID NO: 591012 - RNA, 19 nt, Artificial Sequence
  Description of Artificial Sequence: Synthetic oligonucleotide
  Sense strand starting at position 299 of SEQ ID NO: 584810
ccaauaacugauggaaguu

SEQ ID NO: 591013 - RNA, 19 nt, Artificial Sequence
  Description of Artificial Sequence: Synthetic oligonucleotide
  Antisense strand to SEQ ID NO: 591012
aacuuccaucaguuauugg

SEQ ID NO: 591014 - RNA, 19 nt, Artificial Sequence
  Description of Artificial Sequence: Synthetic oligonucleotide
  Sense strand starting at position 312 of SEQ ID NO: 584810
gaaguuggcgaauaaauac

SEQ ID NO: 591015 - RNA, 19 nt, Artificial Sequence
  Description of Artificial Sequence: Synthetic oligonucleotide
  Antisense strand to SEQ ID NO: 591014
guauuuauucgccaacuuc

SEQ ID NO: 591016 - RNA, 19 nt, Artificial Sequence
  Description of Artificial Sequence: Synthetic oligonucleotide
  Sense strand starting at position 375 of SEQ ID NO: 584810
cccaguauucccuagugaa

SEQ ID NO: 591017 - RNA, 19 nt, Artificial Sequence
  Description of Artificial Sequence: Synthetic oligonucleotide
  Antisense strand to SEQ ID NO: 591016
uucacuagggaauacuggg

SEQ ID NO: 591018 - RNA, 19 nt, Artificial Sequence
  Description of Artificial Sequence: Synthetic oligonucleotide
  Sense strand starting at position 516 of SEQ ID NO: 584810
ucugauuccgggugaaaua

SEQ ID NO: 591019 - RNA, 19 nt, Artificial Sequence
  Description of Artificial Sequence: Synthetic oligonucleotide
  Antisense strand to SEQ ID NO: 591018
uauuucacccggaaucaga

SEQ ID NO: 591020 - RNA, 19 nt, Artificial Sequence
  Description of Artificial Sequence: Synthetic oligonucleotide
  Sense strand starting at position 604 of SEQ ID NO: 584810
aagaguugcuauccuagau

SEQ ID NO: 591021 - RNA, 19 nt, Artificial Sequence
  Description of Artificial Sequence: Synthetic oligonucleotide
  Antisense strand to SEQ ID NO: 591020
aucuaggauagcaacucuu

SEQ ID NO: 591022 - RNA, 19 nt, Artificial Sequence
  Description of Artificial Sequence: Synthetic oligonucleotide
  Sense strand starting at position 858 of SEQ ID NO: 584810
acaauaugaucuuugguau

SEQ ID NO: 591023 - RNA, 19 nt, Artificial Sequence
  Description of Artificial Sequence: Synthetic oligonucleotide
  Antisense strand to SEQ ID NO: 591022
auaccaaagaucauauugu

SEQ ID NO: 591024 - RNA, 19 nt, Artificial Sequence
  Description of Artificial Sequence: Synthetic oligonucleotide
  Sense strand starting at position 861 of SEQ ID NO: 584810
auaugaucuuugguauuac

SEQ ID NO: 591025 - RNA, 19 nt, Artificial Sequence
  Description of Artificial Sequence: Synthetic oligonucleotide
  Antisense strand to SEQ ID NO: 591024
guaauaccaaagaucauau

SEQ ID NO: 591026 - RNA, 19 nt, Artificial Sequence
  Description of Artificial Sequence: Synthetic oligonucleotide
  Sense strand starting at position 870 of SEQ ID NO: 584810
uugguauuacaugaauguu

SEQ ID NO: 591027 - RNA, 19 nt, Artificial Sequence
  Description of Artificial Sequence: Synthetic oligonucleotide
  Antisense strand to SEQ ID NO: 591026
aacauucauguaauaccaa

SEQ ID NO: 591028 - RNA, 19 nt, Artificial Sequence
  Description of Artificial Sequence: Synthetic oligonucleotide
  Sense strand starting at position 878 of SEQ ID NO: 584810
acaugaauguuaucugggu

SEQ ID NO: 591029 - RNA, 19 nt, Artificial Sequence
  Description of Artificial Sequence: Synthetic oligonucleotide
  Antisense strand to SEQ ID NO: 591028
acccagauaacauucaugu

SEQ ID NO: 591030 - RNA, 19 nt, Artificial Sequence
  Description of Artificial Sequence: Synthetic oligonucleotide
  Sense strand starting at position 879 of SEQ ID NO: 584810
caugaauguuaucugggua

SEQ ID NO: 591031 - RNA, 19 nt, Artificial Sequence
  Description of Artificial Sequence: Synthetic oligonucleotide
  Antisense strand to SEQ ID NO: 591030
uacccagauaacauucaug

SEQ ID NO: 591032 - RNA, 19 nt, Artificial Sequence
  Description of Artificial Sequence: Synthetic oligonucleotide
  Sense strand starting at position 880 of SEQ ID NO: 584810
augaauguuaucuggguau

SEQ ID NO: 591033 - RNA, 19 nt, Artificial Sequence
  Description of Artificial Sequence: Synthetic oligonucleotide
  Antisense strand to SEQ ID NO: 591032
auacccagauaacauucau

SEQ ID NO: 591034 - RNA, 19 nt, Artificial Sequence
  Description of Artificial Sequence: Synthetic oligonucleotide
  Sense strand starting at position 891 of SEQ ID NO: 584810
cuggguaugcuauaauucu

SEQ ID NO: 591035 - RNA, 19 nt, Artificial Sequence
  Description of Artificial Sequence: Synthetic oligonucleotide
  Antisense strand to SEQ ID NO: 591034
agaauuauagcauacccag

SEQ ID NO: 591036 - RNA, 19 nt, Artificial Sequence
  Description of Artificial Sequence: Synthetic oligonucleotide
  Sense strand starting at position 934 of SEQ ID NO: 584810
acacuuagcaguugagaag

SEQ ID NO: 591037 - RNA, 19 nt, Artificial Sequence
  Description of Artificial Sequence: Synthetic oligonucleotide
  Antisense strand to SEQ ID NO: 591036
cuucucaacugcuaagugu

SEQ ID NO: 591038 - RNA, 19 nt, Artificial Sequence
  Description of Artificial Sequence: Synthetic oligonucleotide
  Sense strand starting at position 946 of SEQ ID NO: 584810
ugagaagcccucuagcaga

SEQ ID NO: 591039 - RNA, 19 nt, Artificial Sequence
  Description of Artificial Sequence: Synthetic oligonucleotide
  Antisense strand to SEQ ID NO: 591038
ucugcuagagggcuucuca

SEQ ID NO: 591040 - RNA, 19 nt, Artificial Sequence
  Description of Artificial Sequence: Synthetic oligonucleotide
  Sense strand starting at position 976 of SEQ ID NO: 584810
uuuagagguuuccugggaa

SEQ ID NO: 591041 - RNA, 19 nt, Artificial Sequence
  Description of Artificial Sequence: Synthetic oligonucleotide
  Antisense strand to SEQ ID NO: 591040
uucccaggaaaccucuaaa

SEQ ID NO: 591042 - RNA, 19 nt, Artificial Sequence
  Description of Artificial Sequence: Synthetic oligonucleotide
  Sense strand starting at position 979 of SEQ ID NO: 584810
agagguuuccugggaaacc

SEQ ID NO: 591043 - RNA, 19 nt, Artificial Sequence
  Description of Artificial Sequence: Synthetic oligonucleotide
  Antisense strand to SEQ ID NO: 591042
gguuucccaggaaaccucu

SEQ ID NO: 591044 - RNA, 19 nt, Artificial Sequence
  Description of Artificial Sequence: Synthetic oligonucleotide
  Sense strand starting at position 999 of SEQ ID NO: 584810
agaauugccgccuaagaua

SEQ ID NO: 591045 - RNA, 19 nt, Artificial Sequence
  Description of Artificial Sequence: Synthetic oligonucleotide
  Antisense strand to SEQ ID NO: 591044
uaucuuaggcggcaauucu

SEQ ID NO: 591046 - RNA, 19 nt, Artificial Sequence
  Description of Artificial Sequence: Synthetic oligonucleotide
  Sense strand starting at position 1087 of SEQ ID NO: 584810
acuucagucguugaaagga

SEQ ID NO: 591047 - RNA, 19 nt, Artificial Sequence
  Description of Artificial Sequence: Synthetic oligonucleotide
  Antisense strand to SEQ ID NO: 591046
uccuuucaacgacugaagu

SEQ ID NO: 591048 - RNA, 19 nt, Artificial Sequence
  Description of Artificial Sequence: Synthetic oligonucleotide
  Sense strand starting at position 1397 of SEQ ID NO: 584810
aguucuuugucauuucuuu

SEQ ID NO: 591049 - RNA, 19 nt, Artificial Sequence
  Description of Artificial Sequence: Synthetic oligonucleotide
  Antisense strand to SEQ ID NO: 591048
aaagaaaugacaaagaacu

SEQ ID NO: 591050 - RNA, 19 nt, Artificial Sequence
  Description of Artificial Sequence: Synthetic oligonucleotide
  Sense strand starting at position 1681 of SEQ ID NO: 584810
guagguacaacauggauua

SEQ ID NO: 591051 - RNA, 19 nt, Artificial Sequence
  Description of Artificial Sequence: Synthetic oligonucleotide
  Antisense strand to SEQ ID NO: 591050
uaauccauguuguaccuac

SEQ ID NO: 591052 - RNA, 19 nt, Artificial Sequence
  Description of Artificial Sequence: Synthetic oligonucleotide
  Sense strand starting at position 1991 of SEQ ID NO: 584810
acccgaccucucuaugaua

SEQ ID NO: 591053 - RNA, 19 nt, Artificial Sequence
  Description of Artificial Sequence: Synthetic oligonucleotide
  Antisense strand to SEQ ID NO: 591052
uaucauagagaggucgggu

SEQ ID NO: 591054 - RNA, 19 nt, Artificial Sequence
  Description of Artificial Sequence: Synthetic oligonucleotide
  Sense strand starting at position 2673 of SEQ ID NO: 584810
uuugaacuaugacuuguaa

SEQ ID NO: 591055 - RNA, 19 nt, Artificial Sequence
  Description of Artificial Sequence: Synthetic oligonucleotide
  Antisense strand to SEQ ID NO: 591054
uuacaagucauaguucaaa

SEQ ID NO: 591056 - RNA, 19 nt, Artificial Sequence
  Description of Artificial Sequence: Synthetic oligonucleotide
  Sense strand starting at position 2742 of SEQ ID NO: 584810
acacuucuauuggugaacu

SEQ ID NO: 591057 - RNA, 19 nt, Artificial Sequence
  Description of Artificial Sequence: Synthetic oligonucleotide
  Antisense strand to SEQ ID NO: 591056
aguucaccaauagaagugu

SEQ ID NO: 591058 - RNA, 19 nt, Artificial Sequence
  Description of Artificial Sequence: Synthetic oligonucleotide
  Sense strand starting at position 2744 of SEQ ID NO: 584810
acuucuauuggugaacuuu

SEQ ID NO: 591059 - RNA, 19 nt, Artificial Sequence
  Description of Artificial Sequence: Synthetic oligonucleotide
  Antisense strand to SEQ ID NO: 591058
aaaguucaccaauagaagu

SEQ ID NO: 591060 - RNA, 19 nt, Artificial Sequence
  Description of Artificial Sequence: Synthetic oligonucleotide
  Sense strand starting at position 2915 of SEQ ID NO: 584810
agugaauaagcagaucagu

SEQ ID NO: 591061 - RNA, 19 nt, Artificial Sequence
  Description of Artificial Sequence: Synthetic oligonucleotide
  Antisense strand to SEQ ID NO: 591060
acugaucugcuuauucacu

SEQ ID NO: 591062 - RNA, 19 nt, Artificial Sequence
  Description of Artificial Sequence: Synthetic oligonucleotide
  Sense strand starting at position 2923 of SEQ ID NO: 584810
agcagaucaguuuguauuu

SEQ ID NO: 591063 - RNA, 19 nt, Artificial Sequence
  Description of Artificial Sequence: Synthetic oligonucleotide
  Antisense strand to SEQ ID NO: 591062
aaauacaaacugaucugcu

SEQ ID NO: 591064 - RNA, 19 nt, Artificial Sequence
  Description of Artificial Sequence: Synthetic oligonucleotide
  Sense strand starting at position 2928 of SEQ ID NO: 584810
aucaguuuguauuucgauu

SEQ ID NO: 591065 - RNA, 19 nt, Artificial Sequence
  Description of Artificial Sequence: Synthetic oligonucleotide
  Antisense strand to SEQ ID NO: 591064
aaucgaaauacaaacugau

SEQ ID NO: 591066 - RNA, 19 nt, Artificial Sequence
  Description of Artificial Sequence: Synthetic oligonucleotide
  Sense strand starting at position 2965 of SEQ ID NO: 584810
ggagaaugguguuuauaua

SEQ ID NO: 591067 - RNA, 19 nt, Artificial Sequence
  Description of Artificial Sequence: Synthetic oligonucleotide
  Antisense strand to SEQ ID NO: 591066
uauauaaacaccauucucc

SEQ ID NO: 591068 - RNA, 19 nt, Artificial Sequence
  Description of Artificial Sequence: Synthetic oligonucleotide
  Sense strand starting at position 3049 of SEQ ID NO: 584810
gggugccacagugauauua

SEQ ID NO: 591069 - RNA, 19 nt, Artificial Sequence
  Description of Artificial Sequence: Synthetic oligonucleotide
  Antisense strand to SEQ ID NO: 591068
uaauaucacuguggcaccc

SEQ ID NO: 591070 - RNA, 19 nt, Artificial Sequence
  Description of Artificial Sequence: Synthetic oligonucleotide
  Sense strand starting at position 3061 of SEQ ID NO: 584810
gauauuagggacuguguuu

SEQ ID NO: 591071 - RNA, 19 nt, Artificial Sequence
  Description of Artificial Sequence: Synthetic oligonucleotide
  Antisense strand to SEQ ID NO: 591070
aaacacagucccuaauauc

SEQ ID NO: 591072 - RNA, 19 nt, Artificial Sequence
  Description of Artificial Sequence: Synthetic oligonucleotide
  Sense strand starting at position 3066 of SEQ ID NO: 584810
uagggacuguguuuaauau

SEQ ID NO: 591073 - RNA, 19 nt, Artificial Sequence
  Description of Artificial Sequence: Synthetic oligonucleotide
  Antisense strand to SEQ ID NO: 591072
auauuaaacacagucccua

SEQ ID NO: 591074 - RNA, 19 nt, Artificial Sequence
  Description of Artificial Sequence: Synthetic oligonucleotide
  Sense strand starting at position 3067 of SEQ ID NO: 584810
agggacuguguuuaauauu

SEQ ID NO: 591075 - RNA, 19 nt, Artificial Sequence
  Description of Artificial Sequence: Synthetic oligonucleotide
  Antisense strand to SEQ ID NO: 591074
aauauuaaacacagucccu

SEQ ID NO: 591076 - RNA, 19 nt, Artificial Sequence
  Description of Artificial Sequence: Synthetic oligonucleotide
  Sense strand starting at position 3180 of SEQ ID NO: 584810
uuggguugucuccauuaga

SEQ ID NO: 591077 - RNA, 19 nt, Artificial Sequence
  Description of Artificial Sequence: Synthetic oligonucleotide
  Antisense strand to SEQ ID NO: 591076
ucuaauggagacaacccaa

SEQ ID NO: 591078 - RNA, 19 nt, Artificial Sequence
  Description of Artificial Sequence: Synthetic oligonucleotide
  Sense strand starting at position 3183 of SEQ ID NO: 584810
gguugucuccauuagagga

SEQ ID NO: 591079 - RNA, 19 nt, Artificial Sequence
  Description of Artificial Sequence: Synthetic oligonucleotide
  Antisense strand to SEQ ID NO: 591078
uccucuaauggagacaacc

SEQ ID NO: 591080 - RNA, 19 nt, Artificial Sequence
  Description of Artificial Sequence: Synthetic oligonucleotide
  Sense strand starting at position 3187 of SEQ ID NO: 584810
gucuccauuagaggaguau

SEQ ID NO: 591081 - RNA, 19 nt, Artificial Sequence
  Description of Artificial Sequence: Synthetic oligonucleotide
  Antisense strand to SEQ ID NO: 591080
auacuccucuaauggagac

SEQ ID NO: 591082 - RNA, 19 nt, Artificial Sequence
  Description of Artificial Sequence: Synthetic oligonucleotide
  Sense strand starting at position 3310 of SEQ ID NO: 584810
ugcugacaacuuugauuag

SEQ ID NO: 591083 - RNA, 19 nt, Artificial Sequence
  Description of Artificial Sequence: Synthetic oligonucleotide
  Antisense strand to SEQ ID NO: 591082
cuaaucaaaguugucagca

SEQ ID NO: 591084 - RNA, 19 nt, Artificial Sequence
  Description of Artificial Sequence: Synthetic oligonucleotide
  Sense strand starting at position 3760 of SEQ ID NO: 584810
ccgcaucuggccguaaaua

SEQ ID NO: 591085 - RNA, 19 nt, Artificial Sequence
  Description of Artificial Sequence: Synthetic oligonucleotide
  Antisense strand to SEQ ID NO: 591084
uauuuacggccagaugcgg

SEQ ID NO: 591086 - RNA, 19 nt, Artificial Sequence
  Description of Artificial Sequence: Synthetic oligonucleotide
  Sense strand starting at position 3817 of SEQ ID NO: 584810
ugaggacugcgugagauau

SEQ ID NO: 591087 - RNA, 19 nt, Artificial Sequence
  Description of Artificial Sequence: Synthetic oligonucleotide
  Antisense strand to SEQ ID NO: 591086
auaucucacgcaguccuca

SEQ ID NO: 591088 - RNA, 19 nt, Artificial Sequence
  Description of Artificial Sequence: Synthetic oligonucleotide
  Sense strand starting at position 6 of SEQ ID NO: 584811
aguacuuaauaucuaggga

SEQ ID NO: 591089 - RNA, 19 nt, Artificial Sequence
  Description of Artificial Sequence: Synthetic oligonucleotide
  Antisense strand to SEQ ID NO: 591088
ucccuagauauuaaguacu

SEQ ID NO: 591090 - RNA, 19 nt, Artificial Sequence
  Description of Artificial Sequence: Synthetic oligonucleotide
  Sense strand starting at position 36 of SEQ ID NO: 584811
acaaguaguuaugaaucaa

SEQ ID NO: 591091 - RNA, 19 nt, Artificial Sequence
  Description of Artificial Sequence: Synthetic oligonucleotide
  Antisense strand to SEQ ID NO: 591090
uugauucauaacuacuugu

SEQ ID NO: 591092 - RNA, 19 nt, Artificial Sequence
  Description of Artificial Sequence: Synthetic oligonucleotide
  Sense strand starting at position 84 of SEQ ID NO: 584811
agcagucucucagcccaaa

SEQ ID NO: 591093 - RNA, 19 nt, Artificial Sequence
  Description of Artificial Sequence: Synthetic oligonucleotide
  Antisense strand to SEQ ID NO: 591092
uuugggcugagagacugcu

SEQ ID NO: 591094 - RNA, 19 nt, Artificial Sequence
  Description of Artificial Sequence: Synthetic oligonucleotide
  Sense strand starting at position 129 of SEQ ID NO: 584811
aggcaauuaggucaugguu

SEQ ID NO: 591095 - RNA, 19 nt, Artificial Sequence
  Description of Artificial Sequence: Synthetic oligonucleotide
  Antisense strand to SEQ ID NO: 591094
aaccaugaccuaauugccu

SEQ ID NO: 591096 - RNA, 19 nt, Artificial Sequence
  Description of Artificial Sequence: Synthetic oligonucleotide
  Sense strand starting at position 132 of SEQ ID NO: 584811
caauuaggucaugguugua

SEQ ID NO: 591097 - RNA, 19 nt, Artificial Sequence
  Description of Artificial Sequence: Synthetic oligonucleotide
  Antisense strand to SEQ ID NO: 591096
uacaaccaugaccuaauug

SEQ ID NO: 591098 - RNA, 19 nt, Artificial Sequence
  Description of Artificial Sequence: Synthetic oligonucleotide
  Sense strand starting at position 300 of SEQ ID NO: 584811
uugugauacaaggguauca

SEQ ID NO: 591099 - RNA, 19 nt, Artificial Sequence
  Description of Artificial Sequence: Synthetic oligonucleotide
  Antisense strand to SEQ ID NO: 591098
ugauacccuuguaucacaa

SEQ ID NO: 591100 - RNA, 19 nt, Artificial Sequence
  Description of Artificial Sequence: Synthetic oligonucleotide
  Sense strand starting at position 331 of SEQ ID NO: 584811
agugaagccuugcuaauga

SEQ ID NO: 591101 - RNA, 19 nt, Artificial Sequence
  Description of Artificial Sequence: Synthetic oligonucleotide
  Antisense strand to SEQ ID NO: 591100
ucauuagcaaggcuucacu

SEQ ID NO: 591102 - RNA, 19 nt, Artificial Sequence
  Description of Artificial Sequence: Synthetic oligonucleotide
  Sense strand starting at position 412 of SEQ ID NO: 584811
uguccuggcccacaagaaa

SEQ ID NO: 591103 - RNA, 19 nt, Artificial Sequence
  Description of Artificial Sequence: Synthetic oligonucleotide
  Antisense strand to SEQ ID NO: 591102
uuucuugugggccaggaca

SEQ ID NO: 591104 - RNA, 19 nt, Artificial Sequence
  Description of Artificial Sequence: Synthetic oligonucleotide
  Sense strand starting at position 499 of SEQ ID NO: 584811
ccggaaugcucguuacacu

SEQ ID NO: 591105 - RNA, 19 nt, Artificial Sequence
  Description of Artificial Sequence: Synthetic oligonucleotide
  Antisense strand to SEQ ID NO: 591104
aguguaacgagcauuccgg

SEQ ID NO: 591106 - RNA, 19 nt, Artificial Sequence
  Description of Artificial Sequence: Synthetic oligonucleotide
  Sense strand starting at position 500 of SEQ ID NO: 584811
cggaaugcucguuacacug

SEQ ID NO: 591107 - RNA, 19 nt, Artificial Sequence
  Description of Artificial Sequence: Synthetic oligonucleotide
  Antisense strand to SEQ ID NO: 591106
caguguaacgagcauuccg

SEQ ID NO: 591108 - RNA, 19 nt, Artificial Sequence
  Description of Artificial Sequence: Synthetic oligonucleotide
  Sense strand starting at position 613 of SEQ ID NO: 584811
guuugcgaaaccugucauu

SEQ ID NO: 591109 - RNA, 19 nt, Artificial Sequence
  Description of Artificial Sequence: Synthetic oligonucleotide
  Antisense strand to SEQ ID NO: 591108
aaugacagguuucgcaaac

SEQ ID NO: 591110 - RNA, 19 nt, Artificial Sequence
  Description of Artificial Sequence: Synthetic oligonucleotide
  Sense strand starting at position 622 of SEQ ID NO: 584811
accugucauuccuucugga

SEQ ID NO: 591111 - RNA, 19 nt, Artificial Sequence
  Description of Artificial Sequence: Synthetic oligonucleotide
  Antisense strand to SEQ ID NO: 591110
uccagaaggaaugacaggu

SEQ ID NO: 591112 - RNA, 19 nt, Artificial Sequence
  Description of Artificial Sequence: Synthetic oligonucleotide
  Sense strand starting at position 1178 of SEQ ID NO: 584811
ggaaguucucucggcggaa

SEQ ID NO: 591113 - RNA, 19 nt, Artificial Sequence
  Description of Artificial Sequence: Synthetic oligonucleotide
  Antisense strand to SEQ ID NO: 591112
uuccgccgagagaacuucc

SEQ ID NO: 591114 - RNA, 19 nt, Artificial Sequence
  Description of Artificial Sequence: Synthetic oligonucleotide
  Sense strand starting at position 1179 of SEQ ID NO: 584811
gaaguucucucggcggaaa

SEQ ID NO: 591115 - RNA, 19 nt, Artificial Sequence
  Description of Artificial Sequence: Synthetic oligonucleotide
  Antisense strand to SEQ ID NO: 591114
uuuccgccgagagaacuuc

SEQ ID NO: 591116 - RNA, 19 nt, Artificial Sequence
  Description of Artificial Sequence: Synthetic oligonucleotide
  Sense strand starting at position 1180 of SEQ ID NO: 584811
aaguucucucggcggaaau

SEQ ID NO: 591117 - RNA, 19 nt, Artificial Sequence
  Description of Artificial Sequence: Synthetic oligonucleotide
  Antisense strand to SEQ ID NO: 591116
auuuccgccgagagaacuu

SEQ ID NO: 591118 - RNA, 19 nt, Artificial Sequence
  Description of Artificial Sequence: Synthetic oligonucleotide
  Sense strand starting at position 1181 of SEQ ID NO: 584811
aguucucucggcggaaauc

SEQ ID NO: 591119 - RNA, 19 nt, Artificial Sequence
  Description of Artificial Sequence: Synthetic oligonucleotide
  Antisense strand to SEQ ID NO: 591118
gauuuccgccgagagaacu

SEQ ID NO: 591120 - RNA, 19 nt, Artificial Sequence
  Description of Artificial Sequence: Synthetic oligonucleotide
  Sense strand starting at position 1808 of SEQ ID NO: 584811
gggcgccucccguuucuaa

SEQ ID NO: 591121 - RNA, 19 nt, Artificial Sequence
  Description of Artificial Sequence: Synthetic oligonucleotide
  Antisense strand to SEQ ID NO: 591120
uuagaaacgggaggcgccc

SEQ ID NO: 591122 - RNA, 19 nt, Artificial Sequence
  Description of Artificial Sequence: Synthetic oligonucleotide
  Sense strand starting at position 2001 of SEQ ID NO: 584811
ccauuugcuuuccugcaga

SEQ ID NO: 591123 - RNA, 19 nt, Artificial Sequence
  Description of Artificial Sequence: Synthetic oligonucleotide
  Antisense strand to SEQ ID NO: 591122
ucugcaggaaagcaaaugg

SEQ ID NO: 591124 - RNA, 19 nt, Artificial Sequence
  Description of Artificial Sequence: Synthetic oligonucleotide
  Sense strand starting at position 2012 of SEQ ID NO: 584811
ccugcagauuguguuuaac

SEQ ID NO: 591125 - RNA, 19 nt, Artificial Sequence
  Description of Artificial Sequence: Synthetic oligonucleotide
  Antisense strand to SEQ ID NO: 591124
guuaaacacaaucugcagg

SEQ ID NO: 591126 - RNA, 19 nt, Artificial Sequence
  Description of Artificial Sequence: Synthetic oligonucleotide
  Sense strand starting at position 2014 of SEQ ID NO: 584811
ugcagauuguguuuaacuc

SEQ ID NO: 591127 - RNA, 19 nt, Artificial Sequence
  Description of Artificial Sequence: Synthetic oligonucleotide
  Antisense strand to SEQ ID NO: 591126
gaguuaaacacaaucugca

SEQ ID NO: 591128 - RNA, 19 nt, Artificial Sequence
  Description of Artificial Sequence: Synthetic oligonucleotide
  Sense strand starting at position 2021 of SEQ ID NO: 584811
uguguuuaacuccaaacau

SEQ ID NO: 591129 - RNA, 19 nt, Artificial Sequence
  Description of Artificial Sequence: Synthetic oligonucleotide
  Antisense strand to SEQ ID NO: 591128
auguuuggaguuaaacaca

SEQ ID NO: 591130 - RNA, 19 nt, Artificial Sequence
  Description of Artificial Sequence: Synthetic oligonucleotide
  Sense strand starting at position 2195 of SEQ ID NO: 584811
ucuccuauccuccggaaca

SEQ ID NO: 591131 - RNA, 19 nt, Artificial Sequence
  Description of Artificial Sequence: Synthetic oligonucleotide
  Antisense strand to SEQ ID NO: 591130
uguuccggaggauaggaga

SEQ ID NO: 591132 - RNA, 19 nt, Artificial Sequence
  Description of Artificial Sequence: Synthetic oligonucleotide
  Sense strand starting at position 2280 of SEQ ID NO: 584811
gaggcuguuaccggaaaug

SEQ ID NO: 591133 - RNA, 19 nt, Artificial Sequence
  Description of Artificial Sequence: Synthetic oligonucleotide
  Antisense strand to SEQ ID NO: 591132
cauuuccgguaacagccuc

SEQ ID NO: 591134 - RNA, 19 nt, Artificial Sequence
  Description of Artificial Sequence: Synthetic oligonucleotide
  Sense strand starting at position 2316 of SEQ ID NO: 584811
gggccugugcuggaaguua

SEQ ID NO: 591135 - RNA, 19 nt, Artificial Sequence
  Description of Artificial Sequence: Synthetic oligonucleotide
  Antisense strand to SEQ ID NO: 591134
uaacuuccagcacaggccc

SEQ ID NO: 591136 - RNA, 19 nt, Artificial Sequence
  Description of Artificial Sequence: Synthetic oligonucleotide
  Sense strand starting at position 2396 of SEQ ID NO: 584811
ugccgucagccuuucucaa

SEQ ID NO: 591137 - RNA, 19 nt, Artificial Sequence
  Description of Artificial Sequence: Synthetic oligonucleotide
  Antisense strand to SEQ ID NO: 591136
uugagaaaggcugacggca

SEQ ID NO: 591138 - RNA, 19 nt, Artificial Sequence
  Description of Artificial Sequence: Synthetic oligonucleotide
  Sense strand starting at position 2503 of SEQ ID NO: 584811
gcagccaaucaauaaguau

SEQ ID NO: 591139 - RNA, 19 nt, Artificial Sequence
  Description of Artificial Sequence: Synthetic oligonucleotide
  Antisense strand to SEQ ID NO: 591138
auacuuauugauuggcugc

SEQ ID NO: 591140 - RNA, 19 nt, Artificial Sequence
  Description of Artificial Sequence: Synthetic oligonucleotide
  Sense strand starting at position 2544 of SEQ ID NO: 584811
cuggauugcuuggcgcaaa

SEQ ID NO: 591141 - RNA, 19 nt, Artificial Sequence
  Description of Artificial Sequence: Synthetic oligonucleotide
  Antisense strand to SEQ ID NO: 591140
uuugcgccaagcaauccag

SEQ ID NO: 591142 - RNA, 19 nt, Artificial Sequence
  Description of Artificial Sequence: Synthetic oligonucleotide
  Sense strand starting at position 2547 of SEQ ID NO: 584811
gauugcuuggcgcaaagca

SEQ ID NO: 591143 - RNA, 19 nt, Artificial Sequence
  Description of Artificial Sequence: Synthetic oligonucleotide
  Antisense strand to SEQ ID NO: 591142
ugcuuugcgccaagcaauc

SEQ ID NO: 591144 - RNA, 19 nt, Artificial Sequence
  Description of Artificial Sequence: Synthetic oligonucleotide
  Sense strand starting at position 2972 of SEQ ID NO: 584811
ggguguaagcaguaguuca

SEQ ID NO: 591145 - RNA, 19 nt, Artificial Sequence
  Description of Artificial Sequence: Synthetic oligonucleotide
  Antisense strand to SEQ ID NO: 591144
ugaacuacugcuuacaccc

SEQ ID NO: 591146 - RNA, 19 nt, Artificial Sequence
  Description of Artificial Sequence: Synthetic oligonucleotide
  Sense strand starting at position 3039 of SEQ ID NO: 584811
cugggaaccauagguuagu

SEQ ID NO: 591147 - RNA, 19 nt, Artificial Sequence
  Description of Artificial Sequence: Synthetic oligonucleotide
  Antisense strand to SEQ ID NO: 591146
acuaaccuaugguucccag

SEQ ID NO: 591148 - RNA, 19 nt, Artificial Sequence
  Description of Artificial Sequence: Synthetic oligonucleotide
  Sense strand starting at position 3052 of SEQ ID NO: 584811
guuaguuacucaccaucaa

SEQ ID NO: 591149 - RNA, 19 nt, Artificial Sequence
  Description of Artificial Sequence: Synthetic oligonucleotide
  Antisense strand to SEQ ID NO: 591148
uugauggugaguaacuaac

SEQ ID NO: 591150 - RNA, 19 nt, Artificial Sequence
  Description of Artificial Sequence: Synthetic oligonucleotide
  Sense strand starting at position 3279 of SEQ ID NO: 584811
ucuggaguuuaucucuuaa

SEQ ID NO: 591151 - RNA, 19 nt, Artificial Sequence
  Description of Artificial Sequence: Synthetic oligonucleotide
  Antisense strand to SEQ ID NO: 591150
uuaagagauaaacuccaga

SEQ ID NO: 591152 - RNA, 19 nt, Artificial Sequence
  Description of Artificial Sequence: Synthetic oligonucleotide
  Sense strand starting at position 3281 of SEQ ID NO: 584811
uggaguuuaucucuuaaga

SEQ ID NO: 591153 - RNA, 19 nt, Artificial Sequence
  Description of Artificial Sequence: Synthetic oligonucleotide
  Antisense strand to SEQ ID NO: 591152
ucuuaagagauaaacucca

SEQ ID NO: 591154 - RNA, 19 nt, Artificial Sequence
  Description of Artificial Sequence: Synthetic oligonucleotide
  Sense strand starting at position 3366 of SEQ ID NO: 584811
uuugacuauuuaggaaaca

SEQ ID NO: 591155 - RNA, 19 nt, Artificial Sequence
  Description of Artificial Sequence: Synthetic oligonucleotide
  Antisense strand to SEQ ID NO: 591154
uguuuccuaaauagucaaa

SEQ ID NO: 591156 - RNA, 19 nt, Artificial Sequence
  Description of Artificial Sequence: Synthetic oligonucleotide
  Sense strand starting at position 3367 of SEQ ID NO: 584811
uugacuauuuaggaaacau

SEQ ID NO: 591157 - RNA, 19 nt, Artificial Sequence
  Description of Artificial Sequence: Synthetic oligonucleotide
  Antisense strand to SEQ ID NO: 591156
auguuuccuaaauagucaa

SEQ ID NO: 591158 - RNA, 19 nt, Artificial Sequence
  Description of Artificial Sequence: Synthetic oligonucleotide
  Sense strand starting at position 3453 of SEQ ID NO: 584811
ugggauagauaguauuauu

SEQ ID NO: 591159 - RNA, 19 nt, Artificial Sequence
  Description of Artificial Sequence: Synthetic oligonucleotide
  Antisense strand to SEQ ID NO: 591158
aauaauacuaucuauccca

SEQ ID NO: 591160 - RNA, 19 nt, Artificial Sequence
  Description of Artificial Sequence: Synthetic oligonucleotide
  Sense strand starting at position 3498 of SEQ ID NO: 584811
aggaguaggcccggagaaa

SEQ ID NO: 591161 - RNA, 19 nt, Artificial Sequence
  Description of Artificial Sequence: Synthetic oligonucleotide
  Antisense strand to SEQ ID NO: 591160
uuucuccgggccuacuccu

SEQ ID NO: 591162 - RNA, 19 nt, Artificial Sequence
  Description of Artificial Sequence: Synthetic oligonucleotide
  Sense strand starting at position 3499 of SEQ ID NO: 584811
ggaguaggcccggagaaau

SEQ ID NO: 591163 - RNA, 19 nt, Artificial Sequence
  Description of Artificial Sequence: Synthetic oligonucleotide
  Antisense strand to SEQ ID NO: 591162
auuucuccgggccuacucc

SEQ ID NO: 591164 - RNA, 19 nt, Artificial Sequence
  Description of Artificial Sequence: Synthetic oligonucleotide
  Sense strand starting at position 3653 of SEQ ID NO: 584811
agagguguuacugaaacgu

SEQ ID NO: 591165 - RNA, 19 nt, Artificial Sequence
  Description of Artificial Sequence: Synthetic oligonucleotide
  Antisense strand to SEQ ID NO: 591164
acguuucaguaacaccucu

SEQ ID NO: 591166 - RNA, 19 nt, Artificial Sequence
  Description of Artificial Sequence: Synthetic oligonucleotide
  Sense strand starting at position 3659 of SEQ ID NO: 584811
guuacugaaacguggcauu

SEQ ID NO: 591167 - RNA, 19 nt, Artificial Sequence
  Description of Artificial Sequence: Synthetic oligonucleotide
  Antisense strand to SEQ ID NO: 591166
aaugccacguuucaguaac

SEQ ID NO: 591168 - RNA, 19 nt, Artificial Sequence
  Description of Artificial Sequence: Synthetic oligonucleotide
  Sense strand starting at position 38 of SEQ ID NO: 584812
agcugugacucccuacaau

SEQ ID NO: 591169 - RNA, 19 nt, Artificial Sequence
  Description of Artificial Sequence: Synthetic oligonucleotide
  Antisense strand to SEQ ID NO: 591168
auuguagggagucacagcu

SEQ ID NO: 591170 - RNA, 19 nt, Artificial Sequence
  Description of Artificial Sequence: Synthetic oligonucleotide
  Sense strand starting at position 159 of SEQ ID NO: 584812
auaguuucgagauauggca

SEQ ID NO: 591171 - RNA, 19 nt, Artificial Sequence
  Description of Artificial Sequence: Synthetic oligonucleotide
  Antisense strand to SEQ ID NO: 591170
ugccauaucucgaaacuau

SEQ ID NO: 591172 - RNA, 19 nt, Artificial Sequence
  Description of Artificial Sequence: Synthetic oligonucleotide
  Sense strand starting at position 161 of SEQ ID NO: 584812
aguuucgagauauggcaua

SEQ ID NO: 591173 - RNA, 19 nt, Artificial Sequence
  Description of Artificial Sequence: Synthetic oligonucleotide
  Antisense strand to SEQ ID NO: 591172
uaugccauaucucgaaacu

SEQ ID NO: 591174 - RNA, 19 nt, Artificial Sequence
  Description of Artificial Sequence: Synthetic oligonucleotide
  Sense strand starting at position 166 of SEQ ID NO: 584812
cgagauauggcauaaacuu

SEQ ID NO: 591175 - RNA, 19 nt, Artificial Sequence
  Description of Artificial Sequence: Synthetic oligonucleotide
  Antisense strand to SEQ ID NO: 591174
aaguuuaugccauaucucg

SEQ ID NO: 591176 - RNA, 19 nt, Artificial Sequence
  Description of Artificial Sequence: Synthetic oligonucleotide
  Sense strand starting at position 188 of SEQ ID NO: 584812
agcugaguaaaugguagaa

SEQ ID NO: 591177 - RNA, 19 nt, Artificial Sequence
  Description of Artificial Sequence: Synthetic oligonucleotide
  Antisense strand to SEQ ID NO: 591176
uucuaccauuuacucagcu

SEQ ID NO: 591178 - RNA, 19 nt, Artificial Sequence
  Description of Artificial Sequence: Synthetic oligonucleotide
  Sense strand starting at position 201 of SEQ ID NO: 584812
guagaaagguuagccaagu

SEQ ID NO: 591179 - RNA, 19 nt, Artificial Sequence
  Description of Artificial Sequence: Synthetic oligonucleotide
  Antisense strand to SEQ ID NO: 591178
acuuggcuaaccuuucuac

SEQ ID NO: 591180 - RNA, 19 nt, Artificial Sequence
  Description of Artificial Sequence: Synthetic oligonucleotide
  Sense strand starting at position 289 of SEQ ID NO: 584812
uuuaguauugcugaacuuu

SEQ ID NO: 591181 - RNA, 19 nt, Artificial Sequence
  Description of Artificial Sequence: Synthetic oligonucleotide
  Antisense strand to SEQ ID NO: 591180
aaaguucagcaauacuaaa

SEQ ID NO: 591182 - RNA, 19 nt, Artificial Sequence
  Description of Artificial Sequence: Synthetic oligonucleotide
  Sense strand starting at position 918 of SEQ ID NO: 584812
ugaugcguguaaguuauuu

SEQ ID NO: 591183 - RNA, 19 nt, Artificial Sequence
  Description of Artificial Sequence: Synthetic oligonucleotide
  Antisense strand to SEQ ID NO: 591182
aaauaacuuacacgcauca

SEQ ID NO: 591184 - RNA, 19 nt, Artificial Sequence
  Description of Artificial Sequence: Synthetic oligonucleotide
  Sense strand starting at position 922 of SEQ ID NO: 584812
gcguguaaguuauuugcua

SEQ ID NO: 591185 - RNA, 19 nt, Artificial Sequence
  Description of Artificial Sequence: Synthetic oligonucleotide
  Antisense strand to SEQ ID NO: 591184
uagcaaauaacuuacacgc

SEQ ID NO: 591186 - RNA, 19 nt, Artificial Sequence
  Description of Artificial Sequence: Synthetic oligonucleotide
  Sense strand starting at position 923 of SEQ ID NO: 584812
cguguaaguuauuugcuag

SEQ ID NO: 591187 - RNA, 19 nt, Artificial Sequence
  Description of Artificial Sequence: Synthetic oligonucleotide
  Antisense strand to SEQ ID NO: 591186
cuagcaaauaacuuacacg

SEQ ID NO: 591188 - RNA, 19 nt, Artificial Sequence
  Description of Artificial Sequence: Synthetic oligonucleotide
  Sense strand starting at position 924 of SEQ ID NO: 584812
guguaaguuauuugcuaga

SEQ ID NO: 591189 - RNA, 19 nt, Artificial Sequence
  Description of Artificial Sequence: Synthetic oligonucleotide
  Antisense strand to SEQ ID NO: 591188
ucuagcaaauaacuuacac

SEQ ID NO: 591190 - RNA, 19 nt, Artificial Sequence
  Description of Artificial Sequence: Synthetic oligonucleotide
  Sense strand starting at position 937 of SEQ ID NO: 584812
gcuagaaguaggcaguaaa

SEQ ID NO: 591191 - RNA, 19 nt, Artificial Sequence
  Description of Artificial Sequence: Synthetic oligonucleotide
  Antisense strand to SEQ ID NO: 591190
uuuacugccuacuucuagc

SEQ ID NO: 591192 - RNA, 19 nt, Artificial Sequence
  Description of Artificial Sequence: Synthetic oligonucleotide
  Sense strand starting at position 973 of SEQ ID NO: 584812
acggccagauuccuagaaa

SEQ ID NO: 591193 - RNA, 19 nt, Artificial Sequence
  Description of Artificial Sequence: Synthetic oligonucleotide
  Antisense strand to SEQ ID NO: 591192
uuucuaggaaucuggccgu

SEQ ID NO: 591194 - RNA, 19 nt, Artificial Sequence
  Description of Artificial Sequence: Synthetic oligonucleotide
  Sense strand starting at position 976 of SEQ ID NO: 584812
gccagauuccuagaaagua

SEQ ID NO: 591195 - RNA, 19 nt, Artificial Sequence
  Description of Artificial Sequence: Synthetic oligonucleotide
  Antisense strand to SEQ ID NO: 591194
uacuuucuaggaaucuggc

SEQ ID NO: 591196 - RNA, 19 nt, Artificial Sequence
  Description of Artificial Sequence: Synthetic oligonucleotide
  Sense strand starting at position 1114 of SEQ ID NO: 584812
ccacuuaaagcagagcuua

SEQ ID NO: 591197 - RNA, 19 nt, Artificial Sequence
  Description of Artificial Sequence: Synthetic oligonucleotide
  Antisense strand to SEQ ID NO: 591196
uaagcucugcuuuaagugg

SEQ ID NO: 591198 - RNA, 19 nt, Artificial Sequence
  Description of Artificial Sequence: Synthetic oligonucleotide
  Sense strand starting at position 1221 of SEQ ID NO: 584812
agaggaauguauucugucu

SEQ ID NO: 591199 - RNA, 19 nt, Artificial Sequence
  Description of Artificial Sequence: Synthetic oligonucleotide
  Antisense strand to SEQ ID NO: 591198
agacagaauacauuccucu

SEQ ID NO: 591200 - RNA, 19 nt, Artificial Sequence
  Description of Artificial Sequence: Synthetic oligonucleotide
  Sense strand starting at position 1227 of SEQ ID NO: 584812
auguauucugucuaugacu

SEQ ID NO: 591201 - RNA, 19 nt, Artificial Sequence
  Description of Artificial Sequence: Synthetic oligonucleotide
  Antisense strand to SEQ ID NO: 591200
agucauagacagaauacau

SEQ ID NO: 591202 - RNA, 19 nt, Artificial Sequence
  Description of Artificial Sequence: Synthetic oligonucleotide
  Sense strand starting at position 1229 of SEQ ID NO: 584812
guauucugucuaugacuac

SEQ ID NO: 591203 - RNA, 19 nt, Artificial Sequence
  Description of Artificial Sequence: Synthetic oligonucleotide
  Antisense strand to SEQ ID NO: 591202
guagucauagacagaauac

SEQ ID NO: 591204 - RNA, 19 nt, Artificial Sequence
  Description of Artificial Sequence: Synthetic oligonucleotide
  Sense strand starting at position 1470 of SEQ ID NO: 584812
gggagaauguucuucugaa

SEQ ID NO: 591205 - RNA, 19 nt, Artificial Sequence
  Description of Artificial Sequence: Synthetic oligonucleotide
  Antisense strand to SEQ ID NO: 591204
uucagaagaacauucuccc

SEQ ID NO: 591206 - RNA, 19 nt, Artificial Sequence
  Description of Artificial Sequence: Synthetic oligonucleotide
  Sense strand starting at position 1471 of SEQ ID NO: 584812
ggagaauguucuucugaag

SEQ ID NO: 591207 - RNA, 19 nt, Artificial Sequence
  Description of Artificial Sequence: Synthetic oligonucleotide
  Antisense strand to SEQ ID NO: 591206
cuucagaagaacauucucc

SEQ ID NO: 591208 - RNA, 19 nt, Artificial Sequence
  Description of Artificial Sequence: Synthetic oligonucleotide
  Sense strand starting at position 2153 of SEQ ID NO: 584812
cauuccuggcaccgauuua

SEQ ID NO: 591209 - RNA, 19 nt, Artificial Sequence
  Description of Artificial Sequence: Synthetic oligonucleotide
  Antisense strand to SEQ ID NO: 591208
uaaaucggugccaggaaug

SEQ ID NO: 591210 - RNA, 19 nt, Artificial Sequence
  Description of Artificial Sequence: Synthetic oligonucleotide
  Sense strand starting at position 2266 of SEQ ID NO: 584812
uccuuauguuuguuuaaag

SEQ ID NO: 591211 - RNA, 19 nt, Artificial Sequence
  Description of Artificial Sequence: Synthetic oligonucleotide
  Antisense strand to SEQ ID NO: 591210
cuuuaaacaaacauaagga

SEQ ID NO: 591212 - RNA, 19 nt, Artificial Sequence
  Description of Artificial Sequence: Synthetic oligonucleotide
  Sense strand starting at position 2318 of SEQ ID NO: 584812
ucuguagcauuugauauuu

SEQ ID NO: 591213 - RNA, 19 nt, Artificial Sequence
  Description of Artificial Sequence: Synthetic oligonucleotide
  Antisense strand to SEQ ID NO: 591212
aaauaucaaaugcuacaga

SEQ ID NO: 591214 - RNA, 19 nt, Artificial Sequence
  Description of Artificial Sequence: Synthetic oligonucleotide
  Sense strand starting at position 2409 of SEQ ID NO: 584812
uccuaaacucuuugagaag

SEQ ID NO: 591215 - RNA, 19 nt, Artificial Sequence
  Description of Artificial Sequence: Synthetic oligonucleotide
  Antisense strand to SEQ ID NO: 591214
cuucucaaagaguuuagga

SEQ ID NO: 591216 - RNA, 19 nt, Artificial Sequence
  Description of Artificial Sequence: Synthetic oligonucleotide
  Sense strand starting at position 2428 of SEQ ID NO: 584812
ggcucucagaagugaacuu

SEQ ID NO: 591217 - RNA, 19 nt, Artificial Sequence
  Description of Artificial Sequence: Synthetic oligonucleotide
  Antisense strand to SEQ ID NO: 591216
aaguucacuucugagagcc

SEQ ID NO: 591218 - RNA, 19 nt, Artificial Sequence
  Description of Artificial Sequence: Synthetic oligonucleotide
  Sense strand starting at position 2523 of SEQ ID NO: 584812
uucuaaauggcagaaguua

SEQ ID NO: 591219 - RNA, 19 nt, Artificial Sequence
  Description of Artificial Sequence: Synthetic oligonucleotide
  Antisense strand to SEQ ID NO: 591218
uaacuucugccauuuagaa

SEQ ID NO: 591220 - RNA, 19 nt, Artificial Sequence
  Description of Artificial Sequence: Synthetic oligonucleotide
  Sense strand starting at position 2531 of SEQ ID NO: 584812
ggcagaaguuagcuaacuu

SEQ ID NO: 591221 - RNA, 19 nt, Artificial Sequence
  Description of Artificial Sequence: Synthetic oligonucleotide
  Antisense strand to SEQ ID NO: 591220
aaguuagcuaacuucugcc

SEQ ID NO: 591222 - RNA, 19 nt, Artificial Sequence
  Description of Artificial Sequence: Synthetic oligonucleotide
  Sense strand starting at position 2698 of SEQ ID NO: 584812
cagguuuguucuuuguaaa

SEQ ID NO: 591223 - RNA, 19 nt, Artificial Sequence
  Description of Artificial Sequence: Synthetic oligonucleotide
  Antisense strand to SEQ ID NO: 591222
uuuacaaagaacaaaccug

SEQ ID NO: 591224 - RNA, 19 nt, Artificial Sequence
  Description of Artificial Sequence: Synthetic oligonucleotide
  Sense strand starting at position 2699 of SEQ ID NO: 584812
agguuuguucuuuguaaag

SEQ ID NO: 591225 - RNA, 19 nt, Artificial Sequence
  Description of Artificial Sequence: Synthetic oligonucleotide
  Antisense strand to SEQ ID NO: 591224
cuuuacaaagaacaaaccu

SEQ ID NO: 591226 - RNA, 19 nt, Artificial Sequence
  Description of Artificial Sequence: Synthetic oligonucleotide
  Sense strand starting at position 3140 of SEQ ID NO: 584812
cagagugagcaacgugaaa

SEQ ID NO: 591227 - RNA, 19 nt, Artificial Sequence
  Description of Artificial Sequence: Synthetic oligonucleotide
  Antisense strand to SEQ ID NO: 591226
uuucacguugcucacucug

SEQ ID NO: 591228 - RNA, 19 nt, Artificial Sequence
  Description of Artificial Sequence: Synthetic oligonucleotide
  Sense strand starting at position 3174 of SEQ ID NO: 584812
guaaccagaccuuguuaca

SEQ ID NO: 591229 - RNA, 19 nt, Artificial Sequence
  Description of Artificial Sequence: Synthetic oligonucleotide
  Antisense strand to SEQ ID NO: 591228
uguaacaaggucugguuac

SEQ ID NO: 591230 - RNA, 19 nt, Artificial Sequence
  Description of Artificial Sequence: Synthetic oligonucleotide
  Sense strand starting at position 3282 of SEQ ID NO: 584812
uguccugacucagugagau

SEQ ID NO: 591231 - RNA, 19 nt, Artificial Sequence
  Description of Artificial Sequence: Synthetic oligonucleotide
  Antisense strand to SEQ ID NO: 591230
aucucacugagucaggaca

SEQ ID NO: 591232 - RNA, 19 nt, Artificial Sequence
  Description of Artificial Sequence: Synthetic oligonucleotide
  Sense strand starting at position 3294 of SEQ ID NO: 584812
gugagauauugccuggaag

SEQ ID NO: 591233 - RNA, 19 nt, Artificial Sequence
  Description of Artificial Sequence: Synthetic oligonucleotide
  Antisense strand to SEQ ID NO: 591232
cuuccaggcaauaucucac

SEQ ID NO: 591234 - RNA, 19 nt, Artificial Sequence
  Description of Artificial Sequence: Synthetic oligonucleotide
  Sense strand starting at position 3295 of SEQ ID NO: 584812
ugagauauugccuggaagc

SEQ ID NO: 591235 - RNA, 19 nt, Artificial Sequence
  Description of Artificial Sequence: Synthetic oligonucleotide
  Antisense strand to SEQ ID NO: 591234
gcuuccaggcaauaucuca

SEQ ID NO: 591236 - RNA, 19 nt, Artificial Sequence
  Description of Artificial Sequence: Synthetic oligonucleotide
  Sense strand starting at position 3296 of SEQ ID NO: 584812
gagauauugccuggaagcu

SEQ ID NO: 591237 - RNA, 19 nt, Artificial Sequence
  Description of Artificial Sequence: Synthetic oligonucleotide
  Antisense strand to SEQ ID NO: 591236
agcuuccaggcaauaucuc

SEQ ID NO: 591238 - RNA, 19 nt, Artificial Sequence
  Description of Artificial Sequence: Synthetic oligonucleotide
  Sense strand starting at position 3524 of SEQ ID NO: 584812
ggcugugcaaaucauggau

SEQ ID NO: 591239 - RNA, 19 nt, Artificial Sequence
  Description of Artificial Sequence: Synthetic oligonucleotide
  Antisense strand to SEQ ID NO: 591238
auccaugauuugcacagcc

SEQ ID NO: 591240 - RNA, 19 nt, Artificial Sequence
  Description of Artificial Sequence: Synthetic oligonucleotide
  Sense strand starting at position 3527 of SEQ ID NO: 584812
ugugcaaaucauggauaaa

SEQ ID NO: 591241 - RNA, 19 nt, Artificial Sequence
  Description of Artificial Sequence: Synthetic oligonucleotide
  Antisense strand to SEQ ID NO: 591240
uuuauccaugauuugcaca

SEQ ID NO: 591242 - RNA, 19 nt, Artificial Sequence
  Description of Artificial Sequence: Synthetic oligonucleotide
  Sense strand starting at position 3639 of SEQ ID NO: 584812
gguucugcaucauuucuca

SEQ ID NO: 591243 - RNA, 19 nt, Artificial Sequence
  Description of Artificial Sequence: Synthetic oligonucleotide
  Antisense strand to SEQ ID NO: 591242
ugagaaaugaugcagaacc

SEQ ID NO: 591244 - RNA, 19 nt, Artificial Sequence
  Description of Artificial Sequence: Synthetic oligonucleotide
  Sense strand starting at position 3792 of SEQ ID NO: 584812
cagcuauuccacugagcug

SEQ ID NO: 591245 - RNA, 19 nt, Artificial Sequence
  Description of Artificial Sequence: Synthetic oligonucleotide
  Antisense strand to SEQ ID NO: 591244
cagcucaguggaauagcug

SEQ ID NO: 591246 - RNA, 19 nt, Artificial Sequence
  Description of Artificial Sequence: Synthetic oligonucleotide
  Sense strand starting at position 3946 of SEQ ID NO: 584812
gcuaacacaucugauuuga

SEQ ID NO: 591247 - RNA, 19 nt, Artificial Sequence
  Description of Artificial Sequence: Synthetic oligonucleotide
  Antisense strand to SEQ ID NO: 591246
ucaaaucagauguguuagc

SEQ ID NO: 591248 - RNA, 19 nt, Artificial Sequence
  Description of Artificial Sequence: Synthetic oligonucleotide
  Sense strand starting at position 339 of SEQ ID NO: 584813
uuuguuagaaagugaauga

SEQ ID NO: 591249 - RNA, 19 nt, Artificial Sequence
  Description of Artificial Sequence: Synthetic oligonucleotide
  Antisense strand to SEQ ID NO: 591248
ucauucacuuucuaacaaa

SEQ ID NO: 591250 - RNA, 19 nt, Artificial Sequence
  Description of Artificial Sequence: Synthetic oligonucleotide
  Sense strand starting at position 343 of SEQ ID NO: 584813
uuagaaagugaaugacuuu

SEQ ID NO: 591251 - RNA, 19 nt, Artificial Sequence
  Description of Artificial Sequence: Synthetic oligonucleotide
  Antisense strand to SEQ ID NO: 591250
aaagucauucacuuucuaa

SEQ ID NO: 591252 - RNA, 19 nt, Artificial Sequence
  Description of Artificial Sequence: Synthetic oligonucleotide
  Sense strand starting at position 346 of SEQ ID NO: 584813
gaaagugaaugacuuuguu

SEQ ID NO: 591253 - RNA, 19 nt, Artificial Sequence
  Description of Artificial Sequence: Synthetic oligonucleotide
  Antisense strand to SEQ ID NO: 591252
aacaaagucauucacuuuc

SEQ ID NO: 591254 - RNA, 19 nt, Artificial Sequence
  Description of Artificial Sequence: Synthetic oligonucleotide
  Sense strand starting at position 523 of SEQ ID NO: 584813
cccaaagaguuacuguaaa

SEQ ID NO: 591255 - RNA, 19 nt, Artificial Sequence
  Description of Artificial Sequence: Synthetic oligonucleotide
  Antisense strand to SEQ ID NO: 591254
uuuacaguaacucuuuggg

SEQ ID NO: 591256 - RNA, 19 nt, Artificial Sequence
  Description of Artificial Sequence: Synthetic oligonucleotide
  Sense strand starting at position 559 of SEQ ID NO: 584813
agugaacagguauagcaua

SEQ ID NO: 591257 - RNA, 19 nt, Artificial Sequence
  Description of Artificial Sequence: Synthetic oligonucleotide
  Antisense strand to SEQ ID NO: 591256
uaugcuauaccuguucacu

SEQ ID NO: 591258 - RNA, 19 nt, Artificial Sequence
  Description of Artificial Sequence: Synthetic oligonucleotide
  Sense strand starting at position 564 of SEQ ID NO: 584813
acagguauagcauauguau

SEQ ID NO: 591259 - RNA, 19 nt, Artificial Sequence
  Description of Artificial Sequence: Synthetic oligonucleotide
  Antisense strand to SEQ ID NO: 591258
auacauaugcuauaccugu

SEQ ID NO: 591260 - RNA, 19 nt, Artificial Sequence
  Description of Artificial Sequence: Synthetic oligonucleotide
  Sense strand starting at position 730 of SEQ ID NO: 584813
guugcaaauuuagcaagua

SEQ ID NO: 591261 - RNA, 19 nt, Artificial Sequence
  Description of Artificial Sequence: Synthetic oligonucleotide
  Antisense strand to SEQ ID NO: 591260
uacuugcuaaauuugcaac

SEQ ID NO: 591262 - RNA, 19 nt, Artificial Sequence
  Description of Artificial Sequence: Synthetic oligonucleotide
  Sense strand starting at position 740 of SEQ ID NO: 584813
uagcaaguaugacuggaaa

SEQ ID NO: 591263 - RNA, 19 nt, Artificial Sequence
  Description of Artificial Sequence: Synthetic oligonucleotide
  Antisense strand to SEQ ID NO: 591262
uuuccagucauacuugcua

SEQ ID NO: 591264 - RNA, 19 nt, Artificial Sequence
  Description of Artificial Sequence: Synthetic oligonucleotide
  Sense strand starting at position 742 of SEQ ID NO: 584813
gcaaguaugacuggaaaca

SEQ ID NO: 591265 - RNA, 19 nt, Artificial Sequence
  Description of Artificial Sequence: Synthetic oligonucleotide
  Antisense strand to SEQ ID NO: 591264
uguuuccagucauacuugc

SEQ ID NO: 591266 - RNA, 19 nt, Artificial Sequence
  Description of Artificial Sequence: Synthetic oligonucleotide
  Sense strand starting at position 1088 of SEQ ID NO: 584813
ucugcaagugucuaauaug

SEQ ID NO: 591267 - RNA, 19 nt, Artificial Sequence
  Description of Artificial Sequence: Synthetic oligonucleotide
  Antisense strand to SEQ ID NO: 591266
cauauuagacacuugcaga

SEQ ID NO: 591268 - RNA, 19 nt, Artificial Sequence
  Description of Artificial Sequence: Synthetic oligonucleotide
  Sense strand starting at position 1096 of SEQ ID NO: 584813
ugucuaauaugugucauuu

SEQ ID NO: 591269 - RNA, 19 nt, Artificial Sequence
  Description of Artificial Sequence: Synthetic oligonucleotide
  Antisense strand to SEQ ID NO: 591268
aaaugacacauauuagaca

SEQ ID NO: 591270 - RNA, 19 nt, Artificial Sequence
  Description of Artificial Sequence: Synthetic oligonucleotide
  Sense strand starting at position 1193 of SEQ ID NO: 584813
uggcuuguacaguauauca

SEQ ID NO: 591271 - RNA, 19 nt, Artificial Sequence
  Description of Artificial Sequence: Synthetic oligonucleotide
  Antisense strand to SEQ ID NO: 591270
ugauauacuguacaagcca

SEQ ID NO: 591272 - RNA, 19 nt, Artificial Sequence
  Description of Artificial Sequence: Synthetic oligonucleotide
  Sense strand starting at position 1195 of SEQ ID NO: 584813
gcuuguacaguauaucaaa

SEQ ID NO: 591273 - RNA, 19 nt, Artificial Sequence
  Description of Artificial Sequence: Synthetic oligonucleotide
  Antisense strand to SEQ ID NO: 591272
uuugauauacuguacaagc

SEQ ID NO: 591274 - RNA, 19 nt, Artificial Sequence
  Description of Artificial Sequence: Synthetic oligonucleotide
  Sense strand starting at position 1255 of SEQ ID NO: 584813
cucuaauguagugggauaa

SEQ ID NO: 591275 - RNA, 19 nt, Artificial Sequence
  Description of Artificial Sequence: Synthetic oligonucleotide
  Antisense strand to SEQ ID NO: 591274
uuaucccacuacauuagag

SEQ ID NO: 591276 - RNA, 19 nt, Artificial Sequence
  Description of Artificial Sequence: Synthetic oligonucleotide
  Sense strand starting at position 1513 of SEQ ID NO: 584813
uaggauucugcacaguaca

SEQ ID NO: 591277 - RNA, 19 nt, Artificial Sequence
  Description of Artificial Sequence: Synthetic oligonucleotide
  Antisense strand to SEQ ID NO: 591276
uguacugugcagaauccua

SEQ ID NO: 591278 - RNA, 19 nt, Artificial Sequence
  Description of Artificial Sequence: Synthetic oligonucleotide
  Sense strand starting at position 2080 of SEQ ID NO: 584813
aggagauugugguuuauga

SEQ ID NO: 591279 - RNA, 19 nt, Artificial Sequence
  Description of Artificial Sequence: Synthetic oligonucleotide
  Antisense strand to SEQ ID NO: 591278
ucauaaaccacaaucuccu

SEQ ID NO: 591280 - RNA, 19 nt, Artificial Sequence
  Description of Artificial Sequence: Synthetic oligonucleotide
  Sense strand starting at position 2082 of SEQ ID NO: 584813
gagauugugguuuaugaau

SEQ ID NO: 591281 - RNA, 19 nt, Artificial Sequence
  Description of Artificial Sequence: Synthetic oligonucleotide
  Antisense strand to SEQ ID NO: 591280
auucauaaaccacaaucuc

SEQ ID NO: 591282 - RNA, 19 nt, Artificial Sequence
  Description of Artificial Sequence: Synthetic oligonucleotide
  Sense strand starting at position 2130 of SEQ ID NO: 584813
ucacaacuuguaugaagua

SEQ ID NO: 591283 - RNA, 19 nt, Artificial Sequence
  Description of Artificial Sequence: Synthetic oligonucleotide
  Antisense strand to SEQ ID NO: 591282
uacuucauacaaguuguga

SEQ ID NO: 591284 - RNA, 19 nt, Artificial Sequence
  Description of Artificial Sequence: Synthetic oligonucleotide
  Sense strand starting at position 2180 of SEQ ID NO: 584813
uagaaaugauaggcuaagu

SEQ ID NO: 591285 - RNA, 19 nt, Artificial Sequence
  Description of Artificial Sequence: Synthetic oligonucleotide
  Antisense strand to SEQ ID NO: 591284
acuuagccuaucauuucua

SEQ ID NO: 591286 - RNA, 19 nt, Artificial Sequence
  Description of Artificial Sequence: Synthetic oligonucleotide
  Sense strand starting at position 2283 of SEQ ID NO: 584813
cuaguaaagcaguaaucaa

SEQ ID NO: 591287 - RNA, 19 nt, Artificial Sequence
  Description of Artificial Sequence: Synthetic oligonucleotide
  Antisense strand to SEQ ID NO: 591286
uugauuacugcuuuacuag

SEQ ID NO: 591288 - RNA, 19 nt, Artificial Sequence
  Description of Artificial Sequence: Synthetic oligonucleotide
  Sense strand starting at position 2362 of SEQ ID NO: 584813
auagaugcaucacugacaa

SEQ ID NO: 591289 - RNA, 19 nt, Artificial Sequence
  Description of Artificial Sequence: Synthetic oligonucleotide
  Antisense strand to SEQ ID NO: 591288
uugucagugaugcaucuau

SEQ ID NO: 591290 - RNA, 19 nt, Artificial Sequence
  Description of Artificial Sequence: Synthetic oligonucleotide
  Sense strand starting at position 2419 of SEQ ID NO: 584813
caaggugauugagcaaauu

SEQ ID NO: 591291 - RNA, 19 nt, Artificial Sequence
  Description of Artificial Sequence: Synthetic oligonucleotide
  Antisense strand to SEQ ID NO: 591290
aauuugcucaaucaccuug

SEQ ID NO: 591292 - RNA, 19 nt, Artificial Sequence
  Description of Artificial Sequence: Synthetic oligonucleotide
  Sense strand starting at position 2540 of SEQ ID NO: 584813
agggaauagccuuaguuua

SEQ ID NO: 591293 - RNA, 19 nt, Artificial Sequence
  Description of Artificial Sequence: Synthetic oligonucleotide
  Antisense strand to SEQ ID NO: 591292
uaaacuaaggcuauucccu

SEQ ID NO: 591294 - RNA, 19 nt, Artificial Sequence
  Description of Artificial Sequence: Synthetic oligonucleotide
  Sense strand starting at position 2542 of SEQ ID NO: 584813
ggaauagccuuaguuuaug

SEQ ID NO: 591295 - RNA, 19 nt, Artificial Sequence
  Description of Artificial Sequence: Synthetic oligonucleotide
  Antisense strand to SEQ ID NO: 591294
cauaaacuaaggcuauucc

SEQ ID NO: 591296 - RNA, 19 nt, Artificial Sequence
  Description of Artificial Sequence: Synthetic oligonucleotide
  Sense strand starting at position 2545 of SEQ ID NO: 584813
auagccuuaguuuaugaca

SEQ ID NO: 591297 - RNA, 19 nt, Artificial Sequence
  Description of Artificial Sequence: Synthetic oligonucleotide
  Antisense strand to SEQ ID NO: 591296
ugucauaaacuaaggcuau

SEQ ID NO: 591298 - RNA, 19 nt, Artificial Sequence
  Description of Artificial Sequence: Synthetic oligonucleotide
  Sense strand starting at position 2691 of SEQ ID NO: 584813
caccucaagugguucugaa

SEQ ID NO: 591299 - RNA, 19 nt, Artificial Sequence
  Description of Artificial Sequence: Synthetic oligonucleotide
  Antisense strand to SEQ ID NO: 591298
uucagaaccacuugaggug

SEQ ID NO: 591300 - RNA, 19 nt, Artificial Sequence
  Description of Artificial Sequence: Synthetic oligonucleotide
  Sense strand starting at position 2908 of SEQ ID NO: 584813
uugagaguguuaucaagga

SEQ ID NO: 591301 - RNA, 19 nt, Artificial Sequence
  Description of Artificial Sequence: Synthetic oligonucleotide
  Antisense strand to SEQ ID NO: 591300
uccuugauaacacucucaa

SEQ ID NO: 591302 - RNA, 19 nt, Artificial Sequence
  Description of Artificial Sequence: Synthetic oligonucleotide
  Sense strand starting at position 2912 of SEQ ID NO: 584813
gaguguuaucaaggaacac

SEQ ID NO: 591303 - RNA, 19 nt, Artificial Sequence
  Description of Artificial Sequence: Synthetic oligonucleotide
  Antisense strand to SEQ ID NO: 591302
guguuccuugauaacacuc

SEQ ID NO: 591304 - RNA, 19 nt, Artificial Sequence
  Description of Artificial Sequence: Synthetic oligonucleotide
  Sense strand starting at position 2943 of SEQ ID NO: 584813
augucacagguacauuaau

SEQ ID NO: 591305 - RNA, 19 nt, Artificial Sequence
  Description of Artificial Sequence: Synthetic oligonucleotide
  Antisense strand to SEQ ID NO: 591304
auuaauguaccugugacau

SEQ ID NO: 591306 - RNA, 19 nt, Artificial Sequence
  Description of Artificial Sequence: Synthetic oligonucleotide
  Sense strand starting at position 3231 of SEQ ID NO: 584813
acagcuuagugacuuauaa

SEQ ID NO: 591307 - RNA, 19 nt, Artificial Sequence
  Description of Artificial Sequence: Synthetic oligonucleotide
  Antisense strand to SEQ ID NO: 591306
uuauaagucacuaagcugu

SEQ ID NO: 591308 - RNA, 19 nt, Artificial Sequence
  Description of Artificial Sequence: Synthetic oligonucleotide
  Sense strand starting at position 3305 of SEQ ID NO: 584813
ugaauacagguguauguuu

SEQ ID NO: 591309 - RNA, 19 nt, Artificial Sequence
  Description of Artificial Sequence: Synthetic oligonucleotide
  Antisense strand to SEQ ID NO: 591308
aaacauacaccuguauuca

SEQ ID NO: 591310 - RNA, 19 nt, Artificial Sequence
  Description of Artificial Sequence: Synthetic oligonucleotide
  Sense strand starting at position 3401 of SEQ ID NO: 584813
gcaaauaaauggccuguaa

SEQ ID NO: 591311 - RNA, 19 nt, Artificial Sequence
  Description of Artificial Sequence: Synthetic oligonucleotide
  Antisense strand to SEQ ID NO: 591310
uuacaggccauuuauuugc

SEQ ID NO: 591312 - RNA, 19 nt, Artificial Sequence
  Description of Artificial Sequence: Synthetic oligonucleotide
  Sense strand starting at position 3695 of SEQ ID NO: 584813
guguucagugaagauguau

SEQ ID NO: 591313 - RNA, 19 nt, Artificial Sequence
  Description of Artificial Sequence: Synthetic oligonucleotide
  Antisense strand to SEQ ID NO: 591312
auacaucuucacugaacac

SEQ ID NO: 591314 - RNA, 19 nt, Artificial Sequence
  Description of Artificial Sequence: Synthetic oligonucleotide
  Sense strand starting at position 3708 of SEQ ID NO: 584813
auguauuugcagggaacgu

SEQ ID NO: 591315 - RNA, 19 nt, Artificial Sequence
  Description of Artificial Sequence: Synthetic oligonucleotide
  Antisense strand to SEQ ID NO: 591314
acguucccugcaaauacau

SEQ ID NO: 591316 - RNA, 19 nt, Artificial Sequence
  Description of Artificial Sequence: Synthetic oligonucleotide
  Sense strand starting at position 3718 of SEQ ID NO: 584813
agggaacguucuucacuga

SEQ ID NO: 591317 - RNA, 19 nt, Artificial Sequence
  Description of Artificial Sequence: Synthetic oligonucleotide
  Antisense strand to SEQ ID NO: 591316
ucagugaagaacguucccu

SEQ ID NO: 591318 - RNA, 19 nt, Artificial Sequence
  Description of Artificial Sequence: Synthetic oligonucleotide
  Sense strand starting at position 3743 of SEQ ID NO: 584813
uuaguaacuccuggcauuu

SEQ ID NO: 591319 - RNA, 19 nt, Artificial Sequence
  Description of Artificial Sequence: Synthetic oligonucleotide
  Antisense strand to SEQ ID NO: 591318
aaaugccaggaguuacuaa

SEQ ID NO: 591320 - RNA, 19 nt, Artificial Sequence
  Description of Artificial Sequence: Synthetic oligonucleotide
  Sense strand starting at position 3770 of SEQ ID NO: 584813
ccagcaucaguauagugau

SEQ ID NO: 591321 - RNA, 19 nt, Artificial Sequence
  Description of Artificial Sequence: Synthetic oligonucleotide
  Antisense strand to SEQ ID NO: 591320
aucacuauacugaugcugg

SEQ ID NO: 591322 - RNA, 19 nt, Artificial Sequence
  Description of Artificial Sequence: Synthetic oligonucleotide
  Sense strand starting at position 3802 of SEQ ID NO: 584813
ucaggaaaccauggguuua

SEQ ID NO: 591323 - RNA, 19 nt, Artificial Sequence
  Description of Artificial Sequence: Synthetic oligonucleotide
  Antisense strand to SEQ ID NO: 591322
uaaacccaugguuuccuga

SEQ ID NO: 591324 - RNA, 19 nt, Artificial Sequence
  Description of Artificial Sequence: Synthetic oligonucleotide
  Sense strand starting at position 3816 of SEQ ID NO: 584813
guuuaaaucccagauguca

SEQ ID NO: 591325 - RNA, 19 nt, Artificial Sequence
  Description of Artificial Sequence: Synthetic oligonucleotide
  Antisense strand to SEQ ID NO: 591324
ugacaucugggauuuaaac

SEQ ID NO: 591326 - RNA, 19 nt, Artificial Sequence
  Description of Artificial Sequence: Synthetic oligonucleotide
  Sense strand starting at position 3972 of SEQ ID NO: 584813
uugucugauggcuguauuu

SEQ ID NO: 591327 - RNA, 19 nt, Artificial Sequence
  Description of Artificial Sequence: Synthetic oligonucleotide
  Antisense strand to SEQ ID NO: 591326
aaauacagccaucagacaa

SEQ ID NO: 591328 - RNA, 19 nt, Artificial Sequence
  Description of Artificial Sequence: Synthetic oligonucleotide
  Sense strand starting at position 317 of SEQ ID NO: 584814
uauggagaguucucccacu

SEQ ID NO: 591329 - RNA, 19 nt, Artificial Sequence
  Description of Artificial Sequence: Synthetic oligonucleotide
  Antisense strand to SEQ ID NO: 591328
agugggagaacucuccaua

SEQ ID NO: 591330 - RNA, 19 nt, Artificial Sequence
  Description of Artificial Sequence: Synthetic oligonucleotide
  Sense strand starting at position 349 of SEQ ID NO: 584814
cagguuuccuaacuggaua

SEQ ID NO: 591331 - RNA, 19 nt, Artificial Sequence
  Description of Artificial Sequence: Synthetic oligonucleotide
  Antisense strand to SEQ ID NO: 591330
uauccaguuaggaaaccug

SEQ ID NO: 591332 - RNA, 19 nt, Artificial Sequence
  Description of Artificial Sequence: Synthetic oligonucleotide
  Sense strand starting at position 389 of SEQ ID NO: 584814
ugaaguaagucucucauca

SEQ ID NO: 591333 - RNA, 19 nt, Artificial Sequence
  Description of Artificial Sequence: Synthetic oligonucleotide
  Antisense strand to SEQ ID NO: 591332
ugaugagagacuuacuuca

SEQ ID NO: 591334 - RNA, 19 nt, Artificial Sequence
  Description of Artificial Sequence: Synthetic oligonucleotide
  Sense strand starting at position 860 of SEQ ID NO: 584814
gacagcugcguagaaauca

SEQ ID NO: 591335 - RNA, 19 nt, Artificial Sequence
  Description of Artificial Sequence: Synthetic oligonucleotide
  Antisense strand to SEQ ID NO: 591334
ugauuucuacgcagcuguc

SEQ ID NO: 591336 - RNA, 19 nt, Artificial Sequence
  Description of Artificial Sequence: Synthetic oligonucleotide
  Sense strand starting at position 868 of SEQ ID NO: 584814
cguagaaaucaacaaguua

SEQ ID NO: 591337 - RNA, 19 nt, Artificial Sequence
  Description of Artificial Sequence: Synthetic oligonucleotide
  Antisense strand to SEQ ID NO: 591336
uaacuuguugauuucuacg

SEQ ID NO: 591338 - RNA, 19 nt, Artificial Sequence
  Description of Artificial Sequence: Synthetic oligonucleotide
  Sense strand starting at position 1257 of SEQ ID NO: 584814
acucuucuaugaguuuauc

SEQ ID NO: 591339 - RNA, 19 nt, Artificial Sequence
  Description of Artificial Sequence: Synthetic oligonucleotide
  Antisense strand to SEQ ID NO: 591338
gauaaacucauagaagagu

SEQ ID NO: 591340 - RNA, 19 nt, Artificial Sequence
  Description of Artificial Sequence: Synthetic oligonucleotide
  Sense strand starting at position 1260 of SEQ ID NO: 584814
cuucuaugaguuuauccua

SEQ ID NO: 591341 - RNA, 19 nt, Artificial Sequence
  Description of Artificial Sequence: Synthetic oligonucleotide
  Antisense strand to SEQ ID NO: 591340
uaggauaaacucauagaag

SEQ ID NO: 591342 - RNA, 19 nt, Artificial Sequence
  Description of Artificial Sequence: Synthetic oligonucleotide
  Sense strand starting at position 1263 of SEQ ID NO: 584814
cuaugaguuuauccuauga

SEQ ID NO: 591343 - RNA, 19 nt, Artificial Sequence
  Description of Artificial Sequence: Synthetic oligonucleotide
  Antisense strand to SEQ ID NO: 591342
ucauaggauaaacucauag

SEQ ID NO: 591344 - RNA, 19 nt, Artificial Sequence
  Description of Artificial Sequence: Synthetic oligonucleotide
  Sense strand starting at position 1420 of SEQ ID NO: 584814
guagacuuggcgccaguuu

SEQ ID NO: 591345 - RNA, 19 nt, Artificial Sequence
  Description of Artificial Sequence: Synthetic oligonucleotide
  Antisense strand to SEQ ID NO: 591344
aaacuggcgccaagucuac

SEQ ID NO: 591346 - RNA, 19 nt, Artificial Sequence
  Description of Artificial Sequence: Synthetic oligonucleotide
  Sense strand starting at position 1498 of SEQ ID NO: 584814
ggugcuuaauauuugugau

SEQ ID NO: 591347 - RNA, 19 nt, Artificial Sequence
  Description of Artificial Sequence: Synthetic oligonucleotide
  Antisense strand to SEQ ID NO: 591346
aucacaaauauuaagcacc

SEQ ID NO: 591348 - RNA, 19 nt, Artificial Sequence
  Description of Artificial Sequence: Synthetic oligonucleotide
  Sense strand starting at position 1585 of SEQ ID NO: 584814
guguacuggcaugaacuuu

SEQ ID NO: 591349 - RNA, 19 nt, Artificial Sequence
  Description of Artificial Sequence: Synthetic oligonucleotide
  Antisense strand to SEQ ID NO: 591348
aaaguucaugccaguacac

SEQ ID NO: 591350 - RNA, 19 nt, Artificial Sequence
  Description of Artificial Sequence: Synthetic oligonucleotide
  Sense strand starting at position 2332 of SEQ ID NO: 584814
ggucgucucgacucugcaa

SEQ ID NO: 591351 - RNA, 19 nt, Artificial Sequence
  Description of Artificial Sequence: Synthetic oligonucleotide
  Antisense strand to SEQ ID NO: 591350
uugcagagucgagacgacc

SEQ ID NO: 591352 - RNA, 19 nt, Artificial Sequence
  Description of Artificial Sequence: Synthetic oligonucleotide
  Sense strand starting at position 2333 of SEQ ID NO: 584814
gucgucucgacucugcaau

SEQ ID NO: 591353 - RNA, 19 nt, Artificial Sequence
  Description of Artificial Sequence: Synthetic oligonucleotide
  Antisense strand to SEQ ID NO: 591352
auugcagagucgagacgac

SEQ ID NO: 591354 - RNA, 19 nt, Artificial Sequence
  Description of Artificial Sequence: Synthetic oligonucleotide
  Sense strand starting at position 2415 of SEQ ID NO: 584814
auuuauuucccguggcgca

SEQ ID NO: 591355 - RNA, 19 nt, Artificial Sequence
  Description of Artificial Sequence: Synthetic oligonucleotide
  Antisense strand to SEQ ID NO: 591354
ugcgccacgggaaauaaau

SEQ ID NO: 591356 - RNA, 19 nt, Artificial Sequence
  Description of Artificial Sequence: Synthetic oligonucleotide
  Sense strand starting at position 2479 of SEQ ID NO: 584814
gaaagaauucucuggccug

SEQ ID NO: 591357 - RNA, 19 nt, Artificial Sequence
  Description of Artificial Sequence: Synthetic oligonucleotide
  Antisense strand to SEQ ID NO: 591356
caggccagagaauucuuuc

SEQ ID NO: 591358 - RNA, 19 nt, Artificial Sequence
  Description of Artificial Sequence: Synthetic oligonucleotide
  Sense strand starting at position 2506 of SEQ ID NO: 584814
ugagaauccaugugcuuag

SEQ ID NO: 591359 - RNA, 19 nt, Artificial Sequence
  Description of Artificial Sequence: Synthetic oligonucleotide
  Antisense strand to SEQ ID NO: 591358
cuaagcacauggauucuca

SEQ ID NO: 591360 - RNA, 19 nt, Artificial Sequence
  Description of Artificial Sequence: Synthetic oligonucleotide
  Sense strand starting at position 2534 of SEQ ID NO: 584814
caggguucugauugcagaa

SEQ ID NO: 591361 - RNA, 19 nt, Artificial Sequence
  Description of Artificial Sequence: Synthetic oligonucleotide
  Antisense strand to SEQ ID NO: 591360
uucugcaaucagaacccug

SEQ ID NO: 591362 - RNA, 19 nt, Artificial Sequence
  Description of Artificial Sequence: Synthetic oligonucleotide
  Sense strand starting at position 2546 of SEQ ID NO: 584814
ugcagaauauuugggaaga

SEQ ID NO: 591363 - RNA, 19 nt, Artificial Sequence
  Description of Artificial Sequence: Synthetic oligonucleotide
  Antisense strand to SEQ ID NO: 591362
ucuucccaaauauucugca

SEQ ID NO: 591364 - RNA, 19 nt, Artificial Sequence
  Description of Artificial Sequence: Synthetic oligonucleotide
  Sense strand starting at position 2547 of SEQ ID NO: 584814
gcagaauauuugggaagag

SEQ ID NO: 591365 - RNA, 19 nt, Artificial Sequence
  Description of Artificial Sequence: Synthetic oligonucleotide
  Antisense strand to SEQ ID NO: 591364
cucuucccaaauauucugc

SEQ ID NO: 591366 - RNA, 19 nt, Artificial Sequence
  Description of Artificial Sequence: Synthetic oligonucleotide
  Sense strand starting at position 2559 of SEQ ID NO: 584814
ggaagagcgaaauguacaa

SEQ ID NO: 591367 - RNA, 19 nt, Artificial Sequence
  Description of Artificial Sequence: Synthetic oligonucleotide
  Antisense strand to SEQ ID NO: 591366
uuguacauuucgcucuucc

SEQ ID NO: 591368 - RNA, 19 nt, Artificial Sequence
  Description of Artificial Sequence: Synthetic oligonucleotide
  Sense strand starting at position 2582 of SEQ ID NO: 584814
gagaccuuguacuucugua

SEQ ID NO: 591369 - RNA, 19 nt, Artificial Sequence
  Description of Artificial Sequence: Synthetic oligonucleotide
  Antisense strand to SEQ ID NO: 591368
uacagaaguacaaggucuc

SEQ ID NO: 591370 - RNA, 19 nt, Artificial Sequence
  Description of Artificial Sequence: Synthetic oligonucleotide
  Sense strand starting at position 2587 of SEQ ID NO: 584814
cuuguacuucuguauaaug

SEQ ID NO: 591371 - RNA, 19 nt, Artificial Sequence
  Description of Artificial Sequence: Synthetic oligonucleotide
  Antisense strand to SEQ ID NO: 591370
cauuauacagaaguacaag

SEQ ID NO: 591372 - RNA, 19 nt, Artificial Sequence
  Description of Artificial Sequence: Synthetic oligonucleotide
  Sense strand starting at position 2667 of SEQ ID NO: 584814
caaugauguuauguuuaga

SEQ ID NO: 591373 - RNA, 19 nt, Artificial Sequence
  Description of Artificial Sequence: Synthetic oligonucleotide
  Antisense strand to SEQ ID NO: 591372
ucuaaacauaacaucauug

SEQ ID NO: 591374 - RNA, 19 nt, Artificial Sequence
  Description of Artificial Sequence: Synthetic oligonucleotide
  Sense strand starting at position 2670 of SEQ ID NO: 584814
ugauguuauguuuagacau

SEQ ID NO: 591375 - RNA, 19 nt, Artificial Sequence
  Description of Artificial Sequence: Synthetic oligonucleotide
  Antisense strand to SEQ ID NO: 591374
augucuaaacauaacauca

SEQ ID NO: 591376 - RNA, 19 nt, Artificial Sequence
  Description of Artificial Sequence: Synthetic oligonucleotide
  Sense strand starting at position 2709 of SEQ ID NO: 584814
guucuuguaguauaaggua

SEQ ID NO: 591377 - RNA, 19 nt, Artificial Sequence
  Description of Artificial Sequence: Synthetic oligonucleotide
  Antisense strand to SEQ ID NO: 591376
uaccuuauacuacaagaac

SEQ ID NO: 591378 - RNA, 19 nt, Artificial Sequence
  Description of Artificial Sequence: Synthetic oligonucleotide
  Sense strand starting at position 2723 of SEQ ID NO: 584814
agguacugcagugaguaaa

SEQ ID NO: 591379 - RNA, 19 nt, Artificial Sequence
  Description of Artificial Sequence: Synthetic oligonucleotide
  Antisense strand to SEQ ID NO: 591378
uuuacucacugcaguaccu

SEQ ID NO: 591380 - RNA, 19 nt, Artificial Sequence
  Description of Artificial Sequence: Synthetic oligonucleotide
  Sense strand starting at position 2731 of SEQ ID NO: 584814
cagugaguaaauugggaga

SEQ ID NO: 591381 - RNA, 19 nt, Artificial Sequence
  Description of Artificial Sequence: Synthetic oligonucleotide
  Antisense strand to SEQ ID NO: 591380
ucucccaauuuacucacug

SEQ ID NO: 591382 - RNA, 19 nt, Artificial Sequence
  Description of Artificial Sequence: Synthetic oligonucleotide
  Sense strand starting at position 2790 of SEQ ID NO: 584814
cuugaaacggaaugcuauu

SEQ ID NO: 591383 - RNA, 19 nt, Artificial Sequence
  Description of Artificial Sequence: Synthetic oligonucleotide
  Antisense strand to SEQ ID NO: 591382
aauagcauuccguuucaag

SEQ ID NO: 591384 - RNA, 19 nt, Artificial Sequence
  Description of Artificial Sequence: Synthetic oligonucleotide
  Sense strand starting at position 2854 of SEQ ID NO: 584814
ugcauccguccacaaauua

SEQ ID NO: 591385 - RNA, 19 nt, Artificial Sequence
  Description of Artificial Sequence: Synthetic oligonucleotide
  Antisense strand to SEQ ID NO: 591384
uaauuuguggacggaugca

SEQ ID NO: 591386 - RNA, 19 nt, Artificial Sequence
  Description of Artificial Sequence: Synthetic oligonucleotide
  Sense strand starting at position 2867 of SEQ ID NO: 584814
aaauuagcgccuuucguga

SEQ ID NO: 591387 - RNA, 19 nt, Artificial Sequence
  Description of Artificial Sequence: Synthetic oligonucleotide
  Antisense strand to SEQ ID NO: 591386
ucacgaaaggcgcuaauuu

SEQ ID NO: 591388 - RNA, 19 nt, Artificial Sequence
  Description of Artificial Sequence: Synthetic oligonucleotide
  Sense strand starting at position 2875 of SEQ ID NO: 584814
gccuuucgugaauaauaac

SEQ ID NO: 591389 - RNA, 19 nt, Artificial Sequence
  Description of Artificial Sequence: Synthetic oligonucleotide
  Antisense strand to SEQ ID NO: 591388
guuauuauucacgaaaggc

SEQ ID NO: 591390 - RNA, 19 nt, Artificial Sequence
  Description of Artificial Sequence: Synthetic oligonucleotide
  Sense strand starting at position 2982 of SEQ ID NO: 584814
acuagaagucggcaaacua

SEQ ID NO: 591391 - RNA, 19 nt, Artificial Sequence
  Description of Artificial Sequence: Synthetic oligonucleotide
  Antisense strand to SEQ ID NO: 591390
uaguuugccgacuucuagu

SEQ ID NO: 591392 - RNA, 19 nt, Artificial Sequence
  Description of Artificial Sequence: Synthetic oligonucleotide
  Sense strand starting at position 2993 of SEQ ID NO: 584814
gcaaacuaguuacucugau

SEQ ID NO: 591393 - RNA, 19 nt, Artificial Sequence
  Description of Artificial Sequence: Synthetic oligonucleotide
  Antisense strand to SEQ ID NO: 591392
aucagaguaacuaguuugc

SEQ ID NO: 591394 - RNA, 19 nt, Artificial Sequence
  Description of Artificial Sequence: Synthetic oligonucleotide
  Sense strand starting at position 3045 of SEQ ID NO: 584814
gcccauuuaugggcuggua

SEQ ID NO: 591395 - RNA, 19 nt, Artificial Sequence
  Description of Artificial Sequence: Synthetic oligonucleotide
  Antisense strand to SEQ ID NO: 591394
uaccagcccauaaaugggc

SEQ ID NO: 591396 - RNA, 19 nt, Artificial Sequence
  Description of Artificial Sequence: Synthetic oligonucleotide
  Sense strand starting at position 3091 of SEQ ID NO: 584814
uuauuuaaugcuugagcuc

SEQ ID NO: 591397 - RNA, 19 nt, Artificial Sequence
  Description of Artificial Sequence: Synthetic oligonucleotide
  Antisense strand to SEQ ID NO: 591396
gagcucaagcauuaaauaa

SEQ ID NO: 591398 - RNA, 19 nt, Artificial Sequence
  Description of Artificial Sequence: Synthetic oligonucleotide
  Sense strand starting at position 3115 of SEQ ID NO: 584814
ugaggaugugcagguaaga

SEQ ID NO: 591399 - RNA, 19 nt, Artificial Sequence
  Description of Artificial Sequence: Synthetic oligonucleotide
  Antisense strand to SEQ ID NO: 591398
ucuuaccugcacauccuca

SEQ ID NO: 591400 - RNA, 19 nt, Artificial Sequence
  Description of Artificial Sequence: Synthetic oligonucleotide
  Sense strand starting at position 3183 of SEQ ID NO: 584814
uaaguaacugcggaaauaa

SEQ ID NO: 591401 - RNA, 19 nt, Artificial Sequence
  Description of Artificial Sequence: Synthetic oligonucleotide
  Antisense strand to SEQ ID NO: 591400
uuauuuccgcaguuacuua

SEQ ID NO: 591402 - RNA, 19 nt, Artificial Sequence
  Description of Artificial Sequence: Synthetic oligonucleotide
  Sense strand starting at position 3273 of SEQ ID NO: 584814
gcauaaggauuauucuuga

SEQ ID NO: 591403 - RNA, 19 nt, Artificial Sequence
  Description of Artificial Sequence: Synthetic oligonucleotide
  Antisense strand to SEQ ID NO: 591402
ucaagaauaauccuuaugc

SEQ ID NO: 591404 - RNA, 19 nt, Artificial Sequence
  Description of Artificial Sequence: Synthetic oligonucleotide
  Sense strand starting at position 3373 of SEQ ID NO: 584814
cuucguaaaggugacauaa

SEQ ID NO: 591405 - RNA, 19 nt, Artificial Sequence
  Description of Artificial Sequence: Synthetic oligonucleotide
  Antisense strand to SEQ ID NO: 591404
uuaugucaccuuuacgaag

SEQ ID NO: 591406 - RNA, 19 nt, Artificial Sequence
  Description of Artificial Sequence: Synthetic oligonucleotide
  Sense strand starting at position 3751 of SEQ ID NO: 584814
gaaugagucuuaccugcau

SEQ ID NO: 591407 - RNA, 19 nt, Artificial Sequence
  Description of Artificial Sequence: Synthetic oligonucleotide
  Antisense strand to SEQ ID NO: 591406
augcagguaagacucauuc

SEQ ID NO: 591408 - RNA, 19 nt, Artificial Sequence
  Description of Artificial Sequence: Synthetic oligonucleotide
  Sense strand starting at position 75 of SEQ ID NO: 584815
gcuacugauaacgagacau

SEQ ID NO: 591409 - RNA, 19 nt, Artificial Sequence
  Description of Artificial Sequence: Synthetic oligonucleotide
  Antisense strand to SEQ ID NO: 591408
augucucguuaucaguagc

SEQ ID NO: 591410 - RNA, 19 nt, Artificial Sequence
  Description of Artificial Sequence: Synthetic oligonucleotide
  Sense strand starting at position 106 of SEQ ID NO: 584815
auggaaaggcuuugucuaa

SEQ ID NO: 591411 - RNA, 19 nt, Artificial Sequence
  Description of Artificial Sequence: Synthetic oligonucleotide
  Antisense strand to SEQ ID NO: 591410
uuagacaaagccuuuccau

SEQ ID NO: 591412 - RNA, 19 nt, Artificial Sequence
  Description of Artificial Sequence: Synthetic oligonucleotide
  Sense strand starting at position 107 of SEQ ID NO: 584815
uggaaaggcuuugucuaaa

SEQ ID NO: 591413 - RNA, 19 nt, Artificial Sequence
  Description of Artificial Sequence: Synthetic oligonucleotide
  Antisense strand to SEQ ID NO: 591412
uuuagacaaagccuuucca

SEQ ID NO: 591414 - RNA, 19 nt, Artificial Sequence
  Description of Artificial Sequence: Synthetic oligonucleotide
  Sense strand starting at position 115 of SEQ ID NO: 584815
cuuugucuaaagggugaua

SEQ ID NO: 591415 - RNA, 19 nt, Artificial Sequence
  Description of Artificial Sequence: Synthetic oligonucleotide
  Antisense strand to SEQ ID NO: 591414
uaucacccuuuagacaaag

SEQ ID NO: 591416 - RNA, 19 nt, Artificial Sequence
  Description of Artificial Sequence: Synthetic oligonucleotide
  Sense strand starting at position 117 of SEQ ID NO: 584815
uugucuaaagggugauauu

SEQ ID NO: 591417 - RNA, 19 nt, Artificial Sequence
  Description of Artificial Sequence: Synthetic oligonucleotide
  Antisense strand to SEQ ID NO: 591416
aauaucacccuuuagacaa

SEQ ID NO: 591418 - RNA, 19 nt, Artificial Sequence
  Description of Artificial Sequence: Synthetic oligonucleotide
  Sense strand starting at position 128 of SEQ ID NO: 584815
gugauauuauuacuaaagg

SEQ ID NO: 591419 - RNA, 19 nt, Artificial Sequence
  Description of Artificial Sequence: Synthetic oligonucleotide
  Antisense strand to SEQ ID NO: 591418
ccuuuaguaauaauaucac

SEQ ID NO: 591420 - RNA, 19 nt, Artificial Sequence
  Description of Artificial Sequence: Synthetic oligonucleotide
  Sense strand starting at position 346 of SEQ ID NO: 584815
ucugaagucccuuggaauc

SEQ ID NO: 591421 - RNA, 19 nt, Artificial Sequence
  Description of Artificial Sequence: Synthetic oligonucleotide
  Antisense strand to SEQ ID NO: 591420
gauuccaagggacuucaga

SEQ ID NO: 591422 - RNA, 19 nt, Artificial Sequence
  Description of Artificial Sequence: Synthetic oligonucleotide
  Sense strand starting at position 357 of SEQ ID NO: 584815
uuggaaucuuggguugauu

SEQ ID NO: 591423 - RNA, 19 nt, Artificial Sequence
  Description of Artificial Sequence: Synthetic oligonucleotide
  Antisense strand to SEQ ID NO: 591422
aaucaacccaagauuccaa

SEQ ID NO: 591424 - RNA, 19 nt, Artificial Sequence
  Description of Artificial Sequence: Synthetic oligonucleotide
  Sense strand starting at position 507 of SEQ ID NO: 584815
ucucaaggucuagacuuau

SEQ ID NO: 591425 - RNA, 19 nt, Artificial Sequence
  Description of Artificial Sequence: Synthetic oligonucleotide
  Antisense strand to SEQ ID NO: 591424
auaagucuagaccuugaga

SEQ ID NO: 591426 - RNA, 19 nt, Artificial Sequence
  Description of Artificial Sequence: Synthetic oligonucleotide
  Sense strand starting at position 518 of SEQ ID NO: 584815
agacuuauagugugaucau

SEQ ID NO: 591427 - RNA, 19 nt, Artificial Sequence
  Description of Artificial Sequence: Synthetic oligonucleotide
  Antisense strand to SEQ ID NO: 591426
augaucacacuauaagucu

SEQ ID NO: 591428 - RNA, 19 nt, Artificial Sequence
  Description of Artificial Sequence: Synthetic oligonucleotide
  Sense strand starting at position 535 of SEQ ID NO: 584815
auauuacaguacucgggaa

SEQ ID NO: 591429 - RNA, 19 nt, Artificial Sequence
  Description of Artificial Sequence: Synthetic oligonucleotide
  Antisense strand to SEQ ID NO: 591428
uucccgaguacuguaauau

SEQ ID NO: 591430 - RNA, 19 nt, Artificial Sequence
  Description of Artificial Sequence: Synthetic oligonucleotide
  Sense strand starting at position 537 of SEQ ID NO: 584815
auuacaguacucgggaaga

SEQ ID NO: 591431 - RNA, 19 nt, Artificial Sequence
  Description of Artificial Sequence: Synthetic oligonucleotide
  Antisense strand to SEQ ID NO: 591430
ucuucccgaguacuguaau

SEQ ID NO: 591432 - RNA, 19 nt, Artificial Sequence
  Description of Artificial Sequence: Synthetic oligonucleotide
  Sense strand starting at position 591 of SEQ ID NO: 584815
ggucuugacucagccaaag

SEQ ID NO: 591433 - RNA, 19 nt, Artificial Sequence
  Description of Artificial Sequence: Synthetic oligonucleotide
  Antisense strand to SEQ ID NO: 591432
cuuuggcugagucaagacc

SEQ ID NO: 591434 - RNA, 19 nt, Artificial Sequence
  Description of Artificial Sequence: Synthetic oligonucleotide
  Sense strand starting at position 616 of SEQ ID NO: 584815
ucuugugggugauuaauga

SEQ ID NO: 591435 - RNA, 19 nt, Artificial Sequence
  Description of Artificial Sequence: Synthetic oligonucleotide
  Antisense strand to SEQ ID NO: 591434
ucauuaaucacccacaaga

SEQ ID NO: 591436 - RNA, 19 nt, Artificial Sequence
  Description of Artificial Sequence: Synthetic oligonucleotide
  Sense strand starting at position 755 of SEQ ID NO: 584815
aguuaauagcugcaaccaa

SEQ ID NO: 591437 - RNA, 19 nt, Artificial Sequence
  Description of Artificial Sequence: Synthetic oligonucleotide
  Antisense strand to SEQ ID NO: 591436
uugguugcagcuauuaacu

SEQ ID NO: 591438 - RNA, 19 nt, Artificial Sequence
  Description of Artificial Sequence: Synthetic oligonucleotide
  Sense strand starting at position 1222 of SEQ ID NO: 584815
gcuccauucggagauacuu

SEQ ID NO: 591439 - RNA, 19 nt, Artificial Sequence
  Description of Artificial Sequence: Synthetic oligonucleotide
  Antisense strand to SEQ ID NO: 591438
aaguaucuccgaauggagc

SEQ ID NO: 591440 - RNA, 19 nt, Artificial Sequence
  Description of Artificial Sequence: Synthetic oligonucleotide
  Sense strand starting at position 1375 of SEQ ID NO: 584815
ggucgaaauccagaguccu

SEQ ID NO: 591441 - RNA, 19 nt, Artificial Sequence
  Description of Artificial Sequence: Synthetic oligonucleotide
  Antisense strand to SEQ ID NO: 591440
aggacucuggauuucgacc

SEQ ID NO: 591442 - RNA, 19 nt, Artificial Sequence
  Description of Artificial Sequence: Synthetic oligonucleotide
  Sense strand starting at position 1780 of SEQ ID NO: 584815
gagacuagauccuuucuga

SEQ ID NO: 591443 - RNA, 19 nt, Artificial Sequence
  Description of Artificial Sequence: Synthetic oligonucleotide
  Antisense strand to SEQ ID NO: 591442
ucagaaaggaucuagucuc

SEQ ID NO: 591444 - RNA, 19 nt, Artificial Sequence
  Description of Artificial Sequence: Synthetic oligonucleotide
  Sense strand starting at position 1783 of SEQ ID NO: 584815
acuagauccuuucugaagu

SEQ ID NO: 591445 - RNA, 19 nt, Artificial Sequence
  Description of Artificial Sequence: Synthetic oligonucleotide
  Antisense strand to SEQ ID NO: 591444
acuucagaaaggaucuagu

SEQ ID NO: 591446 - RNA, 19 nt, Artificial Sequence
  Description of Artificial Sequence: Synthetic oligonucleotide
  Sense strand starting at position 1878 of SEQ ID NO: 584815
gcgaucgaugcagagagau

SEQ ID NO: 591447 - RNA, 19 nt, Artificial Sequence
  Description of Artificial Sequence: Synthetic oligonucleotide
  Antisense strand to SEQ ID NO: 591446
aucucucugcaucgaucgc

SEQ ID NO: 591448 - RNA, 19 nt, Artificial Sequence
  Description of Artificial Sequence: Synthetic oligonucleotide
  Sense strand starting at position 1984 of SEQ ID NO: 584815
ccaauauggcgucaauaac

SEQ ID NO: 591449 - RNA, 19 nt, Artificial Sequence
  Description of Artificial Sequence: Synthetic oligonucleotide
  Antisense strand to SEQ ID NO: 591448
guuauugacgccauauugg

SEQ ID NO: 591450 - RNA, 19 nt, Artificial Sequence
  Description of Artificial Sequence: Synthetic oligonucleotide
  Sense strand starting at position 2098 of SEQ ID NO: 584815
cgggaggaaucggcuugaa

SEQ ID NO: 591451 - RNA, 19 nt, Artificial Sequence
  Description of Artificial Sequence: Synthetic oligonucleotide
  Antisense strand to SEQ ID NO: 591450
uucaagccgauuccucccg

SEQ ID NO: 591452 - RNA, 19 nt, Artificial Sequence
  Description of Artificial Sequence: Synthetic oligonucleotide
  Sense strand starting at position 2101 of SEQ ID NO: 584815
gaggaaucggcuugaaagg

SEQ ID NO: 591453 - RNA, 19 nt, Artificial Sequence
  Description of Artificial Sequence: Synthetic oligonucleotide
  Antisense strand to SEQ ID NO: 591452
ccuuucaagccgauuccuc

SEQ ID NO: 591454 - RNA, 19 nt, Artificial Sequence
  Description of Artificial Sequence: Synthetic oligonucleotide
  Sense strand starting at position 2298 of SEQ ID NO: 584815
caggcuaagcgacauagaa

SEQ ID NO: 591455 - RNA, 19 nt, Artificial Sequence
  Description of Artificial Sequence: Synthetic oligonucleotide
  Antisense strand to SEQ ID NO: 591454
uucuaugucgcuuagccug

SEQ ID NO: 591456 - RNA, 19 nt, Artificial Sequence
  Description of Artificial Sequence: Synthetic oligonucleotide
  Sense strand starting at position 2300 of SEQ ID NO: 584815
ggcuaagcgacauagaaau

SEQ ID NO: 591457 - RNA, 19 nt, Artificial Sequence
  Description of Artificial Sequence: Synthetic oligonucleotide
  Antisense strand to SEQ ID NO: 591456
auuucuaugucgcuuagcc

SEQ ID NO: 591458 - RNA, 19 nt, Artificial Sequence
  Description of Artificial Sequence: Synthetic oligonucleotide
  Sense strand starting at position 2379 of SEQ ID NO: 584815
accaaucucuagucaaagu

SEQ ID NO: 591459 - RNA, 19 nt, Artificial Sequence
  Description of Artificial Sequence: Synthetic oligonucleotide
  Antisense strand to SEQ ID NO: 591458
acuuugacuagagauuggu

SEQ ID NO: 591460 - RNA, 19 nt, Artificial Sequence
  Description of Artificial Sequence: Synthetic oligonucleotide
  Sense strand starting at position 2400 of SEQ ID NO: 584815
gcuuaauuucgguagcgac

SEQ ID NO: 591461 - RNA, 19 nt, Artificial Sequence
  Description of Artificial Sequence: Synthetic oligonucleotide
  Antisense strand to SEQ ID NO: 591460
gucgcuaccgaaauuaagc

SEQ ID NO: 591462 - RNA, 19 nt, Artificial Sequence
  Description of Artificial Sequence: Synthetic oligonucleotide
  Sense strand starting at position 2618 of SEQ ID NO: 584815
auaggacuugaacgacuua

SEQ ID NO: 591463 - RNA, 19 nt, Artificial Sequence
  Description of Artificial Sequence: Synthetic oligonucleotide
  Antisense strand to SEQ ID NO: 591462
uaagucguucaaguccuau

SEQ ID NO: 591464 - RNA, 19 nt, Artificial Sequence
  Description of Artificial Sequence: Synthetic oligonucleotide
  Sense strand starting at position 2671 of SEQ ID NO: 584815
agugguaucagacauugca

SEQ ID NO: 591465 - RNA, 19 nt, Artificial Sequence
  Description of Artificial Sequence: Synthetic oligonucleotide
  Antisense strand to SEQ ID NO: 591464
ugcaaugucugauaccacu

SEQ ID NO: 591466 - RNA, 19 nt, Artificial Sequence
  Description of Artificial Sequence: Synthetic oligonucleotide
  Sense strand starting at position 2674 of SEQ ID NO: 584815
gguaucagacauugcauua

SEQ ID NO: 591467 - RNA, 19 nt, Artificial Sequence
  Description of Artificial Sequence: Synthetic oligonucleotide
  Antisense strand to SEQ ID NO: 591466
uaaugcaaugucugauacc

SEQ ID NO: 591468 - RNA, 19 nt, Artificial Sequence
  Description of Artificial Sequence: Synthetic oligonucleotide
  Sense strand starting at position 2700 of SEQ ID NO: 584815
ugaauauuggugcauauau

SEQ ID NO: 591469 - RNA, 19 nt, Artificial Sequence
  Description of Artificial Sequence: Synthetic oligonucleotide
  Antisense strand to SEQ ID NO: 591468
auauaugcaccaauauuca

SEQ ID NO: 591470 - RNA, 19 nt, Artificial Sequence
  Description of Artificial Sequence: Synthetic oligonucleotide
  Sense strand starting at position 2718 of SEQ ID NO: 584815
uugugaacuuuguuacaaa

SEQ ID NO: 591471 - RNA, 19 nt, Artificial Sequence
  Description of Artificial Sequence: Synthetic oligonucleotide
  Antisense strand to SEQ ID NO: 591470
uuuguaacaaaguucacaa

SEQ ID NO: 591472 - RNA, 19 nt, Artificial Sequence
  Description of Artificial Sequence: Synthetic oligonucleotide
  Sense strand starting at position 2750 of SEQ ID NO: 584815
cagugaaauguuuagguaa

SEQ ID NO: 591473 - RNA, 19 nt, Artificial Sequence
  Description of Artificial Sequence: Synthetic oligonucleotide
  Antisense strand to SEQ ID NO: 591472
uuaccuaaacauuucacug

SEQ ID NO: 591474 - RNA, 19 nt, Artificial Sequence
  Description of Artificial Sequence: Synthetic oligonucleotide
  Sense strand starting at position 2753 of SEQ ID NO: 584815
ugaaauguuuagguaauag

SEQ ID NO: 591475 - RNA, 19 nt, Artificial Sequence
  Description of Artificial Sequence: Synthetic oligonucleotide
  Antisense strand to SEQ ID NO: 591474
cuauuaccuaaacauuuca

SEQ ID NO: 591476 - RNA, 19 nt, Artificial Sequence
  Description of Artificial Sequence: Synthetic oligonucleotide
  Sense strand starting at position 2875 of SEQ ID NO: 584815
uagaaagugaucuguguag

SEQ ID NO: 591477 - RNA, 19 nt, Artificial Sequence
  Description of Artificial Sequence: Synthetic oligonucleotide
  Antisense strand to SEQ ID NO: 591476
cuacacagaucacuuucua

SEQ ID NO: 591478 - RNA, 19 nt, Artificial Sequence
  Description of Artificial Sequence: Synthetic oligonucleotide
  Sense strand starting at position 3521 of SEQ ID NO: 584815
ucaccagugcaauaugaaa

SEQ ID NO: 591479 - RNA, 19 nt, Artificial Sequence
  Description of Artificial Sequence: Synthetic oligonucleotide
  Antisense strand to SEQ ID NO: 591478
uuucauauugcacugguga

SEQ ID NO: 591480 - RNA, 19 nt, Artificial Sequence
  Description of Artificial Sequence: Synthetic oligonucleotide
  Sense strand starting at position 3577 of SEQ ID NO: 584815
acugauuuccagugcucau

SEQ ID NO: 591481 - RNA, 19 nt, Artificial Sequence
  Description of Artificial Sequence: Synthetic oligonucleotide
  Antisense strand to SEQ ID NO: 591480
augagcacuggaaaucagu

SEQ ID NO: 591482 - RNA, 19 nt, Artificial Sequence
  Description of Artificial Sequence: Synthetic oligonucleotide
  Sense strand starting at position 3580 of SEQ ID NO: 584815
gauuuccagugcucaugua

SEQ ID NO: 591483 - RNA, 19 nt, Artificial Sequence
  Description of Artificial Sequence: Synthetic oligonucleotide
  Antisense strand to SEQ ID NO: 591482
uacaugagcacuggaaauc

SEQ ID NO: 591484 - RNA, 19 nt, Artificial Sequence
  Description of Artificial Sequence: Synthetic oligonucleotide
  Sense strand starting at position 3724 of SEQ ID NO: 584815
aucagcaguccugaucaca

SEQ ID NO: 591485 - RNA, 19 nt, Artificial Sequence
  Description of Artificial Sequence: Synthetic oligonucleotide
  Antisense strand to SEQ ID NO: 591484
ugugaucaggacugcugau

SEQ ID NO: 591486 - RNA, 19 nt, Artificial Sequence
  Description of Artificial Sequence: Synthetic oligonucleotide
  Sense strand starting at position 3972 of SEQ ID NO: 584815
aguuaaauucccuauguuu

SEQ ID NO: 591487 - RNA, 19 nt, Artificial Sequence
  Description of Artificial Sequence: Synthetic oligonucleotide
  Antisense strand to SEQ ID NO: 591486
aaacauagggaauuuaacu

SEQ ID NO: 591488 - RNA, 19 nt, Artificial Sequence
  Description of Artificial Sequence: Synthetic oligonucleotide
  Sense strand starting at position 18 of SEQ ID NO: 584816
ugagaccuacccugauguu

SEQ ID NO: 591489 - RNA, 19 nt, Artificial Sequence
  Description of Artificial Sequence: Synthetic oligonucleotide
  Antisense strand to SEQ ID NO: 591488
aacaucaggguaggucuca

SEQ ID NO: 591490 - RNA, 19 nt, Artificial Sequence
  Description of Artificial Sequence: Synthetic oligonucleotide
  Sense strand starting at position 202 of SEQ ID NO: 584816
agaagagauuaggacacau

SEQ ID NO: 591491 - RNA, 19 nt, Artificial Sequence
  Description of Artificial Sequence: Synthetic oligonucleotide
  Antisense strand to SEQ ID NO: 591490
auguguccuaaucucuucu

SEQ ID NO: 591492 - RNA, 19 nt, Artificial Sequence
  Description of Artificial Sequence: Synthetic oligonucleotide
  Sense strand starting at position 297 of SEQ ID NO: 584816
ucacuugggcgugaacaga

SEQ ID NO: 591493 - RNA, 19 nt, Artificial Sequence
  Description of Artificial Sequence: Synthetic oligonucleotide
  Antisense strand to SEQ ID NO: 591492
ucuguucacgcccaaguga

SEQ ID NO: 591494 - RNA, 19 nt, Artificial Sequence
  Description of Artificial Sequence: Synthetic oligonucleotide
  Sense strand starting at position 319 of SEQ ID NO: 584816
cucagacuccaugagucua

SEQ ID NO: 591495 - RNA, 19 nt, Artificial Sequence
  Description of Artificial Sequence: Synthetic oligonucleotide
  Antisense strand to SEQ ID NO: 591494
uagacucauggagucugag

SEQ ID NO: 591496 - RNA, 19 nt, Artificial Sequence
  Description of Artificial Sequence: Synthetic oligonucleotide
  Sense strand starting at position 462 of SEQ ID NO: 584816
ugagaaaugucuguuguuc

SEQ ID NO: 591497 - RNA, 19 nt, Artificial Sequence
  Description of Artificial Sequence: Synthetic oligonucleotide
  Antisense strand to SEQ ID NO: 591496
gaacaacagacauuucuca

SEQ ID NO: 591498 - RNA, 19 nt, Artificial Sequence
  Description of Artificial Sequence: Synthetic oligonucleotide
  Sense strand starting at position 513 of SEQ ID NO: 584816
agcccuagcagaggaauau

SEQ ID NO: 591499 - RNA, 19 nt, Artificial Sequence
  Description of Artificial Sequence: Synthetic oligonucleotide
  Antisense strand to SEQ ID NO: 591498
auauuccucugcuagggcu

SEQ ID NO: 591500 - RNA, 19 nt, Artificial Sequence
  Description of Artificial Sequence: Synthetic oligonucleotide
  Sense strand starting at position 522 of SEQ ID NO: 584816
agaggaauaugccugguca

SEQ ID NO: 591501 - RNA, 19 nt, Artificial Sequence
  Description of Artificial Sequence: Synthetic oligonucleotide
  Antisense strand to SEQ ID NO: 591500
ugaccaggcauauuccucu

SEQ ID NO: 591502 - RNA, 19 nt, Artificial Sequence
  Description of Artificial Sequence: Synthetic oligonucleotide
  Sense strand starting at position 523 of SEQ ID NO: 584816
gaggaauaugccuggucac

SEQ ID NO: 591503 - RNA, 19 nt, Artificial Sequence
  Description of Artificial Sequence: Synthetic oligonucleotide
  Antisense strand to SEQ ID NO: 591502
gugaccaggcauauuccuc

SEQ ID NO: 591504 - RNA, 19 nt, Artificial Sequence
  Description of Artificial Sequence: Synthetic oligonucleotide
  Sense strand starting at position 524 of SEQ ID NO: 584816
aggaauaugccuggucaca

SEQ ID NO: 591505 - RNA, 19 nt, Artificial Sequence
  Description of Artificial Sequence: Synthetic oligonucleotide
  Antisense strand to SEQ ID NO: 591504
ugugaccaggcauauuccu

SEQ ID NO: 591506 - RNA, 19 nt, Artificial Sequence
  Description of Artificial Sequence: Synthetic oligonucleotide
  Sense strand starting at position 526 of SEQ ID NO: 584816
gaauaugccuggucacacu

SEQ ID NO: 591507 - RNA, 19 nt, Artificial Sequence
  Description of Artificial Sequence: Synthetic oligonucleotide
  Antisense strand to SEQ ID NO: 591506
agugugaccaggcauauuc

SEQ ID NO: 591508 - RNA, 19 nt, Artificial Sequence
  Description of Artificial Sequence: Synthetic oligonucleotide
  Sense strand starting at position 725 of SEQ ID NO: 584816
ccuucuuucguuuaacuga

SEQ ID NO: 591509 - RNA, 19 nt, Artificial Sequence
  Description of Artificial Sequence: Synthetic oligonucleotide
  Antisense strand to SEQ ID NO: 591508
ucaguuaaacgaaagaagg

SEQ ID NO: 591510 - RNA, 19 nt, Artificial Sequence
  Description of Artificial Sequence: Synthetic oligonucleotide
  Sense strand starting at position 730 of SEQ ID NO: 584816
uuucguuuaacugagguau

SEQ ID NO: 591511 - RNA, 19 nt, Artificial Sequence
  Description of Artificial Sequence: Synthetic oligonucleotide
  Antisense strand to SEQ ID NO: 591510
auaccucaguuaaacgaaa

SEQ ID NO: 591512 - RNA, 19 nt, Artificial Sequence
  Description of Artificial Sequence: Synthetic oligonucleotide
  Sense strand starting at position 837 of SEQ ID NO: 584816
uagggaucgcuggaugcau

SEQ ID NO: 591513 - RNA, 19 nt, Artificial Sequence
  Description of Artificial Sequence: Synthetic oligonucleotide
  Antisense strand to SEQ ID NO: 591512
augcauccagcgaucccua

SEQ ID NO: 591514 - RNA, 19 nt, Artificial Sequence
  Description of Artificial Sequence: Synthetic oligonucleotide
  Sense strand starting at position 1003 of SEQ ID NO: 584816
cucccaauucuccaguguu

SEQ ID NO: 591515 - RNA, 19 nt, Artificial Sequence
  Description of Artificial Sequence: Synthetic oligonucleotide
  Antisense strand to SEQ ID NO: 591514
aacacuggagaauugggag

SEQ ID NO: 591516 - RNA, 19 nt, Artificial Sequence
  Description of Artificial Sequence: Synthetic oligonucleotide
  Sense strand starting at position 1013 of SEQ ID NO: 584816
uccaguguucucuaugcaa

SEQ ID NO: 591517 - RNA, 19 nt, Artificial Sequence
  Description of Artificial Sequence: Synthetic oligonucleotide
  Antisense strand to SEQ ID NO: 591516
uugcauagagaacacugga

SEQ ID NO: 591518 - RNA, 19 nt, Artificial Sequence
  Description of Artificial Sequence: Synthetic oligonucleotide
  Sense strand starting at position 1124 of SEQ ID NO: 584816
caguucucuccguuuccga

SEQ ID NO: 591519 - RNA, 19 nt, Artificial Sequence
  Description of Artificial Sequence: Synthetic oligonucleotide
  Antisense strand to SEQ ID NO: 591518
ucggaaacggagagaacug

SEQ ID NO: 591520 - RNA, 19 nt, Artificial Sequence
  Description of Artificial Sequence: Synthetic oligonucleotide
  Sense strand starting at position 1312 of SEQ ID NO: 584816
aggcuuguugaccauaaca

SEQ ID NO: 591521 - RNA, 19 nt, Artificial Sequence
  Description of Artificial Sequence: Synthetic oligonucleotide
  Antisense strand to SEQ ID NO: 591520
uguuauggucaacaagccu

SEQ ID NO: 591522 - RNA, 19 nt, Artificial Sequence
  Description of Artificial Sequence: Synthetic oligonucleotide
  Sense strand starting at position 1314 of SEQ ID NO: 584816
gcuuguugaccauaacaag

SEQ ID NO: 591523 - RNA, 19 nt, Artificial Sequence
  Description of Artificial Sequence: Synthetic oligonucleotide
  Antisense strand to SEQ ID NO: 591522
cuuguuauggucaacaagc

SEQ ID NO: 591524 - RNA, 19 nt, Artificial Sequence
  Description of Artificial Sequence: Synthetic oligonucleotide
  Sense strand starting at position 1329 of SEQ ID NO: 584816
caagcagcucgcuuguauu

SEQ ID NO: 591525 - RNA, 19 nt, Artificial Sequence
  Description of Artificial Sequence: Synthetic oligonucleotide
  Antisense strand to SEQ ID NO: 591524
aauacaagcgagcugcuug

SEQ ID NO: 591526 - RNA, 19 nt, Artificial Sequence
  Description of Artificial Sequence: Synthetic oligonucleotide
  Sense strand starting at position 1342 of SEQ ID NO: 584816
uguauuaggcgcucacguu

SEQ ID NO: 591527 - RNA, 19 nt, Artificial Sequence
  Description of Artificial Sequence: Synthetic oligonucleotide
  Antisense strand to SEQ ID NO: 591526
aacgugagcgccuaauaca

SEQ ID NO: 591528 - RNA, 19 nt, Artificial Sequence
  Description of Artificial Sequence: Synthetic oligonucleotide
  Sense strand starting at position 1382 of SEQ ID NO: 584816
gcauaacuugaugaggcuu

SEQ ID NO: 591529 - RNA, 19 nt, Artificial Sequence
  Description of Artificial Sequence: Synthetic oligonucleotide
  Antisense strand to SEQ ID NO: 591528
aagccucaucaaguuaugc

SEQ ID NO: 591530 - RNA, 19 nt, Artificial Sequence
  Description of Artificial Sequence: Synthetic oligonucleotide
  Sense strand starting at position 2300 of SEQ ID NO: 584816
gggugcucauuugucacua

SEQ ID NO: 591531 - RNA, 19 nt, Artificial Sequence
  Description of Artificial Sequence: Synthetic oligonucleotide
  Antisense strand to SEQ ID NO: 591530
uagugacaaaugagcaccc

SEQ ID NO: 591532 - RNA, 19 nt, Artificial Sequence
  Description of Artificial Sequence: Synthetic oligonucleotide
  Sense strand starting at position 2301 of SEQ ID NO: 584816
ggugcucauuugucacuaa

SEQ ID NO: 591533 - RNA, 19 nt, Artificial Sequence
  Description of Artificial Sequence: Synthetic oligonucleotide
  Antisense strand to SEQ ID NO: 591532
uuagugacaaaugagcacc

SEQ ID NO: 591534 - RNA, 19 nt, Artificial Sequence
  Description of Artificial Sequence: Synthetic oligonucleotide
  Sense strand starting at position 2304 of SEQ ID NO: 584816
gcucauuugucacuaacug

SEQ ID NO: 591535 - RNA, 19 nt, Artificial Sequence
  Description of Artificial Sequence: Synthetic oligonucleotide
  Antisense strand to SEQ ID NO: 591534
caguuagugacaaaugagc

SEQ ID NO: 591536 - RNA, 19 nt, Artificial Sequence
  Description of Artificial Sequence: Synthetic oligonucleotide
  Sense strand starting at position 2442 of SEQ ID NO: 584816
ggccgugaucacgcuucuu

SEQ ID NO: 591537 - RNA, 19 nt, Artificial Sequence
  Description of Artificial Sequence: Synthetic oligonucleotide
  Antisense strand to SEQ ID NO: 591536
aagaagcgugaucacggcc

SEQ ID NO: 591538 - RNA, 19 nt, Artificial Sequence
  Description of Artificial Sequence: Synthetic oligonucleotide
  Sense strand starting at position 2581 of SEQ ID NO: 584816
aggguugcucccgauaaau

SEQ ID NO: 591539 - RNA, 19 nt, Artificial Sequence
  Description of Artificial Sequence: Synthetic oligonucleotide
  Antisense strand to SEQ ID NO: 591538
auuuaucgggagcaacccu

SEQ ID NO: 591540 - RNA, 19 nt, Artificial Sequence
  Description of Artificial Sequence: Synthetic oligonucleotide
  Sense strand starting at position 2583 of SEQ ID NO: 584816
gguugcucccgauaaauaa

SEQ ID NO: 591541 - RNA, 19 nt, Artificial Sequence
  Description of Artificial Sequence: Synthetic oligonucleotide
  Antisense strand to SEQ ID NO: 591540
uuauuuaucgggagcaacc

SEQ ID NO: 591542 - RNA, 19 nt, Artificial Sequence
  Description of Artificial Sequence: Synthetic oligonucleotide
  Sense strand starting at position 2657 of SEQ ID NO: 584816
cugugugaccgacagguua

SEQ ID NO: 591543 - RNA, 19 nt, Artificial Sequence
  Description of Artificial Sequence: Synthetic oligonucleotide
  Antisense strand to SEQ ID NO: 591542
uaaccugucggucacacag

SEQ ID NO: 591544 - RNA, 19 nt, Artificial Sequence
  Description of Artificial Sequence: Synthetic oligonucleotide
  Sense strand starting at position 2668 of SEQ ID NO: 584816
acagguuaaccuuagucca

SEQ ID NO: 591545 - RNA, 19 nt, Artificial Sequence
  Description of Artificial Sequence: Synthetic oligonucleotide
  Antisense strand to SEQ ID NO: 591544
uggacuaagguuaaccugu

SEQ ID NO: 591546 - RNA, 19 nt, Artificial Sequence
  Description of Artificial Sequence: Synthetic oligonucleotide
  Sense strand starting at position 2670 of SEQ ID NO: 584816
agguuaaccuuaguccagu

SEQ ID NO: 591547 - RNA, 19 nt, Artificial Sequence
  Description of Artificial Sequence: Synthetic oligonucleotide
  Antisense strand to SEQ ID NO: 591546
acuggacuaagguuaaccu

SEQ ID NO: 591548 - RNA, 19 nt, Artificial Sequence
  Description of Artificial Sequence: Synthetic oligonucleotide
  Sense strand starting at position 2679 of SEQ ID NO: 584816
uuaguccagucacuuauaa

SEQ ID NO: 591549 - RNA, 19 nt, Artificial Sequence
  Description of Artificial Sequence: Synthetic oligonucleotide
  Antisense strand to SEQ ID NO: 591548
uuauaagugacuggacuaa

SEQ ID NO: 591550 - RNA, 19 nt, Artificial Sequence
  Description of Artificial Sequence: Synthetic oligonucleotide
  Sense strand starting at position 2720 of SEQ ID NO: 584816
uuuguugugagauaacgua

SEQ ID NO: 591551 - RNA, 19 nt, Artificial Sequence
  Description of Artificial Sequence: Synthetic oligonucleotide
  Antisense strand to SEQ ID NO: 591550
uacguuaucucacaacaaa

SEQ ID NO: 591552 - RNA, 19 nt, Artificial Sequence
  Description of Artificial Sequence: Synthetic oligonucleotide
  Sense strand starting at position 2745 of SEQ ID NO: 584816
ucauuacaguugccacauu

SEQ ID NO: 591553 - RNA, 19 nt, Artificial Sequence
  Description of Artificial Sequence: Synthetic oligonucleotide
  Antisense strand to SEQ ID NO: 591552
aauguggcaacuguaauga

SEQ ID NO: 591554 - RNA, 19 nt, Artificial Sequence
  Description of Artificial Sequence: Synthetic oligonucleotide
  Sense strand starting at position 2823 of SEQ ID NO: 584816
aaaguugggucaccaacua

SEQ ID NO: 591555 - RNA, 19 nt, Artificial Sequence
  Description of Artificial Sequence: Synthetic oligonucleotide
  Antisense strand to SEQ ID NO: 591554
uaguuggugacccaacuuu

SEQ ID NO: 591556 - RNA, 19 nt, Artificial Sequence
  Description of Artificial Sequence: Synthetic oligonucleotide
  Sense strand starting at position 2877 of SEQ ID NO: 584816
agguauaaggauugagcau

SEQ ID NO: 591557 - RNA, 19 nt, Artificial Sequence
  Description of Artificial Sequence: Synthetic oligonucleotide
  Antisense strand to SEQ ID NO: 591556
augcucaauccuuauaccu

SEQ ID NO: 591558 - RNA, 19 nt, Artificial Sequence
  Description of Artificial Sequence: Synthetic oligonucleotide
  Sense strand starting at position 3025 of SEQ ID NO: 584816
aggcguaugcugggaauuu

SEQ ID NO: 591559 - RNA, 19 nt, Artificial Sequence
  Description of Artificial Sequence: Synthetic oligonucleotide
  Antisense strand to SEQ ID NO: 591558
aaauucccagcauacgccu

SEQ ID NO: 591560 - RNA, 19 nt, Artificial Sequence
  Description of Artificial Sequence: Synthetic oligonucleotide
  Sense strand starting at position 3249 of SEQ ID NO: 584816
gccagucacauauggcaga

SEQ ID NO: 591561 - RNA, 19 nt, Artificial Sequence
  Description of Artificial Sequence: Synthetic oligonucleotide
  Antisense strand to SEQ ID NO: 591560
ucugccauaugugacuggc

SEQ ID NO: 591562 - RNA, 19 nt, Artificial Sequence
  Description of Artificial Sequence: Synthetic oligonucleotide
  Sense strand starting at position 3269 of SEQ ID NO: 584816
gugauaacaguagaguuua

SEQ ID NO: 591563 - RNA, 19 nt, Artificial Sequence
  Description of Artificial Sequence: Synthetic oligonucleotide
  Antisense strand to SEQ ID NO: 591562
uaaacucuacuguuaucac

SEQ ID NO: 591564 - RNA, 19 nt, Artificial Sequence
  Description of Artificial Sequence: Synthetic oligonucleotide
  Sense strand starting at position 3743 of SEQ ID NO: 584816
cugggauuacagggcucau

SEQ ID NO: 591565 - RNA, 19 nt, Artificial Sequence
  Description of Artificial Sequence: Synthetic oligonucleotide
  Antisense strand to SEQ ID NO: 591564
augagcccuguaaucccag

SEQ ID NO: 591566 - RNA, 19 nt, Artificial Sequence
  Description of Artificial Sequence: Synthetic oligonucleotide
  Sense strand starting at position 3919 of SEQ ID NO: 584816
ugacuuauccauuacgcac

SEQ ID NO: 591567 - RNA, 19 nt, Artificial Sequence
  Description of Artificial Sequence: Synthetic oligonucleotide
  Antisense strand to SEQ ID NO: 591566
gugcguaauggauaaguca

SEQ ID NO: 591568 - RNA, 19 nt, Artificial Sequence
  Description of Artificial Sequence: Synthetic oligonucleotide
  Sense strand starting at position 139 of SEQ ID NO: 584817
gaggauagagguuggcuaa

SEQ ID NO: 591569 - RNA, 19 nt, Artificial Sequence
  Description of Artificial Sequence: Synthetic oligonucleotide
  Antisense strand to SEQ ID NO: 591568
uuagccaaccucuauccuc

SEQ ID NO: 591570 - RNA, 19 nt, Artificial Sequence
  Description of Artificial Sequence: Synthetic oligonucleotide
  Sense strand starting at position 140 of SEQ ID NO: 584817
aggauagagguuggcuaau

SEQ ID NO: 591571 - RNA, 19 nt, Artificial Sequence
  Description of Artificial Sequence: Synthetic oligonucleotide
  Antisense strand to SEQ ID NO: 591570
auuagccaaccucuauccu

SEQ ID NO: 591572 - RNA, 19 nt, Artificial Sequence
  Description of Artificial Sequence: Synthetic oligonucleotide
  Sense strand starting at position 142 of SEQ ID NO: 584817
gauagagguuggcuaauua

SEQ ID NO: 591573 - RNA, 19 nt, Artificial Sequence
  Description of Artificial Sequence: Synthetic oligonucleotide
  Antisense strand to SEQ ID NO: 591572
uaauuagccaaccucuauc

SEQ ID NO: 591574 - RNA, 19 nt, Artificial Sequence
  Description of Artificial Sequence: Synthetic oligonucleotide
  Sense strand starting at position 146 of SEQ ID NO: 584817
gagguuggcuaauuaauac

SEQ ID NO: 591575 - RNA, 19 nt, Artificial Sequence
  Description of Artificial Sequence: Synthetic oligonucleotide
  Antisense strand to SEQ ID NO: 591574
guauuaauuagccaaccuc

SEQ ID NO: 591576 - RNA, 19 nt, Artificial Sequence
  Description of Artificial Sequence: Synthetic oligonucleotide
  Sense strand starting at position 288 of SEQ ID NO: 584817
guuuaaugugauggagauc

SEQ ID NO: 591577 - RNA, 19 nt, Artificial Sequence
  Description of Artificial Sequence: Synthetic oligonucleotide
  Antisense strand to SEQ ID NO: 591576
gaucuccaucacauuaaac

SEQ ID NO: 591578 - RNA, 19 nt, Artificial Sequence
  Description of Artificial Sequence: Synthetic oligonucleotide
  Sense strand starting at position 299 of SEQ ID NO: 584817
uggagauccuaauuacccu

SEQ ID NO: 591579 - RNA, 19 nt, Artificial Sequence
  Description of Artificial Sequence: Synthetic oligonucleotide
  Antisense strand to SEQ ID NO: 591578
aggguaauuaggaucucca

SEQ ID NO: 591580 - RNA, 19 nt, Artificial Sequence
  Description of Artificial Sequence: Synthetic oligonucleotide
  Sense strand starting at position 355 of SEQ ID NO: 584817
gucacauaugcccauaaag

SEQ ID NO: 591581 - RNA, 19 nt, Artificial Sequence
  Description of Artificial Sequence: Synthetic oligonucleotide
  Antisense strand to SEQ ID NO: 591580
cuuuaugggcauaugugac

SEQ ID NO: 591582 - RNA, 19 nt, Artificial Sequence
  Description of Artificial Sequence: Synthetic oligonucleotide
  Sense strand starting at position 418 of SEQ ID NO: 584817
agggcuuaaugacugcaaa

SEQ ID NO: 591583 - RNA, 19 nt, Artificial Sequence
  Description of Artificial Sequence: Synthetic oligonucleotide
  Antisense strand to SEQ ID NO: 591582
uuugcagucauuaagcccu

SEQ ID NO: 591584 - RNA, 19 nt, Artificial Sequence
  Description of Artificial Sequence: Synthetic oligonucleotide
  Sense strand starting at position 419 of SEQ ID NO: 584817
gggcuuaaugacugcaaag

SEQ ID NO: 591585 - RNA, 19 nt, Artificial Sequence
  Description of Artificial Sequence: Synthetic oligonucleotide
  Antisense strand to SEQ ID NO: 591584
cuuugcagucauuaagccc

SEQ ID NO: 591586 - RNA, 19 nt, Artificial Sequence
  Description of Artificial Sequence: Synthetic oligonucleotide
  Sense strand starting at position 509 of SEQ ID NO: 584817
ggaaauuggacaugcaguu

SEQ ID NO: 591587 - RNA, 19 nt, Artificial Sequence
  Description of Artificial Sequence: Synthetic oligonucleotide
  Antisense strand to SEQ ID NO: 591586
aacugcauguccaauuucc

SEQ ID NO: 591588 - RNA, 19 nt, Artificial Sequence
  Description of Artificial Sequence: Synthetic oligonucleotide
  Sense strand starting at position 573 of SEQ ID NO: 584817
gggaucagauaggauauuu

SEQ ID NO: 591589 - RNA, 19 nt, Artificial Sequence
  Description of Artificial Sequence: Synthetic oligonucleotide
  Antisense strand to SEQ ID NO: 591588
aaauauccuaucugauccc

SEQ ID NO: 591590 - RNA, 19 nt, Artificial Sequence
  Description of Artificial Sequence: Synthetic oligonucleotide
  Sense strand starting at position 593 of SEQ ID NO: 584817
gaaguuggauugcugagaa

SEQ ID NO: 591591 - RNA, 19 nt, Artificial Sequence
  Description of Artificial Sequence: Synthetic oligonucleotide
  Antisense strand to SEQ ID NO: 591590
uucucagcaauccaacuuc

SEQ ID NO: 591592 - RNA, 19 nt, Artificial Sequence
  Description of Artificial Sequence: Synthetic oligonucleotide
  Sense strand starting at position 679 of SEQ ID NO: 584817
agccauuagcugcaggaaa

SEQ ID NO: 591593 - RNA, 19 nt, Artificial Sequence
  Description of Artificial Sequence: Synthetic oligonucleotide
  Antisense strand to SEQ ID NO: 591592
uuuccugcagcuaauggcu

SEQ ID NO: 591594 - RNA, 19 nt, Artificial Sequence
  Description of Artificial Sequence: Synthetic oligonucleotide
  Sense strand starting at position 875 of SEQ ID NO: 584817
ucugaagguuuacuuuaaa

SEQ ID NO: 591595 - RNA, 19 nt, Artificial Sequence
  Description of Artificial Sequence: Synthetic oligonucleotide
  Antisense strand to SEQ ID NO: 591594
uuuaaaguaaaccuucaga

SEQ ID NO: 591596 - RNA, 19 nt, Artificial Sequence
  Description of Artificial Sequence: Synthetic oligonucleotide
  Sense strand starting at position 896 of SEQ ID NO: 584817
caagacagauuugaaguau

SEQ ID NO: 591597 - RNA, 19 nt, Artificial Sequence
  Description of Artificial Sequence: Synthetic oligonucleotide
  Antisense strand to SEQ ID NO: 591596
auacuucaaaucugucuug

SEQ ID NO: 591598 - RNA, 19 nt, Artificial Sequence
  Description of Artificial Sequence: Synthetic oligonucleotide
  Sense strand starting at position 1004 of SEQ ID NO: 584817
cuaguuauuugugccuuaa

SEQ ID NO: 591599 - RNA, 19 nt, Artificial Sequence
  Description of Artificial Sequence: Synthetic oligonucleotide
  Antisense strand to SEQ ID NO: 591598
uuaaggcacaaauaacuag

SEQ ID NO: 591600 - RNA, 19 nt, Artificial Sequence
  Description of Artificial Sequence: Synthetic oligonucleotide
  Sense strand starting at position 1046 of SEQ ID NO: 584817
ggcauuagaugacuauaua

SEQ ID NO: 591601 - RNA, 19 nt, Artificial Sequence
  Description of Artificial Sequence: Synthetic oligonucleotide
  Antisense strand to SEQ ID NO: 591600
uauauagucaucuaaugcc

SEQ ID NO: 591602 - RNA, 19 nt, Artificial Sequence
  Description of Artificial Sequence: Synthetic oligonucleotide
  Sense strand starting at position 1102 of SEQ ID NO: 584817
uucucagugcaauaauuga

SEQ ID NO: 591603 - RNA, 19 nt, Artificial Sequence
  Description of Artificial Sequence: Synthetic oligonucleotide
  Antisense strand to SEQ ID NO: 591602
ucaauuauugcacugagaa

SEQ ID NO: 591604 - RNA, 19 nt, Artificial Sequence
  Description of Artificial Sequence: Synthetic oligonucleotide
  Sense strand starting at position 1463 of SEQ ID NO: 584817
gggaauauuuaacaaagug

SEQ ID NO: 591605 - RNA, 19 nt, Artificial Sequence
  Description of Artificial Sequence: Synthetic oligonucleotide
  Antisense strand to SEQ ID NO: 591604
cacuuuguuaaauauuccc

SEQ ID NO: 591606 - RNA, 19 nt, Artificial Sequence
  Description of Artificial Sequence: Synthetic oligonucleotide
  Sense strand starting at position 1515 of SEQ ID NO: 584817
cugauuaggaaauguuuga

SEQ ID NO: 591607 - RNA, 19 nt, Artificial Sequence
  Description of Artificial Sequence: Synthetic oligonucleotide
  Antisense strand to SEQ ID NO: 591606
ucaaacauuuccuaaucag

SEQ ID NO: 591608 - RNA, 19 nt, Artificial Sequence
  Description of Artificial Sequence: Synthetic oligonucleotide
  Sense strand starting at position 1560 of SEQ ID NO: 584817
ggcuguguuagguuggcua

SEQ ID NO: 591609 - RNA, 19 nt, Artificial Sequence
  Description of Artificial Sequence: Synthetic oligonucleotide
  Antisense strand to SEQ ID NO: 591608
uagccaaccuaacacagcc

SEQ ID NO: 591610 - RNA, 19 nt, Artificial Sequence
  Description of Artificial Sequence: Synthetic oligonucleotide
  Sense strand starting at position 1589 of SEQ ID NO: 584817
uuacuuucugcauauagga

SEQ ID NO: 591611 - RNA, 19 nt, Artificial Sequence
  Description of Artificial Sequence: Synthetic oligonucleotide
  Antisense strand to SEQ ID NO: 591610
uccuauaugcagaaaguaa

SEQ ID NO: 591612 - RNA, 19 nt, Artificial Sequence
  Description of Artificial Sequence: Synthetic oligonucleotide
  Sense strand starting at position 1642 of SEQ ID NO: 584817
caagguacaucuucugaga

SEQ ID NO: 591613 - RNA, 19 nt, Artificial Sequence
  Description of Artificial Sequence: Synthetic oligonucleotide
  Antisense strand to SEQ ID NO: 591612
ucucagaagauguaccuug

SEQ ID NO: 591614 - RNA, 19 nt, Artificial Sequence
  Description of Artificial Sequence: Synthetic oligonucleotide
  Sense strand starting at position 1915 of SEQ ID NO: 584817
gcguuuguuccagccauag

SEQ ID NO: 591615 - RNA, 19 nt, Artificial Sequence
  Description of Artificial Sequence: Synthetic oligonucleotide
  Antisense strand to SEQ ID NO: 591614
cuauggcuggaacaaacgc

SEQ ID NO: 591616 - RNA, 19 nt, Artificial Sequence
  Description of Artificial Sequence: Synthetic oligonucleotide
  Sense strand starting at position 2111 of SEQ ID NO: 584817
aagagaguggcugaauguu

SEQ ID NO: 591617 - RNA, 19 nt, Artificial Sequence
  Description of Artificial Sequence: Synthetic oligonucleotide
  Antisense strand to SEQ ID NO: 591616
aacauucagccacucucuu

SEQ ID NO: 591618 - RNA, 19 nt, Artificial Sequence
  Description of Artificial Sequence: Synthetic oligonucleotide
  Sense strand starting at position 2140 of SEQ ID NO: 584817
cuaguacauuaccugacau

SEQ ID NO: 591619 - RNA, 19 nt, Artificial Sequence
  Description of Artificial Sequence: Synthetic oligonucleotide
  Antisense strand to SEQ ID NO: 591618
augucagguaauguacuag

SEQ ID NO: 591620 - RNA, 19 nt, Artificial Sequence
  Description of Artificial Sequence: Synthetic oligonucleotide
  Sense strand starting at position 2157 of SEQ ID NO: 584817
auggauaauuguguguaaa

SEQ ID NO: 591621 - RNA, 19 nt, Artificial Sequence
  Description of Artificial Sequence: Synthetic oligonucleotide
  Antisense strand to SEQ ID NO: 591620
uuuacacacaauuauccau

SEQ ID NO: 591622 - RNA, 19 nt, Artificial Sequence
  Description of Artificial Sequence: Synthetic oligonucleotide
  Sense strand starting at position 2394 of SEQ ID NO: 584817
gagccuuggagagguuaga

SEQ ID NO: 591623 - RNA, 19 nt, Artificial Sequence
  Description of Artificial Sequence: Synthetic oligonucleotide
  Antisense strand to SEQ ID NO: 591622
ucuaaccucuccaaggcuc

SEQ ID NO: 591624 - RNA, 19 nt, Artificial Sequence
  Description of Artificial Sequence: Synthetic oligonucleotide
  Sense strand starting at position 2705 of SEQ ID NO: 584817
ccugauguagcugagaauu

SEQ ID NO: 591625 - RNA, 19 nt, Artificial Sequence
  Description of Artificial Sequence: Synthetic oligonucleotide
  Antisense strand to SEQ ID NO: 591624
aauucucagcuacaucagg

SEQ ID NO: 591626 - RNA, 19 nt, Artificial Sequence
  Description of Artificial Sequence: Synthetic oligonucleotide
  Sense strand starting at position 2841 of SEQ ID NO: 584817
cuuguuguuaagcaaggaa

SEQ ID NO: 591627 - RNA, 19 nt, Artificial Sequence
  Description of Artificial Sequence: Synthetic oligonucleotide
  Antisense strand to SEQ ID NO: 591626
uuccuugcuuaacaacaag

SEQ ID NO: 591628 - RNA, 19 nt, Artificial Sequence
  Description of Artificial Sequence: Synthetic oligonucleotide
  Sense strand starting at position 2848 of SEQ ID NO: 584817
uuaagcaaggaaugugaaa

SEQ ID NO: 591629 - RNA, 19 nt, Artificial Sequence
  Description of Artificial Sequence: Synthetic oligonucleotide
  Antisense strand to SEQ ID NO: 591628
uuucacauuccuugcuuaa

SEQ ID NO: 591630 - RNA, 19 nt, Artificial Sequence
  Description of Artificial Sequence: Synthetic oligonucleotide
  Sense strand starting at position 2875 of SEQ ID NO: 584817
uggccugauuugccaauca

SEQ ID NO: 591631 - RNA, 19 nt, Artificial Sequence
  Description of Artificial Sequence: Synthetic oligonucleotide
  Antisense strand to SEQ ID NO: 591630
ugauuggcaaaucaggcca

SEQ ID NO: 591632 - RNA, 19 nt, Artificial Sequence
  Description of Artificial Sequence: Synthetic oligonucleotide
  Sense strand starting at position 2918 of SEQ ID NO: 584817
gagaacaucuacucuguga

SEQ ID NO: 591633 - RNA, 19 nt, Artificial Sequence
  Description of Artificial Sequence: Synthetic oligonucleotide
  Antisense strand to SEQ ID NO: 591632
ucacagaguagauguucuc

SEQ ID NO: 591634 - RNA, 19 nt, Artificial Sequence
  Description of Artificial Sequence: Synthetic oligonucleotide
  Sense strand starting at position 2921 of SEQ ID NO: 584817
aacaucuacucugugagga

SEQ ID NO: 591635 - RNA, 19 nt, Artificial Sequence
  Description of Artificial Sequence: Synthetic oligonucleotide
  Antisense strand to SEQ ID NO: 591634
uccucacagaguagauguu

SEQ ID NO: 591636 - RNA, 19 nt, Artificial Sequence
  Description of Artificial Sequence: Synthetic oligonucleotide
  Sense strand starting at position 2922 of SEQ ID NO: 584817
acaucuacucugugaggau

SEQ ID NO: 591637 - RNA, 19 nt, Artificial Sequence
  Description of Artificial Sequence: Synthetic oligonucleotide
  Antisense strand to SEQ ID NO: 591636
auccucacagaguagaugu

SEQ ID NO: 591638 - RNA, 19 nt, Artificial Sequence
  Description of Artificial Sequence: Synthetic oligonucleotide
  Sense strand starting at position 3026 of SEQ ID NO: 584817
cuaggaaucucuccuacag

SEQ ID NO: 591639 - RNA, 19 nt, Artificial Sequence
  Description of Artificial Sequence: Synthetic oligonucleotide
  Antisense strand to SEQ ID NO: 591638
cuguaggagagauuccuag

SEQ ID NO: 591640 - RNA, 19 nt, Artificial Sequence
  Description of Artificial Sequence: Synthetic oligonucleotide
  Sense strand starting at position 3044 of SEQ ID NO: 584817
gaauuacgugcucaugaac

SEQ ID NO: 591641 - RNA, 19 nt, Artificial Sequence
  Description of Artificial Sequence: Synthetic oligonucleotide
  Antisense strand to SEQ ID NO: 591640
guucaugagcacguaauuc

SEQ ID NO: 591642 - RNA, 19 nt, Artificial Sequence
  Description of Artificial Sequence: Synthetic oligonucleotide
  Sense strand starting at position 3304 of SEQ ID NO: 584817
auggcaagccuauauuacu

SEQ ID NO: 591643 - RNA, 19 nt, Artificial Sequence
  Description of Artificial Sequence: Synthetic oligonucleotide
  Antisense strand to SEQ ID NO: 591642
aguaauauaggcuugccau

SEQ ID NO: 591644 - RNA, 19 nt, Artificial Sequence
  Description of Artificial Sequence: Synthetic oligonucleotide
  Sense strand starting at position 3445 of SEQ ID NO: 584817
uuuauuggucucuagauau

SEQ ID NO: 591645 - RNA, 19 nt, Artificial Sequence
  Description of Artificial Sequence: Synthetic oligonucleotide
  Antisense strand to SEQ ID NO: 591644
auaucuagagaccaauaaa

SEQ ID NO: 591646 - RNA, 19 nt, Artificial Sequence
  Description of Artificial Sequence: Synthetic oligonucleotide
  Sense strand starting at position 3641 of SEQ ID NO: 584817
gaaacagaaugagagaaau

SEQ ID NO: 591647 - RNA, 19 nt, Artificial Sequence
  Description of Artificial Sequence: Synthetic oligonucleotide
  Antisense strand to SEQ ID NO: 591646
auuucucucauucuguuuc

SEQ ID NO: 591648 - RNA, 19 nt, Artificial Sequence
  Description of Artificial Sequence: Synthetic oligonucleotide
  Sense strand starting at position 33 of SEQ ID NO: 584818
ccaucuuucucaucuguga

SEQ ID NO: 591649 - RNA, 19 nt, Artificial Sequence
  Description of Artificial Sequence: Synthetic oligonucleotide
  Antisense strand to SEQ ID NO: 591648
ucacagaugagaaagaugg

SEQ ID NO: 591650 - RNA, 19 nt, Artificial Sequence
  Description of Artificial Sequence: Synthetic oligonucleotide
  Sense strand starting at position 121 of SEQ ID NO: 584818
uaguaagcgcuauagacau

SEQ ID NO: 591651 - RNA, 19 nt, Artificial Sequence
  Description of Artificial Sequence: Synthetic oligonucleotide
  Antisense strand to SEQ ID NO: 591650
augucuauagcgcuuacua

SEQ ID NO: 591652 - RNA, 19 nt, Artificial Sequence
  Description of Artificial Sequence: Synthetic oligonucleotide
  Sense strand starting at position 166 of SEQ ID NO: 584818
aaaugagacgugugacauu

SEQ ID NO: 591653 - RNA, 19 nt, Artificial Sequence
  Description of Artificial Sequence: Synthetic oligonucleotide
  Antisense strand to SEQ ID NO: 591652
aaugucacacgucucauuu

SEQ ID NO: 591654 - RNA, 19 nt, Artificial Sequence
  Description of Artificial Sequence: Synthetic oligonucleotide
  Sense strand starting at position 184 of SEQ ID NO: 584818
uuuagcuaugacuaguauu

SEQ ID NO: 591655 - RNA, 19 nt, Artificial Sequence
  Description of Artificial Sequence: Synthetic oligonucleotide
  Antisense strand to SEQ ID NO: 591654
aauacuagucauagcuaaa

SEQ ID NO: 591656 - RNA, 19 nt, Artificial Sequence
  Description of Artificial Sequence: Synthetic oligonucleotide
  Sense strand starting at position 250 of SEQ ID NO: 584818
ucccgucgugccuuaaagu

SEQ ID NO: 591657 - RNA, 19 nt, Artificial Sequence
  Description of Artificial Sequence: Synthetic oligonucleotide
  Antisense strand to SEQ ID NO: 591656
acuuuaaggcacgacggga

SEQ ID NO: 591658 - RNA, 19 nt, Artificial Sequence
  Description of Artificial Sequence: Synthetic oligonucleotide
  Sense strand starting at position 688 of SEQ ID NO: 584818
ccagauuccuuugcucaag

SEQ ID NO: 591659 - RNA, 19 nt, Artificial Sequence
  Description of Artificial Sequence: Synthetic oligonucleotide
  Antisense strand to SEQ ID NO: 591658
cuugagcaaaggaaucugg

SEQ ID NO: 591660 - RNA, 19 nt, Artificial Sequence
  Description of Artificial Sequence: Synthetic oligonucleotide
  Sense strand starting at position 1128 of SEQ ID NO: 584818
cgaauuagcgccugacuaa

SEQ ID NO: 591661 - RNA, 19 nt, Artificial Sequence
  Description of Artificial Sequence: Synthetic oligonucleotide
  Antisense strand to SEQ ID NO: 591660
uuagucaggcgcuaauucg

SEQ ID NO: 591662 - RNA, 19 nt, Artificial Sequence
  Description of Artificial Sequence: Synthetic oligonucleotide
  Sense strand starting at position 1129 of SEQ ID NO: 584818
gaauuagcgccugacuaag

SEQ ID NO: 591663 - RNA, 19 nt, Artificial Sequence
  Description of Artificial Sequence: Synthetic oligonucleotide
  Antisense strand to SEQ ID NO: 591662
cuuagucaggcgcuaauuc

SEQ ID NO: 591664 - RNA, 19 nt, Artificial Sequence
  Description of Artificial Sequence: Synthetic oligonucleotide
  Sense strand starting at position 1984 of SEQ ID NO: 584818
ggccauacuguguaagcga

SEQ ID NO: 591665 - RNA, 19 nt, Artificial Sequence
  Description of Artificial Sequence: Synthetic oligonucleotide
  Antisense strand to SEQ ID NO: 591664
ucgcuuacacaguauggcc

SEQ ID NO: 591666 - RNA, 19 nt, Artificial Sequence
  Description of Artificial Sequence: Synthetic oligonucleotide
  Sense strand starting at position 2014 of SEQ ID NO: 584818
gagcaccgcccuuauauau

SEQ ID NO: 591667 - RNA, 19 nt, Artificial Sequence
  Description of Artificial Sequence: Synthetic oligonucleotide
  Antisense strand to SEQ ID NO: 591666
auauauaagggcggugcuc

SEQ ID NO: 591668 - RNA, 19 nt, Artificial Sequence
  Description of Artificial Sequence: Synthetic oligonucleotide
  Sense strand starting at position 2238 of SEQ ID NO: 584818
acuagaaaccucggaucga

SEQ ID NO: 591669 - RNA, 19 nt, Artificial Sequence
  Description of Artificial Sequence: Synthetic oligonucleotide
  Antisense strand to SEQ ID NO: 591668
ucgauccgagguuucuagu

SEQ ID NO: 591670 - RNA, 19 nt, Artificial Sequence
  Description of Artificial Sequence: Synthetic oligonucleotide
  Sense strand starting at position 2443 of SEQ ID NO: 584818
gagguacuuggccauucuu

SEQ ID NO: 591671 - RNA, 19 nt, Artificial Sequence
  Description of Artificial Sequence: Synthetic oligonucleotide
  Antisense strand to SEQ ID NO: 591670
aagaauggccaaguaccuc

SEQ ID NO: 591672 - RNA, 19 nt, Artificial Sequence
  Description of Artificial Sequence: Synthetic oligonucleotide
  Sense strand starting at position 2541 of SEQ ID NO: 584818
cgaauuagaaggcgcuuua

SEQ ID NO: 591673 - RNA, 19 nt, Artificial Sequence
  Description of Artificial Sequence: Synthetic oligonucleotide
  Antisense strand to SEQ ID NO: 591672
uaaagcgccuucuaauucg

SEQ ID NO: 591674 - RNA, 19 nt, Artificial Sequence
  Description of Artificial Sequence: Synthetic oligonucleotide
  Sense strand starting at position 2574 of SEQ ID NO: 584818
uuggcugaugugcgaauga

SEQ ID NO: 591675 - RNA, 19 nt, Artificial Sequence
  Description of Artificial Sequence: Synthetic oligonucleotide
  Antisense strand to SEQ ID NO: 591674
ucauucgcacaucagccaa

SEQ ID NO: 591676 - RNA, 19 nt, Artificial Sequence
  Description of Artificial Sequence: Synthetic oligonucleotide
  Sense strand starting at position 2782 of SEQ ID NO: 584818
agcucaacuggugggaauu

SEQ ID NO: 591677 - RNA, 19 nt, Artificial Sequence
  Description of Artificial Sequence: Synthetic oligonucleotide
  Antisense strand to SEQ ID NO: 591676
aauucccaccaguugagcu

SEQ ID NO: 591678 - RNA, 19 nt, Artificial Sequence
  Description of Artificial Sequence: Synthetic oligonucleotide
  Sense strand starting at position 2784 of SEQ ID NO: 584818
cucaacuggugggaauuua

SEQ ID NO: 591679 - RNA, 19 nt, Artificial Sequence
  Description of Artificial Sequence: Synthetic oligonucleotide
  Antisense strand to SEQ ID NO: 591678
uaaauucccaccaguugag

SEQ ID NO: 591680 - RNA, 19 nt, Artificial Sequence
  Description of Artificial Sequence: Synthetic oligonucleotide
  Sense strand starting at position 2819 of SEQ ID NO: 584818
cuagaaacugaauguguua

SEQ ID NO: 591681 - RNA, 19 nt, Artificial Sequence
  Description of Artificial Sequence: Synthetic oligonucleotide
  Antisense strand to SEQ ID NO: 591680
uaacacauucaguuucuag

SEQ ID NO: 591682 - RNA, 19 nt, Artificial Sequence
  Description of Artificial Sequence: Synthetic oligonucleotide
  Sense strand starting at position 2822 of SEQ ID NO: 584818
gaaacugaauguguuaaau

SEQ ID NO: 591683 - RNA, 19 nt, Artificial Sequence
  Description of Artificial Sequence: Synthetic oligonucleotide
  Antisense strand to SEQ ID NO: 591682
auuuaacacauucaguuuc

SEQ ID NO: 591684 - RNA, 19 nt, Artificial Sequence
  Description of Artificial Sequence: Synthetic oligonucleotide
  Sense strand starting at position 2888 of SEQ ID NO: 584818
ugauguauuaauugaugga

SEQ ID NO: 591685 - RNA, 19 nt, Artificial Sequence
  Description of Artificial Sequence: Synthetic oligonucleotide
  Antisense strand to SEQ ID NO: 591684
uccaucaauuaauacauca

SEQ ID NO: 591686 - RNA, 19 nt, Artificial Sequence
  Description of Artificial Sequence: Synthetic oligonucleotide
  Sense strand starting at position 2892 of SEQ ID NO: 584818
guauuaauugauggagguu

SEQ ID NO: 591687 - RNA, 19 nt, Artificial Sequence
  Description of Artificial Sequence: Synthetic oligonucleotide
  Antisense strand to SEQ ID NO: 591686
aaccuccaucaauuaauac

SEQ ID NO: 591688 - RNA, 19 nt, Artificial Sequence
  Description of Artificial Sequence: Synthetic oligonucleotide
  Sense strand starting at position 2941 of SEQ ID NO: 584818
cuucccaugugcuuaagaa

SEQ ID NO: 591689 - RNA, 19 nt, Artificial Sequence
  Description of Artificial Sequence: Synthetic oligonucleotide
  Antisense strand to SEQ ID NO: 591688
uucuuaagcacaugggaag

SEQ ID NO: 591690 - RNA, 19 nt, Artificial Sequence
  Description of Artificial Sequence: Synthetic oligonucleotide
  Sense strand starting at position 2942 of SEQ ID NO: 584818
uucccaugugcuuaagaag

SEQ ID NO: 591691 - RNA, 19 nt, Artificial Sequence
  Description of Artificial Sequence: Synthetic oligonucleotide
  Antisense strand to SEQ ID NO: 591690
cuucuuaagcacaugggaa

SEQ ID NO: 591692 - RNA, 19 nt, Artificial Sequence
  Description of Artificial Sequence: Synthetic oligonucleotide
  Sense strand starting at position 2994 of SEQ ID NO: 584818
agagcuaucacugguggua

SEQ ID NO: 591693 - RNA, 19 nt, Artificial Sequence
  Description of Artificial Sequence: Synthetic oligonucleotide
  Antisense strand to SEQ ID NO: 591692
uaccaccagugauagcucu

SEQ ID NO: 591694 - RNA, 19 nt, Artificial Sequence
  Description of Artificial Sequence: Synthetic oligonucleotide
  Sense strand starting at position 2997 of SEQ ID NO: 584818
gcuaucacuggugguaacu

SEQ ID NO: 591695 - RNA, 19 nt, Artificial Sequence
  Description of Artificial Sequence: Synthetic oligonucleotide
  Antisense strand to SEQ ID NO: 591694
aguuaccaccagugauagc

SEQ ID NO: 591696 - RNA, 19 nt, Artificial Sequence
  Description of Artificial Sequence: Synthetic oligonucleotide
  Sense strand starting at position 3063 of SEQ ID NO: 584818
ucgucaagccauggucaaa

SEQ ID NO: 591697 - RNA, 19 nt, Artificial Sequence
  Description of Artificial Sequence: Synthetic oligonucleotide
  Antisense strand to SEQ ID NO: 591696
uuugaccauggcuugacga

SEQ ID NO: 591698 - RNA, 19 nt, Artificial Sequence
  Description of Artificial Sequence: Synthetic oligonucleotide
  Sense strand starting at position 3130 of SEQ ID NO: 584818
uugggaauaugggaggaaa

SEQ ID NO: 591699 - RNA, 19 nt, Artificial Sequence
  Description of Artificial Sequence: Synthetic oligonucleotide
  Antisense strand to SEQ ID NO: 591698
uuuccucccauauucccaa

SEQ ID NO: 591700 - RNA, 19 nt, Artificial Sequence
  Description of Artificial Sequence: Synthetic oligonucleotide
  Sense strand starting at position 3200 of SEQ ID NO: 584818
ucgcuaucauccuuagaaa

SEQ ID NO: 591701 - RNA, 19 nt, Artificial Sequence
  Description of Artificial Sequence: Synthetic oligonucleotide
  Antisense strand to SEQ ID NO: 591700
uuucuaaggaugauagcga

SEQ ID NO: 591702 - RNA, 19 nt, Artificial Sequence
  Description of Artificial Sequence: Synthetic oligonucleotide
  Sense strand starting at position 3239 of SEQ ID NO: 584818
auaagaugaugucaacaug

SEQ ID NO: 591703 - RNA, 19 nt, Artificial Sequence
  Description of Artificial Sequence: Synthetic oligonucleotide
  Antisense strand to SEQ ID NO: 591702
cauguugacaucaucuuau

SEQ ID NO: 591704 - RNA, 19 nt, Artificial Sequence
  Description of Artificial Sequence: Synthetic oligonucleotide
  Sense strand starting at position 3285 of SEQ ID NO: 584818
ggguuugcacucuagauac

SEQ ID NO: 591705 - RNA, 19 nt, Artificial Sequence
  Description of Artificial Sequence: Synthetic oligonucleotide
  Antisense strand to SEQ ID NO: 591704
guaucuagagugcaaaccc

SEQ ID NO: 591706 - RNA, 19 nt, Artificial Sequence
  Description of Artificial Sequence: Synthetic oligonucleotide
  Sense strand starting at position 3341 of SEQ ID NO: 584818
acgugucuccgugaaaccu

SEQ ID NO: 591707 - RNA, 19 nt, Artificial Sequence
  Description of Artificial Sequence: Synthetic oligonucleotide
  Antisense strand to SEQ ID NO: 591706
agguuucacggagacacgu

SEQ ID NO: 591708 - RNA, 19 nt, Artificial Sequence
  Description of Artificial Sequence: Synthetic oligonucleotide
  Sense strand starting at position 3347 of SEQ ID NO: 584818
cuccgugaaaccuguugaa

SEQ ID NO: 591709 - RNA, 19 nt, Artificial Sequence
  Description of Artificial Sequence: Synthetic oligonucleotide
  Antisense strand to SEQ ID NO: 591708
uucaacagguuucacggag

SEQ ID NO: 591710 - RNA, 19 nt, Artificial Sequence
  Description of Artificial Sequence: Synthetic oligonucleotide
  Sense strand starting at position 3363 of SEQ ID NO: 584818
gaaagaagcuauguuguga

SEQ ID NO: 591711 - RNA, 19 nt, Artificial Sequence
  Description of Artificial Sequence: Synthetic oligonucleotide
  Antisense strand to SEQ ID NO: 591710
ucacaacauagcuucuuuc

SEQ ID NO: 591712 - RNA, 19 nt, Artificial Sequence
  Description of Artificial Sequence: Synthetic oligonucleotide
  Sense strand starting at position 3374 of SEQ ID NO: 584818
uguugugagcuagguacau

SEQ ID NO: 591713 - RNA, 19 nt, Artificial Sequence
  Description of Artificial Sequence: Synthetic oligonucleotide
  Antisense strand to SEQ ID NO: 591712
auguaccuagcucacaaca

SEQ ID NO: 591714 - RNA, 19 nt, Artificial Sequence
  Description of Artificial Sequence: Synthetic oligonucleotide
  Sense strand starting at position 3376 of SEQ ID NO: 584818
uugugagcuagguacauaa

SEQ ID NO: 591715 - RNA, 19 nt, Artificial Sequence
  Description of Artificial Sequence: Synthetic oligonucleotide
  Antisense strand to SEQ ID NO: 591714
uuauguaccuagcucacaa

SEQ ID NO: 591716 - RNA, 19 nt, Artificial Sequence
  Description of Artificial Sequence: Synthetic oligonucleotide
  Sense strand starting at position 3777 of SEQ ID NO: 584818
gaaugugguuacucuacuu

SEQ ID NO: 591717 - RNA, 19 nt, Artificial Sequence
  Description of Artificial Sequence: Synthetic oligonucleotide
  Antisense strand to SEQ ID NO: 591716
aaguagaguaaccacauuc

SEQ ID NO: 591718 - RNA, 19 nt, Artificial Sequence
  Description of Artificial Sequence: Synthetic oligonucleotide
  Sense strand starting at position 3782 of SEQ ID NO: 584818
ugguuacucuacuuggaau

SEQ ID NO: 591719 - RNA, 19 nt, Artificial Sequence
  Description of Artificial Sequence: Synthetic oligonucleotide
  Antisense strand to SEQ ID NO: 591718
auuccaaguagaguaacca

SEQ ID NO: 591720 - RNA, 19 nt, Artificial Sequence
  Description of Artificial Sequence: Synthetic oligonucleotide
  Sense strand starting at position 3784 of SEQ ID NO: 584818
guuacucuacuuggaauaa

SEQ ID NO: 591721 - RNA, 19 nt, Artificial Sequence
  Description of Artificial Sequence: Synthetic oligonucleotide
  Antisense strand to SEQ ID NO: 591720
uuauuccaaguagaguaac

SEQ ID NO: 591722 - RNA, 19 nt, Artificial Sequence
  Description of Artificial Sequence: Synthetic oligonucleotide
  Sense strand starting at position 3860 of SEQ ID NO: 584818
ugaagaaucugccuacuaa

SEQ ID NO: 591723 - RNA, 19 nt, Artificial Sequence
  Description of Artificial Sequence: Synthetic oligonucleotide
  Antisense strand to SEQ ID NO: 591722
uuaguaggcagauucuuca

SEQ ID NO: 591724 - RNA, 19 nt, Artificial Sequence
  Description of Artificial Sequence: Synthetic oligonucleotide
  Sense strand starting at position 3892 of SEQ ID NO: 584818
cuaauugugguauaaacau

SEQ ID NO: 591725 - RNA, 19 nt, Artificial Sequence
  Description of Artificial Sequence: Synthetic oligonucleotide
  Antisense strand to SEQ ID NO: 591724
auguuuauaccacaauuag

SEQ ID NO: 591726 - RNA, 19 nt, Artificial Sequence
  Description of Artificial Sequence: Synthetic oligonucleotide
  Sense strand starting at position 3916 of SEQ ID NO: 584818
ggcuuauaauugcuuauaa

SEQ ID NO: 591727 - RNA, 19 nt, Artificial Sequence
  Description of Artificial Sequence: Synthetic oligonucleotide
  Antisense strand to SEQ ID NO: 591726
uuauaagcaauuauaagcc

SEQ ID NO: 591728 - RNA, 19 nt, Artificial Sequence
  Description of Artificial Sequence: Synthetic oligonucleotide
  Sense strand starting at position 2 of SEQ ID NO: 584819
cugguaagauuccuuuaau

SEQ ID NO: 591729 - RNA, 19 nt, Artificial Sequence
  Description of Artificial Sequence: Synthetic oligonucleotide
  Antisense strand to SEQ ID NO: 591728
auuaaaggaaucuuaccag

SEQ ID NO: 591730 - RNA, 19 nt, Artificial Sequence
  Description of Artificial Sequence: Synthetic oligonucleotide
  Sense strand starting at position 3 of SEQ ID NO: 584819
ugguaagauuccuuuaauu

SEQ ID NO: 591731 - RNA, 19 nt, Artificial Sequence
  Description of Artificial Sequence: Synthetic oligonucleotide
  Antisense strand to SEQ ID NO: 591730
aauuaaaggaaucuuacca

SEQ ID NO: 591732 - RNA, 19 nt, Artificial Sequence
  Description of Artificial Sequence: Synthetic oligonucleotide
  Sense strand starting at position 8 of SEQ ID NO: 584819
agauuccuuuaauuacgaa

SEQ ID NO: 591733 - RNA, 19 nt, Artificial Sequence
  Description of Artificial Sequence: Synthetic oligonucleotide
  Antisense strand to SEQ ID NO: 591732
uucguaauuaaaggaaucu

SEQ ID NO: 591734 - RNA, 19 nt, Artificial Sequence
  Description of Artificial Sequence: Synthetic oligonucleotide
  Sense strand starting at position 85 of SEQ ID NO: 584819
gcaguagugggauaaguga

SEQ ID NO: 591735 - RNA, 19 nt, Artificial Sequence
  Description of Artificial Sequence: Synthetic oligonucleotide
  Antisense strand to SEQ ID NO: 591734
ucacuuaucccacuacugc

SEQ ID NO: 591736 - RNA, 19 nt, Artificial Sequence
  Description of Artificial Sequence: Synthetic oligonucleotide
  Sense strand starting at position 375 of SEQ ID NO: 584819
uuuaauuguccuuagacag

SEQ ID NO: 591737 - RNA, 19 nt, Artificial Sequence
  Description of Artificial Sequence: Synthetic oligonucleotide
  Antisense strand to SEQ ID NO: 591736
cugucuaaggacaauuaaa

SEQ ID NO: 591738 - RNA, 19 nt, Artificial Sequence
  Description of Artificial Sequence: Synthetic oligonucleotide
  Sense strand starting at position 851 of SEQ ID NO: 584819
gcuaguuacagugaaguau

SEQ ID NO: 591739 - RNA, 19 nt, Artificial Sequence
  Description of Artificial Sequence: Synthetic oligonucleotide
  Antisense strand to SEQ ID NO: 591738
auacuucacuguaacuagc

SEQ ID NO: 591740 - RNA, 19 nt, Artificial Sequence
  Description of Artificial Sequence: Synthetic oligonucleotide
  Sense strand starting at position 1067 of SEQ ID NO: 584819
uauuucuuacgccggcaaa

SEQ ID NO: 591741 - RNA, 19 nt, Artificial Sequence
  Description of Artificial Sequence: Synthetic oligonucleotide
  Antisense strand to SEQ ID NO: 591740
uuugccggcguaagaaaua

SEQ ID NO: 591742 - RNA, 19 nt, Artificial Sequence
  Description of Artificial Sequence: Synthetic oligonucleotide
  Sense strand starting at position 1102 of SEQ ID NO: 584819
aggccuucgcgacuucauu

SEQ ID NO: 591743 - RNA, 19 nt, Artificial Sequence
  Description of Artificial Sequence: Synthetic oligonucleotide
  Antisense strand to SEQ ID NO: 591742
aaugaagucgcgaaggccu

SEQ ID NO: 591744 - RNA, 19 nt, Artificial Sequence
  Description of Artificial Sequence: Synthetic oligonucleotide
  Sense strand starting at position 1152 of SEQ ID NO: 584819
cagugaguucgcuaaugag

SEQ ID NO: 591745 - RNA, 19 nt, Artificial Sequence
  Description of Artificial Sequence: Synthetic oligonucleotide
  Antisense strand to SEQ ID NO: 591744
cucauuagcgaacucacug

SEQ ID NO: 591746 - RNA, 19 nt, Artificial Sequence
  Description of Artificial Sequence: Synthetic oligonucleotide
  Sense strand starting at position 1601 of SEQ ID NO: 584819
ggcggaaagauggguaaga

SEQ ID NO: 591747 - RNA, 19 nt, Artificial Sequence
  Description of Artificial Sequence: Synthetic oligonucleotide
  Antisense strand to SEQ ID NO: 591746
ucuuacccaucuuuccgcc

SEQ ID NO: 591748 - RNA, 19 nt, Artificial Sequence
  Description of Artificial Sequence: Synthetic oligonucleotide
  Sense strand starting at position 2312 of SEQ ID NO: 584819
aacuuaagaguuggcugaa

SEQ ID NO: 591749 - RNA, 19 nt, Artificial Sequence
  Description of Artificial Sequence: Synthetic oligonucleotide
  Antisense strand to SEQ ID NO: 591748
uucagccaacucuuaaguu

SEQ ID NO: 591750 - RNA, 19 nt, Artificial Sequence
  Description of Artificial Sequence: Synthetic oligonucleotide
  Sense strand starting at position 2313 of SEQ ID NO: 584819
acuuaagaguuggcugaau

SEQ ID NO: 591751 - RNA, 19 nt, Artificial Sequence
  Description of Artificial Sequence: Synthetic oligonucleotide
  Antisense strand to SEQ ID NO: 591750
auucagccaacucuuaagu

SEQ ID NO: 591752 - RNA, 19 nt, Artificial Sequence
  Description of Artificial Sequence: Synthetic oligonucleotide
  Sense strand starting at position 2315 of SEQ ID NO: 584819
uuaagaguuggcugaauuc

SEQ ID NO: 591753 - RNA, 19 nt, Artificial Sequence
  Description of Artificial Sequence: Synthetic oligonucleotide
  Antisense strand to SEQ ID NO: 591752
gaauucagccaacucuuaa

SEQ ID NO: 591754 - RNA, 19 nt, Artificial Sequence
  Description of Artificial Sequence: Synthetic oligonucleotide
  Sense strand starting at position 2365 of SEQ ID NO: 584819
uggguaucuuggguauuau

SEQ ID NO: 591755 - RNA, 19 nt, Artificial Sequence
  Description of Artificial Sequence: Synthetic oligonucleotide
  Antisense strand to SEQ ID NO: 591754
auaauacccaagauaccca

SEQ ID NO: 591756 - RNA, 19 nt, Artificial Sequence
  Description of Artificial Sequence: Synthetic oligonucleotide
  Sense strand starting at position 2366 of SEQ ID NO: 584819
ggguaucuuggguauuaug

SEQ ID NO: 591757 - RNA, 19 nt, Artificial Sequence
  Description of Artificial Sequence: Synthetic oligonucleotide
  Antisense strand to SEQ ID NO: 591756
cauaauacccaagauaccc

SEQ ID NO: 591758 - RNA, 19 nt, Artificial Sequence
  Description of Artificial Sequence: Synthetic oligonucleotide
  Sense strand starting at position 2422 of SEQ ID NO: 584819
gggcuuauggaguaccuau

SEQ ID NO: 591759 - RNA, 19 nt, Artificial Sequence
  Description of Artificial Sequence: Synthetic oligonucleotide
  Antisense strand to SEQ ID NO: 591758
auagguacuccauaagccc

SEQ ID NO: 591760 - RNA, 19 nt, Artificial Sequence
  Description of Artificial Sequence: Synthetic oligonucleotide
  Sense strand starting at position 2716 of SEQ ID NO: 584819
agucaaacucuacggaaga

SEQ ID NO: 591761 - RNA, 19 nt, Artificial Sequence
  Description of Artificial Sequence: Synthetic oligonucleotide
  Antisense strand to SEQ ID NO: 591760
ucuuccguagaguuugacu

SEQ ID NO: 591762 - RNA, 19 nt, Artificial Sequence
  Description of Artificial Sequence: Synthetic oligonucleotide
  Sense strand starting at position 2733 of SEQ ID NO: 584819
gaggauuguaacggaccau

SEQ ID NO: 591763 - RNA, 19 nt, Artificial Sequence
  Description of Artificial Sequence: Synthetic oligonucleotide
  Antisense strand to SEQ ID NO: 591762
augguccguuacaauccuc

SEQ ID NO: 591764 - RNA, 19 nt, Artificial Sequence
  Description of Artificial Sequence: Synthetic oligonucleotide
  Sense strand starting at position 2744 of SEQ ID NO: 584819
cggaccauuucugaauaaa

SEQ ID NO: 591765 - RNA, 19 nt, Artificial Sequence
  Description of Artificial Sequence: Synthetic oligonucleotide
  Antisense strand to SEQ ID NO: 591764
uuuauucagaaaugguccg

SEQ ID NO: 591766 - RNA, 19 nt, Artificial Sequence
  Description of Artificial Sequence: Synthetic oligonucleotide
  Sense strand starting at position 2761 of SEQ ID NO: 584819
aagugaugaucagccacaa

SEQ ID NO: 591767 - RNA, 19 nt, Artificial Sequence
  Description of Artificial Sequence: Synthetic oligonucleotide
  Antisense strand to SEQ ID NO: 591766
uuguggcugaucaucacuu

SEQ ID NO: 591768 - RNA, 19 nt, Artificial Sequence
  Description of Artificial Sequence: Synthetic oligonucleotide
  Sense strand starting at position 2809 of SEQ ID NO: 584819
aucuuugugcgugcuguua

SEQ ID NO: 591769 - RNA, 19 nt, Artificial Sequence
  Description of Artificial Sequence: Synthetic oligonucleotide
  Antisense strand to SEQ ID NO: 591768
uaacagcacgcacaaagau

SEQ ID NO: 591770 - RNA, 19 nt, Artificial Sequence
  Description of Artificial Sequence: Synthetic oligonucleotide
  Sense strand starting at position 2813 of SEQ ID NO: 584819
uugugcgugcuguuauaau

SEQ ID NO: 591771 - RNA, 19 nt, Artificial Sequence
  Description of Artificial Sequence: Synthetic oligonucleotide
  Antisense strand to SEQ ID NO: 591770
auuauaacagcacgcacaa

SEQ ID NO: 591772 - RNA, 19 nt, Artificial Sequence
  Description of Artificial Sequence: Synthetic oligonucleotide
  Sense strand starting at position 3006 of SEQ ID NO: 584819
cugaacaggccuuaaggua

SEQ ID NO: 591773 - RNA, 19 nt, Artificial Sequence
  Description of Artificial Sequence: Synthetic oligonucleotide
  Antisense strand to SEQ ID NO: 591772
uaccuuaaggccuguucag

SEQ ID NO: 591774 - RNA, 19 nt, Artificial Sequence
  Description of Artificial Sequence: Synthetic oligonucleotide
  Sense strand starting at position 3064 of SEQ ID NO: 584819
cuugaaugcuuaucaugga

SEQ ID NO: 591775 - RNA, 19 nt, Artificial Sequence
  Description of Artificial Sequence: Synthetic oligonucleotide
  Antisense strand to SEQ ID NO: 591774
uccaugauaagcauucaag

SEQ ID NO: 591776 - RNA, 19 nt, Artificial Sequence
  Description of Artificial Sequence: Synthetic oligonucleotide
  Sense strand starting at position 3068 of SEQ ID NO: 584819
aaugcuuaucauggaaugu

SEQ ID NO: 591777 - RNA, 19 nt, Artificial Sequence
  Description of Artificial Sequence: Synthetic oligonucleotide
  Antisense strand to SEQ ID NO: 591776
acauuccaugauaagcauu

SEQ ID NO: 591778 - RNA, 19 nt, Artificial Sequence
  Description of Artificial Sequence: Synthetic oligonucleotide
  Sense strand starting at position 3072 of SEQ ID NO: 584819
cuuaucauggaaugugaga

SEQ ID NO: 591779 - RNA, 19 nt, Artificial Sequence
  Description of Artificial Sequence: Synthetic oligonucleotide
  Antisense strand to SEQ ID NO: 591778
ucucacauuccaugauaag

SEQ ID NO: 591780 - RNA, 19 nt, Artificial Sequence
  Description of Artificial Sequence: Synthetic oligonucleotide
  Sense strand starting at position 3143 of SEQ ID NO: 584819
aguguucuugugggaauuu

SEQ ID NO: 591781 - RNA, 19 nt, Artificial Sequence
  Description of Artificial Sequence: Synthetic oligonucleotide
  Antisense strand to SEQ ID NO: 591780
aaauucccacaagaacacu

SEQ ID NO: 591782 - RNA, 19 nt, Artificial Sequence
  Description of Artificial Sequence: Synthetic oligonucleotide
  Sense strand starting at position 3209 of SEQ ID NO: 584819
uguuaauaaaucugaggug

SEQ ID NO: 591783 - RNA, 19 nt, Artificial Sequence
  Description of Artificial Sequence: Synthetic oligonucleotide
  Antisense strand to SEQ ID NO: 591782
caccucagauuuauuaaca

SEQ ID NO: 591784 - RNA, 19 nt, Artificial Sequence
  Description of Artificial Sequence: Synthetic oligonucleotide
  Sense strand starting at position 3214 of SEQ ID NO: 584819
auaaaucugagguggguuu

SEQ ID NO: 591785 - RNA, 19 nt, Artificial Sequence
  Description of Artificial Sequence: Synthetic oligonucleotide
  Antisense strand to SEQ ID NO: 591784
aaacccaccucagauuuau

SEQ ID NO: 591786 - RNA, 19 nt, Artificial Sequence
  Description of Artificial Sequence: Synthetic oligonucleotide
  Sense strand starting at position 3369 of SEQ ID NO: 584819
ugaauaguaugggcuuaca

SEQ ID NO: 591787 - RNA, 19 nt, Artificial Sequence
  Description of Artificial Sequence: Synthetic oligonucleotide
  Antisense strand to SEQ ID NO: 591786
uguaagcccauacuauuca

SEQ ID NO: 591788 - RNA, 19 nt, Artificial Sequence
  Description of Artificial Sequence: Synthetic oligonucleotide
  Sense strand starting at position 3372 of SEQ ID NO: 584819
auaguaugggcuuacaaca

SEQ ID NO: 591789 - RNA, 19 nt, Artificial Sequence
  Description of Artificial Sequence: Synthetic oligonucleotide
  Antisense strand to SEQ ID NO: 591788
uguuguaagcccauacuau

SEQ ID NO: 591790 - RNA, 19 nt, Artificial Sequence
  Description of Artificial Sequence: Synthetic oligonucleotide
  Sense strand starting at position 3442 of SEQ ID NO: 584819
uaaaguacuugauucgaau

SEQ ID NO: 591791 - RNA, 19 nt, Artificial Sequence
  Description of Artificial Sequence: Synthetic oligonucleotide
  Antisense strand to SEQ ID NO: 591790
auucgaaucaaguacuuua

SEQ ID NO: 591792 - RNA, 19 nt, Artificial Sequence
  Description of Artificial Sequence: Synthetic oligonucleotide
  Sense strand starting at position 3504 of SEQ ID NO: 584819
gcuucuuuacuagaguaag

SEQ ID NO: 591793 - RNA, 19 nt, Artificial Sequence
  Description of Artificial Sequence: Synthetic oligonucleotide
  Antisense strand to SEQ ID NO: 591792
cuuacucuaguaaagaagc

SEQ ID NO: 591794 - RNA, 19 nt, Artificial Sequence
  Description of Artificial Sequence: Synthetic oligonucleotide
  Sense strand starting at position 3587 of SEQ ID NO: 584819
cugaaagcauuaguuuaaa

SEQ ID NO: 591795 - RNA, 19 nt, Artificial Sequence
  Description of Artificial Sequence: Synthetic oligonucleotide
  Antisense strand to SEQ ID NO: 591794
uuuaaacuaaugcuuucag

SEQ ID NO: 591796 - RNA, 19 nt, Artificial Sequence
  Description of Artificial Sequence: Synthetic oligonucleotide
  Sense strand starting at position 3609 of SEQ ID NO: 584819
cuguauuacguauaagaaa

SEQ ID NO: 591797 - RNA, 19 nt, Artificial Sequence
  Description of Artificial Sequence: Synthetic oligonucleotide
  Antisense strand to SEQ ID NO: 591796
uuucuuauacguaauacag

SEQ ID NO: 591798 - RNA, 19 nt, Artificial Sequence
  Description of Artificial Sequence: Synthetic oligonucleotide
  Sense strand starting at position 3707 of SEQ ID NO: 584819
uggguugguagugggauua

SEQ ID NO: 591799 - RNA, 19 nt, Artificial Sequence
  Description of Artificial Sequence: Synthetic oligonucleotide
  Antisense strand to SEQ ID NO: 591798
uaaucccacuaccaaccca

SEQ ID NO: 591800 - RNA, 19 nt, Artificial Sequence
  Description of Artificial Sequence: Synthetic oligonucleotide
  Sense strand starting at position 3708 of SEQ ID NO: 584819
ggguugguagugggauuaa

SEQ ID NO: 591801 - RNA, 19 nt, Artificial Sequence
  Description of Artificial Sequence: Synthetic oligonucleotide
  Antisense strand to SEQ ID NO: 591800
uuaaucccacuaccaaccc

SEQ ID NO: 591802 - RNA, 19 nt, Artificial Sequence
  Description of Artificial Sequence: Synthetic oligonucleotide
  Sense strand starting at position 3754 of SEQ ID NO: 584819
gaaagaacaucuguguccu

SEQ ID NO: 591803 - RNA, 19 nt, Artificial Sequence
  Description of Artificial Sequence: Synthetic oligonucleotide
  Antisense strand to SEQ ID NO: 591802
aggacacagauguucuuuc

SEQ ID NO: 591804 - RNA, 19 nt, Artificial Sequence
  Description of Artificial Sequence: Synthetic oligonucleotide
  Sense strand starting at position 3829 of SEQ ID NO: 584819
agauuugcauaguaaagga

SEQ ID NO: 591805 - RNA, 19 nt, Artificial Sequence
  Description of Artificial Sequence: Synthetic oligonucleotide
  Antisense strand to SEQ ID NO: 591804
uccuuuacuaugcaaaucu

SEQ ID NO: 591806 - RNA, 19 nt, Artificial Sequence
  Description of Artificial Sequence: Synthetic oligonucleotide
  Sense strand starting at position 3857 of SEQ ID NO: 584819
ccgaucaugguagauuaca

SEQ ID NO: 591807 - RNA, 19 nt, Artificial Sequence
  Description of Artificial Sequence: Synthetic oligonucleotide
  Antisense strand to SEQ ID NO: 591806
uguaaucuaccaugaucgg

SEQ ID NO: 591808 - RNA, 19 nt, Artificial Sequence
  Description of Artificial Sequence: Synthetic oligonucleotide
  Sense strand starting at position 32 of SEQ ID NO: 584820
aagugugccuugucucuaa

SEQ ID NO: 591809 - RNA, 19 nt, Artificial Sequence
  Description of Artificial Sequence: Synthetic oligonucleotide
  Antisense strand to SEQ ID NO: 591808
uuagagacaaggcacacuu

SEQ ID NO: 591810 - RNA, 19 nt, Artificial Sequence
  Description of Artificial Sequence: Synthetic oligonucleotide
  Sense strand starting at position 44 of SEQ ID NO: 584820
ucucuaagcugaguuggau

SEQ ID NO: 591811 - RNA, 19 nt, Artificial Sequence
  Description of Artificial Sequence: Synthetic oligonucleotide
  Antisense strand to SEQ ID NO: 591810
auccaacucagcuuagaga

SEQ ID NO: 591812 - RNA, 19 nt, Artificial Sequence
  Description of Artificial Sequence: Synthetic oligonucleotide
  Sense strand starting at position 87 of SEQ ID NO: 584820
agcauaugcuuaucuggaa

SEQ ID NO: 591813 - RNA, 19 nt, Artificial Sequence
  Description of Artificial Sequence: Synthetic oligonucleotide
  Antisense strand to SEQ ID NO: 591812
uuccagauaagcauaugcu

SEQ ID NO: 591814 - RNA, 19 nt, Artificial Sequence
  Description of Artificial Sequence: Synthetic oligonucleotide
  Sense strand starting at position 88 of SEQ ID NO: 584820
gcauaugcuuaucuggaaa

SEQ ID NO: 591815 - RNA, 19 nt, Artificial Sequence
  Description of Artificial Sequence: Synthetic oligonucleotide
  Antisense strand to SEQ ID NO: 591814
uuuccagauaagcauaugc

SEQ ID NO: 591816 - RNA, 19 nt, Artificial Sequence
  Description of Artificial Sequence: Synthetic oligonucleotide
  Sense strand starting at position 124 of SEQ ID NO: 584820
ugaguuuaagugggagacu

SEQ ID NO: 591817 - RNA, 19 nt, Artificial Sequence
  Description of Artificial Sequence: Synthetic oligonucleotide
  Antisense strand to SEQ ID NO: 591816
agucucccacuuaaacuca

SEQ ID NO: 591818 - RNA, 19 nt, Artificial Sequence
  Description of Artificial Sequence: Synthetic oligonucleotide
  Sense strand starting at position 125 of SEQ ID NO: 584820
gaguuuaagugggagacua

SEQ ID NO: 591819 - RNA, 19 nt, Artificial Sequence
  Description of Artificial Sequence: Synthetic oligonucleotide
  Antisense strand to SEQ ID NO: 591818
uagucucccacuuaaacuc

SEQ ID NO: 591820 - RNA, 19 nt, Artificial Sequence
  Description of Artificial Sequence: Synthetic oligonucleotide
  Sense strand starting at position 133 of SEQ ID NO: 584820
gugggagacuaagauuaau

SEQ ID NO: 591821 - RNA, 19 nt, Artificial Sequence
  Description of Artificial Sequence: Synthetic oligonucleotide
  Antisense strand to SEQ ID NO: 591820
auuaaucuuagucucccac

SEQ ID NO: 591822 - RNA, 19 nt, Artificial Sequence
  Description of Artificial Sequence: Synthetic oligonucleotide
  Sense strand starting at position 405 of SEQ ID NO: 584820
guaacauguaucgguauag

SEQ ID NO: 591823 - RNA, 19 nt, Artificial Sequence
  Description of Artificial Sequence: Synthetic oligonucleotide
  Antisense strand to SEQ ID NO: 591822
cuauaccgauacauguuac

SEQ ID NO: 591824 - RNA, 19 nt, Artificial Sequence
  Description of Artificial Sequence: Synthetic oligonucleotide
  Sense strand starting at position 406 of SEQ ID NO: 584820
uaacauguaucgguauaga

SEQ ID NO: 591825 - RNA, 19 nt, Artificial Sequence
  Description of Artificial Sequence: Synthetic oligonucleotide
  Antisense strand to SEQ ID NO: 591824
ucuauaccgauacauguua

SEQ ID NO: 591826 - RNA, 19 nt, Artificial Sequence
  Description of Artificial Sequence: Synthetic oligonucleotide
  Sense strand starting at position 610 of SEQ ID NO: 584820
ggaagaucgguugagcuaa

SEQ ID NO: 591827 - RNA, 19 nt, Artificial Sequence
  Description of Artificial Sequence: Synthetic oligonucleotide
  Antisense strand to SEQ ID NO: 591826
uuagcucaaccgaucuucc

SEQ ID NO: 591828 - RNA, 19 nt, Artificial Sequence
  Description of Artificial Sequence: Synthetic oligonucleotide
  Sense strand starting at position 771 of SEQ ID NO: 584820
ccagguguguuugucuuca

SEQ ID NO: 591829 - RNA, 19 nt, Artificial Sequence
  Description of Artificial Sequence: Synthetic oligonucleotide
  Antisense strand to SEQ ID NO: 591828
ugaagacaaacacaccugg

SEQ ID NO: 591830 - RNA, 19 nt, Artificial Sequence
  Description of Artificial Sequence: Synthetic oligonucleotide
  Sense strand starting at position 931 of SEQ ID NO: 584820
acaauacuacgagguuaug

SEQ ID NO: 591831 - RNA, 19 nt, Artificial Sequence
  Description of Artificial Sequence: Synthetic oligonucleotide
  Antisense strand to SEQ ID NO: 591830
cauaaccucguaguauugu

SEQ ID NO: 591832 - RNA, 19 nt, Artificial Sequence
  Description of Artificial Sequence: Synthetic oligonucleotide
  Sense strand starting at position 937 of SEQ ID NO: 584820
cuacgagguuauguacaau

SEQ ID NO: 591833 - RNA, 19 nt, Artificial Sequence
  Description of Artificial Sequence: Synthetic oligonucleotide
  Antisense strand to SEQ ID NO: 591832
auuguacauaaccucguag

SEQ ID NO: 591834 - RNA, 19 nt, Artificial Sequence
  Description of Artificial Sequence: Synthetic oligonucleotide
  Sense strand starting at position 949 of SEQ ID NO: 584820
guacaauaccugcaguuua

SEQ ID NO: 591835 - RNA, 19 nt, Artificial Sequence
  Description of Artificial Sequence: Synthetic oligonucleotide
  Antisense strand to SEQ ID NO: 591834
uaaacugcagguauuguac

SEQ ID NO: 591836 - RNA, 19 nt, Artificial Sequence
  Description of Artificial Sequence: Synthetic oligonucleotide
  Sense strand starting at position 984 of SEQ ID NO: 584820
gguuuaaagaaguggguuu

SEQ ID NO: 591837 - RNA, 19 nt, Artificial Sequence
  Description of Artificial Sequence: Synthetic oligonucleotide
  Antisense strand to SEQ ID NO: 591836
aaacccacuucuuuaaacc

SEQ ID NO: 591838 - RNA, 19 nt, Artificial Sequence
  Description of Artificial Sequence: Synthetic oligonucleotide
  Sense strand starting at position 1104 of SEQ ID NO: 584820
gggaaacauucuugaccag

SEQ ID NO: 591839 - RNA, 19 nt, Artificial Sequence
  Description of Artificial Sequence: Synthetic oligonucleotide
  Antisense strand to SEQ ID NO: 591838
cuggucaagaauguuuccc

SEQ ID NO: 591840 - RNA, 19 nt, Artificial Sequence
  Description of Artificial Sequence: Synthetic oligonucleotide
  Sense strand starting at position 1139 of SEQ ID NO: 584820
ucccucuugggucacaaau

SEQ ID NO: 591841 - RNA, 19 nt, Artificial Sequence
  Description of Artificial Sequence: Synthetic oligonucleotide
  Antisense strand to SEQ ID NO: 591840
auuugugacccaagaggga

SEQ ID NO: 591842 - RNA, 19 nt, Artificial Sequence
  Description of Artificial Sequence: Synthetic oligonucleotide
  Sense strand starting at position 1182 of SEQ ID NO: 584820
ccgagaucuaccggaagca

SEQ ID NO: 591843 - RNA, 19 nt, Artificial Sequence
  Description of Artificial Sequence: Synthetic oligonucleotide
  Antisense strand to SEQ ID NO: 591842
ugcuuccgguagaucucgg

SEQ ID NO: 591844 - RNA, 19 nt, Artificial Sequence
  Description of Artificial Sequence: Synthetic oligonucleotide
  Sense strand starting at position 1183 of SEQ ID NO: 584820
cgagaucuaccggaagcaa

SEQ ID NO: 591845 - RNA, 19 nt, Artificial Sequence
  Description of Artificial Sequence: Synthetic oligonucleotide
  Antisense strand to SEQ ID NO: 591844
uugcuuccgguagaucucg

SEQ ID NO: 591846 - RNA, 19 nt, Artificial Sequence
  Description of Artificial Sequence: Synthetic oligonucleotide
  Sense strand starting at position 1215 of SEQ ID NO: 584820
ccaagauaagcuuggguga

SEQ ID NO: 591847 - RNA, 19 nt, Artificial Sequence
  Description of Artificial Sequence: Synthetic oligonucleotide
  Antisense strand to SEQ ID NO: 591846
ucacccaagcuuaucuugg

SEQ ID NO: 591848 - RNA, 19 nt, Artificial Sequence
  Description of Artificial Sequence: Synthetic oligonucleotide
  Sense strand starting at position 1233 of SEQ ID NO: 584820
agcugaugucuggacccaa

SEQ ID NO: 591849 - RNA, 19 nt, Artificial Sequence
  Description of Artificial Sequence: Synthetic oligonucleotide
  Antisense strand to SEQ ID NO: 591848
uuggguccagacaucagcu

SEQ ID NO: 591850 - RNA, 19 nt, Artificial Sequence
  Description of Artificial Sequence: Synthetic oligonucleotide
  Sense strand starting at position 1518 of SEQ ID NO: 584820
agaagaaaguucuccaccu

SEQ ID NO: 591851 - RNA, 19 nt, Artificial Sequence
  Description of Artificial Sequence: Synthetic oligonucleotide
  Antisense strand to SEQ ID NO: 591850
agguggagaacuuucuucu

SEQ ID NO: 591852 - RNA, 19 nt, Artificial Sequence
  Description of Artificial Sequence: Synthetic oligonucleotide
  Sense strand starting at position 1543 of SEQ ID NO: 584820
cccgaaguuccauauucca

SEQ ID NO: 591853 - RNA, 19 nt, Artificial Sequence
  Description of Artificial Sequence: Synthetic oligonucleotide
  Antisense strand to SEQ ID NO: 591852
uggaauauggaacuucggg

SEQ ID NO: 591854 - RNA, 19 nt, Artificial Sequence
  Description of Artificial Sequence: Synthetic oligonucleotide
  Sense strand starting at position 1551 of SEQ ID NO: 584820
uccauauuccagggaggca

SEQ ID NO: 591855 - RNA, 19 nt, Artificial Sequence
  Description of Artificial Sequence: Synthetic oligonucleotide
  Antisense strand to SEQ ID NO: 591854
ugccucccuggaauaugga

SEQ ID NO: 591856 - RNA, 19 nt, Artificial Sequence
  Description of Artificial Sequence: Synthetic oligonucleotide
  Sense strand starting at position 2225 of SEQ ID NO: 584820
ccuauaguagggugagguu

SEQ ID NO: 591857 - RNA, 19 nt, Artificial Sequence
  Description of Artificial Sequence: Synthetic oligonucleotide
  Antisense strand to SEQ ID NO: 591856
aaccucacccuacuauagg

SEQ ID NO: 591858 - RNA, 19 nt, Artificial Sequence
  Description of Artificial Sequence: Synthetic oligonucleotide
  Sense strand starting at position 2455 of SEQ ID NO: 584820
acagcuugacuauaaguau

SEQ ID NO: 591859 - RNA, 19 nt, Artificial Sequence
  Description of Artificial Sequence: Synthetic oligonucleotide
  Antisense strand to SEQ ID NO: 591858
auacuuauagucaagcugu

SEQ ID NO: 591860 - RNA, 19 nt, Artificial Sequence
  Description of Artificial Sequence: Synthetic oligonucleotide
  Sense strand starting at position 2458 of SEQ ID NO: 584820
gcuugacuauaaguaucuu

SEQ ID NO: 591861 - RNA, 19 nt, Artificial Sequence
  Description of Artificial Sequence: Synthetic oligonucleotide
  Antisense strand to SEQ ID NO: 591860
aagauacuuauagucaagc

SEQ ID NO: 591862 - RNA, 19 nt, Artificial Sequence
  Description of Artificial Sequence: Synthetic oligonucleotide
  Sense strand starting at position 2466 of SEQ ID NO: 584820
auaaguaucuuguuggaau

SEQ ID NO: 591863 - RNA, 19 nt, Artificial Sequence
  Description of Artificial Sequence: Synthetic oligonucleotide
  Antisense strand to SEQ ID NO: 591862
auuccaacaagauacuuau

SEQ ID NO: 591864 - RNA, 19 nt, Artificial Sequence
  Description of Artificial Sequence: Synthetic oligonucleotide
  Sense strand starting at position 2468 of SEQ ID NO: 584820
aaguaucuuguuggaauca

SEQ ID NO: 591865 - RNA, 19 nt, Artificial Sequence
  Description of Artificial Sequence: Synthetic oligonucleotide
  Antisense strand to SEQ ID NO: 591864
ugauuccaacaagauacuu

SEQ ID NO: 591866 - RNA, 19 nt, Artificial Sequence
  Description of Artificial Sequence: Synthetic oligonucleotide
  Sense strand starting at position 2653 of SEQ ID NO: 584820
gaauacauguaagauggau

SEQ ID NO: 591867 - RNA, 19 nt, Artificial Sequence
  Description of Artificial Sequence: Synthetic oligonucleotide
  Antisense strand to SEQ ID NO: 591866
auccaucuuacauguauuc

SEQ ID NO: 591868 - RNA, 19 nt, Artificial Sequence
  Description of Artificial Sequence: Synthetic oligonucleotide
  Sense strand starting at position 2704 of SEQ ID NO: 584820
acagguaucugcucuccaa

SEQ ID NO: 591869 - RNA, 19 nt, Artificial Sequence
  Description of Artificial Sequence: Synthetic oligonucleotide
  Antisense strand to SEQ ID NO: 591868
uuggagagcagauaccugu

SEQ ID NO: 591870 - RNA, 19 nt, Artificial Sequence
  Description of Artificial Sequence: Synthetic oligonucleotide
  Sense strand starting at position 2770 of SEQ ID NO: 584820
ucaaucuuaccugagguuu

SEQ ID NO: 591871 - RNA, 19 nt, Artificial Sequence
  Description of Artificial Sequence: Synthetic oligonucleotide
  Antisense strand to SEQ ID NO: 591870
aaaccucagguaagauuga

SEQ ID NO: 591872 - RNA, 19 nt, Artificial Sequence
  Description of Artificial Sequence: Synthetic oligonucleotide
  Sense strand starting at position 2790 of SEQ ID NO: 584820
gggacaagcuuaucacgaa

SEQ ID NO: 591873 - RNA, 19 nt, Artificial Sequence
  Description of Artificial Sequence: Synthetic oligonucleotide
  Antisense strand to SEQ ID NO: 591872
uucgugauaagcuuguccc

SEQ ID NO: 591874 - RNA, 19 nt, Artificial Sequence
  Description of Artificial Sequence: Synthetic oligonucleotide
  Sense strand starting at position 3199 of SEQ ID NO: 584820
uuaagauguuuguuucccu

SEQ ID NO: 591875 - RNA, 19 nt, Artificial Sequence
  Description of Artificial Sequence: Synthetic oligonucleotide
  Antisense strand to SEQ ID NO: 591874
agggaaacaaacaucuuaa

SEQ ID NO: 591876 - RNA, 19 nt, Artificial Sequence
  Description of Artificial Sequence: Synthetic oligonucleotide
  Sense strand starting at position 3359 of SEQ ID NO: 584820
ugaaaucucucuucugagu

SEQ ID NO: 591877 - RNA, 19 nt, Artificial Sequence
  Description of Artificial Sequence: Synthetic oligonucleotide
  Antisense strand to SEQ ID NO: 591876
acucagaagagagauuuca

SEQ ID NO: 591878 - RNA, 19 nt, Artificial Sequence
  Description of Artificial Sequence: Synthetic oligonucleotide
  Sense strand starting at position 3365 of SEQ ID NO: 584820
cucucuucugaguauccuu

SEQ ID NO: 591879 - RNA, 19 nt, Artificial Sequence
  Description of Artificial Sequence: Synthetic oligonucleotide
  Antisense strand to SEQ ID NO: 591878
aaggauacucagaagagag

SEQ ID NO: 591880 - RNA, 19 nt, Artificial Sequence
  Description of Artificial Sequence: Synthetic oligonucleotide
  Sense strand starting at position 3372 of SEQ ID NO: 584820
cugaguauccuuuggccuu

SEQ ID NO: 591881 - RNA, 19 nt, Artificial Sequence
  Description of Artificial Sequence: Synthetic oligonucleotide
  Antisense strand to SEQ ID NO: 591880
aaggccaaaggauacucag

SEQ ID NO: 591882 - RNA, 19 nt, Artificial Sequence
  Description of Artificial Sequence: Synthetic oligonucleotide
  Sense strand starting at position 3758 of SEQ ID NO: 584820
ccagguuucucuccaggca

SEQ ID NO: 591883 - RNA, 19 nt, Artificial Sequence
  Description of Artificial Sequence: Synthetic oligonucleotide
  Antisense strand to SEQ ID NO: 591882
ugccuggagagaaaccugg

SEQ ID NO: 591884 - RNA, 19 nt, Artificial Sequence
  Description of Artificial Sequence: Synthetic oligonucleotide
  Sense strand starting at position 3777 of SEQ ID NO: 584820
gguuacuaaugaguuccua

SEQ ID NO: 591885 - RNA, 19 nt, Artificial Sequence
  Description of Artificial Sequence: Synthetic oligonucleotide
  Antisense strand to SEQ ID NO: 591884
uaggaacucauuaguaacc

SEQ ID NO: 591886 - RNA, 19 nt, Artificial Sequence
  Description of Artificial Sequence: Synthetic oligonucleotide
  Sense strand starting at position 3781 of SEQ ID NO: 584820
acuaaugaguuccuagaua

SEQ ID NO: 591887 - RNA, 19 nt, Artificial Sequence
  Description of Artificial Sequence: Synthetic oligonucleotide
  Antisense strand to SEQ ID NO: 591886
uaucuaggaacucauuagu

SEQ ID NO: 591888 - RNA, 19 nt, Artificial Sequence
  Description of Artificial Sequence: Synthetic oligonucleotide
  Sense strand starting at position 5 of SEQ ID NO: 584821
aguuacagcuacuuaagaa

SEQ ID NO: 591889 - RNA, 19 nt, Artificial Sequence
  Description of Artificial Sequence: Synthetic oligonucleotide
  Antisense strand to SEQ ID NO: 591888
uucuuaaguagcuguaacu

SEQ ID NO: 591890 - RNA, 19 nt, Artificial Sequence
  Description of Artificial Sequence: Synthetic oligonucleotide
  Sense strand starting at position 299 of SEQ ID NO: 584821
cacaguuugugggugggaa

SEQ ID NO: 591891 - RNA, 19 nt, Artificial Sequence
  Description of Artificial Sequence: Synthetic oligonucleotide
  Antisense strand to SEQ ID NO: 591890
uucccacccacaaacugug

SEQ ID NO: 591892 - RNA, 19 nt, Artificial Sequence
  Description of Artificial Sequence: Synthetic oligonucleotide
  Sense strand starting at position 315 of SEQ ID NO: 584821
gaagguaucaaaugagggu

SEQ ID NO: 591893 - RNA, 19 nt, Artificial Sequence
  Description of Artificial Sequence: Synthetic oligonucleotide
  Antisense strand to SEQ ID NO: 591892
acccucauuugauaccuuc

SEQ ID NO: 591894 - RNA, 19 nt, Artificial Sequence
  Description of Artificial Sequence: Synthetic oligonucleotide
  Sense strand starting at position 505 of SEQ ID NO: 584821
cauuccuuagagugagaag

SEQ ID NO: 591895 - RNA, 19 nt, Artificial Sequence
  Description of Artificial Sequence: Synthetic oligonucleotide
  Antisense strand to SEQ ID NO: 591894
cuucucacucuaaggaaug

SEQ ID NO: 591896 - RNA, 19 nt, Artificial Sequence
  Description of Artificial Sequence: Synthetic oligonucleotide
  Sense strand starting at position 546 of SEQ ID NO: 584821
augcccugaccugacaaau

SEQ ID NO: 591897 - RNA, 19 nt, Artificial Sequence
  Description of Artificial Sequence: Synthetic oligonucleotide
  Antisense strand to SEQ ID NO: 591896
auuugucaggucagggcau

SEQ ID NO: 591898 - RNA, 19 nt, Artificial Sequence
  Description of Artificial Sequence: Synthetic oligonucleotide
  Sense strand starting at position 568 of SEQ ID NO: 584821
accagauagagaugugugu

SEQ ID NO: 591899 - RNA, 19 nt, Artificial Sequence
  Description of Artificial Sequence: Synthetic oligonucleotide
  Antisense strand to SEQ ID NO: 591898
acacacaucucuaucuggu

SEQ ID NO: 591900 - RNA, 19 nt, Artificial Sequence
  Description of Artificial Sequence: Synthetic oligonucleotide
  Sense strand starting at position 765 of SEQ ID NO: 584821
ccaaguagaucagcuauca

SEQ ID NO: 591901 - RNA, 19 nt, Artificial Sequence
  Description of Artificial Sequence: Synthetic oligonucleotide
  Antisense strand to SEQ ID NO: 591900
ugauagcugaucuacuugg

SEQ ID NO: 591902 - RNA, 19 nt, Artificial Sequence
  Description of Artificial Sequence: Synthetic oligonucleotide
  Sense strand starting at position 798 of SEQ ID NO: 584821
cauugcuggcagugagaaa

SEQ ID NO: 591903 - RNA, 19 nt, Artificial Sequence
  Description of Artificial Sequence: Synthetic oligonucleotide
  Antisense strand to SEQ ID NO: 591902
uuucucacugccagcaaug

SEQ ID NO: 591904 - RNA, 19 nt, Artificial Sequence
  Description of Artificial Sequence: Synthetic oligonucleotide
  Sense strand starting at position 799 of SEQ ID NO: 584821
auugcuggcagugagaaau

SEQ ID NO: 591905 - RNA, 19 nt, Artificial Sequence
  Description of Artificial Sequence: Synthetic oligonucleotide
  Antisense strand to SEQ ID NO: 591904
auuucucacugccagcaau

SEQ ID NO: 591906 - RNA, 19 nt, Artificial Sequence
  Description of Artificial Sequence: Synthetic oligonucleotide
  Sense strand starting at position 805 of SEQ ID NO: 584821
ggcagugagaaauguauuc

SEQ ID NO: 591907 - RNA, 19 nt, Artificial Sequence
  Description of Artificial Sequence: Synthetic oligonucleotide
  Antisense strand to SEQ ID NO: 591906
gaauacauuucucacugcc

SEQ ID NO: 591908 - RNA, 19 nt, Artificial Sequence
  Description of Artificial Sequence: Synthetic oligonucleotide
  Sense strand starting at position 950 of SEQ ID NO: 584821
auaaguaugcaaugcacau

SEQ ID NO: 591909 - RNA, 19 nt, Artificial Sequence
  Description of Artificial Sequence: Synthetic oligonucleotide
  Antisense strand to SEQ ID NO: 591908
augugcauugcauacuuau

SEQ ID NO: 591910 - RNA, 19 nt, Artificial Sequence
  Description of Artificial Sequence: Synthetic oligonucleotide
  Sense strand starting at position 972 of SEQ ID NO: 584821
gaaucuagauagggauuua

SEQ ID NO: 591911 - RNA, 19 nt, Artificial Sequence
  Description of Artificial Sequence: Synthetic oligonucleotide
  Antisense strand to SEQ ID NO: 591910
uaaaucccuaucuagauuc

SEQ ID NO: 591912 - RNA, 19 nt, Artificial Sequence
  Description of Artificial Sequence: Synthetic oligonucleotide
  Sense strand starting at position 1035 of SEQ ID NO: 584821
uuuguugcucuguaauuug

SEQ ID NO: 591913 - RNA, 19 nt, Artificial Sequence
  Description of Artificial Sequence: Synthetic oligonucleotide
  Antisense strand to SEQ ID NO: 591912
caaauuacagagcaacaaa

SEQ ID NO: 591914 - RNA, 19 nt, Artificial Sequence
  Description of Artificial Sequence: Synthetic oligonucleotide
  Sense strand starting at position 1038 of SEQ ID NO: 584821
guugcucuguaauuugcua

SEQ ID NO: 591915 - RNA, 19 nt, Artificial Sequence
  Description of Artificial Sequence: Synthetic oligonucleotide
  Antisense strand to SEQ ID NO: 591914
uagcaaauuacagagcaac

SEQ ID NO: 591916 - RNA, 19 nt, Artificial Sequence
  Description of Artificial Sequence: Synthetic oligonucleotide
  Sense strand starting at position 1188 of SEQ ID NO: 584821
ucuccuauacuuuggagaa

SEQ ID NO: 591917 - RNA, 19 nt, Artificial Sequence
  Description of Artificial Sequence: Synthetic oligonucleotide
  Antisense strand to SEQ ID NO: 591916
uucuccaaaguauaggaga

SEQ ID NO: 591918 - RNA, 19 nt, Artificial Sequence
  Description of Artificial Sequence: Synthetic oligonucleotide
  Sense strand starting at position 1200 of SEQ ID NO: 584821
uggagaauuugccaauauc

SEQ ID NO: 591919 - RNA, 19 nt, Artificial Sequence
  Description of Artificial Sequence: Synthetic oligonucleotide
  Antisense strand to SEQ ID NO: 591918
gauauuggcaaauucucca

SEQ ID NO: 591920 - RNA, 19 nt, Artificial Sequence
  Description of Artificial Sequence: Synthetic oligonucleotide
  Sense strand starting at position 1354 of SEQ ID NO: 584821
cgccaucagcuauaaacua

SEQ ID NO: 591921 - RNA, 19 nt, Artificial Sequence
  Description of Artificial Sequence: Synthetic oligonucleotide
  Antisense strand to SEQ ID NO: 591920
uaguuuauagcugauggcg

SEQ ID NO: 591922 - RNA, 19 nt, Artificial Sequence
  Description of Artificial Sequence: Synthetic oligonucleotide
  Sense strand starting at position 1397 of SEQ ID NO: 584821
uuguguugaagagauggua

SEQ ID NO: 591923 - RNA, 19 nt, Artificial Sequence
  Description of Artificial Sequence: Synthetic oligonucleotide
  Antisense strand to SEQ ID NO: 591922
uaccaucucuucaacacaa

SEQ ID NO: 591924 - RNA, 19 nt, Artificial Sequence
  Description of Artificial Sequence: Synthetic oligonucleotide
  Sense strand starting at position 2321 of SEQ ID NO: 584821
gggaaauuacucugucagu

SEQ ID NO: 591925 - RNA, 19 nt, Artificial Sequence
  Description of Artificial Sequence: Synthetic oligonucleotide
  Antisense strand to SEQ ID NO: 591924
acugacagaguaauuuccc

SEQ ID NO: 591926 - RNA, 19 nt, Artificial Sequence
  Description of Artificial Sequence: Synthetic oligonucleotide
  Sense strand starting at position 2322 of SEQ ID NO: 584821
ggaaauuacucugucagua

SEQ ID NO: 591927 - RNA, 19 nt, Artificial Sequence
  Description of Artificial Sequence: Synthetic oligonucleotide
  Antisense strand to SEQ ID NO: 591926
uacugacagaguaauuucc

SEQ ID NO: 591928 - RNA, 19 nt, Artificial Sequence
  Description of Artificial Sequence: Synthetic oligonucleotide
  Sense strand starting at position 2326 of SEQ ID NO: 584821
auuacucugucaguacaaa

SEQ ID NO: 591929 - RNA, 19 nt, Artificial Sequence
  Description of Artificial Sequence: Synthetic oligonucleotide
  Antisense strand to SEQ ID NO: 591928
uuuguacugacagaguaau

SEQ ID NO: 591930 - RNA, 19 nt, Artificial Sequence
  Description of Artificial Sequence: Synthetic oligonucleotide
  Sense strand starting at position 2428 of SEQ ID NO: 584821
ggucaucauuugccuuaca

SEQ ID NO: 591931 - RNA, 19 nt, Artificial Sequence
  Description of Artificial Sequence: Synthetic oligonucleotide
  Antisense strand to SEQ ID NO: 591930
uguaaggcaaaugaugacc

SEQ ID NO: 591932 - RNA, 19 nt, Artificial Sequence
  Description of Artificial Sequence: Synthetic oligonucleotide
  Sense strand starting at position 2594 of SEQ ID NO: 584821
ggguuacugugaucaccac

SEQ ID NO: 591933 - RNA, 19 nt, Artificial Sequence
  Description of Artificial Sequence: Synthetic oligonucleotide
  Antisense strand to SEQ ID NO: 591932
guggugaucacaguaaccc

SEQ ID NO: 591934 - RNA, 19 nt, Artificial Sequence
  Description of Artificial Sequence: Synthetic oligonucleotide
  Sense strand starting at position 2647 of SEQ ID NO: 584821
ugacucaauccguacuuua

SEQ ID NO: 591935 - RNA, 19 nt, Artificial Sequence
  Description of Artificial Sequence: Synthetic oligonucleotide
  Antisense strand to SEQ ID NO: 591934
uaaaguacggauugaguca

SEQ ID NO: 591936 - RNA, 19 nt, Artificial Sequence
  Description of Artificial Sequence: Synthetic oligonucleotide
  Sense strand starting at position 2673 of SEQ ID NO: 584821
ucaucaucuggccacugaa

SEQ ID NO: 591937 - RNA, 19 nt, Artificial Sequence
  Description of Artificial Sequence: Synthetic oligonucleotide
  Antisense strand to SEQ ID NO: 591936
uucaguggccagaugauga

SEQ ID NO: 591938 - RNA, 19 nt, Artificial Sequence
  Description of Artificial Sequence: Synthetic oligonucleotide
  Sense strand starting at position 2722 of SEQ ID NO: 584821
gccagaagauaaguguaaa

SEQ ID NO: 591939 - RNA, 19 nt, Artificial Sequence
  Description of Artificial Sequence: Synthetic oligonucleotide
  Antisense strand to SEQ ID NO: 591938
uuuacacuuaucuucuggc

SEQ ID NO: 591940 - RNA, 19 nt, Artificial Sequence
  Description of Artificial Sequence: Synthetic oligonucleotide
  Sense strand starting at position 2733 of SEQ ID NO: 584821
aguguaaacugagugggaa

SEQ ID NO: 591941 - RNA, 19 nt, Artificial Sequence
  Description of Artificial Sequence: Synthetic oligonucleotide
  Antisense strand to SEQ ID NO: 591940
uucccacucaguuuacacu

SEQ ID NO: 591942 - RNA, 19 nt, Artificial Sequence
  Description of Artificial Sequence: Synthetic oligonucleotide
  Sense strand starting at position 2903 of SEQ ID NO: 584821
aggacuauuugcgaaagaa

SEQ ID NO: 591943 - RNA, 19 nt, Artificial Sequence
  Description of Artificial Sequence: Synthetic oligonucleotide
  Antisense strand to SEQ ID NO: 591942
uucuuucgcaaauaguccu

SEQ ID NO: 591944 - RNA, 19 nt, Artificial Sequence
  Description of Artificial Sequence: Synthetic oligonucleotide
  Sense strand starting at position 3092 of SEQ ID NO: 584821
aggcauagaggcuguuaca

SEQ ID NO: 591945 - RNA, 19 nt, Artificial Sequence
  Description of Artificial Sequence: Synthetic oligonucleotide
  Antisense strand to SEQ ID NO: 591944
uguaacagccucuaugccu

SEQ ID NO: 591946 - RNA, 19 nt, Artificial Sequence
  Description of Artificial Sequence: Synthetic oligonucleotide
  Sense strand starting at position 3101 of SEQ ID NO: 584821
ggcuguuacagugaaagcu

SEQ ID NO: 591947 - RNA, 19 nt, Artificial Sequence
  Description of Artificial Sequence: Synthetic oligonucleotide
  Antisense strand to SEQ ID NO: 591946
agcuuucacuguaacagcc

SEQ ID NO: 591948 - RNA, 19 nt, Artificial Sequence
  Description of Artificial Sequence: Synthetic oligonucleotide
  Sense strand starting at position 3110 of SEQ ID NO: 584821
agugaaagcugagugacau

SEQ ID NO: 591949 - RNA, 19 nt, Artificial Sequence
  Description of Artificial Sequence: Synthetic oligonucleotide
  Antisense strand to SEQ ID NO: 591948
augucacucagcuuucacu

SEQ ID NO: 591950 - RNA, 19 nt, Artificial Sequence
  Description of Artificial Sequence: Synthetic oligonucleotide
  Sense strand starting at position 3111 of SEQ ID NO: 584821
gugaaagcugagugacauc

SEQ ID NO: 591951 - RNA, 19 nt, Artificial Sequence
  Description of Artificial Sequence: Synthetic oligonucleotide
  Antisense strand to SEQ ID NO: 591950
gaugucacucagcuuucac

SEQ ID NO: 591952 - RNA, 19 nt, Artificial Sequence
  Description of Artificial Sequence: Synthetic oligonucleotide
  Sense strand starting at position 3140 of SEQ ID NO: 584821
ucaggaaaccugugacaua

SEQ ID NO: 591953 - RNA, 19 nt, Artificial Sequence
  Description of Artificial Sequence: Synthetic oligonucleotide
  Antisense strand to SEQ ID NO: 591952
uaugucacagguuuccuga

SEQ ID NO: 591954 - RNA, 19 nt, Artificial Sequence
  Description of Artificial Sequence: Synthetic oligonucleotide
  Sense strand starting at position 3209 of SEQ ID NO: 584821
agcacauaucaccgaauaa

SEQ ID NO: 591955 - RNA, 19 nt, Artificial Sequence
  Description of Artificial Sequence: Synthetic oligonucleotide
  Antisense strand to SEQ ID NO: 591954
uuauucggugauaugugcu

SEQ ID NO: 591956 - RNA, 19 nt, Artificial Sequence
  Description of Artificial Sequence: Synthetic oligonucleotide
  Sense strand starting at position 3219 of SEQ ID NO: 584821
accgaauaaagaugugacu

SEQ ID NO: 591957 - RNA, 19 nt, Artificial Sequence
  Description of Artificial Sequence: Synthetic oligonucleotide
  Antisense strand to SEQ ID NO: 591956
agucacaucuuuauucggu

SEQ ID NO: 591958 - RNA, 19 nt, Artificial Sequence
  Description of Artificial Sequence: Synthetic oligonucleotide
  Sense strand starting at position 3221 of SEQ ID NO: 584821
cgaauaaagaugugacuga

SEQ ID NO: 591959 - RNA, 19 nt, Artificial Sequence
  Description of Artificial Sequence: Synthetic oligonucleotide
  Antisense strand to SEQ ID NO: 591958
ucagucacaucuuuauucg

SEQ ID NO: 591960 - RNA, 19 nt, Artificial Sequence
  Description of Artificial Sequence: Synthetic oligonucleotide
  Sense strand starting at position 3422 of SEQ ID NO: 584821
ccugccuugcccuagacaa

SEQ ID NO: 591961 - RNA, 19 nt, Artificial Sequence
  Description of Artificial Sequence: Synthetic oligonucleotide
  Antisense strand to SEQ ID NO: 591960
uugucuagggcaaggcagg

SEQ ID NO: 591962 - RNA, 19 nt, Artificial Sequence
  Description of Artificial Sequence: Synthetic oligonucleotide
  Sense strand starting at position 3443 of SEQ ID NO: 584821
ugaccauucccucaucugu

SEQ ID NO: 591963 - RNA, 19 nt, Artificial Sequence
  Description of Artificial Sequence: Synthetic oligonucleotide
  Antisense strand to SEQ ID NO: 591962
acagaugagggaaugguca

SEQ ID NO: 591964 - RNA, 19 nt, Artificial Sequence
  Description of Artificial Sequence: Synthetic oligonucleotide
  Sense strand starting at position 3892 of SEQ ID NO: 584821
ugaauuuggucauaaaggu

SEQ ID NO: 591965 - RNA, 19 nt, Artificial Sequence
  Description of Artificial Sequence: Synthetic oligonucleotide
  Antisense strand to SEQ ID NO: 591964
accuuuaugaccaaauuca

SEQ ID NO: 591966 - RNA, 19 nt, Artificial Sequence
  Description of Artificial Sequence: Synthetic oligonucleotide
  Sense strand starting at position 3925 of SEQ ID NO: 584821
auagaauuagcgcacucau

SEQ ID NO: 591967 - RNA, 19 nt, Artificial Sequence
  Description of Artificial Sequence: Synthetic oligonucleotide
  Antisense strand to SEQ ID NO: 591966
augagugcgcuaauucuau

SEQ ID NO: 591968 - RNA, 19 nt, Artificial Sequence
  Description of Artificial Sequence: Synthetic oligonucleotide
  Sense strand starting at position 315 of SEQ ID NO: 584822
ugguauaaauacgcuagaa

SEQ ID NO: 591969 - RNA, 19 nt, Artificial Sequence
  Description of Artificial Sequence: Synthetic oligonucleotide
  Antisense strand to SEQ ID NO: 591968
uucuagcguauuuauacca

SEQ ID NO: 591970 - RNA, 19 nt, Artificial Sequence
  Description of Artificial Sequence: Synthetic oligonucleotide
  Sense strand starting at position 317 of SEQ ID NO: 584822
guauaaauacgcuagaaau

SEQ ID NO: 591971 - RNA, 19 nt, Artificial Sequence
  Description of Artificial Sequence: Synthetic oligonucleotide
  Antisense strand to SEQ ID NO: 591970
auuucuagcguauuuauac

SEQ ID NO: 591972 - RNA, 19 nt, Artificial Sequence
  Description of Artificial Sequence: Synthetic oligonucleotide
  Sense strand starting at position 657 of SEQ ID NO: 584822
gaaagugcuauggguagau

SEQ ID NO: 591973 - RNA, 19 nt, Artificial Sequence
  Description of Artificial Sequence: Synthetic oligonucleotide
  Antisense strand to SEQ ID NO: 591972
aucuacccauagcacuuuc

SEQ ID NO: 591974 - RNA, 19 nt, Artificial Sequence
  Description of Artificial Sequence: Synthetic oligonucleotide
  Sense strand starting at position 659 of SEQ ID NO: 584822
aagugcuauggguagauca

SEQ ID NO: 591975 - RNA, 19 nt, Artificial Sequence
  Description of Artificial Sequence: Synthetic oligonucleotide
  Antisense strand to SEQ ID NO: 591974
ugaucuacccauagcacuu

SEQ ID NO: 591976 - RNA, 19 nt, Artificial Sequence
  Description of Artificial Sequence: Synthetic oligonucleotide
  Sense strand starting at position 661 of SEQ ID NO: 584822
gugcuauggguagaucaca

SEQ ID NO: 591977 - RNA, 19 nt, Artificial Sequence
  Description of Artificial Sequence: Synthetic oligonucleotide
  Antisense strand to SEQ ID NO: 591976
ugugaucuacccauagcac

SEQ ID NO: 591978 - RNA, 19 nt, Artificial Sequence
  Description of Artificial Sequence: Synthetic oligonucleotide
  Sense strand starting at position 675 of SEQ ID NO: 584822
ucacacaagcucugaguua

SEQ ID NO: 591979 - RNA, 19 nt, Artificial Sequence
  Description of Artificial Sequence: Synthetic oligonucleotide
  Antisense strand to SEQ ID NO: 591978
uaacucagagcuuguguga

SEQ ID NO: 591980 - RNA, 19 nt, Artificial Sequence
  Description of Artificial Sequence: Synthetic oligonucleotide
  Sense strand starting at position 1056 of SEQ ID NO: 584822
cuucuagaaggcuguaaag

SEQ ID NO: 591981 - RNA, 19 nt, Artificial Sequence
  Description of Artificial Sequence: Synthetic oligonucleotide
  Antisense strand to SEQ ID NO: 591980
cuuuacagccuucuagaag

SEQ ID NO: 591982 - RNA, 19 nt, Artificial Sequence
  Description of Artificial Sequence: Synthetic oligonucleotide
  Sense strand starting at position 1119 of SEQ ID NO: 584822
uuacuuugccaguguauuu

SEQ ID NO: 591983 - RNA, 19 nt, Artificial Sequence
  Description of Artificial Sequence: Synthetic oligonucleotide
  Antisense strand to SEQ ID NO: 591982
aaauacacuggcaaaguaa

SEQ ID NO: 591984 - RNA, 19 nt, Artificial Sequence
  Description of Artificial Sequence: Synthetic oligonucleotide
  Sense strand starting at position 1124 of SEQ ID NO: 584822
uugccaguguauuuaaacu

SEQ ID NO: 591985 - RNA, 19 nt, Artificial Sequence
  Description of Artificial Sequence: Synthetic oligonucleotide
  Antisense strand to SEQ ID NO: 591984
aguuuaaauacacuggcaa

SEQ ID NO: 591986 - RNA, 19 nt, Artificial Sequence
  Description of Artificial Sequence: Synthetic oligonucleotide
  Sense strand starting at position 1358 of SEQ ID NO: 584822
caaugagacucugcacagu

SEQ ID NO: 591987 - RNA, 19 nt, Artificial Sequence
  Description of Artificial Sequence: Synthetic oligonucleotide
  Antisense strand to SEQ ID NO: 591986
acugugcagagucucauug

SEQ ID NO: 591988 - RNA, 19 nt, Artificial Sequence
  Description of Artificial Sequence: Synthetic oligonucleotide
  Sense strand starting at position 1540 of SEQ ID NO: 584822
gucaaaugcuaauuacaag

SEQ ID NO: 591989 - RNA, 19 nt, Artificial Sequence
  Description of Artificial Sequence: Synthetic oligonucleotide
  Antisense strand to SEQ ID NO: 591988
cuuguaauuagcauuugac

SEQ ID NO: 591990 - RNA, 19 nt, Artificial Sequence
  Description of Artificial Sequence: Synthetic oligonucleotide
  Sense strand starting at position 1558 of SEQ ID NO: 584822
guugcuccacuugaaagau

SEQ ID NO: 591991 - RNA, 19 nt, Artificial Sequence
  Description of Artificial Sequence: Synthetic oligonucleotide
  Antisense strand to SEQ ID NO: 591990
aucuuucaaguggagcaac

SEQ ID NO: 591992 - RNA, 19 nt, Artificial Sequence
  Description of Artificial Sequence: Synthetic oligonucleotide
  Sense strand starting at position 1634 of SEQ ID NO: 584822
aaagccaguucuuugaaag

SEQ ID NO: 591993 - RNA, 19 nt, Artificial Sequence
  Description of Artificial Sequence: Synthetic oligonucleotide
  Antisense strand to SEQ ID NO: 591992
cuuucaaagaacuggcuuu

SEQ ID NO: 591994 - RNA, 19 nt, Artificial Sequence
  Description of Artificial Sequence: Synthetic oligonucleotide
  Sense strand starting at position 1644 of SEQ ID NO: 584822
cuuugaaagcugugaacca

SEQ ID NO: 591995 - RNA, 19 nt, Artificial Sequence
  Description of Artificial Sequence: Synthetic oligonucleotide
  Antisense strand to SEQ ID NO: 591994
ugguucacagcuuucaaag

SEQ ID NO: 591996 - RNA, 19 nt, Artificial Sequence
  Description of Artificial Sequence: Synthetic oligonucleotide
  Sense strand starting at position 2233 of SEQ ID NO: 584822
ggacauccuccggaggagu

SEQ ID NO: 591997 - RNA, 19 nt, Artificial Sequence
  Description of Artificial Sequence: Synthetic oligonucleotide
  Antisense strand to SEQ ID NO: 591996
acuccuccggaggaugucc

SEQ ID NO: 591998 - RNA, 19 nt, Artificial Sequence
  Description of Artificial Sequence: Synthetic oligonucleotide
  Sense strand starting at position 2235 of SEQ ID NO: 584822
acauccuccggaggaguau

SEQ ID NO: 591999 - RNA, 19 nt, Artificial Sequence
  Description of Artificial Sequence: Synthetic oligonucleotide
  Antisense strand to SEQ ID NO: 591998
auacuccuccggaggaugu

SEQ ID NO: 592000 - RNA, 19 nt, Artificial Sequence
  Description of Artificial Sequence: Synthetic oligonucleotide
  Sense strand starting at position 2771 of SEQ ID NO: 584822
agcagugaucuggagggua

SEQ ID NO: 592001 - RNA, 19 nt, Artificial Sequence
  Description of Artificial Sequence: Synthetic oligonucleotide
  Antisense strand to SEQ ID NO: 592000
uacccuccagaucacugcu

SEQ ID NO: 592002 - RNA, 19 nt, Artificial Sequence
  Description of Artificial Sequence: Synthetic oligonucleotide
  Sense strand starting at position 2773 of SEQ ID NO: 584822
cagugaucuggaggguagu

SEQ ID NO: 592003 - RNA, 19 nt, Artificial Sequence
  Description of Artificial Sequence: Synthetic oligonucleotide
  Antisense strand to SEQ ID NO: 592002
acuacccuccagaucacug

SEQ ID NO: 592004 - RNA, 19 nt, Artificial Sequence
  Description of Artificial Sequence: Synthetic oligonucleotide
  Sense strand starting at position 2774 of SEQ ID NO: 584822
agugaucuggaggguagua

SEQ ID NO: 592005 - RNA, 19 nt, Artificial Sequence
  Description of Artificial Sequence: Synthetic oligonucleotide
  Antisense strand to SEQ ID NO: 592004
uacuacccuccagaucacu

SEQ ID NO: 592006 - RNA, 19 nt, Artificial Sequence
  Description of Artificial Sequence: Synthetic oligonucleotide
  Sense strand starting at position 3110 of SEQ ID NO: 584822
ggaagaugcagccauccuu

SEQ ID NO: 592007 - RNA, 19 nt, Artificial Sequence
  Description of Artificial Sequence: Synthetic oligonucleotide
  Antisense strand to SEQ ID NO: 592006
aaggauggcugcaucuucc

SEQ ID NO: 592008 - RNA, 19 nt, Artificial Sequence
  Description of Artificial Sequence: Synthetic oligonucleotide
  Sense strand starting at position 3128 of SEQ ID NO: 584822
uuacauuuguucccaggca

SEQ ID NO: 592009 - RNA, 19 nt, Artificial Sequence
  Description of Artificial Sequence: Synthetic oligonucleotide
  Antisense strand to SEQ ID NO: 592008
ugccugggaacaaauguaa

SEQ ID NO: 592010 - RNA, 19 nt, Artificial Sequence
  Description of Artificial Sequence: Synthetic oligonucleotide
  Sense strand starting at position 3188 of SEQ ID NO: 584822
ccaugauacggcuggaaag

SEQ ID NO: 592011 - RNA, 19 nt, Artificial Sequence
  Description of Artificial Sequence: Synthetic oligonucleotide
  Antisense strand to SEQ ID NO: 592010
cuuuccagccguaucaugg

SEQ ID NO: 592012 - RNA, 19 nt, Artificial Sequence
  Description of Artificial Sequence: Synthetic oligonucleotide
  Sense strand starting at position 3223 of SEQ ID NO: 584822
guuugaacucguucaccgu

SEQ ID NO: 592013 - RNA, 19 nt, Artificial Sequence
  Description of Artificial Sequence: Synthetic oligonucleotide
  Antisense strand to SEQ ID NO: 592012
acggugaacgaguucaaac

SEQ ID NO: 592014 - RNA, 19 nt, Artificial Sequence
  Description of Artificial Sequence: Synthetic oligonucleotide
  Sense strand starting at position 3331 of SEQ ID NO: 584822
aggacugugguggguauua

SEQ ID NO: 592015 - RNA, 19 nt, Artificial Sequence
  Description of Artificial Sequence: Synthetic oligonucleotide
  Antisense strand to SEQ ID NO: 592014
uaauacccaccacaguccu

SEQ ID NO: 592016 - RNA, 19 nt, Artificial Sequence
  Description of Artificial Sequence: Synthetic oligonucleotide
  Sense strand starting at position 3333 of SEQ ID NO: 584822
gacugugguggguauuaaa

SEQ ID NO: 592017 - RNA, 19 nt, Artificial Sequence
  Description of Artificial Sequence: Synthetic oligonucleotide
  Antisense strand to SEQ ID NO: 592016
uuuaauacccaccacaguc

SEQ ID NO: 592018 - RNA, 19 nt, Artificial Sequence
  Description of Artificial Sequence: Synthetic oligonucleotide
  Sense strand starting at position 3342 of SEQ ID NO: 584822
ggguauuaaagaggguauu

SEQ ID NO: 592019 - RNA, 19 nt, Artificial Sequence
  Description of Artificial Sequence: Synthetic oligonucleotide
  Antisense strand to SEQ ID NO: 592018
aauacccucuuuaauaccc

SEQ ID NO: 592020 - RNA, 19 nt, Artificial Sequence
  Description of Artificial Sequence: Synthetic oligonucleotide
  Sense strand starting at position 3368 of SEQ ID NO: 584822
gugaaaguauggcccagau

SEQ ID NO: 592021 - RNA, 19 nt, Artificial Sequence
  Description of Artificial Sequence: Synthetic oligonucleotide
  Antisense strand to SEQ ID NO: 592020
aucugggccauacuuucac

SEQ ID NO: 592022 - RNA, 19 nt, Artificial Sequence
  Description of Artificial Sequence: Synthetic oligonucleotide
  Sense strand starting at position 3370 of SEQ ID NO: 584822
gaaaguauggcccagaugu

SEQ ID NO: 592023 - RNA, 19 nt, Artificial Sequence
  Description of Artificial Sequence: Synthetic oligonucleotide
  Antisense strand to SEQ ID NO: 592022
acaucugggccauacuuuc

SEQ ID NO: 592024 - RNA, 19 nt, Artificial Sequence
  Description of Artificial Sequence: Synthetic oligonucleotide
  Sense strand starting at position 3372 of SEQ ID NO: 584822
aaguauggcccagauguga

SEQ ID NO: 592025 - RNA, 19 nt, Artificial Sequence
  Description of Artificial Sequence: Synthetic oligonucleotide
  Antisense strand to SEQ ID NO: 592024
ucacaucugggccauacuu

SEQ ID NO: 592026 - RNA, 19 nt, Artificial Sequence
  Description of Artificial Sequence: Synthetic oligonucleotide
  Sense strand starting at position 3380 of SEQ ID NO: 584822
cccagaugugaauacugua

SEQ ID NO: 592027 - RNA, 19 nt, Artificial Sequence
  Description of Artificial Sequence: Synthetic oligonucleotide
  Antisense strand to SEQ ID NO: 592026
uacaguauucacaucuggg

SEQ ID NO: 592028 - RNA, 19 nt, Artificial Sequence
  Description of Artificial Sequence: Synthetic oligonucleotide
  Sense strand starting at position 3385 of SEQ ID NO: 584822
augugaauacuguaacuuc

SEQ ID NO: 592029 - RNA, 19 nt, Artificial Sequence
  Description of Artificial Sequence: Synthetic oligonucleotide
  Antisense strand to SEQ ID NO: 592028
gaaguuacaguauucacau

SEQ ID NO: 592030 - RNA, 19 nt, Artificial Sequence
  Description of Artificial Sequence: Synthetic oligonucleotide
  Sense strand starting at position 3532 of SEQ ID NO: 584822
ugcucacugggucauuaga

SEQ ID NO: 592031 - RNA, 19 nt, Artificial Sequence
  Description of Artificial Sequence: Synthetic oligonucleotide
  Antisense strand to SEQ ID NO: 592030
ucuaaugacccagugagca

SEQ ID NO: 592032 - RNA, 19 nt, Artificial Sequence
  Description of Artificial Sequence: Synthetic oligonucleotide
  Sense strand starting at position 3534 of SEQ ID NO: 584822
cucacugggucauuagaaa

SEQ ID NO: 592033 - RNA, 19 nt, Artificial Sequence
  Description of Artificial Sequence: Synthetic oligonucleotide
  Antisense strand to SEQ ID NO: 592032
uuucuaaugacccagugag

SEQ ID NO: 592034 - RNA, 19 nt, Artificial Sequence
  Description of Artificial Sequence: Synthetic oligonucleotide
  Sense strand starting at position 3569 of SEQ ID NO: 584822
aagggucugcuguaaagca

SEQ ID NO: 592035 - RNA, 19 nt, Artificial Sequence
  Description of Artificial Sequence: Synthetic oligonucleotide
  Antisense strand to SEQ ID NO: 592034
ugcuuuacagcagacccuu

SEQ ID NO: 592036 - RNA, 19 nt, Artificial Sequence
  Description of Artificial Sequence: Synthetic oligonucleotide
  Sense strand starting at position 3603 of SEQ ID NO: 584822
gucugagaucccugggaua

SEQ ID NO: 592037 - RNA, 19 nt, Artificial Sequence
  Description of Artificial Sequence: Synthetic oligonucleotide
  Antisense strand to SEQ ID NO: 592036
uaucccagggaucucagac

SEQ ID NO: 592038 - RNA, 19 nt, Artificial Sequence
  Description of Artificial Sequence: Synthetic oligonucleotide
  Sense strand starting at position 3750 of SEQ ID NO: 584822
uuaucuuucccagaccguu

SEQ ID NO: 592039 - RNA, 19 nt, Artificial Sequence
  Description of Artificial Sequence: Synthetic oligonucleotide
  Antisense strand to SEQ ID NO: 592038
aacggucugggaaagauaa

SEQ ID NO: 592040 - RNA, 19 nt, Artificial Sequence
  Description of Artificial Sequence: Synthetic oligonucleotide
  Sense strand starting at position 3764 of SEQ ID NO: 584822
ccguuacacuauuugaagu

SEQ ID NO: 592041 - RNA, 19 nt, Artificial Sequence
  Description of Artificial Sequence: Synthetic oligonucleotide
  Antisense strand to SEQ ID NO: 592040
acuucaaauaguguaacgg

SEQ ID NO: 592042 - RNA, 19 nt, Artificial Sequence
  Description of Artificial Sequence: Synthetic oligonucleotide
  Sense strand starting at position 3918 of SEQ ID NO: 584822
aauagaguauuagccauga

SEQ ID NO: 592043 - RNA, 19 nt, Artificial Sequence
  Description of Artificial Sequence: Synthetic oligonucleotide
  Antisense strand to SEQ ID NO: 592042
ucauggcuaauacucuauu

SEQ ID NO: 592044 - RNA, 19 nt, Artificial Sequence
  Description of Artificial Sequence: Synthetic oligonucleotide
  Sense strand starting at position 3922 of SEQ ID NO: 584822
gaguauuagccaugacuua

SEQ ID NO: 592045 - RNA, 19 nt, Artificial Sequence
  Description of Artificial Sequence: Synthetic oligonucleotide
  Antisense strand to SEQ ID NO: 592044
uaagucauggcuaauacuc

SEQ ID NO: 592046 - RNA, 19 nt, Artificial Sequence
  Description of Artificial Sequence: Synthetic oligonucleotide
  Sense strand starting at position 3923 of SEQ ID NO: 584822
aguauuagccaugacuuau

SEQ ID NO: 592047 - RNA, 19 nt, Artificial Sequence
  Description of Artificial Sequence: Synthetic oligonucleotide
  Antisense strand to SEQ ID NO: 592046
auaagucauggcuaauacu

SEQ ID NO: 592048 - RNA, 19 nt, Artificial Sequence
  Description of Artificial Sequence: Synthetic oligonucleotide
  Sense strand starting at position 55 of SEQ ID NO: 584823
ccacacucugaguagcaau

SEQ ID NO: 592049 - RNA, 19 nt, Artificial Sequence
  Description of Artificial Sequence: Synthetic oligonucleotide
  Antisense strand to SEQ ID NO: 592048
auugcuacucagagugugg

SEQ ID NO: 592050 - RNA, 19 nt, Artificial Sequence
  Description of Artificial Sequence: Synthetic oligonucleotide
  Sense strand starting at position 281 of SEQ ID NO: 584823
guagaugcucuguacauac

SEQ ID NO: 592051 - RNA, 19 nt, Artificial Sequence
  Description of Artificial Sequence: Synthetic oligonucleotide
  Antisense strand to SEQ ID NO: 592050
guauguacagagcaucuac

SEQ ID NO: 592052 - RNA, 19 nt, Artificial Sequence
  Description of Artificial Sequence: Synthetic oligonucleotide
  Sense strand starting at position 283 of SEQ ID NO: 584823
agaugcucuguacauacua

SEQ ID NO: 592053 - RNA, 19 nt, Artificial Sequence
  Description of Artificial Sequence: Synthetic oligonucleotide
  Antisense strand to SEQ ID NO: 592052
uaguauguacagagcaucu

SEQ ID NO: 592054 - RNA, 19 nt, Artificial Sequence
  Description of Artificial Sequence: Synthetic oligonucleotide
  Sense strand starting at position 375 of SEQ ID NO: 584823
uggaguguuugaucaauga

SEQ ID NO: 592055 - RNA, 19 nt, Artificial Sequence
  Description of Artificial Sequence: Synthetic oligonucleotide
  Antisense strand to SEQ ID NO: 592054
ucauugaucaaacacucca

SEQ ID NO: 592056 - RNA, 19 nt, Artificial Sequence
  Description of Artificial Sequence: Synthetic oligonucleotide
  Sense strand starting at position 379 of SEQ ID NO: 584823
guguuugaucaaugauaga

SEQ ID NO: 592057 - RNA, 19 nt, Artificial Sequence
  Description of Artificial Sequence: Synthetic oligonucleotide
  Antisense strand to SEQ ID NO: 592056
ucuaucauugaucaaacac

SEQ ID NO: 592058 - RNA, 19 nt, Artificial Sequence
  Description of Artificial Sequence: Synthetic oligonucleotide
  Sense strand starting at position 417 of SEQ ID NO: 584823
gaguguuucuaaucugagg

SEQ ID NO: 592059 - RNA, 19 nt, Artificial Sequence
  Description of Artificial Sequence: Synthetic oligonucleotide
  Antisense strand to SEQ ID NO: 592058
ccucagauuagaaacacuc

SEQ ID NO: 592060 - RNA, 19 nt, Artificial Sequence
  Description of Artificial Sequence: Synthetic oligonucleotide
  Sense strand starting at position 568 of SEQ ID NO: 584823
cauaacuuuccauggguga

SEQ ID NO: 592061 - RNA, 19 nt, Artificial Sequence
  Description of Artificial Sequence: Synthetic oligonucleotide
  Antisense strand to SEQ ID NO: 592060
ucacccauggaaaguuaug

SEQ ID NO: 592062 - RNA, 19 nt, Artificial Sequence
  Description of Artificial Sequence: Synthetic oligonucleotide
  Sense strand starting at position 601 of SEQ ID NO: 584823
ggaagcauuaggcagcaaa

SEQ ID NO: 592063 - RNA, 19 nt, Artificial Sequence
  Description of Artificial Sequence: Synthetic oligonucleotide
  Antisense strand to SEQ ID NO: 592062
uuugcugccuaaugcuucc

SEQ ID NO: 592064 - RNA, 19 nt, Artificial Sequence
  Description of Artificial Sequence: Synthetic oligonucleotide
  Sense strand starting at position 1039 of SEQ ID NO: 584823
cuacacaguccugauuacu

SEQ ID NO: 592065 - RNA, 19 nt, Artificial Sequence
  Description of Artificial Sequence: Synthetic oligonucleotide
  Antisense strand to SEQ ID NO: 592064
aguaaucaggacuguguag

SEQ ID NO: 592066 - RNA, 19 nt, Artificial Sequence
  Description of Artificial Sequence: Synthetic oligonucleotide
  Sense strand starting at position 1047 of SEQ ID NO: 584823
uccugauuacugcagguuu

SEQ ID NO: 592067 - RNA, 19 nt, Artificial Sequence
  Description of Artificial Sequence: Synthetic oligonucleotide
  Antisense strand to SEQ ID NO: 592066
aaaccugcaguaaucagga

SEQ ID NO: 592068 - RNA, 19 nt, Artificial Sequence
  Description of Artificial Sequence: Synthetic oligonucleotide
  Sense strand starting at position 1087 of SEQ ID NO: 584823
aagucugaguauuccaaug

SEQ ID NO: 592069 - RNA, 19 nt, Artificial Sequence
  Description of Artificial Sequence: Synthetic oligonucleotide
  Antisense strand to SEQ ID NO: 592068
cauuggaauacucagacuu

SEQ ID NO: 592070 - RNA, 19 nt, Artificial Sequence
  Description of Artificial Sequence: Synthetic oligonucleotide
  Sense strand starting at position 1092 of SEQ ID NO: 584823
ugaguauuccaaugagcua

SEQ ID NO: 592071 - RNA, 19 nt, Artificial Sequence
  Description of Artificial Sequence: Synthetic oligonucleotide
  Antisense strand to SEQ ID NO: 592070
uagcucauuggaauacuca

SEQ ID NO: 592072 - RNA, 19 nt, Artificial Sequence
  Description of Artificial Sequence: Synthetic oligonucleotide
  Sense strand starting at position 1095 of SEQ ID NO: 584823
guauuccaaugagcuauau

SEQ ID NO: 592073 - RNA, 19 nt, Artificial Sequence
  Description of Artificial Sequence: Synthetic oligonucleotide
  Antisense strand to SEQ ID NO: 592072
auauagcucauuggaauac

SEQ ID NO: 592074 - RNA, 19 nt, Artificial Sequence
  Description of Artificial Sequence: Synthetic oligonucleotide
  Sense strand starting at position 1154 of SEQ ID NO: 584823
acauguauguucuuagaag

SEQ ID NO: 592075 - RNA, 19 nt, Artificial Sequence
  Description of Artificial Sequence: Synthetic oligonucleotide
  Antisense strand to SEQ ID NO: 592074
cuucuaagaacauacaugu

SEQ ID NO: 592076 - RNA, 19 nt, Artificial Sequence
  Description of Artificial Sequence: Synthetic oligonucleotide
  Sense strand starting at position 1301 of SEQ ID NO: 584823
auacuuuauggaugaaccu

SEQ ID NO: 592077 - RNA, 19 nt, Artificial Sequence
  Description of Artificial Sequence: Synthetic oligonucleotide
  Antisense strand to SEQ ID NO: 592076
agguucauccauaaaguau

SEQ ID NO: 592078 - RNA, 19 nt, Artificial Sequence
  Description of Artificial Sequence: Synthetic oligonucleotide
  Sense strand starting at position 1363 of SEQ ID NO: 584823
auugcauaccuccauguau

SEQ ID NO: 592079 - RNA, 19 nt, Artificial Sequence
  Description of Artificial Sequence: Synthetic oligonucleotide
  Antisense strand to SEQ ID NO: 592078
auacauggagguaugcaau

SEQ ID NO: 592080 - RNA, 19 nt, Artificial Sequence
  Description of Artificial Sequence: Synthetic oligonucleotide
  Sense strand starting at position 1405 of SEQ ID NO: 584823
ucuagauagcuagaaugua

SEQ ID NO: 592081 - RNA, 19 nt, Artificial Sequence
  Description of Artificial Sequence: Synthetic oligonucleotide
  Antisense strand to SEQ ID NO: 592080
uacauucuagcuaucuaga

SEQ ID NO: 592082 - RNA, 19 nt, Artificial Sequence
  Description of Artificial Sequence: Synthetic oligonucleotide
  Sense strand starting at position 1472 of SEQ ID NO: 584823
ugcugauaaguacaggauu

SEQ ID NO: 592083 - RNA, 19 nt, Artificial Sequence
  Description of Artificial Sequence: Synthetic oligonucleotide
  Antisense strand to SEQ ID NO: 592082
aauccuguacuuaucagca

SEQ ID NO: 592084 - RNA, 19 nt, Artificial Sequence
  Description of Artificial Sequence: Synthetic oligonucleotide
  Sense strand starting at position 1748 of SEQ ID NO: 584823
aguaaccaauccuugugaa

SEQ ID NO: 592085 - RNA, 19 nt, Artificial Sequence
  Description of Artificial Sequence: Synthetic oligonucleotide
  Antisense strand to SEQ ID NO: 592084
uucacaaggauugguuacu

SEQ ID NO: 592086 - RNA, 19 nt, Artificial Sequence
  Description of Artificial Sequence: Synthetic oligonucleotide
  Sense strand starting at position 1749 of SEQ ID NO: 584823
guaaccaauccuugugaau

SEQ ID NO: 592087 - RNA, 19 nt, Artificial Sequence
  Description of Artificial Sequence: Synthetic oligonucleotide
  Antisense strand to SEQ ID NO: 592086
auucacaaggauugguuac

SEQ ID NO: 592088 - RNA, 19 nt, Artificial Sequence
  Description of Artificial Sequence: Synthetic oligonucleotide
  Sense strand starting at position 1758 of SEQ ID NO: 584823
ccuugugaauuugauuaaa

SEQ ID NO: 592089 - RNA, 19 nt, Artificial Sequence
  Description of Artificial Sequence: Synthetic oligonucleotide
  Antisense strand to SEQ ID NO: 592088
uuuaaucaaauucacaagg

SEQ ID NO: 592090 - RNA, 19 nt, Artificial Sequence
  Description of Artificial Sequence: Synthetic oligonucleotide
  Sense strand starting at position 1816 of SEQ ID NO: 584823
ccauaaagauaggaaauca

SEQ ID NO: 592091 - RNA, 19 nt, Artificial Sequence
  Description of Artificial Sequence: Synthetic oligonucleotide
  Antisense strand to SEQ ID NO: 592090
ugauuuccuaucuuuaugg

SEQ ID NO: 592092 - RNA, 19 nt, Artificial Sequence
  Description of Artificial Sequence: Synthetic oligonucleotide
  Sense strand starting at position 1835 of SEQ ID NO: 584823
agugcaaaguagucaauaa

SEQ ID NO: 592093 - RNA, 19 nt, Artificial Sequence
  Description of Artificial Sequence: Synthetic oligonucleotide
  Antisense strand to SEQ ID NO: 592092
uuauugacuacuuugcacu

SEQ ID NO: 592094 - RNA, 19 nt, Artificial Sequence
  Description of Artificial Sequence: Synthetic oligonucleotide
  Sense strand starting at position 2228 of SEQ ID NO: 584823
cacauaauacugugacgga

SEQ ID NO: 592095 - RNA, 19 nt, Artificial Sequence
  Description of Artificial Sequence: Synthetic oligonucleotide
  Antisense strand to SEQ ID NO: 592094
uccgucacaguauuaugug

SEQ ID NO: 592096 - RNA, 19 nt, Artificial Sequence
  Description of Artificial Sequence: Synthetic oligonucleotide
  Sense strand starting at position 2348 of SEQ ID NO: 584823
gggcaaguuccuuaacuuu

SEQ ID NO: 592097 - RNA, 19 nt, Artificial Sequence
  Description of Artificial Sequence: Synthetic oligonucleotide
  Antisense strand to SEQ ID NO: 592096
aaaguuaaggaacuugccc

SEQ ID NO: 592098 - RNA, 19 nt, Artificial Sequence
  Description of Artificial Sequence: Synthetic oligonucleotide
  Sense strand starting at position 2650 of SEQ ID NO: 584823
gaugaugaugcuggucaaa

SEQ ID NO: 592099 - RNA, 19 nt, Artificial Sequence
  Description of Artificial Sequence: Synthetic oligonucleotide
  Antisense strand to SEQ ID NO: 592098
uuugaccagcaucaucauc

SEQ ID NO: 592100 - RNA, 19 nt, Artificial Sequence
  Description of Artificial Sequence: Synthetic oligonucleotide
  Sense strand starting at position 2844 of SEQ ID NO: 584823
guauuuagugaaugccuua

SEQ ID NO: 592101 - RNA, 19 nt, Artificial Sequence
  Description of Artificial Sequence: Synthetic oligonucleotide
  Antisense strand to SEQ ID NO: 592100
uaaggcauucacuaaauac

SEQ ID NO: 592102 - RNA, 19 nt, Artificial Sequence
  Description of Artificial Sequence: Synthetic oligonucleotide
  Sense strand starting at position 2995 of SEQ ID NO: 584823
guacgaguacaaugaacaa

SEQ ID NO: 592103 - RNA, 19 nt, Artificial Sequence
  Description of Artificial Sequence: Synthetic oligonucleotide
  Antisense strand to SEQ ID NO: 592102
uuguucauuguacucguac

SEQ ID NO: 592104 - RNA, 19 nt, Artificial Sequence
  Description of Artificial Sequence: Synthetic oligonucleotide
  Sense strand starting at position 3162 of SEQ ID NO: 584823
cuuggcuuaggugaagaau

SEQ ID NO: 592105 - RNA, 19 nt, Artificial Sequence
  Description of Artificial Sequence: Synthetic oligonucleotide
  Antisense strand to SEQ ID NO: 592104
auucuucaccuaagccaag

SEQ ID NO: 592106 - RNA, 19 nt, Artificial Sequence
  Description of Artificial Sequence: Synthetic oligonucleotide
  Sense strand starting at position 3263 of SEQ ID NO: 584823
aggaguuuggauuguauuc

SEQ ID NO: 592107 - RNA, 19 nt, Artificial Sequence
  Description of Artificial Sequence: Synthetic oligonucleotide
  Antisense strand to SEQ ID NO: 592106
gaauacaauccaaacuccu

SEQ ID NO: 592108 - RNA, 19 nt, Artificial Sequence
  Description of Artificial Sequence: Synthetic oligonucleotide
  Sense strand starting at position 3307 of SEQ ID NO: 584823
gcacuuaaacaacgaagaa

SEQ ID NO: 592109 - RNA, 19 nt, Artificial Sequence
  Description of Artificial Sequence: Synthetic oligonucleotide
  Antisense strand to SEQ ID NO: 592108
uucuucguuguuuaagugc

SEQ ID NO: 592110 - RNA, 19 nt, Artificial Sequence
  Description of Artificial Sequence: Synthetic oligonucleotide
  Sense strand starting at position 3320 of SEQ ID NO: 584823
gaagaagaaugugcaacuu

SEQ ID NO: 592111 - RNA, 19 nt, Artificial Sequence
  Description of Artificial Sequence: Synthetic oligonucleotide
  Antisense strand to SEQ ID NO: 592110
aaguugcacauucuucuuc

SEQ ID NO: 592112 - RNA, 19 nt, Artificial Sequence
  Description of Artificial Sequence: Synthetic oligonucleotide
  Sense strand starting at position 3430 of SEQ ID NO: 584823
cguggaaguccagacaaga

SEQ ID NO: 592113 - RNA, 19 nt, Artificial Sequence
  Description of Artificial Sequence: Synthetic oligonucleotide
  Antisense strand to SEQ ID NO: 592112
ucuugucuggacuuccacg

SEQ ID NO: 592114 - RNA, 19 nt, Artificial Sequence
  Description of Artificial Sequence: Synthetic oligonucleotide
  Sense strand starting at position 3452 of SEQ ID NO: 584823
gauggugacuuggugaacu

SEQ ID NO: 592115 - RNA, 19 nt, Artificial Sequence
  Description of Artificial Sequence: Synthetic oligonucleotide
  Antisense strand to SEQ ID NO: 592114
aguucaccaagucaccauc

SEQ ID NO: 592116 - RNA, 19 nt, Artificial Sequence
  Description of Artificial Sequence: Synthetic oligonucleotide
  Sense strand starting at position 3463 of SEQ ID NO: 584823
ggugaacuguggccauaga

SEQ ID NO: 592117 - RNA, 19 nt, Artificial Sequence
  Description of Artificial Sequence: Synthetic oligonucleotide
  Antisense strand to SEQ ID NO: 592116
ucuauggccacaguucacc

SEQ ID NO: 592118 - RNA, 19 nt, Artificial Sequence
  Description of Artificial Sequence: Synthetic oligonucleotide
  Sense strand starting at position 3531 of SEQ ID NO: 584823
ggaaguugccaauggauua

SEQ ID NO: 592119 - RNA, 19 nt, Artificial Sequence
  Description of Artificial Sequence: Synthetic oligonucleotide
  Antisense strand to SEQ ID NO: 592118
uaauccauuggcaacuucc

SEQ ID NO: 592120 - RNA, 19 nt, Artificial Sequence
  Description of Artificial Sequence: Synthetic oligonucleotide
  Sense strand starting at position 3579 of SEQ ID NO: 584823
caaggaugauccucagguu

SEQ ID NO: 592121 - RNA, 19 nt, Artificial Sequence
  Description of Artificial Sequence: Synthetic oligonucleotide
  Antisense strand to SEQ ID NO: 592120
aaccugaggaucauccuug

SEQ ID NO: 592122 - RNA, 19 nt, Artificial Sequence
  Description of Artificial Sequence: Synthetic oligonucleotide
  Sense strand starting at position 3659 of SEQ ID NO: 584823
gccagguuuggguaaggga

SEQ ID NO: 592123 - RNA, 19 nt, Artificial Sequence
  Description of Artificial Sequence: Synthetic oligonucleotide
  Antisense strand to SEQ ID NO: 592122
ucccuuacccaaaccuggc

SEQ ID NO: 592124 - RNA, 19 nt, Artificial Sequence
  Description of Artificial Sequence: Synthetic oligonucleotide
  Sense strand starting at position 3708 of SEQ ID NO: 584823
auguguuaaguuugagaua

SEQ ID NO: 592125 - RNA, 19 nt, Artificial Sequence
  Description of Artificial Sequence: Synthetic oligonucleotide
  Antisense strand to SEQ ID NO: 592124
uaucucaaacuuaacacau

SEQ ID NO: 592126 - RNA, 19 nt, Artificial Sequence
  Description of Artificial Sequence: Synthetic oligonucleotide
  Sense strand starting at position 3795 of SEQ ID NO: 584823
uggaguuaucagcacauag

SEQ ID NO: 592127 - RNA, 19 nt, Artificial Sequence
  Description of Artificial Sequence: Synthetic oligonucleotide
  Antisense strand to SEQ ID NO: 592126
cuaugugcugauaacucca

SEQ ID NO: 592128 - RNA, 19 nt, Artificial Sequence
  Description of Artificial Sequence: Synthetic oligonucleotide
  Sense strand starting at position 32 of SEQ ID NO: 584824
ucauuucugugccucugau

SEQ ID NO: 592129 - RNA, 19 nt, Artificial Sequence
  Description of Artificial Sequence: Synthetic oligonucleotide
  Antisense strand to SEQ ID NO: 592128
aucagaggcacagaaauga

SEQ ID NO: 592130 - RNA, 19 nt, Artificial Sequence
  Description of Artificial Sequence: Synthetic oligonucleotide
  Sense strand starting at position 164 of SEQ ID NO: 584824
ccuaaaugaugucucuguu

SEQ ID NO: 592131 - RNA, 19 nt, Artificial Sequence
  Description of Artificial Sequence: Synthetic oligonucleotide
  Antisense strand to SEQ ID NO: 592130
aacagagacaucauuuagg

SEQ ID NO: 592132 - RNA, 19 nt, Artificial Sequence
  Description of Artificial Sequence: Synthetic oligonucleotide
  Sense strand starting at position 195 of SEQ ID NO: 584824
agcaauuacagcgaguaau

SEQ ID NO: 592133 - RNA, 19 nt, Artificial Sequence
  Description of Artificial Sequence: Synthetic oligonucleotide
  Antisense strand to SEQ ID NO: 592132
auuacucgcuguaauugcu

SEQ ID NO: 592134 - RNA, 19 nt, Artificial Sequence
  Description of Artificial Sequence: Synthetic oligonucleotide
  Sense strand starting at position 241 of SEQ ID NO: 584824
uuuauuguccugcaacuga

SEQ ID NO: 592135 - RNA, 19 nt, Artificial Sequence
  Description of Artificial Sequence: Synthetic oligonucleotide
  Antisense strand to SEQ ID NO: 592134
ucaguugcaggacaauaaa

SEQ ID NO: 592136 - RNA, 19 nt, Artificial Sequence
  Description of Artificial Sequence: Synthetic oligonucleotide
  Sense strand starting at position 336 of SEQ ID NO: 584824
guacucagugcuuaauauc

SEQ ID NO: 592137 - RNA, 19 nt, Artificial Sequence
  Description of Artificial Sequence: Synthetic oligonucleotide
  Antisense strand to SEQ ID NO: 592136
gauauuaagcacugaguac

SEQ ID NO: 592138 - RNA, 19 nt, Artificial Sequence
  Description of Artificial Sequence: Synthetic oligonucleotide
  Sense strand starting at position 615 of SEQ ID NO: 584824
cuuacagcuccagauugaa

SEQ ID NO: 592139 - RNA, 19 nt, Artificial Sequence
  Description of Artificial Sequence: Synthetic oligonucleotide
  Antisense strand to SEQ ID NO: 592138
uucaaucuggagcuguaag

SEQ ID NO: 592140 - RNA, 19 nt, Artificial Sequence
  Description of Artificial Sequence: Synthetic oligonucleotide
  Sense strand starting at position 627 of SEQ ID NO: 584824
gauugaagcguuuaacaac

SEQ ID NO: 592141 - RNA, 19 nt, Artificial Sequence
  Description of Artificial Sequence: Synthetic oligonucleotide
  Antisense strand to SEQ ID NO: 592140
guuguuaaacgcuucaauc

SEQ ID NO: 592142 - RNA, 19 nt, Artificial Sequence
  Description of Artificial Sequence: Synthetic oligonucleotide
  Sense strand starting at position 725 of SEQ ID NO: 584824
ggaugaauccugcauaugc

SEQ ID NO: 592143 - RNA, 19 nt, Artificial Sequence
  Description of Artificial Sequence: Synthetic oligonucleotide
  Antisense strand to SEQ ID NO: 592142
gcauaugcaggauucaucc

SEQ ID NO: 592144 - RNA, 19 nt, Artificial Sequence
  Description of Artificial Sequence: Synthetic oligonucleotide
  Sense strand starting at position 749 of SEQ ID NO: 584824
agacuaauccaaugagguu

SEQ ID NO: 592145 - RNA, 19 nt, Artificial Sequence
  Description of Artificial Sequence: Synthetic oligonucleotide
  Antisense strand to SEQ ID NO: 592144
aaccucauuggauuagucu

SEQ ID NO: 592146 - RNA, 19 nt, Artificial Sequence
  Description of Artificial Sequence: Synthetic oligonucleotide
  Sense strand starting at position 930 of SEQ ID NO: 584824
gguuccugaggucaagagu

SEQ ID NO: 592147 - RNA, 19 nt, Artificial Sequence
  Description of Artificial Sequence: Synthetic oligonucleotide
  Antisense strand to SEQ ID NO: 592146
acucuugaccucaggaacc

SEQ ID NO: 592148 - RNA, 19 nt, Artificial Sequence
  Description of Artificial Sequence: Synthetic oligonucleotide
  Sense strand starting at position 1268 of SEQ ID NO: 584824
guaggaguuucugcaggag

SEQ ID NO: 592149 - RNA, 19 nt, Artificial Sequence
  Description of Artificial Sequence: Synthetic oligonucleotide
  Antisense strand to SEQ ID NO: 592148
cuccugcagaaacuccuac

SEQ ID NO: 592150 - RNA, 19 nt, Artificial Sequence
  Description of Artificial Sequence: Synthetic oligonucleotide
  Sense strand starting at position 2155 of SEQ ID NO: 584824
ccauuaugcagguggaaag

SEQ ID NO: 592151 - RNA, 19 nt, Artificial Sequence
  Description of Artificial Sequence: Synthetic oligonucleotide
  Antisense strand to SEQ ID NO: 592150
cuuuccaccugcauaaugg

SEQ ID NO: 592152 - RNA, 19 nt, Artificial Sequence
  Description of Artificial Sequence: Synthetic oligonucleotide
  Sense strand starting at position 2236 of SEQ ID NO: 584824
gcuccugggacaggaaaua

SEQ ID NO: 592153 - RNA, 19 nt, Artificial Sequence
  Description of Artificial Sequence: Synthetic oligonucleotide
  Antisense strand to SEQ ID NO: 592152
uauuuccugucccaggagc

SEQ ID NO: 592154 - RNA, 19 nt, Artificial Sequence
  Description of Artificial Sequence: Synthetic oligonucleotide
  Sense strand starting at position 2368 of SEQ ID NO: 584824
uagucauacccaggugaau

SEQ ID NO: 592155 - RNA, 19 nt, Artificial Sequence
  Description of Artificial Sequence: Synthetic oligonucleotide
  Antisense strand to SEQ ID NO: 592154
auucaccuggguaugacua

SEQ ID NO: 592156 - RNA, 19 nt, Artificial Sequence
  Description of Artificial Sequence: Synthetic oligonucleotide
  Sense strand starting at position 2401 of SEQ ID NO: 584824
cucguaucucaaugaggga

SEQ ID NO: 592157 - RNA, 19 nt, Artificial Sequence
  Description of Artificial Sequence: Synthetic oligonucleotide
  Antisense strand to SEQ ID NO: 592156
ucccucauugagauacgag

SEQ ID NO: 592158 - RNA, 19 nt, Artificial Sequence
  Description of Artificial Sequence: Synthetic oligonucleotide
  Sense strand starting at position 2625 of SEQ ID NO: 584824
aucauuuaauuggguagaa

SEQ ID NO: 592159 - RNA, 19 nt, Artificial Sequence
  Description of Artificial Sequence: Synthetic oligonucleotide
  Antisense strand to SEQ ID NO: 592158
uucuacccaauuaaaugau

SEQ ID NO: 592160 - RNA, 19 nt, Artificial Sequence
  Description of Artificial Sequence: Synthetic oligonucleotide
  Sense strand starting at position 2688 of SEQ ID NO: 584824
gaaguaggcagucaauagu

SEQ ID NO: 592161 - RNA, 19 nt, Artificial Sequence
  Description of Artificial Sequence: Synthetic oligonucleotide
  Antisense strand to SEQ ID NO: 592160
acuauugacugccuacuuc

SEQ ID NO: 592162 - RNA, 19 nt, Artificial Sequence
  Description of Artificial Sequence: Synthetic oligonucleotide
  Sense strand starting at position 2701 of SEQ ID NO: 584824
aauaguuguggaugaauaa

SEQ ID NO: 592163 - RNA, 19 nt, Artificial Sequence
  Description of Artificial Sequence: Synthetic oligonucleotide
  Antisense strand to SEQ ID NO: 592162
uuauucauccacaacuauu

SEQ ID NO: 592164 - RNA, 19 nt, Artificial Sequence
  Description of Artificial Sequence: Synthetic oligonucleotide
  Sense strand starting at position 2726 of SEQ ID NO: 584824
uggauaaauucugcucgag

SEQ ID NO: 592165 - RNA, 19 nt, Artificial Sequence
  Description of Artificial Sequence: Synthetic oligonucleotide
  Antisense strand to SEQ ID NO: 592164
cucgagcagaauuuaucca

SEQ ID NO: 592166 - RNA, 19 nt, Artificial Sequence
  Description of Artificial Sequence: Synthetic oligonucleotide
  Sense strand starting at position 2821 of SEQ ID NO: 584824
cgguuucgggccaguugaa

SEQ ID NO: 592167 - RNA, 19 nt, Artificial Sequence
  Description of Artificial Sequence: Synthetic oligonucleotide
  Antisense strand to SEQ ID NO: 592166
uucaacuggcccgaaaccg

SEQ ID NO: 592168 - RNA, 19 nt, Artificial Sequence
  Description of Artificial Sequence: Synthetic oligonucleotide
  Sense strand starting at position 2850 of SEQ ID NO: 584824
uugaguccuugccugaaag

SEQ ID NO: 592169 - RNA, 19 nt, Artificial Sequence
  Description of Artificial Sequence: Synthetic oligonucleotide
  Antisense strand to SEQ ID NO: 592168
cuuucaggcaaggacucaa

SEQ ID NO: 592170 - RNA, 19 nt, Artificial Sequence
  Description of Artificial Sequence: Synthetic oligonucleotide
  Sense strand starting at position 2852 of SEQ ID NO: 584824
gaguccuugccugaaaguu

SEQ ID NO: 592171 - RNA, 19 nt, Artificial Sequence
  Description of Artificial Sequence: Synthetic oligonucleotide
  Antisense strand to SEQ ID NO: 592170
aacuuucaggcaaggacuc

SEQ ID NO: 592172 - RNA, 19 nt, Artificial Sequence
  Description of Artificial Sequence: Synthetic oligonucleotide
  Sense strand starting at position 2954 of SEQ ID NO: 584824
ggguuaacgaagggauuaa

SEQ ID NO: 592173 - RNA, 19 nt, Artificial Sequence
  Description of Artificial Sequence: Synthetic oligonucleotide
  Antisense strand to SEQ ID NO: 592172
uuaaucccuucguuaaccc

SEQ ID NO: 592174 - RNA, 19 nt, Artificial Sequence
  Description of Artificial Sequence: Synthetic oligonucleotide
  Sense strand starting at position 3291 of SEQ ID NO: 584824
caauccuauccgugaugga

SEQ ID NO: 592175 - RNA, 19 nt, Artificial Sequence
  Description of Artificial Sequence: Synthetic oligonucleotide
  Antisense strand to SEQ ID NO: 592174
uccaucacggauaggauug

SEQ ID NO: 592176 - RNA, 19 nt, Artificial Sequence
  Description of Artificial Sequence: Synthetic oligonucleotide
  Sense strand starting at position 3292 of SEQ ID NO: 584824
aauccuauccgugauggac

SEQ ID NO: 592177 - RNA, 19 nt, Artificial Sequence
  Description of Artificial Sequence: Synthetic oligonucleotide
  Antisense strand to SEQ ID NO: 592176
guccaucacggauaggauu

SEQ ID NO: 592178 - RNA, 19 nt, Artificial Sequence
  Description of Artificial Sequence: Synthetic oligonucleotide
  Sense strand starting at position 3508 of SEQ ID NO: 584824
auacccagagauuguguua

SEQ ID NO: 592179 - RNA, 19 nt, Artificial Sequence
  Description of Artificial Sequence: Synthetic oligonucleotide
  Antisense strand to SEQ ID NO: 592178
uaacacaaucucuggguau

SEQ ID NO: 592180 - RNA, 19 nt, Artificial Sequence
  Description of Artificial Sequence: Synthetic oligonucleotide
  Sense strand starting at position 3511 of SEQ ID NO: 584824
cccagagauuguguuacug

SEQ ID NO: 592181 - RNA, 19 nt, Artificial Sequence
  Description of Artificial Sequence: Synthetic oligonucleotide
  Antisense strand to SEQ ID NO: 592180
caguaacacaaucucuggg

SEQ ID NO: 592182 - RNA, 19 nt, Artificial Sequence
  Description of Artificial Sequence: Synthetic oligonucleotide
  Sense strand starting at position 3545 of SEQ ID NO: 584824
ucugguuagucccuaacaa

SEQ ID NO: 592183 - RNA, 19 nt, Artificial Sequence
  Description of Artificial Sequence: Synthetic oligonucleotide
  Antisense strand to SEQ ID NO: 592182
uuguuagggacuaaccaga

SEQ ID NO: 592184 - RNA, 19 nt, Artificial Sequence
  Description of Artificial Sequence: Synthetic oligonucleotide
  Sense strand starting at position 3546 of SEQ ID NO: 584824
cugguuagucccuaacaag

SEQ ID NO: 592185 - RNA, 19 nt, Artificial Sequence
  Description of Artificial Sequence: Synthetic oligonucleotide
  Antisense strand to SEQ ID NO: 592184
cuuguuagggacuaaccag

SEQ ID NO: 592186 - RNA, 19 nt, Artificial Sequence
  Description of Artificial Sequence: Synthetic oligonucleotide
  Sense strand starting at position 3565 of SEQ ID NO: 584824
uuacgagaacucgaacuca

SEQ ID NO: 592187 - RNA, 19 nt, Artificial Sequence
  Description of Artificial Sequence: Synthetic oligonucleotide
  Antisense strand to SEQ ID NO: 592186
ugaguucgaguucucguaa

SEQ ID NO: 592188 - RNA, 19 nt, Artificial Sequence
  Description of Artificial Sequence: Synthetic oligonucleotide
  Sense strand starting at position 3587 of SEQ ID NO: 584824
gaauucccuccagaucguu

SEQ ID NO: 592189 - RNA, 19 nt, Artificial Sequence
  Description of Artificial Sequence: Synthetic oligonucleotide
  Antisense strand to SEQ ID NO: 592188
aacgaucuggagggaauuc

SEQ ID NO: 592190 - RNA, 19 nt, Artificial Sequence
  Description of Artificial Sequence: Synthetic oligonucleotide
  Sense strand starting at position 3593 of SEQ ID NO: 584824
ccuccagaucguuaaucuu

SEQ ID NO: 592191 - RNA, 19 nt, Artificial Sequence
  Description of Artificial Sequence: Synthetic oligonucleotide
  Antisense strand to SEQ ID NO: 592190
aagauuaacgaucuggagg

SEQ ID NO: 592192 - RNA, 19 nt, Artificial Sequence
  Description of Artificial Sequence: Synthetic oligonucleotide
  Sense strand starting at position 3689 of SEQ ID NO: 584824
uuagucuugucuuuaggga

SEQ ID NO: 592193 - RNA, 19 nt, Artificial Sequence
  Description of Artificial Sequence: Synthetic oligonucleotide
  Antisense strand to SEQ ID NO: 592192
ucccuaaagacaagacuaa

SEQ ID NO: 592194 - RNA, 19 nt, Artificial Sequence
  Description of Artificial Sequence: Synthetic oligonucleotide
  Sense strand starting at position 3690 of SEQ ID NO: 584824
uagucuugucuuuagggau

SEQ ID NO: 592195 - RNA, 19 nt, Artificial Sequence
  Description of Artificial Sequence: Synthetic oligonucleotide
  Antisense strand to SEQ ID NO: 592194
aucccuaaagacaagacua

SEQ ID NO: 592196 - RNA, 19 nt, Artificial Sequence
  Description of Artificial Sequence: Synthetic oligonucleotide
  Sense strand starting at position 3697 of SEQ ID NO: 584824
gucuuuagggauuaaagcu

SEQ ID NO: 592197 - RNA, 19 nt, Artificial Sequence
  Description of Artificial Sequence: Synthetic oligonucleotide
  Antisense strand to SEQ ID NO: 592196
agcuuuaaucccuaaagac

SEQ ID NO: 592198 - RNA, 19 nt, Artificial Sequence
  Description of Artificial Sequence: Synthetic oligonucleotide
  Sense strand starting at position 3713 of SEQ ID NO: 584824
gcuacuucuaagggaguua

SEQ ID NO: 592199 - RNA, 19 nt, Artificial Sequence
  Description of Artificial Sequence: Synthetic oligonucleotide
  Antisense strand to SEQ ID NO: 592198
uaacucccuuagaaguagc

SEQ ID NO: 592200 - RNA, 19 nt, Artificial Sequence
  Description of Artificial Sequence: Synthetic oligonucleotide
  Sense strand starting at position 3744 of SEQ ID NO: 584824
ggcuuugguggugaggaaa

SEQ ID NO: 592201 - RNA, 19 nt, Artificial Sequence
  Description of Artificial Sequence: Synthetic oligonucleotide
  Antisense strand to SEQ ID NO: 592200
uuuccucaccaccaaagcc

SEQ ID NO: 592202 - RNA, 19 nt, Artificial Sequence
  Description of Artificial Sequence: Synthetic oligonucleotide
  Sense strand starting at position 3785 of SEQ ID NO: 584824
gacguagugcaagagcuaa

SEQ ID NO: 592203 - RNA, 19 nt, Artificial Sequence
  Description of Artificial Sequence: Synthetic oligonucleotide
  Antisense strand to SEQ ID NO: 592202
uuagcucuugcacuacguc

SEQ ID NO: 592204 - RNA, 19 nt, Artificial Sequence
  Description of Artificial Sequence: Synthetic oligonucleotide
  Sense strand starting at position 3887 of SEQ ID NO: 584824
gucgaucagaccugucaaa

SEQ ID NO: 592205 - RNA, 19 nt, Artificial Sequence
  Description of Artificial Sequence: Synthetic oligonucleotide
  Antisense strand to SEQ ID NO: 592204
uuugacaggucugaucgac

SEQ ID NO: 592206 - RNA, 19 nt, Artificial Sequence
  Description of Artificial Sequence: Synthetic oligonucleotide
  Sense strand starting at position 3930 of SEQ ID NO: 584824
agucuauaucgauauagac

SEQ ID NO: 592207 - RNA, 19 nt, Artificial Sequence
  Description of Artificial Sequence: Synthetic oligonucleotide
  Antisense strand to SEQ ID NO: 592206
gucuauaucgauauagacu

SEQ ID NO: 592208 - RNA, 19 nt, Artificial Sequence
  Description of Artificial Sequence: Synthetic oligonucleotide
  Sense strand starting at position 6 of SEQ ID NO: 584825
ggauacuuugcugggagua

SEQ ID NO: 592209 - RNA, 19 nt, Artificial Sequence
  Description of Artificial Sequence: Synthetic oligonucleotide
  Antisense strand to SEQ ID NO: 592208
uacucccagcaaaguaucc

SEQ ID NO: 592210 - RNA, 19 nt, Artificial Sequence
  Description of Artificial Sequence: Synthetic oligonucleotide
  Sense strand starting at position 7 of SEQ ID NO: 584825
gauacuuugcugggaguaa

SEQ ID NO: 592211 - RNA, 19 nt, Artificial Sequence
  Description of Artificial Sequence: Synthetic oligonucleotide
  Antisense strand to SEQ ID NO: 592210
uuacucccagcaaaguauc

SEQ ID NO: 592212 - RNA, 19 nt, Artificial Sequence
  Description of Artificial Sequence: Synthetic oligonucleotide
  Sense strand starting at position 163 of SEQ ID NO: 584825
ucaugaaacuauguuguga

SEQ ID NO: 592213 - RNA, 19 nt, Artificial Sequence
  Description of Artificial Sequence: Synthetic oligonucleotide
  Antisense strand to SEQ ID NO: 592212
ucacaacauaguuucauga

SEQ ID NO: 592214 - RNA, 19 nt, Artificial Sequence
  Description of Artificial Sequence: Synthetic oligonucleotide
  Sense strand starting at position 171 of SEQ ID NO: 584825
cuauguugugauuauaaag

SEQ ID NO: 592215 - RNA, 19 nt, Artificial Sequence
  Description of Artificial Sequence: Synthetic oligonucleotide
  Antisense strand to SEQ ID NO: 592214
cuuuauaaucacaacauag

SEQ ID NO: 592216 - RNA, 19 nt, Artificial Sequence
  Description of Artificial Sequence: Synthetic oligonucleotide
  Sense strand starting at position 181 of SEQ ID NO: 584825
auuauaaagcccuggacaa

SEQ ID NO: 592217 - RNA, 19 nt, Artificial Sequence
  Description of Artificial Sequence: Synthetic oligonucleotide
  Antisense strand to SEQ ID NO: 592216
uuguccagggcuuuauaau

SEQ ID NO: 592218 - RNA, 19 nt, Artificial Sequence
  Description of Artificial Sequence: Synthetic oligonucleotide
  Sense strand starting at position 182 of SEQ ID NO: 584825
uuauaaagcccuggacaaa

SEQ ID NO: 592219 - RNA, 19 nt, Artificial Sequence
  Description of Artificial Sequence: Synthetic oligonucleotide
  Antisense strand to SEQ ID NO: 592218
uuuguccagggcuuuauaa

SEQ ID NO: 592220 - RNA, 19 nt, Artificial Sequence
  Description of Artificial Sequence: Synthetic oligonucleotide
  Sense strand starting at position 194 of SEQ ID NO: 584825
ggacaaauguaaguuauau

SEQ ID NO: 592221 - RNA, 19 nt, Artificial Sequence
  Description of Artificial Sequence: Synthetic oligonucleotide
  Antisense strand to SEQ ID NO: 592220
auauaacuuacauuugucc

SEQ ID NO: 592222 - RNA, 19 nt, Artificial Sequence
  Description of Artificial Sequence: Synthetic oligonucleotide
  Sense strand starting at position 203 of SEQ ID NO: 584825
uaaguuauaucaguggacu

SEQ ID NO: 592223 - RNA, 19 nt, Artificial Sequence
  Description of Artificial Sequence: Synthetic oligonucleotide
  Antisense strand to SEQ ID NO: 592222
aguccacugauauaacuua

SEQ ID NO: 592224 - RNA, 19 nt, Artificial Sequence
  Description of Artificial Sequence: Synthetic oligonucleotide
  Sense strand starting at position 502 of SEQ ID NO: 584825
cccuuaauccuaggaugag

SEQ ID NO: 592225 - RNA, 19 nt, Artificial Sequence
  Description of Artificial Sequence: Synthetic oligonucleotide
  Antisense strand to SEQ ID NO: 592224
cucauccuaggauuaaggg

SEQ ID NO: 592226 - RNA, 19 nt, Artificial Sequence
  Description of Artificial Sequence: Synthetic oligonucleotide
  Sense strand starting at position 565 of SEQ ID NO: 584825
cuacucuugccucaggaaa

SEQ ID NO: 592227 - RNA, 19 nt, Artificial Sequence
  Description of Artificial Sequence: Synthetic oligonucleotide
  Antisense strand to SEQ ID NO: 592226
uuuccugaggcaagaguag

SEQ ID NO: 592228 - RNA, 19 nt, Artificial Sequence
  Description of Artificial Sequence: Synthetic oligonucleotide
  Sense strand starting at position 597 of SEQ ID NO: 584825
cccuuagguucucuugaaa

SEQ ID NO: 592229 - RNA, 19 nt, Artificial Sequence
  Description of Artificial Sequence: Synthetic oligonucleotide
  Antisense strand to SEQ ID NO: 592228
uuucaagagaaccuaaggg

SEQ ID NO: 592230 - RNA, 19 nt, Artificial Sequence
  Description of Artificial Sequence: Synthetic oligonucleotide
  Sense strand starting at position 701 of SEQ ID NO: 584825
acuugucaagcuugaaaua

SEQ ID NO: 592231 - RNA, 19 nt, Artificial Sequence
  Description of Artificial Sequence: Synthetic oligonucleotide
  Antisense strand to SEQ ID NO: 592230
uauuucaagcuugacaagu

SEQ ID NO: 592232 - RNA, 19 nt, Artificial Sequence
  Description of Artificial Sequence: Synthetic oligonucleotide
  Sense strand starting at position 702 of SEQ ID NO: 584825
cuugucaagcuugaaauau

SEQ ID NO: 592233 - RNA, 19 nt, Artificial Sequence
  Description of Artificial Sequence: Synthetic oligonucleotide
  Antisense strand to SEQ ID NO: 592232
auauuucaagcuugacaag

SEQ ID NO: 592234 - RNA, 19 nt, Artificial Sequence
  Description of Artificial Sequence: Synthetic oligonucleotide
  Sense strand starting at position 846 of SEQ ID NO: 584825
gaacguuugguucaaggag

SEQ ID NO: 592235 - RNA, 19 nt, Artificial Sequence
  Description of Artificial Sequence: Synthetic oligonucleotide
  Antisense strand to SEQ ID NO: 592234
cuccuugaaccaaacguuc

SEQ ID NO: 592236 - RNA, 19 nt, Artificial Sequence
  Description of Artificial Sequence: Synthetic oligonucleotide
  Sense strand starting at position 862 of SEQ ID NO: 584825
gaggaaauauggccucaua

SEQ ID NO: 592237 - RNA, 19 nt, Artificial Sequence
  Description of Artificial Sequence: Synthetic oligonucleotide
  Antisense strand to SEQ ID NO: 592236
uaugaggccauauuuccuc

SEQ ID NO: 592238 - RNA, 19 nt, Artificial Sequence
  Description of Artificial Sequence: Synthetic oligonucleotide
  Sense strand starting at position 891 of SEQ ID NO: 584825
uuauucuuugcucaggauu

SEQ ID NO: 592239 - RNA, 19 nt, Artificial Sequence
  Description of Artificial Sequence: Synthetic oligonucleotide
  Antisense strand to SEQ ID NO: 592238
aauccugagcaaagaauaa

SEQ ID NO: 592240 - RNA, 19 nt, Artificial Sequence
  Description of Artificial Sequence: Synthetic oligonucleotide
  Sense strand starting at position 909 of SEQ ID NO: 584825
uuagaagggucuuccacua

SEQ ID NO: 592241 - RNA, 19 nt, Artificial Sequence
  Description of Artificial Sequence: Synthetic oligonucleotide
  Antisense strand to SEQ ID NO: 592240
uaguggaagacccuucuaa

SEQ ID NO: 592242 - RNA, 19 nt, Artificial Sequence
  Description of Artificial Sequence: Synthetic oligonucleotide
  Sense strand starting at position 948 of SEQ ID NO: 584825
gaagaagacuacuuaguuu

SEQ ID NO: 592243 - RNA, 19 nt, Artificial Sequence
  Description of Artificial Sequence: Synthetic oligonucleotide
  Antisense strand to SEQ ID NO: 592242
aaacuaaguagucuucuuc

SEQ ID NO: 592244 - RNA, 19 nt, Artificial Sequence
  Description of Artificial Sequence: Synthetic oligonucleotide
  Sense strand starting at position 1129 of SEQ ID NO: 584825
gcauguaauuucucuguuu

SEQ ID NO: 592245 - RNA, 19 nt, Artificial Sequence
  Description of Artificial Sequence: Synthetic oligonucleotide
  Antisense strand to SEQ ID NO: 592244
aaacagagaaauuacaugc

SEQ ID NO: 592246 - RNA, 19 nt, Artificial Sequence
  Description of Artificial Sequence: Synthetic oligonucleotide
  Sense strand starting at position 1131 of SEQ ID NO: 584825
auguaauuucucuguuucu

SEQ ID NO: 592247 - RNA, 19 nt, Artificial Sequence
  Description of Artificial Sequence: Synthetic oligonucleotide
  Antisense strand to SEQ ID NO: 592246
agaaacagagaaauuacau

SEQ ID NO: 592248 - RNA, 19 nt, Artificial Sequence
  Description of Artificial Sequence: Synthetic oligonucleotide
  Sense strand starting at position 1247 of SEQ ID NO: 584825
gcaucuacuccaggaagaa

SEQ ID NO: 592249 - RNA, 19 nt, Artificial Sequence
  Description of Artificial Sequence: Synthetic oligonucleotide
  Antisense strand to SEQ ID NO: 592248
uucuuccuggaguagaugc

SEQ ID NO: 592250 - RNA, 19 nt, Artificial Sequence
  Description of Artificial Sequence: Synthetic oligonucleotide
  Sense strand starting at position 1391 of SEQ ID NO: 584825
gccaaacucccugggacua

SEQ ID NO: 592251 - RNA, 19 nt, Artificial Sequence
  Description of Artificial Sequence: Synthetic oligonucleotide
  Antisense strand to SEQ ID NO: 592250
uagucccagggaguuuggc

SEQ ID NO: 592252 - RNA, 19 nt, Artificial Sequence
  Description of Artificial Sequence: Synthetic oligonucleotide
  Sense strand starting at position 1407 of SEQ ID NO: 584825
cuaagcuucuacccagaga

SEQ ID NO: 592253 - RNA, 19 nt, Artificial Sequence
  Description of Artificial Sequence: Synthetic oligonucleotide
  Antisense strand to SEQ ID NO: 592252
ucucuggguagaagcuuag

SEQ ID NO: 592254 - RNA, 19 nt, Artificial Sequence
  Description of Artificial Sequence: Synthetic oligonucleotide
  Sense strand starting at position 1505 of SEQ ID NO: 584825
accucucccugauuagaga

SEQ ID NO: 592255 - RNA, 19 nt, Artificial Sequence
  Description of Artificial Sequence: Synthetic oligonucleotide
  Antisense strand to SEQ ID NO: 592254
ucucuaaucagggagaggu

SEQ ID NO: 592256 - RNA, 19 nt, Artificial Sequence
  Description of Artificial Sequence: Synthetic oligonucleotide
  Sense strand starting at position 2340 of SEQ ID NO: 584825
ggaggagauguguguugaa

SEQ ID NO: 592257 - RNA, 19 nt, Artificial Sequence
  Description of Artificial Sequence: Synthetic oligonucleotide
  Antisense strand to SEQ ID NO: 592256
uucaacacacaucuccucc

SEQ ID NO: 592258 - RNA, 19 nt, Artificial Sequence
  Description of Artificial Sequence: Synthetic oligonucleotide
  Sense strand starting at position 2465 of SEQ ID NO: 584825
aagugugugaguuaugacu

SEQ ID NO: 592259 - RNA, 19 nt, Artificial Sequence
  Description of Artificial Sequence: Synthetic oligonucleotide
  Antisense strand to SEQ ID NO: 592258
agucauaacucacacacuu

SEQ ID NO: 592260 - RNA, 19 nt, Artificial Sequence
  Description of Artificial Sequence: Synthetic oligonucleotide
  Sense strand starting at position 2497 of SEQ ID NO: 584825
ugcugauuugccuguuaca

SEQ ID NO: 592261 - RNA, 19 nt, Artificial Sequence
  Description of Artificial Sequence: Synthetic oligonucleotide
  Antisense strand to SEQ ID NO: 592260
uguaacaggcaaaucagca

SEQ ID NO: 592262 - RNA, 19 nt, Artificial Sequence
  Description of Artificial Sequence: Synthetic oligonucleotide
  Sense strand starting at position 2510 of SEQ ID NO: 584825
guuacaaagccauaaugua

SEQ ID NO: 592263 - RNA, 19 nt, Artificial Sequence
  Description of Artificial Sequence: Synthetic oligonucleotide
  Antisense strand to SEQ ID NO: 592262
uacauuauggcuuuguaac

SEQ ID NO: 592264 - RNA, 19 nt, Artificial Sequence
  Description of Artificial Sequence: Synthetic oligonucleotide
  Sense strand starting at position 2545 of SEQ ID NO: 584825
gagccucccugaguaacaa

SEQ ID NO: 592265 - RNA, 19 nt, Artificial Sequence
  Description of Artificial Sequence: Synthetic oligonucleotide
  Antisense strand to SEQ ID NO: 592264
uuguuacucagggaggcuc

SEQ ID NO: 592266 - RNA, 19 nt, Artificial Sequence
  Description of Artificial Sequence: Synthetic oligonucleotide
  Sense strand starting at position 2546 of SEQ ID NO: 584825
agccucccugaguaacaau

SEQ ID NO: 592267 - RNA, 19 nt, Artificial Sequence
  Description of Artificial Sequence: Synthetic oligonucleotide
  Antisense strand to SEQ ID NO: 592266
auuguuacucagggaggcu

SEQ ID NO: 592268 - RNA, 19 nt, Artificial Sequence
  Description of Artificial Sequence: Synthetic oligonucleotide
  Sense strand starting at position 2768 of SEQ ID NO: 584825
ugcuaugugcccucacagu

SEQ ID NO: 592269 - RNA, 19 nt, Artificial Sequence
  Description of Artificial Sequence: Synthetic oligonucleotide
  Antisense strand to SEQ ID NO: 592268
acugugagggcacauagca

SEQ ID NO: 592270 - RNA, 19 nt, Artificial Sequence
  Description of Artificial Sequence: Synthetic oligonucleotide
  Sense strand starting at position 3022 of SEQ ID NO: 584825
ggguuacguacuuauagga

SEQ ID NO: 592271 - RNA, 19 nt, Artificial Sequence
  Description of Artificial Sequence: Synthetic oligonucleotide
  Antisense strand to SEQ ID NO: 592270
uccuauaaguacguaaccc

SEQ ID NO: 592272 - RNA, 19 nt, Artificial Sequence
  Description of Artificial Sequence: Synthetic oligonucleotide
  Sense strand starting at position 3207 of SEQ ID NO: 584825
gacauacaucugggugacu

SEQ ID NO: 592273 - RNA, 19 nt, Artificial Sequence
  Description of Artificial Sequence: Synthetic oligonucleotide
  Antisense strand to SEQ ID NO: 592272
agucacccagauguauguc

SEQ ID NO: 592274 - RNA, 19 nt, Artificial Sequence
  Description of Artificial Sequence: Synthetic oligonucleotide
  Sense strand starting at position 3209 of SEQ ID NO: 584825
cauacaucugggugacuga

SEQ ID NO: 592275 - RNA, 19 nt, Artificial Sequence
  Description of Artificial Sequence: Synthetic oligonucleotide
  Antisense strand to SEQ ID NO: 592274
ucagucacccagauguaug

SEQ ID NO: 592276 - RNA, 19 nt, Artificial Sequence
  Description of Artificial Sequence: Synthetic oligonucleotide
  Sense strand starting at position 3231 of SEQ ID NO: 584825
guucuaagagauuaagcca

SEQ ID NO: 592277 - RNA, 19 nt, Artificial Sequence
  Description of Artificial Sequence: Synthetic oligonucleotide
  Antisense strand to SEQ ID NO: 592276
uggcuuaaucucuuagaac

SEQ ID NO: 592278 - RNA, 19 nt, Artificial Sequence
  Description of Artificial Sequence: Synthetic oligonucleotide
  Sense strand starting at position 3360 of SEQ ID NO: 584825
gucugagcacuugggaaga

SEQ ID NO: 592279 - RNA, 19 nt, Artificial Sequence
  Description of Artificial Sequence: Synthetic oligonucleotide
  Antisense strand to SEQ ID NO: 592278
ucuucccaagugcucagac

SEQ ID NO: 592280 - RNA, 19 nt, Artificial Sequence
  Description of Artificial Sequence: Synthetic oligonucleotide
  Sense strand starting at position 3493 of SEQ ID NO: 584825
cucucaugauggguacuua

SEQ ID NO: 592281 - RNA, 19 nt, Artificial Sequence
  Description of Artificial Sequence: Synthetic oligonucleotide
  Antisense strand to SEQ ID NO: 592280
uaaguacccaucaugagag

SEQ ID NO: 592282 - RNA, 19 nt, Artificial Sequence
  Description of Artificial Sequence: Synthetic oligonucleotide
  Sense strand starting at position 3719 of SEQ ID NO: 584825
gagucaagaugguuuggaa

SEQ ID NO: 592283 - RNA, 19 nt, Artificial Sequence
  Description of Artificial Sequence: Synthetic oligonucleotide
  Antisense strand to SEQ ID NO: 592282
uuccaaaccaucuugacuc

SEQ ID NO: 592284 - RNA, 19 nt, Artificial Sequence
  Description of Artificial Sequence: Synthetic oligonucleotide
  Sense strand starting at position 3828 of SEQ ID NO: 584825
uccuguuguccagacauaa

SEQ ID NO: 592285 - RNA, 19 nt, Artificial Sequence
  Description of Artificial Sequence: Synthetic oligonucleotide
  Antisense strand to SEQ ID NO: 592284
uuaugucuggacaacagga

SEQ ID NO: 592286 - RNA, 19 nt, Artificial Sequence
  Description of Artificial Sequence: Synthetic oligonucleotide
  Sense strand starting at position 3882 of SEQ ID NO: 584825
cgcuguggacaauaaauua

SEQ ID NO: 592287 - RNA, 19 nt, Artificial Sequence
  Description of Artificial Sequence: Synthetic oligonucleotide
  Antisense strand to SEQ ID NO: 592286
uaauuuauuguccacagcg

SEQ ID NO: 592288 - RNA, 19 nt, Artificial Sequence
  Description of Artificial Sequence: Synthetic oligonucleotide
  Sense strand starting at position 88 of SEQ ID NO: 584826
uugggugaccaguauauua

SEQ ID NO: 592289 - RNA, 19 nt, Artificial Sequence
  Description of Artificial Sequence: Synthetic oligonucleotide
  Antisense strand to SEQ ID NO: 592288
uaauauacuggucacccaa

SEQ ID NO: 592290 - RNA, 19 nt, Artificial Sequence
  Description of Artificial Sequence: Synthetic oligonucleotide
  Sense strand starting at position 131 of SEQ ID NO: 584826
ugguguaauguuugaauuu

SEQ ID NO: 592291 - RNA, 19 nt, Artificial Sequence
  Description of Artificial Sequence: Synthetic oligonucleotide
  Antisense strand to SEQ ID NO: 592290
aaauucaaacauuacacca

SEQ ID NO: 592292 - RNA, 19 nt, Artificial Sequence
  Description of Artificial Sequence: Synthetic oligonucleotide
  Sense strand starting at position 903 of SEQ ID NO: 584826
ggcacaagugcucauuaaa

SEQ ID NO: 592293 - RNA, 19 nt, Artificial Sequence
  Description of Artificial Sequence: Synthetic oligonucleotide
  Antisense strand to SEQ ID NO: 592292
uuuaaugagcacuugugcc

SEQ ID NO: 592294 - RNA, 19 nt, Artificial Sequence
  Description of Artificial Sequence: Synthetic oligonucleotide
  Sense strand starting at position 906 of SEQ ID NO: 584826
acaagugcucauuaaacag

SEQ ID NO: 592295 - RNA, 19 nt, Artificial Sequence
  Description of Artificial Sequence: Synthetic oligonucleotide
  Antisense strand to SEQ ID NO: 592294
cuguuuaaugagcacuugu

SEQ ID NO: 592296 - RNA, 19 nt, Artificial Sequence
  Description of Artificial Sequence: Synthetic oligonucleotide
  Sense strand starting at position 1011 of SEQ ID NO: 584826
ugugucuuucuggaggacu

SEQ ID NO: 592297 - RNA, 19 nt, Artificial Sequence
  Description of Artificial Sequence: Synthetic oligonucleotide
  Antisense strand to SEQ ID NO: 592296
aguccuccagaaagacaca

SEQ ID NO: 592298 - RNA, 19 nt, Artificial Sequence
  Description of Artificial Sequence: Synthetic oligonucleotide
  Sense strand starting at position 1127 of SEQ ID NO: 584826
gcuggccggccuuuaaauu

SEQ ID NO: 592299 - RNA, 19 nt, Artificial Sequence
  Description of Artificial Sequence: Synthetic oligonucleotide
  Antisense strand to SEQ ID NO: 592298
aauuuaaaggccggccagc

SEQ ID NO: 592300 - RNA, 19 nt, Artificial Sequence
  Description of Artificial Sequence: Synthetic oligonucleotide
  Sense strand starting at position 1227 of SEQ ID NO: 584826
ugacaagucgugcaacuua

SEQ ID NO: 592301 - RNA, 19 nt, Artificial Sequence
  Description of Artificial Sequence: Synthetic oligonucleotide
  Antisense strand to SEQ ID NO: 592300
uaaguugcacgacuuguca

SEQ ID NO: 592302 - RNA, 19 nt, Artificial Sequence
  Description of Artificial Sequence: Synthetic oligonucleotide
  Sense strand starting at position 1343 of SEQ ID NO: 584826
cgaaaucuagcccaaccaa

SEQ ID NO: 592303 - RNA, 19 nt, Artificial Sequence
  Description of Artificial Sequence: Synthetic oligonucleotide
  Antisense strand to SEQ ID NO: 592302
uugguugggcuagauuucg

SEQ ID NO: 592304 - RNA, 19 nt, Artificial Sequence
  Description of Artificial Sequence: Synthetic oligonucleotide
  Sense strand starting at position 2183 of SEQ ID NO: 584826
gccguuucgggucuauagu

SEQ ID NO: 592305 - RNA, 19 nt, Artificial Sequence
  Description of Artificial Sequence: Synthetic oligonucleotide
  Antisense strand to SEQ ID NO: 592304
acuauagacccgaaacggc

SEQ ID NO: 592306 - RNA, 19 nt, Artificial Sequence
  Description of Artificial Sequence: Synthetic oligonucleotide
  Sense strand starting at position 2192 of SEQ ID NO: 584826
ggucuauagugaguuagga

SEQ ID NO: 592307 - RNA, 19 nt, Artificial Sequence
  Description of Artificial Sequence: Synthetic oligonucleotide
  Antisense strand to SEQ ID NO: 592306
uccuaacucacuauagacc

SEQ ID NO: 592308 - RNA, 19 nt, Artificial Sequence
  Description of Artificial Sequence: Synthetic oligonucleotide
  Sense strand starting at position 2200 of SEQ ID NO: 584826
gugaguuaggaggguucga

SEQ ID NO: 592309 - RNA, 19 nt, Artificial Sequence
  Description of Artificial Sequence: Synthetic oligonucleotide
  Antisense strand to SEQ ID NO: 592308
ucgaacccuccuaacucac

SEQ ID NO: 592310 - RNA, 19 nt, Artificial Sequence
  Description of Artificial Sequence: Synthetic oligonucleotide
  Sense strand starting at position 2391 of SEQ ID NO: 584826
uugugauuggcgucgugga

SEQ ID NO: 592311 - RNA, 19 nt, Artificial Sequence
  Description of Artificial Sequence: Synthetic oligonucleotide
  Antisense strand to SEQ ID NO: 592310
uccacgacgccaaucacaa

SEQ ID NO: 592312 - RNA, 19 nt, Artificial Sequence
  Description of Artificial Sequence: Synthetic oligonucleotide
  Sense strand starting at position 2558 of SEQ ID NO: 584826
ggauuaaugcuagggaguc

SEQ ID NO: 592313 - RNA, 19 nt, Artificial Sequence
  Description of Artificial Sequence: Synthetic oligonucleotide
  Antisense strand to SEQ ID NO: 592312
gacucccuagcauuaaucc

SEQ ID NO: 592314 - RNA, 19 nt, Artificial Sequence
  Description of Artificial Sequence: Synthetic oligonucleotide
  Sense strand starting at position 2572 of SEQ ID NO: 584826
gagucuuucggguacacuc

SEQ ID NO: 592315 - RNA, 19 nt, Artificial Sequence
  Description of Artificial Sequence: Synthetic oligonucleotide
  Antisense strand to SEQ ID NO: 592314
gaguguacccgaaagacuc

SEQ ID NO: 592316 - RNA, 19 nt, Artificial Sequence
  Description of Artificial Sequence: Synthetic oligonucleotide
  Sense strand starting at position 2620 of SEQ ID NO: 584826
uucguucuucuuuagagac

SEQ ID NO: 592317 - RNA, 19 nt, Artificial Sequence
  Description of Artificial Sequence: Synthetic oligonucleotide
  Antisense strand to SEQ ID NO: 592316
gucucuaaagaagaacgaa

SEQ ID NO: 592318 - RNA, 19 nt, Artificial Sequence
  Description of Artificial Sequence: Synthetic oligonucleotide
  Sense strand starting at position 2644 of SEQ ID NO: 584826
ggccauggagccuaaugau

SEQ ID NO: 592319 - RNA, 19 nt, Artificial Sequence
  Description of Artificial Sequence: Synthetic oligonucleotide
  Antisense strand to SEQ ID NO: 592318
aucauuaggcuccauggcc

SEQ ID NO: 592320 - RNA, 19 nt, Artificial Sequence
  Description of Artificial Sequence: Synthetic oligonucleotide
  Sense strand starting at position 2777 of SEQ ID NO: 584826
ggaagacaccuuuagcuuu

SEQ ID NO: 592321 - RNA, 19 nt, Artificial Sequence
  Description of Artificial Sequence: Synthetic oligonucleotide
  Antisense strand to SEQ ID NO: 592320
aaagcuaaaggugucuucc

SEQ ID NO: 592322 - RNA, 19 nt, Artificial Sequence
  Description of Artificial Sequence: Synthetic oligonucleotide
  Sense strand starting at position 3183 of SEQ ID NO: 584826
uucguauuccaguagaacg

SEQ ID NO: 592323 - RNA, 19 nt, Artificial Sequence
  Description of Artificial Sequence: Synthetic oligonucleotide
  Antisense strand to SEQ ID NO: 592322
cguucuacuggaauacgaa

SEQ ID NO: 592324 - RNA, 19 nt, Artificial Sequence
  Description of Artificial Sequence: Synthetic oligonucleotide
  Sense strand starting at position 3235 of SEQ ID NO: 584826
uucuguccuccacauggau

SEQ ID NO: 592325 - RNA, 19 nt, Artificial Sequence
  Description of Artificial Sequence: Synthetic oligonucleotide
  Antisense strand to SEQ ID NO: 592324
auccauguggaggacagaa

SEQ ID NO: 592326 - RNA, 19 nt, Artificial Sequence
  Description of Artificial Sequence: Synthetic oligonucleotide
  Sense strand starting at position 3282 of SEQ ID NO: 584826
gaaggaagaaucugugugu

SEQ ID NO: 592327 - RNA, 19 nt, Artificial Sequence
  Description of Artificial Sequence: Synthetic oligonucleotide
  Antisense strand to SEQ ID NO: 592326
acacacagauucuuccuuc

SEQ ID NO: 592328 - RNA, 19 nt, Artificial Sequence
  Description of Artificial Sequence: Synthetic oligonucleotide
  Sense strand starting at position 3286 of SEQ ID NO: 584826
gaagaaucugugugucauc

SEQ ID NO: 592329 - RNA, 19 nt, Artificial Sequence
  Description of Artificial Sequence: Synthetic oligonucleotide
  Antisense strand to SEQ ID NO: 592328
gaugacacacagauucuuc

SEQ ID NO: 592330 - RNA, 19 nt, Artificial Sequence
  Description of Artificial Sequence: Synthetic oligonucleotide
  Sense strand starting at position 3287 of SEQ ID NO: 584826
aagaaucugugugucauca

SEQ ID NO: 592331 - RNA, 19 nt, Artificial Sequence
  Description of Artificial Sequence: Synthetic oligonucleotide
  Antisense strand to SEQ ID NO: 592330
ugaugacacacagauucuu

SEQ ID NO: 592332 - RNA, 19 nt, Artificial Sequence
  Description of Artificial Sequence: Synthetic oligonucleotide
  Sense strand starting at position 3383 of SEQ ID NO: 584826
aagugugucuuacugauag

SEQ ID NO: 592333 - RNA, 19 nt, Artificial Sequence
  Description of Artificial Sequence: Synthetic oligonucleotide
  Antisense strand to SEQ ID NO: 592332
cuaucaguaagacacacuu

SEQ ID NO: 592334 - RNA, 19 nt, Artificial Sequence
  Description of Artificial Sequence: Synthetic oligonucleotide
  Sense strand starting at position 3385 of SEQ ID NO: 584826
gugugucuuacugauagac

SEQ ID NO: 592335 - RNA, 19 nt, Artificial Sequence
  Description of Artificial Sequence: Synthetic oligonucleotide
  Antisense strand to SEQ ID NO: 592334
gucuaucaguaagacacac

SEQ ID NO: 592336 - RNA, 19 nt, Artificial Sequence
  Description of Artificial Sequence: Synthetic oligonucleotide
  Sense strand starting at position 3421 of SEQ ID NO: 584826
uguguucuuaaaggguaga

SEQ ID NO: 592337 - RNA, 19 nt, Artificial Sequence
  Description of Artificial Sequence: Synthetic oligonucleotide
  Antisense strand to SEQ ID NO: 592336
ucuacccuuuaagaacaca

SEQ ID NO: 592338 - RNA, 19 nt, Artificial Sequence
  Description of Artificial Sequence: Synthetic oligonucleotide
  Sense strand starting at position 3422 of SEQ ID NO: 584826
guguucuuaaaggguagaa

SEQ ID NO: 592339 - RNA, 19 nt, Artificial Sequence
  Description of Artificial Sequence: Synthetic oligonucleotide
  Antisense strand to SEQ ID NO: 592338
uucuacccuuuaagaacac

SEQ ID NO: 592340 - RNA, 19 nt, Artificial Sequence
  Description of Artificial Sequence: Synthetic oligonucleotide
  Sense strand starting at position 3471 of SEQ ID NO: 584826
auagacuguugagugaaau

SEQ ID NO: 592341 - RNA, 19 nt, Artificial Sequence
  Description of Artificial Sequence: Synthetic oligonucleotide
  Antisense strand to SEQ ID NO: 592340
auuucacucaacagucuau

SEQ ID NO: 592342 - RNA, 19 nt, Artificial Sequence
  Description of Artificial Sequence: Synthetic oligonucleotide
  Sense strand starting at position 3472 of SEQ ID NO: 584826
uagacuguugagugaaauu

SEQ ID NO: 592343 - RNA, 19 nt, Artificial Sequence
  Description of Artificial Sequence: Synthetic oligonucleotide
  Antisense strand to SEQ ID NO: 592342
aauuucacucaacagucua

SEQ ID NO: 592344 - RNA, 19 nt, Artificial Sequence
  Description of Artificial Sequence: Synthetic oligonucleotide
  Sense strand starting at position 3512 of SEQ ID NO: 584826
ugagucucuugagcuuaaa

SEQ ID NO: 592345 - RNA, 19 nt, Artificial Sequence
  Description of Artificial Sequence: Synthetic oligonucleotide
  Antisense strand to SEQ ID NO: 592344
uuuaagcucaagagacuca

SEQ ID NO: 592346 - RNA, 19 nt, Artificial Sequence
  Description of Artificial Sequence: Synthetic oligonucleotide
  Sense strand starting at position 3523 of SEQ ID NO: 584826
agcuuaaagccuuggacau

SEQ ID NO: 592347 - RNA, 19 nt, Artificial Sequence
  Description of Artificial Sequence: Synthetic oligonucleotide
  Antisense strand to SEQ ID NO: 592346
auguccaaggcuuuaagcu

SEQ ID NO: 592348 - RNA, 19 nt, Artificial Sequence
  Description of Artificial Sequence: Synthetic oligonucleotide
  Sense strand starting at position 3524 of SEQ ID NO: 584826
gcuuaaagccuuggacaua

SEQ ID NO: 592349 - RNA, 19 nt, Artificial Sequence
  Description of Artificial Sequence: Synthetic oligonucleotide
  Antisense strand to SEQ ID NO: 592348
uauguccaaggcuuuaagc

SEQ ID NO: 592350 - RNA, 19 nt, Artificial Sequence
  Description of Artificial Sequence: Synthetic oligonucleotide
  Sense strand starting at position 3561 of SEQ ID NO: 584826
ccuguaauacuuggagaca

SEQ ID NO: 592351 - RNA, 19 nt, Artificial Sequence
  Description of Artificial Sequence: Synthetic oligonucleotide
  Antisense strand to SEQ ID NO: 592350
ugucuccaaguauuacagg

SEQ ID NO: 592352 - RNA, 19 nt, Artificial Sequence
  Description of Artificial Sequence: Synthetic oligonucleotide
  Sense strand starting at position 3613 of SEQ ID NO: 584826
augugauauuaccuggaua

SEQ ID NO: 592353 - RNA, 19 nt, Artificial Sequence
  Description of Artificial Sequence: Synthetic oligonucleotide
  Antisense strand to SEQ ID NO: 592352
uauccagguaauaucacau

SEQ ID NO: 592354 - RNA, 19 nt, Artificial Sequence
  Description of Artificial Sequence: Synthetic oligonucleotide
  Sense strand starting at position 3615 of SEQ ID NO: 584826
gugauauuaccuggauaua

SEQ ID NO: 592355 - RNA, 19 nt, Artificial Sequence
  Description of Artificial Sequence: Synthetic oligonucleotide
  Antisense strand to SEQ ID NO: 592354
uauauccagguaauaucac

SEQ ID NO: 592356 - RNA, 19 nt, Artificial Sequence
  Description of Artificial Sequence: Synthetic oligonucleotide
  Sense strand starting at position 3646 of SEQ ID NO: 584826
auagacuugugauuagaug

SEQ ID NO: 592357 - RNA, 19 nt, Artificial Sequence
  Description of Artificial Sequence: Synthetic oligonucleotide
  Antisense strand to SEQ ID NO: 592356
caucuaaucacaagucuau

SEQ ID NO: 592358 - RNA, 19 nt, Artificial Sequence
  Description of Artificial Sequence: Synthetic oligonucleotide
  Sense strand starting at position 3647 of SEQ ID NO: 584826
uagacuugugauuagaugu

SEQ ID NO: 592359 - RNA, 19 nt, Artificial Sequence
  Description of Artificial Sequence: Synthetic oligonucleotide
  Antisense strand to SEQ ID NO: 592358
acaucuaaucacaagucua

SEQ ID NO: 592360 - RNA, 19 nt, Artificial Sequence
  Description of Artificial Sequence: Synthetic oligonucleotide
  Sense strand starting at position 3664 of SEQ ID NO: 584826
guauauaaauacucuggua

SEQ ID NO: 592361 - RNA, 19 nt, Artificial Sequence
  Description of Artificial Sequence: Synthetic oligonucleotide
  Antisense strand to SEQ ID NO: 592360
uaccagaguauuuauauac

SEQ ID NO: 592362 - RNA, 19 nt, Artificial Sequence
  Description of Artificial Sequence: Synthetic oligonucleotide
  Sense strand starting at position 3685 of SEQ ID NO: 584826
ucccaagagucaguuugua

SEQ ID NO: 592363 - RNA, 19 nt, Artificial Sequence
  Description of Artificial Sequence: Synthetic oligonucleotide
  Antisense strand to SEQ ID NO: 592362
uacaaacugacucuuggga

SEQ ID NO: 592364 - RNA, 19 nt, Artificial Sequence
  Description of Artificial Sequence: Synthetic oligonucleotide
  Sense strand starting at position 3689 of SEQ ID NO: 584826
aagagucaguuuguaguua

SEQ ID NO: 592365 - RNA, 19 nt, Artificial Sequence
  Description of Artificial Sequence: Synthetic oligonucleotide
  Antisense strand to SEQ ID NO: 592364
uaacuacaaacugacucuu

SEQ ID NO: 592366 - RNA, 19 nt, Artificial Sequence
  Description of Artificial Sequence: Synthetic oligonucleotide
  Sense strand starting at position 3694 of SEQ ID NO: 584826
ucaguuuguaguuaggaaa

SEQ ID NO: 592367 - RNA, 19 nt, Artificial Sequence
  Description of Artificial Sequence: Synthetic oligonucleotide
  Antisense strand to SEQ ID NO: 592366
uuuccuaacuacaaacuga

SEQ ID NO: 592368 - RNA, 19 nt, Artificial Sequence
  Description of Artificial Sequence: Synthetic oligonucleotide
  Sense strand starting at position 119 of SEQ ID NO: 584827
accagaagacuuggugagu

SEQ ID NO: 592369 - RNA, 19 nt, Artificial Sequence
  Description of Artificial Sequence: Synthetic oligonucleotide
  Antisense strand to SEQ ID NO: 592368
acucaccaagucuucuggu

SEQ ID NO: 592370 - RNA, 19 nt, Artificial Sequence
  Description of Artificial Sequence: Synthetic oligonucleotide
  Sense strand starting at position 662 of SEQ ID NO: 584827
ccaucuuuccugcagaggu

SEQ ID NO: 592371 - RNA, 19 nt, Artificial Sequence
  Description of Artificial Sequence: Synthetic oligonucleotide
  Antisense strand to SEQ ID NO: 592370
accucugcaggaaagaugg

SEQ ID NO: 592372 - RNA, 19 nt, Artificial Sequence
  Description of Artificial Sequence: Synthetic oligonucleotide
  Sense strand starting at position 1116 of SEQ ID NO: 584827
caucuuucuccagagggca

SEQ ID NO: 592373 - RNA, 19 nt, Artificial Sequence
  Description of Artificial Sequence: Synthetic oligonucleotide
  Antisense strand to SEQ ID NO: 592372
ugcccucuggagaaagaug

SEQ ID NO: 592374 - RNA, 19 nt, Artificial Sequence
  Description of Artificial Sequence: Synthetic oligonucleotide
  Sense strand starting at position 1202 of SEQ ID NO: 584827
guggguggauucucacacu

SEQ ID NO: 592375 - RNA, 19 nt, Artificial Sequence
  Description of Artificial Sequence: Synthetic oligonucleotide
  Antisense strand to SEQ ID NO: 592374
agugugagaauccacccac

SEQ ID NO: 592376 - RNA, 19 nt, Artificial Sequence
  Description of Artificial Sequence: Synthetic oligonucleotide
  Sense strand starting at position 1230 of SEQ ID NO: 584827
gacugaacccagugaugcu

SEQ ID NO: 592377 - RNA, 19 nt, Artificial Sequence
  Description of Artificial Sequence: Synthetic oligonucleotide
  Antisense strand to SEQ ID NO: 592376
agcaucacuggguucaguc

SEQ ID NO: 592378 - RNA, 19 nt, Artificial Sequence
  Description of Artificial Sequence: Synthetic oligonucleotide
  Sense strand starting at position 1649 of SEQ ID NO: 584827
ugcauugauggccacagua

SEQ ID NO: 592379 - RNA, 19 nt, Artificial Sequence
  Description of Artificial Sequence: Synthetic oligonucleotide
  Antisense strand to SEQ ID NO: 592378
uacuguggccaucaaugca

SEQ ID NO: 592380 - RNA, 19 nt, Artificial Sequence
  Description of Artificial Sequence: Synthetic oligonucleotide
  Sense strand starting at position 1651 of SEQ ID NO: 584827
cauugauggccacaguacu

SEQ ID NO: 592381 - RNA, 19 nt, Artificial Sequence
  Description of Artificial Sequence: Synthetic oligonucleotide
  Antisense strand to SEQ ID NO: 592380
aguacuguggccaucaaug

SEQ ID NO: 592382 - RNA, 19 nt, Artificial Sequence
  Description of Artificial Sequence: Synthetic oligonucleotide
  Sense strand starting at position 1730 of SEQ ID NO: 584827
ccaagauggucuccaguca

SEQ ID NO: 592383 - RNA, 19 nt, Artificial Sequence
  Description of Artificial Sequence: Synthetic oligonucleotide
  Antisense strand to SEQ ID NO: 592382
ugacuggagaccaucuugg

SEQ ID NO: 592384 - RNA, 19 nt, Artificial Sequence
  Description of Artificial Sequence: Synthetic oligonucleotide
  Sense strand starting at position 1731 of SEQ ID NO: 584827
caagauggucuccagucau

SEQ ID NO: 592385 - RNA, 19 nt, Artificial Sequence
  Description of Artificial Sequence: Synthetic oligonucleotide
  Antisense strand to SEQ ID NO: 592384
augacuggagaccaucuug

SEQ ID NO: 592386 - RNA, 19 nt, Artificial Sequence
  Description of Artificial Sequence: Synthetic oligonucleotide
  Sense strand starting at position 2156 of SEQ ID NO: 584827
aggguuucucaggaguuau

SEQ ID NO: 592387 - RNA, 19 nt, Artificial Sequence
  Description of Artificial Sequence: Synthetic oligonucleotide
  Antisense strand to SEQ ID NO: 592386
auaacuccugagaaacccu

SEQ ID NO: 592388 - RNA, 19 nt, Artificial Sequence
  Description of Artificial Sequence: Synthetic oligonucleotide
  Sense strand starting at position 2183 of SEQ ID NO: 584827
cugagcuguccagggagaa

SEQ ID NO: 592389 - RNA, 19 nt, Artificial Sequence
  Description of Artificial Sequence: Synthetic oligonucleotide
  Antisense strand to SEQ ID NO: 592388
uucucccuggacagcucag

SEQ ID NO: 592390 - RNA, 19 nt, Artificial Sequence
  Description of Artificial Sequence: Synthetic oligonucleotide
  Sense strand starting at position 2326 of SEQ ID NO: 584827
guuguuucccaagaacuag

SEQ ID NO: 592391 - RNA, 19 nt, Artificial Sequence
  Description of Artificial Sequence: Synthetic oligonucleotide
  Antisense strand to SEQ ID NO: 592390
cuaguucuugggaaacaac

SEQ ID NO: 592392 - RNA, 19 nt, Artificial Sequence
  Description of Artificial Sequence: Synthetic oligonucleotide
  Sense strand starting at position 2390 of SEQ ID NO: 584827
ucuugaagaagucguuaga

SEQ ID NO: 592393 - RNA, 19 nt, Artificial Sequence
  Description of Artificial Sequence: Synthetic oligonucleotide
  Antisense strand to SEQ ID NO: 592392
ucuaacgacuucuucaaga

SEQ ID NO: 592394 - RNA, 19 nt, Artificial Sequence
  Description of Artificial Sequence: Synthetic oligonucleotide
  Sense strand starting at position 2396 of SEQ ID NO: 584827
agaagucguuagagggaaa

SEQ ID NO: 592395 - RNA, 19 nt, Artificial Sequence
  Description of Artificial Sequence: Synthetic oligonucleotide
  Antisense strand to SEQ ID NO: 592394
uuucccucuaacgacuucu

SEQ ID NO: 592396 - RNA, 19 nt, Artificial Sequence
  Description of Artificial Sequence: Synthetic oligonucleotide
  Sense strand starting at position 2413 of SEQ ID NO: 584827
aaacuagcuguguagacaa

SEQ ID NO: 592397 - RNA, 19 nt, Artificial Sequence
  Description of Artificial Sequence: Synthetic oligonucleotide
  Antisense strand to SEQ ID NO: 592396
uugucuacacagcuaguuu

SEQ ID NO: 592398 - RNA, 19 nt, Artificial Sequence
  Description of Artificial Sequence: Synthetic oligonucleotide
  Sense strand starting at position 2438 of SEQ ID NO: 584827
gcaauacaacuugguaaau

SEQ ID NO: 592399 - RNA, 19 nt, Artificial Sequence
  Description of Artificial Sequence: Synthetic oligonucleotide
  Antisense strand to SEQ ID NO: 592398
auuuaccaaguuguauugc

SEQ ID NO: 592400 - RNA, 19 nt, Artificial Sequence
  Description of Artificial Sequence: Synthetic oligonucleotide
  Sense strand starting at position 2447 of SEQ ID NO: 584827
cuugguaaaugcuuuagaa

SEQ ID NO: 592401 - RNA, 19 nt, Artificial Sequence
  Description of Artificial Sequence: Synthetic oligonucleotide
  Antisense strand to SEQ ID NO: 592400
uucuaaagcauuuaccaag

SEQ ID NO: 592402 - RNA, 19 nt, Artificial Sequence
  Description of Artificial Sequence: Synthetic oligonucleotide
  Sense strand starting at position 2449 of SEQ ID NO: 584827
ugguaaaugcuuuagaaca

SEQ ID NO: 592403 - RNA, 19 nt, Artificial Sequence
  Description of Artificial Sequence: Synthetic oligonucleotide
  Antisense strand to SEQ ID NO: 592402
uguucuaaagcauuuacca

SEQ ID NO: 592404 - RNA, 19 nt, Artificial Sequence
  Description of Artificial Sequence: Synthetic oligonucleotide
  Sense strand starting at position 2454 of SEQ ID NO: 584827
aaugcuuuagaacagguau

SEQ ID NO: 592405 - RNA, 19 nt, Artificial Sequence
  Description of Artificial Sequence: Synthetic oligonucleotide
  Antisense strand to SEQ ID NO: 592404
auaccuguucuaaagcauu

SEQ ID NO: 592406 - RNA, 19 nt, Artificial Sequence
  Description of Artificial Sequence: Synthetic oligonucleotide
  Sense strand starting at position 2456 of SEQ ID NO: 584827
ugcuuuagaacagguauga

SEQ ID NO: 592407 - RNA, 19 nt, Artificial Sequence
  Description of Artificial Sequence: Synthetic oligonucleotide
  Antisense strand to SEQ ID NO: 592406
ucauaccuguucuaaagca

SEQ ID NO: 592408 - RNA, 19 nt, Artificial Sequence
  Description of Artificial Sequence: Synthetic oligonucleotide
  Sense strand starting at position 2579 of SEQ ID NO: 584827
caaagaggcuauguaaucu

SEQ ID NO: 592409 - RNA, 19 nt, Artificial Sequence
  Description of Artificial Sequence: Synthetic oligonucleotide
  Antisense strand to SEQ ID NO: 592408
agauuacauagccucuuug

SEQ ID NO: 592410 - RNA, 19 nt, Artificial Sequence
  Description of Artificial Sequence: Synthetic oligonucleotide
  Sense strand starting at position 2596 of SEQ ID NO: 584827
cuggcuguuagagaggaua

SEQ ID NO: 592411 - RNA, 19 nt, Artificial Sequence
  Description of Artificial Sequence: Synthetic oligonucleotide
  Antisense strand to SEQ ID NO: 592410
uauccucucuaacagccag

SEQ ID NO: 592412 - RNA, 19 nt, Artificial Sequence
  Description of Artificial Sequence: Synthetic oligonucleotide
  Sense strand starting at position 2609 of SEQ ID NO: 584827
aggauagauguugguguca

SEQ ID NO: 592413 - RNA, 19 nt, Artificial Sequence
  Description of Artificial Sequence: Synthetic oligonucleotide
  Antisense strand to SEQ ID NO: 592412
ugacaccaacaucuauccu

SEQ ID NO: 592414 - RNA, 19 nt, Artificial Sequence
  Description of Artificial Sequence: Synthetic oligonucleotide
  Sense strand starting at position 2618 of SEQ ID NO: 584827
guuggugucaggcagaaug

SEQ ID NO: 592415 - RNA, 19 nt, Artificial Sequence
  Description of Artificial Sequence: Synthetic oligonucleotide
  Antisense strand to SEQ ID NO: 592414
cauucugccugacaccaac

SEQ ID NO: 592416 - RNA, 19 nt, Artificial Sequence
  Description of Artificial Sequence: Synthetic oligonucleotide
  Sense strand starting at position 3046 of SEQ ID NO: 584827
caaagacuugcacauggua

SEQ ID NO: 592417 - RNA, 19 nt, Artificial Sequence
  Description of Artificial Sequence: Synthetic oligonucleotide
  Antisense strand to SEQ ID NO: 592416
uaccaugugcaagucuuug

SEQ ID NO: 592418 - RNA, 19 nt, Artificial Sequence
  Description of Artificial Sequence: Synthetic oligonucleotide
  Sense strand starting at position 3092 of SEQ ID NO: 584827
aauaguaauguuugcaaag

SEQ ID NO: 592419 - RNA, 19 nt, Artificial Sequence
  Description of Artificial Sequence: Synthetic oligonucleotide
  Antisense strand to SEQ ID NO: 592418
cuuugcaaacauuacuauu

SEQ ID NO: 592420 - RNA, 19 nt, Artificial Sequence
  Description of Artificial Sequence: Synthetic oligonucleotide
  Sense strand starting at position 3116 of SEQ ID NO: 584827
aguuucugguggguaauaa

SEQ ID NO: 592421 - RNA, 19 nt, Artificial Sequence
  Description of Artificial Sequence: Synthetic oligonucleotide
  Antisense strand to SEQ ID NO: 592420
uuauuacccaccagaaacu

SEQ ID NO: 592422 - RNA, 19 nt, Artificial Sequence
  Description of Artificial Sequence: Synthetic oligonucleotide
  Sense strand starting at position 3117 of SEQ ID NO: 584827
guuucugguggguaauaag

SEQ ID NO: 592423 - RNA, 19 nt, Artificial Sequence
  Description of Artificial Sequence: Synthetic oligonucleotide
  Antisense strand to SEQ ID NO: 592422
cuuauuacccaccagaaac

SEQ ID NO: 592424 - RNA, 19 nt, Artificial Sequence
  Description of Artificial Sequence: Synthetic oligonucleotide
  Sense strand starting at position 3127 of SEQ ID NO: 584827
gguaauaaguucucaaaua

SEQ ID NO: 592425 - RNA, 19 nt, Artificial Sequence
  Description of Artificial Sequence: Synthetic oligonucleotide
  Antisense strand to SEQ ID NO: 592424
uauuugagaacuuauuacc

SEQ ID NO: 592426 - RNA, 19 nt, Artificial Sequence
  Description of Artificial Sequence: Synthetic oligonucleotide
  Sense strand starting at position 3149 of SEQ ID NO: 584827
ggcaguaagaauugccaaa

SEQ ID NO: 592427 - RNA, 19 nt, Artificial Sequence
  Description of Artificial Sequence: Synthetic oligonucleotide
  Antisense strand to SEQ ID NO: 592426
uuuggcaauucuuacugcc

SEQ ID NO: 592428 - RNA, 19 nt, Artificial Sequence
  Description of Artificial Sequence: Synthetic oligonucleotide
  Sense strand starting at position 3167 of SEQ ID NO: 584827
auagguuguccuuggauag

SEQ ID NO: 592429 - RNA, 19 nt, Artificial Sequence
  Description of Artificial Sequence: Synthetic oligonucleotide
  Antisense strand to SEQ ID NO: 592428
cuauccaaggacaaccuau

SEQ ID NO: 592430 - RNA, 19 nt, Artificial Sequence
  Description of Artificial Sequence: Synthetic oligonucleotide
  Sense strand starting at position 3202 of SEQ ID NO: 584827
caguuaaugcugugagaga

SEQ ID NO: 592431 - RNA, 19 nt, Artificial Sequence
  Description of Artificial Sequence: Synthetic oligonucleotide
  Antisense strand to SEQ ID NO: 592430
ucucucacagcauuaacug

SEQ ID NO: 592432 - RNA, 19 nt, Artificial Sequence
  Description of Artificial Sequence: Synthetic oligonucleotide
  Sense strand starting at position 3216 of SEQ ID NO: 584827
agagauggaucuuccucga

SEQ ID NO: 592433 - RNA, 19 nt, Artificial Sequence
  Description of Artificial Sequence: Synthetic oligonucleotide
  Antisense strand to SEQ ID NO: 592432
ucgaggaagauccaucucu

SEQ ID NO: 592434 - RNA, 19 nt, Artificial Sequence
  Description of Artificial Sequence: Synthetic oligonucleotide
  Sense strand starting at position 3219 of SEQ ID NO: 584827
gauggaucuuccucgauag

SEQ ID NO: 592435 - RNA, 19 nt, Artificial Sequence
  Description of Artificial Sequence: Synthetic oligonucleotide
  Antisense strand to SEQ ID NO: 592434
cuaucgaggaagauccauc

SEQ ID NO: 592436 - RNA, 19 nt, Artificial Sequence
  Description of Artificial Sequence: Synthetic oligonucleotide
  Sense strand starting at position 3220 of SEQ ID NO: 584827
auggaucuuccucgauaga

SEQ ID NO: 592437 - RNA, 19 nt, Artificial Sequence
  Description of Artificial Sequence: Synthetic oligonucleotide
  Antisense strand to SEQ ID NO: 592436
ucuaucgaggaagauccau

SEQ ID NO: 592438 - RNA, 19 nt, Artificial Sequence
  Description of Artificial Sequence: Synthetic oligonucleotide
  Sense strand starting at position 3221 of SEQ ID NO: 584827
uggaucuuccucgauagau

SEQ ID NO: 592439 - RNA, 19 nt, Artificial Sequence
  Description of Artificial Sequence: Synthetic oligonucleotide
  Antisense strand to SEQ ID NO: 592438
aucuaucgaggaagaucca

SEQ ID NO: 592440 - RNA, 19 nt, Artificial Sequence
  Description of Artificial Sequence: Synthetic oligonucleotide
  Sense strand starting at position 3223 of SEQ ID NO: 584827
gaucuuccucgauagauua

SEQ ID NO: 592441 - RNA, 19 nt, Artificial Sequence
  Description of Artificial Sequence: Synthetic oligonucleotide
  Antisense strand to SEQ ID NO: 592440
uaaucuaucgaggaagauc

SEQ ID NO: 592442 - RNA, 19 nt, Artificial Sequence
  Description of Artificial Sequence: Synthetic oligonucleotide
  Sense strand starting at position 3311 of SEQ ID NO: 584827
cucagaugauucccgagua

SEQ ID NO: 592443 - RNA, 19 nt, Artificial Sequence
  Description of Artificial Sequence: Synthetic oligonucleotide
  Antisense strand to SEQ ID NO: 592442
uacucgggaaucaucugag

SEQ ID NO: 592444 - RNA, 19 nt, Artificial Sequence
  Description of Artificial Sequence: Synthetic oligonucleotide
  Sense strand starting at position 3572 of SEQ ID NO: 584827
uugggugaccaguauauua

SEQ ID NO: 592445 - RNA, 19 nt, Artificial Sequence
  Description of Artificial Sequence: Synthetic oligonucleotide
  Antisense strand to SEQ ID NO: 592444
uaauauacuggucacccaa

SEQ ID NO: 592446 - RNA, 19 nt, Artificial Sequence
  Description of Artificial Sequence: Synthetic oligonucleotide
  Sense strand starting at position 3615 of SEQ ID NO: 584827
ugguguaauguuugaauuu

SEQ ID NO: 592447 - RNA, 19 nt, Artificial Sequence
  Description of Artificial Sequence: Synthetic oligonucleotide
  Antisense strand to SEQ ID NO: 592446
aaauucaaacauuacacca

SEQ ID NO: 592448 - RNA, 19 nt, Artificial Sequence
  Description of Artificial Sequence: Synthetic oligonucleotide
  Sense strand starting at position 93 of SEQ ID NO: 584828
ucaaauggcuucucaugau

SEQ ID NO: 592449 - RNA, 19 nt, Artificial Sequence
  Description of Artificial Sequence: Synthetic oligonucleotide
  Antisense strand to SEQ ID NO: 592448
aucaugagaagccauuuga

SEQ ID NO: 592450 - RNA, 19 nt, Artificial Sequence
  Description of Artificial Sequence: Synthetic oligonucleotide
  Sense strand starting at position 195 of SEQ ID NO: 584828
ccuaaauggccacaaguau

SEQ ID NO: 592451 - RNA, 19 nt, Artificial Sequence
  Description of Artificial Sequence: Synthetic oligonucleotide
  Antisense strand to SEQ ID NO: 592450
auacuuguggccauuuagg

SEQ ID NO: 592452 - RNA, 19 nt, Artificial Sequence
  Description of Artificial Sequence: Synthetic oligonucleotide
  Sense strand starting at position 226 of SEQ ID NO: 584828
ggaguugaauagucugaag

SEQ ID NO: 592453 - RNA, 19 nt, Artificial Sequence
  Description of Artificial Sequence: Synthetic oligonucleotide
  Antisense strand to SEQ ID NO: 592452
cuucagacuauucaacucc

SEQ ID NO: 592454 - RNA, 19 nt, Artificial Sequence
  Description of Artificial Sequence: Synthetic oligonucleotide
  Sense strand starting at position 228 of SEQ ID NO: 584828
aguugaauagucugaagag

SEQ ID NO: 592455 - RNA, 19 nt, Artificial Sequence
  Description of Artificial Sequence: Synthetic oligonucleotide
  Antisense strand to SEQ ID NO: 592454
cucuucagacuauucaacu

SEQ ID NO: 592456 - RNA, 19 nt, Artificial Sequence
  Description of Artificial Sequence: Synthetic oligonucleotide
  Sense strand starting at position 242 of SEQ ID NO: 584828
aagagacaucagugcaaau

SEQ ID NO: 592457 - RNA, 19 nt, Artificial Sequence
  Description of Artificial Sequence: Synthetic oligonucleotide
  Antisense strand to SEQ ID NO: 592456
auuugcacugaugucucuu

SEQ ID NO: 592458 - RNA, 19 nt, Artificial Sequence
  Description of Artificial Sequence: Synthetic oligonucleotide
  Sense strand starting at position 282 of SEQ ID NO: 584828
cagauuaucuugucuggaa

SEQ ID NO: 592459 - RNA, 19 nt, Artificial Sequence
  Description of Artificial Sequence: Synthetic oligonucleotide
  Antisense strand to SEQ ID NO: 592458
uuccagacaagauaaucug

SEQ ID NO: 592460 - RNA, 19 nt, Artificial Sequence
  Description of Artificial Sequence: Synthetic oligonucleotide
  Sense strand starting at position 283 of SEQ ID NO: 584828
agauuaucuugucuggaau

SEQ ID NO: 592461 - RNA, 19 nt, Artificial Sequence
  Description of Artificial Sequence: Synthetic oligonucleotide
  Antisense strand to SEQ ID NO: 592460
auuccagacaagauaaucu

SEQ ID NO: 592462 - RNA, 19 nt, Artificial Sequence
  Description of Artificial Sequence: Synthetic oligonucleotide
  Sense strand starting at position 284 of SEQ ID NO: 584828
gauuaucuugucuggaauu

SEQ ID NO: 592463 - RNA, 19 nt, Artificial Sequence
  Description of Artificial Sequence: Synthetic oligonucleotide
  Antisense strand to SEQ ID NO: 592462
aauuccagacaagauaauc

SEQ ID NO: 592464 - RNA, 19 nt, Artificial Sequence
  Description of Artificial Sequence: Synthetic oligonucleotide
  Sense strand starting at position 313 of SEQ ID NO: 584828
ggcugugugacguugagca

SEQ ID NO: 592465 - RNA, 19 nt, Artificial Sequence
  Description of Artificial Sequence: Synthetic oligonucleotide
  Antisense strand to SEQ ID NO: 592464
ugcucaacgucacacagcc

SEQ ID NO: 592466 - RNA, 19 nt, Artificial Sequence
  Description of Artificial Sequence: Synthetic oligonucleotide
  Sense strand starting at position 323 of SEQ ID NO: 584828
cguugagcacauuaccaaa

SEQ ID NO: 592467 - RNA, 19 nt, Artificial Sequence
  Description of Artificial Sequence: Synthetic oligonucleotide
  Antisense strand to SEQ ID NO: 592466
uuugguaaugugcucaacg

SEQ ID NO: 592468 - RNA, 19 nt, Artificial Sequence
  Description of Artificial Sequence: Synthetic oligonucleotide
  Sense strand starting at position 572 of SEQ ID NO: 584828
cucuaugacuuaguguaaa

SEQ ID NO: 592469 - RNA, 19 nt, Artificial Sequence
  Description of Artificial Sequence: Synthetic oligonucleotide
  Antisense strand to SEQ ID NO: 592468
uuuacacuaagucauagag

SEQ ID NO: 592470 - RNA, 19 nt, Artificial Sequence
  Description of Artificial Sequence: Synthetic oligonucleotide
  Sense strand starting at position 731 of SEQ ID NO: 584828
uguucaagagugggugaga

SEQ ID NO: 592471 - RNA, 19 nt, Artificial Sequence
  Description of Artificial Sequence: Synthetic oligonucleotide
  Antisense strand to SEQ ID NO: 592470
ucucacccacucuugaaca

SEQ ID NO: 592472 - RNA, 19 nt, Artificial Sequence
  Description of Artificial Sequence: Synthetic oligonucleotide
  Sense strand starting at position 732 of SEQ ID NO: 584828
guucaagagugggugagaa

SEQ ID NO: 592473 - RNA, 19 nt, Artificial Sequence
  Description of Artificial Sequence: Synthetic oligonucleotide
  Antisense strand to SEQ ID NO: 592472
uucucacccacucuugaac

SEQ ID NO: 592474 - RNA, 19 nt, Artificial Sequence
  Description of Artificial Sequence: Synthetic oligonucleotide
  Sense strand starting at position 742 of SEQ ID NO: 584828
gggugagaacaguguggau

SEQ ID NO: 592475 - RNA, 19 nt, Artificial Sequence
  Description of Artificial Sequence: Synthetic oligonucleotide
  Antisense strand to SEQ ID NO: 592474
auccacacuguucucaccc

SEQ ID NO: 592476 - RNA, 19 nt, Artificial Sequence
  Description of Artificial Sequence: Synthetic oligonucleotide
  Sense strand starting at position 768 of SEQ ID NO: 584828
ggaacauuucugugucagc

SEQ ID NO: 592477 - RNA, 19 nt, Artificial Sequence
  Description of Artificial Sequence: Synthetic oligonucleotide
  Antisense strand to SEQ ID NO: 592476
gcugacacagaaauguucc

SEQ ID NO: 592478 - RNA, 19 nt, Artificial Sequence
  Description of Artificial Sequence: Synthetic oligonucleotide
  Sense strand starting at position 769 of SEQ ID NO: 584828
gaacauuucugugucagca

SEQ ID NO: 592479 - RNA, 19 nt, Artificial Sequence
  Description of Artificial Sequence: Synthetic oligonucleotide
  Antisense strand to SEQ ID NO: 592478
ugcugacacagaaauguuc

SEQ ID NO: 592480 - RNA, 19 nt, Artificial Sequence
  Description of Artificial Sequence: Synthetic oligonucleotide
  Sense strand starting at position 796 of SEQ ID NO: 584828
cuguguuugggagagacuu

SEQ ID NO: 592481 - RNA, 19 nt, Artificial Sequence
  Description of Artificial Sequence: Synthetic oligonucleotide
  Antisense strand to SEQ ID NO: 592480
aagucucucccaaacacag

SEQ ID NO: 592482 - RNA, 19 nt, Artificial Sequence
  Description of Artificial Sequence: Synthetic oligonucleotide
  Sense strand starting at position 1068 of SEQ ID NO: 584828
gcguguugaagucuaaggu

SEQ ID NO: 592483 - RNA, 19 nt, Artificial Sequence
  Description of Artificial Sequence: Synthetic oligonucleotide
  Antisense strand to SEQ ID NO: 592482
accuuagacuucaacacgc

SEQ ID NO: 592484 - RNA, 19 nt, Artificial Sequence
  Description of Artificial Sequence: Synthetic oligonucleotide
  Sense strand starting at position 1104 of SEQ ID NO: 584828
ucuuuacuagaauaagugu

SEQ ID NO: 592485 - RNA, 19 nt, Artificial Sequence
  Description of Artificial Sequence: Synthetic oligonucleotide
  Antisense strand to SEQ ID NO: 592484
acacuuauucuaguaaaga

SEQ ID NO: 592486 - RNA, 19 nt, Artificial Sequence
  Description of Artificial Sequence: Synthetic oligonucleotide
  Sense strand starting at position 1308 of SEQ ID NO: 584828
cuaccuaguccaugaauga

SEQ ID NO: 592487 - RNA, 19 nt, Artificial Sequence
  Description of Artificial Sequence: Synthetic oligonucleotide
  Antisense strand to SEQ ID NO: 592486
ucauucauggacuagguag

SEQ ID NO: 592488 - RNA, 19 nt, Artificial Sequence
  Description of Artificial Sequence: Synthetic oligonucleotide
  Sense strand starting at position 1412 of SEQ ID NO: 584828
uuauaagaagccugaaggu

SEQ ID NO: 592489 - RNA, 19 nt, Artificial Sequence
  Description of Artificial Sequence: Synthetic oligonucleotide
  Antisense strand to SEQ ID NO: 592488
accuucaggcuucuuauaa

SEQ ID NO: 592490 - RNA, 19 nt, Artificial Sequence
  Description of Artificial Sequence: Synthetic oligonucleotide
  Sense strand starting at position 1552 of SEQ ID NO: 584828
cucaaugaguagcuacaau

SEQ ID NO: 592491 - RNA, 19 nt, Artificial Sequence
  Description of Artificial Sequence: Synthetic oligonucleotide
  Antisense strand to SEQ ID NO: 592490
auuguagcuacucauugag

SEQ ID NO: 592492 - RNA, 19 nt, Artificial Sequence
  Description of Artificial Sequence: Synthetic oligonucleotide
  Sense strand starting at position 1683 of SEQ ID NO: 584828
guaaguggauaugugacua

SEQ ID NO: 592493 - RNA, 19 nt, Artificial Sequence
  Description of Artificial Sequence: Synthetic oligonucleotide
  Antisense strand to SEQ ID NO: 592492
uagucacauauccacuuac

SEQ ID NO: 592494 - RNA, 19 nt, Artificial Sequence
  Description of Artificial Sequence: Synthetic oligonucleotide
  Sense strand starting at position 1687 of SEQ ID NO: 584828
guggauaugugacuauaau

SEQ ID NO: 592495 - RNA, 19 nt, Artificial Sequence
  Description of Artificial Sequence: Synthetic oligonucleotide
  Antisense strand to SEQ ID NO: 592494
auuauagucacauauccac

SEQ ID NO: 592496 - RNA, 19 nt, Artificial Sequence
  Description of Artificial Sequence: Synthetic oligonucleotide
  Sense strand starting at position 1742 of SEQ ID NO: 584828
uaugcauuuccuggccaga

SEQ ID NO: 592497 - RNA, 19 nt, Artificial Sequence
  Description of Artificial Sequence: Synthetic oligonucleotide
  Antisense strand to SEQ ID NO: 592496
ucuggccaggaaaugcaua

SEQ ID NO: 592498 - RNA, 19 nt, Artificial Sequence
  Description of Artificial Sequence: Synthetic oligonucleotide
  Sense strand starting at position 2004 of SEQ ID NO: 584828
uuauacuuggguugaauaa

SEQ ID NO: 592499 - RNA, 19 nt, Artificial Sequence
  Description of Artificial Sequence: Synthetic oligonucleotide
  Antisense strand to SEQ ID NO: 592498
uuauucaacccaaguauaa

SEQ ID NO: 592500 - RNA, 19 nt, Artificial Sequence
  Description of Artificial Sequence: Synthetic oligonucleotide
  Sense strand starting at position 2106 of SEQ ID NO: 584828
ggaguaacuauaugguuac

SEQ ID NO: 592501 - RNA, 19 nt, Artificial Sequence
  Description of Artificial Sequence: Synthetic oligonucleotide
  Antisense strand to SEQ ID NO: 592500
guaaccauauaguuacucc

SEQ ID NO: 592502 - RNA, 19 nt, Artificial Sequence
  Description of Artificial Sequence: Synthetic oligonucleotide
  Sense strand starting at position 2119 of SEQ ID NO: 584828
gguuacuccauguaugaag

SEQ ID NO: 592503 - RNA, 19 nt, Artificial Sequence
  Description of Artificial Sequence: Synthetic oligonucleotide
  Antisense strand to SEQ ID NO: 592502
cuucauacauggaguaacc

SEQ ID NO: 592504 - RNA, 19 nt, Artificial Sequence
  Description of Artificial Sequence: Synthetic oligonucleotide
  Sense strand starting at position 2181 of SEQ ID NO: 584828
agucuaggucucuaaucaa

SEQ ID NO: 592505 - RNA, 19 nt, Artificial Sequence
  Description of Artificial Sequence: Synthetic oligonucleotide
  Antisense strand to SEQ ID NO: 592504
uugauuagagaccuagacu

SEQ ID NO: 592506 - RNA, 19 nt, Artificial Sequence
  Description of Artificial Sequence: Synthetic oligonucleotide
  Sense strand starting at position 2346 of SEQ ID NO: 584828
ccuccagaucucugaagac

SEQ ID NO: 592507 - RNA, 19 nt, Artificial Sequence
  Description of Artificial Sequence: Synthetic oligonucleotide
  Antisense strand to SEQ ID NO: 592506
gucuucagagaucuggagg

SEQ ID NO: 592508 - RNA, 19 nt, Artificial Sequence
  Description of Artificial Sequence: Synthetic oligonucleotide
  Sense strand starting at position 2455 of SEQ ID NO: 584828
guaaaugguuaauccauga

SEQ ID NO: 592509 - RNA, 19 nt, Artificial Sequence
  Description of Artificial Sequence: Synthetic oligonucleotide
  Antisense strand to SEQ ID NO: 592508
ucauggauuaaccauuuac

SEQ ID NO: 592510 - RNA, 19 nt, Artificial Sequence
  Description of Artificial Sequence: Synthetic oligonucleotide
  Sense strand starting at position 2459 of SEQ ID NO: 584828
augguuaauccaugagaca

SEQ ID NO: 592511 - RNA, 19 nt, Artificial Sequence
  Description of Artificial Sequence: Synthetic oligonucleotide
  Antisense strand to SEQ ID NO: 592510
ugucucauggauuaaccau

SEQ ID NO: 592512 - RNA, 19 nt, Artificial Sequence
  Description of Artificial Sequence: Synthetic oligonucleotide
  Sense strand starting at position 2590 of SEQ ID NO: 584828
ugaaguaugguguacagga

SEQ ID NO: 592513 - RNA, 19 nt, Artificial Sequence
  Description of Artificial Sequence: Synthetic oligonucleotide
  Antisense strand to SEQ ID NO: 592512
uccuguacaccauacuuca

SEQ ID NO: 592514 - RNA, 19 nt, Artificial Sequence
  Description of Artificial Sequence: Synthetic oligonucleotide
  Sense strand starting at position 2680 of SEQ ID NO: 584828
guccgaugcaguucuguuu

SEQ ID NO: 592515 - RNA, 19 nt, Artificial Sequence
  Description of Artificial Sequence: Synthetic oligonucleotide
  Antisense strand to SEQ ID NO: 592514
aaacagaacugcaucggac

SEQ ID NO: 592516 - RNA, 19 nt, Artificial Sequence
  Description of Artificial Sequence: Synthetic oligonucleotide
  Sense strand starting at position 2819 of SEQ ID NO: 584828
ggauuuagucucugccauu

SEQ ID NO: 592517 - RNA, 19 nt, Artificial Sequence
  Description of Artificial Sequence: Synthetic oligonucleotide
  Antisense strand to SEQ ID NO: 592516
aauggcagagacuaaaucc

SEQ ID NO: 592518 - RNA, 19 nt, Artificial Sequence
  Description of Artificial Sequence: Synthetic oligonucleotide
  Sense strand starting at position 3030 of SEQ ID NO: 584828
uuccuauuggugggaaaga

SEQ ID NO: 592519 - RNA, 19 nt, Artificial Sequence
  Description of Artificial Sequence: Synthetic oligonucleotide
  Antisense strand to SEQ ID NO: 592518
ucuuucccaccaauaggaa

SEQ ID NO: 592520 - RNA, 19 nt, Artificial Sequence
  Description of Artificial Sequence: Synthetic oligonucleotide
  Sense strand starting at position 3267 of SEQ ID NO: 584828
ugugguauuccucauauug

SEQ ID NO: 592521 - RNA, 19 nt, Artificial Sequence
  Description of Artificial Sequence: Synthetic oligonucleotide
  Antisense strand to SEQ ID NO: 592520
caauaugaggaauaccaca

SEQ ID NO: 592522 - RNA, 19 nt, Artificial Sequence
  Description of Artificial Sequence: Synthetic oligonucleotide
  Sense strand starting at position 3745 of SEQ ID NO: 584828
cuuaucauuguuuaggcaa

SEQ ID NO: 592523 - RNA, 19 nt, Artificial Sequence
  Description of Artificial Sequence: Synthetic oligonucleotide
  Antisense strand to SEQ ID NO: 592522
uugccuaaacaaugauaag

SEQ ID NO: 592524 - RNA, 19 nt, Artificial Sequence
  Description of Artificial Sequence: Synthetic oligonucleotide
  Sense strand starting at position 3752 of SEQ ID NO: 584828
uuguuuaggcaagaguaac

SEQ ID NO: 592525 - RNA, 19 nt, Artificial Sequence
  Description of Artificial Sequence: Synthetic oligonucleotide
  Antisense strand to SEQ ID NO: 592524
guuacucuugccuaaacaa

SEQ ID NO: 592526 - RNA, 19 nt, Artificial Sequence
  Description of Artificial Sequence: Synthetic oligonucleotide
  Sense strand starting at position 3820 of SEQ ID NO: 584828
ucuccuauaguuggaauaa

SEQ ID NO: 592527 - RNA, 19 nt, Artificial Sequence
  Description of Artificial Sequence: Synthetic oligonucleotide
  Antisense strand to SEQ ID NO: 592526
uuauuccaacuauaggaga

SEQ ID NO: 592528 - RNA, 19 nt, Artificial Sequence
  Description of Artificial Sequence: Synthetic oligonucleotide
  Sense strand starting at position 15 of SEQ ID NO: 584829
aauucaguggugggaaguu

SEQ ID NO: 592529 - RNA, 19 nt, Artificial Sequence
  Description of Artificial Sequence: Synthetic oligonucleotide
  Antisense strand to SEQ ID NO: 592528
aacuucccaccacugaauu

SEQ ID NO: 592530 - RNA, 19 nt, Artificial Sequence
  Description of Artificial Sequence: Synthetic oligonucleotide
  Sense strand starting at position 27 of SEQ ID NO: 584829
ggaaguugggucugguaug

SEQ ID NO: 592531 - RNA, 19 nt, Artificial Sequence
  Description of Artificial Sequence: Synthetic oligonucleotide
  Antisense strand to SEQ ID NO: 592530
cauaccagacccaacuucc

SEQ ID NO: 592532 - RNA, 19 nt, Artificial Sequence
  Description of Artificial Sequence: Synthetic oligonucleotide
  Sense strand starting at position 168 of SEQ ID NO: 584829
ggcagagaaugaucugauc

SEQ ID NO: 592533 - RNA, 19 nt, Artificial Sequence
  Description of Artificial Sequence: Synthetic oligonucleotide
  Antisense strand to SEQ ID NO: 592532
gaucagaucauucucugcc

SEQ ID NO: 592534 - RNA, 19 nt, Artificial Sequence
  Description of Artificial Sequence: Synthetic oligonucleotide
  Sense strand starting at position 355 of SEQ ID NO: 584829
aggacucaguccuuaaggu

SEQ ID NO: 592535 - RNA, 19 nt, Artificial Sequence
  Description of Artificial Sequence: Synthetic oligonucleotide
  Antisense strand to SEQ ID NO: 592534
accuuaaggacugaguccu

SEQ ID NO: 592536 - RNA, 19 nt, Artificial Sequence
  Description of Artificial Sequence: Synthetic oligonucleotide
  Sense strand starting at position 428 of SEQ ID NO: 584829
cagccuaaagucggagaau

SEQ ID NO: 592537 - RNA, 19 nt, Artificial Sequence
  Description of Artificial Sequence: Synthetic oligonucleotide
  Antisense strand to SEQ ID NO: 592536
auucuccgacuuuaggcug

SEQ ID NO: 592538 - RNA, 19 nt, Artificial Sequence
  Description of Artificial Sequence: Synthetic oligonucleotide
  Sense strand starting at position 440 of SEQ ID NO: 584829
ggagaauguccugagcuug

SEQ ID NO: 592539 - RNA, 19 nt, Artificial Sequence
  Description of Artificial Sequence: Synthetic oligonucleotide
  Antisense strand to SEQ ID NO: 592538
caagcucaggacauucucc

SEQ ID NO: 592540 - RNA, 19 nt, Artificial Sequence
  Description of Artificial Sequence: Synthetic oligonucleotide
  Sense strand starting at position 475 of SEQ ID NO: 584829
uugacugacauguggaauc

SEQ ID NO: 592541 - RNA, 19 nt, Artificial Sequence
  Description of Artificial Sequence: Synthetic oligonucleotide
  Antisense strand to SEQ ID NO: 592540
gauuccacaugucagucaa

SEQ ID NO: 592542 - RNA, 19 nt, Artificial Sequence
  Description of Artificial Sequence: Synthetic oligonucleotide
  Sense strand starting at position 530 of SEQ ID NO: 584829
ugcuuuacugcuuaaugau

SEQ ID NO: 592543 - RNA, 19 nt, Artificial Sequence
  Description of Artificial Sequence: Synthetic oligonucleotide
  Antisense strand to SEQ ID NO: 592542
aucauuaagcaguaaagca

SEQ ID NO: 592544 - RNA, 19 nt, Artificial Sequence
  Description of Artificial Sequence: Synthetic oligonucleotide
  Sense strand starting at position 717 of SEQ ID NO: 584829
uguggaugcuaugugagaa

SEQ ID NO: 592545 - RNA, 19 nt, Artificial Sequence
  Description of Artificial Sequence: Synthetic oligonucleotide
  Antisense strand to SEQ ID NO: 592544
uucucacauagcauccaca

SEQ ID NO: 592546 - RNA, 19 nt, Artificial Sequence
  Description of Artificial Sequence: Synthetic oligonucleotide
  Sense strand starting at position 718 of SEQ ID NO: 584829
guggaugcuaugugagaaa

SEQ ID NO: 592547 - RNA, 19 nt, Artificial Sequence
  Description of Artificial Sequence: Synthetic oligonucleotide
  Antisense strand to SEQ ID NO: 592546
uuucucacauagcauccac

SEQ ID NO: 592548 - RNA, 19 nt, Artificial Sequence
  Description of Artificial Sequence: Synthetic oligonucleotide
  Sense strand starting at position 753 of SEQ ID NO: 584829
ggagucuaacacugaguau

SEQ ID NO: 592549 - RNA, 19 nt, Artificial Sequence
  Description of Artificial Sequence: Synthetic oligonucleotide
  Antisense strand to SEQ ID NO: 592548
auacucaguguuagacucc

SEQ ID NO: 592550 - RNA, 19 nt, Artificial Sequence
  Description of Artificial Sequence: Synthetic oligonucleotide
  Sense strand starting at position 756 of SEQ ID NO: 584829
gucuaacacugaguauuac

SEQ ID NO: 592551 - RNA, 19 nt, Artificial Sequence
  Description of Artificial Sequence: Synthetic oligonucleotide
  Antisense strand to SEQ ID NO: 592550
guaauacucaguguuagac

SEQ ID NO: 592552 - RNA, 19 nt, Artificial Sequence
  Description of Artificial Sequence: Synthetic oligonucleotide
  Sense strand starting at position 913 of SEQ ID NO: 584829
gaggaaaugugcuuaccga

SEQ ID NO: 592553 - RNA, 19 nt, Artificial Sequence
  Description of Artificial Sequence: Synthetic oligonucleotide
  Antisense strand to SEQ ID NO: 592552
ucgguaagcacauuuccuc

SEQ ID NO: 592554 - RNA, 19 nt, Artificial Sequence
  Description of Artificial Sequence: Synthetic oligonucleotide
  Sense strand starting at position 914 of SEQ ID NO: 584829
aggaaaugugcuuaccgau

SEQ ID NO: 592555 - RNA, 19 nt, Artificial Sequence
  Description of Artificial Sequence: Synthetic oligonucleotide
  Antisense strand to SEQ ID NO: 592554
aucgguaagcacauuuccu

SEQ ID NO: 592556 - RNA, 19 nt, Artificial Sequence
  Description of Artificial Sequence: Synthetic oligonucleotide
  Sense strand starting at position 920 of SEQ ID NO: 584829
ugugcuuaccgauaacuaa

SEQ ID NO: 592557 - RNA, 19 nt, Artificial Sequence
  Description of Artificial Sequence: Synthetic oligonucleotide
  Antisense strand to SEQ ID NO: 592556
uuaguuaucgguaagcaca

SEQ ID NO: 592558 - RNA, 19 nt, Artificial Sequence
  Description of Artificial Sequence: Synthetic oligonucleotide
  Sense strand starting at position 950 of SEQ ID NO: 584829
aggcuauuagguuaguauu

SEQ ID NO: 592559 - RNA, 19 nt, Artificial Sequence
  Description of Artificial Sequence: Synthetic oligonucleotide
  Antisense strand to SEQ ID NO: 592558
aauacuaaccuaauagccu

SEQ ID NO: 592560 - RNA, 19 nt, Artificial Sequence
  Description of Artificial Sequence: Synthetic oligonucleotide
  Sense strand starting at position 963 of SEQ ID NO: 584829
aguauuugcuucuugcaau

SEQ ID NO: 592561 - RNA, 19 nt, Artificial Sequence
  Description of Artificial Sequence: Synthetic oligonucleotide
  Antisense strand to SEQ ID NO: 592560
auugcaagaagcaaauacu

SEQ ID NO: 592562 - RNA, 19 nt, Artificial Sequence
  Description of Artificial Sequence: Synthetic oligonucleotide
  Sense strand starting at position 977 of SEQ ID NO: 584829
gcaaucuucuaggccaaua

SEQ ID NO: 592563 - RNA, 19 nt, Artificial Sequence
  Description of Artificial Sequence: Synthetic oligonucleotide
  Antisense strand to SEQ ID NO: 592562
uauuggccuagaagauugc

SEQ ID NO: 592564 - RNA, 19 nt, Artificial Sequence
  Description of Artificial Sequence: Synthetic oligonucleotide
  Sense strand starting at position 1004 of SEQ ID NO: 584829
uuauaucuugauggaggua

SEQ ID NO: 592565 - RNA, 19 nt, Artificial Sequence
  Description of Artificial Sequence: Synthetic oligonucleotide
  Antisense strand to SEQ ID NO: 592564
uaccuccaucaagauauaa

SEQ ID NO: 592566 - RNA, 19 nt, Artificial Sequence
  Description of Artificial Sequence: Synthetic oligonucleotide
  Sense strand starting at position 1125 of SEQ ID NO: 584829
gccucaguggucuauagaa

SEQ ID NO: 592567 - RNA, 19 nt, Artificial Sequence
  Description of Artificial Sequence: Synthetic oligonucleotide
  Antisense strand to SEQ ID NO: 592566
uucuauagaccacugaggc

SEQ ID NO: 592568 - RNA, 19 nt, Artificial Sequence
  Description of Artificial Sequence: Synthetic oligonucleotide
  Sense strand starting at position 1411 of SEQ ID NO: 584829
agacuuucccagcgaacag

SEQ ID NO: 592569 - RNA, 19 nt, Artificial Sequence
  Description of Artificial Sequence: Synthetic oligonucleotide
  Antisense strand to SEQ ID NO: 592568
cuguucgcugggaaagucu

SEQ ID NO: 592570 - RNA, 19 nt, Artificial Sequence
  Description of Artificial Sequence: Synthetic oligonucleotide
  Sense strand starting at position 1533 of SEQ ID NO: 584829
cuaaauagcuagucugaca

SEQ ID NO: 592571 - RNA, 19 nt, Artificial Sequence
  Description of Artificial Sequence: Synthetic oligonucleotide
  Antisense strand to SEQ ID NO: 592570
ugucagacuagcuauuuag

SEQ ID NO: 592572 - RNA, 19 nt, Artificial Sequence
  Description of Artificial Sequence: Synthetic oligonucleotide
  Sense strand starting at position 2132 of SEQ ID NO: 584829
ggcggcuuugguuaaagga

SEQ ID NO: 592573 - RNA, 19 nt, Artificial Sequence
  Description of Artificial Sequence: Synthetic oligonucleotide
  Antisense strand to SEQ ID NO: 592572
uccuuuaaccaaagccgcc

SEQ ID NO: 592574 - RNA, 19 nt, Artificial Sequence
  Description of Artificial Sequence: Synthetic oligonucleotide
  Sense strand starting at position 2187 of SEQ ID NO: 584829
aaguuagucugaucagauu

SEQ ID NO: 592575 - RNA, 19 nt, Artificial Sequence
  Description of Artificial Sequence: Synthetic oligonucleotide
  Antisense strand to SEQ ID NO: 592574
aaucugaucagacuaacuu

SEQ ID NO: 592576 - RNA, 19 nt, Artificial Sequence
  Description of Artificial Sequence: Synthetic oligonucleotide
  Sense strand starting at position 2203 of SEQ ID NO: 584829
auuaaacugccagaacgua

SEQ ID NO: 592577 - RNA, 19 nt, Artificial Sequence
  Description of Artificial Sequence: Synthetic oligonucleotide
  Antisense strand to SEQ ID NO: 592576
uacguucuggcaguuuaau

SEQ ID NO: 592578 - RNA, 19 nt, Artificial Sequence
  Description of Artificial Sequence: Synthetic oligonucleotide
  Sense strand starting at position 2247 of SEQ ID NO: 584829
agccgucuuacuuaggaaa

SEQ ID NO: 592579 - RNA, 19 nt, Artificial Sequence
  Description of Artificial Sequence: Synthetic oligonucleotide
  Antisense strand to SEQ ID NO: 592578
uuuccuaaguaagacggcu

SEQ ID NO: 592580 - RNA, 19 nt, Artificial Sequence
  Description of Artificial Sequence: Synthetic oligonucleotide
  Sense strand starting at position 2438 of SEQ ID NO: 584829
acgagaaaggcuugauccu

SEQ ID NO: 592581 - RNA, 19 nt, Artificial Sequence
  Description of Artificial Sequence: Synthetic oligonucleotide
  Antisense strand to SEQ ID NO: 592580
aggaucaagccuuucucgu

SEQ ID NO: 592582 - RNA, 19 nt, Artificial Sequence
  Description of Artificial Sequence: Synthetic oligonucleotide
  Sense strand starting at position 2439 of SEQ ID NO: 584829
cgagaaaggcuugauccuu

SEQ ID NO: 592583 - RNA, 19 nt, Artificial Sequence
  Description of Artificial Sequence: Synthetic oligonucleotide
  Antisense strand to SEQ ID NO: 592582
aaggaucaagccuuucucg

SEQ ID NO: 592584 - RNA, 19 nt, Artificial Sequence
  Description of Artificial Sequence: Synthetic oligonucleotide
  Sense strand starting at position 2502 of SEQ ID NO: 584829
ugucgucgucuuucacaua

SEQ ID NO: 592585 - RNA, 19 nt, Artificial Sequence
  Description of Artificial Sequence: Synthetic oligonucleotide
  Antisense strand to SEQ ID NO: 592584
uaugugaaagacgacgaca

SEQ ID NO: 592586 - RNA, 19 nt, Artificial Sequence
  Description of Artificial Sequence: Synthetic oligonucleotide
  Sense strand starting at position 2602 of SEQ ID NO: 584829
aguguuauugcugagaaca

SEQ ID NO: 592587 - RNA, 19 nt, Artificial Sequence
  Description of Artificial Sequence: Synthetic oligonucleotide
  Antisense strand to SEQ ID NO: 592586
uguucucagcaauaacacu

SEQ ID NO: 592588 - RNA, 19 nt, Artificial Sequence
  Description of Artificial Sequence: Synthetic oligonucleotide
  Sense strand starting at position 2620 of SEQ ID NO: 584829
aagagaagucccugccauu

SEQ ID NO: 592589 - RNA, 19 nt, Artificial Sequence
  Description of Artificial Sequence: Synthetic oligonucleotide
  Antisense strand to SEQ ID NO: 592588
aauggcagggacuucucuu

SEQ ID NO: 592590 - RNA, 19 nt, Artificial Sequence
  Description of Artificial Sequence: Synthetic oligonucleotide
  Sense strand starting at position 2755 of SEQ ID NO: 584829
acuaucaucuguguuauac

SEQ ID NO: 592591 - RNA, 19 nt, Artificial Sequence
  Description of Artificial Sequence: Synthetic oligonucleotide
  Antisense strand to SEQ ID NO: 592590
guauaacacagaugauagu

SEQ ID NO: 592592 - RNA, 19 nt, Artificial Sequence
  Description of Artificial Sequence: Synthetic oligonucleotide
  Sense strand starting at position 2799 of SEQ ID NO: 584829
ggacgaguuaaguaacuuc

SEQ ID NO: 592593 - RNA, 19 nt, Artificial Sequence
  Description of Artificial Sequence: Synthetic oligonucleotide
  Antisense strand to SEQ ID NO: 592592
gaaguuacuuaacucgucc

SEQ ID NO: 592594 - RNA, 19 nt, Artificial Sequence
  Description of Artificial Sequence: Synthetic oligonucleotide
  Sense strand starting at position 2845 of SEQ ID NO: 584829
gaagcuggauuugaacaga

SEQ ID NO: 592595 - RNA, 19 nt, Artificial Sequence
  Description of Artificial Sequence: Synthetic oligonucleotide
  Antisense strand to SEQ ID NO: 592594
ucuguucaaauccagcuuc

SEQ ID NO: 592596 - RNA, 19 nt, Artificial Sequence
  Description of Artificial Sequence: Synthetic oligonucleotide
  Sense strand starting at position 2859 of SEQ ID NO: 584829
acagaauucuaggcuacau

SEQ ID NO: 592597 - RNA, 19 nt, Artificial Sequence
  Description of Artificial Sequence: Synthetic oligonucleotide
  Antisense strand to SEQ ID NO: 592596
auguagccuagaauucugu

SEQ ID NO: 592598 - RNA, 19 nt, Artificial Sequence
  Description of Artificial Sequence: Synthetic oligonucleotide
  Sense strand starting at position 3052 of SEQ ID NO: 584829
gaguacaguggugauugua

SEQ ID NO: 592599 - RNA, 19 nt, Artificial Sequence
  Description of Artificial Sequence: Synthetic oligonucleotide
  Antisense strand to SEQ ID NO: 592598
uacaaucaccacuguacuc

SEQ ID NO: 592600 - RNA, 19 nt, Artificial Sequence
  Description of Artificial Sequence: Synthetic oligonucleotide
  Sense strand starting at position 3055 of SEQ ID NO: 584829
uacaguggugauuguaacu

SEQ ID NO: 592601 - RNA, 19 nt, Artificial Sequence
  Description of Artificial Sequence: Synthetic oligonucleotide
  Antisense strand to SEQ ID NO: 592600
aguuacaaucaccacugua

SEQ ID NO: 592602 - RNA, 19 nt, Artificial Sequence
  Description of Artificial Sequence: Synthetic oligonucleotide
  Sense strand starting at position 3298 of SEQ ID NO: 584829
uggcuucuacucugacaua

SEQ ID NO: 592603 - RNA, 19 nt, Artificial Sequence
  Description of Artificial Sequence: Synthetic oligonucleotide
  Antisense strand to SEQ ID NO: 592602
uaugucagaguagaagcca

SEQ ID NO: 592604 - RNA, 19 nt, Artificial Sequence
  Description of Artificial Sequence: Synthetic oligonucleotide
  Sense strand starting at position 3477 of SEQ ID NO: 584829
cuagaaguaucugaaauuu

SEQ ID NO: 592605 - RNA, 19 nt, Artificial Sequence
  Description of Artificial Sequence: Synthetic oligonucleotide
  Antisense strand to SEQ ID NO: 592604
aaauuucagauacuucuag

SEQ ID NO: 592606 - RNA, 19 nt, Artificial Sequence
  Description of Artificial Sequence: Synthetic oligonucleotide
  Sense strand starting at position 3729 of SEQ ID NO: 584829
uugcuuugacauuaugauc

SEQ ID NO: 592607 - RNA, 19 nt, Artificial Sequence
  Description of Artificial Sequence: Synthetic oligonucleotide
  Antisense strand to SEQ ID NO: 592606
gaucauaaugucaaagcaa

SEQ ID NO: 592608 - RNA, 19 nt, Artificial Sequence
  Description of Artificial Sequence: Synthetic oligonucleotide
  Sense strand starting at position 2431 of SEQ ID NO: 584830
ugcugugugcuuucauggu

SEQ ID NO: 592609 - RNA, 19 nt, Artificial Sequence
  Description of Artificial Sequence: Synthetic oligonucleotide
  Antisense strand to SEQ ID NO: 592608
accaugaaagcacacagca

SEQ ID NO: 592610 - RNA, 19 nt, Artificial Sequence
  Description of Artificial Sequence: Synthetic oligonucleotide
  Sense strand starting at position 2435 of SEQ ID NO: 584830
gugugcuuucauggugaaa

SEQ ID NO: 592611 - RNA, 19 nt, Artificial Sequence
  Description of Artificial Sequence: Synthetic oligonucleotide
  Antisense strand to SEQ ID NO: 592610
uuucaccaugaaagcacac

SEQ ID NO: 592612 - RNA, 19 nt, Artificial Sequence
  Description of Artificial Sequence: Synthetic oligonucleotide
  Sense strand starting at position 2437 of SEQ ID NO: 584830
gugcuuucauggugaaagu

SEQ ID NO: 592613 - RNA, 19 nt, Artificial Sequence
  Description of Artificial Sequence: Synthetic oligonucleotide
  Antisense strand to SEQ ID NO: 592612
acuuucaccaugaaagcac

SEQ ID NO: 592614 - RNA, 19 nt, Artificial Sequence
  Description of Artificial Sequence: Synthetic oligonucleotide
  Sense strand starting at position 2789 of SEQ ID NO: 584830
gccgcugucuccuugccaa

SEQ ID NO: 592615 - RNA, 19 nt, Artificial Sequence
  Description of Artificial Sequence: Synthetic oligonucleotide
  Antisense strand to SEQ ID NO: 592614
uuggcaaggagacagcggc

SEQ ID NO: 592616 - RNA, 19 nt, Artificial Sequence
  Description of Artificial Sequence: Synthetic oligonucleotide
  Sense strand starting at position 2810 of SEQ ID NO: 584830
gggcguucgcauguuuguu

SEQ ID NO: 592617 - RNA, 19 nt, Artificial Sequence
  Description of Artificial Sequence: Synthetic oligonucleotide
  Antisense strand to SEQ ID NO: 592616
aacaaacaugcgaacgccc

SEQ ID NO: 592618 - RNA, 19 nt, Artificial Sequence
  Description of Artificial Sequence: Synthetic oligonucleotide
  Sense strand starting at position 2811 of SEQ ID NO: 584830
ggcguucgcauguuuguuu

SEQ ID NO: 592619 - RNA, 19 nt, Artificial Sequence
  Description of Artificial Sequence: Synthetic oligonucleotide
  Antisense strand to SEQ ID NO: 592618
aaacaaacaugcgaacgcc

SEQ ID NO: 592620 - RNA, 19 nt, Artificial Sequence
  Description of Artificial Sequence: Synthetic oligonucleotide
  Sense strand starting at position 2900 of SEQ ID NO: 584830
gggaaacaaaguugucuau

SEQ ID NO: 592621 - RNA, 19 nt, Artificial Sequence
  Description of Artificial Sequence: Synthetic oligonucleotide
  Antisense strand to SEQ ID NO: 592620
auagacaacuuuguuuccc

SEQ ID NO: 592622 - RNA, 19 nt, Artificial Sequence
  Description of Artificial Sequence: Synthetic oligonucleotide
  Sense strand starting at position 2902 of SEQ ID NO: 584830
gaaacaaaguugucuauug

SEQ ID NO: 592623 - RNA, 19 nt, Artificial Sequence
  Description of Artificial Sequence: Synthetic oligonucleotide
  Antisense strand to SEQ ID NO: 592622
caauagacaacuuuguuuc

SEQ ID NO: 592624 - RNA, 19 nt, Artificial Sequence
  Description of Artificial Sequence: Synthetic oligonucleotide
  Sense strand starting at position 2910 of SEQ ID NO: 584830
guugucuauuggccucaga

SEQ ID NO: 592625 - RNA, 19 nt, Artificial Sequence
  Description of Artificial Sequence: Synthetic oligonucleotide
  Antisense strand to SEQ ID NO: 592624
ucugaggccaauagacaac

SEQ ID NO: 592626 - RNA, 19 nt, Artificial Sequence
  Description of Artificial Sequence: Synthetic oligonucleotide
  Sense strand starting at position 2913 of SEQ ID NO: 584830
gucuauuggccucagaggu

SEQ ID NO: 592627 - RNA, 19 nt, Artificial Sequence
  Description of Artificial Sequence: Synthetic oligonucleotide
  Antisense strand to SEQ ID NO: 592626
accucugaggccaauagac

SEQ ID NO: 592628 - RNA, 19 nt, Artificial Sequence
  Description of Artificial Sequence: Synthetic oligonucleotide
  Sense strand starting at position 2981 of SEQ ID NO: 584830
cggucucucccaggaguua

SEQ ID NO: 592629 - RNA, 19 nt, Artificial Sequence
  Description of Artificial Sequence: Synthetic oligonucleotide
  Antisense strand to SEQ ID NO: 592628
uaacuccugggagagaccg

SEQ ID NO: 592630 - RNA, 19 nt, Artificial Sequence
  Description of Artificial Sequence: Synthetic oligonucleotide
  Sense strand starting at position 2982 of SEQ ID NO: 584830
ggucucucccaggaguuau

SEQ ID NO: 592631 - RNA, 19 nt, Artificial Sequence
  Description of Artificial Sequence: Synthetic oligonucleotide
  Antisense strand to SEQ ID NO: 592630
auaacuccugggagagacc

SEQ ID NO: 592632 - RNA, 19 nt, Artificial Sequence
  Description of Artificial Sequence: Synthetic oligonucleotide
  Sense strand starting at position 3034 of SEQ ID NO: 584830
ucgggccaucggcguaauu

SEQ ID NO: 592633 - RNA, 19 nt, Artificial Sequence
  Description of Artificial Sequence: Synthetic oligonucleotide
  Antisense strand to SEQ ID NO: 592632
aauuacgccgauggcccga

SEQ ID NO: 592634 - RNA, 19 nt, Artificial Sequence
  Description of Artificial Sequence: Synthetic oligonucleotide
  Sense strand starting at position 3043 of SEQ ID NO: 584830
cggcguaauucccacaacu

SEQ ID NO: 592635 - RNA, 19 nt, Artificial Sequence
  Description of Artificial Sequence: Synthetic oligonucleotide
  Antisense strand to SEQ ID NO: 592634
aguugugggaauuacgccg

SEQ ID NO: 592636 - RNA, 19 nt, Artificial Sequence
  Description of Artificial Sequence: Synthetic oligonucleotide
  Sense strand starting at position 3045 of SEQ ID NO: 584830
gcguaauucccacaacuuc

SEQ ID NO: 592637 - RNA, 19 nt, Artificial Sequence
  Description of Artificial Sequence: Synthetic oligonucleotide
  Antisense strand to SEQ ID NO: 592636
gaaguugugggaauuacgc

SEQ ID NO: 592638 - RNA, 19 nt, Artificial Sequence
  Description of Artificial Sequence: Synthetic oligonucleotide
  Sense strand starting at position 3181 of SEQ ID NO: 584830
agagaauguuuacauaacu

SEQ ID NO: 592639 - RNA, 19 nt, Artificial Sequence
  Description of Artificial Sequence: Synthetic oligonucleotide
  Antisense strand to SEQ ID NO: 592638
aguuauguaaacauucucu

SEQ ID NO: 592640 - RNA, 19 nt, Artificial Sequence
  Description of Artificial Sequence: Synthetic oligonucleotide
  Sense strand starting at position 3227 of SEQ ID NO: 584830
guagguuugucaguguauu

SEQ ID NO: 592641 - RNA, 19 nt, Artificial Sequence
  Description of Artificial Sequence: Synthetic oligonucleotide
  Antisense strand to SEQ ID NO: 592640
aauacacugacaaaccuac

SEQ ID NO: 592642 - RNA, 19 nt, Artificial Sequence
  Description of Artificial Sequence: Synthetic oligonucleotide
  Sense strand starting at position 3228 of SEQ ID NO: 584830
uagguuugucaguguauuu

SEQ ID NO: 592643 - RNA, 19 nt, Artificial Sequence
  Description of Artificial Sequence: Synthetic oligonucleotide
  Antisense strand to SEQ ID NO: 592642
aaauacacugacaaaccua

SEQ ID NO: 592644 - RNA, 19 nt, Artificial Sequence
  Description of Artificial Sequence: Synthetic oligonucleotide
  Sense strand starting at position 3233 of SEQ ID NO: 584830
uugucaguguauuuccaaa

SEQ ID NO: 592645 - RNA, 19 nt, Artificial Sequence
  Description of Artificial Sequence: Synthetic oligonucleotide
  Antisense strand to SEQ ID NO: 592644
uuuggaaauacacugacaa

SEQ ID NO: 592646 - RNA, 19 nt, Artificial Sequence
  Description of Artificial Sequence: Synthetic oligonucleotide
  Sense strand starting at position 3249 of SEQ ID NO: 584830
aaaggaauauguccacgua

SEQ ID NO: 592647 - RNA, 19 nt, Artificial Sequence
  Description of Artificial Sequence: Synthetic oligonucleotide
  Antisense strand to SEQ ID NO: 592646
uacguggacauauuccuuu

SEQ ID NO: 592648 - RNA, 19 nt, Artificial Sequence
  Description of Artificial Sequence: Synthetic oligonucleotide
  Sense strand starting at position 3250 of SEQ ID NO: 584830
aaggaauauguccacguau

SEQ ID NO: 592649 - RNA, 19 nt, Artificial Sequence
  Description of Artificial Sequence: Synthetic oligonucleotide
  Antisense strand to SEQ ID NO: 592648
auacguggacauauuccuu

SEQ ID NO: 592650 - RNA, 19 nt, Artificial Sequence
  Description of Artificial Sequence: Synthetic oligonucleotide
  Sense strand starting at position 3252 of SEQ ID NO: 584830
ggaauauguccacguauuc

SEQ ID NO: 592651 - RNA, 19 nt, Artificial Sequence
  Description of Artificial Sequence: Synthetic oligonucleotide
  Antisense strand to SEQ ID NO: 592650
gaauacguggacauauucc

SEQ ID NO: 592652 - RNA, 19 nt, Artificial Sequence
  Description of Artificial Sequence: Synthetic oligonucleotide
  Sense strand starting at position 3300 of SEQ ID NO: 584830
ggauguccucuguggagua

SEQ ID NO: 592653 - RNA, 19 nt, Artificial Sequence
  Description of Artificial Sequence: Synthetic oligonucleotide
  Antisense strand to SEQ ID NO: 592652
uacuccacagaggacaucc

SEQ ID NO: 592654 - RNA, 19 nt, Artificial Sequence
  Description of Artificial Sequence: Synthetic oligonucleotide
  Sense strand starting at position 3301 of SEQ ID NO: 584830
gauguccucuguggaguau

SEQ ID NO: 592655 - RNA, 19 nt, Artificial Sequence
  Description of Artificial Sequence: Synthetic oligonucleotide
  Antisense strand to SEQ ID NO: 592654
auacuccacagaggacauc

SEQ ID NO: 592656 - RNA, 19 nt, Artificial Sequence
  Description of Artificial Sequence: Synthetic oligonucleotide
  Sense strand starting at position 3314 of SEQ ID NO: 584830
gaguauguacagugguguu

SEQ ID NO: 592657 - RNA, 19 nt, Artificial Sequence
  Description of Artificial Sequence: Synthetic oligonucleotide
  Antisense strand to SEQ ID NO: 592656
aacaccacuguacauacuc

SEQ ID NO: 592658 - RNA, 19 nt, Artificial Sequence
  Description of Artificial Sequence: Synthetic oligonucleotide
  Sense strand starting at position 3358 of SEQ ID NO: 584830
uuuaacucuuggugccaga

SEQ ID NO: 592659 - RNA, 19 nt, Artificial Sequence
  Description of Artificial Sequence: Synthetic oligonucleotide
  Antisense strand to SEQ ID NO: 592658
ucuggcaccaagaguuaaa

SEQ ID NO: 592660 - RNA, 19 nt, Artificial Sequence
  Description of Artificial Sequence: Synthetic oligonucleotide
  Sense strand starting at position 3361 of SEQ ID NO: 584830
aacucuuggugccagaaca

SEQ ID NO: 592661 - RNA, 19 nt, Artificial Sequence
  Description of Artificial Sequence: Synthetic oligonucleotide
  Antisense strand to SEQ ID NO: 592660
uguucuggcaccaagaguu

SEQ ID NO: 592662 - RNA, 19 nt, Artificial Sequence
  Description of Artificial Sequence: Synthetic oligonucleotide
  Sense strand starting at position 3378 of SEQ ID NO: 584830
cagcgacagcuauggguua

SEQ ID NO: 592663 - RNA, 19 nt, Artificial Sequence
  Description of Artificial Sequence: Synthetic oligonucleotide
  Antisense strand to SEQ ID NO: 592662
uaacccauagcugucgcug

SEQ ID NO: 592664 - RNA, 19 nt, Artificial Sequence
  Description of Artificial Sequence: Synthetic oligonucleotide
  Sense strand starting at position 3390 of SEQ ID NO: 584830
uggguuagcucguaucuuc

SEQ ID NO: 592665 - RNA, 19 nt, Artificial Sequence
  Description of Artificial Sequence: Synthetic oligonucleotide
  Antisense strand to SEQ ID NO: 592664
gaagauacgagcuaaccca

SEQ ID NO: 592666 - RNA, 19 nt, Artificial Sequence
  Description of Artificial Sequence: Synthetic oligonucleotide
  Sense strand starting at position 3457 of SEQ ID NO: 584830
aguuaacccucucgauaua

SEQ ID NO: 592667 - RNA, 19 nt, Artificial Sequence
  Description of Artificial Sequence: Synthetic oligonucleotide
  Antisense strand to SEQ ID NO: 592666
uauaucgagaggguuaacu

SEQ ID NO: 592668 - RNA, 19 nt, Artificial Sequence
  Description of Artificial Sequence: Synthetic oligonucleotide
  Sense strand starting at position 3561 of SEQ ID NO: 584830
agucaacucuaguccuaau

SEQ ID NO: 592669 - RNA, 19 nt, Artificial Sequence
  Description of Artificial Sequence: Synthetic oligonucleotide
  Antisense strand to SEQ ID NO: 592668
auuaggacuagaguugacu

SEQ ID NO: 592670 - RNA, 19 nt, Artificial Sequence
  Description of Artificial Sequence: Synthetic oligonucleotide
  Sense strand starting at position 3571 of SEQ ID NO: 584830
aguccuaauguagaaaugu

SEQ ID NO: 592671 - RNA, 19 nt, Artificial Sequence
  Description of Artificial Sequence: Synthetic oligonucleotide
  Antisense strand to SEQ ID NO: 592670
acauuucuacauuaggacu

SEQ ID NO: 592672 - RNA, 19 nt, Artificial Sequence
  Description of Artificial Sequence: Synthetic oligonucleotide
  Sense strand starting at position 3580 of SEQ ID NO: 584830
guagaaauguuccauacuu

SEQ ID NO: 592673 - RNA, 19 nt, Artificial Sequence
  Description of Artificial Sequence: Synthetic oligonucleotide
  Antisense strand to SEQ ID NO: 592672
aaguauggaacauuucuac

SEQ ID NO: 592674 - RNA, 19 nt, Artificial Sequence
  Description of Artificial Sequence: Synthetic oligonucleotide
  Sense strand starting at position 3612 of SEQ ID NO: 584830
auuggugucuauuaacauu

SEQ ID NO: 592675 - RNA, 19 nt, Artificial Sequence
  Description of Artificial Sequence: Synthetic oligonucleotide
  Antisense strand to SEQ ID NO: 592674
aauguuaauagacaccaau

SEQ ID NO: 592676 - RNA, 19 nt, Artificial Sequence
  Description of Artificial Sequence: Synthetic oligonucleotide
  Sense strand starting at position 3889 of SEQ ID NO: 584830
gugguuauuuguuugacca

SEQ ID NO: 592677 - RNA, 19 nt, Artificial Sequence
  Description of Artificial Sequence: Synthetic oligonucleotide
  Antisense strand to SEQ ID NO: 592676
uggucaaacaaauaaccac

SEQ ID NO: 592678 - RNA, 19 nt, Artificial Sequence
  Description of Artificial Sequence: Synthetic oligonucleotide
  Sense strand starting at position 3891 of SEQ ID NO: 584830
gguuauuuguuugaccaag

SEQ ID NO: 592679 - RNA, 19 nt, Artificial Sequence
  Description of Artificial Sequence: Synthetic oligonucleotide
  Antisense strand to SEQ ID NO: 592678
cuuggucaaacaaauaacc

SEQ ID NO: 592680 - RNA, 19 nt, Artificial Sequence
  Description of Artificial Sequence: Synthetic oligonucleotide
  Sense strand starting at position 3900 of SEQ ID NO: 584830
uuugaccaaguguaaauau

SEQ ID NO: 592681 - RNA, 19 nt, Artificial Sequence
  Description of Artificial Sequence: Synthetic oligonucleotide
  Antisense strand to SEQ ID NO: 592680
auauuuacacuuggucaaa

SEQ ID NO: 592682 - RNA, 19 nt, Artificial Sequence
  Description of Artificial Sequence: Synthetic oligonucleotide
  Sense strand starting at position 3909 of SEQ ID NO: 584830
guguaaauauguuacauga

SEQ ID NO: 592683 - RNA, 19 nt, Artificial Sequence
  Description of Artificial Sequence: Synthetic oligonucleotide
  Antisense strand to SEQ ID NO: 592682
ucauguaacauauuuacac

SEQ ID NO: 592684 - RNA, 19 nt, Artificial Sequence
  Description of Artificial Sequence: Synthetic oligonucleotide
  Sense strand starting at position 3911 of SEQ ID NO: 584830
guaaauauguuacaugacu

SEQ ID NO: 592685 - RNA, 19 nt, Artificial Sequence
  Description of Artificial Sequence: Synthetic oligonucleotide
  Antisense strand to SEQ ID NO: 592684
agucauguaacauauuuac

SEQ ID NO: 592686 - RNA, 19 nt, Artificial Sequence
  Description of Artificial Sequence: Synthetic oligonucleotide
  Sense strand starting at position 14 of SEQ ID NO: 584831
aguucugggagccauucua

SEQ ID NO: 592687 - RNA, 19 nt, Artificial Sequence
  Description of Artificial Sequence: Synthetic oligonucleotide
  Antisense strand to SEQ ID NO: 592686
uagaauggcucccagaacu

SEQ ID NO: 592688 - RNA, 19 nt, Artificial Sequence
  Description of Artificial Sequence: Synthetic oligonucleotide
  Sense strand starting at position 105 of SEQ ID NO: 584831
uaugauugguaccugaagu

SEQ ID NO: 592689 - RNA, 19 nt, Artificial Sequence
  Description of Artificial Sequence: Synthetic oligonucleotide
  Antisense strand to SEQ ID NO: 592688
acuucagguaccaaucaua

SEQ ID NO: 592690 - RNA, 19 nt, Artificial Sequence
  Description of Artificial Sequence: Synthetic oligonucleotide
  Sense strand starting at position 106 of SEQ ID NO: 584831
augauugguaccugaaguc

SEQ ID NO: 592691 - RNA, 19 nt, Artificial Sequence
  Description of Artificial Sequence: Synthetic oligonucleotide
  Antisense strand to SEQ ID NO: 592690
gacuucagguaccaaucau

SEQ ID NO: 592692 - RNA, 19 nt, Artificial Sequence
  Description of Artificial Sequence: Synthetic oligonucleotide
  Sense strand starting at position 158 of SEQ ID NO: 584831
ugugaagucugcccuaacu

SEQ ID NO: 592693 - RNA, 19 nt, Artificial Sequence
  Description of Artificial Sequence: Synthetic oligonucleotide
  Antisense strand to SEQ ID NO: 592692
aguuagggcagacuucaca

SEQ ID NO: 592694 - RNA, 19 nt, Artificial Sequence
  Description of Artificial Sequence: Synthetic oligonucleotide
  Sense strand starting at position 160 of SEQ ID NO: 584831
ugaagucugcccuaacuau

SEQ ID NO: 592695 - RNA, 19 nt, Artificial Sequence
  Description of Artificial Sequence: Synthetic oligonucleotide
  Antisense strand to SEQ ID NO: 592694
auaguuagggcagacuuca

SEQ ID NO: 592696 - RNA, 19 nt, Artificial Sequence
  Description of Artificial Sequence: Synthetic oligonucleotide
  Sense strand starting at position 176 of SEQ ID NO: 584831
uauggauagugucugaacu

SEQ ID NO: 592697 - RNA, 19 nt, Artificial Sequence
  Description of Artificial Sequence: Synthetic oligonucleotide
  Antisense strand to SEQ ID NO: 592696
aguucagacacuauccaua

SEQ ID NO: 592698 - RNA, 19 nt, Artificial Sequence
  Description of Artificial Sequence: Synthetic oligonucleotide
  Sense strand starting at position 641 of SEQ ID NO: 584831
agcagaggccuggaguauu

SEQ ID NO: 592699 - RNA, 19 nt, Artificial Sequence
  Description of Artificial Sequence: Synthetic oligonucleotide
  Antisense strand to SEQ ID NO: 592698
aauacuccaggccucugcu

SEQ ID NO: 592700 - RNA, 19 nt, Artificial Sequence
  Description of Artificial Sequence: Synthetic oligonucleotide
  Sense strand starting at position 772 of SEQ ID NO: 584831
caggauauagucuggccau

SEQ ID NO: 592701 - RNA, 19 nt, Artificial Sequence
  Description of Artificial Sequence: Synthetic oligonucleotide
  Antisense strand to SEQ ID NO: 592700
auggccagacuauauccug

SEQ ID NO: 592702 - RNA, 19 nt, Artificial Sequence
  Description of Artificial Sequence: Synthetic oligonucleotide
  Sense strand starting at position 1115 of SEQ ID NO: 584831
ggagaagccuucucgccau

SEQ ID NO: 592703 - RNA, 19 nt, Artificial Sequence
  Description of Artificial Sequence: Synthetic oligonucleotide
  Antisense strand to SEQ ID NO: 592702
auggcgagaaggcuucucc

SEQ ID NO: 592704 - RNA, 19 nt, Artificial Sequence
  Description of Artificial Sequence: Synthetic oligonucleotide
  Sense strand starting at position 1195 of SEQ ID NO: 584831
uuguauuguccauaacgua

SEQ ID NO: 592705 - RNA, 19 nt, Artificial Sequence
  Description of Artificial Sequence: Synthetic oligonucleotide
  Antisense strand to SEQ ID NO: 592704
uacguuauggacaauacaa

SEQ ID NO: 592706 - RNA, 19 nt, Artificial Sequence
  Description of Artificial Sequence: Synthetic oligonucleotide
  Sense strand starting at position 1238 of SEQ ID NO: 584831
cuaacaacugucuggcaua

SEQ ID NO: 592707 - RNA, 19 nt, Artificial Sequence
  Description of Artificial Sequence: Synthetic oligonucleotide
  Antisense strand to SEQ ID NO: 592706
uaugccagacaguuguuag

SEQ ID NO: 592708 - RNA, 19 nt, Artificial Sequence
  Description of Artificial Sequence: Synthetic oligonucleotide
  Sense strand starting at position 1258 of SEQ ID NO: 584831
ggcgguaacaaguaguauu

SEQ ID NO: 592709 - RNA, 19 nt, Artificial Sequence
  Description of Artificial Sequence: Synthetic oligonucleotide
  Antisense strand to SEQ ID NO: 592708
aauacuacuuguuaccgcc

SEQ ID NO: 592710 - RNA, 19 nt, Artificial Sequence
  Description of Artificial Sequence: Synthetic oligonucleotide
  Sense strand starting at position 1289 of SEQ ID NO: 584831
guauguggcaaugauauuc

SEQ ID NO: 592711 - RNA, 19 nt, Artificial Sequence
  Description of Artificial Sequence: Synthetic oligonucleotide
  Antisense strand to SEQ ID NO: 592710
gaauaucauugccacauac

SEQ ID NO: 592712 - RNA, 19 nt, Artificial Sequence
  Description of Artificial Sequence: Synthetic oligonucleotide
  Sense strand starting at position 1380 of SEQ ID NO: 584831
guggaagcucugggcauau

SEQ ID NO: 592713 - RNA, 19 nt, Artificial Sequence
  Description of Artificial Sequence: Synthetic oligonucleotide
  Antisense strand to SEQ ID NO: 592712
auaugcccagagcuuccac

SEQ ID NO: 592714 - RNA, 19 nt, Artificial Sequence
  Description of Artificial Sequence: Synthetic oligonucleotide
  Sense strand starting at position 1384 of SEQ ID NO: 584831
aagcucugggcauauagua

SEQ ID NO: 592715 - RNA, 19 nt, Artificial Sequence
  Description of Artificial Sequence: Synthetic oligonucleotide
  Antisense strand to SEQ ID NO: 592714
uacuauaugcccagagcuu

SEQ ID NO: 592716 - RNA, 19 nt, Artificial Sequence
  Description of Artificial Sequence: Synthetic oligonucleotide
  Sense strand starting at position 1526 of SEQ ID NO: 584831
ggagaccugccagaugagu

SEQ ID NO: 592717 - RNA, 19 nt, Artificial Sequence
  Description of Artificial Sequence: Synthetic oligonucleotide
  Antisense strand to SEQ ID NO: 592716
acucaucuggcaggucucc

SEQ ID NO: 592718 - RNA, 19 nt, Artificial Sequence
  Description of Artificial Sequence: Synthetic oligonucleotide
  Sense strand starting at position 1534 of SEQ ID NO: 584831
gccagaugagucugaggau

SEQ ID NO: 592719 - RNA, 19 nt, Artificial Sequence
  Description of Artificial Sequence: Synthetic oligonucleotide
  Antisense strand to SEQ ID NO: 592718
auccucagacucaucuggc

SEQ ID NO: 592720 - RNA, 19 nt, Artificial Sequence
  Description of Artificial Sequence: Synthetic oligonucleotide
  Sense strand starting at position 1546 of SEQ ID NO: 584831
ugaggauccacuugaguga

SEQ ID NO: 592721 - RNA, 19 nt, Artificial Sequence
  Description of Artificial Sequence: Synthetic oligonucleotide
  Antisense strand to SEQ ID NO: 592720
ucacucaaguggauccuca

SEQ ID NO: 592722 - RNA, 19 nt, Artificial Sequence
  Description of Artificial Sequence: Synthetic oligonucleotide
  Sense strand starting at position 1549 of SEQ ID NO: 584831
ggauccacuugagugagau

SEQ ID NO: 592723 - RNA, 19 nt, Artificial Sequence
  Description of Artificial Sequence: Synthetic oligonucleotide
  Antisense strand to SEQ ID NO: 592722
aucucacucaaguggaucc

SEQ ID NO: 592724 - RNA, 19 nt, Artificial Sequence
  Description of Artificial Sequence: Synthetic oligonucleotide
  Sense strand starting at position 1550 of SEQ ID NO: 584831
gauccacuugagugagauc

SEQ ID NO: 592725 - RNA, 19 nt, Artificial Sequence
  Description of Artificial Sequence: Synthetic oligonucleotide
  Antisense strand to SEQ ID NO: 592724
gaucucacucaaguggauc

SEQ ID NO: 592726 - RNA, 19 nt, Artificial Sequence
  Description of Artificial Sequence: Synthetic oligonucleotide
  Sense strand starting at position 2100 of SEQ ID NO: 584831
ccaggagugcucgagaaca

SEQ ID NO: 592727 - RNA, 19 nt, Artificial Sequence
  Description of Artificial Sequence: Synthetic oligonucleotide
  Antisense strand to SEQ ID NO: 592726
uguucucgagcacuccugg

SEQ ID NO: 592728 - RNA, 19 nt, Artificial Sequence
  Description of Artificial Sequence: Synthetic oligonucleotide
  Sense strand starting at position 2102 of SEQ ID NO: 584831
aggagugcucgagaacaga

SEQ ID NO: 592729 - RNA, 19 nt, Artificial Sequence
  Description of Artificial Sequence: Synthetic oligonucleotide
  Antisense strand to SEQ ID NO: 592728
ucuguucucgagcacuccu

SEQ ID NO: 592730 - RNA, 19 nt, Artificial Sequence
  Description of Artificial Sequence: Synthetic oligonucleotide
  Sense strand starting at position 2415 of SEQ ID NO: 584831
agagaagguucugcuuuag

SEQ ID NO: 592731 - RNA, 19 nt, Artificial Sequence
  Description of Artificial Sequence: Synthetic oligonucleotide
  Antisense strand to SEQ ID NO: 592730
cuaaagcagaaccuucucu

SEQ ID NO: 592732 - RNA, 19 nt, Artificial Sequence
  Description of Artificial Sequence: Synthetic oligonucleotide
  Sense strand starting at position 2419 of SEQ ID NO: 584831
aagguucugcuuuagagac

SEQ ID NO: 592733 - RNA, 19 nt, Artificial Sequence
  Description of Artificial Sequence: Synthetic oligonucleotide
  Antisense strand to SEQ ID NO: 592732
gucucuaaagcagaaccuu

SEQ ID NO: 592734 - RNA, 19 nt, Artificial Sequence
  Description of Artificial Sequence: Synthetic oligonucleotide
  Sense strand starting at position 2601 of SEQ ID NO: 584831
ggcauuucugggugaggug

SEQ ID NO: 592735 - RNA, 19 nt, Artificial Sequence
  Description of Artificial Sequence: Synthetic oligonucleotide
  Antisense strand to SEQ ID NO: 592734
caccucacccagaaaugcc

SEQ ID NO: 592736 - RNA, 19 nt, Artificial Sequence
  Description of Artificial Sequence: Synthetic oligonucleotide
  Sense strand starting at position 2602 of SEQ ID NO: 584831
gcauuucugggugaggugu

SEQ ID NO: 592737 - RNA, 19 nt, Artificial Sequence
  Description of Artificial Sequence: Synthetic oligonucleotide
  Antisense strand to SEQ ID NO: 592736
acaccucacccagaaaugc

SEQ ID NO: 592738 - RNA, 19 nt, Artificial Sequence
  Description of Artificial Sequence: Synthetic oligonucleotide
  Sense strand starting at position 2624 of SEQ ID NO: 584831
ggguaugcccauugacaac

SEQ ID NO: 592739 - RNA, 19 nt, Artificial Sequence
  Description of Artificial Sequence: Synthetic oligonucleotide
  Antisense strand to SEQ ID NO: 592738
guugucaaugggcauaccc

SEQ ID NO: 592740 - RNA, 19 nt, Artificial Sequence
  Description of Artificial Sequence: Synthetic oligonucleotide
  Sense strand starting at position 2673 of SEQ ID NO: 584831
augugaucucuccacccua

SEQ ID NO: 592741 - RNA, 19 nt, Artificial Sequence
  Description of Artificial Sequence: Synthetic oligonucleotide
  Antisense strand to SEQ ID NO: 592740
uaggguggagagaucacau

SEQ ID NO: 592742 - RNA, 19 nt, Artificial Sequence
  Description of Artificial Sequence: Synthetic oligonucleotide
  Sense strand starting at position 2830 of SEQ ID NO: 584831
cccugaaguuuaccuguuu

SEQ ID NO: 592743 - RNA, 19 nt, Artificial Sequence
  Description of Artificial Sequence: Synthetic oligonucleotide
  Antisense strand to SEQ ID NO: 592742
aaacagguaaacuucaggg

SEQ ID NO: 592744 - RNA, 19 nt, Artificial Sequence
  Description of Artificial Sequence: Synthetic oligonucleotide
  Sense strand starting at position 2836 of SEQ ID NO: 584831
aguuuaccuguuugacaaa

SEQ ID NO: 592745 - RNA, 19 nt, Artificial Sequence
  Description of Artificial Sequence: Synthetic oligonucleotide
  Antisense strand to SEQ ID NO: 592744
uuugucaaacagguaaacu

SEQ ID NO: 592746 - RNA, 19 nt, Artificial Sequence
  Description of Artificial Sequence: Synthetic oligonucleotide
  Sense strand starting at position 2851 of SEQ ID NO: 584831
caaagugcucuugaggaca

SEQ ID NO: 592747 - RNA, 19 nt, Artificial Sequence
  Description of Artificial Sequence: Synthetic oligonucleotide
  Antisense strand to SEQ ID NO: 592746
uguccucaagagcacuuug

SEQ ID NO: 592748 - RNA, 19 nt, Artificial Sequence
  Description of Artificial Sequence: Synthetic oligonucleotide
  Sense strand starting at position 2877 of SEQ ID NO: 584831
uugcaucuccagcauagaa

SEQ ID NO: 592749 - RNA, 19 nt, Artificial Sequence
  Description of Artificial Sequence: Synthetic oligonucleotide
  Antisense strand to SEQ ID NO: 592748
uucuaugcuggagaugcaa

SEQ ID NO: 592750 - RNA, 19 nt, Artificial Sequence
  Description of Artificial Sequence: Synthetic oligonucleotide
  Sense strand starting at position 2910 of SEQ ID NO: 584831
ggugguuuaagucauguuc

SEQ ID NO: 592751 - RNA, 19 nt, Artificial Sequence
  Description of Artificial Sequence: Synthetic oligonucleotide
  Antisense strand to SEQ ID NO: 592750
gaacaugacuuaaaccacc

SEQ ID NO: 592752 - RNA, 19 nt, Artificial Sequence
  Description of Artificial Sequence: Synthetic oligonucleotide
  Sense strand starting at position 2926 of SEQ ID NO: 584831
uucugccauucuuuaagga

SEQ ID NO: 592753 - RNA, 19 nt, Artificial Sequence
  Description of Artificial Sequence: Synthetic oligonucleotide
  Antisense strand to SEQ ID NO: 592752
uccuuaaagaauggcagaa

SEQ ID NO: 592754 - RNA, 19 nt, Artificial Sequence
  Description of Artificial Sequence: Synthetic oligonucleotide
  Sense strand starting at position 3125 of SEQ ID NO: 584831
ucagcuaaauuuggaagua

SEQ ID NO: 592755 - RNA, 19 nt, Artificial Sequence
  Description of Artificial Sequence: Synthetic oligonucleotide
  Antisense strand to SEQ ID NO: 592754
uacuuccaaauuuagcuga

SEQ ID NO: 592756 - RNA, 19 nt, Artificial Sequence
  Description of Artificial Sequence: Synthetic oligonucleotide
  Sense strand starting at position 3126 of SEQ ID NO: 584831
cagcuaaauuuggaaguau

SEQ ID NO: 592757 - RNA, 19 nt, Artificial Sequence
  Description of Artificial Sequence: Synthetic oligonucleotide
  Antisense strand to SEQ ID NO: 592756
auacuuccaaauuuagcug

SEQ ID NO: 592758 - RNA, 19 nt, Artificial Sequence
  Description of Artificial Sequence: Synthetic oligonucleotide
  Sense strand starting at position 3185 of SEQ ID NO: 584831
guccucuggagucagaaga

SEQ ID NO: 592759 - RNA, 19 nt, Artificial Sequence
  Description of Artificial Sequence: Synthetic oligonucleotide
  Antisense strand to SEQ ID NO: 592758
ucuucugacuccagaggac

SEQ ID NO: 592760 - RNA, 19 nt, Artificial Sequence
  Description of Artificial Sequence: Synthetic oligonucleotide
  Sense strand starting at position 3790 of SEQ ID NO: 584831
ccugaugggaacugucauu

SEQ ID NO: 592761 - RNA, 19 nt, Artificial Sequence
  Description of Artificial Sequence: Synthetic oligonucleotide
  Antisense strand to SEQ ID NO: 592760
aaugacaguucccaucagg

SEQ ID NO: 592762 - RNA, 19 nt, Artificial Sequence
  Description of Artificial Sequence: Synthetic oligonucleotide
  Sense strand starting at position 3820 of SEQ ID NO: 584831
gcuacuuugguggaucuga

SEQ ID NO: 592763 - RNA, 19 nt, Artificial Sequence
  Description of Artificial Sequence: Synthetic oligonucleotide
  Antisense strand to SEQ ID NO: 592762
ucagauccaccaaaguagc

SEQ ID NO: 592764 - RNA, 19 nt, Artificial Sequence
  Description of Artificial Sequence: Synthetic oligonucleotide
  Sense strand starting at position 3957 of SEQ ID NO: 584831
aggcucaccuguucuuuaa

SEQ ID NO: 592765 - RNA, 19 nt, Artificial Sequence
  Description of Artificial Sequence: Synthetic oligonucleotide
  Antisense strand to SEQ ID NO: 592764
uuaaagaacaggugagccu

SEQ ID NO: 592766 - RNA, 19 nt, Artificial Sequence
  Description of Artificial Sequence: Synthetic oligonucleotide
  Sense strand starting at position 147 of SEQ ID NO: 584832
gcaucacacuauccugagu

SEQ ID NO: 592767 - RNA, 19 nt, Artificial Sequence
  Description of Artificial Sequence: Synthetic oligonucleotide
  Antisense strand to SEQ ID NO: 592766
acucaggauagugugaugc

SEQ ID NO: 592768 - RNA, 19 nt, Artificial Sequence
  Description of Artificial Sequence: Synthetic oligonucleotide
  Sense strand starting at position 254 of SEQ ID NO: 584832
ccuacuggucugggugaaa

SEQ ID NO: 592769 - RNA, 19 nt, Artificial Sequence
  Description of Artificial Sequence: Synthetic oligonucleotide
  Antisense strand to SEQ ID NO: 592768
uuucacccagaccaguagg

SEQ ID NO: 592770 - RNA, 19 nt, Artificial Sequence
  Description of Artificial Sequence: Synthetic oligonucleotide
  Sense strand starting at position 272 of SEQ ID NO: 584832
agcucagagucauaauuua

SEQ ID NO: 592771 - RNA, 19 nt, Artificial Sequence
  Description of Artificial Sequence: Synthetic oligonucleotide
  Antisense strand to SEQ ID NO: 592770
uaaauuaugacucugagcu

SEQ ID NO: 592772 - RNA, 19 nt, Artificial Sequence
  Description of Artificial Sequence: Synthetic oligonucleotide
  Sense strand starting at position 313 of SEQ ID NO: 584832
aagaccugucuuuaucguu

SEQ ID NO: 592773 - RNA, 19 nt, Artificial Sequence
  Description of Artificial Sequence: Synthetic oligonucleotide
  Antisense strand to SEQ ID NO: 592772
aacgauaaagacaggucuu

SEQ ID NO: 592774 - RNA, 19 nt, Artificial Sequence
  Description of Artificial Sequence: Synthetic oligonucleotide
  Sense strand starting at position 320 of SEQ ID NO: 584832
gucuuuaucguugcugcua

SEQ ID NO: 592775 - RNA, 19 nt, Artificial Sequence
  Description of Artificial Sequence: Synthetic oligonucleotide
  Antisense strand to SEQ ID NO: 592774
uagcagcaacgauaaagac

SEQ ID NO: 592776 - RNA, 19 nt, Artificial Sequence
  Description of Artificial Sequence: Synthetic oligonucleotide
  Sense strand starting at position 354 of SEQ ID NO: 584832
agagccuucuugcuaaaug

SEQ ID NO: 592777 - RNA, 19 nt, Artificial Sequence
  Description of Artificial Sequence: Synthetic oligonucleotide
  Antisense strand to SEQ ID NO: 592776
cauuuagcaagaaggcucu

SEQ ID NO: 592778 - RNA, 19 nt, Artificial Sequence
  Description of Artificial Sequence: Synthetic oligonucleotide
  Sense strand starting at position 481 of SEQ ID NO: 584832
guauuaauaugagcaucca

SEQ ID NO: 592779 - RNA, 19 nt, Artificial Sequence
  Description of Artificial Sequence: Synthetic oligonucleotide
  Antisense strand to SEQ ID NO: 592778
uggaugcucauauuaauac

SEQ ID NO: 592780 - RNA, 19 nt, Artificial Sequence
  Description of Artificial Sequence: Synthetic oligonucleotide
  Sense strand starting at position 517 of SEQ ID NO: 584832
ugcuuagaugcuggacuaa

SEQ ID NO: 592781 - RNA, 19 nt, Artificial Sequence
  Description of Artificial Sequence: Synthetic oligonucleotide
  Antisense strand to SEQ ID NO: 592780
uuaguccagcaucuaagca

SEQ ID NO: 592782 - RNA, 19 nt, Artificial Sequence
  Description of Artificial Sequence: Synthetic oligonucleotide
  Sense strand starting at position 537 of SEQ ID NO: 584832
gguuuaaaugcugacaauu

SEQ ID NO: 592783 - RNA, 19 nt, Artificial Sequence
  Description of Artificial Sequence: Synthetic oligonucleotide
  Antisense strand to SEQ ID NO: 592782
aauugucagcauuuaaacc

SEQ ID NO: 592784 - RNA, 19 nt, Artificial Sequence
  Description of Artificial Sequence: Synthetic oligonucleotide
  Sense strand starting at position 573 of SEQ ID NO: 584832
aggcaaugccucuaauauc

SEQ ID NO: 592785 - RNA, 19 nt, Artificial Sequence
  Description of Artificial Sequence: Synthetic oligonucleotide
  Antisense strand to SEQ ID NO: 592784
gauauuagaggcauugccu

SEQ ID NO: 592786 - RNA, 19 nt, Artificial Sequence
  Description of Artificial Sequence: Synthetic oligonucleotide
  Sense strand starting at position 643 of SEQ ID NO: 584832
cccauaggauuguuugaag

SEQ ID NO: 592787 - RNA, 19 nt, Artificial Sequence
  Description of Artificial Sequence: Synthetic oligonucleotide
  Antisense strand to SEQ ID NO: 592786
cuucaaacaauccuauggg

SEQ ID NO: 592788 - RNA, 19 nt, Artificial Sequence
  Description of Artificial Sequence: Synthetic oligonucleotide
  Sense strand starting at position 757 of SEQ ID NO: 584832
gcccaagugcuacaugaua

SEQ ID NO: 592789 - RNA, 19 nt, Artificial Sequence
  Description of Artificial Sequence: Synthetic oligonucleotide
  Antisense strand to SEQ ID NO: 592788
uaucauguagcacuugggc

SEQ ID NO: 592790 - RNA, 19 nt, Artificial Sequence
  Description of Artificial Sequence: Synthetic oligonucleotide
  Sense strand starting at position 1024 of SEQ ID NO: 584832
gguacuugccuuuaugaaa

SEQ ID NO: 592791 - RNA, 19 nt, Artificial Sequence
  Description of Artificial Sequence: Synthetic oligonucleotide
  Antisense strand to SEQ ID NO: 592790
uuucauaaaggcaaguacc

SEQ ID NO: 592792 - RNA, 19 nt, Artificial Sequence
  Description of Artificial Sequence: Synthetic oligonucleotide
  Sense strand starting at position 1320 of SEQ ID NO: 584832
ccuggaagugcccagauau

SEQ ID NO: 592793 - RNA, 19 nt, Artificial Sequence
  Description of Artificial Sequence: Synthetic oligonucleotide
  Antisense strand to SEQ ID NO: 592792
auaucugggcacuuccagg

SEQ ID NO: 592794 - RNA, 19 nt, Artificial Sequence
  Description of Artificial Sequence: Synthetic oligonucleotide
  Sense strand starting at position 2221 of SEQ ID NO: 584832
uaaugcuuguggguaagaa

SEQ ID NO: 592795 - RNA, 19 nt, Artificial Sequence
  Description of Artificial Sequence: Synthetic oligonucleotide
  Antisense strand to SEQ ID NO: 592794
uucuuacccacaagcauua

SEQ ID NO: 592796 - RNA, 19 nt, Artificial Sequence
  Description of Artificial Sequence: Synthetic oligonucleotide
  Sense strand starting at position 2222 of SEQ ID NO: 584832
aaugcuuguggguaagaag

SEQ ID NO: 592797 - RNA, 19 nt, Artificial Sequence
  Description of Artificial Sequence: Synthetic oligonucleotide
  Antisense strand to SEQ ID NO: 592796
cuucuuacccacaagcauu

SEQ ID NO: 592798 - RNA, 19 nt, Artificial Sequence
  Description of Artificial Sequence: Synthetic oligonucleotide
  Sense strand starting at position 2254 of SEQ ID NO: 584832
agguuagggcucuguauaa

SEQ ID NO: 592799 - RNA, 19 nt, Artificial Sequence
  Description of Artificial Sequence: Synthetic oligonucleotide
  Antisense strand to SEQ ID NO: 592798
uuauacagagcccuaaccu

SEQ ID NO: 592800 - RNA, 19 nt, Artificial Sequence
  Description of Artificial Sequence: Synthetic oligonucleotide
  Sense strand starting at position 2308 of SEQ ID NO: 584832
ugucaaguggcaggaaaua

SEQ ID NO: 592801 - RNA, 19 nt, Artificial Sequence
  Description of Artificial Sequence: Synthetic oligonucleotide
  Antisense strand to SEQ ID NO: 592800
uauuuccugccacuugaca

SEQ ID NO: 592802 - RNA, 19 nt, Artificial Sequence
  Description of Artificial Sequence: Synthetic oligonucleotide
  Sense strand starting at position 2354 of SEQ ID NO: 584832
ggcuguuaugaagacugca

SEQ ID NO: 592803 - RNA, 19 nt, Artificial Sequence
  Description of Artificial Sequence: Synthetic oligonucleotide
  Antisense strand to SEQ ID NO: 592802
ugcagucuucauaacagcc

SEQ ID NO: 592804 - RNA, 19 nt, Artificial Sequence
  Description of Artificial Sequence: Synthetic oligonucleotide
  Sense strand starting at position 2357 of SEQ ID NO: 584832
uguuaugaagacugcauga

SEQ ID NO: 592805 - RNA, 19 nt, Artificial Sequence
  Description of Artificial Sequence: Synthetic oligonucleotide
  Antisense strand to SEQ ID NO: 592804
ucaugcagucuucauaaca

SEQ ID NO: 592806 - RNA, 19 nt, Artificial Sequence
  Description of Artificial Sequence: Synthetic oligonucleotide
  Sense strand starting at position 2402 of SEQ ID NO: 584832
guggcaaucaacgaauauu

SEQ ID NO: 592807 - RNA, 19 nt, Artificial Sequence
  Description of Artificial Sequence: Synthetic oligonucleotide
  Antisense strand to SEQ ID NO: 592806
aauauucguugauugccac

SEQ ID NO: 592808 - RNA, 19 nt, Artificial Sequence
  Description of Artificial Sequence: Synthetic oligonucleotide
  Sense strand starting at position 2475 of SEQ ID NO: 584832
guguaugcacguaaucgua

SEQ ID NO: 592809 - RNA, 19 nt, Artificial Sequence
  Description of Artificial Sequence: Synthetic oligonucleotide
  Antisense strand to SEQ ID NO: 592808
uacgauuacgugcauacac

SEQ ID NO: 592810 - RNA, 19 nt, Artificial Sequence
  Description of Artificial Sequence: Synthetic oligonucleotide
  Sense strand starting at position 2493 of SEQ ID NO: 584832
accuucugagucugaggua

SEQ ID NO: 592811 - RNA, 19 nt, Artificial Sequence
  Description of Artificial Sequence: Synthetic oligonucleotide
  Antisense strand to SEQ ID NO: 592810
uaccucagacucagaaggu

SEQ ID NO: 592812 - RNA, 19 nt, Artificial Sequence
  Description of Artificial Sequence: Synthetic oligonucleotide
  Sense strand starting at position 2651 of SEQ ID NO: 584832
cuccauuuauguguuucua

SEQ ID NO: 592813 - RNA, 19 nt, Artificial Sequence
  Description of Artificial Sequence: Synthetic oligonucleotide
  Antisense strand to SEQ ID NO: 592812
uagaaacacauaaauggag

SEQ ID NO: 592814 - RNA, 19 nt, Artificial Sequence
  Description of Artificial Sequence: Synthetic oligonucleotide
  Sense strand starting at position 2653 of SEQ ID NO: 584832
ccauuuauguguuucuagu

SEQ ID NO: 592815 - RNA, 19 nt, Artificial Sequence
  Description of Artificial Sequence: Synthetic oligonucleotide
  Antisense strand to SEQ ID NO: 592814
acuagaaacacauaaaugg

SEQ ID NO: 592816 - RNA, 19 nt, Artificial Sequence
  Description of Artificial Sequence: Synthetic oligonucleotide
  Sense strand starting at position 2661 of SEQ ID NO: 584832
guguuucuaguuuaaauuc

SEQ ID NO: 592817 - RNA, 19 nt, Artificial Sequence
  Description of Artificial Sequence: Synthetic oligonucleotide
  Antisense strand to SEQ ID NO: 592816
gaauuuaaacuagaaacac

SEQ ID NO: 592818 - RNA, 19 nt, Artificial Sequence
  Description of Artificial Sequence: Synthetic oligonucleotide
  Sense strand starting at position 2730 of SEQ ID NO: 584832
gugagaucauaagcacucu

SEQ ID NO: 592819 - RNA, 19 nt, Artificial Sequence
  Description of Artificial Sequence: Synthetic oligonucleotide
  Antisense strand to SEQ ID NO: 592818
agagugcuuaugaucucac

SEQ ID NO: 592820 - RNA, 19 nt, Artificial Sequence
  Description of Artificial Sequence: Synthetic oligonucleotide
  Sense strand starting at position 2807 of SEQ ID NO: 584832
ugucaucaacacugggaaa

SEQ ID NO: 592821 - RNA, 19 nt, Artificial Sequence
  Description of Artificial Sequence: Synthetic oligonucleotide
  Antisense strand to SEQ ID NO: 592820
uuucccaguguugaugaca

SEQ ID NO: 592822 - RNA, 19 nt, Artificial Sequence
  Description of Artificial Sequence: Synthetic oligonucleotide
  Sense strand starting at position 2997 of SEQ ID NO: 584832
auaaauaccuauucguuga

SEQ ID NO: 592823 - RNA, 19 nt, Artificial Sequence
  Description of Artificial Sequence: Synthetic oligonucleotide
  Antisense strand to SEQ ID NO: 592822
ucaacgaauagguauuuau

SEQ ID NO: 592824 - RNA, 19 nt, Artificial Sequence
  Description of Artificial Sequence: Synthetic oligonucleotide
  Sense strand starting at position 3002 of SEQ ID NO: 584832
uaccuauucguugauugga

SEQ ID NO: 592825 - RNA, 19 nt, Artificial Sequence
  Description of Artificial Sequence: Synthetic oligonucleotide
  Antisense strand to SEQ ID NO: 592824
uccaaucaacgaauaggua

SEQ ID NO: 592826 - RNA, 19 nt, Artificial Sequence
  Description of Artificial Sequence: Synthetic oligonucleotide
  Sense strand starting at position 3004 of SEQ ID NO: 584832
ccuauucguugauuggaua

SEQ ID NO: 592827 - RNA, 19 nt, Artificial Sequence
  Description of Artificial Sequence: Synthetic oligonucleotide
  Antisense strand to SEQ ID NO: 592826
uauccaaucaacgaauagg

SEQ ID NO: 592828 - RNA, 19 nt, Artificial Sequence
  Description of Artificial Sequence: Synthetic oligonucleotide
  Sense strand starting at position 3005 of SEQ ID NO: 584832
cuauucguugauuggauaa

SEQ ID NO: 592829 - RNA, 19 nt, Artificial Sequence
  Description of Artificial Sequence: Synthetic oligonucleotide
  Antisense strand to SEQ ID NO: 592828
uuauccaaucaacgaauag

SEQ ID NO: 592830 - RNA, 19 nt, Artificial Sequence
  Description of Artificial Sequence: Synthetic oligonucleotide
  Sense strand starting at position 3121 of SEQ ID NO: 584832
uauaauguugggugcaaga

SEQ ID NO: 592831 - RNA, 19 nt, Artificial Sequence
  Description of Artificial Sequence: Synthetic oligonucleotide
  Antisense strand to SEQ ID NO: 592830
ucuugcacccaacauuaua

SEQ ID NO: 592832 - RNA, 19 nt, Artificial Sequence
  Description of Artificial Sequence: Synthetic oligonucleotide
  Sense strand starting at position 3123 of SEQ ID NO: 584832
uaauguugggugcaagaua

SEQ ID NO: 592833 - RNA, 19 nt, Artificial Sequence
  Description of Artificial Sequence: Synthetic oligonucleotide
  Antisense strand to SEQ ID NO: 592832
uaucuugcacccaacauua

SEQ ID NO: 592834 - RNA, 19 nt, Artificial Sequence
  Description of Artificial Sequence: Synthetic oligonucleotide
  Sense strand starting at position 3347 of SEQ ID NO: 584832
gcauuucuuccuggaguug

SEQ ID NO: 592835 - RNA, 19 nt, Artificial Sequence
  Description of Artificial Sequence: Synthetic oligonucleotide
  Antisense strand to SEQ ID NO: 592834
caacuccaggaagaaaugc

SEQ ID NO: 592836 - RNA, 19 nt, Artificial Sequence
  Description of Artificial Sequence: Synthetic oligonucleotide
  Sense strand starting at position 3387 of SEQ ID NO: 584832
cuggcuuaugguuaaagca

SEQ ID NO: 592837 - RNA, 19 nt, Artificial Sequence
  Description of Artificial Sequence: Synthetic oligonucleotide
  Antisense strand to SEQ ID NO: 592836
ugcuuuaaccauaagccag

SEQ ID NO: 592838 - RNA, 19 nt, Artificial Sequence
  Description of Artificial Sequence: Synthetic oligonucleotide
  Sense strand starting at position 3624 of SEQ ID NO: 584832
uuagcuuacccaggaguga

SEQ ID NO: 592839 - RNA, 19 nt, Artificial Sequence
  Description of Artificial Sequence: Synthetic oligonucleotide
  Antisense strand to SEQ ID NO: 592838
ucacuccuggguaagcuaa

SEQ ID NO: 592840 - RNA, 19 nt, Artificial Sequence
  Description of Artificial Sequence: Synthetic oligonucleotide
  Sense strand starting at position 3719 of SEQ ID NO: 584832
gcuugagaugaagggcaua

SEQ ID NO: 592841 - RNA, 19 nt, Artificial Sequence
  Description of Artificial Sequence: Synthetic oligonucleotide
  Antisense strand to SEQ ID NO: 592840
uaugcccuucaucucaagc

SEQ ID NO: 592842 - RNA, 19 nt, Artificial Sequence
  Description of Artificial Sequence: Synthetic oligonucleotide
  Sense strand starting at position 3910 of SEQ ID NO: 584832
auuaccaucucaguggaaa

SEQ ID NO: 592843 - RNA, 19 nt, Artificial Sequence
  Description of Artificial Sequence: Synthetic oligonucleotide
  Antisense strand to SEQ ID NO: 592842
uuuccacugagaugguaau

SEQ ID NO: 592844 - RNA, 19 nt, Artificial Sequence
  Description of Artificial Sequence: Synthetic oligonucleotide
  Sense strand starting at position 3911 of SEQ ID NO: 584832
uuaccaucucaguggaaac

SEQ ID NO: 592845 - RNA, 19 nt, Artificial Sequence
  Description of Artificial Sequence: Synthetic oligonucleotide
  Antisense strand to SEQ ID NO: 592844
guuuccacugagaugguaa

SEQ ID NO: 592846 - RNA, 19 nt, Artificial Sequence
  Description of Artificial Sequence: Synthetic oligonucleotide
  Sense strand starting at position 225 of SEQ ID NO: 584833
ggagaucaaucagaccaaa

SEQ ID NO: 592847 - RNA, 19 nt, Artificial Sequence
  Description of Artificial Sequence: Synthetic oligonucleotide
  Antisense strand to SEQ ID NO: 592846
uuuggucugauugaucucc

SEQ ID NO: 592848 - RNA, 19 nt, Artificial Sequence
  Description of Artificial Sequence: Synthetic oligonucleotide
  Sense strand starting at position 322 of SEQ ID NO: 584833
gagguagaacugugaacuu

SEQ ID NO: 592849 - RNA, 19 nt, Artificial Sequence
  Description of Artificial Sequence: Synthetic oligonucleotide
  Antisense strand to SEQ ID NO: 592848
aaguucacaguucuaccuc

SEQ ID NO: 592850 - RNA, 19 nt, Artificial Sequence
  Description of Artificial Sequence: Synthetic oligonucleotide
  Sense strand starting at position 441 of SEQ ID NO: 584833
cuguuaaagcaagaucauc

SEQ ID NO: 592851 - RNA, 19 nt, Artificial Sequence
  Description of Artificial Sequence: Synthetic oligonucleotide
  Antisense strand to SEQ ID NO: 592850
gaugaucuugcuuuaacag

SEQ ID NO: 592852 - RNA, 19 nt, Artificial Sequence
  Description of Artificial Sequence: Synthetic oligonucleotide
  Sense strand starting at position 657 of SEQ ID NO: 584833
gcguuugacacauaggaag

SEQ ID NO: 592853 - RNA, 19 nt, Artificial Sequence
  Description of Artificial Sequence: Synthetic oligonucleotide
  Antisense strand to SEQ ID NO: 592852
cuuccuaugugucaaacgc

SEQ ID NO: 592854 - RNA, 19 nt, Artificial Sequence
  Description of Artificial Sequence: Synthetic oligonucleotide
  Sense strand starting at position 699 of SEQ ID NO: 584833
aacuguuaagcagggauca

SEQ ID NO: 592855 - RNA, 19 nt, Artificial Sequence
  Description of Artificial Sequence: Synthetic oligonucleotide
  Antisense strand to SEQ ID NO: 592854
ugaucccugcuuaacaguu

SEQ ID NO: 592856 - RNA, 19 nt, Artificial Sequence
  Description of Artificial Sequence: Synthetic oligonucleotide
  Sense strand starting at position 700 of SEQ ID NO: 584833
acuguuaagcagggaucaa

SEQ ID NO: 592857 - RNA, 19 nt, Artificial Sequence
  Description of Artificial Sequence: Synthetic oligonucleotide
  Antisense strand to SEQ ID NO: 592856
uugaucccugcuuaacagu

SEQ ID NO: 592858 - RNA, 19 nt, Artificial Sequence
  Description of Artificial Sequence: Synthetic oligonucleotide
  Sense strand starting at position 776 of SEQ ID NO: 584833
uuaagagcaucuuuaagga

SEQ ID NO: 592859 - RNA, 19 nt, Artificial Sequence
  Description of Artificial Sequence: Synthetic oligonucleotide
  Antisense strand to SEQ ID NO: 592858
uccuuaaagaugcucuuaa

SEQ ID NO: 592860 - RNA, 19 nt, Artificial Sequence
  Description of Artificial Sequence: Synthetic oligonucleotide
  Sense strand starting at position 1002 of SEQ ID NO: 584833
auguaaccaugaguuugaa

SEQ ID NO: 592861 - RNA, 19 nt, Artificial Sequence
  Description of Artificial Sequence: Synthetic oligonucleotide
  Antisense strand to SEQ ID NO: 592860
uucaaacucaugguuacau

SEQ ID NO: 592862 - RNA, 19 nt, Artificial Sequence
  Description of Artificial Sequence: Synthetic oligonucleotide
  Sense strand starting at position 1011 of SEQ ID NO: 584833
ugaguuugaaugcacaagu

SEQ ID NO: 592863 - RNA, 19 nt, Artificial Sequence
  Description of Artificial Sequence: Synthetic oligonucleotide
  Antisense strand to SEQ ID NO: 592862
acuugugcauucaaacuca

SEQ ID NO: 592864 - RNA, 19 nt, Artificial Sequence
  Description of Artificial Sequence: Synthetic oligonucleotide
  Sense strand starting at position 1106 of SEQ ID NO: 584833
acugcauuccaugaguaag

SEQ ID NO: 592865 - RNA, 19 nt, Artificial Sequence
  Description of Artificial Sequence: Synthetic oligonucleotide
  Antisense strand to SEQ ID NO: 592864
cuuacucauggaaugcagu

SEQ ID NO: 592866 - RNA, 19 nt, Artificial Sequence
  Description of Artificial Sequence: Synthetic oligonucleotide
  Sense strand starting at position 1109 of SEQ ID NO: 584833
gcauuccaugaguaaguua

SEQ ID NO: 592867 - RNA, 19 nt, Artificial Sequence
  Description of Artificial Sequence: Synthetic oligonucleotide
  Antisense strand to SEQ ID NO: 592866
uaacuuacucauggaaugc

SEQ ID NO: 592868 - RNA, 19 nt, Artificial Sequence
  Description of Artificial Sequence: Synthetic oligonucleotide
  Sense strand starting at position 1112 of SEQ ID NO: 584833
uuccaugaguaaguuaauu

SEQ ID NO: 592869 - RNA, 19 nt, Artificial Sequence
  Description of Artificial Sequence: Synthetic oligonucleotide
  Antisense strand to SEQ ID NO: 592868
aauuaacuuacucauggaa

SEQ ID NO: 592870 - RNA, 19 nt, Artificial Sequence
  Description of Artificial Sequence: Synthetic oligonucleotide
  Sense strand starting at position 1257 of SEQ ID NO: 584833
acggucagcuaccuauuua

SEQ ID NO: 592871 - RNA, 19 nt, Artificial Sequence
  Description of Artificial Sequence: Synthetic oligonucleotide
  Antisense strand to SEQ ID NO: 592870
uaaauagguagcugaccgu

SEQ ID NO: 592872 - RNA, 19 nt, Artificial Sequence
  Description of Artificial Sequence: Synthetic oligonucleotide
  Sense strand starting at position 1345 of SEQ ID NO: 584833
uuaucaaggcuuuguaaca

SEQ ID NO: 592873 - RNA, 19 nt, Artificial Sequence
  Description of Artificial Sequence: Synthetic oligonucleotide
  Antisense strand to SEQ ID NO: 592872
uguuacaaagccuugauaa

SEQ ID NO: 592874 - RNA, 19 nt, Artificial Sequence
  Description of Artificial Sequence: Synthetic oligonucleotide
  Sense strand starting at position 1424 of SEQ ID NO: 584833
ggcuuaacacuuggacaau

SEQ ID NO: 592875 - RNA, 19 nt, Artificial Sequence
  Description of Artificial Sequence: Synthetic oligonucleotide
  Antisense strand to SEQ ID NO: 592874
auuguccaaguguuaagcc

SEQ ID NO: 592876 - RNA, 19 nt, Artificial Sequence
  Description of Artificial Sequence: Synthetic oligonucleotide
  Sense strand starting at position 1439 of SEQ ID NO: 584833
caauauguagcuuagguua

SEQ ID NO: 592877 - RNA, 19 nt, Artificial Sequence
  Description of Artificial Sequence: Synthetic oligonucleotide
  Antisense strand to SEQ ID NO: 592876
uaaccuaagcuacauauug

SEQ ID NO: 592878 - RNA, 19 nt, Artificial Sequence
  Description of Artificial Sequence: Synthetic oligonucleotide
  Sense strand starting at position 1491 of SEQ ID NO: 584833
aggaaugggcgguauuguu

SEQ ID NO: 592879 - RNA, 19 nt, Artificial Sequence
  Description of Artificial Sequence: Synthetic oligonucleotide
  Antisense strand to SEQ ID NO: 592878
aacaauaccgcccauuccu

SEQ ID NO: 592880 - RNA, 19 nt, Artificial Sequence
  Description of Artificial Sequence: Synthetic oligonucleotide
  Sense strand starting at position 2385 of SEQ ID NO: 584833
cuggcugcuagagaguaua

SEQ ID NO: 592881 - RNA, 19 nt, Artificial Sequence
  Description of Artificial Sequence: Synthetic oligonucleotide
  Antisense strand to SEQ ID NO: 592880
uauacucucuagcagccag

SEQ ID NO: 592882 - RNA, 19 nt, Artificial Sequence
  Description of Artificial Sequence: Synthetic oligonucleotide
  Sense strand starting at position 2388 of SEQ ID NO: 584833
gcugcuagagaguauacau

SEQ ID NO: 592883 - RNA, 19 nt, Artificial Sequence
  Description of Artificial Sequence: Synthetic oligonucleotide
  Antisense strand to SEQ ID NO: 592882
auguauacucucuagcagc

SEQ ID NO: 592884 - RNA, 19 nt, Artificial Sequence
  Description of Artificial Sequence: Synthetic oligonucleotide
  Sense strand starting at position 2432 of SEQ ID NO: 584833
uccauaagcuuucuggauu

SEQ ID NO: 592885 - RNA, 19 nt, Artificial Sequence
  Description of Artificial Sequence: Synthetic oligonucleotide
  Antisense strand to SEQ ID NO: 592884
aauccagaaagcuuaugga

SEQ ID NO: 592886 - RNA, 19 nt, Artificial Sequence
  Description of Artificial Sequence: Synthetic oligonucleotide
  Sense strand starting at position 2467 of SEQ ID NO: 584833
caaagugaucucugcaagu

SEQ ID NO: 592887 - RNA, 19 nt, Artificial Sequence
  Description of Artificial Sequence: Synthetic oligonucleotide
  Antisense strand to SEQ ID NO: 592886
acuugcagagaucacuuug

SEQ ID NO: 592888 - RNA, 19 nt, Artificial Sequence
  Description of Artificial Sequence: Synthetic oligonucleotide
  Sense strand starting at position 2486 of SEQ ID NO: 584833
cggcucuucggucagaaga

SEQ ID NO: 592889 - RNA, 19 nt, Artificial Sequence
  Description of Artificial Sequence: Synthetic oligonucleotide
  Antisense strand to SEQ ID NO: 592888
ucuucugaccgaagagccg

SEQ ID NO: 592890 - RNA, 19 nt, Artificial Sequence
  Description of Artificial Sequence: Synthetic oligonucleotide
  Sense strand starting at position 2581 of SEQ ID NO: 584833
uaaagaauugugugguuua

SEQ ID NO: 592891 - RNA, 19 nt, Artificial Sequence
  Description of Artificial Sequence: Synthetic oligonucleotide
  Antisense strand to SEQ ID NO: 592890
uaaaccacacaauucuuua

SEQ ID NO: 592892 - RNA, 19 nt, Artificial Sequence
  Description of Artificial Sequence: Synthetic oligonucleotide
  Sense strand starting at position 2592 of SEQ ID NO: 584833
gugguuuaucugcaaagag

SEQ ID NO: 592893 - RNA, 19 nt, Artificial Sequence
  Description of Artificial Sequence: Synthetic oligonucleotide
  Antisense strand to SEQ ID NO: 592892
cucuuugcagauaaaccac

SEQ ID NO: 592894 - RNA, 19 nt, Artificial Sequence
  Description of Artificial Sequence: Synthetic oligonucleotide
  Sense strand starting at position 2737 of SEQ ID NO: 584833
agccaauagugauccaguu

SEQ ID NO: 592895 - RNA, 19 nt, Artificial Sequence
  Description of Artificial Sequence: Synthetic oligonucleotide
  Antisense strand to SEQ ID NO: 592894
aacuggaucacuauuggcu

SEQ ID NO: 592896 - RNA, 19 nt, Artificial Sequence
  Description of Artificial Sequence: Synthetic oligonucleotide
  Sense strand starting at position 2759 of SEQ ID NO: 584833
gucuuuacuggucagacca

SEQ ID NO: 592897 - RNA, 19 nt, Artificial Sequence
  Description of Artificial Sequence: Synthetic oligonucleotide
  Antisense strand to SEQ ID NO: 592896
uggucugaccaguaaagac

SEQ ID NO: 592898 - RNA, 19 nt, Artificial Sequence
  Description of Artificial Sequence: Synthetic oligonucleotide
  Sense strand starting at position 2803 of SEQ ID NO: 584833
ugaagacuuuaaucaagcu

SEQ ID NO: 592899 - RNA, 19 nt, Artificial Sequence
  Description of Artificial Sequence: Synthetic oligonucleotide
  Antisense strand to SEQ ID NO: 592898
agcuugauuaaagucuuca

SEQ ID NO: 592900 - RNA, 19 nt, Artificial Sequence
  Description of Artificial Sequence: Synthetic oligonucleotide
  Sense strand starting at position 2810 of SEQ ID NO: 584833
uuuaaucaagcuggcauua

SEQ ID NO: 592901 - RNA, 19 nt, Artificial Sequence
  Description of Artificial Sequence: Synthetic oligonucleotide
  Antisense strand to SEQ ID NO: 592900
uaaugccagcuugauuaaa

SEQ ID NO: 592902 - RNA, 19 nt, Artificial Sequence
  Description of Artificial Sequence: Synthetic oligonucleotide
  Sense strand starting at position 2815 of SEQ ID NO: 584833
ucaagcuggcauuauauca

SEQ ID NO: 592903 - RNA, 19 nt, Artificial Sequence
  Description of Artificial Sequence: Synthetic oligonucleotide
  Antisense strand to SEQ ID NO: 592902
ugauauaaugccagcuuga

SEQ ID NO: 592904 - RNA, 19 nt, Artificial Sequence
  Description of Artificial Sequence: Synthetic oligonucleotide
  Sense strand starting at position 3058 of SEQ ID NO: 584833
accuuagcaugugugaaua

SEQ ID NO: 592905 - RNA, 19 nt, Artificial Sequence
  Description of Artificial Sequence: Synthetic oligonucleotide
  Antisense strand to SEQ ID NO: 592904
uauucacacaugcuaaggu

SEQ ID NO: 592906 - RNA, 19 nt, Artificial Sequence
  Description of Artificial Sequence: Synthetic oligonucleotide
  Sense strand starting at position 3068 of SEQ ID NO: 584833
gugugaauaccucaaccac

SEQ ID NO: 592907 - RNA, 19 nt, Artificial Sequence
  Description of Artificial Sequence: Synthetic oligonucleotide
  Antisense strand to SEQ ID NO: 592906
gugguugagguauucacac

SEQ ID NO: 592908 - RNA, 19 nt, Artificial Sequence
  Description of Artificial Sequence: Synthetic oligonucleotide
  Sense strand starting at position 3157 of SEQ ID NO: 584833
agaauaauuaguugauggu

SEQ ID NO: 592909 - RNA, 19 nt, Artificial Sequence
  Description of Artificial Sequence: Synthetic oligonucleotide
  Antisense strand to SEQ ID NO: 592908
accaucaacuaauuauucu

SEQ ID NO: 592910 - RNA, 19 nt, Artificial Sequence
  Description of Artificial Sequence: Synthetic oligonucleotide
  Sense strand starting at position 3193 of SEQ ID NO: 584833
cagucuugagauuacaugu

SEQ ID NO: 592911 - RNA, 19 nt, Artificial Sequence
  Description of Artificial Sequence: Synthetic oligonucleotide
  Antisense strand to SEQ ID NO: 592910
acauguaaucucaagacug

SEQ ID NO: 592912 - RNA, 19 nt, Artificial Sequence
  Description of Artificial Sequence: Synthetic oligonucleotide
  Sense strand starting at position 3303 of SEQ ID NO: 584833
gauaaugagaggugcugau

SEQ ID NO: 592913 - RNA, 19 nt, Artificial Sequence
  Description of Artificial Sequence: Synthetic oligonucleotide
  Antisense strand to SEQ ID NO: 592912
aucagcaccucucauuauc

SEQ ID NO: 592914 - RNA, 19 nt, Artificial Sequence
  Description of Artificial Sequence: Synthetic oligonucleotide
  Sense strand starting at position 3307 of SEQ ID NO: 584833
augagaggugcugauaagu

SEQ ID NO: 592915 - RNA, 19 nt, Artificial Sequence
  Description of Artificial Sequence: Synthetic oligonucleotide
  Antisense strand to SEQ ID NO: 592914
acuuaucagcaccucucau

SEQ ID NO: 592916 - RNA, 19 nt, Artificial Sequence
  Description of Artificial Sequence: Synthetic oligonucleotide
  Sense strand starting at position 3318 of SEQ ID NO: 584833
ugauaagugcuaggaauuc

SEQ ID NO: 592917 - RNA, 19 nt, Artificial Sequence
  Description of Artificial Sequence: Synthetic oligonucleotide
  Antisense strand to SEQ ID NO: 592916
gaauuccuagcacuuauca

SEQ ID NO: 592918 - RNA, 19 nt, Artificial Sequence
  Description of Artificial Sequence: Synthetic oligonucleotide
  Sense strand starting at position 3440 of SEQ ID NO: 584833
uuaaauacgucucuugaca

SEQ ID NO: 592919 - RNA, 19 nt, Artificial Sequence
  Description of Artificial Sequence: Synthetic oligonucleotide
  Antisense strand to SEQ ID NO: 592918
ugucaagagacguauuuaa

SEQ ID NO: 592920 - RNA, 19 nt, Artificial Sequence
  Description of Artificial Sequence: Synthetic oligonucleotide
  Sense strand starting at position 3554 of SEQ ID NO: 584833
ucuuaugucgauuacaugu

SEQ ID NO: 592921 - RNA, 19 nt, Artificial Sequence
  Description of Artificial Sequence: Synthetic oligonucleotide
  Antisense strand to SEQ ID NO: 592920
acauguaaucgacauaaga

SEQ ID NO: 592922 - RNA, 19 nt, Artificial Sequence
  Description of Artificial Sequence: Synthetic oligonucleotide
  Sense strand starting at position 3675 of SEQ ID NO: 584833
cuugcaucauauuuguauu

SEQ ID NO: 592923 - RNA, 19 nt, Artificial Sequence
  Description of Artificial Sequence: Synthetic oligonucleotide
  Antisense strand to SEQ ID NO: 592922
aauacaaauaugaugcaag

SEQ ID NO: 592924 - RNA, 19 nt, Artificial Sequence
  Description of Artificial Sequence: Synthetic oligonucleotide
  Sense strand starting at position 3933 of SEQ ID NO: 584833
guuuaagguauaugggaca

SEQ ID NO: 592925 - RNA, 19 nt, Artificial Sequence
  Description of Artificial Sequence: Synthetic oligonucleotide
  Antisense strand to SEQ ID NO: 592924
ugucccauauaccuuaaac

SEQ ID NO: 592926 - RNA, 19 nt, Artificial Sequence
  Description of Artificial Sequence: Synthetic oligonucleotide
  Sense strand starting at position 5 of SEQ ID NO: 584834
ugcucuauauagguuuaaa

SEQ ID NO: 592927 - RNA, 19 nt, Artificial Sequence
  Description of Artificial Sequence: Synthetic oligonucleotide
  Antisense strand to SEQ ID NO: 592926
uuuaaaccuauauagagca

SEQ ID NO: 592928 - RNA, 19 nt, Artificial Sequence
  Description of Artificial Sequence: Synthetic oligonucleotide
  Sense strand starting at position 55 of SEQ ID NO: 584834
uaauaauugugauuaccga

SEQ ID NO: 592929 - RNA, 19 nt, Artificial Sequence
  Description of Artificial Sequence: Synthetic oligonucleotide
  Antisense strand to SEQ ID NO: 592928
ucgguaaucacaauuauua

SEQ ID NO: 592930 - RNA, 19 nt, Artificial Sequence
  Description of Artificial Sequence: Synthetic oligonucleotide
  Sense strand starting at position 304 of SEQ ID NO: 584834
aaguaugucccucaucgau

SEQ ID NO: 592931 - RNA, 19 nt, Artificial Sequence
  Description of Artificial Sequence: Synthetic oligonucleotide
  Antisense strand to SEQ ID NO: 592930
aucgaugagggacauacuu

SEQ ID NO: 592932 - RNA, 19 nt, Artificial Sequence
  Description of Artificial Sequence: Synthetic oligonucleotide
  Sense strand starting at position 311 of SEQ ID NO: 584834
ucccucaucgaugaaguua

SEQ ID NO: 592933 - RNA, 19 nt, Artificial Sequence
  Description of Artificial Sequence: Synthetic oligonucleotide
  Antisense strand to SEQ ID NO: 592932
uaacuucaucgaugaggga

SEQ ID NO: 592934 - RNA, 19 nt, Artificial Sequence
  Description of Artificial Sequence: Synthetic oligonucleotide
  Sense strand starting at position 645 of SEQ ID NO: 584834
agauuaaguccuggaaauu

SEQ ID NO: 592935 - RNA, 19 nt, Artificial Sequence
  Description of Artificial Sequence: Synthetic oligonucleotide
  Antisense strand to SEQ ID NO: 592934
aauuuccaggacuuaaucu

SEQ ID NO: 592936 - RNA, 19 nt, Artificial Sequence
  Description of Artificial Sequence: Synthetic oligonucleotide
  Sense strand starting at position 690 of SEQ ID NO: 584834
gguuaaauguaacuuccua

SEQ ID NO: 592937 - RNA, 19 nt, Artificial Sequence
  Description of Artificial Sequence: Synthetic oligonucleotide
  Antisense strand to SEQ ID NO: 592936
uaggaaguuacauuuaacc

SEQ ID NO: 592938 - RNA, 19 nt, Artificial Sequence
  Description of Artificial Sequence: Synthetic oligonucleotide
  Sense strand starting at position 920 of SEQ ID NO: 584834
ggucgaggaagccagaaau

SEQ ID NO: 592939 - RNA, 19 nt, Artificial Sequence
  Description of Artificial Sequence: Synthetic oligonucleotide
  Antisense strand to SEQ ID NO: 592938
auuucuggcuuccucgacc

SEQ ID NO: 592940 - RNA, 19 nt, Artificial Sequence
  Description of Artificial Sequence: Synthetic oligonucleotide
  Sense strand starting at position 933 of SEQ ID NO: 584834
agaaaucagcgcgaggaca

SEQ ID NO: 592941 - RNA, 19 nt, Artificial Sequence
  Description of Artificial Sequence: Synthetic oligonucleotide
  Antisense strand to SEQ ID NO: 592940
uguccucgcgcugauuucu

SEQ ID NO: 592942 - RNA, 19 nt, Artificial Sequence
  Description of Artificial Sequence: Synthetic oligonucleotide
  Sense strand starting at position 1403 of SEQ ID NO: 584834
ggccgucguccaucaacuu

SEQ ID NO: 592943 - RNA, 19 nt, Artificial Sequence
  Description of Artificial Sequence: Synthetic oligonucleotide
  Antisense strand to SEQ ID NO: 592942
aaguugauggacgacggcc

SEQ ID NO: 592944 - RNA, 19 nt, Artificial Sequence
  Description of Artificial Sequence: Synthetic oligonucleotide
  Sense strand starting at position 2285 of SEQ ID NO: 584834
gccggccuugcugaauuua

SEQ ID NO: 592945 - RNA, 19 nt, Artificial Sequence
  Description of Artificial Sequence: Synthetic oligonucleotide
  Antisense strand to SEQ ID NO: 592944
uaaauucagcaaggccggc

SEQ ID NO: 592946 - RNA, 19 nt, Artificial Sequence
  Description of Artificial Sequence: Synthetic oligonucleotide
  Sense strand starting at position 2306 of SEQ ID NO: 584834
agaugagagucgguguuua

SEQ ID NO: 592947 - RNA, 19 nt, Artificial Sequence
  Description of Artificial Sequence: Synthetic oligonucleotide
  Antisense strand to SEQ ID NO: 592946
uaaacaccgacucucaucu

SEQ ID NO: 592948 - RNA, 19 nt, Artificial Sequence
  Description of Artificial Sequence: Synthetic oligonucleotide
  Sense strand starting at position 2353 of SEQ ID NO: 584834
ucggguaguauuuggagua

SEQ ID NO: 592949 - RNA, 19 nt, Artificial Sequence
  Description of Artificial Sequence: Synthetic oligonucleotide
  Antisense strand to SEQ ID NO: 592948
uacuccaaauacuacccga

SEQ ID NO: 592950 - RNA, 19 nt, Artificial Sequence
  Description of Artificial Sequence: Synthetic oligonucleotide
  Sense strand starting at position 2356 of SEQ ID NO: 584834
gguaguauuuggaguagag

SEQ ID NO: 592951 - RNA, 19 nt, Artificial Sequence
  Description of Artificial Sequence: Synthetic oligonucleotide
  Antisense strand to SEQ ID NO: 592950
cucuacuccaaauacuacc

SEQ ID NO: 592952 - RNA, 19 nt, Artificial Sequence
  Description of Artificial Sequence: Synthetic oligonucleotide
  Sense strand starting at position 2402 of SEQ ID NO: 584834
uugcauguuauagaccgau

SEQ ID NO: 592953 - RNA, 19 nt, Artificial Sequence
  Description of Artificial Sequence: Synthetic oligonucleotide
  Antisense strand to SEQ ID NO: 592952
aucggucuauaacaugcaa

SEQ ID NO: 592954 - RNA, 19 nt, Artificial Sequence
  Description of Artificial Sequence: Synthetic oligonucleotide
  Sense strand starting at position 2406 of SEQ ID NO: 584834
auguuauagaccgauguca

SEQ ID NO: 592955 - RNA, 19 nt, Artificial Sequence
  Description of Artificial Sequence: Synthetic oligonucleotide
  Antisense strand to SEQ ID NO: 592954
ugacaucggucuauaacau

SEQ ID NO: 592956 - RNA, 19 nt, Artificial Sequence
  Description of Artificial Sequence: Synthetic oligonucleotide
  Sense strand starting at position 2417 of SEQ ID NO: 584834
cgaugucagcucgaaagga

SEQ ID NO: 592957 - RNA, 19 nt, Artificial Sequence
  Description of Artificial Sequence: Synthetic oligonucleotide
  Antisense strand to SEQ ID NO: 592956
uccuuucgagcugacaucg

SEQ ID NO: 592958 - RNA, 19 nt, Artificial Sequence
  Description of Artificial Sequence: Synthetic oligonucleotide
  Sense strand starting at position 2534 of SEQ ID NO: 584834
uacacacugugcuuggaaa

SEQ ID NO: 592959 - RNA, 19 nt, Artificial Sequence
  Description of Artificial Sequence: Synthetic oligonucleotide
  Antisense strand to SEQ ID NO: 592958
uuuccaagcacagugugua

SEQ ID NO: 592960 - RNA, 19 nt, Artificial Sequence
  Description of Artificial Sequence: Synthetic oligonucleotide
  Sense strand starting at position 2806 of SEQ ID NO: 584834
gaccuaaaccguuaguaaa

SEQ ID NO: 592961 - RNA, 19 nt, Artificial Sequence
  Description of Artificial Sequence: Synthetic oligonucleotide
  Antisense strand to SEQ ID NO: 592960
uuuacuaacgguuuagguc

SEQ ID NO: 592962 - RNA, 19 nt, Artificial Sequence
  Description of Artificial Sequence: Synthetic oligonucleotide
  Sense strand starting at position 2874 of SEQ ID NO: 584834
ugaggaaauguugauucgu

SEQ ID NO: 592963 - RNA, 19 nt, Artificial Sequence
  Description of Artificial Sequence: Synthetic oligonucleotide
  Antisense strand to SEQ ID NO: 592962
acgaaucaacauuuccuca

SEQ ID NO: 592964 - RNA, 19 nt, Artificial Sequence
  Description of Artificial Sequence: Synthetic oligonucleotide
  Sense strand starting at position 2876 of SEQ ID NO: 584834
aggaaauguugauucguuu

SEQ ID NO: 592965 - RNA, 19 nt, Artificial Sequence
  Description of Artificial Sequence: Synthetic oligonucleotide
  Antisense strand to SEQ ID NO: 592964
aaacgaaucaacauuuccu

SEQ ID NO: 592966 - RNA, 19 nt, Artificial Sequence
  Description of Artificial Sequence: Synthetic oligonucleotide
  Sense strand starting at position 2965 of SEQ ID NO: 584834
uaguaagugguauaaaggu

SEQ ID NO: 592967 - RNA, 19 nt, Artificial Sequence
  Description of Artificial Sequence: Synthetic oligonucleotide
  Antisense strand to SEQ ID NO: 592966
accuuuauaccacuuacua

SEQ ID NO: 592968 - RNA, 19 nt, Artificial Sequence
  Description of Artificial Sequence: Synthetic oligonucleotide
  Sense strand starting at position 3082 of SEQ ID NO: 584834
uuaaguauguguucuggaa

SEQ ID NO: 592969 - RNA, 19 nt, Artificial Sequence
  Description of Artificial Sequence: Synthetic oligonucleotide
  Antisense strand to SEQ ID NO: 592968
uuccagaacacauacuuaa

SEQ ID NO: 592970 - RNA, 19 nt, Artificial Sequence
  Description of Artificial Sequence: Synthetic oligonucleotide
  Sense strand starting at position 3086 of SEQ ID NO: 584834
guauguguucuggaagagu

SEQ ID NO: 592971 - RNA, 19 nt, Artificial Sequence
  Description of Artificial Sequence: Synthetic oligonucleotide
  Antisense strand to SEQ ID NO: 592970
acucuuccagaacacauac

SEQ ID NO: 592972 - RNA, 19 nt, Artificial Sequence
  Description of Artificial Sequence: Synthetic oligonucleotide
  Sense strand starting at position 3111 of SEQ ID NO: 584834
uuaguauagugcccagaau

SEQ ID NO: 592973 - RNA, 19 nt, Artificial Sequence
  Description of Artificial Sequence: Synthetic oligonucleotide
  Antisense strand to SEQ ID NO: 592972
auucugggcacuauacuaa

SEQ ID NO: 592974 - RNA, 19 nt, Artificial Sequence
  Description of Artificial Sequence: Synthetic oligonucleotide
  Sense strand starting at position 3112 of SEQ ID NO: 584834
uaguauagugcccagaauu

SEQ ID NO: 592975 - RNA, 19 nt, Artificial Sequence
  Description of Artificial Sequence: Synthetic oligonucleotide
  Antisense strand to SEQ ID NO: 592974
aauucugggcacuauacua

SEQ ID NO: 592976 - RNA, 19 nt, Artificial Sequence
  Description of Artificial Sequence: Synthetic oligonucleotide
  Sense strand starting at position 3134 of SEQ ID NO: 584834
auuugucauucuuugguca

SEQ ID NO: 592977 - RNA, 19 nt, Artificial Sequence
  Description of Artificial Sequence: Synthetic oligonucleotide
  Antisense strand to SEQ ID NO: 592976
ugaccaaagaaugacaaau

SEQ ID NO: 592978 - RNA, 19 nt, Artificial Sequence
  Description of Artificial Sequence: Synthetic oligonucleotide
  Sense strand starting at position 3213 of SEQ ID NO: 584834
guuaaugugagacagcuaa

SEQ ID NO: 592979 - RNA, 19 nt, Artificial Sequence
  Description of Artificial Sequence: Synthetic oligonucleotide
  Antisense strand to SEQ ID NO: 592978
uuagcugucucacauuaac

SEQ ID NO: 592980 - RNA, 19 nt, Artificial Sequence
  Description of Artificial Sequence: Synthetic oligonucleotide
  Sense strand starting at position 3371 of SEQ ID NO: 584834
agagucaaaccauggugau

SEQ ID NO: 592981 - RNA, 19 nt, Artificial Sequence
  Description of Artificial Sequence: Synthetic oligonucleotide
  Antisense strand to SEQ ID NO: 592980
aucaccaugguuugacucu

SEQ ID NO: 592982 - RNA, 19 nt, Artificial Sequence
  Description of Artificial Sequence: Synthetic oligonucleotide
  Sense strand starting at position 3372 of SEQ ID NO: 584834
gagucaaaccauggugaua

SEQ ID NO: 592983 - RNA, 19 nt, Artificial Sequence
  Description of Artificial Sequence: Synthetic oligonucleotide
  Antisense strand to SEQ ID NO: 592982
uaucaccaugguuugacuc

SEQ ID NO: 592984 - RNA, 19 nt, Artificial Sequence
  Description of Artificial Sequence: Synthetic oligonucleotide
  Sense strand starting at position 3456 of SEQ ID NO: 584834
agcagauaaaguggaaauu

SEQ ID NO: 592985 - RNA, 19 nt, Artificial Sequence
  Description of Artificial Sequence: Synthetic oligonucleotide
  Antisense strand to SEQ ID NO: 592984
aauuuccacuuuaucugcu

SEQ ID NO: 592986 - RNA, 19 nt, Artificial Sequence
  Description of Artificial Sequence: Synthetic oligonucleotide
  Sense strand starting at position 3467 of SEQ ID NO: 584834
uggaaauugcuguaugcug

SEQ ID NO: 592987 - RNA, 19 nt, Artificial Sequence
  Description of Artificial Sequence: Synthetic oligonucleotide
  Antisense strand to SEQ ID NO: 592986
cagcauacagcaauuucca

SEQ ID NO: 592988 - RNA, 19 nt, Artificial Sequence
  Description of Artificial Sequence: Synthetic oligonucleotide
  Sense strand starting at position 3485 of SEQ ID NO: 584834
guaagacacucuguauaug

SEQ ID NO: 592989 - RNA, 19 nt, Artificial Sequence
  Description of Artificial Sequence: Synthetic oligonucleotide
  Antisense strand to SEQ ID NO: 592988
cauauacagagugucuuac

SEQ ID NO: 592990 - RNA, 19 nt, Artificial Sequence
  Description of Artificial Sequence: Synthetic oligonucleotide
  Sense strand starting at position 3488 of SEQ ID NO: 584834
agacacucuguauauguaa

SEQ ID NO: 592991 - RNA, 19 nt, Artificial Sequence
  Description of Artificial Sequence: Synthetic oligonucleotide
  Antisense strand to SEQ ID NO: 592990
uuacauauacagagugucu

SEQ ID NO: 592992 - RNA, 19 nt, Artificial Sequence
  Description of Artificial Sequence: Synthetic oligonucleotide
  Sense strand starting at position 3575 of SEQ ID NO: 584834
guacucuuaagaggagagu

SEQ ID NO: 592993 - RNA, 19 nt, Artificial Sequence
  Description of Artificial Sequence: Synthetic oligonucleotide
  Antisense strand to SEQ ID NO: 592992
acucuccucuuaagaguac

SEQ ID NO: 592994 - RNA, 19 nt, Artificial Sequence
  Description of Artificial Sequence: Synthetic oligonucleotide
  Sense strand starting at position 3586 of SEQ ID NO: 584834
aggagagucuagucagucu

SEQ ID NO: 592995 - RNA, 19 nt, Artificial Sequence
  Description of Artificial Sequence: Synthetic oligonucleotide
  Antisense strand to SEQ ID NO: 592994
agacugacuagacucuccu

SEQ ID NO: 592996 - RNA, 19 nt, Artificial Sequence
  Description of Artificial Sequence: Synthetic oligonucleotide
  Sense strand starting at position 3669 of SEQ ID NO: 584834
caaugagacuaguuguaaa

SEQ ID NO: 592997 - RNA, 19 nt, Artificial Sequence
  Description of Artificial Sequence: Synthetic oligonucleotide
  Antisense strand to SEQ ID NO: 592996
uuuacaacuagucucauug

SEQ ID NO: 592998 - RNA, 19 nt, Artificial Sequence
  Description of Artificial Sequence: Synthetic oligonucleotide
  Sense strand starting at position 3740 of SEQ ID NO: 584834
gccacuaauuuggcuuauu

SEQ ID NO: 592999 - RNA, 19 nt, Artificial Sequence
  Description of Artificial Sequence: Synthetic oligonucleotide
  Antisense strand to SEQ ID NO: 592998
aauaagccaaauuaguggc

SEQ ID NO: 593000 - RNA, 19 nt, Artificial Sequence
  Description of Artificial Sequence: Synthetic oligonucleotide
  Sense strand starting at position 3926 of SEQ ID NO: 584834
auaguuuccucaccauuga

SEQ ID NO: 593001 - RNA, 19 nt, Artificial Sequence
  Description of Artificial Sequence: Synthetic oligonucleotide
  Antisense strand to SEQ ID NO: 593000
ucaauggugaggaaacuau

SEQ ID NO: 593002 - RNA, 19 nt, Artificial Sequence
  Description of Artificial Sequence: Synthetic oligonucleotide
  Sense strand starting at position 3967 of SEQ ID NO: 584834
ccgaaaggauuccucagau

SEQ ID NO: 593003 - RNA, 19 nt, Artificial Sequence
  Description of Artificial Sequence: Synthetic oligonucleotide
  Antisense strand to SEQ ID NO: 593002
aucugaggaauccuuucgg

SEQ ID NO: 593004 - RNA, 19 nt, Artificial Sequence
  Description of Artificial Sequence: Synthetic oligonucleotide
  Sense strand starting at position 3981 of SEQ ID NO: 584834
cagauauguccuggcauau

SEQ ID NO: 593005 - RNA, 19 nt, Artificial Sequence
  Description of Artificial Sequence: Synthetic oligonucleotide
  Antisense strand to SEQ ID NO: 593004
auaugccaggacauaucug

SEQ ID NO: 593006 - RNA, 19 nt, Artificial Sequence
  Description of Artificial Sequence: Synthetic oligonucleotide
  Sense strand starting at position 86 of SEQ ID NO: 584835
guaacuccgucuccacuaa

SEQ ID NO: 593007 - RNA, 19 nt, Artificial Sequence
  Description of Artificial Sequence: Synthetic oligonucleotide
  Antisense strand to SEQ ID NO: 593006
uuaguggagacggaguuac

SEQ ID NO: 593008 - RNA, 19 nt, Artificial Sequence
  Description of Artificial Sequence: Synthetic oligonucleotide
  Sense strand starting at position 309 of SEQ ID NO: 584835
gagagaugguaccacaaga

SEQ ID NO: 593009 - RNA, 19 nt, Artificial Sequence
  Description of Artificial Sequence: Synthetic oligonucleotide
  Antisense strand to SEQ ID NO: 593008
ucuugugguaccaucucuc

SEQ ID NO: 593010 - RNA, 19 nt, Artificial Sequence
  Description of Artificial Sequence: Synthetic oligonucleotide
  Sense strand starting at position 330 of SEQ ID NO: 584835
aagaaagagccugguugua

SEQ ID NO: 593011 - RNA, 19 nt, Artificial Sequence
  Description of Artificial Sequence: Synthetic oligonucleotide
  Antisense strand to SEQ ID NO: 593010
uacaaccaggcucuuucuu

SEQ ID NO: 593012 - RNA, 19 nt, Artificial Sequence
  Description of Artificial Sequence: Synthetic oligonucleotide
  Sense strand starting at position 332 of SEQ ID NO: 584835
gaaagagccugguuguaga

SEQ ID NO: 593013 - RNA, 19 nt, Artificial Sequence
  Description of Artificial Sequence: Synthetic oligonucleotide
  Antisense strand to SEQ ID NO: 593012
ucuacaaccaggcucuuuc

SEQ ID NO: 593014 - RNA, 19 nt, Artificial Sequence
  Description of Artificial Sequence: Synthetic oligonucleotide
  Sense strand starting at position 356 of SEQ ID NO: 584835
aaaccuaugugauaggaaa

SEQ ID NO: 593015 - RNA, 19 nt, Artificial Sequence
  Description of Artificial Sequence: Synthetic oligonucleotide
  Antisense strand to SEQ ID NO: 593014
uuuccuaucacauagguuu

SEQ ID NO: 593016 - RNA, 19 nt, Artificial Sequence
  Description of Artificial Sequence: Synthetic oligonucleotide
  Sense strand starting at position 370 of SEQ ID NO: 584835
ggaaauaagucacuacuuc

SEQ ID NO: 593017 - RNA, 19 nt, Artificial Sequence
  Description of Artificial Sequence: Synthetic oligonucleotide
  Antisense strand to SEQ ID NO: 593016
gaaguagugacuuauuucc

SEQ ID NO: 593018 - RNA, 19 nt, Artificial Sequence
  Description of Artificial Sequence: Synthetic oligonucleotide
  Sense strand starting at position 431 of SEQ ID NO: 584835
gggaucuauucucugaaac

SEQ ID NO: 593019 - RNA, 19 nt, Artificial Sequence
  Description of Artificial Sequence: Synthetic oligonucleotide
  Antisense strand to SEQ ID NO: 593018
guuucagagaauagauccc

SEQ ID NO: 593020 - RNA, 19 nt, Artificial Sequence
  Description of Artificial Sequence: Synthetic oligonucleotide
  Sense strand starting at position 432 of SEQ ID NO: 584835
ggaucuauucucugaaacc

SEQ ID NO: 593021 - RNA, 19 nt, Artificial Sequence
  Description of Artificial Sequence: Synthetic oligonucleotide
  Antisense strand to SEQ ID NO: 593020
gguuucagagaauagaucc

SEQ ID NO: 593022 - RNA, 19 nt, Artificial Sequence
  Description of Artificial Sequence: Synthetic oligonucleotide
  Sense strand starting at position 721 of SEQ ID NO: 584835
cagugaagaggucagugau

SEQ ID NO: 593023 - RNA, 19 nt, Artificial Sequence
  Description of Artificial Sequence: Synthetic oligonucleotide
  Antisense strand to SEQ ID NO: 593022
aucacugaccucuucacug

SEQ ID NO: 593024 - RNA, 19 nt, Artificial Sequence
  Description of Artificial Sequence: Synthetic oligonucleotide
  Sense strand starting at position 845 of SEQ ID NO: 584835
ucacgaucauccuaagaga

SEQ ID NO: 593025 - RNA, 19 nt, Artificial Sequence
  Description of Artificial Sequence: Synthetic oligonucleotide
  Antisense strand to SEQ ID NO: 593024
ucucuuaggaugaucguga

SEQ ID NO: 593026 - RNA, 19 nt, Artificial Sequence
  Description of Artificial Sequence: Synthetic oligonucleotide
  Sense strand starting at position 848 of SEQ ID NO: 584835
cgaucauccuaagagagaa

SEQ ID NO: 593027 - RNA, 19 nt, Artificial Sequence
  Description of Artificial Sequence: Synthetic oligonucleotide
  Antisense strand to SEQ ID NO: 593026
uucucucuuaggaugaucg

SEQ ID NO: 593028 - RNA, 19 nt, Artificial Sequence
  Description of Artificial Sequence: Synthetic oligonucleotide
  Sense strand starting at position 1060 of SEQ ID NO: 584835
acaggcuagugguaucuau

SEQ ID NO: 593029 - RNA, 19 nt, Artificial Sequence
  Description of Artificial Sequence: Synthetic oligonucleotide
  Antisense strand to SEQ ID NO: 593028
auagauaccacuagccugu

SEQ ID NO: 593030 - RNA, 19 nt, Artificial Sequence
  Description of Artificial Sequence: Synthetic oligonucleotide
  Sense strand starting at position 1067 of SEQ ID NO: 584835
agugguaucuaucugcaag

SEQ ID NO: 593031 - RNA, 19 nt, Artificial Sequence
  Description of Artificial Sequence: Synthetic oligonucleotide
  Antisense strand to SEQ ID NO: 593030
cuugcagauagauaccacu

SEQ ID NO: 593032 - RNA, 19 nt, Artificial Sequence
  Description of Artificial Sequence: Synthetic oligonucleotide
  Sense strand starting at position 1068 of SEQ ID NO: 584835
gugguaucuaucugcaaga

SEQ ID NO: 593033 - RNA, 19 nt, Artificial Sequence
  Description of Artificial Sequence: Synthetic oligonucleotide
  Antisense strand to SEQ ID NO: 593032
ucuugcagauagauaccac

SEQ ID NO: 593034 - RNA, 19 nt, Artificial Sequence
  Description of Artificial Sequence: Synthetic oligonucleotide
  Sense strand starting at position 1069 of SEQ ID NO: 584835
ugguaucuaucugcaagag

SEQ ID NO: 593035 - RNA, 19 nt, Artificial Sequence
  Description of Artificial Sequence: Synthetic oligonucleotide
  Antisense strand to SEQ ID NO: 593034
cucuugcagauagauacca

SEQ ID NO: 593036 - RNA, 19 nt, Artificial Sequence
  Description of Artificial Sequence: Synthetic oligonucleotide
  Sense strand starting at position 1070 of SEQ ID NO: 584835
gguaucuaucugcaagaga

SEQ ID NO: 593037 - RNA, 19 nt, Artificial Sequence
  Description of Artificial Sequence: Synthetic oligonucleotide
  Antisense strand to SEQ ID NO: 593036
ucucuugcagauagauacc

SEQ ID NO: 593038 - RNA, 19 nt, Artificial Sequence
  Description of Artificial Sequence: Synthetic oligonucleotide
  Sense strand starting at position 1124 of SEQ ID NO: 584835
aauuaaguaugggauggaa

SEQ ID NO: 593039 - RNA, 19 nt, Artificial Sequence
  Description of Artificial Sequence: Synthetic oligonucleotide
  Antisense strand to SEQ ID NO: 593038
uuccaucccauacuuaauu

SEQ ID NO: 593040 - RNA, 19 nt, Artificial Sequence
  Description of Artificial Sequence: Synthetic oligonucleotide
  Sense strand starting at position 1238 of SEQ ID NO: 584835
gaaagauucugggccugca

SEQ ID NO: 593041 - RNA, 19 nt, Artificial Sequence
  Description of Artificial Sequence: Synthetic oligonucleotide
  Antisense strand to SEQ ID NO: 593040
ugcaggcccagaaucuuuc

SEQ ID NO: 593042 - RNA, 19 nt, Artificial Sequence
  Description of Artificial Sequence: Synthetic oligonucleotide
  Sense strand starting at position 1268 of SEQ ID NO: 584835
gucagacuuucugcaaguc

SEQ ID NO: 593043 - RNA, 19 nt, Artificial Sequence
  Description of Artificial Sequence: Synthetic oligonucleotide
  Antisense strand to SEQ ID NO: 593042
gacuugcagaaagucugac

SEQ ID NO: 593044 - RNA, 19 nt, Artificial Sequence
  Description of Artificial Sequence: Synthetic oligonucleotide
  Sense strand starting at position 1269 of SEQ ID NO: 584835
ucagacuuucugcaagucu

SEQ ID NO: 593045 - RNA, 19 nt, Artificial Sequence
  Description of Artificial Sequence: Synthetic oligonucleotide
  Antisense strand to SEQ ID NO: 593044
agacuugcagaaagucuga

SEQ ID NO: 593046 - RNA, 19 nt, Artificial Sequence
  Description of Artificial Sequence: Synthetic oligonucleotide
  Sense strand starting at position 1280 of SEQ ID NO: 584835
gcaagucucuccgaaggac

SEQ ID NO: 593047 - RNA, 19 nt, Artificial Sequence
  Description of Artificial Sequence: Synthetic oligonucleotide
  Antisense strand to SEQ ID NO: 593046
guccuucggagagacuugc

SEQ ID NO: 593048 - RNA, 19 nt, Artificial Sequence
  Description of Artificial Sequence: Synthetic oligonucleotide
  Sense strand starting at position 1414 of SEQ ID NO: 584835
gcuguagaucaacacuaga

SEQ ID NO: 593049 - RNA, 19 nt, Artificial Sequence
  Description of Artificial Sequence: Synthetic oligonucleotide
  Antisense strand to SEQ ID NO: 593048
ucuaguguugaucuacagc

SEQ ID NO: 593050 - RNA, 19 nt, Artificial Sequence
  Description of Artificial Sequence: Synthetic oligonucleotide
  Sense strand starting at position 1463 of SEQ ID NO: 584835
acuaaauuagcggguccua

SEQ ID NO: 593051 - RNA, 19 nt, Artificial Sequence
  Description of Artificial Sequence: Synthetic oligonucleotide
  Antisense strand to SEQ ID NO: 593050
uaggacccgcuaauuuagu

SEQ ID NO: 593052 - RNA, 19 nt, Artificial Sequence
  Description of Artificial Sequence: Synthetic oligonucleotide
  Sense strand starting at position 1482 of SEQ ID NO: 584835
ggcagucaguccugggaac

SEQ ID NO: 593053 - RNA, 19 nt, Artificial Sequence
  Description of Artificial Sequence: Synthetic oligonucleotide
  Antisense strand to SEQ ID NO: 593052
guucccaggacugacugcc

SEQ ID NO: 593054 - RNA, 19 nt, Artificial Sequence
  Description of Artificial Sequence: Synthetic oligonucleotide
  Sense strand starting at position 1544 of SEQ ID NO: 584835
gccuuugccugggagucuu

SEQ ID NO: 593055 - RNA, 19 nt, Artificial Sequence
  Description of Artificial Sequence: Synthetic oligonucleotide
  Antisense strand to SEQ ID NO: 593054
aagacucccaggcaaaggc

SEQ ID NO: 593056 - RNA, 19 nt, Artificial Sequence
  Description of Artificial Sequence: Synthetic oligonucleotide
  Sense strand starting at position 1552 of SEQ ID NO: 584835
cugggagucuuccaaucug

SEQ ID NO: 593057 - RNA, 19 nt, Artificial Sequence
  Description of Artificial Sequence: Synthetic oligonucleotide
  Antisense strand to SEQ ID NO: 593056
cagauuggaagacucccag

SEQ ID NO: 593058 - RNA, 19 nt, Artificial Sequence
  Description of Artificial Sequence: Synthetic oligonucleotide
  Sense strand starting at position 2065 of SEQ ID NO: 584835
ccgccucucggagucuuua

SEQ ID NO: 593059 - RNA, 19 nt, Artificial Sequence
  Description of Artificial Sequence: Synthetic oligonucleotide
  Antisense strand to SEQ ID NO: 593058
uaaagacuccgagaggcgg

SEQ ID NO: 593060 - RNA, 19 nt, Artificial Sequence
  Description of Artificial Sequence: Synthetic oligonucleotide
  Sense strand starting at position 2066 of SEQ ID NO: 584835
cgccucucggagucuuuau

SEQ ID NO: 593061 - RNA, 19 nt, Artificial Sequence
  Description of Artificial Sequence: Synthetic oligonucleotide
  Antisense strand to SEQ ID NO: 593060
auaaagacuccgagaggcg

SEQ ID NO: 593062 - RNA, 19 nt, Artificial Sequence
  Description of Artificial Sequence: Synthetic oligonucleotide
  Sense strand starting at position 2384 of SEQ ID NO: 584835
gcuuaagccugaccacuua

SEQ ID NO: 593063 - RNA, 19 nt, Artificial Sequence
  Description of Artificial Sequence: Synthetic oligonucleotide
  Antisense strand to SEQ ID NO: 593062
uaaguggucaggcuuaagc

SEQ ID NO: 593064 - RNA, 19 nt, Artificial Sequence
  Description of Artificial Sequence: Synthetic oligonucleotide
  Sense strand starting at position 3423 of SEQ ID NO: 584835
ugaggagggugguuuagau

SEQ ID NO: 593065 - RNA, 19 nt, Artificial Sequence
  Description of Artificial Sequence: Synthetic oligonucleotide
  Antisense strand to SEQ ID NO: 593064
aucuaaaccacccuccuca

SEQ ID NO: 593066 - RNA, 19 nt, Artificial Sequence
  Description of Artificial Sequence: Synthetic oligonucleotide
  Sense strand starting at position 3430 of SEQ ID NO: 584835
ggugguuuagaugaaguaa

SEQ ID NO: 593067 - RNA, 19 nt, Artificial Sequence
  Description of Artificial Sequence: Synthetic oligonucleotide
  Antisense strand to SEQ ID NO: 593066
uuacuucaucuaaaccacc

SEQ ID NO: 593068 - RNA, 19 nt, Artificial Sequence
  Description of Artificial Sequence: Synthetic oligonucleotide
  Sense strand starting at position 3538 of SEQ ID NO: 584835
gcaagugugggcugacaua

SEQ ID NO: 593069 - RNA, 19 nt, Artificial Sequence
  Description of Artificial Sequence: Synthetic oligonucleotide
  Antisense strand to SEQ ID NO: 593068
uaugucagcccacacuugc

SEQ ID NO: 593070 - RNA, 19 nt, Artificial Sequence
  Description of Artificial Sequence: Synthetic oligonucleotide
  Sense strand starting at position 3676 of SEQ ID NO: 584835
gccagacauuuauauaaag

SEQ ID NO: 593071 - RNA, 19 nt, Artificial Sequence
  Description of Artificial Sequence: Synthetic oligonucleotide
  Antisense strand to SEQ ID NO: 593070
cuuuauauaaaugucuggc

SEQ ID NO: 593072 - RNA, 19 nt, Artificial Sequence
  Description of Artificial Sequence: Synthetic oligonucleotide
  Sense strand starting at position 3767 of SEQ ID NO: 584835
acaggacaaugauaaagua

SEQ ID NO: 593073 - RNA, 19 nt, Artificial Sequence
  Description of Artificial Sequence: Synthetic oligonucleotide
  Antisense strand to SEQ ID NO: 593072
uacuuuaucauuguccugu

SEQ ID NO: 593074 - RNA, 19 nt, Artificial Sequence
  Description of Artificial Sequence: Synthetic oligonucleotide
  Sense strand starting at position 3783 of SEQ ID NO: 584835
guaagacacucaggagaaa

SEQ ID NO: 593075 - RNA, 19 nt, Artificial Sequence
  Description of Artificial Sequence: Synthetic oligonucleotide
  Antisense strand to SEQ ID NO: 593074
uuucuccugagugucuuac

SEQ ID NO: 593076 - RNA, 19 nt, Artificial Sequence
  Description of Artificial Sequence: Synthetic oligonucleotide
  Sense strand starting at position 3813 of SEQ ID NO: 584835
aauguaacgucaggaagaa

SEQ ID NO: 593077 - RNA, 19 nt, Artificial Sequence
  Description of Artificial Sequence: Synthetic oligonucleotide
  Antisense strand to SEQ ID NO: 593076
uucuuccugacguuacauu

SEQ ID NO: 593078 - RNA, 19 nt, Artificial Sequence
  Description of Artificial Sequence: Synthetic oligonucleotide
  Sense strand starting at position 3840 of SEQ ID NO: 584835
gugcuaccaucuugaacag

SEQ ID NO: 593079 - RNA, 19 nt, Artificial Sequence
  Description of Artificial Sequence: Synthetic oligonucleotide
  Antisense strand to SEQ ID NO: 593078
cuguucaagaugguagcac

SEQ ID NO: 593080 - RNA, 19 nt, Artificial Sequence
  Description of Artificial Sequence: Synthetic oligonucleotide
  Sense strand starting at position 3932 of SEQ ID NO: 584835
gucucaugcucaccaugau

SEQ ID NO: 593081 - RNA, 19 nt, Artificial Sequence
  Description of Artificial Sequence: Synthetic oligonucleotide
  Antisense strand to SEQ ID NO: 593080
aucauggugagcaugagac

SEQ ID NO: 593082 - RNA, 19 nt, Artificial Sequence
  Description of Artificial Sequence: Synthetic oligonucleotide
  Sense strand starting at position 38 of SEQ ID NO: 584836
guaacuccgucuccacuaa

SEQ ID NO: 593083 - RNA, 19 nt, Artificial Sequence
  Description of Artificial Sequence: Synthetic oligonucleotide
  Antisense strand to SEQ ID NO: 593082
uuaguggagacggaguuac

SEQ ID NO: 593084 - RNA, 19 nt, Artificial Sequence
  Description of Artificial Sequence: Synthetic oligonucleotide
  Sense strand starting at position 261 of SEQ ID NO: 584836
gagagaugguaccacaaga

SEQ ID NO: 593085 - RNA, 19 nt, Artificial Sequence
  Description of Artificial Sequence: Synthetic oligonucleotide
  Antisense strand to SEQ ID NO: 593084
ucuugugguaccaucucuc

SEQ ID NO: 593086 - RNA, 19 nt, Artificial Sequence
  Description of Artificial Sequence: Synthetic oligonucleotide
  Sense strand starting at position 282 of SEQ ID NO: 584836
aagaaagagccugguugua

SEQ ID NO: 593087 - RNA, 19 nt, Artificial Sequence
  Description of Artificial Sequence: Synthetic oligonucleotide
  Antisense strand to SEQ ID NO: 593086
uacaaccaggcucuuucuu

SEQ ID NO: 593088 - RNA, 19 nt, Artificial Sequence
  Description of Artificial Sequence: Synthetic oligonucleotide
  Sense strand starting at position 284 of SEQ ID NO: 584836
gaaagagccugguuguaga

SEQ ID NO: 593089 - RNA, 19 nt, Artificial Sequence
  Description of Artificial Sequence: Synthetic oligonucleotide
  Antisense strand to SEQ ID NO: 593088
ucuacaaccaggcucuuuc

SEQ ID NO: 593090 - RNA, 19 nt, Artificial Sequence
  Description of Artificial Sequence: Synthetic oligonucleotide
  Sense strand starting at position 308 of SEQ ID NO: 584836
aaaccuaugugauaggaaa

SEQ ID NO: 593091 - RNA, 19 nt, Artificial Sequence
  Description of Artificial Sequence: Synthetic oligonucleotide
  Antisense strand to SEQ ID NO: 593090
uuuccuaucacauagguuu

SEQ ID NO: 593092 - RNA, 19 nt, Artificial Sequence
  Description of Artificial Sequence: Synthetic oligonucleotide
  Sense strand starting at position 322 of SEQ ID NO: 584836
ggaaauaagucacuacuuc

SEQ ID NO: 593093 - RNA, 19 nt, Artificial Sequence
  Description of Artificial Sequence: Synthetic oligonucleotide
  Antisense strand to SEQ ID NO: 593092
gaaguagugacuuauuucc

SEQ ID NO: 593094 - RNA, 19 nt, Artificial Sequence
  Description of Artificial Sequence: Synthetic oligonucleotide
  Sense strand starting at position 383 of SEQ ID NO: 584836
gggaucuauucucugaaac

SEQ ID NO: 593095 - RNA, 19 nt, Artificial Sequence
  Description of Artificial Sequence: Synthetic oligonucleotide
  Antisense strand to SEQ ID NO: 593094
guuucagagaauagauccc

SEQ ID NO: 593096 - RNA, 19 nt, Artificial Sequence
  Description of Artificial Sequence: Synthetic oligonucleotide
  Sense strand starting at position 384 of SEQ ID NO: 584836
ggaucuauucucugaaacc

SEQ ID NO: 593097 - RNA, 19 nt, Artificial Sequence
  Description of Artificial Sequence: Synthetic oligonucleotide
  Antisense strand to SEQ ID NO: 593096
gguuucagagaauagaucc

SEQ ID NO: 593098 - RNA, 19 nt, Artificial Sequence
  Description of Artificial Sequence: Synthetic oligonucleotide
  Sense strand starting at position 673 of SEQ ID NO: 584836
cagugaagaggucagugau

SEQ ID NO: 593099 - RNA, 19 nt, Artificial Sequence
  Description of Artificial Sequence: Synthetic oligonucleotide
  Antisense strand to SEQ ID NO: 593098
aucacugaccucuucacug

SEQ ID NO: 593100 - RNA, 19 nt, Artificial Sequence
  Description of Artificial Sequence: Synthetic oligonucleotide
  Sense strand starting at position 797 of SEQ ID NO: 584836
ucacgaucauccuaagaga

SEQ ID NO: 593101 - RNA, 19 nt, Artificial Sequence
  Description of Artificial Sequence: Synthetic oligonucleotide
  Antisense strand to SEQ ID NO: 593100
ucucuuaggaugaucguga

SEQ ID NO: 593102 - RNA, 19 nt, Artificial Sequence
  Description of Artificial Sequence: Synthetic oligonucleotide
  Sense strand starting at position 800 of SEQ ID NO: 584836
cgaucauccuaagagagaa

SEQ ID NO: 593103 - RNA, 19 nt, Artificial Sequence
  Description of Artificial Sequence: Synthetic oligonucleotide
  Antisense strand to SEQ ID NO: 593102
uucucucuuaggaugaucg

SEQ ID NO: 593104 - RNA, 19 nt, Artificial Sequence
  Description of Artificial Sequence: Synthetic oligonucleotide
  Sense strand starting at position 1012 of SEQ ID NO: 584836
acaggcuagugguaucuau

SEQ ID NO: 593105 - RNA, 19 nt, Artificial Sequence
  Description of Artificial Sequence: Synthetic oligonucleotide
  Antisense strand to SEQ ID NO: 593104
auagauaccacuagccugu

SEQ ID NO: 593106 - RNA, 19 nt, Artificial Sequence
  Description of Artificial Sequence: Synthetic oligonucleotide
  Sense strand starting at position 1019 of SEQ ID NO: 584836
agugguaucuaucugcaag

SEQ ID NO: 593107 - RNA, 19 nt, Artificial Sequence
  Description of Artificial Sequence: Synthetic oligonucleotide
  Antisense strand to SEQ ID NO: 593106
cuugcagauagauaccacu

SEQ ID NO: 593108 - RNA, 19 nt, Artificial Sequence
  Description of Artificial Sequence: Synthetic oligonucleotide
  Sense strand starting at position 1020 of SEQ ID NO: 584836
gugguaucuaucugcaaga

SEQ ID NO: 593109 - RNA, 19 nt, Artificial Sequence
  Description of Artificial Sequence: Synthetic oligonucleotide
  Antisense strand to SEQ ID NO: 593108
ucuugcagauagauaccac

SEQ ID NO: 593110 - RNA, 19 nt, Artificial Sequence
  Description of Artificial Sequence: Synthetic oligonucleotide
  Sense strand starting at position 1021 of SEQ ID NO: 584836
ugguaucuaucugcaagag

SEQ ID NO: 593111 - RNA, 19 nt, Artificial Sequence
  Description of Artificial Sequence: Synthetic oligonucleotide
  Antisense strand to SEQ ID NO: 593110
cucuugcagauagauacca

SEQ ID NO: 593112 - RNA, 19 nt, Artificial Sequence
  Description of Artificial Sequence: Synthetic oligonucleotide
  Sense strand starting at position 1022 of SEQ ID NO: 584836
gguaucuaucugcaagaga

SEQ ID NO: 593113 - RNA, 19 nt, Artificial Sequence
  Description of Artificial Sequence: Synthetic oligonucleotide
  Antisense strand to SEQ ID NO: 593112
ucucuugcagauagauacc

SEQ ID NO: 593114 - RNA, 19 nt, Artificial Sequence
  Description of Artificial Sequence: Synthetic oligonucleotide
  Sense strand starting at position 1076 of SEQ ID NO: 584836
aauuaaguaugggauggaa

SEQ ID NO: 593115 - RNA, 19 nt, Artificial Sequence
  Description of Artificial Sequence: Synthetic oligonucleotide
  Antisense strand to SEQ ID NO: 593114
uuccaucccauacuuaauu

SEQ ID NO: 593116 - RNA, 19 nt, Artificial Sequence
  Description of Artificial Sequence: Synthetic oligonucleotide
  Sense strand starting at position 1190 of SEQ ID NO: 584836
gaaagauucugggccugca

SEQ ID NO: 593117 - RNA, 19 nt, Artificial Sequence
  Description of Artificial Sequence: Synthetic oligonucleotide
  Antisense strand to SEQ ID NO: 593116
ugcaggcccagaaucuuuc

SEQ ID NO: 593118 - RNA, 19 nt, Artificial Sequence
  Description of Artificial Sequence: Synthetic oligonucleotide
  Sense strand starting at position 1220 of SEQ ID NO: 584836
gucagacuuucugcaaguc

SEQ ID NO: 593119 - RNA, 19 nt, Artificial Sequence
  Description of Artificial Sequence: Synthetic oligonucleotide
  Antisense strand to SEQ ID NO: 593118
gacuugcagaaagucugac

SEQ ID NO: 593120 - RNA, 19 nt, Artificial Sequence
  Description of Artificial Sequence: Synthetic oligonucleotide
  Sense strand starting at position 1221 of SEQ ID NO: 584836
ucagacuuucugcaagucu

SEQ ID NO: 593121 - RNA, 19 nt, Artificial Sequence
  Description of Artificial Sequence: Synthetic oligonucleotide
  Antisense strand to SEQ ID NO: 593120
agacuugcagaaagucuga

SEQ ID NO: 593122 - RNA, 19 nt, Artificial Sequence
  Description of Artificial Sequence: Synthetic oligonucleotide
  Sense strand starting at position 1232 of SEQ ID NO: 584836
gcaagucucuccgaaggac

SEQ ID NO: 593123 - RNA, 19 nt, Artificial Sequence
  Description of Artificial Sequence: Synthetic oligonucleotide
  Antisense strand to SEQ ID NO: 593122
guccuucggagagacuugc

SEQ ID NO: 593124 - RNA, 19 nt, Artificial Sequence
  Description of Artificial Sequence: Synthetic oligonucleotide
  Sense strand starting at position 1366 of SEQ ID NO: 584836
gcuguagaucaacacuaga

SEQ ID NO: 593125 - RNA, 19 nt, Artificial Sequence
  Description of Artificial Sequence: Synthetic oligonucleotide
  Antisense strand to SEQ ID NO: 593124
ucuaguguugaucuacagc

SEQ ID NO: 593126 - RNA, 19 nt, Artificial Sequence
  Description of Artificial Sequence: Synthetic oligonucleotide
  Sense strand starting at position 1415 of SEQ ID NO: 584836
acuaaauuagcggguccua

SEQ ID NO: 593127 - RNA, 19 nt, Artificial Sequence
  Description of Artificial Sequence: Synthetic oligonucleotide
  Antisense strand to SEQ ID NO: 593126
uaggacccgcuaauuuagu

SEQ ID NO: 593128 - RNA, 19 nt, Artificial Sequence
  Description of Artificial Sequence: Synthetic oligonucleotide
  Sense strand starting at position 1434 of SEQ ID NO: 584836
ggcagucaguccugggaac

SEQ ID NO: 593129 - RNA, 19 nt, Artificial Sequence
  Description of Artificial Sequence: Synthetic oligonucleotide
  Antisense strand to SEQ ID NO: 593128
guucccaggacugacugcc

SEQ ID NO: 593130 - RNA, 19 nt, Artificial Sequence
  Description of Artificial Sequence: Synthetic oligonucleotide
  Sense strand starting at position 1496 of SEQ ID NO: 584836
gccuuugccugggagucuu

SEQ ID NO: 593131 - RNA, 19 nt, Artificial Sequence
  Description of Artificial Sequence: Synthetic oligonucleotide
  Antisense strand to SEQ ID NO: 593130
aagacucccaggcaaaggc

SEQ ID NO: 593132 - RNA, 19 nt, Artificial Sequence
  Description of Artificial Sequence: Synthetic oligonucleotide
  Sense strand starting at position 1504 of SEQ ID NO: 584836
cugggagucuuccaaucug

SEQ ID NO: 593133 - RNA, 19 nt, Artificial Sequence
  Description of Artificial Sequence: Synthetic oligonucleotide
  Antisense strand to SEQ ID NO: 593132
cagauuggaagacucccag

SEQ ID NO: 593134 - RNA, 19 nt, Artificial Sequence
  Description of Artificial Sequence: Synthetic oligonucleotide
  Sense strand starting at position 2017 of SEQ ID NO: 584836
ccgccucucggagucuuua

SEQ ID NO: 593135 - RNA, 19 nt, Artificial Sequence
  Description of Artificial Sequence: Synthetic oligonucleotide
  Antisense strand to SEQ ID NO: 593134
uaaagacuccgagaggcgg

SEQ ID NO: 593136 - RNA, 19 nt, Artificial Sequence
  Description of Artificial Sequence: Synthetic oligonucleotide
  Sense strand starting at position 2018 of SEQ ID NO: 584836
cgccucucggagucuuuau

SEQ ID NO: 593137 - RNA, 19 nt, Artificial Sequence
  Description of Artificial Sequence: Synthetic oligonucleotide
  Antisense strand to SEQ ID NO: 593136
auaaagacuccgagaggcg

SEQ ID NO: 593138 - RNA, 19 nt, Artificial Sequence
  Description of Artificial Sequence: Synthetic oligonucleotide
  Sense strand starting at position 2336 of SEQ ID NO: 584836
gcuuaagccugaccacuua

SEQ ID NO: 593139 - RNA, 19 nt, Artificial Sequence
  Description of Artificial Sequence: Synthetic oligonucleotide
  Antisense strand to SEQ ID NO: 593138
uaaguggucaggcuuaagc

SEQ ID NO: 593140 - RNA, 19 nt, Artificial Sequence
  Description of Artificial Sequence: Synthetic oligonucleotide
  Sense strand starting at position 3375 of SEQ ID NO: 584836
ugaggagggugguuuagau

SEQ ID NO: 593141 - RNA, 19 nt, Artificial Sequence
  Description of Artificial Sequence: Synthetic oligonucleotide
  Antisense strand to SEQ ID NO: 593140
aucuaaaccacccuccuca

SEQ ID NO: 593142 - RNA, 19 nt, Artificial Sequence
  Description of Artificial Sequence: Synthetic oligonucleotide
  Sense strand starting at position 3382 of SEQ ID NO: 584836
ggugguuuagaugaaguaa

SEQ ID NO: 593143 - RNA, 19 nt, Artificial Sequence
  Description of Artificial Sequence: Synthetic oligonucleotide
  Antisense strand to SEQ ID NO: 593142
uuacuucaucuaaaccacc

SEQ ID NO: 593144 - RNA, 19 nt, Artificial Sequence
  Description of Artificial Sequence: Synthetic oligonucleotide
  Sense strand starting at position 3490 of SEQ ID NO: 584836
gcaagugugggcugacaua

SEQ ID NO: 593145 - RNA, 19 nt, Artificial Sequence
  Description of Artificial Sequence: Synthetic oligonucleotide
  Antisense strand to SEQ ID NO: 593144
uaugucagcccacacuugc

SEQ ID NO: 593146 - RNA, 19 nt, Artificial Sequence
  Description of Artificial Sequence: Synthetic oligonucleotide
  Sense strand starting at position 3628 of SEQ ID NO: 584836
gccagacauuuauauaaag

SEQ ID NO: 593147 - RNA, 19 nt, Artificial Sequence
  Description of Artificial Sequence: Synthetic oligonucleotide
  Antisense strand to SEQ ID NO: 593146
cuuuauauaaaugucuggc

SEQ ID NO: 593148 - RNA, 19 nt, Artificial Sequence
  Description of Artificial Sequence: Synthetic oligonucleotide
  Sense strand starting at position 3719 of SEQ ID NO: 584836
acaggacaaugauaaagua

SEQ ID NO: 593149 - RNA, 19 nt, Artificial Sequence
  Description of Artificial Sequence: Synthetic oligonucleotide
  Antisense strand to SEQ ID NO: 593148
uacuuuaucauuguccugu

SEQ ID NO: 593150 - RNA, 19 nt, Artificial Sequence
  Description of Artificial Sequence: Synthetic oligonucleotide
  Sense strand starting at position 3735 of SEQ ID NO: 584836
guaagacacucaggagaaa

SEQ ID NO: 593151 - RNA, 19 nt, Artificial Sequence
  Description of Artificial Sequence: Synthetic oligonucleotide
  Antisense strand to SEQ ID NO: 593150
uuucuccugagugucuuac

SEQ ID NO: 593152 - RNA, 19 nt, Artificial Sequence
  Description of Artificial Sequence: Synthetic oligonucleotide
  Sense strand starting at position 3765 of SEQ ID NO: 584836
aauguaacgucaggaagaa

SEQ ID NO: 593153 - RNA, 19 nt, Artificial Sequence
  Description of Artificial Sequence: Synthetic oligonucleotide
  Antisense strand to SEQ ID NO: 593152
uucuuccugacguuacauu

SEQ ID NO: 593154 - RNA, 19 nt, Artificial Sequence
  Description of Artificial Sequence: Synthetic oligonucleotide
  Sense strand starting at position 3792 of SEQ ID NO: 584836
gugcuaccaucuugaacag

SEQ ID NO: 593155 - RNA, 19 nt, Artificial Sequence
  Description of Artificial Sequence: Synthetic oligonucleotide
  Antisense strand to SEQ ID NO: 593154
cuguucaagaugguagcac

SEQ ID NO: 593156 - RNA, 19 nt, Artificial Sequence
  Description of Artificial Sequence: Synthetic oligonucleotide
  Sense strand starting at position 3884 of SEQ ID NO: 584836
gucucaugcucaccaugau

SEQ ID NO: 593157 - RNA, 19 nt, Artificial Sequence
  Description of Artificial Sequence: Synthetic oligonucleotide
  Antisense strand to SEQ ID NO: 593156
aucauggugagcaugagac

SEQ ID NO: 593158 - RNA, 19 nt, Artificial Sequence
  Description of Artificial Sequence: Synthetic oligonucleotide
  Sense strand starting at position 36 of SEQ ID NO: 584837
guaacuccgucuccacuaa

SEQ ID NO: 593159 - RNA, 19 nt, Artificial Sequence
  Description of Artificial Sequence: Synthetic oligonucleotide
  Antisense strand to SEQ ID NO: 593158
uuaguggagacggaguuac

SEQ ID NO: 593160 - RNA, 19 nt, Artificial Sequence
  Description of Artificial Sequence: Synthetic oligonucleotide
  Sense strand starting at position 259 of SEQ ID NO: 584837
gagagaugguaccacaaga

SEQ ID NO: 593161 - RNA, 19 nt, Artificial Sequence
  Description of Artificial Sequence: Synthetic oligonucleotide
  Antisense strand to SEQ ID NO: 593160
ucuugugguaccaucucuc

SEQ ID NO: 593162 - RNA, 19 nt, Artificial Sequence
  Description of Artificial Sequence: Synthetic oligonucleotide
  Sense strand starting at position 280 of SEQ ID NO: 584837
aagaaagagccugguugua

SEQ ID NO: 593163 - RNA, 19 nt, Artificial Sequence
  Description of Artificial Sequence: Synthetic oligonucleotide
  Antisense strand to SEQ ID NO: 593162
uacaaccaggcucuuucuu

SEQ ID NO: 593164 - RNA, 19 nt, Artificial Sequence
  Description of Artificial Sequence: Synthetic oligonucleotide
  Sense strand starting at position 282 of SEQ ID NO: 584837
gaaagagccugguuguaga

SEQ ID NO: 593165 - RNA, 19 nt, Artificial Sequence
  Description of Artificial Sequence: Synthetic oligonucleotide
  Antisense strand to SEQ ID NO: 593164
ucuacaaccaggcucuuuc

SEQ ID NO: 593166 - RNA, 19 nt, Artificial Sequence
  Description of Artificial Sequence: Synthetic oligonucleotide
  Sense strand starting at position 306 of SEQ ID NO: 584837
aaaccuaugugauaggaaa

SEQ ID NO: 593167 - RNA, 19 nt, Artificial Sequence
  Description of Artificial Sequence: Synthetic oligonucleotide
  Antisense strand to SEQ ID NO: 593166
uuuccuaucacauagguuu

SEQ ID NO: 593168 - RNA, 19 nt, Artificial Sequence
  Description of Artificial Sequence: Synthetic oligonucleotide
  Sense strand starting at position 320 of SEQ ID NO: 584837
ggaaauaagucacuacuuc

SEQ ID NO: 593169 - RNA, 19 nt, Artificial Sequence
  Description of Artificial Sequence: Synthetic oligonucleotide
  Antisense strand to SEQ ID NO: 593168
gaaguagugacuuauuucc

SEQ ID NO: 593170 - RNA, 19 nt, Artificial Sequence
  Description of Artificial Sequence: Synthetic oligonucleotide
  Sense strand starting at position 381 of SEQ ID NO: 584837
gggaucuauucucugaaac

SEQ ID NO: 593171 - RNA, 19 nt, Artificial Sequence
  Description of Artificial Sequence: Synthetic oligonucleotide
  Antisense strand to SEQ ID NO: 593170
guuucagagaauagauccc

SEQ ID NO: 593172 - RNA, 19 nt, Artificial Sequence
  Description of Artificial Sequence: Synthetic oligonucleotide
  Sense strand starting at position 382 of SEQ ID NO: 584837
ggaucuauucucugaaacc

SEQ ID NO: 593173 - RNA, 19 nt, Artificial Sequence
  Description of Artificial Sequence: Synthetic oligonucleotide
  Antisense strand to SEQ ID NO: 593172
gguuucagagaauagaucc

SEQ ID NO: 593174 - RNA, 19 nt, Artificial Sequence
  Description of Artificial Sequence: Synthetic oligonucleotide
  Sense strand starting at position 671 of SEQ ID NO: 584837
cagugaagaggucagugau

SEQ ID NO: 593175 - RNA, 19 nt, Artificial Sequence
  Description of Artificial Sequence: Synthetic oligonucleotide
  Antisense strand to SEQ ID NO: 593174
aucacugaccucuucacug

SEQ ID NO: 593176 - RNA, 19 nt, Artificial Sequence
  Description of Artificial Sequence: Synthetic oligonucleotide
  Sense strand starting at position 795 of SEQ ID NO: 584837
ucacgaucauccuaagaga

SEQ ID NO: 593177 - RNA, 19 nt, Artificial Sequence
  Description of Artificial Sequence: Synthetic oligonucleotide
  Antisense strand to SEQ ID NO: 593176
ucucuuaggaugaucguga

SEQ ID NO: 593178 - RNA, 19 nt, Artificial Sequence
  Description of Artificial Sequence: Synthetic oligonucleotide
  Sense strand starting at position 798 of SEQ ID NO: 584837
cgaucauccuaagagagaa

SEQ ID NO: 593179 - RNA, 19 nt, Artificial Sequence
  Description of Artificial Sequence: Synthetic oligonucleotide
  Antisense strand to SEQ ID NO: 593178
uucucucuuaggaugaucg

SEQ ID NO: 593180 - RNA, 19 nt, Artificial Sequence
  Description of Artificial Sequence: Synthetic oligonucleotide
  Sense strand starting at position 1010 of SEQ ID NO: 584837
acaggcuagugguaucuau

SEQ ID NO: 593181 - RNA, 19 nt, Artificial Sequence
  Description of Artificial Sequence: Synthetic oligonucleotide
  Antisense strand to SEQ ID NO: 593180
auagauaccacuagccugu

SEQ ID NO: 593182 - RNA, 19 nt, Artificial Sequence
  Description of Artificial Sequence: Synthetic oligonucleotide
  Sense strand starting at position 1017 of SEQ ID NO: 584837
agugguaucuaucugcaag

SEQ ID NO: 593183 - RNA, 19 nt, Artificial Sequence
  Description of Artificial Sequence: Synthetic oligonucleotide
  Antisense strand to SEQ ID NO: 593182
cuugcagauagauaccacu

SEQ ID NO: 593184 - RNA, 19 nt, Artificial Sequence
  Description of Artificial Sequence: Synthetic oligonucleotide
  Sense strand starting at position 1018 of SEQ ID NO: 584837
gugguaucuaucugcaaga

SEQ ID NO: 593185 - RNA, 19 nt, Artificial Sequence
  Description of Artificial Sequence: Synthetic oligonucleotide
  Antisense strand to SEQ ID NO: 593184
ucuugcagauagauaccac

SEQ ID NO: 593186 - RNA, 19 nt, Artificial Sequence
  Description of Artificial Sequence: Synthetic oligonucleotide
  Sense strand starting at position 1019 of SEQ ID NO: 584837
ugguaucuaucugcaagag

SEQ ID NO: 593187 - RNA, 19 nt, Artificial Sequence
  Description of Artificial Sequence: Synthetic oligonucleotide
  Antisense strand to SEQ ID NO: 593186
cucuugcagauagauacca

SEQ ID NO: 593188 - RNA, 19 nt, Artificial Sequence
  Description of Artificial Sequence: Synthetic oligonucleotide
  Sense strand starting at position 1020 of SEQ ID NO: 584837
gguaucuaucugcaagaga

SEQ ID NO: 593189 - RNA, 19 nt, Artificial Sequence
  Description of Artificial Sequence: Synthetic oligonucleotide
  Antisense strand to SEQ ID NO: 593188
ucucuugcagauagauacc

SEQ ID NO: 593190 - RNA, 19 nt, Artificial Sequence
  Description of Artificial Sequence: Synthetic oligonucleotide
  Sense strand starting at position 1074 of SEQ ID NO: 584837
aauuaaguaugggauggaa

SEQ ID NO: 593191 - RNA, 19 nt, Artificial Sequence
  Description of Artificial Sequence: Synthetic oligonucleotide
  Antisense strand to SEQ ID NO: 593190
uuccaucccauacuuaauu

SEQ ID NO: 593192 - RNA, 19 nt, Artificial Sequence
  Description of Artificial Sequence: Synthetic oligonucleotide
  Sense strand starting at position 1188 of SEQ ID NO: 584837
gaaagauucugggccugca

SEQ ID NO: 593193 - RNA, 19 nt, Artificial Sequence
  Description of Artificial Sequence: Synthetic oligonucleotide
  Antisense strand to SEQ ID NO: 593192
ugcaggcccagaaucuuuc

SEQ ID NO: 593194 - RNA, 19 nt, Artificial Sequence
  Description of Artificial Sequence: Synthetic oligonucleotide
  Sense strand starting at position 1218 of SEQ ID NO: 584837
gucagacuuucugcaaguc

SEQ ID NO: 593195 - RNA, 19 nt, Artificial Sequence
  Description of Artificial Sequence: Synthetic oligonucleotide
  Antisense strand to SEQ ID NO: 593194
gacuugcagaaagucugac

SEQ ID NO: 593196 - RNA, 19 nt, Artificial Sequence
  Description of Artificial Sequence: Synthetic oligonucleotide
  Sense strand starting at position 1219 of SEQ ID NO: 584837
ucagacuuucugcaagucu

SEQ ID NO: 593197 - RNA, 19 nt, Artificial Sequence
  Description of Artificial Sequence: Synthetic oligonucleotide
  Antisense strand to SEQ ID NO: 593196
agacuugcagaaagucuga

SEQ ID NO: 593198 - RNA, 19 nt, Artificial Sequence
  Description of Artificial Sequence: Synthetic oligonucleotide
  Sense strand starting at position 1230 of SEQ ID NO: 584837
gcaagucucuccgaaggac

SEQ ID NO: 593199 - RNA, 19 nt, Artificial Sequence
  Description of Artificial Sequence: Synthetic oligonucleotide
  Antisense strand to SEQ ID NO: 593198
guccuucggagagacuugc

SEQ ID NO: 593200 - RNA, 19 nt, Artificial Sequence
  Description of Artificial Sequence: Synthetic oligonucleotide
  Sense strand starting at position 1364 of SEQ ID NO: 584837
gcuguagaucaacacuaga

SEQ ID NO: 593201 - RNA, 19 nt, Artificial Sequence
  Description of Artificial Sequence: Synthetic oligonucleotide
  Antisense strand to SEQ ID NO: 593200
ucuaguguugaucuacagc

SEQ ID NO: 593202 - RNA, 19 nt, Artificial Sequence
  Description of Artificial Sequence: Synthetic oligonucleotide
  Sense strand starting at position 1413 of SEQ ID NO: 584837
acuaaauuagcggguccua

SEQ ID NO: 593203 - RNA, 19 nt, Artificial Sequence
  Description of Artificial Sequence: Synthetic oligonucleotide
  Antisense strand to SEQ ID NO: 593202
uaggacccgcuaauuuagu

SEQ ID NO: 593204 - RNA, 19 nt, Artificial Sequence
  Description of Artificial Sequence: Synthetic oligonucleotide
  Sense strand starting at position 1432 of SEQ ID NO: 584837
ggcagucaguccugggaac

SEQ ID NO: 593205 - RNA, 19 nt, Artificial Sequence
  Description of Artificial Sequence: Synthetic oligonucleotide
  Antisense strand to SEQ ID NO: 593204
guucccaggacugacugcc

SEQ ID NO: 593206 - RNA, 19 nt, Artificial Sequence
  Description of Artificial Sequence: Synthetic oligonucleotide
  Sense strand starting at position 1494 of SEQ ID NO: 584837
gccuuugccugggagucuu

SEQ ID NO: 593207 - RNA, 19 nt, Artificial Sequence
  Description of Artificial Sequence: Synthetic oligonucleotide
  Antisense strand to SEQ ID NO: 593206
aagacucccaggcaaaggc

SEQ ID NO: 593208 - RNA, 19 nt, Artificial Sequence
  Description of Artificial Sequence: Synthetic oligonucleotide
  Sense strand starting at position 1502 of SEQ ID NO: 584837
cugggagucuuccaaucug

SEQ ID NO: 593209 - RNA, 19 nt, Artificial Sequence
  Description of Artificial Sequence: Synthetic oligonucleotide
  Antisense strand to SEQ ID NO: 593208
cagauuggaagacucccag

SEQ ID NO: 593210 - RNA, 19 nt, Artificial Sequence
  Description of Artificial Sequence: Synthetic oligonucleotide
  Sense strand starting at position 2015 of SEQ ID NO: 584837
ccgccucucggagucuuua

SEQ ID NO: 593211 - RNA, 19 nt, Artificial Sequence
  Description of Artificial Sequence: Synthetic oligonucleotide
  Antisense strand to SEQ ID NO: 593210
uaaagacuccgagaggcgg

SEQ ID NO: 593212 - RNA, 19 nt, Artificial Sequence
  Description of Artificial Sequence: Synthetic oligonucleotide
  Sense strand starting at position 2016 of SEQ ID NO: 584837
cgccucucggagucuuuau

SEQ ID NO: 593213 - RNA, 19 nt, Artificial Sequence
  Description of Artificial Sequence: Synthetic oligonucleotide
  Antisense strand to SEQ ID NO: 593212
auaaagacuccgagaggcg

SEQ ID NO: 593214 - RNA, 19 nt, Artificial Sequence
  Description of Artificial Sequence: Synthetic oligonucleotide
  Sense strand starting at position 2334 of SEQ ID NO: 584837
gcuuaagccugaccacuua

SEQ ID NO: 593215 - RNA, 19 nt, Artificial Sequence
  Description of Artificial Sequence: Synthetic oligonucleotide
  Antisense strand to SEQ ID NO: 593214
uaaguggucaggcuuaagc

SEQ ID NO: 593216 - RNA, 19 nt, Artificial Sequence
  Description of Artificial Sequence: Synthetic oligonucleotide
  Sense strand starting at position 3373 of SEQ ID NO: 584837
ugaggagggugguuuagau

SEQ ID NO: 593217 - RNA, 19 nt, Artificial Sequence
  Description of Artificial Sequence: Synthetic oligonucleotide
  Antisense strand to SEQ ID NO: 593216
aucuaaaccacccuccuca

SEQ ID NO: 593218 - RNA, 19 nt, Artificial Sequence
  Description of Artificial Sequence: Synthetic oligonucleotide
  Sense strand starting at position 3380 of SEQ ID NO: 584837
ggugguuuagaugaaguaa

SEQ ID NO: 593219 - RNA, 19 nt, Artificial Sequence
  Description of Artificial Sequence: Synthetic oligonucleotide
  Antisense strand to SEQ ID NO: 593218
uuacuucaucuaaaccacc

SEQ ID NO: 593220 - RNA, 19 nt, Artificial Sequence
  Description of Artificial Sequence: Synthetic oligonucleotide
  Sense strand starting at position 3488 of SEQ ID NO: 584837
gcaagugugggcugacaua

SEQ ID NO: 593221 - RNA, 19 nt, Artificial Sequence
  Description of Artificial Sequence: Synthetic oligonucleotide
  Antisense strand to SEQ ID NO: 593220
uaugucagcccacacuugc

SEQ ID NO: 593222 - RNA, 19 nt, Artificial Sequence
  Description of Artificial Sequence: Synthetic oligonucleotide
  Sense strand starting at position 3626 of SEQ ID NO: 584837
gccagacauuuauauaaag

SEQ ID NO: 593223 - RNA, 19 nt, Artificial Sequence
  Description of Artificial Sequence: Synthetic oligonucleotide
  Antisense strand to SEQ ID NO: 593222
cuuuauauaaaugucuggc

SEQ ID NO: 593224 - RNA, 19 nt, Artificial Sequence
  Description of Artificial Sequence: Synthetic oligonucleotide
  Sense strand starting at position 3717 of SEQ ID NO: 584837
acaggacaaugauaaagua

SEQ ID NO: 593225 - RNA, 19 nt, Artificial Sequence
  Description of Artificial Sequence: Synthetic oligonucleotide
  Antisense strand to SEQ ID NO: 593224
uacuuuaucauuguccugu

SEQ ID NO: 593226 - RNA, 19 nt, Artificial Sequence
  Description of Artificial Sequence: Synthetic oligonucleotide
  Sense strand starting at position 3733 of SEQ ID NO: 584837
guaagacacucaggagaaa

SEQ ID NO: 593227 - RNA, 19 nt, Artificial Sequence
  Description of Artificial Sequence: Synthetic oligonucleotide
  Antisense strand to SEQ ID NO: 593226
uuucuccugagugucuuac

SEQ ID NO: 593228 - RNA, 19 nt, Artificial Sequence
  Description of Artificial Sequence: Synthetic oligonucleotide
  Sense strand starting at position 3763 of SEQ ID NO: 584837
aauguaacgucaggaagaa

SEQ ID NO: 593229 - RNA, 19 nt, Artificial Sequence
  Description of Artificial Sequence: Synthetic oligonucleotide
  Antisense strand to SEQ ID NO: 593228
uucuuccugacguuacauu

SEQ ID NO: 593230 - RNA, 19 nt, Artificial Sequence
  Description of Artificial Sequence: Synthetic oligonucleotide
  Sense strand starting at position 3790 of SEQ ID NO: 584837
gugcuaccaucuugaacag

SEQ ID NO: 593231 - RNA, 19 nt, Artificial Sequence
  Description of Artificial Sequence: Synthetic oligonucleotide
  Antisense strand to SEQ ID NO: 593230
cuguucaagaugguagcac

SEQ ID NO: 593232 - RNA, 19 nt, Artificial Sequence
  Description of Artificial Sequence: Synthetic oligonucleotide
  Sense strand starting at position 3882 of SEQ ID NO: 584837
gucucaugcucaccaugau

SEQ ID NO: 593233 - RNA, 19 nt, Artificial Sequence
  Description of Artificial Sequence: Synthetic oligonucleotide
  Antisense strand to SEQ ID NO: 593232
aucauggugagcaugagac

SEQ ID NO: 593234 - RNA, 19 nt, Artificial Sequence
  Description of Artificial Sequence: Synthetic oligonucleotide
  Sense strand starting at position 132 of SEQ ID NO: 584838
uugacauucuggucugaau

SEQ ID NO: 593235 - RNA, 19 nt, Artificial Sequence
  Description of Artificial Sequence: Synthetic oligonucleotide
  Antisense strand to SEQ ID NO: 593234
auucagaccagaaugucaa

SEQ ID NO: 593236 - RNA, 19 nt, Artificial Sequence
  Description of Artificial Sequence: Synthetic oligonucleotide
  Sense strand starting at position 188 of SEQ ID NO: 584838
cuuuauuucugggagaauu

SEQ ID NO: 593237 - RNA, 19 nt, Artificial Sequence
  Description of Artificial Sequence: Synthetic oligonucleotide
  Antisense strand to SEQ ID NO: 593236
aauucucccagaaauaaag

SEQ ID NO: 593238 - RNA, 19 nt, Artificial Sequence
  Description of Artificial Sequence: Synthetic oligonucleotide
  Sense strand starting at position 225 of SEQ ID NO: 584838
caaauauggccucagagug

SEQ ID NO: 593239 - RNA, 19 nt, Artificial Sequence
  Description of Artificial Sequence: Synthetic oligonucleotide
  Antisense strand to SEQ ID NO: 593238
cacucugaggccauauuug

SEQ ID NO: 593240 - RNA, 19 nt, Artificial Sequence
  Description of Artificial Sequence: Synthetic oligonucleotide
  Sense strand starting at position 266 of SEQ ID NO: 584838
ccagaauucucagcaguca

SEQ ID NO: 593241 - RNA, 19 nt, Artificial Sequence
  Description of Artificial Sequence: Synthetic oligonucleotide
  Antisense strand to SEQ ID NO: 593240
ugacugcugagaauucugg

SEQ ID NO: 593242 - RNA, 19 nt, Artificial Sequence
  Description of Artificial Sequence: Synthetic oligonucleotide
  Sense strand starting at position 969 of SEQ ID NO: 584838
guuagaaauuaucaggaag

SEQ ID NO: 593243 - RNA, 19 nt, Artificial Sequence
  Description of Artificial Sequence: Synthetic oligonucleotide
  Antisense strand to SEQ ID NO: 593242
cuuccugauaauuucuaac

SEQ ID NO: 593244 - RNA, 19 nt, Artificial Sequence
  Description of Artificial Sequence: Synthetic oligonucleotide
  Sense strand starting at position 1101 of SEQ ID NO: 584838
uauguagaagcgugaggau

SEQ ID NO: 593245 - RNA, 19 nt, Artificial Sequence
  Description of Artificial Sequence: Synthetic oligonucleotide
  Antisense strand to SEQ ID NO: 593244
auccucacgcuucuacaua

SEQ ID NO: 593246 - RNA, 19 nt, Artificial Sequence
  Description of Artificial Sequence: Synthetic oligonucleotide
  Sense strand starting at position 1193 of SEQ ID NO: 584838
cuaccuuaccugggaagau

SEQ ID NO: 593247 - RNA, 19 nt, Artificial Sequence
  Description of Artificial Sequence: Synthetic oligonucleotide
  Antisense strand to SEQ ID NO: 593246
aucuucccagguaagguag

SEQ ID NO: 593248 - RNA, 19 nt, Artificial Sequence
  Description of Artificial Sequence: Synthetic oligonucleotide
  Sense strand starting at position 1265 of SEQ ID NO: 584838
gggagcugccgucaaacua

SEQ ID NO: 593249 - RNA, 19 nt, Artificial Sequence
  Description of Artificial Sequence: Synthetic oligonucleotide
  Antisense strand to SEQ ID NO: 593248
uaguuugacggcagcuccc

SEQ ID NO: 593250 - RNA, 19 nt, Artificial Sequence
  Description of Artificial Sequence: Synthetic oligonucleotide
  Sense strand starting at position 1302 of SEQ ID NO: 584838
agggcaggagugugagaaa

SEQ ID NO: 593251 - RNA, 19 nt, Artificial Sequence
  Description of Artificial Sequence: Synthetic oligonucleotide
  Antisense strand to SEQ ID NO: 593250
uuucucacacuccugcccu

SEQ ID NO: 593252 - RNA, 19 nt, Artificial Sequence
  Description of Artificial Sequence: Synthetic oligonucleotide
  Sense strand starting at position 1336 of SEQ ID NO: 584838
ggugacuccagaugaguua

SEQ ID NO: 593253 - RNA, 19 nt, Artificial Sequence
  Description of Artificial Sequence: Synthetic oligonucleotide
  Antisense strand to SEQ ID NO: 593252
uaacucaucuggagucacc

SEQ ID NO: 593254 - RNA, 19 nt, Artificial Sequence
  Description of Artificial Sequence: Synthetic oligonucleotide
  Sense strand starting at position 1348 of SEQ ID NO: 584838
ugaguuauggccugugaau

SEQ ID NO: 593255 - RNA, 19 nt, Artificial Sequence
  Description of Artificial Sequence: Synthetic oligonucleotide
  Antisense strand to SEQ ID NO: 593254
auucacaggccauaacuca

SEQ ID NO: 593256 - RNA, 19 nt, Artificial Sequence
  Description of Artificial Sequence: Synthetic oligonucleotide
  Sense strand starting at position 1502 of SEQ ID NO: 584838
aggugcugucugcaagaaa

SEQ ID NO: 593257 - RNA, 19 nt, Artificial Sequence
  Description of Artificial Sequence: Synthetic oligonucleotide
  Antisense strand to SEQ ID NO: 593256
uuucuugcagacagcaccu

SEQ ID NO: 593258 - RNA, 19 nt, Artificial Sequence
  Description of Artificial Sequence: Synthetic oligonucleotide
  Sense strand starting at position 1779 of SEQ ID NO: 584838
uuccguauuugcccagacu

SEQ ID NO: 593259 - RNA, 19 nt, Artificial Sequence
  Description of Artificial Sequence: Synthetic oligonucleotide
  Antisense strand to SEQ ID NO: 593258
agucugggcaaauacggaa

SEQ ID NO: 593260 - RNA, 19 nt, Artificial Sequence
  Description of Artificial Sequence: Synthetic oligonucleotide
  Sense strand starting at position 1780 of SEQ ID NO: 584838
uccguauuugcccagacuu

SEQ ID NO: 593261 - RNA, 19 nt, Artificial Sequence
  Description of Artificial Sequence: Synthetic oligonucleotide
  Antisense strand to SEQ ID NO: 593260
aagucugggcaaauacgga

SEQ ID NO: 593262 - RNA, 19 nt, Artificial Sequence
  Description of Artificial Sequence: Synthetic oligonucleotide
  Sense strand starting at position 1905 of SEQ ID NO: 584838
cagguugucggugaagaaa

SEQ ID NO: 593263 - RNA, 19 nt, Artificial Sequence
  Description of Artificial Sequence: Synthetic oligonucleotide
  Antisense strand to SEQ ID NO: 593262
uuucuucaccgacaaccug

SEQ ID NO: 593264 - RNA, 19 nt, Artificial Sequence
  Description of Artificial Sequence: Synthetic oligonucleotide
  Sense strand starting at position 2096 of SEQ ID NO: 584838
ugcugagcacgugaaucaa

SEQ ID NO: 593265 - RNA, 19 nt, Artificial Sequence
  Description of Artificial Sequence: Synthetic oligonucleotide
  Antisense strand to SEQ ID NO: 593264
uugauucacgugcucagca

SEQ ID NO: 593266 - RNA, 19 nt, Artificial Sequence
  Description of Artificial Sequence: Synthetic oligonucleotide
  Sense strand starting at position 2220 of SEQ ID NO: 584838
gauaaagcgccugggagau

SEQ ID NO: 593267 - RNA, 19 nt, Artificial Sequence
  Description of Artificial Sequence: Synthetic oligonucleotide
  Antisense strand to SEQ ID NO: 593266
aucucccaggcgcuuuauc

SEQ ID NO: 593268 - RNA, 19 nt, Artificial Sequence
  Description of Artificial Sequence: Synthetic oligonucleotide
  Sense strand starting at position 2235 of SEQ ID NO: 584838
agauguaguacccaguauu

SEQ ID NO: 593269 - RNA, 19 nt, Artificial Sequence
  Description of Artificial Sequence: Synthetic oligonucleotide
  Antisense strand to SEQ ID NO: 593268
aauacuggguacuacaucu

SEQ ID NO: 593270 - RNA, 19 nt, Artificial Sequence
  Description of Artificial Sequence: Synthetic oligonucleotide
  Sense strand starting at position 2238 of SEQ ID NO: 584838
uguaguacccaguauuaag

SEQ ID NO: 593271 - RNA, 19 nt, Artificial Sequence
  Description of Artificial Sequence: Synthetic oligonucleotide
  Antisense strand to SEQ ID NO: 593270
cuuaauacuggguacuaca

SEQ ID NO: 593272 - RNA, 19 nt, Artificial Sequence
  Description of Artificial Sequence: Synthetic oligonucleotide
  Sense strand starting at position 2278 of SEQ ID NO: 584838
cuacuaaguuuaguuuaga

SEQ ID NO: 593273 - RNA, 19 nt, Artificial Sequence
  Description of Artificial Sequence: Synthetic oligonucleotide
  Antisense strand to SEQ ID NO: 593272
ucuaaacuaaacuuaguag

SEQ ID NO: 593274 - RNA, 19 nt, Artificial Sequence
  Description of Artificial Sequence: Synthetic oligonucleotide
  Sense strand starting at position 2301 of SEQ ID NO: 584838
uucuauguguccucggaga

SEQ ID NO: 593275 - RNA, 19 nt, Artificial Sequence
  Description of Artificial Sequence: Synthetic oligonucleotide
  Antisense strand to SEQ ID NO: 593274
ucuccgaggacacauagaa

SEQ ID NO: 593276 - RNA, 19 nt, Artificial Sequence
  Description of Artificial Sequence: Synthetic oligonucleotide
  Sense strand starting at position 2303 of SEQ ID NO: 584838
cuauguguccucggagaua

SEQ ID NO: 593277 - RNA, 19 nt, Artificial Sequence
  Description of Artificial Sequence: Synthetic oligonucleotide
  Antisense strand to SEQ ID NO: 593276
uaucuccgaggacacauag

SEQ ID NO: 593278 - RNA, 19 nt, Artificial Sequence
  Description of Artificial Sequence: Synthetic oligonucleotide
  Sense strand starting at position 2306 of SEQ ID NO: 584838
uguguccucggagauagau

SEQ ID NO: 593279 - RNA, 19 nt, Artificial Sequence
  Description of Artificial Sequence: Synthetic oligonucleotide
  Antisense strand to SEQ ID NO: 593278
aucuaucuccgaggacaca

SEQ ID NO: 593280 - RNA, 19 nt, Artificial Sequence
  Description of Artificial Sequence: Synthetic oligonucleotide
  Sense strand starting at position 2765 of SEQ ID NO: 584838
gccagauuggcaugaagga

SEQ ID NO: 593281 - RNA, 19 nt, Artificial Sequence
  Description of Artificial Sequence: Synthetic oligonucleotide
  Antisense strand to SEQ ID NO: 593280
uccuucaugccaaucuggc

SEQ ID NO: 593282 - RNA, 19 nt, Artificial Sequence
  Description of Artificial Sequence: Synthetic oligonucleotide
  Sense strand starting at position 2864 of SEQ ID NO: 584838
ggguucccagcucgaaaua

SEQ ID NO: 593283 - RNA, 19 nt, Artificial Sequence
  Description of Artificial Sequence: Synthetic oligonucleotide
  Antisense strand to SEQ ID NO: 593282
uauuucgagcugggaaccc

SEQ ID NO: 593284 - RNA, 19 nt, Artificial Sequence
  Description of Artificial Sequence: Synthetic oligonucleotide
  Sense strand starting at position 2944 of SEQ ID NO: 584838
ccaggagucucggccuuga

SEQ ID NO: 593285 - RNA, 19 nt, Artificial Sequence
  Description of Artificial Sequence: Synthetic oligonucleotide
  Antisense strand to SEQ ID NO: 593284
ucaaggccgagacuccugg

SEQ ID NO: 593286 - RNA, 19 nt, Artificial Sequence
  Description of Artificial Sequence: Synthetic oligonucleotide
  Sense strand starting at position 3051 of SEQ ID NO: 584838
agcauuucucuaugagcuc

SEQ ID NO: 593287 - RNA, 19 nt, Artificial Sequence
  Description of Artificial Sequence: Synthetic oligonucleotide
  Antisense strand to SEQ ID NO: 593286
gagcucauagagaaaugcu

SEQ ID NO: 593288 - RNA, 19 nt, Artificial Sequence
  Description of Artificial Sequence: Synthetic oligonucleotide
  Sense strand starting at position 3180 of SEQ ID NO: 584838
cuaguuuggguuuguccaa

SEQ ID NO: 593289 - RNA, 19 nt, Artificial Sequence
  Description of Artificial Sequence: Synthetic oligonucleotide
  Antisense strand to SEQ ID NO: 593288
uuggacaaacccaaacuag

SEQ ID NO: 593290 - RNA, 19 nt, Artificial Sequence
  Description of Artificial Sequence: Synthetic oligonucleotide
  Sense strand starting at position 3197 of SEQ ID NO: 584838
aagccauggccacggauua

SEQ ID NO: 593291 - RNA, 19 nt, Artificial Sequence
  Description of Artificial Sequence: Synthetic oligonucleotide
  Antisense strand to SEQ ID NO: 593290
uaauccguggccauggcuu

SEQ ID NO: 593292 - RNA, 19 nt, Artificial Sequence
  Description of Artificial Sequence: Synthetic oligonucleotide
  Sense strand starting at position 3210 of SEQ ID NO: 584838
ggauuacgaucuucuugac

SEQ ID NO: 593293 - RNA, 19 nt, Artificial Sequence
  Description of Artificial Sequence: Synthetic oligonucleotide
  Antisense strand to SEQ ID NO: 593292
gucaagaagaucguaaucc

SEQ ID NO: 593294 - RNA, 19 nt, Artificial Sequence
  Description of Artificial Sequence: Synthetic oligonucleotide
  Sense strand starting at position 3276 of SEQ ID NO: 584838
cuggcaucugacugguuga

SEQ ID NO: 593295 - RNA, 19 nt, Artificial Sequence
  Description of Artificial Sequence: Synthetic oligonucleotide
  Antisense strand to SEQ ID NO: 593294
ucaaccagucagaugccag

SEQ ID NO: 593296 - RNA, 19 nt, Artificial Sequence
  Description of Artificial Sequence: Synthetic oligonucleotide
  Sense strand starting at position 3277 of SEQ ID NO: 584838
uggcaucugacugguugau

SEQ ID NO: 593297 - RNA, 19 nt, Artificial Sequence
  Description of Artificial Sequence: Synthetic oligonucleotide
  Antisense strand to SEQ ID NO: 593296
aucaaccagucagaugcca

SEQ ID NO: 593298 - RNA, 19 nt, Artificial Sequence
  Description of Artificial Sequence: Synthetic oligonucleotide
  Sense strand starting at position 3283 of SEQ ID NO: 584838
cugacugguugauccauga

SEQ ID NO: 593299 - RNA, 19 nt, Artificial Sequence
  Description of Artificial Sequence: Synthetic oligonucleotide
  Antisense strand to SEQ ID NO: 593298
ucauggaucaaccagucag

SEQ ID NO: 593300 - RNA, 19 nt, Artificial Sequence
  Description of Artificial Sequence: Synthetic oligonucleotide
  Sense strand starting at position 3287 of SEQ ID NO: 584838
cugguugauccaugagacu

SEQ ID NO: 593301 - RNA, 19 nt, Artificial Sequence
  Description of Artificial Sequence: Synthetic oligonucleotide
  Antisense strand to SEQ ID NO: 593300
agucucauggaucaaccag

SEQ ID NO: 593302 - RNA, 19 nt, Artificial Sequence
  Description of Artificial Sequence: Synthetic oligonucleotide
  Sense strand starting at position 3347 of SEQ ID NO: 584838
ccuugaguaugcucuagaa

SEQ ID NO: 593303 - RNA, 19 nt, Artificial Sequence
  Description of Artificial Sequence: Synthetic oligonucleotide
  Antisense strand to SEQ ID NO: 593302
uucuagagcauacucaagg

SEQ ID NO: 593304 - RNA, 19 nt, Artificial Sequence
  Description of Artificial Sequence: Synthetic oligonucleotide
  Sense strand starting at position 3349 of SEQ ID NO: 584838
uugaguaugcucuagaauu

SEQ ID NO: 593305 - RNA, 19 nt, Artificial Sequence
  Description of Artificial Sequence: Synthetic oligonucleotide
  Antisense strand to SEQ ID NO: 593304
aauucuagagcauacucaa

SEQ ID NO: 593306 - RNA, 19 nt, Artificial Sequence
  Description of Artificial Sequence: Synthetic oligonucleotide
  Sense strand starting at position 3449 of SEQ ID NO: 584838
gaaucaagguucucccgaa

SEQ ID NO: 593307 - RNA, 19 nt, Artificial Sequence
  Description of Artificial Sequence: Synthetic oligonucleotide
  Antisense strand to SEQ ID NO: 593306
uucgggagaaccuugauuc

SEQ ID NO: 593308 - RNA, 19 nt, Artificial Sequence
  Description of Artificial Sequence: Synthetic oligonucleotide
  Sense strand starting at position 3453 of SEQ ID NO: 584838
caagguucucccgaagguu

SEQ ID NO: 593309 - RNA, 19 nt, Artificial Sequence
  Description of Artificial Sequence: Synthetic oligonucleotide
  Antisense strand to SEQ ID NO: 593308
aaccuucgggagaaccuug

SEQ ID NO: 593310 - RNA, 19 nt, Artificial Sequence
  Description of Artificial Sequence: Synthetic oligonucleotide
  Sense strand starting at position 3792 of SEQ ID NO: 584838
cacaauucccugcgguuaa

SEQ ID NO: 593311 - RNA, 19 nt, Artificial Sequence
  Description of Artificial Sequence: Synthetic oligonucleotide
  Antisense strand to SEQ ID NO: 593310
uuaaccgcagggaauugug

SEQ ID NO: 593312 - RNA, 19 nt, Artificial Sequence
  Description of Artificial Sequence: Synthetic oligonucleotide
  Sense strand starting at position 3835 of SEQ ID NO: 584838
ccggucgggucaauaagua

SEQ ID NO: 593313 - RNA, 19 nt, Artificial Sequence
  Description of Artificial Sequence: Synthetic oligonucleotide
  Antisense strand to SEQ ID NO: 593312
uacuuauugacccgaccgg

SEQ ID NO: 593314 - RNA, 19 nt, Artificial Sequence
  Description of Artificial Sequence: Synthetic oligonucleotide
  Sense strand starting at position 116 of SEQ ID NO: 584839
uuaguugcucaguccguaa

SEQ ID NO: 593315 - RNA, 19 nt, Artificial Sequence
  Description of Artificial Sequence: Synthetic oligonucleotide
  Antisense strand to SEQ ID NO: 593314
uuacggacugagcaacuaa

SEQ ID NO: 593316 - RNA, 19 nt, Artificial Sequence
  Description of Artificial Sequence: Synthetic oligonucleotide
  Sense strand starting at position 186 of SEQ ID NO: 584839
agaaucuggucauuucgca

SEQ ID NO: 593317 - RNA, 19 nt, Artificial Sequence
  Description of Artificial Sequence: Synthetic oligonucleotide
  Antisense strand to SEQ ID NO: 593316
ugcgaaaugaccagauucu

SEQ ID NO: 593318 - RNA, 19 nt, Artificial Sequence
  Description of Artificial Sequence: Synthetic oligonucleotide
  Sense strand starting at position 847 of SEQ ID NO: 584839
uuaaguuguauugcgcauu

SEQ ID NO: 593319 - RNA, 19 nt, Artificial Sequence
  Description of Artificial Sequence: Synthetic oligonucleotide
  Antisense strand to SEQ ID NO: 593318
aaugcgcaauacaacuuaa

SEQ ID NO: 593320 - RNA, 19 nt, Artificial Sequence
  Description of Artificial Sequence: Synthetic oligonucleotide
  Sense strand starting at position 906 of SEQ ID NO: 584839
auagguuaucugcaaacac

SEQ ID NO: 593321 - RNA, 19 nt, Artificial Sequence
  Description of Artificial Sequence: Synthetic oligonucleotide
  Antisense strand to SEQ ID NO: 593320
guguuugcagauaaccuau

SEQ ID NO: 593322 - RNA, 19 nt, Artificial Sequence
  Description of Artificial Sequence: Synthetic oligonucleotide
  Sense strand starting at position 1194 of SEQ ID NO: 584839
aggugugugcacuauucua

SEQ ID NO: 593323 - RNA, 19 nt, Artificial Sequence
  Description of Artificial Sequence: Synthetic oligonucleotide
  Antisense strand to SEQ ID NO: 593322
uagaauagugcacacaccu

SEQ ID NO: 593324 - RNA, 19 nt, Artificial Sequence
  Description of Artificial Sequence: Synthetic oligonucleotide
  Sense strand starting at position 1262 of SEQ ID NO: 584839
aguagcauaucuuugaaga

SEQ ID NO: 593325 - RNA, 19 nt, Artificial Sequence
  Description of Artificial Sequence: Synthetic oligonucleotide
  Antisense strand to SEQ ID NO: 593324
ucuucaaagauaugcuacu

SEQ ID NO: 593326 - RNA, 19 nt, Artificial Sequence
  Description of Artificial Sequence: Synthetic oligonucleotide
  Sense strand starting at position 1263 of SEQ ID NO: 584839
guagcauaucuuugaagau

SEQ ID NO: 593327 - RNA, 19 nt, Artificial Sequence
  Description of Artificial Sequence: Synthetic oligonucleotide
  Antisense strand to SEQ ID NO: 593326
aucuucaaagauaugcuac

SEQ ID NO: 593328 - RNA, 19 nt, Artificial Sequence
  Description of Artificial Sequence: Synthetic oligonucleotide
  Sense strand starting at position 1454 of SEQ ID NO: 584839
ucuggaaggcuuuggaagu

SEQ ID NO: 593329 - RNA, 19 nt, Artificial Sequence
  Description of Artificial Sequence: Synthetic oligonucleotide
  Antisense strand to SEQ ID NO: 593328
acuuccaaagccuuccaga

SEQ ID NO: 593330 - RNA, 19 nt, Artificial Sequence
  Description of Artificial Sequence: Synthetic oligonucleotide
  Sense strand starting at position 1497 of SEQ ID NO: 584839
ggguucugauugcucaaga

SEQ ID NO: 593331 - RNA, 19 nt, Artificial Sequence
  Description of Artificial Sequence: Synthetic oligonucleotide
  Antisense strand to SEQ ID NO: 593330
ucuugagcaaucagaaccc

SEQ ID NO: 593332 - RNA, 19 nt, Artificial Sequence
  Description of Artificial Sequence: Synthetic oligonucleotide
  Sense strand starting at position 1498 of SEQ ID NO: 584839
gguucugauugcucaagac

SEQ ID NO: 593333 - RNA, 19 nt, Artificial Sequence
  Description of Artificial Sequence: Synthetic oligonucleotide
  Antisense strand to SEQ ID NO: 593332
gucuugagcaaucagaacc

SEQ ID NO: 593334 - RNA, 19 nt, Artificial Sequence
  Description of Artificial Sequence: Synthetic oligonucleotide
  Sense strand starting at position 1552 of SEQ ID NO: 584839
accaauaguuuccuagguu

SEQ ID NO: 593335 - RNA, 19 nt, Artificial Sequence
  Description of Artificial Sequence: Synthetic oligonucleotide
  Antisense strand to SEQ ID NO: 593334
aaccuaggaaacuauuggu

SEQ ID NO: 593336 - RNA, 19 nt, Artificial Sequence
  Description of Artificial Sequence: Synthetic oligonucleotide
  Sense strand starting at position 1696 of SEQ ID NO: 584839
gauaaauugcuuggaggac

SEQ ID NO: 593337 - RNA, 19 nt, Artificial Sequence
  Description of Artificial Sequence: Synthetic oligonucleotide
  Antisense strand to SEQ ID NO: 593336
guccuccaagcaauuuauc

SEQ ID NO: 593338 - RNA, 19 nt, Artificial Sequence
  Description of Artificial Sequence: Synthetic oligonucleotide
  Sense strand starting at position 1711 of SEQ ID NO: 584839
ggacauacccaccgaguuu

SEQ ID NO: 593339 - RNA, 19 nt, Artificial Sequence
  Description of Artificial Sequence: Synthetic oligonucleotide
  Antisense strand to SEQ ID NO: 593338
aaacucgguggguaugucc

SEQ ID NO: 593340 - RNA, 19 nt, Artificial Sequence
  Description of Artificial Sequence: Synthetic oligonucleotide
  Sense strand starting at position 1762 of SEQ ID NO: 584839
uuuaaauaacuguguucca

SEQ ID NO: 593341 - RNA, 19 nt, Artificial Sequence
  Description of Artificial Sequence: Synthetic oligonucleotide
  Antisense strand to SEQ ID NO: 593340
uggaacacaguuauuuaaa

SEQ ID NO: 593342 - RNA, 19 nt, Artificial Sequence
  Description of Artificial Sequence: Synthetic oligonucleotide
  Sense strand starting at position 1841 of SEQ ID NO: 584839
cuuaguaagcaacagacau

SEQ ID NO: 593343 - RNA, 19 nt, Artificial Sequence
  Description of Artificial Sequence: Synthetic oligonucleotide
  Antisense strand to SEQ ID NO: 593342
augucuguugcuuacuaag

SEQ ID NO: 593344 - RNA, 19 nt, Artificial Sequence
  Description of Artificial Sequence: Synthetic oligonucleotide
  Sense strand starting at position 2041 of SEQ ID NO: 584839
gcccuccuccucuaggaau

SEQ ID NO: 593345 - RNA, 19 nt, Artificial Sequence
  Description of Artificial Sequence: Synthetic oligonucleotide
  Antisense strand to SEQ ID NO: 593344
auuccuagaggaggagggc

SEQ ID NO: 593346 - RNA, 19 nt, Artificial Sequence
  Description of Artificial Sequence: Synthetic oligonucleotide
  Sense strand starting at position 2295 of SEQ ID NO: 584839
cugguauccagcgaauaca

SEQ ID NO: 593347 - RNA, 19 nt, Artificial Sequence
  Description of Artificial Sequence: Synthetic oligonucleotide
  Antisense strand to SEQ ID NO: 593346
uguauucgcuggauaccag

SEQ ID NO: 593348 - RNA, 19 nt, Artificial Sequence
  Description of Artificial Sequence: Synthetic oligonucleotide
  Sense strand starting at position 2371 of SEQ ID NO: 584839
cggagaugacgucacgaga

SEQ ID NO: 593349 - RNA, 19 nt, Artificial Sequence
  Description of Artificial Sequence: Synthetic oligonucleotide
  Antisense strand to SEQ ID NO: 593348
ucucgugacgucaucuccg

SEQ ID NO: 593350 - RNA, 19 nt, Artificial Sequence
  Description of Artificial Sequence: Synthetic oligonucleotide
  Sense strand starting at position 2481 of SEQ ID NO: 584839
gcuugaacucgcgaccaaa

SEQ ID NO: 593351 - RNA, 19 nt, Artificial Sequence
  Description of Artificial Sequence: Synthetic oligonucleotide
  Antisense strand to SEQ ID NO: 593350
uuuggucgcgaguucaagc

SEQ ID NO: 593352 - RNA, 19 nt, Artificial Sequence
  Description of Artificial Sequence: Synthetic oligonucleotide
  Sense strand starting at position 2531 of SEQ ID NO: 584839
ugagaaucuugcgucaaag

SEQ ID NO: 593353 - RNA, 19 nt, Artificial Sequence
  Description of Artificial Sequence: Synthetic oligonucleotide
  Antisense strand to SEQ ID NO: 593352
cuuugacgcaagauucuca

SEQ ID NO: 593354 - RNA, 19 nt, Artificial Sequence
  Description of Artificial Sequence: Synthetic oligonucleotide
  Sense strand starting at position 2539 of SEQ ID NO: 584839
uugcgucaaagcguaguua

SEQ ID NO: 593355 - RNA, 19 nt, Artificial Sequence
  Description of Artificial Sequence: Synthetic oligonucleotide
  Antisense strand to SEQ ID NO: 593354
uaacuacgcuuugacgcaa

SEQ ID NO: 593356 - RNA, 19 nt, Artificial Sequence
  Description of Artificial Sequence: Synthetic oligonucleotide
  Sense strand starting at position 2542 of SEQ ID NO: 584839
cgucaaagcguaguuauug

SEQ ID NO: 593357 - RNA, 19 nt, Artificial Sequence
  Description of Artificial Sequence: Synthetic oligonucleotide
  Antisense strand to SEQ ID NO: 593356
caauaacuacgcuuugacg

SEQ ID NO: 593358 - RNA, 19 nt, Artificial Sequence
  Description of Artificial Sequence: Synthetic oligonucleotide
  Sense strand starting at position 3193 of SEQ ID NO: 584839
uggcucuauccagaagucu

SEQ ID NO: 593359 - RNA, 19 nt, Artificial Sequence
  Description of Artificial Sequence: Synthetic oligonucleotide
  Antisense strand to SEQ ID NO: 593358
agacuucuggauagagcca

SEQ ID NO: 593360 - RNA, 19 nt, Artificial Sequence
  Description of Artificial Sequence: Synthetic oligonucleotide
  Sense strand starting at position 3205 of SEQ ID NO: 584839
gaagucuuagcaggcauuu

SEQ ID NO: 593361 - RNA, 19 nt, Artificial Sequence
  Description of Artificial Sequence: Synthetic oligonucleotide
  Antisense strand to SEQ ID NO: 593360
aaaugccugcuaagacuuc

SEQ ID NO: 593362 - RNA, 19 nt, Artificial Sequence
  Description of Artificial Sequence: Synthetic oligonucleotide
  Sense strand starting at position 3258 of SEQ ID NO: 584839
caugcauguuaaguaagua

SEQ ID NO: 593363 - RNA, 19 nt, Artificial Sequence
  Description of Artificial Sequence: Synthetic oligonucleotide
  Antisense strand to SEQ ID NO: 593362
uacuuacuuaacaugcaug

SEQ ID NO: 593364 - RNA, 19 nt, Artificial Sequence
  Description of Artificial Sequence: Synthetic oligonucleotide
  Sense strand starting at position 3297 of SEQ ID NO: 584839
gguucuugauaauugggaa

SEQ ID NO: 593365 - RNA, 19 nt, Artificial Sequence
  Description of Artificial Sequence: Synthetic oligonucleotide
  Antisense strand to SEQ ID NO: 593364
uucccaauuaucaagaacc

SEQ ID NO: 593366 - RNA, 19 nt, Artificial Sequence
  Description of Artificial Sequence: Synthetic oligonucleotide
  Sense strand starting at position 3298 of SEQ ID NO: 584839
guucuugauaauugggaac

SEQ ID NO: 593367 - RNA, 19 nt, Artificial Sequence
  Description of Artificial Sequence: Synthetic oligonucleotide
  Antisense strand to SEQ ID NO: 593366
guucccaauuaucaagaac

SEQ ID NO: 593368 - RNA, 19 nt, Artificial Sequence
  Description of Artificial Sequence: Synthetic oligonucleotide
  Sense strand starting at position 3365 of SEQ ID NO: 584839
ucuucuuggaguuggacua

SEQ ID NO: 593369 - RNA, 19 nt, Artificial Sequence
  Description of Artificial Sequence: Synthetic oligonucleotide
  Antisense strand to SEQ ID NO: 593368
uaguccaacuccaagaaga

SEQ ID NO: 593370 - RNA, 19 nt, Artificial Sequence
  Description of Artificial Sequence: Synthetic oligonucleotide
  Sense strand starting at position 3366 of SEQ ID NO: 584839
cuucuuggaguuggacuaa

SEQ ID NO: 593371 - RNA, 19 nt, Artificial Sequence
  Description of Artificial Sequence: Synthetic oligonucleotide
  Antisense strand to SEQ ID NO: 593370
uuaguccaacuccaagaag

SEQ ID NO: 593372 - RNA, 19 nt, Artificial Sequence
  Description of Artificial Sequence: Synthetic oligonucleotide
  Sense strand starting at position 3414 of SEQ ID NO: 584839
guacauuaguggguaucua

SEQ ID NO: 593373 - RNA, 19 nt, Artificial Sequence
  Description of Artificial Sequence: Synthetic oligonucleotide
  Antisense strand to SEQ ID NO: 593372
uagauacccacuaauguac

SEQ ID NO: 593374 - RNA, 19 nt, Artificial Sequence
  Description of Artificial Sequence: Synthetic oligonucleotide
  Sense strand starting at position 3415 of SEQ ID NO: 584839
uacauuaguggguaucuaa

SEQ ID NO: 593375 - RNA, 19 nt, Artificial Sequence
  Description of Artificial Sequence: Synthetic oligonucleotide
  Antisense strand to SEQ ID NO: 593374
uuagauacccacuaaugua

SEQ ID NO: 593376 - RNA, 19 nt, Artificial Sequence
  Description of Artificial Sequence: Synthetic oligonucleotide
  Sense strand starting at position 3418 of SEQ ID NO: 584839
auuaguggguaucuaaauc

SEQ ID NO: 593377 - RNA, 19 nt, Artificial Sequence
  Description of Artificial Sequence: Synthetic oligonucleotide
  Antisense strand to SEQ ID NO: 593376
gauuuagauacccacuaau

SEQ ID NO: 593378 - RNA, 19 nt, Artificial Sequence
  Description of Artificial Sequence: Synthetic oligonucleotide
  Sense strand starting at position 3513 of SEQ ID NO: 584839
gguaaauauugugucccaa

SEQ ID NO: 593379 - RNA, 19 nt, Artificial Sequence
  Description of Artificial Sequence: Synthetic oligonucleotide
  Antisense strand to SEQ ID NO: 593378
uugggacacaauauuuacc

SEQ ID NO: 593380 - RNA, 19 nt, Artificial Sequence
  Description of Artificial Sequence: Synthetic oligonucleotide
  Sense strand starting at position 3581 of SEQ ID NO: 584839
uacauuucuuaguaagggu

SEQ ID NO: 593381 - RNA, 19 nt, Artificial Sequence
  Description of Artificial Sequence: Synthetic oligonucleotide
  Antisense strand to SEQ ID NO: 593380
acccuuacuaagaaaugua

SEQ ID NO: 593382 - RNA, 19 nt, Artificial Sequence
  Description of Artificial Sequence: Synthetic oligonucleotide
  Sense strand starting at position 3613 of SEQ ID NO: 584839
guuugaaagccacaguuau

SEQ ID NO: 593383 - RNA, 19 nt, Artificial Sequence
  Description of Artificial Sequence: Synthetic oligonucleotide
  Antisense strand to SEQ ID NO: 593382
auaacuguggcuuucaaac

SEQ ID NO: 593384 - RNA, 19 nt, Artificial Sequence
  Description of Artificial Sequence: Synthetic oligonucleotide
  Sense strand starting at position 3688 of SEQ ID NO: 584839
cuauuagccucuguaagaa

SEQ ID NO: 593385 - RNA, 19 nt, Artificial Sequence
  Description of Artificial Sequence: Synthetic oligonucleotide
  Antisense strand to SEQ ID NO: 593384
uucuuacagaggcuaauag

SEQ ID NO: 593386 - RNA, 19 nt, Artificial Sequence
  Description of Artificial Sequence: Synthetic oligonucleotide
  Sense strand starting at position 3722 of SEQ ID NO: 584839
ggugcauugccuucccagu

SEQ ID NO: 593387 - RNA, 19 nt, Artificial Sequence
  Description of Artificial Sequence: Synthetic oligonucleotide
  Antisense strand to SEQ ID NO: 593386
acugggaaggcaaugcacc

SEQ ID NO: 593388 - RNA, 19 nt, Artificial Sequence
  Description of Artificial Sequence: Synthetic oligonucleotide
  Sense strand starting at position 3801 of SEQ ID NO: 584839
gggcgcauagauggauaaa

SEQ ID NO: 593389 - RNA, 19 nt, Artificial Sequence
  Description of Artificial Sequence: Synthetic oligonucleotide
  Antisense strand to SEQ ID NO: 593388
uuuauccaucuaugcgccc

SEQ ID NO: 593390 - RNA, 19 nt, Artificial Sequence
  Description of Artificial Sequence: Synthetic oligonucleotide
  Sense strand starting at position 3802 of SEQ ID NO: 584839
ggcgcauagauggauaaau

SEQ ID NO: 593391 - RNA, 19 nt, Artificial Sequence
  Description of Artificial Sequence: Synthetic oligonucleotide
  Antisense strand to SEQ ID NO: 593390
auuuauccaucuaugcgcc

SEQ ID NO: 593392 - RNA, 19 nt, Artificial Sequence
  Description of Artificial Sequence: Synthetic oligonucleotide
  Sense strand starting at position 3879 of SEQ ID NO: 584839
guagaaucuagaugguaga

SEQ ID NO: 593393 - RNA, 19 nt, Artificial Sequence
  Description of Artificial Sequence: Synthetic oligonucleotide
  Antisense strand to SEQ ID NO: 593392
ucuaccaucuagauucuac

SEQ ID NO: 593394 - RNA, 19 nt, Artificial Sequence
  Description of Artificial Sequence: Synthetic oligonucleotide
  Sense strand starting at position 462 of SEQ ID NO: 584840
uuaaguuguauugcgcauu

SEQ ID NO: 593395 - RNA, 19 nt, Artificial Sequence
  Description of Artificial Sequence: Synthetic oligonucleotide
  Antisense strand to SEQ ID NO: 593394
aaugcgcaauacaacuuaa

SEQ ID NO: 593396 - RNA, 19 nt, Artificial Sequence
  Description of Artificial Sequence: Synthetic oligonucleotide
  Sense strand starting at position 521 of SEQ ID NO: 584840
auagguuaucugcaaacac

SEQ ID NO: 593397 - RNA, 19 nt, Artificial Sequence
  Description of Artificial Sequence: Synthetic oligonucleotide
  Antisense strand to SEQ ID NO: 593396
guguuugcagauaaccuau

SEQ ID NO: 593398 - RNA, 19 nt, Artificial Sequence
  Description of Artificial Sequence: Synthetic oligonucleotide
  Sense strand starting at position 809 of SEQ ID NO: 584840
aggugugugcacuauucua

SEQ ID NO: 593399 - RNA, 19 nt, Artificial Sequence
  Description of Artificial Sequence: Synthetic oligonucleotide
  Antisense strand to SEQ ID NO: 593398
uagaauagugcacacaccu

SEQ ID NO: 593400 - RNA, 19 nt, Artificial Sequence
  Description of Artificial Sequence: Synthetic oligonucleotide
  Sense strand starting at position 877 of SEQ ID NO: 584840
aguagcauaucuuugaaga

SEQ ID NO: 593401 - RNA, 19 nt, Artificial Sequence
  Description of Artificial Sequence: Synthetic oligonucleotide
  Antisense strand to SEQ ID NO: 593400
ucuucaaagauaugcuacu

SEQ ID NO: 593402 - RNA, 19 nt, Artificial Sequence
  Description of Artificial Sequence: Synthetic oligonucleotide
  Sense strand starting at position 878 of SEQ ID NO: 584840
guagcauaucuuugaagau

SEQ ID NO: 593403 - RNA, 19 nt, Artificial Sequence
  Description of Artificial Sequence: Synthetic oligonucleotide
  Antisense strand to SEQ ID NO: 593402
aucuucaaagauaugcuac

SEQ ID NO: 593404 - RNA, 19 nt, Artificial Sequence
  Description of Artificial Sequence: Synthetic oligonucleotide
  Sense strand starting at position 1069 of SEQ ID NO: 584840
ucuggaaggcuuuggaagu

SEQ ID NO: 593405 - RNA, 19 nt, Artificial Sequence
  Description of Artificial Sequence: Synthetic oligonucleotide
  Antisense strand to SEQ ID NO: 593404
acuuccaaagccuuccaga

SEQ ID NO: 593406 - RNA, 19 nt, Artificial Sequence
  Description of Artificial Sequence: Synthetic oligonucleotide
  Sense strand starting at position 1112 of SEQ ID NO: 584840
ggguucugauugcucaaga

SEQ ID NO: 593407 - RNA, 19 nt, Artificial Sequence
  Description of Artificial Sequence: Synthetic oligonucleotide
  Antisense strand to SEQ ID NO: 593406
ucuugagcaaucagaaccc

SEQ ID NO: 593408 - RNA, 19 nt, Artificial Sequence
  Description of Artificial Sequence: Synthetic oligonucleotide
  Sense strand starting at position 1113 of SEQ ID NO: 584840
gguucugauugcucaagac

SEQ ID NO: 593409 - RNA, 19 nt, Artificial Sequence
  Description of Artificial Sequence: Synthetic oligonucleotide
  Antisense strand to SEQ ID NO: 593408
gucuugagcaaucagaacc

SEQ ID NO: 593410 - RNA, 19 nt, Artificial Sequence
  Description of Artificial Sequence: Synthetic oligonucleotide
  Sense strand starting at position 1167 of SEQ ID NO: 584840
accaauaguuuccuagguu

SEQ ID NO: 593411 - RNA, 19 nt, Artificial Sequence
  Description of Artificial Sequence: Synthetic oligonucleotide
  Antisense strand to SEQ ID NO: 593410
aaccuaggaaacuauuggu

SEQ ID NO: 593412 - RNA, 19 nt, Artificial Sequence
  Description of Artificial Sequence: Synthetic oligonucleotide
  Sense strand starting at position 1311 of SEQ ID NO: 584840
gauaaauugcuuggaggac

SEQ ID NO: 593413 - RNA, 19 nt, Artificial Sequence
  Description of Artificial Sequence: Synthetic oligonucleotide
  Antisense strand to SEQ ID NO: 593412
guccuccaagcaauuuauc

SEQ ID NO: 593414 - RNA, 19 nt, Artificial Sequence
  Description of Artificial Sequence: Synthetic oligonucleotide
  Sense strand starting at position 1326 of SEQ ID NO: 584840
ggacauacccaccgaguuu

SEQ ID NO: 593415 - RNA, 19 nt, Artificial Sequence
  Description of Artificial Sequence: Synthetic oligonucleotide
  Antisense strand to SEQ ID NO: 593414
aaacucgguggguaugucc

SEQ ID NO: 593416 - RNA, 19 nt, Artificial Sequence
  Description of Artificial Sequence: Synthetic oligonucleotide
  Sense strand starting at position 1377 of SEQ ID NO: 584840
uuuaaauaacuguguucca

SEQ ID NO: 593417 - RNA, 19 nt, Artificial Sequence
  Description of Artificial Sequence: Synthetic oligonucleotide
  Antisense strand to SEQ ID NO: 593416
uggaacacaguuauuuaaa

SEQ ID NO: 593418 - RNA, 19 nt, Artificial Sequence
  Description of Artificial Sequence: Synthetic oligonucleotide
  Sense strand starting at position 1456 of SEQ ID NO: 584840
cuuaguaagcaacagacau

SEQ ID NO: 593419 - RNA, 19 nt, Artificial Sequence
  Description of Artificial Sequence: Synthetic oligonucleotide
  Antisense strand to SEQ ID NO: 593418
augucuguugcuuacuaag

SEQ ID NO: 593420 - RNA, 19 nt, Artificial Sequence
  Description of Artificial Sequence: Synthetic oligonucleotide
  Sense strand starting at position 1656 of SEQ ID NO: 584840
gcccuccuccucuaggaau

SEQ ID NO: 593421 - RNA, 19 nt, Artificial Sequence
  Description of Artificial Sequence: Synthetic oligonucleotide
  Antisense strand to SEQ ID NO: 593420
auuccuagaggaggagggc

SEQ ID NO: 593422 - RNA, 19 nt, Artificial Sequence
  Description of Artificial Sequence: Synthetic oligonucleotide
  Sense strand starting at position 1910 of SEQ ID NO: 584840
cugguauccagcgaauaca

SEQ ID NO: 593423 - RNA, 19 nt, Artificial Sequence
  Description of Artificial Sequence: Synthetic oligonucleotide
  Antisense strand to SEQ ID NO: 593422
uguauucgcuggauaccag

SEQ ID NO: 593424 - RNA, 19 nt, Artificial Sequence
  Description of Artificial Sequence: Synthetic oligonucleotide
  Sense strand starting at position 1986 of SEQ ID NO: 584840
cggagaugacgucacgaga

SEQ ID NO: 593425 - RNA, 19 nt, Artificial Sequence
  Description of Artificial Sequence: Synthetic oligonucleotide
  Antisense strand to SEQ ID NO: 593424
ucucgugacgucaucuccg

SEQ ID NO: 593426 - RNA, 19 nt, Artificial Sequence
  Description of Artificial Sequence: Synthetic oligonucleotide
  Sense strand starting at position 2096 of SEQ ID NO: 584840
gcuugaacucgcgaccaaa

SEQ ID NO: 593427 - RNA, 19 nt, Artificial Sequence
  Description of Artificial Sequence: Synthetic oligonucleotide
  Antisense strand to SEQ ID NO: 593426
uuuggucgcgaguucaagc

SEQ ID NO: 593428 - RNA, 19 nt, Artificial Sequence
  Description of Artificial Sequence: Synthetic oligonucleotide
  Sense strand starting at position 2146 of SEQ ID NO: 584840
ugagaaucuugcgucaaag

SEQ ID NO: 593429 - RNA, 19 nt, Artificial Sequence
  Description of Artificial Sequence: Synthetic oligonucleotide
  Antisense strand to SEQ ID NO: 593428
cuuugacgcaagauucuca

SEQ ID NO: 593430 - RNA, 19 nt, Artificial Sequence
  Description of Artificial Sequence: Synthetic oligonucleotide
  Sense strand starting at position 2154 of SEQ ID NO: 584840
uugcgucaaagcguaguua

SEQ ID NO: 593431 - RNA, 19 nt, Artificial Sequence
  Description of Artificial Sequence: Synthetic oligonucleotide
  Antisense strand to SEQ ID NO: 593430
uaacuacgcuuugacgcaa

SEQ ID NO: 593432 - RNA, 19 nt, Artificial Sequence
  Description of Artificial Sequence: Synthetic oligonucleotide
  Sense strand starting at position 2157 of SEQ ID NO: 584840
cgucaaagcguaguuauug

SEQ ID NO: 593433 - RNA, 19 nt, Artificial Sequence
  Description of Artificial Sequence: Synthetic oligonucleotide
  Antisense strand to SEQ ID NO: 593432
caauaacuacgcuuugacg

SEQ ID NO: 593434 - RNA, 19 nt, Artificial Sequence
  Description of Artificial Sequence: Synthetic oligonucleotide
  Sense strand starting at position 2808 of SEQ ID NO: 584840
uggcucuauccagaagucu

SEQ ID NO: 593435 - RNA, 19 nt, Artificial Sequence
  Description of Artificial Sequence: Synthetic oligonucleotide
  Antisense strand to SEQ ID NO: 593434
agacuucuggauagagcca

SEQ ID NO: 593436 - RNA, 19 nt, Artificial Sequence
  Description of Artificial Sequence: Synthetic oligonucleotide
  Sense strand starting at position 2820 of SEQ ID NO: 584840
gaagucuuagcaggcauuu

SEQ ID NO: 593437 - RNA, 19 nt, Artificial Sequence
  Description of Artificial Sequence: Synthetic oligonucleotide
  Antisense strand to SEQ ID NO: 593436
aaaugccugcuaagacuuc

SEQ ID NO: 593438 - RNA, 19 nt, Artificial Sequence
  Description of Artificial Sequence: Synthetic oligonucleotide
  Sense strand starting at position 2873 of SEQ ID NO: 584840
caugcauguuaaguaagua

SEQ ID NO: 593439 - RNA, 19 nt, Artificial Sequence
  Description of Artificial Sequence: Synthetic oligonucleotide
  Antisense strand to SEQ ID NO: 593438
uacuuacuuaacaugcaug

SEQ ID NO: 593440 - RNA, 19 nt, Artificial Sequence
  Description of Artificial Sequence: Synthetic oligonucleotide
  Sense strand starting at position 2912 of SEQ ID NO: 584840
gguucuugauaauugggaa

SEQ ID NO: 593441 - RNA, 19 nt, Artificial Sequence
  Description of Artificial Sequence: Synthetic oligonucleotide
  Antisense strand to SEQ ID NO: 593440
uucccaauuaucaagaacc

SEQ ID NO: 593442 - RNA, 19 nt, Artificial Sequence
  Description of Artificial Sequence: Synthetic oligonucleotide
  Sense strand starting at position 2913 of SEQ ID NO: 584840
guucuugauaauugggaac

SEQ ID NO: 593443 - RNA, 19 nt, Artificial Sequence
  Description of Artificial Sequence: Synthetic oligonucleotide
  Antisense strand to SEQ ID NO: 593442
guucccaauuaucaagaac

SEQ ID NO: 593444 - RNA, 19 nt, Artificial Sequence
  Description of Artificial Sequence: Synthetic oligonucleotide
  Sense strand starting at position 2980 of SEQ ID NO: 584840
ucuucuuggaguuggacua

SEQ ID NO: 593445 - RNA, 19 nt, Artificial Sequence
  Description of Artificial Sequence: Synthetic oligonucleotide
  Antisense strand to SEQ ID NO: 593444
uaguccaacuccaagaaga

SEQ ID NO: 593446 - RNA, 19 nt, Artificial Sequence
  Description of Artificial Sequence: Synthetic oligonucleotide
  Sense strand starting at position 2981 of SEQ ID NO: 584840
cuucuuggaguuggacuaa

SEQ ID NO: 593447 - RNA, 19 nt, Artificial Sequence
  Description of Artificial Sequence: Synthetic oligonucleotide
  Antisense strand to SEQ ID NO: 593446
uuaguccaacuccaagaag

SEQ ID NO: 593448 - RNA, 19 nt, Artificial Sequence
  Description of Artificial Sequence: Synthetic oligonucleotide
  Sense strand starting at position 3029 of SEQ ID NO: 584840
guacauuaguggguaucua

SEQ ID NO: 593449 - RNA, 19 nt, Artificial Sequence
  Description of Artificial Sequence: Synthetic oligonucleotide
  Antisense strand to SEQ ID NO: 593448
uagauacccacuaauguac

SEQ ID NO: 593450 - RNA, 19 nt, Artificial Sequence
  Description of Artificial Sequence: Synthetic oligonucleotide
  Sense strand starting at position 3030 of SEQ ID NO: 584840
uacauuaguggguaucuaa

SEQ ID NO: 593451 - RNA, 19 nt, Artificial Sequence
  Description of Artificial Sequence: Synthetic oligonucleotide
  Antisense strand to SEQ ID NO: 593450
uuagauacccacuaaugua

SEQ ID NO: 593452 - RNA, 19 nt, Artificial Sequence
  Description of Artificial Sequence: Synthetic oligonucleotide
  Sense strand starting at position 3033 of SEQ ID NO: 584840
auuaguggguaucuaaauc

SEQ ID NO: 593453 - RNA, 19 nt, Artificial Sequence
  Description of Artificial Sequence: Synthetic oligonucleotide
  Antisense strand to SEQ ID NO: 593452
gauuuagauacccacuaau

SEQ ID NO: 593454 - RNA, 19 nt, Artificial Sequence
  Description of Artificial Sequence: Synthetic oligonucleotide
  Sense strand starting at position 3128 of SEQ ID NO: 584840
gguaaauauugugucccaa

SEQ ID NO: 593455 - RNA, 19 nt, Artificial Sequence
  Description of Artificial Sequence: Synthetic oligonucleotide
  Antisense strand to SEQ ID NO: 593454
uugggacacaauauuuacc

SEQ ID NO: 593456 - RNA, 19 nt, Artificial Sequence
  Description of Artificial Sequence: Synthetic oligonucleotide
  Sense strand starting at position 3196 of SEQ ID NO: 584840
uacauuucuuaguaagggu

SEQ ID NO: 593457 - RNA, 19 nt, Artificial Sequence
  Description of Artificial Sequence: Synthetic oligonucleotide
  Antisense strand to SEQ ID NO: 593456
acccuuacuaagaaaugua

SEQ ID NO: 593458 - RNA, 19 nt, Artificial Sequence
  Description of Artificial Sequence: Synthetic oligonucleotide
  Sense strand starting at position 3228 of SEQ ID NO: 584840
guuugaaagccacaguuau

SEQ ID NO: 593459 - RNA, 19 nt, Artificial Sequence
  Description of Artificial Sequence: Synthetic oligonucleotide
  Antisense strand to SEQ ID NO: 593458
auaacuguggcuuucaaac

SEQ ID NO: 593460 - RNA, 19 nt, Artificial Sequence
  Description of Artificial Sequence: Synthetic oligonucleotide
  Sense strand starting at position 3303 of SEQ ID NO: 584840
cuauuagccucuguaagaa

SEQ ID NO: 593461 - RNA, 19 nt, Artificial Sequence
  Description of Artificial Sequence: Synthetic oligonucleotide
  Antisense strand to SEQ ID NO: 593460
uucuuacagaggcuaauag

SEQ ID NO: 593462 - RNA, 19 nt, Artificial Sequence
  Description of Artificial Sequence: Synthetic oligonucleotide
  Sense strand starting at position 3337 of SEQ ID NO: 584840
ggugcauugccuucccagu

SEQ ID NO: 593463 - RNA, 19 nt, Artificial Sequence
  Description of Artificial Sequence: Synthetic oligonucleotide
  Antisense strand to SEQ ID NO: 593462
acugggaaggcaaugcacc

SEQ ID NO: 593464 - RNA, 19 nt, Artificial Sequence
  Description of Artificial Sequence: Synthetic oligonucleotide
  Sense strand starting at position 3416 of SEQ ID NO: 584840
gggcgcauagauggauaaa

SEQ ID NO: 593465 - RNA, 19 nt, Artificial Sequence
  Description of Artificial Sequence: Synthetic oligonucleotide
  Antisense strand to SEQ ID NO: 593464
uuuauccaucuaugcgccc

SEQ ID NO: 593466 - RNA, 19 nt, Artificial Sequence
  Description of Artificial Sequence: Synthetic oligonucleotide
  Sense strand starting at position 3417 of SEQ ID NO: 584840
ggcgcauagauggauaaau

SEQ ID NO: 593467 - RNA, 19 nt, Artificial Sequence
  Description of Artificial Sequence: Synthetic oligonucleotide
  Antisense strand to SEQ ID NO: 593466
auuuauccaucuaugcgcc

SEQ ID NO: 593468 - RNA, 19 nt, Artificial Sequence
  Description of Artificial Sequence: Synthetic oligonucleotide
  Sense strand starting at position 3494 of SEQ ID NO: 584840
guagaaucuagaugguaga

SEQ ID NO: 593469 - RNA, 19 nt, Artificial Sequence
  Description of Artificial Sequence: Synthetic oligonucleotide
  Antisense strand to SEQ ID NO: 593468
ucuaccaucuagauucuac

SEQ ID NO: 593470 - RNA, 19 nt, Artificial Sequence
  Description of Artificial Sequence: Synthetic oligonucleotide
  Sense strand starting at position 3833 of SEQ ID NO: 584840
auuguaucacugcagucua

SEQ ID NO: 593471 - RNA, 19 nt, Artificial Sequence
  Description of Artificial Sequence: Synthetic oligonucleotide
  Antisense strand to SEQ ID NO: 593470
uagacugcagugauacaau

SEQ ID NO: 593472 - RNA, 19 nt, Artificial Sequence
  Description of Artificial Sequence: Synthetic oligonucleotide
  Sense strand starting at position 3928 of SEQ ID NO: 584840
ggugaaaggugauuacuug

SEQ ID NO: 593473 - RNA, 19 nt, Artificial Sequence
  Description of Artificial Sequence: Synthetic oligonucleotide
  Antisense strand to SEQ ID NO: 593472
caaguaaucaccuuucacc

SEQ ID NO: 593474 - RNA, 19 nt, Artificial Sequence
  Description of Artificial Sequence: Synthetic oligonucleotide
  Sense strand starting at position 50 of SEQ ID NO: 584841
caggguugcuacuuacuga

SEQ ID NO: 593475 - RNA, 19 nt, Artificial Sequence
  Description of Artificial Sequence: Synthetic oligonucleotide
  Antisense strand to SEQ ID NO: 593474
ucaguaaguagcaacccug

SEQ ID NO: 593476 - RNA, 19 nt, Artificial Sequence
  Description of Artificial Sequence: Synthetic oligonucleotide
  Sense strand starting at position 51 of SEQ ID NO: 584841
aggguugcuacuuacugaa

SEQ ID NO: 593477 - RNA, 19 nt, Artificial Sequence
  Description of Artificial Sequence: Synthetic oligonucleotide
  Antisense strand to SEQ ID NO: 593476
uucaguaaguagcaacccu

SEQ ID NO: 593478 - RNA, 19 nt, Artificial Sequence
  Description of Artificial Sequence: Synthetic oligonucleotide
  Sense strand starting at position 89 of SEQ ID NO: 584841
ggaacugugcuagacuuua

SEQ ID NO: 593479 - RNA, 19 nt, Artificial Sequence
  Description of Artificial Sequence: Synthetic oligonucleotide
  Antisense strand to SEQ ID NO: 593478
uaaagucuagcacaguucc

SEQ ID NO: 593480 - RNA, 19 nt, Artificial Sequence
  Description of Artificial Sequence: Synthetic oligonucleotide
  Sense strand starting at position 94 of SEQ ID NO: 584841
ugugcuagacuuuacagaa

SEQ ID NO: 593481 - RNA, 19 nt, Artificial Sequence
  Description of Artificial Sequence: Synthetic oligonucleotide
  Antisense strand to SEQ ID NO: 593480
uucuguaaagucuagcaca

SEQ ID NO: 593482 - RNA, 19 nt, Artificial Sequence
  Description of Artificial Sequence: Synthetic oligonucleotide
  Sense strand starting at position 149 of SEQ ID NO: 584841
gcauuauuaucaucccagu

SEQ ID NO: 593483 - RNA, 19 nt, Artificial Sequence
  Description of Artificial Sequence: Synthetic oligonucleotide
  Antisense strand to SEQ ID NO: 593482
acugggaugauaauaaugc

SEQ ID NO: 593484 - RNA, 19 nt, Artificial Sequence
  Description of Artificial Sequence: Synthetic oligonucleotide
  Sense strand starting at position 267 of SEQ ID NO: 584841
cacugaagucaggauguuu

SEQ ID NO: 593485 - RNA, 19 nt, Artificial Sequence
  Description of Artificial Sequence: Synthetic oligonucleotide
  Antisense strand to SEQ ID NO: 593484
aaacauccugacuucagug

SEQ ID NO: 593486 - RNA, 19 nt, Artificial Sequence
  Description of Artificial Sequence: Synthetic oligonucleotide
  Sense strand starting at position 332 of SEQ ID NO: 584841
gugagaaugacuuggaagu

SEQ ID NO: 593487 - RNA, 19 nt, Artificial Sequence
  Description of Artificial Sequence: Synthetic oligonucleotide
  Antisense strand to SEQ ID NO: 593486
acuuccaagucauucucac

SEQ ID NO: 593488 - RNA, 19 nt, Artificial Sequence
  Description of Artificial Sequence: Synthetic oligonucleotide
  Sense strand starting at position 357 of SEQ ID NO: 584841
agucccagugaggguuaaa

SEQ ID NO: 593489 - RNA, 19 nt, Artificial Sequence
  Description of Artificial Sequence: Synthetic oligonucleotide
  Antisense strand to SEQ ID NO: 593488
uuuaacccucacugggacu

SEQ ID NO: 593490 - RNA, 19 nt, Artificial Sequence
  Description of Artificial Sequence: Synthetic oligonucleotide
  Sense strand starting at position 408 of SEQ ID NO: 584841
auuuauaagugucacagga

SEQ ID NO: 593491 - RNA, 19 nt, Artificial Sequence
  Description of Artificial Sequence: Synthetic oligonucleotide
  Antisense strand to SEQ ID NO: 593490
uccugugacacuuauaaau

SEQ ID NO: 593492 - RNA, 19 nt, Artificial Sequence
  Description of Artificial Sequence: Synthetic oligonucleotide
  Sense strand starting at position 506 of SEQ ID NO: 584841
gaggauuucuuugagggag

SEQ ID NO: 593493 - RNA, 19 nt, Artificial Sequence
  Description of Artificial Sequence: Synthetic oligonucleotide
  Antisense strand to SEQ ID NO: 593492
cucccucaaagaaauccuc

SEQ ID NO: 593494 - RNA, 19 nt, Artificial Sequence
  Description of Artificial Sequence: Synthetic oligonucleotide
  Sense strand starting at position 1411 of SEQ ID NO: 584841
aauguaauagcaggaguca

SEQ ID NO: 593495 - RNA, 19 nt, Artificial Sequence
  Description of Artificial Sequence: Synthetic oligonucleotide
  Antisense strand to SEQ ID NO: 593494
ugacuccugcuauuacauu

SEQ ID NO: 593496 - RNA, 19 nt, Artificial Sequence
  Description of Artificial Sequence: Synthetic oligonucleotide
  Sense strand starting at position 1661 of SEQ ID NO: 584841
ccgcuucucagcuugcaga

SEQ ID NO: 593497 - RNA, 19 nt, Artificial Sequence
  Description of Artificial Sequence: Synthetic oligonucleotide
  Antisense strand to SEQ ID NO: 593496
ucugcaagcugagaagcgg

SEQ ID NO: 593498 - RNA, 19 nt, Artificial Sequence
  Description of Artificial Sequence: Synthetic oligonucleotide
  Sense strand starting at position 1704 of SEQ ID NO: 584841
cuggccauuucuguuguua

SEQ ID NO: 593499 - RNA, 19 nt, Artificial Sequence
  Description of Artificial Sequence: Synthetic oligonucleotide
  Antisense strand to SEQ ID NO: 593498
uaacaacagaaauggccag

SEQ ID NO: 593500 - RNA, 19 nt, Artificial Sequence
  Description of Artificial Sequence: Synthetic oligonucleotide
  Sense strand starting at position 2127 of SEQ ID NO: 584841
uaaggaugucaucaugcaa

SEQ ID NO: 593501 - RNA, 19 nt, Artificial Sequence
  Description of Artificial Sequence: Synthetic oligonucleotide
  Antisense strand to SEQ ID NO: 593500
uugcaugaugacauccuua

SEQ ID NO: 593502 - RNA, 19 nt, Artificial Sequence
  Description of Artificial Sequence: Synthetic oligonucleotide
  Sense strand starting at position 2160 of SEQ ID NO: 584841
agagcauucugggcuuaau

SEQ ID NO: 593503 - RNA, 19 nt, Artificial Sequence
  Description of Artificial Sequence: Synthetic oligonucleotide
  Antisense strand to SEQ ID NO: 593502
auuaagcccagaaugcucu

SEQ ID NO: 593504 - RNA, 19 nt, Artificial Sequence
  Description of Artificial Sequence: Synthetic oligonucleotide
  Sense strand starting at position 2163 of SEQ ID NO: 584841
gcauucugggcuuaauucu

SEQ ID NO: 593505 - RNA, 19 nt, Artificial Sequence
  Description of Artificial Sequence: Synthetic oligonucleotide
  Antisense strand to SEQ ID NO: 593504
agaauuaagcccagaaugc

SEQ ID NO: 593506 - RNA, 19 nt, Artificial Sequence
  Description of Artificial Sequence: Synthetic oligonucleotide
  Sense strand starting at position 2924 of SEQ ID NO: 584841
agaucauuauuggagauua

SEQ ID NO: 593507 - RNA, 19 nt, Artificial Sequence
  Description of Artificial Sequence: Synthetic oligonucleotide
  Antisense strand to SEQ ID NO: 593506
uaaucuccaauaaugaucu

SEQ ID NO: 593508 - RNA, 19 nt, Artificial Sequence
  Description of Artificial Sequence: Synthetic oligonucleotide
  Sense strand starting at position 2934 of SEQ ID NO: 584841
uggagauuaucugugacuu

SEQ ID NO: 593509 - RNA, 19 nt, Artificial Sequence
  Description of Artificial Sequence: Synthetic oligonucleotide
  Antisense strand to SEQ ID NO: 593508
aagucacagauaaucucca

SEQ ID NO: 593510 - RNA, 19 nt, Artificial Sequence
  Description of Artificial Sequence: Synthetic oligonucleotide
  Sense strand starting at position 2935 of SEQ ID NO: 584841
ggagauuaucugugacuuu

SEQ ID NO: 593511 - RNA, 19 nt, Artificial Sequence
  Description of Artificial Sequence: Synthetic oligonucleotide
  Antisense strand to SEQ ID NO: 593510
aaagucacagauaaucucc

SEQ ID NO: 593512 - RNA, 19 nt, Artificial Sequence
  Description of Artificial Sequence: Synthetic oligonucleotide
  Sense strand starting at position 3047 of SEQ ID NO: 584841
gcuccugagccuuaaacca

SEQ ID NO: 593513 - RNA, 19 nt, Artificial Sequence
  Description of Artificial Sequence: Synthetic oligonucleotide
  Antisense strand to SEQ ID NO: 593512
ugguuuaaggcucaggagc

SEQ ID NO: 593514 - RNA, 19 nt, Artificial Sequence
  Description of Artificial Sequence: Synthetic oligonucleotide
  Sense strand starting at position 3186 of SEQ ID NO: 584841
ccucaucucuugcugaaga

SEQ ID NO: 593515 - RNA, 19 nt, Artificial Sequence
  Description of Artificial Sequence: Synthetic oligonucleotide
  Antisense strand to SEQ ID NO: 593514
ucuucagcaagagaugagg

SEQ ID NO: 593516 - RNA, 19 nt, Artificial Sequence
  Description of Artificial Sequence: Synthetic oligonucleotide
  Sense strand starting at position 3188 of SEQ ID NO: 584841
ucaucucuugcugaagaua

SEQ ID NO: 593517 - RNA, 19 nt, Artificial Sequence
  Description of Artificial Sequence: Synthetic oligonucleotide
  Antisense strand to SEQ ID NO: 593516
uaucuucagcaagagauga

SEQ ID NO: 593518 - RNA, 19 nt, Artificial Sequence
  Description of Artificial Sequence: Synthetic oligonucleotide
  Sense strand starting at position 3191 of SEQ ID NO: 584841
ucucuugcugaagauauua

SEQ ID NO: 593519 - RNA, 19 nt, Artificial Sequence
  Description of Artificial Sequence: Synthetic oligonucleotide
  Antisense strand to SEQ ID NO: 593518
uaauaucuucagcaagaga

SEQ ID NO: 593520 - RNA, 19 nt, Artificial Sequence
  Description of Artificial Sequence: Synthetic oligonucleotide
  Sense strand starting at position 3653 of SEQ ID NO: 584841
accaauaguugagaaauaa

SEQ ID NO: 593521 - RNA, 19 nt, Artificial Sequence
  Description of Artificial Sequence: Synthetic oligonucleotide
  Antisense strand to SEQ ID NO: 593520
uuauuucucaacuauuggu

SEQ ID NO: 593522 - RNA, 19 nt, Artificial Sequence
  Description of Artificial Sequence: Synthetic oligonucleotide
  Sense strand starting at position 3662 of SEQ ID NO: 584841
ugagaaauaagcugguuau

SEQ ID NO: 593523 - RNA, 19 nt, Artificial Sequence
  Description of Artificial Sequence: Synthetic oligonucleotide
  Antisense strand to SEQ ID NO: 593522
auaaccagcuuauuucuca

SEQ ID NO: 593524 - RNA, 19 nt, Artificial Sequence
  Description of Artificial Sequence: Synthetic oligonucleotide
  Sense strand starting at position 3672 of SEQ ID NO: 584841
gcugguuauuuggucauca

SEQ ID NO: 593525 - RNA, 19 nt, Artificial Sequence
  Description of Artificial Sequence: Synthetic oligonucleotide
  Antisense strand to SEQ ID NO: 593524
ugaugaccaaauaaccagc

SEQ ID NO: 593526 - RNA, 19 nt, Artificial Sequence
  Description of Artificial Sequence: Synthetic oligonucleotide
  Sense strand starting at position 3725 of SEQ ID NO: 584841
ggcugucauuugucccuuu

SEQ ID NO: 593527 - RNA, 19 nt, Artificial Sequence
  Description of Artificial Sequence: Synthetic oligonucleotide
  Antisense strand to SEQ ID NO: 593526
aaagggacaaaugacagcc

SEQ ID NO: 593528 - RNA, 19 nt, Artificial Sequence
  Description of Artificial Sequence: Synthetic oligonucleotide
  Sense strand starting at position 3726 of SEQ ID NO: 584841
gcugucauuugucccuuua

SEQ ID NO: 593529 - RNA, 19 nt, Artificial Sequence
  Description of Artificial Sequence: Synthetic oligonucleotide
  Antisense strand to SEQ ID NO: 593528
uaaagggacaaaugacagc

SEQ ID NO: 593530 - RNA, 19 nt, Artificial Sequence
  Description of Artificial Sequence: Synthetic oligonucleotide
  Sense strand starting at position 3728 of SEQ ID NO: 584841
ugucauuugucccuuuaca

SEQ ID NO: 593531 - RNA, 19 nt, Artificial Sequence
  Description of Artificial Sequence: Synthetic oligonucleotide
  Antisense strand to SEQ ID NO: 593530
uguaaagggacaaaugaca

SEQ ID NO: 593532 - RNA, 19 nt, Artificial Sequence
  Description of Artificial Sequence: Synthetic oligonucleotide
  Sense strand starting at position 3750 of SEQ ID NO: 584841
cugagcuaccauugucuga

SEQ ID NO: 593533 - RNA, 19 nt, Artificial Sequence
  Description of Artificial Sequence: Synthetic oligonucleotide
  Antisense strand to SEQ ID NO: 593532
ucagacaaugguagcucag

SEQ ID NO: 593534 - RNA, 19 nt, Artificial Sequence
  Description of Artificial Sequence: Synthetic oligonucleotide
  Sense strand starting at position 3752 of SEQ ID NO: 584841
gagcuaccauugucugaag

SEQ ID NO: 593535 - RNA, 19 nt, Artificial Sequence
  Description of Artificial Sequence: Synthetic oligonucleotide
  Antisense strand to SEQ ID NO: 593534
cuucagacaaugguagcuc

SEQ ID NO: 593536 - RNA, 19 nt, Artificial Sequence
  Description of Artificial Sequence: Synthetic oligonucleotide
  Sense strand starting at position 3754 of SEQ ID NO: 584841
gcuaccauugucugaagaa

SEQ ID NO: 593537 - RNA, 19 nt, Artificial Sequence
  Description of Artificial Sequence: Synthetic oligonucleotide
  Antisense strand to SEQ ID NO: 593536
uucuucagacaaugguagc

SEQ ID NO: 593538 - RNA, 19 nt, Artificial Sequence
  Description of Artificial Sequence: Synthetic oligonucleotide
  Sense strand starting at position 3815 of SEQ ID NO: 584841
cuguuuagauuaguagcua

SEQ ID NO: 593539 - RNA, 19 nt, Artificial Sequence
  Description of Artificial Sequence: Synthetic oligonucleotide
  Antisense strand to SEQ ID NO: 593538
uagcuacuaaucuaaacag

SEQ ID NO: 593540 - RNA, 19 nt, Artificial Sequence
  Description of Artificial Sequence: Synthetic oligonucleotide
  Sense strand starting at position 3819 of SEQ ID NO: 584841
uuagauuaguagcuacuuu

SEQ ID NO: 593541 - RNA, 19 nt, Artificial Sequence
  Description of Artificial Sequence: Synthetic oligonucleotide
  Antisense strand to SEQ ID NO: 593540
aaaguagcuacuaaucuaa

SEQ ID NO: 593542 - RNA, 19 nt, Artificial Sequence
  Description of Artificial Sequence: Synthetic oligonucleotide
  Sense strand starting at position 3830 of SEQ ID NO: 584841
gcuacuuuguuucuugaca

SEQ ID NO: 593543 - RNA, 19 nt, Artificial Sequence
  Description of Artificial Sequence: Synthetic oligonucleotide
  Antisense strand to SEQ ID NO: 593542
ugucaagaaacaaaguagc

SEQ ID NO: 593544 - RNA, 19 nt, Artificial Sequence
  Description of Artificial Sequence: Synthetic oligonucleotide
  Sense strand starting at position 3849 of SEQ ID NO: 584841
gauuguuugcucguagcca

SEQ ID NO: 593545 - RNA, 19 nt, Artificial Sequence
  Description of Artificial Sequence: Synthetic oligonucleotide
  Antisense strand to SEQ ID NO: 593544
uggcuacgagcaaacaauc

SEQ ID NO: 593546 - RNA, 19 nt, Artificial Sequence
  Description of Artificial Sequence: Synthetic oligonucleotide
  Sense strand starting at position 3880 of SEQ ID NO: 584841
gaagguaggcucuggaguu

SEQ ID NO: 593547 - RNA, 19 nt, Artificial Sequence
  Description of Artificial Sequence: Synthetic oligonucleotide
  Antisense strand to SEQ ID NO: 593546
aacuccagagccuaccuuc

SEQ ID NO: 593548 - RNA, 19 nt, Artificial Sequence
  Description of Artificial Sequence: Synthetic oligonucleotide
  Sense strand starting at position 3893 of SEQ ID NO: 584841
ggaguuagauugccuggau

SEQ ID NO: 593549 - RNA, 19 nt, Artificial Sequence
  Description of Artificial Sequence: Synthetic oligonucleotide
  Antisense strand to SEQ ID NO: 593548
auccaggcaaucuaacucc

SEQ ID NO: 593550 - RNA, 19 nt, Artificial Sequence
  Description of Artificial Sequence: Synthetic oligonucleotide
  Sense strand starting at position 3894 of SEQ ID NO: 584841
gaguuagauugccuggauu

SEQ ID NO: 593551 - RNA, 19 nt, Artificial Sequence
  Description of Artificial Sequence: Synthetic oligonucleotide
  Antisense strand to SEQ ID NO: 593550
aauccaggcaaucuaacuc

SEQ ID NO: 593552 - RNA, 19 nt, Artificial Sequence
  Description of Artificial Sequence: Synthetic oligonucleotide
  Sense strand starting at position 3954 of SEQ ID NO: 584841
cguauucuuggacagguua

SEQ ID NO: 593553 - RNA, 19 nt, Artificial Sequence
  Description of Artificial Sequence: Synthetic oligonucleotide
  Antisense strand to SEQ ID NO: 593552
uaaccuguccaagaauacg

SEQ ID NO: 593554 - RNA, 19 nt, Artificial Sequence
  Description of Artificial Sequence: Synthetic oligonucleotide
  Sense strand starting at position 130 of SEQ ID NO: 584842
aggauuauauaccaagaaa

SEQ ID NO: 593555 - RNA, 19 nt, Artificial Sequence
  Description of Artificial Sequence: Synthetic oligonucleotide
  Antisense strand to SEQ ID NO: 593554
uuucuugguauauaauccu

SEQ ID NO: 593556 - RNA, 19 nt, Artificial Sequence
  Description of Artificial Sequence: Synthetic oligonucleotide
  Sense strand starting at position 268 of SEQ ID NO: 584842
ccacuaagguucuugcuca

SEQ ID NO: 593557 - RNA, 19 nt, Artificial Sequence
  Description of Artificial Sequence: Synthetic oligonucleotide
  Antisense strand to SEQ ID NO: 593556
ugagcaagaaccuuagugg

SEQ ID NO: 593558 - RNA, 19 nt, Artificial Sequence
  Description of Artificial Sequence: Synthetic oligonucleotide
  Sense strand starting at position 331 of SEQ ID NO: 584842
cccuacguggucugaaaca

SEQ ID NO: 593559 - RNA, 19 nt, Artificial Sequence
  Description of Artificial Sequence: Synthetic oligonucleotide
  Antisense strand to SEQ ID NO: 593558
uguuucagaccacguaggg

SEQ ID NO: 593560 - RNA, 19 nt, Artificial Sequence
  Description of Artificial Sequence: Synthetic oligonucleotide
  Sense strand starting at position 1954 of SEQ ID NO: 584842
gccacuguaguagaaauga

SEQ ID NO: 593561 - RNA, 19 nt, Artificial Sequence
  Description of Artificial Sequence: Synthetic oligonucleotide
  Antisense strand to SEQ ID NO: 593560
ucauuucuacuacaguggc

SEQ ID NO: 593562 - RNA, 19 nt, Artificial Sequence
  Description of Artificial Sequence: Synthetic oligonucleotide
  Sense strand starting at position 1965 of SEQ ID NO: 584842
agaaaugaugucugcggua

SEQ ID NO: 593563 - RNA, 19 nt, Artificial Sequence
  Description of Artificial Sequence: Synthetic oligonucleotide
  Antisense strand to SEQ ID NO: 593562
uaccgcagacaucauuucu

SEQ ID NO: 593564 - RNA, 19 nt, Artificial Sequence
  Description of Artificial Sequence: Synthetic oligonucleotide
  Sense strand starting at position 2116 of SEQ ID NO: 584842
ccaguauguaaauguguaa

SEQ ID NO: 593565 - RNA, 19 nt, Artificial Sequence
  Description of Artificial Sequence: Synthetic oligonucleotide
  Antisense strand to SEQ ID NO: 593564
uuacacauuuacauacugg

SEQ ID NO: 593566 - RNA, 19 nt, Artificial Sequence
  Description of Artificial Sequence: Synthetic oligonucleotide
  Sense strand starting at position 2119 of SEQ ID NO: 584842
guauguaaauguguaauag

SEQ ID NO: 593567 - RNA, 19 nt, Artificial Sequence
  Description of Artificial Sequence: Synthetic oligonucleotide
  Antisense strand to SEQ ID NO: 593566
cuauuacacauuuacauac

SEQ ID NO: 593568 - RNA, 19 nt, Artificial Sequence
  Description of Artificial Sequence: Synthetic oligonucleotide
  Sense strand starting at position 2649 of SEQ ID NO: 584842
gagggcucacucugaucau

SEQ ID NO: 593569 - RNA, 19 nt, Artificial Sequence
  Description of Artificial Sequence: Synthetic oligonucleotide
  Antisense strand to SEQ ID NO: 593568
augaucagagugagcccuc

SEQ ID NO: 593570 - RNA, 19 nt, Artificial Sequence
  Description of Artificial Sequence: Synthetic oligonucleotide
  Sense strand starting at position 2866 of SEQ ID NO: 584842
ggaaaucggcuuugauaug

SEQ ID NO: 593571 - RNA, 19 nt, Artificial Sequence
  Description of Artificial Sequence: Synthetic oligonucleotide
  Antisense strand to SEQ ID NO: 593570
cauaucaaagccgauuucc

SEQ ID NO: 593572 - RNA, 19 nt, Artificial Sequence
  Description of Artificial Sequence: Synthetic oligonucleotide
  Sense strand starting at position 2871 of SEQ ID NO: 584842
ucggcuuugauauggaacu

SEQ ID NO: 593573 - RNA, 19 nt, Artificial Sequence
  Description of Artificial Sequence: Synthetic oligonucleotide
  Antisense strand to SEQ ID NO: 593572
aguuccauaucaaagccga

SEQ ID NO: 593574 - RNA, 19 nt, Artificial Sequence
  Description of Artificial Sequence: Synthetic oligonucleotide
  Sense strand starting at position 2894 of SEQ ID NO: 584842
cgcucuagccuggaaagga

SEQ ID NO: 593575 - RNA, 19 nt, Artificial Sequence
  Description of Artificial Sequence: Synthetic oligonucleotide
  Antisense strand to SEQ ID NO: 593574
uccuuuccaggcuagagcg

SEQ ID NO: 593576 - RNA, 19 nt, Artificial Sequence
  Description of Artificial Sequence: Synthetic oligonucleotide
  Sense strand starting at position 2953 of SEQ ID NO: 584842
uuuaaucggaaaugaggua

SEQ ID NO: 593577 - RNA, 19 nt, Artificial Sequence
  Description of Artificial Sequence: Synthetic oligonucleotide
  Antisense strand to SEQ ID NO: 593576
uaccucauuuccgauuaaa

SEQ ID NO: 593578 - RNA, 19 nt, Artificial Sequence
  Description of Artificial Sequence: Synthetic oligonucleotide
  Sense strand starting at position 2965 of SEQ ID NO: 584842
ugagguaaccaguguagga

SEQ ID NO: 593579 - RNA, 19 nt, Artificial Sequence
  Description of Artificial Sequence: Synthetic oligonucleotide
  Antisense strand to SEQ ID NO: 593578
uccuacacugguuaccuca

SEQ ID NO: 593580 - RNA, 19 nt, Artificial Sequence
  Description of Artificial Sequence: Synthetic oligonucleotide
  Sense strand starting at position 3010 of SEQ ID NO: 584842
auggcaguucucgagaauc

SEQ ID NO: 593581 - RNA, 19 nt, Artificial Sequence
  Description of Artificial Sequence: Synthetic oligonucleotide
  Antisense strand to SEQ ID NO: 593580
gauucucgagaacugccau

SEQ ID NO: 593582 - RNA, 19 nt, Artificial Sequence
  Description of Artificial Sequence: Synthetic oligonucleotide
  Sense strand starting at position 3012 of SEQ ID NO: 584842
ggcaguucucgagaaucga

SEQ ID NO: 593583 - RNA, 19 nt, Artificial Sequence
  Description of Artificial Sequence: Synthetic oligonucleotide
  Antisense strand to SEQ ID NO: 593582
ucgauucucgagaacugcc

SEQ ID NO: 593584 - RNA, 19 nt, Artificial Sequence
  Description of Artificial Sequence: Synthetic oligonucleotide
  Sense strand starting at position 3128 of SEQ ID NO: 584842
gaaggaaucuucuucggau

SEQ ID NO: 593585 - RNA, 19 nt, Artificial Sequence
  Description of Artificial Sequence: Synthetic oligonucleotide
  Antisense strand to SEQ ID NO: 593584
auccgaagaagauuccuuc

SEQ ID NO: 593586 - RNA, 19 nt, Artificial Sequence
  Description of Artificial Sequence: Synthetic oligonucleotide
  Sense strand starting at position 3129 of SEQ ID NO: 584842
aaggaaucuucuucggaug

SEQ ID NO: 593587 - RNA, 19 nt, Artificial Sequence
  Description of Artificial Sequence: Synthetic oligonucleotide
  Antisense strand to SEQ ID NO: 593586
cauccgaagaagauuccuu

SEQ ID NO: 593588 - RNA, 19 nt, Artificial Sequence
  Description of Artificial Sequence: Synthetic oligonucleotide
  Sense strand starting at position 3221 of SEQ ID NO: 584842
guucuuguugcagaugauu

SEQ ID NO: 593589 - RNA, 19 nt, Artificial Sequence
  Description of Artificial Sequence: Synthetic oligonucleotide
  Antisense strand to SEQ ID NO: 593588
aaucaucugcaacaagaac

SEQ ID NO: 593590 - RNA, 19 nt, Artificial Sequence
  Description of Artificial Sequence: Synthetic oligonucleotide
  Sense strand starting at position 3282 of SEQ ID NO: 584842
ggugcuuagaacuaagugu

SEQ ID NO: 593591 - RNA, 19 nt, Artificial Sequence
  Description of Artificial Sequence: Synthetic oligonucleotide
  Antisense strand to SEQ ID NO: 593590
acacuuaguucuaagcacc

SEQ ID NO: 593592 - RNA, 19 nt, Artificial Sequence
  Description of Artificial Sequence: Synthetic oligonucleotide
  Sense strand starting at position 3289 of SEQ ID NO: 584842
agaacuaagugucuggaaa

SEQ ID NO: 593593 - RNA, 19 nt, Artificial Sequence
  Description of Artificial Sequence: Synthetic oligonucleotide
  Antisense strand to SEQ ID NO: 593592
uuuccagacacuuaguucu

SEQ ID NO: 593594 - RNA, 19 nt, Artificial Sequence
  Description of Artificial Sequence: Synthetic oligonucleotide
  Sense strand starting at position 3290 of SEQ ID NO: 584842
gaacuaagugucuggaaac

SEQ ID NO: 593595 - RNA, 19 nt, Artificial Sequence
  Description of Artificial Sequence: Synthetic oligonucleotide
  Antisense strand to SEQ ID NO: 593594
guuuccagacacuuaguuc

SEQ ID NO: 593596 - RNA, 19 nt, Artificial Sequence
  Description of Artificial Sequence: Synthetic oligonucleotide
  Sense strand starting at position 3310 of SEQ ID NO: 584842
ugauccuuucgcguaaguu

SEQ ID NO: 593597 - RNA, 19 nt, Artificial Sequence
  Description of Artificial Sequence: Synthetic oligonucleotide
  Antisense strand to SEQ ID NO: 593596
aacuuacgcgaaaggauca

SEQ ID NO: 593598 - RNA, 19 nt, Artificial Sequence
  Description of Artificial Sequence: Synthetic oligonucleotide
  Sense strand starting at position 3322 of SEQ ID NO: 584842
guaaguuucuuucugaaag

SEQ ID NO: 593599 - RNA, 19 nt, Artificial Sequence
  Description of Artificial Sequence: Synthetic oligonucleotide
  Antisense strand to SEQ ID NO: 593598
cuuucagaaagaaacuuac

SEQ ID NO: 593600 - RNA, 19 nt, Artificial Sequence
  Description of Artificial Sequence: Synthetic oligonucleotide
  Sense strand starting at position 3340 of SEQ ID NO: 584842
gccaccaaucuugacugua

SEQ ID NO: 593601 - RNA, 19 nt, Artificial Sequence
  Description of Artificial Sequence: Synthetic oligonucleotide
  Antisense strand to SEQ ID NO: 593600
uacagucaagauugguggc

SEQ ID NO: 593602 - RNA, 19 nt, Artificial Sequence
  Description of Artificial Sequence: Synthetic oligonucleotide
  Sense strand starting at position 3357 of SEQ ID NO: 584842
uaagcuguauuugagagau

SEQ ID NO: 593603 - RNA, 19 nt, Artificial Sequence
  Description of Artificial Sequence: Synthetic oligonucleotide
  Antisense strand to SEQ ID NO: 593602
aucucucaaauacagcuua

SEQ ID NO: 593604 - RNA, 19 nt, Artificial Sequence
  Description of Artificial Sequence: Synthetic oligonucleotide
  Sense strand starting at position 3359 of SEQ ID NO: 584842
agcuguauuugagagaucu

SEQ ID NO: 593605 - RNA, 19 nt, Artificial Sequence
  Description of Artificial Sequence: Synthetic oligonucleotide
  Antisense strand to SEQ ID NO: 593604
agaucucucaaauacagcu

SEQ ID NO: 593606 - RNA, 19 nt, Artificial Sequence
  Description of Artificial Sequence: Synthetic oligonucleotide
  Sense strand starting at position 3381 of SEQ ID NO: 584842
ggcugaguuuacuuaugac

SEQ ID NO: 593607 - RNA, 19 nt, Artificial Sequence
  Description of Artificial Sequence: Synthetic oligonucleotide
  Antisense strand to SEQ ID NO: 593606
gucauaaguaaacucagcc

SEQ ID NO: 593608 - RNA, 19 nt, Artificial Sequence
  Description of Artificial Sequence: Synthetic oligonucleotide
  Sense strand starting at position 3403 of SEQ ID NO: 584842
acgguuagucaccaacuga

SEQ ID NO: 593609 - RNA, 19 nt, Artificial Sequence
  Description of Artificial Sequence: Synthetic oligonucleotide
  Antisense strand to SEQ ID NO: 593608
ucaguuggugacuaaccgu

SEQ ID NO: 593610 - RNA, 19 nt, Artificial Sequence
  Description of Artificial Sequence: Synthetic oligonucleotide
  Sense strand starting at position 3464 of SEQ ID NO: 584842
acaacucuggccugcaaga

SEQ ID NO: 593611 - RNA, 19 nt, Artificial Sequence
  Description of Artificial Sequence: Synthetic oligonucleotide
  Antisense strand to SEQ ID NO: 593610
ucuugcaggccagaguugu

SEQ ID NO: 593612 - RNA, 19 nt, Artificial Sequence
  Description of Artificial Sequence: Synthetic oligonucleotide
  Sense strand starting at position 3684 of SEQ ID NO: 584842
guuggucuaaagugacauu

SEQ ID NO: 593613 - RNA, 19 nt, Artificial Sequence
  Description of Artificial Sequence: Synthetic oligonucleotide
  Antisense strand to SEQ ID NO: 593612
aaugucacuuuagaccaac

SEQ ID NO: 593614 - RNA, 19 nt, Artificial Sequence
  Description of Artificial Sequence: Synthetic oligonucleotide
  Sense strand starting at position 3696 of SEQ ID NO: 584842
ugacauuguuggucucauu

SEQ ID NO: 593615 - RNA, 19 nt, Artificial Sequence
  Description of Artificial Sequence: Synthetic oligonucleotide
  Antisense strand to SEQ ID NO: 593614
aaugagaccaacaauguca

SEQ ID NO: 593616 - RNA, 19 nt, Artificial Sequence
  Description of Artificial Sequence: Synthetic oligonucleotide
  Sense strand starting at position 3718 of SEQ ID NO: 584842
gccucuaguggacaguuaa

SEQ ID NO: 593617 - RNA, 19 nt, Artificial Sequence
  Description of Artificial Sequence: Synthetic oligonucleotide
  Antisense strand to SEQ ID NO: 593616
uuaacuguccacuagaggc

SEQ ID NO: 593618 - RNA, 19 nt, Artificial Sequence
  Description of Artificial Sequence: Synthetic oligonucleotide
  Sense strand starting at position 3776 of SEQ ID NO: 584842
guugacaagcuuugucaag

SEQ ID NO: 593619 - RNA, 19 nt, Artificial Sequence
  Description of Artificial Sequence: Synthetic oligonucleotide
  Antisense strand to SEQ ID NO: 593618
cuugacaaagcuugucaac

SEQ ID NO: 593620 - RNA, 19 nt, Artificial Sequence
  Description of Artificial Sequence: Synthetic oligonucleotide
  Sense strand starting at position 3778 of SEQ ID NO: 584842
ugacaagcuuugucaaggu

SEQ ID NO: 593621 - RNA, 19 nt, Artificial Sequence
  Description of Artificial Sequence: Synthetic oligonucleotide
  Antisense strand to SEQ ID NO: 593620
accuugacaaagcuuguca

SEQ ID NO: 593622 - RNA, 19 nt, Artificial Sequence
  Description of Artificial Sequence: Synthetic oligonucleotide
  Sense strand starting at position 3782 of SEQ ID NO: 584842
aagcuuugucaaggugaag

SEQ ID NO: 593623 - RNA, 19 nt, Artificial Sequence
  Description of Artificial Sequence: Synthetic oligonucleotide
  Antisense strand to SEQ ID NO: 593622
cuucaccuugacaaagcuu

SEQ ID NO: 593624 - RNA, 19 nt, Artificial Sequence
  Description of Artificial Sequence: Synthetic oligonucleotide
  Sense strand starting at position 3905 of SEQ ID NO: 584842
gcuuguuggcuuuauauag

SEQ ID NO: 593625 - RNA, 19 nt, Artificial Sequence
  Description of Artificial Sequence: Synthetic oligonucleotide
  Antisense strand to SEQ ID NO: 593624
cuauauaaagccaacaagc

SEQ ID NO: 593626 - RNA, 19 nt, Artificial Sequence
  Description of Artificial Sequence: Synthetic oligonucleotide
  Sense strand starting at position 3933 of SEQ ID NO: 584842
augcuuugugcugcaggua

SEQ ID NO: 593627 - RNA, 19 nt, Artificial Sequence
  Description of Artificial Sequence: Synthetic oligonucleotide
  Antisense strand to SEQ ID NO: 593626
uaccugcagcacaaagcau

SEQ ID NO: 593628 - RNA, 19 nt, Artificial Sequence
  Description of Artificial Sequence: Synthetic oligonucleotide
  Sense strand starting at position 3949 of SEQ ID NO: 584842
guauuauuauuacuggacu

SEQ ID NO: 593629 - RNA, 19 nt, Artificial Sequence
  Description of Artificial Sequence: Synthetic oligonucleotide
  Antisense strand to SEQ ID NO: 593628
aguccaguaauaauaauac

SEQ ID NO: 593630 - RNA, 19 nt, Artificial Sequence
  Description of Artificial Sequence: Synthetic oligonucleotide
  Sense strand starting at position 3955 of SEQ ID NO: 584842
uuauuacuggacugugaau

SEQ ID NO: 593631 - RNA, 19 nt, Artificial Sequence
  Description of Artificial Sequence: Synthetic oligonucleotide
  Antisense strand to SEQ ID NO: 593630
auucacaguccaguaauaa

SEQ ID NO: 593632 - RNA, 19 nt, Artificial Sequence
  Description of Artificial Sequence: Synthetic oligonucleotide
  Sense strand starting at position 3957 of SEQ ID NO: 584842
auuacuggacugugaauaa

SEQ ID NO: 593633 - RNA, 19 nt, Artificial Sequence
  Description of Artificial Sequence: Synthetic oligonucleotide
  Antisense strand to SEQ ID NO: 593632
uuauucacaguccaguaau

SEQ ID NO: 593634 - RNA, 19 nt, Artificial Sequence
  Description of Artificial Sequence: Synthetic oligonucleotide
  Sense strand starting at position 30 of SEQ ID NO: 584843
uggauaaugugucuggauc

SEQ ID NO: 593635 - RNA, 19 nt, Artificial Sequence
  Description of Artificial Sequence: Synthetic oligonucleotide
  Antisense strand to SEQ ID NO: 593634
gauccagacacauuaucca

SEQ ID NO: 593636 - RNA, 19 nt, Artificial Sequence
  Description of Artificial Sequence: Synthetic oligonucleotide
  Sense strand starting at position 31 of SEQ ID NO: 584843
ggauaaugugucuggauca

SEQ ID NO: 593637 - RNA, 19 nt, Artificial Sequence
  Description of Artificial Sequence: Synthetic oligonucleotide
  Antisense strand to SEQ ID NO: 593636
ugauccagacacauuaucc

SEQ ID NO: 593638 - RNA, 19 nt, Artificial Sequence
  Description of Artificial Sequence: Synthetic oligonucleotide
  Sense strand starting at position 32 of SEQ ID NO: 584843
gauaaugugucuggaucau

SEQ ID NO: 593639 - RNA, 19 nt, Artificial Sequence
  Description of Artificial Sequence: Synthetic oligonucleotide
  Antisense strand to SEQ ID NO: 593638
augauccagacacauuauc

SEQ ID NO: 593640 - RNA, 19 nt, Artificial Sequence
  Description of Artificial Sequence: Synthetic oligonucleotide
  Sense strand starting at position 176 of SEQ ID NO: 584843
gggccuuccuccucagaga

SEQ ID NO: 593641 - RNA, 19 nt, Artificial Sequence
  Description of Artificial Sequence: Synthetic oligonucleotide
  Antisense strand to SEQ ID NO: 593640
ucucugaggaggaaggccc

SEQ ID NO: 593642 - RNA, 19 nt, Artificial Sequence
  Description of Artificial Sequence: Synthetic oligonucleotide
  Sense strand starting at position 206 of SEQ ID NO: 584843
cucccaugucccuggagau

SEQ ID NO: 593643 - RNA, 19 nt, Artificial Sequence
  Description of Artificial Sequence: Synthetic oligonucleotide
  Antisense strand to SEQ ID NO: 593642
aucuccagggacaugggag

SEQ ID NO: 593644 - RNA, 19 nt, Artificial Sequence
  Description of Artificial Sequence: Synthetic oligonucleotide
  Sense strand starting at position 2217 of SEQ ID NO: 584843
cuuuguugcuucggucaca

SEQ ID NO: 593645 - RNA, 19 nt, Artificial Sequence
  Description of Artificial Sequence: Synthetic oligonucleotide
  Antisense strand to SEQ ID NO: 593644
ugugaccgaagcaacaaag

SEQ ID NO: 593646 - RNA, 19 nt, Artificial Sequence
  Description of Artificial Sequence: Synthetic oligonucleotide
  Sense strand starting at position 2393 of SEQ ID NO: 584843
ggguguuggucucuaaacu

SEQ ID NO: 593647 - RNA, 19 nt, Artificial Sequence
  Description of Artificial Sequence: Synthetic oligonucleotide
  Antisense strand to SEQ ID NO: 593646
aguuuagagaccaacaccc

SEQ ID NO: 593648 - RNA, 19 nt, Artificial Sequence
  Description of Artificial Sequence: Synthetic oligonucleotide
  Sense strand starting at position 2394 of SEQ ID NO: 584843
gguguuggucucuaaacug

SEQ ID NO: 593649 - RNA, 19 nt, Artificial Sequence
  Description of Artificial Sequence: Synthetic oligonucleotide
  Antisense strand to SEQ ID NO: 593648
caguuuagagaccaacacc

SEQ ID NO: 593650 - RNA, 19 nt, Artificial Sequence
  Description of Artificial Sequence: Synthetic oligonucleotide
  Sense strand starting at position 2472 of SEQ ID NO: 584843
ggacaucacuagcuacaua

SEQ ID NO: 593651 - RNA, 19 nt, Artificial Sequence
  Description of Artificial Sequence: Synthetic oligonucleotide
  Antisense strand to SEQ ID NO: 593650
uauguagcuagugaugucc

SEQ ID NO: 593652 - RNA, 19 nt, Artificial Sequence
  Description of Artificial Sequence: Synthetic oligonucleotide
  Sense strand starting at position 2765 of SEQ ID NO: 584843
agaagagucacaggucaug

SEQ ID NO: 593653 - RNA, 19 nt, Artificial Sequence
  Description of Artificial Sequence: Synthetic oligonucleotide
  Antisense strand to SEQ ID NO: 593652
caugaccugugacucuucu

SEQ ID NO: 593654 - RNA, 19 nt, Artificial Sequence
  Description of Artificial Sequence: Synthetic oligonucleotide
  Sense strand starting at position 3013 of SEQ ID NO: 584843
augcccaauucuguuagga

SEQ ID NO: 593655 - RNA, 19 nt, Artificial Sequence
  Description of Artificial Sequence: Synthetic oligonucleotide
  Antisense strand to SEQ ID NO: 593654
uccuaacagaauugggcau

SEQ ID NO: 593656 - RNA, 19 nt, Artificial Sequence
  Description of Artificial Sequence: Synthetic oligonucleotide
  Sense strand starting at position 3359 of SEQ ID NO: 584843
ggguuucggaauuaguguu

SEQ ID NO: 593657 - RNA, 19 nt, Artificial Sequence
  Description of Artificial Sequence: Synthetic oligonucleotide
  Antisense strand to SEQ ID NO: 593656
aacacuaauuccgaaaccc

SEQ ID NO: 593658 - RNA, 19 nt, Artificial Sequence
  Description of Artificial Sequence: Synthetic oligonucleotide
  Sense strand starting at position 3365 of SEQ ID NO: 584843
cggaauuaguguugaaucu

SEQ ID NO: 593659 - RNA, 19 nt, Artificial Sequence
  Description of Artificial Sequence: Synthetic oligonucleotide
  Antisense strand to SEQ ID NO: 593658
agauucaacacuaauuccg

SEQ ID NO: 593660 - RNA, 19 nt, Artificial Sequence
  Description of Artificial Sequence: Synthetic oligonucleotide
  Sense strand starting at position 3425 of SEQ ID NO: 584843
aagguaggaucugcaauaa

SEQ ID NO: 593661 - RNA, 19 nt, Artificial Sequence
  Description of Artificial Sequence: Synthetic oligonucleotide
  Antisense strand to SEQ ID NO: 593660
uuauugcagauccuaccuu

SEQ ID NO: 593662 - RNA, 19 nt, Artificial Sequence
  Description of Artificial Sequence: Synthetic oligonucleotide
  Sense strand starting at position 3488 of SEQ ID NO: 584843
ccagauauaaaccguucga

SEQ ID NO: 593663 - RNA, 19 nt, Artificial Sequence
  Description of Artificial Sequence: Synthetic oligonucleotide
  Antisense strand to SEQ ID NO: 593662
ucgaacgguuuauaucugg

SEQ ID NO: 593664 - RNA, 19 nt, Artificial Sequence
  Description of Artificial Sequence: Synthetic oligonucleotide
  Sense strand starting at position 3492 of SEQ ID NO: 584843
auauaaaccguucgacaga

SEQ ID NO: 593665 - RNA, 19 nt, Artificial Sequence
  Description of Artificial Sequence: Synthetic oligonucleotide
  Antisense strand to SEQ ID NO: 593664
ucugucgaacgguuuauau

SEQ ID NO: 593666 - RNA, 19 nt, Artificial Sequence
  Description of Artificial Sequence: Synthetic oligonucleotide
  Sense strand starting at position 3493 of SEQ ID NO: 584843
uauaaaccguucgacagaa

SEQ ID NO: 593667 - RNA, 19 nt, Artificial Sequence
  Description of Artificial Sequence: Synthetic oligonucleotide
  Antisense strand to SEQ ID NO: 593666
uucugucgaacgguuuaua

SEQ ID NO: 593668 - RNA, 19 nt, Artificial Sequence
  Description of Artificial Sequence: Synthetic oligonucleotide
  Sense strand starting at position 3497 of SEQ ID NO: 584843
aaccguucgacagaagguu

SEQ ID NO: 593669 - RNA, 19 nt, Artificial Sequence
  Description of Artificial Sequence: Synthetic oligonucleotide
  Antisense strand to SEQ ID NO: 593668
aaccuucugucgaacgguu

SEQ ID NO: 593670 - RNA, 19 nt, Artificial Sequence
  Description of Artificial Sequence: Synthetic oligonucleotide
  Sense strand starting at position 3503 of SEQ ID NO: 584843
ucgacagaagguuaacuuu

SEQ ID NO: 593671 - RNA, 19 nt, Artificial Sequence
  Description of Artificial Sequence: Synthetic oligonucleotide
  Antisense strand to SEQ ID NO: 593670
aaaguuaaccuucugucga

SEQ ID NO: 593672 - RNA, 19 nt, Artificial Sequence
  Description of Artificial Sequence: Synthetic oligonucleotide
  Sense strand starting at position 3854 of SEQ ID NO: 584843
agaauuuaguauuacagac

SEQ ID NO: 593673 - RNA, 19 nt, Artificial Sequence
  Description of Artificial Sequence: Synthetic oligonucleotide
  Antisense strand to SEQ ID NO: 593672
gucuguaauacuaaauucu

SEQ ID NO: 593674 - RNA, 19 nt, Artificial Sequence
  Description of Artificial Sequence: Synthetic oligonucleotide
  Sense strand starting at position 3917 of SEQ ID NO: 584843
agcauauguaguugucacu

SEQ ID NO: 593675 - RNA, 19 nt, Artificial Sequence
  Description of Artificial Sequence: Synthetic oligonucleotide
  Antisense strand to SEQ ID NO: 593674
agugacaacuacauaugcu

SEQ ID NO: 593676 - RNA, 19 nt, Artificial Sequence
  Description of Artificial Sequence: Synthetic oligonucleotide
  Sense strand starting at position 3920 of SEQ ID NO: 584843
auauguaguugucacuaag

SEQ ID NO: 593677 - RNA, 19 nt, Artificial Sequence
  Description of Artificial Sequence: Synthetic oligonucleotide
  Antisense strand to SEQ ID NO: 593676
cuuagugacaacuacauau

SEQ ID NO: 593678 - RNA, 19 nt, Artificial Sequence
  Description of Artificial Sequence: Synthetic oligonucleotide
  Sense strand starting at position 3930 of SEQ ID NO: 584843
gucacuaagugccuucuga

SEQ ID NO: 593679 - RNA, 19 nt, Artificial Sequence
  Description of Artificial Sequence: Synthetic oligonucleotide
  Antisense strand to SEQ ID NO: 593678
ucagaaggcacuuagugac

SEQ ID NO: 593680 - RNA, 19 nt, Artificial Sequence
  Description of Artificial Sequence: Synthetic oligonucleotide
  Sense strand starting at position 3934 of SEQ ID NO: 584843
cuaagugccuucugauucu

SEQ ID NO: 593681 - RNA, 19 nt, Artificial Sequence
  Description of Artificial Sequence: Synthetic oligonucleotide
  Antisense strand to SEQ ID NO: 593680
agaaucagaaggcacuuag

SEQ ID NO: 593682 - RNA, 19 nt, Artificial Sequence
  Description of Artificial Sequence: Synthetic oligonucleotide
  Sense strand starting at position 3940 of SEQ ID NO: 584843
gccuucugauucuugcauu

SEQ ID NO: 593683 - RNA, 19 nt, Artificial Sequence
  Description of Artificial Sequence: Synthetic oligonucleotide
  Antisense strand to SEQ ID NO: 593682
aaugcaagaaucagaaggc

SEQ ID NO: 593684 - RNA, 19 nt, Artificial Sequence
  Description of Artificial Sequence: Synthetic oligonucleotide
  Sense strand starting at position 3943 of SEQ ID NO: 584843
uucugauucuugcauuuag

SEQ ID NO: 593685 - RNA, 19 nt, Artificial Sequence
  Description of Artificial Sequence: Synthetic oligonucleotide
  Antisense strand to SEQ ID NO: 593684
cuaaaugcaagaaucagaa

SEQ ID NO: 593686 - RNA, 19 nt, Artificial Sequence
  Description of Artificial Sequence: Synthetic oligonucleotide
  Sense strand starting at position 3950 of SEQ ID NO: 584843
ucuugcauuuaggagaaca

SEQ ID NO: 593687 - RNA, 19 nt, Artificial Sequence
  Description of Artificial Sequence: Synthetic oligonucleotide
  Antisense strand to SEQ ID NO: 593686
uguucuccuaaaugcaaga

SEQ ID NO: 593688 - RNA, 19 nt, Artificial Sequence
  Description of Artificial Sequence: Synthetic oligonucleotide
  Sense strand starting at position 105 of SEQ ID NO: 584844
aguaaucuugagggucaga

SEQ ID NO: 593689 - RNA, 19 nt, Artificial Sequence
  Description of Artificial Sequence: Synthetic oligonucleotide
  Antisense strand to SEQ ID NO: 593688
ucugacccucaagauuacu

SEQ ID NO: 593690 - RNA, 19 nt, Artificial Sequence
  Description of Artificial Sequence: Synthetic oligonucleotide
  Sense strand starting at position 132 of SEQ ID NO: 584844
uugugaggugugggaaaga

SEQ ID NO: 593691 - RNA, 19 nt, Artificial Sequence
  Description of Artificial Sequence: Synthetic oligonucleotide
  Antisense strand to SEQ ID NO: 593690
ucuuucccacaccucacaa

SEQ ID NO: 593692 - RNA, 19 nt, Artificial Sequence
  Description of Artificial Sequence: Synthetic oligonucleotide
  Sense strand starting at position 164 of SEQ ID NO: 584844
cauagaagucaguguuucu

SEQ ID NO: 593693 - RNA, 19 nt, Artificial Sequence
  Description of Artificial Sequence: Synthetic oligonucleotide
  Antisense strand to SEQ ID NO: 593692
agaaacacugacuucuaug

SEQ ID NO: 593694 - RNA, 19 nt, Artificial Sequence
  Description of Artificial Sequence: Synthetic oligonucleotide
  Sense strand starting at position 171 of SEQ ID NO: 584844
gucaguguuucuucuaaca

SEQ ID NO: 593695 - RNA, 19 nt, Artificial Sequence
  Description of Artificial Sequence: Synthetic oligonucleotide
  Antisense strand to SEQ ID NO: 593694
uguuagaagaaacacugac

SEQ ID NO: 593696 - RNA, 19 nt, Artificial Sequence
  Description of Artificial Sequence: Synthetic oligonucleotide
  Sense strand starting at position 188 of SEQ ID NO: 584844
caaccauuuccgugccagu

SEQ ID NO: 593697 - RNA, 19 nt, Artificial Sequence
  Description of Artificial Sequence: Synthetic oligonucleotide
  Antisense strand to SEQ ID NO: 593696
acuggcacggaaaugguug

SEQ ID NO: 593698 - RNA, 19 nt, Artificial Sequence
  Description of Artificial Sequence: Synthetic oligonucleotide
  Sense strand starting at position 250 of SEQ ID NO: 584844
cucccuauaugguccuaga

SEQ ID NO: 593699 - RNA, 19 nt, Artificial Sequence
  Description of Artificial Sequence: Synthetic oligonucleotide
  Antisense strand to SEQ ID NO: 593698
ucuaggaccauauagggag

SEQ ID NO: 593700 - RNA, 19 nt, Artificial Sequence
  Description of Artificial Sequence: Synthetic oligonucleotide
  Sense strand starting at position 258 of SEQ ID NO: 584844
augguccuagacugagaau

SEQ ID NO: 593701 - RNA, 19 nt, Artificial Sequence
  Description of Artificial Sequence: Synthetic oligonucleotide
  Antisense strand to SEQ ID NO: 593700
auucucagucuaggaccau

SEQ ID NO: 593702 - RNA, 19 nt, Artificial Sequence
  Description of Artificial Sequence: Synthetic oligonucleotide
  Sense strand starting at position 470 of SEQ ID NO: 584844
cugugcuauucucuugaca

SEQ ID NO: 593703 - RNA, 19 nt, Artificial Sequence
  Description of Artificial Sequence: Synthetic oligonucleotide
  Antisense strand to SEQ ID NO: 593702
ugucaagagaauagcacag

SEQ ID NO: 593704 - RNA, 19 nt, Artificial Sequence
  Description of Artificial Sequence: Synthetic oligonucleotide
  Sense strand starting at position 1086 of SEQ ID NO: 584844
gcgugauggcauagauggu

SEQ ID NO: 593705 - RNA, 19 nt, Artificial Sequence
  Description of Artificial Sequence: Synthetic oligonucleotide
  Antisense strand to SEQ ID NO: 593704
accaucuaugccaucacgc

SEQ ID NO: 593706 - RNA, 19 nt, Artificial Sequence
  Description of Artificial Sequence: Synthetic oligonucleotide
  Sense strand starting at position 1430 of SEQ ID NO: 584844
gcacuuagggaguggugau

SEQ ID NO: 593707 - RNA, 19 nt, Artificial Sequence
  Description of Artificial Sequence: Synthetic oligonucleotide
  Antisense strand to SEQ ID NO: 593706
aucaccacucccuaagugc

SEQ ID NO: 593708 - RNA, 19 nt, Artificial Sequence
  Description of Artificial Sequence: Synthetic oligonucleotide
  Sense strand starting at position 1683 of SEQ ID NO: 584844
gcucuuucugaagagugga

SEQ ID NO: 593709 - RNA, 19 nt, Artificial Sequence
  Description of Artificial Sequence: Synthetic oligonucleotide
  Antisense strand to SEQ ID NO: 593708
uccacucuucagaaagagc

SEQ ID NO: 593710 - RNA, 19 nt, Artificial Sequence
  Description of Artificial Sequence: Synthetic oligonucleotide
  Sense strand starting at position 1827 of SEQ ID NO: 584844
gggcuuuccuuccucacau

SEQ ID NO: 593711 - RNA, 19 nt, Artificial Sequence
  Description of Artificial Sequence: Synthetic oligonucleotide
  Antisense strand to SEQ ID NO: 593710
augugaggaaggaaagccc

SEQ ID NO: 593712 - RNA, 19 nt, Artificial Sequence
  Description of Artificial Sequence: Synthetic oligonucleotide
  Sense strand starting at position 1937 of SEQ ID NO: 584844
uugcucuugucuucucaga

SEQ ID NO: 593713 - RNA, 19 nt, Artificial Sequence
  Description of Artificial Sequence: Synthetic oligonucleotide
  Antisense strand to SEQ ID NO: 593712
ucugagaagacaagagcaa

SEQ ID NO: 593714 - RNA, 19 nt, Artificial Sequence
  Description of Artificial Sequence: Synthetic oligonucleotide
  Sense strand starting at position 1939 of SEQ ID NO: 584844
gcucuugucuucucagaac

SEQ ID NO: 593715 - RNA, 19 nt, Artificial Sequence
  Description of Artificial Sequence: Synthetic oligonucleotide
  Antisense strand to SEQ ID NO: 593714
guucugagaagacaagagc

SEQ ID NO: 593716 - RNA, 19 nt, Artificial Sequence
  Description of Artificial Sequence: Synthetic oligonucleotide
  Sense strand starting at position 2272 of SEQ ID NO: 584844
gaaauaccgcaaggucuuu

SEQ ID NO: 593717 - RNA, 19 nt, Artificial Sequence
  Description of Artificial Sequence: Synthetic oligonucleotide
  Antisense strand to SEQ ID NO: 593716
aaagaccuugcgguauuuc

SEQ ID NO: 593718 - RNA, 19 nt, Artificial Sequence
  Description of Artificial Sequence: Synthetic oligonucleotide
  Sense strand starting at position 2277 of SEQ ID NO: 584844
accgcaaggucuuuggaga

SEQ ID NO: 593719 - RNA, 19 nt, Artificial Sequence
  Description of Artificial Sequence: Synthetic oligonucleotide
  Antisense strand to SEQ ID NO: 593718
ucuccaaagaccuugcggu

SEQ ID NO: 593720 - RNA, 19 nt, Artificial Sequence
  Description of Artificial Sequence: Synthetic oligonucleotide
  Sense strand starting at position 2278 of SEQ ID NO: 584844
ccgcaaggucuuuggagau

SEQ ID NO: 593721 - RNA, 19 nt, Artificial Sequence
  Description of Artificial Sequence: Synthetic oligonucleotide
  Antisense strand to SEQ ID NO: 593720
aucuccaaagaccuugcgg

SEQ ID NO: 593722 - RNA, 19 nt, Artificial Sequence
  Description of Artificial Sequence: Synthetic oligonucleotide
  Sense strand starting at position 2284 of SEQ ID NO: 584844
ggucuuuggagaugagcca

SEQ ID NO: 593723 - RNA, 19 nt, Artificial Sequence
  Description of Artificial Sequence: Synthetic oligonucleotide
  Antisense strand to SEQ ID NO: 593722
uggcucaucuccaaagacc

SEQ ID NO: 593724 - RNA, 19 nt, Artificial Sequence
  Description of Artificial Sequence: Synthetic oligonucleotide
  Sense strand starting at position 2309 of SEQ ID NO: 584844
uccauucacgugcggaaau

SEQ ID NO: 593725 - RNA, 19 nt, Artificial Sequence
  Description of Artificial Sequence: Synthetic oligonucleotide
  Antisense strand to SEQ ID NO: 593724
auuuccgcacgugaaugga

SEQ ID NO: 593726 - RNA, 19 nt, Artificial Sequence
  Description of Artificial Sequence: Synthetic oligonucleotide
  Sense strand starting at position 2517 of SEQ ID NO: 584844
gcacauagguguuuggcau

SEQ ID NO: 593727 - RNA, 19 nt, Artificial Sequence
  Description of Artificial Sequence: Synthetic oligonucleotide
  Antisense strand to SEQ ID NO: 593726
augccaaacaccuaugugc

SEQ ID NO: 593728 - RNA, 19 nt, Artificial Sequence
  Description of Artificial Sequence: Synthetic oligonucleotide
  Sense strand starting at position 2523 of SEQ ID NO: 584844
agguguuuggcaugugaga

SEQ ID NO: 593729 - RNA, 19 nt, Artificial Sequence
  Description of Artificial Sequence: Synthetic oligonucleotide
  Antisense strand to SEQ ID NO: 593728
ucucacaugccaaacaccu

SEQ ID NO: 593730 - RNA, 19 nt, Artificial Sequence
  Description of Artificial Sequence: Synthetic oligonucleotide
  Sense strand starting at position 2525 of SEQ ID NO: 584844
guguuuggcaugugagaca

SEQ ID NO: 593731 - RNA, 19 nt, Artificial Sequence
  Description of Artificial Sequence: Synthetic oligonucleotide
  Antisense strand to SEQ ID NO: 593730
ugucucacaugccaaacac

SEQ ID NO: 593732 - RNA, 19 nt, Artificial Sequence
  Description of Artificial Sequence: Synthetic oligonucleotide
  Sense strand starting at position 2825 of SEQ ID NO: 584844
uggcaaguggcauauggaa

SEQ ID NO: 593733 - RNA, 19 nt, Artificial Sequence
  Description of Artificial Sequence: Synthetic oligonucleotide
  Antisense strand to SEQ ID NO: 593732
uuccauaugccacuugcca

SEQ ID NO: 593734 - RNA, 19 nt, Artificial Sequence
  Description of Artificial Sequence: Synthetic oligonucleotide
  Sense strand starting at position 2827 of SEQ ID NO: 584844
gcaaguggcauauggaaau

SEQ ID NO: 593735 - RNA, 19 nt, Artificial Sequence
  Description of Artificial Sequence: Synthetic oligonucleotide
  Antisense strand to SEQ ID NO: 593734
auuuccauaugccacuugc

SEQ ID NO: 593736 - RNA, 19 nt, Artificial Sequence
  Description of Artificial Sequence: Synthetic oligonucleotide
  Sense strand starting at position 2954 of SEQ ID NO: 584844
gauggugcgauugaaauca

SEQ ID NO: 593737 - RNA, 19 nt, Artificial Sequence
  Description of Artificial Sequence: Synthetic oligonucleotide
  Antisense strand to SEQ ID NO: 593736
ugauuucaaucgcaccauc

SEQ ID NO: 593738 - RNA, 19 nt, Artificial Sequence
  Description of Artificial Sequence: Synthetic oligonucleotide
  Sense strand starting at position 2975 of SEQ ID NO: 584844
cagaguguaccaugacgaa

SEQ ID NO: 593739 - RNA, 19 nt, Artificial Sequence
  Description of Artificial Sequence: Synthetic oligonucleotide
  Antisense strand to SEQ ID NO: 593738
uucgucaugguacacucug

SEQ ID NO: 593740 - RNA, 19 nt, Artificial Sequence
  Description of Artificial Sequence: Synthetic oligonucleotide
  Sense strand starting at position 3085 of SEQ ID NO: 584844
gccugaccuucuguaacuu

SEQ ID NO: 593741 - RNA, 19 nt, Artificial Sequence
  Description of Artificial Sequence: Synthetic oligonucleotide
  Antisense strand to SEQ ID NO: 593740
aaguuacagaaggucaggc

SEQ ID NO: 593742 - RNA, 19 nt, Artificial Sequence
  Description of Artificial Sequence: Synthetic oligonucleotide
  Sense strand starting at position 3093 of SEQ ID NO: 584844
uucuguaacuuaccaggaa

SEQ ID NO: 593743 - RNA, 19 nt, Artificial Sequence
  Description of Artificial Sequence: Synthetic oligonucleotide
  Antisense strand to SEQ ID NO: 593742
uuccugguaaguuacagaa

SEQ ID NO: 593744 - RNA, 19 nt, Artificial Sequence
  Description of Artificial Sequence: Synthetic oligonucleotide
  Sense strand starting at position 3139 of SEQ ID NO: 584844
cagggaagugcuugcaaag

SEQ ID NO: 593745 - RNA, 19 nt, Artificial Sequence
  Description of Artificial Sequence: Synthetic oligonucleotide
  Antisense strand to SEQ ID NO: 593744
cuuugcaagcacuucccug

SEQ ID NO: 593746 - RNA, 19 nt, Artificial Sequence
  Description of Artificial Sequence: Synthetic oligonucleotide
  Sense strand starting at position 3182 of SEQ ID NO: 584844
ugcccuagccuaugauaaa

SEQ ID NO: 593747 - RNA, 19 nt, Artificial Sequence
  Description of Artificial Sequence: Synthetic oligonucleotide
  Antisense strand to SEQ ID NO: 593746
uuuaucauaggcuagggca

SEQ ID NO: 593748 - RNA, 19 nt, Artificial Sequence
  Description of Artificial Sequence: Synthetic oligonucleotide
  Sense strand starting at position 3377 of SEQ ID NO: 584844
ggcauuggcucaucuguga

SEQ ID NO: 593749 - RNA, 19 nt, Artificial Sequence
  Description of Artificial Sequence: Synthetic oligonucleotide
  Antisense strand to SEQ ID NO: 593748
ucacagaugagccaaugcc

SEQ ID NO: 593750 - RNA, 19 nt, Artificial Sequence
  Description of Artificial Sequence: Synthetic oligonucleotide
  Sense strand starting at position 3380 of SEQ ID NO: 584844
auuggcucaucugugaauu

SEQ ID NO: 593751 - RNA, 19 nt, Artificial Sequence
  Description of Artificial Sequence: Synthetic oligonucleotide
  Antisense strand to SEQ ID NO: 593750
aauucacagaugagccaau

SEQ ID NO: 593752 - RNA, 19 nt, Artificial Sequence
  Description of Artificial Sequence: Synthetic oligonucleotide
  Sense strand starting at position 3381 of SEQ ID NO: 584844
uuggcucaucugugaauuu

SEQ ID NO: 593753 - RNA, 19 nt, Artificial Sequence
  Description of Artificial Sequence: Synthetic oligonucleotide
  Antisense strand to SEQ ID NO: 593752
aaauucacagaugagccaa

SEQ ID NO: 593754 - RNA, 19 nt, Artificial Sequence
  Description of Artificial Sequence: Synthetic oligonucleotide
  Sense strand starting at position 3417 of SEQ ID NO: 584844
gauucugaaacgugagagu

SEQ ID NO: 593755 - RNA, 19 nt, Artificial Sequence
  Description of Artificial Sequence: Synthetic oligonucleotide
  Antisense strand to SEQ ID NO: 593754
acucucacguuucagaauc

SEQ ID NO: 593756 - RNA, 19 nt, Artificial Sequence
  Description of Artificial Sequence: Synthetic oligonucleotide
  Sense strand starting at position 3525 of SEQ ID NO: 584844
uuaaacucugcagauuagu

SEQ ID NO: 593757 - RNA, 19 nt, Artificial Sequence
  Description of Artificial Sequence: Synthetic oligonucleotide
  Antisense strand to SEQ ID NO: 593756
acuaaucugcagaguuuaa

SEQ ID NO: 593758 - RNA, 19 nt, Artificial Sequence
  Description of Artificial Sequence: Synthetic oligonucleotide
  Sense strand starting at position 3533 of SEQ ID NO: 584844
ugcagauuagugcauccua

SEQ ID NO: 593759 - RNA, 19 nt, Artificial Sequence
  Description of Artificial Sequence: Synthetic oligonucleotide
  Antisense strand to SEQ ID NO: 593758
uaggaugcacuaaucugca

SEQ ID NO: 593760 - RNA, 19 nt, Artificial Sequence
  Description of Artificial Sequence: Synthetic oligonucleotide
  Sense strand starting at position 3600 of SEQ ID NO: 584844
agccuaaugugccucugaa

SEQ ID NO: 593761 - RNA, 19 nt, Artificial Sequence
  Description of Artificial Sequence: Synthetic oligonucleotide
  Antisense strand to SEQ ID NO: 593760
uucagaggcacauuaggcu

SEQ ID NO: 593762 - RNA, 19 nt, Artificial Sequence
  Description of Artificial Sequence: Synthetic oligonucleotide
  Sense strand starting at position 3607 of SEQ ID NO: 584844
ugugccucugaauauaaca

SEQ ID NO: 593763 - RNA, 19 nt, Artificial Sequence
  Description of Artificial Sequence: Synthetic oligonucleotide
  Antisense strand to SEQ ID NO: 593762
uguuauauucagaggcaca

SEQ ID NO: 593764 - RNA, 19 nt, Artificial Sequence
  Description of Artificial Sequence: Synthetic oligonucleotide
  Sense strand starting at position 3796 of SEQ ID NO: 584844
uuguguuugcuggaauaaa

SEQ ID NO: 593765 - RNA, 19 nt, Artificial Sequence
  Description of Artificial Sequence: Synthetic oligonucleotide
  Antisense strand to SEQ ID NO: 593764
uuuauuccagcaaacacaa

SEQ ID NO: 593766 - RNA, 19 nt, Artificial Sequence
  Description of Artificial Sequence: Synthetic oligonucleotide
  Sense strand starting at position 3846 of SEQ ID NO: 584844
aucacuaaccuuuguuagu

SEQ ID NO: 593767 - RNA, 19 nt, Artificial Sequence
  Description of Artificial Sequence: Synthetic oligonucleotide
  Antisense strand to SEQ ID NO: 593766
acuaacaaagguuagugau

SEQ ID NO: 593768 - RNA, 19 nt, Artificial Sequence
  Description of Artificial Sequence: Synthetic oligonucleotide
  Sense strand starting at position 347 of SEQ ID NO: 584845
gccggaacuucccucaagu

SEQ ID NO: 593769 - RNA, 19 nt, Artificial Sequence
  Description of Artificial Sequence: Synthetic oligonucleotide
  Antisense strand to SEQ ID NO: 593768
acuugagggaaguuccggc

SEQ ID NO: 593770 - RNA, 19 nt, Artificial Sequence
  Description of Artificial Sequence: Synthetic oligonucleotide
  Sense strand starting at position 349 of SEQ ID NO: 584845
cggaacuucccucaaguua

SEQ ID NO: 593771 - RNA, 19 nt, Artificial Sequence
  Description of Artificial Sequence: Synthetic oligonucleotide
  Antisense strand to SEQ ID NO: 593770
uaacuugagggaaguuccg

SEQ ID NO: 593772 - RNA, 19 nt, Artificial Sequence
  Description of Artificial Sequence: Synthetic oligonucleotide
  Sense strand starting at position 497 of SEQ ID NO: 584845
cugcaaaugcuuggccaga

SEQ ID NO: 593773 - RNA, 19 nt, Artificial Sequence
  Description of Artificial Sequence: Synthetic oligonucleotide
  Antisense strand to SEQ ID NO: 593772
ucuggccaagcauuugcag

SEQ ID NO: 593774 - RNA, 19 nt, Artificial Sequence
  Description of Artificial Sequence: Synthetic oligonucleotide
  Sense strand starting at position 525 of SEQ ID NO: 584845
ccgagaugcucgcuccagu

SEQ ID NO: 593775 - RNA, 19 nt, Artificial Sequence
  Description of Artificial Sequence: Synthetic oligonucleotide
  Antisense strand to SEQ ID NO: 593774
acuggagcgagcaucucgg

SEQ ID NO: 593776 - RNA, 19 nt, Artificial Sequence
  Description of Artificial Sequence: Synthetic oligonucleotide
  Sense strand starting at position 814 of SEQ ID NO: 584845
gugcaagguuucccucuca

SEQ ID NO: 593777 - RNA, 19 nt, Artificial Sequence
  Description of Artificial Sequence: Synthetic oligonucleotide
  Antisense strand to SEQ ID NO: 593776
ugagagggaaaccuugcac

SEQ ID NO: 593778 - RNA, 19 nt, Artificial Sequence
  Description of Artificial Sequence: Synthetic oligonucleotide
  Sense strand starting at position 842 of SEQ ID NO: 584845
cgcccuuaggucuuagcua

SEQ ID NO: 593779 - RNA, 19 nt, Artificial Sequence
  Description of Artificial Sequence: Synthetic oligonucleotide
  Antisense strand to SEQ ID NO: 593778
uagcuaagaccuaagggcg

SEQ ID NO: 593780 - RNA, 19 nt, Artificial Sequence
  Description of Artificial Sequence: Synthetic oligonucleotide
  Sense strand starting at position 862 of SEQ ID NO: 584845
gcgggacgcuuuccgacaa

SEQ ID NO: 593781 - RNA, 19 nt, Artificial Sequence
  Description of Artificial Sequence: Synthetic oligonucleotide
  Antisense strand to SEQ ID NO: 593780
uugucggaaagcgucccgc

SEQ ID NO: 593782 - RNA, 19 nt, Artificial Sequence
  Description of Artificial Sequence: Synthetic oligonucleotide
  Sense strand starting at position 880 of SEQ ID NO: 584845
acccgaucuuucgcuagga

SEQ ID NO: 593783 - RNA, 19 nt, Artificial Sequence
  Description of Artificial Sequence: Synthetic oligonucleotide
  Antisense strand to SEQ ID NO: 593782
uccuagcgaaagaucgggu

SEQ ID NO: 593784 - RNA, 19 nt, Artificial Sequence
  Description of Artificial Sequence: Synthetic oligonucleotide
  Sense strand starting at position 882 of SEQ ID NO: 584845
ccgaucuuucgcuaggaga

SEQ ID NO: 593785 - RNA, 19 nt, Artificial Sequence
  Description of Artificial Sequence: Synthetic oligonucleotide
  Antisense strand to SEQ ID NO: 593784
ucuccuagcgaaagaucgg

SEQ ID NO: 593786 - RNA, 19 nt, Artificial Sequence
  Description of Artificial Sequence: Synthetic oligonucleotide
  Sense strand starting at position 884 of SEQ ID NO: 584845
gaucuuucgcuaggagaga

SEQ ID NO: 593787 - RNA, 19 nt, Artificial Sequence
  Description of Artificial Sequence: Synthetic oligonucleotide
  Antisense strand to SEQ ID NO: 593786
ucucuccuagcgaaagauc

SEQ ID NO: 593788 - RNA, 19 nt, Artificial Sequence
  Description of Artificial Sequence: Synthetic oligonucleotide
  Sense strand starting at position 885 of SEQ ID NO: 584845
aucuuucgcuaggagagau

SEQ ID NO: 593789 - RNA, 19 nt, Artificial Sequence
  Description of Artificial Sequence: Synthetic oligonucleotide
  Antisense strand to SEQ ID NO: 593788
aucucuccuagcgaaagau

SEQ ID NO: 593790 - RNA, 19 nt, Artificial Sequence
  Description of Artificial Sequence: Synthetic oligonucleotide
  Sense strand starting at position 898 of SEQ ID NO: 584845
agagauucgauccaggucu

SEQ ID NO: 593791 - RNA, 19 nt, Artificial Sequence
  Description of Artificial Sequence: Synthetic oligonucleotide
  Antisense strand to SEQ ID NO: 593790
agaccuggaucgaaucucu

SEQ ID NO: 593792 - RNA, 19 nt, Artificial Sequence
  Description of Artificial Sequence: Synthetic oligonucleotide
  Sense strand starting at position 1377 of SEQ ID NO: 584845
cccuucccguuccuagaaa

SEQ ID NO: 593793 - RNA, 19 nt, Artificial Sequence
  Description of Artificial Sequence: Synthetic oligonucleotide
  Antisense strand to SEQ ID NO: 593792
uuucuaggaacgggaaggg

SEQ ID NO: 593794 - RNA, 19 nt, Artificial Sequence
  Description of Artificial Sequence: Synthetic oligonucleotide
  Sense strand starting at position 1578 of SEQ ID NO: 584845
ggagaacuuugcguccuuu

SEQ ID NO: 593795 - RNA, 19 nt, Artificial Sequence
  Description of Artificial Sequence: Synthetic oligonucleotide
  Antisense strand to SEQ ID NO: 593794
aaaggacgcaaaguucucc

SEQ ID NO: 593796 - RNA, 19 nt, Artificial Sequence
  Description of Artificial Sequence: Synthetic oligonucleotide
  Sense strand starting at position 1979 of SEQ ID NO: 584845
ucucaaucgcuacauuguu

SEQ ID NO: 593797 - RNA, 19 nt, Artificial Sequence
  Description of Artificial Sequence: Synthetic oligonucleotide
  Antisense strand to SEQ ID NO: 593796
aacaauguagcgauugaga

SEQ ID NO: 593798 - RNA, 19 nt, Artificial Sequence
  Description of Artificial Sequence: Synthetic oligonucleotide
  Sense strand starting at position 2632 of SEQ ID NO: 584845
uggaaagagaguggucaau

SEQ ID NO: 593799 - RNA, 19 nt, Artificial Sequence
  Description of Artificial Sequence: Synthetic oligonucleotide
  Antisense strand to SEQ ID NO: 593798
auugaccacucucuuucca

SEQ ID NO: 593800 - RNA, 19 nt, Artificial Sequence
  Description of Artificial Sequence: Synthetic oligonucleotide
  Sense strand starting at position 2750 of SEQ ID NO: 584845
uguuguugcugcccuuaaa

SEQ ID NO: 593801 - RNA, 19 nt, Artificial Sequence
  Description of Artificial Sequence: Synthetic oligonucleotide
  Antisense strand to SEQ ID NO: 593800
uuuaagggcagcaacaaca

SEQ ID NO: 593802 - RNA, 19 nt, Artificial Sequence
  Description of Artificial Sequence: Synthetic oligonucleotide
  Sense strand starting at position 2776 of SEQ ID NO: 584845
gugugagugcccugucaga

SEQ ID NO: 593803 - RNA, 19 nt, Artificial Sequence
  Description of Artificial Sequence: Synthetic oligonucleotide
  Antisense strand to SEQ ID NO: 593802
ucugacagggcacucacac

SEQ ID NO: 593804 - RNA, 19 nt, Artificial Sequence
  Description of Artificial Sequence: Synthetic oligonucleotide
  Sense strand starting at position 2931 of SEQ ID NO: 584845
ugccacguuucccuaaaca

SEQ ID NO: 593805 - RNA, 19 nt, Artificial Sequence
  Description of Artificial Sequence: Synthetic oligonucleotide
  Antisense strand to SEQ ID NO: 593804
uguuuagggaaacguggca

SEQ ID NO: 593806 - RNA, 19 nt, Artificial Sequence
  Description of Artificial Sequence: Synthetic oligonucleotide
  Sense strand starting at position 2976 of SEQ ID NO: 584845
ggcaguauuccauauuauu

SEQ ID NO: 593807 - RNA, 19 nt, Artificial Sequence
  Description of Artificial Sequence: Synthetic oligonucleotide
  Antisense strand to SEQ ID NO: 593806
aauaauauggaauacugcc

SEQ ID NO: 593808 - RNA, 19 nt, Artificial Sequence
  Description of Artificial Sequence: Synthetic oligonucleotide
  Sense strand starting at position 3035 of SEQ ID NO: 584845
gcucgcucuacugagagaa

SEQ ID NO: 593809 - RNA, 19 nt, Artificial Sequence
  Description of Artificial Sequence: Synthetic oligonucleotide
  Antisense strand to SEQ ID NO: 593808
uucucucaguagagcgagc

SEQ ID NO: 593810 - RNA, 19 nt, Artificial Sequence
  Description of Artificial Sequence: Synthetic oligonucleotide
  Sense strand starting at position 3118 of SEQ ID NO: 584845
ggagucuugugauaucauc

SEQ ID NO: 593811 - RNA, 19 nt, Artificial Sequence
  Description of Artificial Sequence: Synthetic oligonucleotide
  Antisense strand to SEQ ID NO: 593810
gaugauaucacaagacucc

SEQ ID NO: 593812 - RNA, 19 nt, Artificial Sequence
  Description of Artificial Sequence: Synthetic oligonucleotide
  Sense strand starting at position 3135 of SEQ ID NO: 584845
ucuaaaguguugcucugaa

SEQ ID NO: 593813 - RNA, 19 nt, Artificial Sequence
  Description of Artificial Sequence: Synthetic oligonucleotide
  Antisense strand to SEQ ID NO: 593812
uucagagcaacacuuuaga

SEQ ID NO: 593814 - RNA, 19 nt, Artificial Sequence
  Description of Artificial Sequence: Synthetic oligonucleotide
  Sense strand starting at position 3192 of SEQ ID NO: 584845
uuggaaugucuguguggaa

SEQ ID NO: 593815 - RNA, 19 nt, Artificial Sequence
  Description of Artificial Sequence: Synthetic oligonucleotide
  Antisense strand to SEQ ID NO: 593814
uuccacacagacauuccaa

SEQ ID NO: 593816 - RNA, 19 nt, Artificial Sequence
  Description of Artificial Sequence: Synthetic oligonucleotide
  Sense strand starting at position 3193 of SEQ ID NO: 584845
uggaaugucuguguggaaa

SEQ ID NO: 593817 - RNA, 19 nt, Artificial Sequence
  Description of Artificial Sequence: Synthetic oligonucleotide
  Antisense strand to SEQ ID NO: 593816
uuuccacacagacauucca

SEQ ID NO: 593818 - RNA, 19 nt, Artificial Sequence
  Description of Artificial Sequence: Synthetic oligonucleotide
  Sense strand starting at position 3210 of SEQ ID NO: 584845
aagcuaagugauggcugaa

SEQ ID NO: 593819 - RNA, 19 nt, Artificial Sequence
  Description of Artificial Sequence: Synthetic oligonucleotide
  Antisense strand to SEQ ID NO: 593818
uucagccaucacuuagcuu

SEQ ID NO: 593820 - RNA, 19 nt, Artificial Sequence
  Description of Artificial Sequence: Synthetic oligonucleotide
  Sense strand starting at position 3530 of SEQ ID NO: 584845
cuuguaaguauguguuugu

SEQ ID NO: 593821 - RNA, 19 nt, Artificial Sequence
  Description of Artificial Sequence: Synthetic oligonucleotide
  Antisense strand to SEQ ID NO: 593820
acaaacacauacuuacaag

SEQ ID NO: 593822 - RNA, 19 nt, Artificial Sequence
  Description of Artificial Sequence: Synthetic oligonucleotide
  Sense strand starting at position 3533 of SEQ ID NO: 584845
guaaguauguguuugugag

SEQ ID NO: 593823 - RNA, 19 nt, Artificial Sequence
  Description of Artificial Sequence: Synthetic oligonucleotide
  Antisense strand to SEQ ID NO: 593822
cucacaaacacauacuuac

SEQ ID NO: 593824 - RNA, 19 nt, Artificial Sequence
  Description of Artificial Sequence: Synthetic oligonucleotide
  Sense strand starting at position 3534 of SEQ ID NO: 584845
uaaguauguguuugugaga

SEQ ID NO: 593825 - RNA, 19 nt, Artificial Sequence
  Description of Artificial Sequence: Synthetic oligonucleotide
  Antisense strand to SEQ ID NO: 593824
ucucacaaacacauacuua

SEQ ID NO: 593826 - RNA, 19 nt, Artificial Sequence
  Description of Artificial Sequence: Synthetic oligonucleotide
  Sense strand starting at position 3535 of SEQ ID NO: 584845
aaguauguguuugugagau

SEQ ID NO: 593827 - RNA, 19 nt, Artificial Sequence
  Description of Artificial Sequence: Synthetic oligonucleotide
  Antisense strand to SEQ ID NO: 593826
aucucacaaacacauacuu

SEQ ID NO: 593828 - RNA, 19 nt, Artificial Sequence
  Description of Artificial Sequence: Synthetic oligonucleotide
  Sense strand starting at position 3541 of SEQ ID NO: 584845
guguuugugagauaacuuu

SEQ ID NO: 593829 - RNA, 19 nt, Artificial Sequence
  Description of Artificial Sequence: Synthetic oligonucleotide
  Antisense strand to SEQ ID NO: 593828
aaaguuaucucacaaacac

SEQ ID NO: 593830 - RNA, 19 nt, Artificial Sequence
  Description of Artificial Sequence: Synthetic oligonucleotide
  Sense strand starting at position 3547 of SEQ ID NO: 584845
gugagauaacuuuacgcau

SEQ ID NO: 593831 - RNA, 19 nt, Artificial Sequence
  Description of Artificial Sequence: Synthetic oligonucleotide
  Antisense strand to SEQ ID NO: 593830
augcguaaaguuaucucac

SEQ ID NO: 593832 - RNA, 19 nt, Artificial Sequence
  Description of Artificial Sequence: Synthetic oligonucleotide
  Sense strand starting at position 3611 of SEQ ID NO: 584845
agagcauccguaugagagu

SEQ ID NO: 593833 - RNA, 19 nt, Artificial Sequence
  Description of Artificial Sequence: Synthetic oligonucleotide
  Antisense strand to SEQ ID NO: 593832
acucucauacggaugcucu

SEQ ID NO: 593834 - RNA, 19 nt, Artificial Sequence
  Description of Artificial Sequence: Synthetic oligonucleotide
  Sense strand starting at position 3617 of SEQ ID NO: 584845
uccguaugagaguggugua

SEQ ID NO: 593835 - RNA, 19 nt, Artificial Sequence
  Description of Artificial Sequence: Synthetic oligonucleotide
  Antisense strand to SEQ ID NO: 593834
uacaccacucucauacgga

SEQ ID NO: 593836 - RNA, 19 nt, Artificial Sequence
  Description of Artificial Sequence: Synthetic oligonucleotide
  Sense strand starting at position 3622 of SEQ ID NO: 584845
augagagugguguagauuc

SEQ ID NO: 593837 - RNA, 19 nt, Artificial Sequence
  Description of Artificial Sequence: Synthetic oligonucleotide
  Antisense strand to SEQ ID NO: 593836
gaaucuacaccacucucau

SEQ ID NO: 593838 - RNA, 19 nt, Artificial Sequence
  Description of Artificial Sequence: Synthetic oligonucleotide
  Sense strand starting at position 3624 of SEQ ID NO: 584845
gagagugguguagauucau

SEQ ID NO: 593839 - RNA, 19 nt, Artificial Sequence
  Description of Artificial Sequence: Synthetic oligonucleotide
  Antisense strand to SEQ ID NO: 593838
augaaucuacaccacucuc

SEQ ID NO: 593840 - RNA, 19 nt, Artificial Sequence
  Description of Artificial Sequence: Synthetic oligonucleotide
  Sense strand starting at position 3703 of SEQ ID NO: 584845
ggugguugaggagggaaau

SEQ ID NO: 593841 - RNA, 19 nt, Artificial Sequence
  Description of Artificial Sequence: Synthetic oligonucleotide
  Antisense strand to SEQ ID NO: 593840
auuucccuccucaaccacc

SEQ ID NO: 593842 - RNA, 19 nt, Artificial Sequence
  Description of Artificial Sequence: Synthetic oligonucleotide
  Sense strand starting at position 3766 of SEQ ID NO: 584845
cugaucuugucagauggau

SEQ ID NO: 593843 - RNA, 19 nt, Artificial Sequence
  Description of Artificial Sequence: Synthetic oligonucleotide
  Antisense strand to SEQ ID NO: 593842
auccaucugacaagaucag

SEQ ID NO: 593844 - RNA, 19 nt, Artificial Sequence
  Description of Artificial Sequence: Synthetic oligonucleotide
  Sense strand starting at position 3813 of SEQ ID NO: 584845
uagucugcuugcccaaaga

SEQ ID NO: 593845 - RNA, 19 nt, Artificial Sequence
  Description of Artificial Sequence: Synthetic oligonucleotide
  Antisense strand to SEQ ID NO: 593844
ucuuugggcaagcagacua

SEQ ID NO: 593846 - RNA, 19 nt, Artificial Sequence
  Description of Artificial Sequence: Synthetic oligonucleotide
  Sense strand starting at position 3954 of SEQ ID NO: 584845
aggaguaguuagccucuca

SEQ ID NO: 593847 - RNA, 19 nt, Artificial Sequence
  Description of Artificial Sequence: Synthetic oligonucleotide
  Antisense strand to SEQ ID NO: 593846
ugagaggcuaacuacuccu

SEQ ID NO: 593848 - RNA, 19 nt, Artificial Sequence
  Description of Artificial Sequence: Synthetic oligonucleotide
  Sense strand starting at position 6 of SEQ ID NO: 584846
uuucuuucuggcuaaggga

SEQ ID NO: 593849 - RNA, 19 nt, Artificial Sequence
  Description of Artificial Sequence: Synthetic oligonucleotide
  Antisense strand to SEQ ID NO: 593848
ucccuuagccagaaagaaa

SEQ ID NO: 593850 - RNA, 19 nt, Artificial Sequence
  Description of Artificial Sequence: Synthetic oligonucleotide
  Sense strand starting at position 30 of SEQ ID NO: 584846
gaaugaagugguugagaac

SEQ ID NO: 593851 - RNA, 19 nt, Artificial Sequence
  Description of Artificial Sequence: Synthetic oligonucleotide
  Antisense strand to SEQ ID NO: 593850
guucucaaccacuucauuc

SEQ ID NO: 593852 - RNA, 19 nt, Artificial Sequence
  Description of Artificial Sequence: Synthetic oligonucleotide
  Sense strand starting at position 44 of SEQ ID NO: 584846
agaacaugcccucaacguu

SEQ ID NO: 593853 - RNA, 19 nt, Artificial Sequence
  Description of Artificial Sequence: Synthetic oligonucleotide
  Antisense strand to SEQ ID NO: 593852
aacguugagggcauguucu

SEQ ID NO: 593854 - RNA, 19 nt, Artificial Sequence
  Description of Artificial Sequence: Synthetic oligonucleotide
  Sense strand starting at position 70 of SEQ ID NO: 584846
cauggagagauguguguua

SEQ ID NO: 593855 - RNA, 19 nt, Artificial Sequence
  Description of Artificial Sequence: Synthetic oligonucleotide
  Antisense strand to SEQ ID NO: 593854
uaacacacaucucuccaug

SEQ ID NO: 593856 - RNA, 19 nt, Artificial Sequence
  Description of Artificial Sequence: Synthetic oligonucleotide
  Sense strand starting at position 72 of SEQ ID NO: 584846
uggagagauguguguuacu

SEQ ID NO: 593857 - RNA, 19 nt, Artificial Sequence
  Description of Artificial Sequence: Synthetic oligonucleotide
  Antisense strand to SEQ ID NO: 593856
aguaacacacaucucucca

SEQ ID NO: 593858 - RNA, 19 nt, Artificial Sequence
  Description of Artificial Sequence: Synthetic oligonucleotide
  Sense strand starting at position 252 of SEQ ID NO: 584846
gccucauucugaguggaac

SEQ ID NO: 593859 - RNA, 19 nt, Artificial Sequence
  Description of Artificial Sequence: Synthetic oligonucleotide
  Antisense strand to SEQ ID NO: 593858
guuccacucagaaugaggc

SEQ ID NO: 593860 - RNA, 19 nt, Artificial Sequence
  Description of Artificial Sequence: Synthetic oligonucleotide
  Sense strand starting at position 280 of SEQ ID NO: 584846
ugguguagggcuuaauaau

SEQ ID NO: 593861 - RNA, 19 nt, Artificial Sequence
  Description of Artificial Sequence: Synthetic oligonucleotide
  Antisense strand to SEQ ID NO: 593860
auuauuaagcccuacacca

SEQ ID NO: 593862 - RNA, 19 nt, Artificial Sequence
  Description of Artificial Sequence: Synthetic oligonucleotide
  Sense strand starting at position 381 of SEQ ID NO: 584846
aagagauaccgugguuauu

SEQ ID NO: 593863 - RNA, 19 nt, Artificial Sequence
  Description of Artificial Sequence: Synthetic oligonucleotide
  Antisense strand to SEQ ID NO: 593862
aauaaccacgguaucucuu

SEQ ID NO: 593864 - RNA, 19 nt, Artificial Sequence
  Description of Artificial Sequence: Synthetic oligonucleotide
  Sense strand starting at position 383 of SEQ ID NO: 584846
gagauaccgugguuauuga

SEQ ID NO: 593865 - RNA, 19 nt, Artificial Sequence
  Description of Artificial Sequence: Synthetic oligonucleotide
  Antisense strand to SEQ ID NO: 593864
ucaauaaccacgguaucuc

SEQ ID NO: 593866 - RNA, 19 nt, Artificial Sequence
  Description of Artificial Sequence: Synthetic oligonucleotide
  Sense strand starting at position 384 of SEQ ID NO: 584846
agauaccgugguuauugaa

SEQ ID NO: 593867 - RNA, 19 nt, Artificial Sequence
  Description of Artificial Sequence: Synthetic oligonucleotide
  Antisense strand to SEQ ID NO: 593866
uucaauaaccacgguaucu

SEQ ID NO: 593868 - RNA, 19 nt, Artificial Sequence
  Description of Artificial Sequence: Synthetic oligonucleotide
  Sense strand starting at position 428 of SEQ ID NO: 584846
cauguuuggguguauuaau

SEQ ID NO: 593869 - RNA, 19 nt, Artificial Sequence
  Description of Artificial Sequence: Synthetic oligonucleotide
  Antisense strand to SEQ ID NO: 593868
auuaauacacccaaacaug

SEQ ID NO: 593870 - RNA, 19 nt, Artificial Sequence
  Description of Artificial Sequence: Synthetic oligonucleotide
  Sense strand starting at position 436 of SEQ ID NO: 584846
gguguauuaauguaggaag

SEQ ID NO: 593871 - RNA, 19 nt, Artificial Sequence
  Description of Artificial Sequence: Synthetic oligonucleotide
  Antisense strand to SEQ ID NO: 593870
cuuccuacauuaauacacc

SEQ ID NO: 593872 - RNA, 19 nt, Artificial Sequence
  Description of Artificial Sequence: Synthetic oligonucleotide
  Sense strand starting at position 438 of SEQ ID NO: 584846
uguauuaauguaggaagau

SEQ ID NO: 593873 - RNA, 19 nt, Artificial Sequence
  Description of Artificial Sequence: Synthetic oligonucleotide
  Antisense strand to SEQ ID NO: 593872
aucuuccuacauuaauaca

SEQ ID NO: 593874 - RNA, 19 nt, Artificial Sequence
  Description of Artificial Sequence: Synthetic oligonucleotide
  Sense strand starting at position 662 of SEQ ID NO: 584846
ucaauacaccguuaaaguc

SEQ ID NO: 593875 - RNA, 19 nt, Artificial Sequence
  Description of Artificial Sequence: Synthetic oligonucleotide
  Antisense strand to SEQ ID NO: 593874
gacuuuaacgguguauuga

SEQ ID NO: 593876 - RNA, 19 nt, Artificial Sequence
  Description of Artificial Sequence: Synthetic oligonucleotide
  Sense strand starting at position 811 of SEQ ID NO: 584846
uuagucuucuauguaggga

SEQ ID NO: 593877 - RNA, 19 nt, Artificial Sequence
  Description of Artificial Sequence: Synthetic oligonucleotide
  Antisense strand to SEQ ID NO: 593876
ucccuacauagaagacuaa

SEQ ID NO: 593878 - RNA, 19 nt, Artificial Sequence
  Description of Artificial Sequence: Synthetic oligonucleotide
  Sense strand starting at position 1010 of SEQ ID NO: 584846
uuuguucugaagcaaggaa

SEQ ID NO: 593879 - RNA, 19 nt, Artificial Sequence
  Description of Artificial Sequence: Synthetic oligonucleotide
  Antisense strand to SEQ ID NO: 593878
uuccuugcuucagaacaaa

SEQ ID NO: 593880 - RNA, 19 nt, Artificial Sequence
  Description of Artificial Sequence: Synthetic oligonucleotide
  Sense strand starting at position 1130 of SEQ ID NO: 584846
agaaguucugcagacccaa

SEQ ID NO: 593881 - RNA, 19 nt, Artificial Sequence
  Description of Artificial Sequence: Synthetic oligonucleotide
  Antisense strand to SEQ ID NO: 593880
uugggucugcagaacuucu

SEQ ID NO: 593882 - RNA, 19 nt, Artificial Sequence
  Description of Artificial Sequence: Synthetic oligonucleotide
  Sense strand starting at position 1170 of SEQ ID NO: 584846
auggaaucucacuguaacu

SEQ ID NO: 593883 - RNA, 19 nt, Artificial Sequence
  Description of Artificial Sequence: Synthetic oligonucleotide
  Antisense strand to SEQ ID NO: 593882
aguuacagugagauuccau

SEQ ID NO: 593884 - RNA, 19 nt, Artificial Sequence
  Description of Artificial Sequence: Synthetic oligonucleotide
  Sense strand starting at position 1172 of SEQ ID NO: 584846
ggaaucucacuguaacuuu

SEQ ID NO: 593885 - RNA, 19 nt, Artificial Sequence
  Description of Artificial Sequence: Synthetic oligonucleotide
  Antisense strand to SEQ ID NO: 593884
aaaguuacagugagauucc

SEQ ID NO: 593886 - RNA, 19 nt, Artificial Sequence
  Description of Artificial Sequence: Synthetic oligonucleotide
  Sense strand starting at position 1262 of SEQ ID NO: 584846
cucacagguuuagcuuaaa

SEQ ID NO: 593887 - RNA, 19 nt, Artificial Sequence
  Description of Artificial Sequence: Synthetic oligonucleotide
  Antisense strand to SEQ ID NO: 593886
uuuaagcuaaaccugugag

SEQ ID NO: 593888 - RNA, 19 nt, Artificial Sequence
  Description of Artificial Sequence: Synthetic oligonucleotide
  Sense strand starting at position 2126 of SEQ ID NO: 584846
gguguauugcucagugacg

SEQ ID NO: 593889 - RNA, 19 nt, Artificial Sequence
  Description of Artificial Sequence: Synthetic oligonucleotide
  Antisense strand to SEQ ID NO: 593888
cgucacugagcaauacacc

SEQ ID NO: 593890 - RNA, 19 nt, Artificial Sequence
  Description of Artificial Sequence: Synthetic oligonucleotide
  Sense strand starting at position 2285 of SEQ ID NO: 584846
uuuauacugagaugagagu

SEQ ID NO: 593891 - RNA, 19 nt, Artificial Sequence
  Description of Artificial Sequence: Synthetic oligonucleotide
  Antisense strand to SEQ ID NO: 593890
acucucaucucaguauaaa

SEQ ID NO: 593892 - RNA, 19 nt, Artificial Sequence
  Description of Artificial Sequence: Synthetic oligonucleotide
  Sense strand starting at position 2569 of SEQ ID NO: 584846
ccacgccuggcuuaaugaa

SEQ ID NO: 593893 - RNA, 19 nt, Artificial Sequence
  Description of Artificial Sequence: Synthetic oligonucleotide
  Antisense strand to SEQ ID NO: 593892
uucauuaagccaggcgugg

SEQ ID NO: 593894 - RNA, 19 nt, Artificial Sequence
  Description of Artificial Sequence: Synthetic oligonucleotide
  Sense strand starting at position 2716 of SEQ ID NO: 584846
gugaaauaauuggcauuaa

SEQ ID NO: 593895 - RNA, 19 nt, Artificial Sequence
  Description of Artificial Sequence: Synthetic oligonucleotide
  Antisense strand to SEQ ID NO: 593894
uuaaugccaauuauuucac

SEQ ID NO: 593896 - RNA, 19 nt, Artificial Sequence
  Description of Artificial Sequence: Synthetic oligonucleotide
  Sense strand starting at position 2815 of SEQ ID NO: 584846
acggaauagagcugaggau

SEQ ID NO: 593897 - RNA, 19 nt, Artificial Sequence
  Description of Artificial Sequence: Synthetic oligonucleotide
  Antisense strand to SEQ ID NO: 593896
auccucagcucuauuccgu

SEQ ID NO: 593898 - RNA, 19 nt, Artificial Sequence
  Description of Artificial Sequence: Synthetic oligonucleotide
  Sense strand starting at position 3157 of SEQ ID NO: 584846
ucuaucaagugacuuuaga

SEQ ID NO: 593899 - RNA, 19 nt, Artificial Sequence
  Description of Artificial Sequence: Synthetic oligonucleotide
  Antisense strand to SEQ ID NO: 593898
ucuaaagucacuugauaga

SEQ ID NO: 593900 - RNA, 19 nt, Artificial Sequence
  Description of Artificial Sequence: Synthetic oligonucleotide
  Sense strand starting at position 3304 of SEQ ID NO: 584846
ugaguuugcaccuggaaua

SEQ ID NO: 593901 - RNA, 19 nt, Artificial Sequence
  Description of Artificial Sequence: Synthetic oligonucleotide
  Antisense strand to SEQ ID NO: 593900
uauuccaggugcaaacuca

SEQ ID NO: 593902 - RNA, 19 nt, Artificial Sequence
  Description of Artificial Sequence: Synthetic oligonucleotide
  Sense strand starting at position 3305 of SEQ ID NO: 584846
gaguuugcaccuggaauac

SEQ ID NO: 593903 - RNA, 19 nt, Artificial Sequence
  Description of Artificial Sequence: Synthetic oligonucleotide
  Antisense strand to SEQ ID NO: 593902
guauuccaggugcaaacuc

SEQ ID NO: 593904 - RNA, 19 nt, Artificial Sequence
  Description of Artificial Sequence: Synthetic oligonucleotide
  Sense strand starting at position 3415 of SEQ ID NO: 584846
ggcagaucauaccauuuau

SEQ ID NO: 593905 - RNA, 19 nt, Artificial Sequence
  Description of Artificial Sequence: Synthetic oligonucleotide
  Antisense strand to SEQ ID NO: 593904
auaaaugguaugaucugcc

SEQ ID NO: 593906 - RNA, 19 nt, Artificial Sequence
  Description of Artificial Sequence: Synthetic oligonucleotide
  Sense strand starting at position 3451 of SEQ ID NO: 584846
ggcuccuuaccucaaagua

SEQ ID NO: 593907 - RNA, 19 nt, Artificial Sequence
  Description of Artificial Sequence: Synthetic oligonucleotide
  Antisense strand to SEQ ID NO: 593906
uacuuugagguaaggagcc

SEQ ID NO: 593908 - RNA, 19 nt, Artificial Sequence
  Description of Artificial Sequence: Synthetic oligonucleotide
  Sense strand starting at position 3471 of SEQ ID NO: 584846
aagcccaggucauuagaaa

SEQ ID NO: 593909 - RNA, 19 nt, Artificial Sequence
  Description of Artificial Sequence: Synthetic oligonucleotide
  Antisense strand to SEQ ID NO: 593908
uuucuaaugaccugggcuu

SEQ ID NO: 593910 - RNA, 19 nt, Artificial Sequence
  Description of Artificial Sequence: Synthetic oligonucleotide
  Sense strand starting at position 3604 of SEQ ID NO: 584846
cuggaacucucuucccgau

SEQ ID NO: 593911 - RNA, 19 nt, Artificial Sequence
  Description of Artificial Sequence: Synthetic oligonucleotide
  Antisense strand to SEQ ID NO: 593910
aucgggaagagaguuccag

SEQ ID NO: 593912 - RNA, 19 nt, Artificial Sequence
  Description of Artificial Sequence: Synthetic oligonucleotide
  Sense strand starting at position 3606 of SEQ ID NO: 584846
ggaacucucuucccgauau

SEQ ID NO: 593913 - RNA, 19 nt, Artificial Sequence
  Description of Artificial Sequence: Synthetic oligonucleotide
  Antisense strand to SEQ ID NO: 593912
auaucgggaagagaguucc

SEQ ID NO: 593914 - RNA, 19 nt, Artificial Sequence
  Description of Artificial Sequence: Synthetic oligonucleotide
  Sense strand starting at position 3610 of SEQ ID NO: 584846
cucucuucccgauauguau

SEQ ID NO: 593915 - RNA, 19 nt, Artificial Sequence
  Description of Artificial Sequence: Synthetic oligonucleotide
  Antisense strand to SEQ ID NO: 593914
auacauaucgggaagagag

SEQ ID NO: 593916 - RNA, 19 nt, Artificial Sequence
  Description of Artificial Sequence: Synthetic oligonucleotide
  Sense strand starting at position 3670 of SEQ ID NO: 584846
guuuaccuaucagugagau

SEQ ID NO: 593917 - RNA, 19 nt, Artificial Sequence
  Description of Artificial Sequence: Synthetic oligonucleotide
  Antisense strand to SEQ ID NO: 593916
aucucacugauagguaaac

SEQ ID NO: 593918 - RNA, 19 nt, Artificial Sequence
  Description of Artificial Sequence: Synthetic oligonucleotide
  Sense strand starting at position 3671 of SEQ ID NO: 584846
uuuaccuaucagugagauc

SEQ ID NO: 593919 - RNA, 19 nt, Artificial Sequence
  Description of Artificial Sequence: Synthetic oligonucleotide
  Antisense strand to SEQ ID NO: 593918
gaucucacugauagguaaa

SEQ ID NO: 593920 - RNA, 19 nt, Artificial Sequence
  Description of Artificial Sequence: Synthetic oligonucleotide
  Sense strand starting at position 3784 of SEQ ID NO: 584846
acguaucaccaucagauau

SEQ ID NO: 593921 - RNA, 19 nt, Artificial Sequence
  Description of Artificial Sequence: Synthetic oligonucleotide
  Antisense strand to SEQ ID NO: 593920
auaucugauggugauacgu

SEQ ID NO: 593922 - RNA, 19 nt, Artificial Sequence
  Description of Artificial Sequence: Synthetic oligonucleotide
  Sense strand starting at position 3853 of SEQ ID NO: 584846
caauaugugcuccacagag

SEQ ID NO: 593923 - RNA, 19 nt, Artificial Sequence
  Description of Artificial Sequence: Synthetic oligonucleotide
  Antisense strand to SEQ ID NO: 593922
cucuguggagcacauauug

SEQ ID NO: 593924 - RNA, 19 nt, Artificial Sequence
  Description of Artificial Sequence: Synthetic oligonucleotide
  Sense strand starting at position 3902 of SEQ ID NO: 584846
auuccaagugcuuagaaca

SEQ ID NO: 593925 - RNA, 19 nt, Artificial Sequence
  Description of Artificial Sequence: Synthetic oligonucleotide
  Antisense strand to SEQ ID NO: 593924
uguucuaagcacuuggaau

SEQ ID NO: 593926 - RNA, 19 nt, Artificial Sequence
  Description of Artificial Sequence: Synthetic oligonucleotide
  Sense strand starting at position 3931 of SEQ ID NO: 584846
caugguggguacucaauau

SEQ ID NO: 593927 - RNA, 19 nt, Artificial Sequence
  Description of Artificial Sequence: Synthetic oligonucleotide
  Antisense strand to SEQ ID NO: 593926
auauugaguacccaccaug

SEQ ID NO: 593928 - RNA, 19 nt, Artificial Sequence
  Description of Artificial Sequence: Synthetic oligonucleotide
  Sense strand starting at position 141 of SEQ ID NO: 584847
cgucgucuguaaucccaga

SEQ ID NO: 593929 - RNA, 19 nt, Artificial Sequence
  Description of Artificial Sequence: Synthetic oligonucleotide
  Antisense strand to SEQ ID NO: 593928
ucugggauuacagacgacg

SEQ ID NO: 593930 - RNA, 19 nt, Artificial Sequence
  Description of Artificial Sequence: Synthetic oligonucleotide
  Sense strand starting at position 317 of SEQ ID NO: 584847
caaacugacucuugggaag

SEQ ID NO: 593931 - RNA, 19 nt, Artificial Sequence
  Description of Artificial Sequence: Synthetic oligonucleotide
  Antisense strand to SEQ ID NO: 593930
cuucccaagagucaguuug

SEQ ID NO: 593932 - RNA, 19 nt, Artificial Sequence
  Description of Artificial Sequence: Synthetic oligonucleotide
  Sense strand starting at position 378 of SEQ ID NO: 584847
gcuuucuuauauccaggua

SEQ ID NO: 593933 - RNA, 19 nt, Artificial Sequence
  Description of Artificial Sequence: Synthetic oligonucleotide
  Antisense strand to SEQ ID NO: 593932
uaccuggauauaagaaagc

SEQ ID NO: 593934 - RNA, 19 nt, Artificial Sequence
  Description of Artificial Sequence: Synthetic oligonucleotide
  Sense strand starting at position 432 of SEQ ID NO: 584847
ugcaauuugucuccaagua

SEQ ID NO: 593935 - RNA, 19 nt, Artificial Sequence
  Description of Artificial Sequence: Synthetic oligonucleotide
  Antisense strand to SEQ ID NO: 593934
uacuuggagacaaauugca

SEQ ID NO: 593936 - RNA, 19 nt, Artificial Sequence
  Description of Artificial Sequence: Synthetic oligonucleotide
  Sense strand starting at position 484 of SEQ ID NO: 584847
aggcuuuaagcucaagaga

SEQ ID NO: 593937 - RNA, 19 nt, Artificial Sequence
  Description of Artificial Sequence: Synthetic oligonucleotide
  Antisense strand to SEQ ID NO: 593936
ucucuugagcuuaaagccu

SEQ ID NO: 593938 - RNA, 19 nt, Artificial Sequence
  Description of Artificial Sequence: Synthetic oligonucleotide
  Sense strand starting at position 562 of SEQ ID NO: 584847
cauuauggguucugauuuc

SEQ ID NO: 593939 - RNA, 19 nt, Artificial Sequence
  Description of Artificial Sequence: Synthetic oligonucleotide
  Antisense strand to SEQ ID NO: 593938
gaaaucagaacccauaaug

SEQ ID NO: 593940 - RNA, 19 nt, Artificial Sequence
  Description of Artificial Sequence: Synthetic oligonucleotide
  Sense strand starting at position 569 of SEQ ID NO: 584847
gguucugauuucuacccuu

SEQ ID NO: 593941 - RNA, 19 nt, Artificial Sequence
  Description of Artificial Sequence: Synthetic oligonucleotide
  Antisense strand to SEQ ID NO: 593940
aaggguagaaaucagaacc

SEQ ID NO: 593942 - RNA, 19 nt, Artificial Sequence
  Description of Artificial Sequence: Synthetic oligonucleotide
  Sense strand starting at position 602 of SEQ ID NO: 584847
agaccugaccaaugucuau

SEQ ID NO: 593943 - RNA, 19 nt, Artificial Sequence
  Description of Artificial Sequence: Synthetic oligonucleotide
  Antisense strand to SEQ ID NO: 593942
auagacauuggucaggucu

SEQ ID NO: 593944 - RNA, 19 nt, Artificial Sequence
  Description of Artificial Sequence: Synthetic oligonucleotide
  Sense strand starting at position 740 of SEQ ID NO: 584847
uguauuucccucugcauua

SEQ ID NO: 593945 - RNA, 19 nt, Artificial Sequence
  Description of Artificial Sequence: Synthetic oligonucleotide
  Antisense strand to SEQ ID NO: 593944
uaaugcagagggaaauaca

SEQ ID NO: 593946 - RNA, 19 nt, Artificial Sequence
  Description of Artificial Sequence: Synthetic oligonucleotide
  Sense strand starting at position 760 of SEQ ID NO: 584847
guucuauccauguggagga

SEQ ID NO: 593947 - RNA, 19 nt, Artificial Sequence
  Description of Artificial Sequence: Synthetic oligonucleotide
  Antisense strand to SEQ ID NO: 593946
uccuccacauggauagaac

SEQ ID NO: 593948 - RNA, 19 nt, Artificial Sequence
  Description of Artificial Sequence: Synthetic oligonucleotide
  Sense strand starting at position 1229 of SEQ ID NO: 584847
aaaggugucuuccagaacu

SEQ ID NO: 593949 - RNA, 19 nt, Artificial Sequence
  Description of Artificial Sequence: Synthetic oligonucleotide
  Antisense strand to SEQ ID NO: 593948
aguucuggaagacaccuuu

SEQ ID NO: 593950 - RNA, 19 nt, Artificial Sequence
  Description of Artificial Sequence: Synthetic oligonucleotide
  Sense strand starting at position 1231 of SEQ ID NO: 584847
aggugucuuccagaacuag

SEQ ID NO: 593951 - RNA, 19 nt, Artificial Sequence
  Description of Artificial Sequence: Synthetic oligonucleotide
  Antisense strand to SEQ ID NO: 593950
cuaguucuggaagacaccu

SEQ ID NO: 593952 - RNA, 19 nt, Artificial Sequence
  Description of Artificial Sequence: Synthetic oligonucleotide
  Sense strand starting at position 1243 of SEQ ID NO: 584847
gaacuagugaggugucuca

SEQ ID NO: 593953 - RNA, 19 nt, Artificial Sequence
  Description of Artificial Sequence: Synthetic oligonucleotide
  Antisense strand to SEQ ID NO: 593952
ugagacaccucacuaguuc

SEQ ID NO: 593954 - RNA, 19 nt, Artificial Sequence
  Description of Artificial Sequence: Synthetic oligonucleotide
  Sense strand starting at position 1273 of SEQ ID NO: 584847
acaauaaagguacgaguuu

SEQ ID NO: 593955 - RNA, 19 nt, Artificial Sequence
  Description of Artificial Sequence: Synthetic oligonucleotide
  Antisense strand to SEQ ID NO: 593954
aaacucguaccuuuauugu

SEQ ID NO: 593956 - RNA, 19 nt, Artificial Sequence
  Description of Artificial Sequence: Synthetic oligonucleotide
  Sense strand starting at position 1372 of SEQ ID NO: 584847
gccgacaggucucuaaaga

SEQ ID NO: 593957 - RNA, 19 nt, Artificial Sequence
  Description of Artificial Sequence: Synthetic oligonucleotide
  Antisense strand to SEQ ID NO: 593956
ucuuuagagaccugucggc

SEQ ID NO: 593958 - RNA, 19 nt, Artificial Sequence
  Description of Artificial Sequence: Synthetic oligonucleotide
  Sense strand starting at position 1436 of SEQ ID NO: 584847
ccgaaagacucccuagcau

SEQ ID NO: 593959 - RNA, 19 nt, Artificial Sequence
  Description of Artificial Sequence: Synthetic oligonucleotide
  Antisense strand to SEQ ID NO: 593958
augcuagggagucuuucgg

SEQ ID NO: 593960 - RNA, 19 nt, Artificial Sequence
  Description of Artificial Sequence: Synthetic oligonucleotide
  Sense strand starting at position 1560 of SEQ ID NO: 584847
gcaggagaucgacggcuua

SEQ ID NO: 593961 - RNA, 19 nt, Artificial Sequence
  Description of Artificial Sequence: Synthetic oligonucleotide
  Antisense strand to SEQ ID NO: 593960
uaagccgucgaucuccugc

SEQ ID NO: 593962 - RNA, 19 nt, Artificial Sequence
  Description of Artificial Sequence: Synthetic oligonucleotide
  Sense strand starting at position 1640 of SEQ ID NO: 584847
cagucagauuaggaaggaa

SEQ ID NO: 593963 - RNA, 19 nt, Artificial Sequence
  Description of Artificial Sequence: Synthetic oligonucleotide
  Antisense strand to SEQ ID NO: 593962
uuccuuccuaaucugacug

SEQ ID NO: 593964 - RNA, 19 nt, Artificial Sequence
  Description of Artificial Sequence: Synthetic oligonucleotide
  Sense strand starting at position 2160 of SEQ ID NO: 584847
ugaguuucugagggcgagu

SEQ ID NO: 593965 - RNA, 19 nt, Artificial Sequence
  Description of Artificial Sequence: Synthetic oligonucleotide
  Antisense strand to SEQ ID NO: 593964
acucgcccucagaaacuca

SEQ ID NO: 593966 - RNA, 19 nt, Artificial Sequence
  Description of Artificial Sequence: Synthetic oligonucleotide
  Sense strand starting at position 2343 of SEQ ID NO: 584847
gcgcgcuugagcgcuagaa

SEQ ID NO: 593967 - RNA, 19 nt, Artificial Sequence
  Description of Artificial Sequence: Synthetic oligonucleotide
  Antisense strand to SEQ ID NO: 593966
uucuagcgcucaagcgcgc

SEQ ID NO: 593968 - RNA, 19 nt, Artificial Sequence
  Description of Artificial Sequence: Synthetic oligonucleotide
  Sense strand starting at position 2345 of SEQ ID NO: 584847
gcgcuugagcgcuagaaga

SEQ ID NO: 593969 - RNA, 19 nt, Artificial Sequence
  Description of Artificial Sequence: Synthetic oligonucleotide
  Antisense strand to SEQ ID NO: 593968
ucuucuagcgcucaagcgc

SEQ ID NO: 593970 - RNA, 19 nt, Artificial Sequence
  Description of Artificial Sequence: Synthetic oligonucleotide
  Sense strand starting at position 2347 of SEQ ID NO: 584847
gcuugagcgcuagaagauu

SEQ ID NO: 593971 - RNA, 19 nt, Artificial Sequence
  Description of Artificial Sequence: Synthetic oligonucleotide
  Antisense strand to SEQ ID NO: 593970
aaucuucuagcgcucaagc

SEQ ID NO: 593972 - RNA, 19 nt, Artificial Sequence
  Description of Artificial Sequence: Synthetic oligonucleotide
  Sense strand starting at position 2494 of SEQ ID NO: 584847
guuuaaaucuuggcaggcu

SEQ ID NO: 593973 - RNA, 19 nt, Artificial Sequence
  Description of Artificial Sequence: Synthetic oligonucleotide
  Antisense strand to SEQ ID NO: 593972
agccugccaagauuuaaac

SEQ ID NO: 593974 - RNA, 19 nt, Artificial Sequence
  Description of Artificial Sequence: Synthetic oligonucleotide
  Sense strand starting at position 2699 of SEQ ID NO: 584847
gggcugugggcgucacauu

SEQ ID NO: 593975 - RNA, 19 nt, Artificial Sequence
  Description of Artificial Sequence: Synthetic oligonucleotide
  Antisense strand to SEQ ID NO: 593974
aaugugacgcccacagccc

SEQ ID NO: 593976 - RNA, 19 nt, Artificial Sequence
  Description of Artificial Sequence: Synthetic oligonucleotide
  Sense strand starting at position 2777 of SEQ ID NO: 584847
uugcacgacuugucaagaa

SEQ ID NO: 593977 - RNA, 19 nt, Artificial Sequence
  Description of Artificial Sequence: Synthetic oligonucleotide
  Antisense strand to SEQ ID NO: 593976
uucuugacaagucgugcaa

SEQ ID NO: 593978 - RNA, 19 nt, Artificial Sequence
  Description of Artificial Sequence: Synthetic oligonucleotide
  Sense strand starting at position 2802 of SEQ ID NO: 584847
cgcuuccgaguuugagaau

SEQ ID NO: 593979 - RNA, 19 nt, Artificial Sequence
  Description of Artificial Sequence: Synthetic oligonucleotide
  Antisense strand to SEQ ID NO: 593978
auucucaaacucggaagcg

SEQ ID NO: 593980 - RNA, 19 nt, Artificial Sequence
  Description of Artificial Sequence: Synthetic oligonucleotide
  Sense strand starting at position 2982 of SEQ ID NO: 584847
aacugcgaguccuccagaa

SEQ ID NO: 593981 - RNA, 19 nt, Artificial Sequence
  Description of Artificial Sequence: Synthetic oligonucleotide
  Antisense strand to SEQ ID NO: 593980
uucuggaggacucgcaguu

SEQ ID NO: 593982 - RNA, 19 nt, Artificial Sequence
  Description of Artificial Sequence: Synthetic oligonucleotide
  Sense strand starting at position 2984 of SEQ ID NO: 584847
cugcgaguccuccagaaag

SEQ ID NO: 593983 - RNA, 19 nt, Artificial Sequence
  Description of Artificial Sequence: Synthetic oligonucleotide
  Antisense strand to SEQ ID NO: 593982
cuuucuggaggacucgcag

SEQ ID NO: 593984 - RNA, 19 nt, Artificial Sequence
  Description of Artificial Sequence: Synthetic oligonucleotide
  Sense strand starting at position 2986 of SEQ ID NO: 584847
gcgaguccuccagaaagac

SEQ ID NO: 593985 - RNA, 19 nt, Artificial Sequence
  Description of Artificial Sequence: Synthetic oligonucleotide
  Antisense strand to SEQ ID NO: 593984
gucuuucuggaggacucgc

SEQ ID NO: 593986 - RNA, 19 nt, Artificial Sequence
  Description of Artificial Sequence: Synthetic oligonucleotide
  Sense strand starting at position 3020 of SEQ ID NO: 584847
uguccaaccuuucugggau

SEQ ID NO: 593987 - RNA, 19 nt, Artificial Sequence
  Description of Artificial Sequence: Synthetic oligonucleotide
  Antisense strand to SEQ ID NO: 593986
aucccagaaagguuggaca

SEQ ID NO: 593988 - RNA, 19 nt, Artificial Sequence
  Description of Artificial Sequence: Synthetic oligonucleotide
  Sense strand starting at position 3028 of SEQ ID NO: 584847
cuuucugggauucguaguu

SEQ ID NO: 593989 - RNA, 19 nt, Artificial Sequence
  Description of Artificial Sequence: Synthetic oligonucleotide
  Antisense strand to SEQ ID NO: 593988
aacuacgaaucccagaaag

SEQ ID NO: 593990 - RNA, 19 nt, Artificial Sequence
  Description of Artificial Sequence: Synthetic oligonucleotide
  Sense strand starting at position 3033 of SEQ ID NO: 584847
ugggauucguaguuuauac

SEQ ID NO: 593991 - RNA, 19 nt, Artificial Sequence
  Description of Artificial Sequence: Synthetic oligonucleotide
  Antisense strand to SEQ ID NO: 593990
guauaaacuacgaauccca

SEQ ID NO: 593992 - RNA, 19 nt, Artificial Sequence
  Description of Artificial Sequence: Synthetic oligonucleotide
  Sense strand starting at position 3049 of SEQ ID NO: 584847
uacccagguccugguuaua

SEQ ID NO: 593993 - RNA, 19 nt, Artificial Sequence
  Description of Artificial Sequence: Synthetic oligonucleotide
  Antisense strand to SEQ ID NO: 593992
uauaaccaggaccugggua

SEQ ID NO: 593994 - RNA, 19 nt, Artificial Sequence
  Description of Artificial Sequence: Synthetic oligonucleotide
  Sense strand starting at position 3072 of SEQ ID NO: 584847
aguuaagaguucuaauaag

SEQ ID NO: 593995 - RNA, 19 nt, Artificial Sequence
  Description of Artificial Sequence: Synthetic oligonucleotide
  Antisense strand to SEQ ID NO: 593994
cuuauuagaacucuuaacu

SEQ ID NO: 593996 - RNA, 19 nt, Artificial Sequence
  Description of Artificial Sequence: Synthetic oligonucleotide
  Sense strand starting at position 3086 of SEQ ID NO: 584847
auaagcagcuguuuaauga

SEQ ID NO: 593997 - RNA, 19 nt, Artificial Sequence
  Description of Artificial Sequence: Synthetic oligonucleotide
  Antisense strand to SEQ ID NO: 593996
ucauuaaacagcugcuuau

SEQ ID NO: 593998 - RNA, 19 nt, Artificial Sequence
  Description of Artificial Sequence: Synthetic oligonucleotide
  Sense strand starting at position 3200 of SEQ ID NO: 584847
gaacauaagugucagaauu

SEQ ID NO: 593999 - RNA, 19 nt, Artificial Sequence
  Description of Artificial Sequence: Synthetic oligonucleotide
  Antisense strand to SEQ ID NO: 593998
aauucugacacuuauguuc

SEQ ID NO: 594000 - RNA, 19 nt, Artificial Sequence
  Description of Artificial Sequence: Synthetic oligonucleotide
  Sense strand starting at position 3202 of SEQ ID NO: 584847
acauaagugucagaauuga

SEQ ID NO: 594001 - RNA, 19 nt, Artificial Sequence
  Description of Artificial Sequence: Synthetic oligonucleotide
  Antisense strand to SEQ ID NO: 594000
ucaauucugacacuuaugu

SEQ ID NO: 594002 - RNA, 19 nt, Artificial Sequence
  Description of Artificial Sequence: Synthetic oligonucleotide
  Sense strand starting at position 3601 of SEQ ID NO: 584847
gacucacacuugggaggau

SEQ ID NO: 594003 - RNA, 19 nt, Artificial Sequence
  Description of Artificial Sequence: Synthetic oligonucleotide
  Antisense strand to SEQ ID NO: 594002
auccucccaagugugaguc

SEQ ID NO: 594004 - RNA, 19 nt, Artificial Sequence
  Description of Artificial Sequence: Synthetic oligonucleotide
  Sense strand starting at position 3960 of SEQ ID NO: 584847
gccucagcccucggcaaau

SEQ ID NO: 594005 - RNA, 19 nt, Artificial Sequence
  Description of Artificial Sequence: Synthetic oligonucleotide
  Antisense strand to SEQ ID NO: 594004
auuugccgagggcugaggc

SEQ ID NO: 594006 - RNA, 19 nt, Artificial Sequence
  Description of Artificial Sequence: Synthetic oligonucleotide
  Sense strand starting at position 3983 of SEQ ID NO: 584847
uguggcaguccaugggaua

SEQ ID NO: 594007 - RNA, 19 nt, Artificial Sequence
  Description of Artificial Sequence: Synthetic oligonucleotide
  Antisense strand to SEQ ID NO: 594006
uaucccauggacugccaca

SEQ ID NO: 594008 - RNA, 19 nt, Artificial Sequence
  Description of Artificial Sequence: Synthetic oligonucleotide
  Sense strand starting at position 10 of SEQ ID NO: 584848
caaacugacucuugggaag

SEQ ID NO: 594009 - RNA, 19 nt, Artificial Sequence
  Description of Artificial Sequence: Synthetic oligonucleotide
  Antisense strand to SEQ ID NO: 594008
cuucccaagagucaguuug

SEQ ID NO: 594010 - RNA, 19 nt, Artificial Sequence
  Description of Artificial Sequence: Synthetic oligonucleotide
  Sense strand starting at position 71 of SEQ ID NO: 584848
gcuuucuuauauccaggua

SEQ ID NO: 594011 - RNA, 19 nt, Artificial Sequence
  Description of Artificial Sequence: Synthetic oligonucleotide
  Antisense strand to SEQ ID NO: 594010
uaccuggauauaagaaagc

SEQ ID NO: 594012 - RNA, 19 nt, Artificial Sequence
  Description of Artificial Sequence: Synthetic oligonucleotide
  Sense strand starting at position 125 of SEQ ID NO: 584848
ugcaauuugucuccaagua

SEQ ID NO: 594013 - RNA, 19 nt, Artificial Sequence
  Description of Artificial Sequence: Synthetic oligonucleotide
  Antisense strand to SEQ ID NO: 594012
uacuuggagacaaauugca

SEQ ID NO: 594014 - RNA, 19 nt, Artificial Sequence
  Description of Artificial Sequence: Synthetic oligonucleotide
  Sense strand starting at position 177 of SEQ ID NO: 584848
aggcuuuaagcucaagaga

SEQ ID NO: 594015 - RNA, 19 nt, Artificial Sequence
  Description of Artificial Sequence: Synthetic oligonucleotide
  Antisense strand to SEQ ID NO: 594014
ucucuugagcuuaaagccu

SEQ ID NO: 594016 - RNA, 19 nt, Artificial Sequence
  Description of Artificial Sequence: Synthetic oligonucleotide
  Sense strand starting at position 255 of SEQ ID NO: 584848
cauuauggguucugauuuc

SEQ ID NO: 594017 - RNA, 19 nt, Artificial Sequence
  Description of Artificial Sequence: Synthetic oligonucleotide
  Antisense strand to SEQ ID NO: 594016
gaaaucagaacccauaaug

SEQ ID NO: 594018 - RNA, 19 nt, Artificial Sequence
  Description of Artificial Sequence: Synthetic oligonucleotide
  Sense strand starting at position 262 of SEQ ID NO: 584848
gguucugauuucuacccuu

SEQ ID NO: 594019 - RNA, 19 nt, Artificial Sequence
  Description of Artificial Sequence: Synthetic oligonucleotide
  Antisense strand to SEQ ID NO: 594018
aaggguagaaaucagaacc

SEQ ID NO: 594020 - RNA, 19 nt, Artificial Sequence
  Description of Artificial Sequence: Synthetic oligonucleotide
  Sense strand starting at position 295 of SEQ ID NO: 584848
agaccugaccaaugucuau

SEQ ID NO: 594021 - RNA, 19 nt, Artificial Sequence
  Description of Artificial Sequence: Synthetic oligonucleotide
  Antisense strand to SEQ ID NO: 594020
auagacauuggucaggucu

SEQ ID NO: 594022 - RNA, 19 nt, Artificial Sequence
  Description of Artificial Sequence: Synthetic oligonucleotide
  Sense strand starting at position 433 of SEQ ID NO: 584848
uguauuucccucugcauua

SEQ ID NO: 594023 - RNA, 19 nt, Artificial Sequence
  Description of Artificial Sequence: Synthetic oligonucleotide
  Antisense strand to SEQ ID NO: 594022
uaaugcagagggaaauaca

SEQ ID NO: 594024 - RNA, 19 nt, Artificial Sequence
  Description of Artificial Sequence: Synthetic oligonucleotide
  Sense strand starting at position 453 of SEQ ID NO: 584848
guucuauccauguggagga

SEQ ID NO: 594025 - RNA, 19 nt, Artificial Sequence
  Description of Artificial Sequence: Synthetic oligonucleotide
  Antisense strand to SEQ ID NO: 594024
uccuccacauggauagaac

SEQ ID NO: 594026 - RNA, 19 nt, Artificial Sequence
  Description of Artificial Sequence: Synthetic oligonucleotide
  Sense strand starting at position 924 of SEQ ID NO: 584848
aggugucuuccagaacuag

SEQ ID NO: 594027 - RNA, 19 nt, Artificial Sequence
  Description of Artificial Sequence: Synthetic oligonucleotide
  Antisense strand to SEQ ID NO: 594026
cuaguucuggaagacaccu

SEQ ID NO: 594028 - RNA, 19 nt, Artificial Sequence
  Description of Artificial Sequence: Synthetic oligonucleotide
  Sense strand starting at position 936 of SEQ ID NO: 584848
gaacuagugaggugucuca

SEQ ID NO: 594029 - RNA, 19 nt, Artificial Sequence
  Description of Artificial Sequence: Synthetic oligonucleotide
  Antisense strand to SEQ ID NO: 594028
ugagacaccucacuaguuc

SEQ ID NO: 594030 - RNA, 19 nt, Artificial Sequence
  Description of Artificial Sequence: Synthetic oligonucleotide
  Sense strand starting at position 966 of SEQ ID NO: 584848
acaauaaagguacgaguuu

SEQ ID NO: 594031 - RNA, 19 nt, Artificial Sequence
  Description of Artificial Sequence: Synthetic oligonucleotide
  Antisense strand to SEQ ID NO: 594030
aaacucguaccuuuauugu

SEQ ID NO: 594032 - RNA, 19 nt, Artificial Sequence
  Description of Artificial Sequence: Synthetic oligonucleotide
  Sense strand starting at position 1065 of SEQ ID NO: 584848
gccgacaggucucuaaaga

SEQ ID NO: 594033 - RNA, 19 nt, Artificial Sequence
  Description of Artificial Sequence: Synthetic oligonucleotide
  Antisense strand to SEQ ID NO: 594032
ucuuuagagaccugucggc

SEQ ID NO: 594034 - RNA, 19 nt, Artificial Sequence
  Description of Artificial Sequence: Synthetic oligonucleotide
  Sense strand starting at position 1129 of SEQ ID NO: 584848
ccgaaagacucccuagcau

SEQ ID NO: 594035 - RNA, 19 nt, Artificial Sequence
  Description of Artificial Sequence: Synthetic oligonucleotide
  Antisense strand to SEQ ID NO: 594034
augcuagggagucuuucgg

SEQ ID NO: 594036 - RNA, 19 nt, Artificial Sequence
  Description of Artificial Sequence: Synthetic oligonucleotide
  Sense strand starting at position 1253 of SEQ ID NO: 584848
gcaggagaucgacggcuua

SEQ ID NO: 594037 - RNA, 19 nt, Artificial Sequence
  Description of Artificial Sequence: Synthetic oligonucleotide
  Antisense strand to SEQ ID NO: 594036
uaagccgucgaucuccugc

SEQ ID NO: 594038 - RNA, 19 nt, Artificial Sequence
  Description of Artificial Sequence: Synthetic oligonucleotide
  Sense strand starting at position 1333 of SEQ ID NO: 584848
cagucagauuaggaaggaa

SEQ ID NO: 594039 - RNA, 19 nt, Artificial Sequence
  Description of Artificial Sequence: Synthetic oligonucleotide
  Antisense strand to SEQ ID NO: 594038
uuccuuccuaaucugacug

SEQ ID NO: 594040 - RNA, 19 nt, Artificial Sequence
  Description of Artificial Sequence: Synthetic oligonucleotide
  Sense strand starting at position 1853 of SEQ ID NO: 584848
ugaguuucugagggcgagu

SEQ ID NO: 594041 - RNA, 19 nt, Artificial Sequence
  Description of Artificial Sequence: Synthetic oligonucleotide
  Antisense strand to SEQ ID NO: 594040
acucgcccucagaaacuca

SEQ ID NO: 594042 - RNA, 19 nt, Artificial Sequence
  Description of Artificial Sequence: Synthetic oligonucleotide
  Sense strand starting at position 2036 of SEQ ID NO: 584848
gcgcgcuugagcgcuagaa

SEQ ID NO: 594043 - RNA, 19 nt, Artificial Sequence
  Description of Artificial Sequence: Synthetic oligonucleotide
  Antisense strand to SEQ ID NO: 594042
uucuagcgcucaagcgcgc

SEQ ID NO: 594044 - RNA, 19 nt, Artificial Sequence
  Description of Artificial Sequence: Synthetic oligonucleotide
  Sense strand starting at position 2040 of SEQ ID NO: 584848
gcuugagcgcuagaagauu

SEQ ID NO: 594045 - RNA, 19 nt, Artificial Sequence
  Description of Artificial Sequence: Synthetic oligonucleotide
  Antisense strand to SEQ ID NO: 594044
aaucuucuagcgcucaagc

SEQ ID NO: 594046 - RNA, 19 nt, Artificial Sequence
  Description of Artificial Sequence: Synthetic oligonucleotide
  Sense strand starting at position 2187 of SEQ ID NO: 584848
guuuaaaucuuggcaggcu

SEQ ID NO: 594047 - RNA, 19 nt, Artificial Sequence
  Description of Artificial Sequence: Synthetic oligonucleotide
  Antisense strand to SEQ ID NO: 594046
agccugccaagauuuaaac

SEQ ID NO: 594048 - RNA, 19 nt, Artificial Sequence
  Description of Artificial Sequence: Synthetic oligonucleotide
  Sense strand starting at position 2392 of SEQ ID NO: 584848
gggcugugggcgucacauu

SEQ ID NO: 594049 - RNA, 19 nt, Artificial Sequence
  Description of Artificial Sequence: Synthetic oligonucleotide
  Antisense strand to SEQ ID NO: 594048
aaugugacgcccacagccc

SEQ ID NO: 594050 - RNA, 19 nt, Artificial Sequence
  Description of Artificial Sequence: Synthetic oligonucleotide
  Sense strand starting at position 2470 of SEQ ID NO: 584848
uugcacgacuugucaagaa

SEQ ID NO: 594051 - RNA, 19 nt, Artificial Sequence
  Description of Artificial Sequence: Synthetic oligonucleotide
  Antisense strand to SEQ ID NO: 594050
uucuugacaagucgugcaa

SEQ ID NO: 594052 - RNA, 19 nt, Artificial Sequence
  Description of Artificial Sequence: Synthetic oligonucleotide
  Sense strand starting at position 2495 of SEQ ID NO: 584848
cgcuuccgaguuugagaau

SEQ ID NO: 594053 - RNA, 19 nt, Artificial Sequence
  Description of Artificial Sequence: Synthetic oligonucleotide
  Antisense strand to SEQ ID NO: 594052
auucucaaacucggaagcg

SEQ ID NO: 594054 - RNA, 19 nt, Artificial Sequence
  Description of Artificial Sequence: Synthetic oligonucleotide
  Sense strand starting at position 2675 of SEQ ID NO: 584848
aacugcgaguccuccagaa

SEQ ID NO: 594055 - RNA, 19 nt, Artificial Sequence
  Description of Artificial Sequence: Synthetic oligonucleotide
  Antisense strand to SEQ ID NO: 594054
uucuggaggacucgcaguu

SEQ ID NO: 594056 - RNA, 19 nt, Artificial Sequence
  Description of Artificial Sequence: Synthetic oligonucleotide
  Sense strand starting at position 2677 of SEQ ID NO: 584848
cugcgaguccuccagaaag

SEQ ID NO: 594057 - RNA, 19 nt, Artificial Sequence
  Description of Artificial Sequence: Synthetic oligonucleotide
  Antisense strand to SEQ ID NO: 594056
cuuucuggaggacucgcag

SEQ ID NO: 594058 - RNA, 19 nt, Artificial Sequence
  Description of Artificial Sequence: Synthetic oligonucleotide
  Sense strand starting at position 2679 of SEQ ID NO: 584848
gcgaguccuccagaaagac

SEQ ID NO: 594059 - RNA, 19 nt, Artificial Sequence
  Description of Artificial Sequence: Synthetic oligonucleotide
  Antisense strand to SEQ ID NO: 594058
gucuuucuggaggacucgc

SEQ ID NO: 594060 - RNA, 19 nt, Artificial Sequence
  Description of Artificial Sequence: Synthetic oligonucleotide
  Sense strand starting at position 2713 of SEQ ID NO: 584848
uguccaaccuuucugggau

SEQ ID NO: 594061 - RNA, 19 nt, Artificial Sequence
  Description of Artificial Sequence: Synthetic oligonucleotide
  Antisense strand to SEQ ID NO: 594060
aucccagaaagguuggaca

SEQ ID NO: 594062 - RNA, 19 nt, Artificial Sequence
  Description of Artificial Sequence: Synthetic oligonucleotide
  Sense strand starting at position 2721 of SEQ ID NO: 584848
cuuucugggauucguaguu

SEQ ID NO: 594063 - RNA, 19 nt, Artificial Sequence
  Description of Artificial Sequence: Synthetic oligonucleotide
  Antisense strand to SEQ ID NO: 594062
aacuacgaaucccagaaag

SEQ ID NO: 594064 - RNA, 19 nt, Artificial Sequence
  Description of Artificial Sequence: Synthetic oligonucleotide
  Sense strand starting at position 2726 of SEQ ID NO: 584848
ugggauucguaguuuauac

SEQ ID NO: 594065 - RNA, 19 nt, Artificial Sequence
  Description of Artificial Sequence: Synthetic oligonucleotide
  Antisense strand to SEQ ID NO: 594064
guauaaacuacgaauccca

SEQ ID NO: 594066 - RNA, 19 nt, Artificial Sequence
  Description of Artificial Sequence: Synthetic oligonucleotide
  Sense strand starting at position 2742 of SEQ ID NO: 584848
uacccagguccugguuaua

SEQ ID NO: 594067 - RNA, 19 nt, Artificial Sequence
  Description of Artificial Sequence: Synthetic oligonucleotide
  Antisense strand to SEQ ID NO: 594066
uauaaccaggaccugggua

SEQ ID NO: 594068 - RNA, 19 nt, Artificial Sequence
  Description of Artificial Sequence: Synthetic oligonucleotide
  Sense strand starting at position 2765 of SEQ ID NO: 584848
aguuaagaguucuaauaag

SEQ ID NO: 594069 - RNA, 19 nt, Artificial Sequence
  Description of Artificial Sequence: Synthetic oligonucleotide
  Antisense strand to SEQ ID NO: 594068
cuuauuagaacucuuaacu

SEQ ID NO: 594070 - RNA, 19 nt, Artificial Sequence
  Description of Artificial Sequence: Synthetic oligonucleotide
  Sense strand starting at position 2779 of SEQ ID NO: 584848
auaagcagcuguuuaauga

SEQ ID NO: 594071 - RNA, 19 nt, Artificial Sequence
  Description of Artificial Sequence: Synthetic oligonucleotide
  Antisense strand to SEQ ID NO: 594070
ucauuaaacagcugcuuau

SEQ ID NO: 594072 - RNA, 19 nt, Artificial Sequence
  Description of Artificial Sequence: Synthetic oligonucleotide
  Sense strand starting at position 2893 of SEQ ID NO: 584848
gaacauaagugucagaauu

SEQ ID NO: 594073 - RNA, 19 nt, Artificial Sequence
  Description of Artificial Sequence: Synthetic oligonucleotide
  Antisense strand to SEQ ID NO: 594072
aauucugacacuuauguuc

SEQ ID NO: 594074 - RNA, 19 nt, Artificial Sequence
  Description of Artificial Sequence: Synthetic oligonucleotide
  Sense strand starting at position 2895 of SEQ ID NO: 584848
acauaagugucagaauuga

SEQ ID NO: 594075 - RNA, 19 nt, Artificial Sequence
  Description of Artificial Sequence: Synthetic oligonucleotide
  Antisense strand to SEQ ID NO: 594074
ucaauucugacacuuaugu

SEQ ID NO: 594076 - RNA, 19 nt, Artificial Sequence
  Description of Artificial Sequence: Synthetic oligonucleotide
  Sense strand starting at position 3294 of SEQ ID NO: 584848
gacucacacuugggaggau

SEQ ID NO: 594077 - RNA, 19 nt, Artificial Sequence
  Description of Artificial Sequence: Synthetic oligonucleotide
  Antisense strand to SEQ ID NO: 594076
auccucccaagugugaguc

SEQ ID NO: 594078 - RNA, 19 nt, Artificial Sequence
  Description of Artificial Sequence: Synthetic oligonucleotide
  Sense strand starting at position 3676 of SEQ ID NO: 584848
uguggcaguccaugggaua

SEQ ID NO: 594079 - RNA, 19 nt, Artificial Sequence
  Description of Artificial Sequence: Synthetic oligonucleotide
  Antisense strand to SEQ ID NO: 594078
uaucccauggacugccaca

SEQ ID NO: 594080 - RNA, 19 nt, Artificial Sequence
  Description of Artificial Sequence: Synthetic oligonucleotide
  Sense strand starting at position 3677 of SEQ ID NO: 584848
guggcaguccaugggauau

SEQ ID NO: 594081 - RNA, 19 nt, Artificial Sequence
  Description of Artificial Sequence: Synthetic oligonucleotide
  Antisense strand to SEQ ID NO: 594080
auaucccauggacugccac

SEQ ID NO: 594082 - RNA, 19 nt, Artificial Sequence
  Description of Artificial Sequence: Synthetic oligonucleotide
  Sense strand starting at position 3861 of SEQ ID NO: 584848
ccuccuacucgggaaucau

SEQ ID NO: 594083 - RNA, 19 nt, Artificial Sequence
  Description of Artificial Sequence: Synthetic oligonucleotide
  Antisense strand to SEQ ID NO: 594082
augauucccgaguaggagg

SEQ ID NO: 594084 - RNA, 19 nt, Artificial Sequence
  Description of Artificial Sequence: Synthetic oligonucleotide
  Sense strand starting at position 3895 of SEQ ID NO: 584848
caaagucaugccugggcga

SEQ ID NO: 594085 - RNA, 19 nt, Artificial Sequence
  Description of Artificial Sequence: Synthetic oligonucleotide
  Antisense strand to SEQ ID NO: 594084
ucgcccaggcaugacuuug

SEQ ID NO: 594086 - RNA, 19 nt, Artificial Sequence
  Description of Artificial Sequence: Synthetic oligonucleotide
  Sense strand starting at position 3897 of SEQ ID NO: 584848
aagucaugccugggcgaca

SEQ ID NO: 594087 - RNA, 19 nt, Artificial Sequence
  Description of Artificial Sequence: Synthetic oligonucleotide
  Antisense strand to SEQ ID NO: 594086
ugucgcccaggcaugacuu

SEQ ID NO: 594088 - RNA, 19 nt, Artificial Sequence
  Description of Artificial Sequence: Synthetic oligonucleotide
  Sense strand starting at position 11 of SEQ ID NO: 584849
aggcuuacacaugguaaua

SEQ ID NO: 594089 - RNA, 19 nt, Artificial Sequence
  Description of Artificial Sequence: Synthetic oligonucleotide
  Antisense strand to SEQ ID NO: 594088
uauuaccauguguaagccu

SEQ ID NO: 594090 - RNA, 19 nt, Artificial Sequence
  Description of Artificial Sequence: Synthetic oligonucleotide
  Sense strand starting at position 155 of SEQ ID NO: 584849
aaaguaguccuugguuaua

SEQ ID NO: 594091 - RNA, 19 nt, Artificial Sequence
  Description of Artificial Sequence: Synthetic oligonucleotide
  Antisense strand to SEQ ID NO: 594090
uauaaccaaggacuacuuu

SEQ ID NO: 594092 - RNA, 19 nt, Artificial Sequence
  Description of Artificial Sequence: Synthetic oligonucleotide
  Sense strand starting at position 341 of SEQ ID NO: 584849
uuccacuguucuguaaaca

SEQ ID NO: 594093 - RNA, 19 nt, Artificial Sequence
  Description of Artificial Sequence: Synthetic oligonucleotide
  Antisense strand to SEQ ID NO: 594092
uguuuacagaacaguggaa

SEQ ID NO: 594094 - RNA, 19 nt, Artificial Sequence
  Description of Artificial Sequence: Synthetic oligonucleotide
  Sense strand starting at position 342 of SEQ ID NO: 584849
uccacuguucuguaaacag

SEQ ID NO: 594095 - RNA, 19 nt, Artificial Sequence
  Description of Artificial Sequence: Synthetic oligonucleotide
  Antisense strand to SEQ ID NO: 594094
cuguuuacagaacagugga

SEQ ID NO: 594096 - RNA, 19 nt, Artificial Sequence
  Description of Artificial Sequence: Synthetic oligonucleotide
  Sense strand starting at position 409 of SEQ ID NO: 584849
cugggucuucucugaauca

SEQ ID NO: 594097 - RNA, 19 nt, Artificial Sequence
  Description of Artificial Sequence: Synthetic oligonucleotide
  Antisense strand to SEQ ID NO: 594096
ugauucagagaagacccag

SEQ ID NO: 594098 - RNA, 19 nt, Artificial Sequence
  Description of Artificial Sequence: Synthetic oligonucleotide
  Sense strand starting at position 492 of SEQ ID NO: 584849
gaccgaagucccugaagau

SEQ ID NO: 594099 - RNA, 19 nt, Artificial Sequence
  Description of Artificial Sequence: Synthetic oligonucleotide
  Antisense strand to SEQ ID NO: 594098
aucuucagggacuucgguc

SEQ ID NO: 594100 - RNA, 19 nt, Artificial Sequence
  Description of Artificial Sequence: Synthetic oligonucleotide
  Sense strand starting at position 540 of SEQ ID NO: 584849
auucuaugucuugauauag

SEQ ID NO: 594101 - RNA, 19 nt, Artificial Sequence
  Description of Artificial Sequence: Synthetic oligonucleotide
  Antisense strand to SEQ ID NO: 594100
cuauaucaagacauagaau

SEQ ID NO: 594102 - RNA, 19 nt, Artificial Sequence
  Description of Artificial Sequence: Synthetic oligonucleotide
  Sense strand starting at position 584 of SEQ ID NO: 584849
ucuauauagcagcaguuua

SEQ ID NO: 594103 - RNA, 19 nt, Artificial Sequence
  Description of Artificial Sequence: Synthetic oligonucleotide
  Antisense strand to SEQ ID NO: 594102
uaaacugcugcuauauaga

SEQ ID NO: 594104 - RNA, 19 nt, Artificial Sequence
  Description of Artificial Sequence: Synthetic oligonucleotide
  Sense strand starting at position 817 of SEQ ID NO: 584849
aguguucuucaggauagag

SEQ ID NO: 594105 - RNA, 19 nt, Artificial Sequence
  Description of Artificial Sequence: Synthetic oligonucleotide
  Antisense strand to SEQ ID NO: 594104
cucuauccugaagaacacu

SEQ ID NO: 594106 - RNA, 19 nt, Artificial Sequence
  Description of Artificial Sequence: Synthetic oligonucleotide
  Sense strand starting at position 971 of SEQ ID NO: 584849
ucauuuauuugacagugca

SEQ ID NO: 594107 - RNA, 19 nt, Artificial Sequence
  Description of Artificial Sequence: Synthetic oligonucleotide
  Antisense strand to SEQ ID NO: 594106
ugcacugucaaauaaauga

SEQ ID NO: 594108 - RNA, 19 nt, Artificial Sequence
  Description of Artificial Sequence: Synthetic oligonucleotide
  Sense strand starting at position 1005 of SEQ ID NO: 584849
gcucaucaaugaucagaga

SEQ ID NO: 594109 - RNA, 19 nt, Artificial Sequence
  Description of Artificial Sequence: Synthetic oligonucleotide
  Antisense strand to SEQ ID NO: 594108
ucucugaucauugaugagc

SEQ ID NO: 594110 - RNA, 19 nt, Artificial Sequence
  Description of Artificial Sequence: Synthetic oligonucleotide
  Sense strand starting at position 1027 of SEQ ID NO: 584849
aggaaauagcucugaauuc

SEQ ID NO: 594111 - RNA, 19 nt, Artificial Sequence
  Description of Artificial Sequence: Synthetic oligonucleotide
  Antisense strand to SEQ ID NO: 594110
gaauucagagcuauuuccu

SEQ ID NO: 594112 - RNA, 19 nt, Artificial Sequence
  Description of Artificial Sequence: Synthetic oligonucleotide
  Sense strand starting at position 1095 of SEQ ID NO: 584849
uuaaucagucuggaguaca

SEQ ID NO: 594113 - RNA, 19 nt, Artificial Sequence
  Description of Artificial Sequence: Synthetic oligonucleotide
  Antisense strand to SEQ ID NO: 594112
uguacuccagacugauuaa

SEQ ID NO: 594114 - RNA, 19 nt, Artificial Sequence
  Description of Artificial Sequence: Synthetic oligonucleotide
  Sense strand starting at position 1244 of SEQ ID NO: 584849
ggaggugucaaggauguuu

SEQ ID NO: 594115 - RNA, 19 nt, Artificial Sequence
  Description of Artificial Sequence: Synthetic oligonucleotide
  Antisense strand to SEQ ID NO: 594114
aaacauccuugacaccucc

SEQ ID NO: 594116 - RNA, 19 nt, Artificial Sequence
  Description of Artificial Sequence: Synthetic oligonucleotide
  Sense strand starting at position 1317 of SEQ ID NO: 584849
cagcauugaguuuagcuau

SEQ ID NO: 594117 - RNA, 19 nt, Artificial Sequence
  Description of Artificial Sequence: Synthetic oligonucleotide
  Antisense strand to SEQ ID NO: 594116
auagcuaaacucaaugcug

SEQ ID NO: 594118 - RNA, 19 nt, Artificial Sequence
  Description of Artificial Sequence: Synthetic oligonucleotide
  Sense strand starting at position 1361 of SEQ ID NO: 584849
acuuuaguuuagucgaaca

SEQ ID NO: 594119 - RNA, 19 nt, Artificial Sequence
  Description of Artificial Sequence: Synthetic oligonucleotide
  Antisense strand to SEQ ID NO: 594118
uguucgacuaaacuaaagu

SEQ ID NO: 594120 - RNA, 19 nt, Artificial Sequence
  Description of Artificial Sequence: Synthetic oligonucleotide
  Sense strand starting at position 1363 of SEQ ID NO: 584849
uuuaguuuagucgaacaua

SEQ ID NO: 594121 - RNA, 19 nt, Artificial Sequence
  Description of Artificial Sequence: Synthetic oligonucleotide
  Antisense strand to SEQ ID NO: 594120
uauguucgacuaaacuaaa

SEQ ID NO: 594122 - RNA, 19 nt, Artificial Sequence
  Description of Artificial Sequence: Synthetic oligonucleotide
  Sense strand starting at position 1366 of SEQ ID NO: 584849
aguuuagucgaacauagac

SEQ ID NO: 594123 - RNA, 19 nt, Artificial Sequence
  Description of Artificial Sequence: Synthetic oligonucleotide
  Antisense strand to SEQ ID NO: 594122
gucuauguucgacuaaacu

SEQ ID NO: 594124 - RNA, 19 nt, Artificial Sequence
  Description of Artificial Sequence: Synthetic oligonucleotide
  Sense strand starting at position 2078 of SEQ ID NO: 584849
aaauguaaguggcuuaaua

SEQ ID NO: 594125 - RNA, 19 nt, Artificial Sequence
  Description of Artificial Sequence: Synthetic oligonucleotide
  Antisense strand to SEQ ID NO: 594124
uauuaagccacuuacauuu

SEQ ID NO: 594126 - RNA, 19 nt, Artificial Sequence
  Description of Artificial Sequence: Synthetic oligonucleotide
  Sense strand starting at position 2204 of SEQ ID NO: 584849
gggcgguggguuuauuaca

SEQ ID NO: 594127 - RNA, 19 nt, Artificial Sequence
  Description of Artificial Sequence: Synthetic oligonucleotide
  Antisense strand to SEQ ID NO: 594126
uguaauaaacccaccgccc

SEQ ID NO: 594128 - RNA, 19 nt, Artificial Sequence
  Description of Artificial Sequence: Synthetic oligonucleotide
  Sense strand starting at position 2211 of SEQ ID NO: 584849
ggguuuauuacaggaguau

SEQ ID NO: 594129 - RNA, 19 nt, Artificial Sequence
  Description of Artificial Sequence: Synthetic oligonucleotide
  Antisense strand to SEQ ID NO: 594128
auacuccuguaauaaaccc

SEQ ID NO: 594130 - RNA, 19 nt, Artificial Sequence
  Description of Artificial Sequence: Synthetic oligonucleotide
  Sense strand starting at position 2212 of SEQ ID NO: 584849
gguuuauuacaggaguauu

SEQ ID NO: 594131 - RNA, 19 nt, Artificial Sequence
  Description of Artificial Sequence: Synthetic oligonucleotide
  Antisense strand to SEQ ID NO: 594130
aauacuccuguaauaaacc

SEQ ID NO: 594132 - RNA, 19 nt, Artificial Sequence
  Description of Artificial Sequence: Synthetic oligonucleotide
  Sense strand starting at position 2367 of SEQ ID NO: 584849
ucggaaagcuguuugaaug

SEQ ID NO: 594133 - RNA, 19 nt, Artificial Sequence
  Description of Artificial Sequence: Synthetic oligonucleotide
  Antisense strand to SEQ ID NO: 594132
cauucaaacagcuuuccga

SEQ ID NO: 594134 - RNA, 19 nt, Artificial Sequence
  Description of Artificial Sequence: Synthetic oligonucleotide
  Sense strand starting at position 3119 of SEQ ID NO: 584849
ugucucuggcuggaacaau

SEQ ID NO: 594135 - RNA, 19 nt, Artificial Sequence
  Description of Artificial Sequence: Synthetic oligonucleotide
  Antisense strand to SEQ ID NO: 594134
auuguuccagccagagaca

SEQ ID NO: 594136 - RNA, 19 nt, Artificial Sequence
  Description of Artificial Sequence: Synthetic oligonucleotide
  Sense strand starting at position 3299 of SEQ ID NO: 584849
guagucuuaauguaucuga

SEQ ID NO: 594137 - RNA, 19 nt, Artificial Sequence
  Description of Artificial Sequence: Synthetic oligonucleotide
  Antisense strand to SEQ ID NO: 594136
ucagauacauuaagacuac

SEQ ID NO: 594138 - RNA, 19 nt, Artificial Sequence
  Description of Artificial Sequence: Synthetic oligonucleotide
  Sense strand starting at position 3465 of SEQ ID NO: 584849
gucuaucuaucaucauaga

SEQ ID NO: 594139 - RNA, 19 nt, Artificial Sequence
  Description of Artificial Sequence: Synthetic oligonucleotide
  Antisense strand to SEQ ID NO: 594138
ucuaugaugauagauagac

SEQ ID NO: 594140 - RNA, 19 nt, Artificial Sequence
  Description of Artificial Sequence: Synthetic oligonucleotide
  Sense strand starting at position 3500 of SEQ ID NO: 584849
uggacaguuggcugacgaa

SEQ ID NO: 594141 - RNA, 19 nt, Artificial Sequence
  Description of Artificial Sequence: Synthetic oligonucleotide
  Antisense strand to SEQ ID NO: 594140
uucgucagccaacugucca

SEQ ID NO: 594142 - RNA, 19 nt, Artificial Sequence
  Description of Artificial Sequence: Synthetic oligonucleotide
  Sense strand starting at position 3512 of SEQ ID NO: 584849
ugacgaagugucugauaaa

SEQ ID NO: 594143 - RNA, 19 nt, Artificial Sequence
  Description of Artificial Sequence: Synthetic oligonucleotide
  Antisense strand to SEQ ID NO: 594142
uuuaucagacacuucguca

SEQ ID NO: 594144 - RNA, 19 nt, Artificial Sequence
  Description of Artificial Sequence: Synthetic oligonucleotide
  Sense strand starting at position 3565 of SEQ ID NO: 584849
ccuccugauuauguuucua

SEQ ID NO: 594145 - RNA, 19 nt, Artificial Sequence
  Description of Artificial Sequence: Synthetic oligonucleotide
  Antisense strand to SEQ ID NO: 594144
uagaaacauaaucaggagg

SEQ ID NO: 594146 - RNA, 19 nt, Artificial Sequence
  Description of Artificial Sequence: Synthetic oligonucleotide
  Sense strand starting at position 3567 of SEQ ID NO: 584849
uccugauuauguuucuacu

SEQ ID NO: 594147 - RNA, 19 nt, Artificial Sequence
  Description of Artificial Sequence: Synthetic oligonucleotide
  Antisense strand to SEQ ID NO: 594146
aguagaaacauaaucagga

SEQ ID NO: 594148 - RNA, 19 nt, Artificial Sequence
  Description of Artificial Sequence: Synthetic oligonucleotide
  Sense strand starting at position 3630 of SEQ ID NO: 584849
cagugauguggugggagga

SEQ ID NO: 594149 - RNA, 19 nt, Artificial Sequence
  Description of Artificial Sequence: Synthetic oligonucleotide
  Antisense strand to SEQ ID NO: 594148
uccucccaccacaucacug

SEQ ID NO: 594150 - RNA, 19 nt, Artificial Sequence
  Description of Artificial Sequence: Synthetic oligonucleotide
  Sense strand starting at position 3631 of SEQ ID NO: 584849
agugauguggugggaggaa

SEQ ID NO: 594151 - RNA, 19 nt, Artificial Sequence
  Description of Artificial Sequence: Synthetic oligonucleotide
  Antisense strand to SEQ ID NO: 594150
uuccucccaccacaucacu

SEQ ID NO: 594152 - RNA, 19 nt, Artificial Sequence
  Description of Artificial Sequence: Synthetic oligonucleotide
  Sense strand starting at position 3668 of SEQ ID NO: 584849
uauaaagugcuggaaucuu

SEQ ID NO: 594153 - RNA, 19 nt, Artificial Sequence
  Description of Artificial Sequence: Synthetic oligonucleotide
  Antisense strand to SEQ ID NO: 594152
aagauuccagcacuuuaua

SEQ ID NO: 594154 - RNA, 19 nt, Artificial Sequence
  Description of Artificial Sequence: Synthetic oligonucleotide
  Sense strand starting at position 3795 of SEQ ID NO: 584849
ggcgauuauggauagccaa

SEQ ID NO: 594155 - RNA, 19 nt, Artificial Sequence
  Description of Artificial Sequence: Synthetic oligonucleotide
  Antisense strand to SEQ ID NO: 594154
uuggcuauccauaaucgcc

SEQ ID NO: 594156 - RNA, 19 nt, Artificial Sequence
  Description of Artificial Sequence: Synthetic oligonucleotide
  Sense strand starting at position 3849 of SEQ ID NO: 584849
ggaaguuuauggucuguua

SEQ ID NO: 594157 - RNA, 19 nt, Artificial Sequence
  Description of Artificial Sequence: Synthetic oligonucleotide
  Antisense strand to SEQ ID NO: 594156
uaacagaccauaaacuucc

SEQ ID NO: 594158 - RNA, 19 nt, Artificial Sequence
  Description of Artificial Sequence: Synthetic oligonucleotide
  Sense strand starting at position 3862 of SEQ ID NO: 584849
cuguuauccacuggaguug

SEQ ID NO: 594159 - RNA, 19 nt, Artificial Sequence
  Description of Artificial Sequence: Synthetic oligonucleotide
  Antisense strand to SEQ ID NO: 594158
caacuccaguggauaacag

SEQ ID NO: 594160 - RNA, 19 nt, Artificial Sequence
  Description of Artificial Sequence: Synthetic oligonucleotide
  Sense strand starting at position 3871 of SEQ ID NO: 584849
acuggaguuguuugaaaua

SEQ ID NO: 594161 - RNA, 19 nt, Artificial Sequence
  Description of Artificial Sequence: Synthetic oligonucleotide
  Antisense strand to SEQ ID NO: 594160
uauuucaaacaacuccagu

SEQ ID NO: 594162 - RNA, 19 nt, Artificial Sequence
  Description of Artificial Sequence: Synthetic oligonucleotide
  Sense strand starting at position 3918 of SEQ ID NO: 584849
auauuaauagagugacccu

SEQ ID NO: 594163 - RNA, 19 nt, Artificial Sequence
  Description of Artificial Sequence: Synthetic oligonucleotide
  Antisense strand to SEQ ID NO: 594162
agggucacucuauuaauau

SEQ ID NO: 594164 - RNA, 19 nt, Artificial Sequence
  Description of Artificial Sequence: Synthetic oligonucleotide
  Sense strand starting at position 3957 of SEQ ID NO: 584849
aaacgaaugccugggauaa

SEQ ID NO: 594165 - RNA, 19 nt, Artificial Sequence
  Description of Artificial Sequence: Synthetic oligonucleotide
  Antisense strand to SEQ ID NO: 594164
uuaucccaggcauucguuu

SEQ ID NO: 594166 - RNA, 19 nt, Artificial Sequence
  Description of Artificial Sequence: Synthetic oligonucleotide
  Sense strand starting at position 3958 of SEQ ID NO: 584849
aacgaaugccugggauaaa

SEQ ID NO: 594167 - RNA, 19 nt, Artificial Sequence
  Description of Artificial Sequence: Synthetic oligonucleotide
  Antisense strand to SEQ ID NO: 594166
uuuaucccaggcauucguu

SEQ ID NO: 594168 - RNA, 19 nt, Artificial Sequence
  Description of Artificial Sequence: Synthetic oligonucleotide
  Sense strand starting at position 31 of SEQ ID NO: 584850
cagggugagcgccaucaua

SEQ ID NO: 594169 - RNA, 19 nt, Artificial Sequence
  Description of Artificial Sequence: Synthetic oligonucleotide
  Antisense strand to SEQ ID NO: 594168
uaugauggcgcucacccug

SEQ ID NO: 594170 - RNA, 19 nt, Artificial Sequence
  Description of Artificial Sequence: Synthetic oligonucleotide
  Sense strand starting at position 96 of SEQ ID NO: 584850
gaggucacaucguuaguca

SEQ ID NO: 594171 - RNA, 19 nt, Artificial Sequence
  Description of Artificial Sequence: Synthetic oligonucleotide
  Antisense strand to SEQ ID NO: 594170
ugacuaacgaugugaccuc

SEQ ID NO: 594172 - RNA, 19 nt, Artificial Sequence
  Description of Artificial Sequence: Synthetic oligonucleotide
  Sense strand starting at position 104 of SEQ ID NO: 584850
aucguuagucacggaaagu

SEQ ID NO: 594173 - RNA, 19 nt, Artificial Sequence
  Description of Artificial Sequence: Synthetic oligonucleotide
  Antisense strand to SEQ ID NO: 594172
acuuuccgugacuaacgau

SEQ ID NO: 594174 - RNA, 19 nt, Artificial Sequence
  Description of Artificial Sequence: Synthetic oligonucleotide
  Sense strand starting at position 105 of SEQ ID NO: 584850
ucguuagucacggaaaguc

SEQ ID NO: 594175 - RNA, 19 nt, Artificial Sequence
  Description of Artificial Sequence: Synthetic oligonucleotide
  Antisense strand to SEQ ID NO: 594174
gacuuuccgugacuaacga

SEQ ID NO: 594176 - RNA, 19 nt, Artificial Sequence
  Description of Artificial Sequence: Synthetic oligonucleotide
  Sense strand starting at position 122 of SEQ ID NO: 584850
ucagguuguuugucugaau

SEQ ID NO: 594177 - RNA, 19 nt, Artificial Sequence
  Description of Artificial Sequence: Synthetic oligonucleotide
  Antisense strand to SEQ ID NO: 594176
auucagacaaacaaccuga

SEQ ID NO: 594178 - RNA, 19 nt, Artificial Sequence
  Description of Artificial Sequence: Synthetic oligonucleotide
  Sense strand starting at position 123 of SEQ ID NO: 584850
cagguuguuugucugaauc

SEQ ID NO: 594179 - RNA, 19 nt, Artificial Sequence
  Description of Artificial Sequence: Synthetic oligonucleotide
  Antisense strand to SEQ ID NO: 594178
gauucagacaaacaaccug

SEQ ID NO: 594180 - RNA, 19 nt, Artificial Sequence
  Description of Artificial Sequence: Synthetic oligonucleotide
  Sense strand starting at position 133 of SEQ ID NO: 584850
gucugaaucuccgugaguc

SEQ ID NO: 594181 - RNA, 19 nt, Artificial Sequence
  Description of Artificial Sequence: Synthetic oligonucleotide
  Antisense strand to SEQ ID NO: 594180
gacucacggagauucagac

SEQ ID NO: 594182 - RNA, 19 nt, Artificial Sequence
  Description of Artificial Sequence: Synthetic oligonucleotide
  Sense strand starting at position 199 of SEQ ID NO: 584850
cagaguguguucuuucuca

SEQ ID NO: 594183 - RNA, 19 nt, Artificial Sequence
  Description of Artificial Sequence: Synthetic oligonucleotide
  Antisense strand to SEQ ID NO: 594182
ugagaaagaacacacucug

SEQ ID NO: 594184 - RNA, 19 nt, Artificial Sequence
  Description of Artificial Sequence: Synthetic oligonucleotide
  Sense strand starting at position 207 of SEQ ID NO: 584850
guucuuucucagggcaacu

SEQ ID NO: 594185 - RNA, 19 nt, Artificial Sequence
  Description of Artificial Sequence: Synthetic oligonucleotide
  Antisense strand to SEQ ID NO: 594184
aguugcccugagaaagaac

SEQ ID NO: 594186 - RNA, 19 nt, Artificial Sequence
  Description of Artificial Sequence: Synthetic oligonucleotide
  Sense strand starting at position 425 of SEQ ID NO: 584850
gggcgaguguuuccuggau

SEQ ID NO: 594187 - RNA, 19 nt, Artificial Sequence
  Description of Artificial Sequence: Synthetic oligonucleotide
  Antisense strand to SEQ ID NO: 594186
auccaggaaacacucgccc

SEQ ID NO: 594188 - RNA, 19 nt, Artificial Sequence
  Description of Artificial Sequence: Synthetic oligonucleotide
  Sense strand starting at position 426 of SEQ ID NO: 584850
ggcgaguguuuccuggaug

SEQ ID NO: 594189 - RNA, 19 nt, Artificial Sequence
  Description of Artificial Sequence: Synthetic oligonucleotide
  Antisense strand to SEQ ID NO: 594188
cauccaggaaacacucgcc

SEQ ID NO: 594190 - RNA, 19 nt, Artificial Sequence
  Description of Artificial Sequence: Synthetic oligonucleotide
  Sense strand starting at position 429 of SEQ ID NO: 584850
gaguguuuccuggauguca

SEQ ID NO: 594191 - RNA, 19 nt, Artificial Sequence
  Description of Artificial Sequence: Synthetic oligonucleotide
  Antisense strand to SEQ ID NO: 594190
ugacauccaggaaacacuc

SEQ ID NO: 594192 - RNA, 19 nt, Artificial Sequence
  Description of Artificial Sequence: Synthetic oligonucleotide
  Sense strand starting at position 1091 of SEQ ID NO: 584850
cccguagcuccuuacauaa

SEQ ID NO: 594193 - RNA, 19 nt, Artificial Sequence
  Description of Artificial Sequence: Synthetic oligonucleotide
  Antisense strand to SEQ ID NO: 594192
uuauguaaggagcuacggg

SEQ ID NO: 594194 - RNA, 19 nt, Artificial Sequence
  Description of Artificial Sequence: Synthetic oligonucleotide
  Sense strand starting at position 1360 of SEQ ID NO: 584850
gaugaauguugcccaggga

SEQ ID NO: 594195 - RNA, 19 nt, Artificial Sequence
  Description of Artificial Sequence: Synthetic oligonucleotide
  Antisense strand to SEQ ID NO: 594194
ucccugggcaacauucauc

SEQ ID NO: 594196 - RNA, 19 nt, Artificial Sequence
  Description of Artificial Sequence: Synthetic oligonucleotide
  Sense strand starting at position 1361 of SEQ ID NO: 584850
augaauguugcccagggau

SEQ ID NO: 594197 - RNA, 19 nt, Artificial Sequence
  Description of Artificial Sequence: Synthetic oligonucleotide
  Antisense strand to SEQ ID NO: 594196
aucccugggcaacauucau

SEQ ID NO: 594198 - RNA, 19 nt, Artificial Sequence
  Description of Artificial Sequence: Synthetic oligonucleotide
  Sense strand starting at position 1363 of SEQ ID NO: 584850
gaauguugcccagggauac

SEQ ID NO: 594199 - RNA, 19 nt, Artificial Sequence
  Description of Artificial Sequence: Synthetic oligonucleotide
  Antisense strand to SEQ ID NO: 594198
guaucccugggcaacauuc

SEQ ID NO: 594200 - RNA, 19 nt, Artificial Sequence
  Description of Artificial Sequence: Synthetic oligonucleotide
  Sense strand starting at position 1364 of SEQ ID NO: 584850
aauguugcccagggauaca

SEQ ID NO: 594201 - RNA, 19 nt, Artificial Sequence
  Description of Artificial Sequence: Synthetic oligonucleotide
  Antisense strand to SEQ ID NO: 594200
uguaucccugggcaacauu

SEQ ID NO: 594202 - RNA, 19 nt, Artificial Sequence
  Description of Artificial Sequence: Synthetic oligonucleotide
  Sense strand starting at position 1486 of SEQ ID NO: 584850
cucccagacuguuaaagga

SEQ ID NO: 594203 - RNA, 19 nt, Artificial Sequence
  Description of Artificial Sequence: Synthetic oligonucleotide
  Antisense strand to SEQ ID NO: 594202
uccuuuaacagucugggag

SEQ ID NO: 594204 - RNA, 19 nt, Artificial Sequence
  Description of Artificial Sequence: Synthetic oligonucleotide
  Sense strand starting at position 1502 of SEQ ID NO: 584850
ggacccaguucuuacaguu

SEQ ID NO: 594205 - RNA, 19 nt, Artificial Sequence
  Description of Artificial Sequence: Synthetic oligonucleotide
  Antisense strand to SEQ ID NO: 594204
aacuguaagaacugggucc

SEQ ID NO: 594206 - RNA, 19 nt, Artificial Sequence
  Description of Artificial Sequence: Synthetic oligonucleotide
  Sense strand starting at position 1691 of SEQ ID NO: 584850
ugcugagaucugggaggau

SEQ ID NO: 594207 - RNA, 19 nt, Artificial Sequence
  Description of Artificial Sequence: Synthetic oligonucleotide
  Antisense strand to SEQ ID NO: 594206
auccucccagaucucagca

SEQ ID NO: 594208 - RNA, 19 nt, Artificial Sequence
  Description of Artificial Sequence: Synthetic oligonucleotide
  Sense strand starting at position 2198 of SEQ ID NO: 584850
gugagaaguuucuuaagca

SEQ ID NO: 594209 - RNA, 19 nt, Artificial Sequence
  Description of Artificial Sequence: Synthetic oligonucleotide
  Antisense strand to SEQ ID NO: 594208
ugcuuaagaaacuucucac

SEQ ID NO: 594210 - RNA, 19 nt, Artificial Sequence
  Description of Artificial Sequence: Synthetic oligonucleotide
  Sense strand starting at position 2199 of SEQ ID NO: 584850
ugagaaguuucuuaagcac

SEQ ID NO: 594211 - RNA, 19 nt, Artificial Sequence
  Description of Artificial Sequence: Synthetic oligonucleotide
  Antisense strand to SEQ ID NO: 594210
gugcuuaagaaacuucuca

SEQ ID NO: 594212 - RNA, 19 nt, Artificial Sequence
  Description of Artificial Sequence: Synthetic oligonucleotide
  Sense strand starting at position 2257 of SEQ ID NO: 584850
ggaucuucucagcaacucu

SEQ ID NO: 594213 - RNA, 19 nt, Artificial Sequence
  Description of Artificial Sequence: Synthetic oligonucleotide
  Antisense strand to SEQ ID NO: 594212
agaguugcugagaagaucc

SEQ ID NO: 594214 - RNA, 19 nt, Artificial Sequence
  Description of Artificial Sequence: Synthetic oligonucleotide
  Sense strand starting at position 2266 of SEQ ID NO: 584850
cagcaacucuuguaaguga

SEQ ID NO: 594215 - RNA, 19 nt, Artificial Sequence
  Description of Artificial Sequence: Synthetic oligonucleotide
  Antisense strand to SEQ ID NO: 594214
ucacuuacaagaguugcug

SEQ ID NO: 594216 - RNA, 19 nt, Artificial Sequence
  Description of Artificial Sequence: Synthetic oligonucleotide
  Sense strand starting at position 2274 of SEQ ID NO: 584850
cuuguaagugagugcuguu

SEQ ID NO: 594217 - RNA, 19 nt, Artificial Sequence
  Description of Artificial Sequence: Synthetic oligonucleotide
  Antisense strand to SEQ ID NO: 594216
aacagcacucacuuacaag

SEQ ID NO: 594218 - RNA, 19 nt, Artificial Sequence
  Description of Artificial Sequence: Synthetic oligonucleotide
  Sense strand starting at position 2281 of SEQ ID NO: 584850
gugagugcuguugacaaua

SEQ ID NO: 594219 - RNA, 19 nt, Artificial Sequence
  Description of Artificial Sequence: Synthetic oligonucleotide
  Antisense strand to SEQ ID NO: 594218
uauugucaacagcacucac

SEQ ID NO: 594220 - RNA, 19 nt, Artificial Sequence
  Description of Artificial Sequence: Synthetic oligonucleotide
  Sense strand starting at position 2325 of SEQ ID NO: 584850
cuggguuaaucaucaguuc

SEQ ID NO: 594221 - RNA, 19 nt, Artificial Sequence
  Description of Artificial Sequence: Synthetic oligonucleotide
  Antisense strand to SEQ ID NO: 594220
gaacugaugauuaacccag

SEQ ID NO: 594222 - RNA, 19 nt, Artificial Sequence
  Description of Artificial Sequence: Synthetic oligonucleotide
  Sense strand starting at position 2326 of SEQ ID NO: 584850
uggguuaaucaucaguucu

SEQ ID NO: 594223 - RNA, 19 nt, Artificial Sequence
  Description of Artificial Sequence: Synthetic oligonucleotide
  Antisense strand to SEQ ID NO: 594222
agaacugaugauuaaccca

SEQ ID NO: 594224 - RNA, 19 nt, Artificial Sequence
  Description of Artificial Sequence: Synthetic oligonucleotide
  Sense strand starting at position 2648 of SEQ ID NO: 584850
ucaguucuguagucgcauu

SEQ ID NO: 594225 - RNA, 19 nt, Artificial Sequence
  Description of Artificial Sequence: Synthetic oligonucleotide
  Antisense strand to SEQ ID NO: 594224
aaugcgacuacagaacuga

SEQ ID NO: 594226 - RNA, 19 nt, Artificial Sequence
  Description of Artificial Sequence: Synthetic oligonucleotide
  Sense strand starting at position 2730 of SEQ ID NO: 584850
guggucucuggauguuuga

SEQ ID NO: 594227 - RNA, 19 nt, Artificial Sequence
  Description of Artificial Sequence: Synthetic oligonucleotide
  Antisense strand to SEQ ID NO: 594226
ucaaacauccagagaccac

SEQ ID NO: 594228 - RNA, 19 nt, Artificial Sequence
  Description of Artificial Sequence: Synthetic oligonucleotide
  Sense strand starting at position 2733 of SEQ ID NO: 584850
gucucuggauguuugaaau

SEQ ID NO: 594229 - RNA, 19 nt, Artificial Sequence
  Description of Artificial Sequence: Synthetic oligonucleotide
  Antisense strand to SEQ ID NO: 594228
auuucaaacauccagagac

SEQ ID NO: 594230 - RNA, 19 nt, Artificial Sequence
  Description of Artificial Sequence: Synthetic oligonucleotide
  Sense strand starting at position 2743 of SEQ ID NO: 584850
guuugaaauccugaaggug

SEQ ID NO: 594231 - RNA, 19 nt, Artificial Sequence
  Description of Artificial Sequence: Synthetic oligonucleotide
  Antisense strand to SEQ ID NO: 594230
caccuucaggauuucaaac

SEQ ID NO: 594232 - RNA, 19 nt, Artificial Sequence
  Description of Artificial Sequence: Synthetic oligonucleotide
  Sense strand starting at position 2751 of SEQ ID NO: 584850
uccugaaggugauagucaa

SEQ ID NO: 594233 - RNA, 19 nt, Artificial Sequence
  Description of Artificial Sequence: Synthetic oligonucleotide
  Antisense strand to SEQ ID NO: 594232
uugacuaucaccuucagga

SEQ ID NO: 594234 - RNA, 19 nt, Artificial Sequence
  Description of Artificial Sequence: Synthetic oligonucleotide
  Sense strand starting at position 2764 of SEQ ID NO: 584850
agucaaguaaacggagauu

SEQ ID NO: 594235 - RNA, 19 nt, Artificial Sequence
  Description of Artificial Sequence: Synthetic oligonucleotide
  Antisense strand to SEQ ID NO: 594234
aaucuccguuuacuugacu

SEQ ID NO: 594236 - RNA, 19 nt, Artificial Sequence
  Description of Artificial Sequence: Synthetic oligonucleotide
  Sense strand starting at position 2923 of SEQ ID NO: 584850
auuagaaauuagcugggua

SEQ ID NO: 594237 - RNA, 19 nt, Artificial Sequence
  Description of Artificial Sequence: Synthetic oligonucleotide
  Antisense strand to SEQ ID NO: 594236
uacccagcuaauuucuaau

SEQ ID NO: 594238 - RNA, 19 nt, Artificial Sequence
  Description of Artificial Sequence: Synthetic oligonucleotide
  Sense strand starting at position 3116 of SEQ ID NO: 584850
cggugugucacgccuagaa

SEQ ID NO: 594239 - RNA, 19 nt, Artificial Sequence
  Description of Artificial Sequence: Synthetic oligonucleotide
  Antisense strand to SEQ ID NO: 594238
uucuaggcgugacacaccg

SEQ ID NO: 594240 - RNA, 19 nt, Artificial Sequence
  Description of Artificial Sequence: Synthetic oligonucleotide
  Sense strand starting at position 3118 of SEQ ID NO: 584850
gugugucacgccuagaauc

SEQ ID NO: 594241 - RNA, 19 nt, Artificial Sequence
  Description of Artificial Sequence: Synthetic oligonucleotide
  Antisense strand to SEQ ID NO: 594240
gauucuaggcgugacacac

SEQ ID NO: 594242 - RNA, 19 nt, Artificial Sequence
  Description of Artificial Sequence: Synthetic oligonucleotide
  Sense strand starting at position 3277 of SEQ ID NO: 584850
guuguaugccuguggucuu

SEQ ID NO: 594243 - RNA, 19 nt, Artificial Sequence
  Description of Artificial Sequence: Synthetic oligonucleotide
  Antisense strand to SEQ ID NO: 594242
aagaccacaggcauacaac

SEQ ID NO: 594244 - RNA, 19 nt, Artificial Sequence
  Description of Artificial Sequence: Synthetic oligonucleotide
  Sense strand starting at position 3382 of SEQ ID NO: 584850
gggagagucugucucuaga

SEQ ID NO: 594245 - RNA, 19 nt, Artificial Sequence
  Description of Artificial Sequence: Synthetic oligonucleotide
  Antisense strand to SEQ ID NO: 594244
ucuagagacagacucuccc

SEQ ID NO: 594246 - RNA, 19 nt, Artificial Sequence
  Description of Artificial Sequence: Synthetic oligonucleotide
  Sense strand starting at position 3384 of SEQ ID NO: 584850
gagagucugucucuagaaa

SEQ ID NO: 594247 - RNA, 19 nt, Artificial Sequence
  Description of Artificial Sequence: Synthetic oligonucleotide
  Antisense strand to SEQ ID NO: 594246
uuucuagagacagacucuc

SEQ ID NO: 594248 - RNA, 19 nt, Artificial Sequence
  Description of Artificial Sequence: Synthetic oligonucleotide
  Sense strand starting at position 260 of SEQ ID NO: 584851
agaauuugcuuugaagaca

SEQ ID NO: 594249 - RNA, 19 nt, Artificial Sequence
  Description of Artificial Sequence: Synthetic oligonucleotide
  Antisense strand to SEQ ID NO: 594248
ugucuucaaagcaaauucu

SEQ ID NO: 594250 - RNA, 19 nt, Artificial Sequence
  Description of Artificial Sequence: Synthetic oligonucleotide
  Sense strand starting at position 275 of SEQ ID NO: 584851
gacagaauugagggcucau

SEQ ID NO: 594251 - RNA, 19 nt, Artificial Sequence
  Description of Artificial Sequence: Synthetic oligonucleotide
  Antisense strand to SEQ ID NO: 594250
augagcccucaauucuguc

SEQ ID NO: 594252 - RNA, 19 nt, Artificial Sequence
  Description of Artificial Sequence: Synthetic oligonucleotide
  Sense strand starting at position 398 of SEQ ID NO: 584851
cuuaguacauuguuuagaa

SEQ ID NO: 594253 - RNA, 19 nt, Artificial Sequence
  Description of Artificial Sequence: Synthetic oligonucleotide
  Antisense strand to SEQ ID NO: 594252
uucuaaacaauguacuaag

SEQ ID NO: 594254 - RNA, 19 nt, Artificial Sequence
  Description of Artificial Sequence: Synthetic oligonucleotide
  Sense strand starting at position 462 of SEQ ID NO: 584851
uggagcuaccacuaacuua

SEQ ID NO: 594255 - RNA, 19 nt, Artificial Sequence
  Description of Artificial Sequence: Synthetic oligonucleotide
  Antisense strand to SEQ ID NO: 594254
uaaguuagugguagcucca

SEQ ID NO: 594256 - RNA, 19 nt, Artificial Sequence
  Description of Artificial Sequence: Synthetic oligonucleotide
  Sense strand starting at position 493 of SEQ ID NO: 584851
uggucaaacugucucaaga

SEQ ID NO: 594257 - RNA, 19 nt, Artificial Sequence
  Description of Artificial Sequence: Synthetic oligonucleotide
  Antisense strand to SEQ ID NO: 594256
ucuugagacaguuugacca

SEQ ID NO: 594258 - RNA, 19 nt, Artificial Sequence
  Description of Artificial Sequence: Synthetic oligonucleotide
  Sense strand starting at position 666 of SEQ ID NO: 584851
aaaugucagcucuagcaug

SEQ ID NO: 594259 - RNA, 19 nt, Artificial Sequence
  Description of Artificial Sequence: Synthetic oligonucleotide
  Antisense strand to SEQ ID NO: 594258
caugcuagagcugacauuu

SEQ ID NO: 594260 - RNA, 19 nt, Artificial Sequence
  Description of Artificial Sequence: Synthetic oligonucleotide
  Sense strand starting at position 677 of SEQ ID NO: 584851
cuagcaugcacaugagaag

SEQ ID NO: 594261 - RNA, 19 nt, Artificial Sequence
  Description of Artificial Sequence: Synthetic oligonucleotide
  Antisense strand to SEQ ID NO: 594260
cuucucaugugcaugcuag

SEQ ID NO: 594262 - RNA, 19 nt, Artificial Sequence
  Description of Artificial Sequence: Synthetic oligonucleotide
  Sense strand starting at position 695 of SEQ ID NO: 584851
guuauuagacaaggaagca

SEQ ID NO: 594263 - RNA, 19 nt, Artificial Sequence
  Description of Artificial Sequence: Synthetic oligonucleotide
  Antisense strand to SEQ ID NO: 594262
ugcuuccuugucuaauaac

SEQ ID NO: 594264 - RNA, 19 nt, Artificial Sequence
  Description of Artificial Sequence: Synthetic oligonucleotide
  Sense strand starting at position 723 of SEQ ID NO: 584851
ucccuacaguuuccugaua

SEQ ID NO: 594265 - RNA, 19 nt, Artificial Sequence
  Description of Artificial Sequence: Synthetic oligonucleotide
  Antisense strand to SEQ ID NO: 594264
uaucaggaaacuguaggga

SEQ ID NO: 594266 - RNA, 19 nt, Artificial Sequence
  Description of Artificial Sequence: Synthetic oligonucleotide
  Sense strand starting at position 724 of SEQ ID NO: 584851
cccuacaguuuccugauau

SEQ ID NO: 594267 - RNA, 19 nt, Artificial Sequence
  Description of Artificial Sequence: Synthetic oligonucleotide
  Antisense strand to SEQ ID NO: 594266
auaucaggaaacuguaggg

SEQ ID NO: 594268 - RNA, 19 nt, Artificial Sequence
  Description of Artificial Sequence: Synthetic oligonucleotide
  Sense strand starting at position 829 of SEQ ID NO: 584851
cuaugaggaguuugcuaca

SEQ ID NO: 594269 - RNA, 19 nt, Artificial Sequence
  Description of Artificial Sequence: Synthetic oligonucleotide
  Antisense strand to SEQ ID NO: 594268
uguagcaaacuccucauag

SEQ ID NO: 594270 - RNA, 19 nt, Artificial Sequence
  Description of Artificial Sequence: Synthetic oligonucleotide
  Sense strand starting at position 912 of SEQ ID NO: 584851
aggacaagcucaguacuaa

SEQ ID NO: 594271 - RNA, 19 nt, Artificial Sequence
  Description of Artificial Sequence: Synthetic oligonucleotide
  Antisense strand to SEQ ID NO: 594270
uuaguacugagcuuguccu

SEQ ID NO: 594272 - RNA, 19 nt, Artificial Sequence
  Description of Artificial Sequence: Synthetic oligonucleotide
  Sense strand starting at position 1009 of SEQ ID NO: 584851
cucagaauucuguagguaa

SEQ ID NO: 594273 - RNA, 19 nt, Artificial Sequence
  Description of Artificial Sequence: Synthetic oligonucleotide
  Antisense strand to SEQ ID NO: 594272
uuaccuacagaauucugag

SEQ ID NO: 594274 - RNA, 19 nt, Artificial Sequence
  Description of Artificial Sequence: Synthetic oligonucleotide
  Sense strand starting at position 1011 of SEQ ID NO: 584851
cagaauucuguagguaaga

SEQ ID NO: 594275 - RNA, 19 nt, Artificial Sequence
  Description of Artificial Sequence: Synthetic oligonucleotide
  Antisense strand to SEQ ID NO: 594274
ucuuaccuacagaauucug

SEQ ID NO: 594276 - RNA, 19 nt, Artificial Sequence
  Description of Artificial Sequence: Synthetic oligonucleotide
  Sense strand starting at position 1012 of SEQ ID NO: 584851
agaauucuguagguaagaa

SEQ ID NO: 594277 - RNA, 19 nt, Artificial Sequence
  Description of Artificial Sequence: Synthetic oligonucleotide
  Antisense strand to SEQ ID NO: 594276
uucuuaccuacagaauucu

SEQ ID NO: 594278 - RNA, 19 nt, Artificial Sequence
  Description of Artificial Sequence: Synthetic oligonucleotide
  Sense strand starting at position 1583 of SEQ ID NO: 584851
acaguuagacccugaggca

SEQ ID NO: 594279 - RNA, 19 nt, Artificial Sequence
  Description of Artificial Sequence: Synthetic oligonucleotide
  Antisense strand to SEQ ID NO: 594278
ugccucagggucuaacugu

SEQ ID NO: 594280 - RNA, 19 nt, Artificial Sequence
  Description of Artificial Sequence: Synthetic oligonucleotide
  Sense strand starting at position 2270 of SEQ ID NO: 584851
ugucauuuacagugccauu

SEQ ID NO: 594281 - RNA, 19 nt, Artificial Sequence
  Description of Artificial Sequence: Synthetic oligonucleotide
  Antisense strand to SEQ ID NO: 594280
aauggcacuguaaaugaca

SEQ ID NO: 594282 - RNA, 19 nt, Artificial Sequence
  Description of Artificial Sequence: Synthetic oligonucleotide
  Sense strand starting at position 2282 of SEQ ID NO: 584851
ugccauuuccaaugguuua

SEQ ID NO: 594283 - RNA, 19 nt, Artificial Sequence
  Description of Artificial Sequence: Synthetic oligonucleotide
  Antisense strand to SEQ ID NO: 594282
uaaaccauuggaaauggca

SEQ ID NO: 594284 - RNA, 19 nt, Artificial Sequence
  Description of Artificial Sequence: Synthetic oligonucleotide
  Sense strand starting at position 2348 of SEQ ID NO: 584851
cucuauuauugugugagag

SEQ ID NO: 594285 - RNA, 19 nt, Artificial Sequence
  Description of Artificial Sequence: Synthetic oligonucleotide
  Antisense strand to SEQ ID NO: 594284
cucucacacaauaauagag

SEQ ID NO: 594286 - RNA, 19 nt, Artificial Sequence
  Description of Artificial Sequence: Synthetic oligonucleotide
  Sense strand starting at position 2349 of SEQ ID NO: 584851
ucuauuauugugugagagg

SEQ ID NO: 594287 - RNA, 19 nt, Artificial Sequence
  Description of Artificial Sequence: Synthetic oligonucleotide
  Antisense strand to SEQ ID NO: 594286
ccucucacacaauaauaga

SEQ ID NO: 594288 - RNA, 19 nt, Artificial Sequence
  Description of Artificial Sequence: Synthetic oligonucleotide
  Sense strand starting at position 2372 of SEQ ID NO: 584851
gagagcuacugauuggcau

SEQ ID NO: 594289 - RNA, 19 nt, Artificial Sequence
  Description of Artificial Sequence: Synthetic oligonucleotide
  Antisense strand to SEQ ID NO: 594288
augccaaucaguagcucuc

SEQ ID NO: 594290 - RNA, 19 nt, Artificial Sequence
  Description of Artificial Sequence: Synthetic oligonucleotide
  Sense strand starting at position 2373 of SEQ ID NO: 584851
agagcuacugauuggcauu

SEQ ID NO: 594291 - RNA, 19 nt, Artificial Sequence
  Description of Artificial Sequence: Synthetic oligonucleotide
  Antisense strand to SEQ ID NO: 594290
aaugccaaucaguagcucu

SEQ ID NO: 594292 - RNA, 19 nt, Artificial Sequence
  Description of Artificial Sequence: Synthetic oligonucleotide
  Sense strand starting at position 2471 of SEQ ID NO: 584851
gcuuaauaagcauauauag

SEQ ID NO: 594293 - RNA, 19 nt, Artificial Sequence
  Description of Artificial Sequence: Synthetic oligonucleotide
  Antisense strand to SEQ ID NO: 594292
cuauauaugcuuauuaagc

SEQ ID NO: 594294 - RNA, 19 nt, Artificial Sequence
  Description of Artificial Sequence: Synthetic oligonucleotide
  Sense strand starting at position 2555 of SEQ ID NO: 584851
cugcaaauccacugaauag

SEQ ID NO: 594295 - RNA, 19 nt, Artificial Sequence
  Description of Artificial Sequence: Synthetic oligonucleotide
  Antisense strand to SEQ ID NO: 594294
cuauucaguggauuugcag

SEQ ID NO: 594296 - RNA, 19 nt, Artificial Sequence
  Description of Artificial Sequence: Synthetic oligonucleotide
  Sense strand starting at position 2611 of SEQ ID NO: 584851
accugauuggcuuagucua

SEQ ID NO: 594297 - RNA, 19 nt, Artificial Sequence
  Description of Artificial Sequence: Synthetic oligonucleotide
  Antisense strand to SEQ ID NO: 594296
uagacuaagccaaucaggu

SEQ ID NO: 594298 - RNA, 19 nt, Artificial Sequence
  Description of Artificial Sequence: Synthetic oligonucleotide
  Sense strand starting at position 2623 of SEQ ID NO: 584851
uagucuaaguagcuuagaa

SEQ ID NO: 594299 - RNA, 19 nt, Artificial Sequence
  Description of Artificial Sequence: Synthetic oligonucleotide
  Antisense strand to SEQ ID NO: 594298
uucuaagcuacuuagacua

SEQ ID NO: 594300 - RNA, 19 nt, Artificial Sequence
  Description of Artificial Sequence: Synthetic oligonucleotide
  Sense strand starting at position 2625 of SEQ ID NO: 584851
gucuaaguagcuuagaaac

SEQ ID NO: 594301 - RNA, 19 nt, Artificial Sequence
  Description of Artificial Sequence: Synthetic oligonucleotide
  Antisense strand to SEQ ID NO: 594300
guuucuaagcuacuuagac

SEQ ID NO: 594302 - RNA, 19 nt, Artificial Sequence
  Description of Artificial Sequence: Synthetic oligonucleotide
  Sense strand starting at position 2707 of SEQ ID NO: 584851
aaguguuuaccaggauaca

SEQ ID NO: 594303 - RNA, 19 nt, Artificial Sequence
  Description of Artificial Sequence: Synthetic oligonucleotide
  Antisense strand to SEQ ID NO: 594302
uguauccugguaaacacuu

SEQ ID NO: 594304 - RNA, 19 nt, Artificial Sequence
  Description of Artificial Sequence: Synthetic oligonucleotide
  Sense strand starting at position 2708 of SEQ ID NO: 584851
aguguuuaccaggauacau

SEQ ID NO: 594305 - RNA, 19 nt, Artificial Sequence
  Description of Artificial Sequence: Synthetic oligonucleotide
  Antisense strand to SEQ ID NO: 594304
auguauccugguaaacacu

SEQ ID NO: 594306 - RNA, 19 nt, Artificial Sequence
  Description of Artificial Sequence: Synthetic oligonucleotide
  Sense strand starting at position 2718 of SEQ ID NO: 584851
aggauacauucucugucca

SEQ ID NO: 594307 - RNA, 19 nt, Artificial Sequence
  Description of Artificial Sequence: Synthetic oligonucleotide
  Antisense strand to SEQ ID NO: 594306
uggacagagaauguauccu

SEQ ID NO: 594308 - RNA, 19 nt, Artificial Sequence
  Description of Artificial Sequence: Synthetic oligonucleotide
  Sense strand starting at position 2719 of SEQ ID NO: 584851
ggauacauucucuguccau

SEQ ID NO: 594309 - RNA, 19 nt, Artificial Sequence
  Description of Artificial Sequence: Synthetic oligonucleotide
  Antisense strand to SEQ ID NO: 594308
auggacagagaauguaucc

SEQ ID NO: 594310 - RNA, 19 nt, Artificial Sequence
  Description of Artificial Sequence: Synthetic oligonucleotide
  Sense strand starting at position 2814 of SEQ ID NO: 584851
caguguguccaucagauga

SEQ ID NO: 594311 - RNA, 19 nt, Artificial Sequence
  Description of Artificial Sequence: Synthetic oligonucleotide
  Antisense strand to SEQ ID NO: 594310
ucaucugauggacacacug

SEQ ID NO: 594312 - RNA, 19 nt, Artificial Sequence
  Description of Artificial Sequence: Synthetic oligonucleotide
  Sense strand starting at position 2992 of SEQ ID NO: 584851
gaggcagagaaauguguuu

SEQ ID NO: 594313 - RNA, 19 nt, Artificial Sequence
  Description of Artificial Sequence: Synthetic oligonucleotide
  Antisense strand to SEQ ID NO: 594312
aaacacauuucucugccuc

SEQ ID NO: 594314 - RNA, 19 nt, Artificial Sequence
  Description of Artificial Sequence: Synthetic oligonucleotide
  Sense strand starting at position 3600 of SEQ ID NO: 584851
aaagucaaguguuuccaga

SEQ ID NO: 594315 - RNA, 19 nt, Artificial Sequence
  Description of Artificial Sequence: Synthetic oligonucleotide
  Antisense strand to SEQ ID NO: 594314
ucuggaaacacuugacuuu

SEQ ID NO: 594316 - RNA, 19 nt, Artificial Sequence
  Description of Artificial Sequence: Synthetic oligonucleotide
  Sense strand starting at position 3602 of SEQ ID NO: 584851
agucaaguguuuccagaua

SEQ ID NO: 594317 - RNA, 19 nt, Artificial Sequence
  Description of Artificial Sequence: Synthetic oligonucleotide
  Antisense strand to SEQ ID NO: 594316
uaucuggaaacacuugacu

SEQ ID NO: 594318 - RNA, 19 nt, Artificial Sequence
  Description of Artificial Sequence: Synthetic oligonucleotide
  Sense strand starting at position 3618 of SEQ ID NO: 584851
auauaacucugagcuagac

SEQ ID NO: 594319 - RNA, 19 nt, Artificial Sequence
  Description of Artificial Sequence: Synthetic oligonucleotide
  Antisense strand to SEQ ID NO: 594318
gucuagcucagaguuauau

SEQ ID NO: 594320 - RNA, 19 nt, Artificial Sequence
  Description of Artificial Sequence: Synthetic oligonucleotide
  Sense strand starting at position 3712 of SEQ ID NO: 584851
ggcugauaggcaugaagag

SEQ ID NO: 594321 - RNA, 19 nt, Artificial Sequence
  Description of Artificial Sequence: Synthetic oligonucleotide
  Antisense strand to SEQ ID NO: 594320
cucuucaugccuaucagcc

SEQ ID NO: 594322 - RNA, 19 nt, Artificial Sequence
  Description of Artificial Sequence: Synthetic oligonucleotide
  Sense strand starting at position 3778 of SEQ ID NO: 584851
ggguguagggaaugauaca

SEQ ID NO: 594323 - RNA, 19 nt, Artificial Sequence
  Description of Artificial Sequence: Synthetic oligonucleotide
  Antisense strand to SEQ ID NO: 594322
uguaucauucccuacaccc

SEQ ID NO: 594324 - RNA, 19 nt, Artificial Sequence
  Description of Artificial Sequence: Synthetic oligonucleotide
  Sense strand starting at position 3841 of SEQ ID NO: 584851
gaaggucuaagagguuuga

SEQ ID NO: 594325 - RNA, 19 nt, Artificial Sequence
  Description of Artificial Sequence: Synthetic oligonucleotide
  Antisense strand to SEQ ID NO: 594324
ucaaaccucuuagaccuuc

SEQ ID NO: 594326 - RNA, 19 nt, Artificial Sequence
  Description of Artificial Sequence: Synthetic oligonucleotide
  Sense strand starting at position 3845 of SEQ ID NO: 584851
gucuaagagguuugaacuu

SEQ ID NO: 594327 - RNA, 19 nt, Artificial Sequence
  Description of Artificial Sequence: Synthetic oligonucleotide
  Antisense strand to SEQ ID NO: 594326
aaguucaaaccucuuagac

SEQ ID NO: 594328 - RNA, 19 nt, Artificial Sequence
  Description of Artificial Sequence: Synthetic oligonucleotide
  Sense strand starting at position 194 of SEQ ID NO: 584852
gagccuaccagugaguagu

SEQ ID NO: 594329 - RNA, 19 nt, Artificial Sequence
  Description of Artificial Sequence: Synthetic oligonucleotide
  Antisense strand to SEQ ID NO: 594328
acuacucacugguaggcuc

SEQ ID NO: 594330 - RNA, 19 nt, Artificial Sequence
  Description of Artificial Sequence: Synthetic oligonucleotide
  Sense strand starting at position 264 of SEQ ID NO: 584852
caagaagggcucuggcuaa

SEQ ID NO: 594331 - RNA, 19 nt, Artificial Sequence
  Description of Artificial Sequence: Synthetic oligonucleotide
  Antisense strand to SEQ ID NO: 594330
uuagccagagcccuucuug

SEQ ID NO: 594332 - RNA, 19 nt, Artificial Sequence
  Description of Artificial Sequence: Synthetic oligonucleotide
  Sense strand starting at position 344 of SEQ ID NO: 584852
caauguacugguugaaaca

SEQ ID NO: 594333 - RNA, 19 nt, Artificial Sequence
  Description of Artificial Sequence: Synthetic oligonucleotide
  Antisense strand to SEQ ID NO: 594332
uguuucaaccaguacauug

SEQ ID NO: 594334 - RNA, 19 nt, Artificial Sequence
  Description of Artificial Sequence: Synthetic oligonucleotide
  Sense strand starting at position 390 of SEQ ID NO: 584852
gguuguuuaccaugagcua

SEQ ID NO: 594335 - RNA, 19 nt, Artificial Sequence
  Description of Artificial Sequence: Synthetic oligonucleotide
  Antisense strand to SEQ ID NO: 594334
uagcucaugguaaacaacc

SEQ ID NO: 594336 - RNA, 19 nt, Artificial Sequence
  Description of Artificial Sequence: Synthetic oligonucleotide
  Sense strand starting at position 532 of SEQ ID NO: 584852
uccugaauuggucaugauc

SEQ ID NO: 594337 - RNA, 19 nt, Artificial Sequence
  Description of Artificial Sequence: Synthetic oligonucleotide
  Antisense strand to SEQ ID NO: 594336
gaucaugaccaauucagga

SEQ ID NO: 594338 - RNA, 19 nt, Artificial Sequence
  Description of Artificial Sequence: Synthetic oligonucleotide
  Sense strand starting at position 637 of SEQ ID NO: 584852
gucgaacugaaaugagaau

SEQ ID NO: 594339 - RNA, 19 nt, Artificial Sequence
  Description of Artificial Sequence: Synthetic oligonucleotide
  Antisense strand to SEQ ID NO: 594338
auucucauuucaguucgac

SEQ ID NO: 594340 - RNA, 19 nt, Artificial Sequence
  Description of Artificial Sequence: Synthetic oligonucleotide
  Sense strand starting at position 724 of SEQ ID NO: 584852
gagguacaagucugaagua

SEQ ID NO: 594341 - RNA, 19 nt, Artificial Sequence
  Description of Artificial Sequence: Synthetic oligonucleotide
  Antisense strand to SEQ ID NO: 594340
uacuucagacuuguaccuc

SEQ ID NO: 594342 - RNA, 19 nt, Artificial Sequence
  Description of Artificial Sequence: Synthetic oligonucleotide
  Sense strand starting at position 734 of SEQ ID NO: 584852
ucugaaguagcucaucuuu

SEQ ID NO: 594343 - RNA, 19 nt, Artificial Sequence
  Description of Artificial Sequence: Synthetic oligonucleotide
  Antisense strand to SEQ ID NO: 594342
aaagaugagcuacuucaga

SEQ ID NO: 594344 - RNA, 19 nt, Artificial Sequence
  Description of Artificial Sequence: Synthetic oligonucleotide
  Sense strand starting at position 756 of SEQ ID NO: 584852
gucaguguuagccacacuu

SEQ ID NO: 594345 - RNA, 19 nt, Artificial Sequence
  Description of Artificial Sequence: Synthetic oligonucleotide
  Antisense strand to SEQ ID NO: 594344
aaguguggcuaacacugac

SEQ ID NO: 594346 - RNA, 19 nt, Artificial Sequence
  Description of Artificial Sequence: Synthetic oligonucleotide
  Sense strand starting at position 788 of SEQ ID NO: 584852
gucuuaauuuguuuccagu

SEQ ID NO: 594347 - RNA, 19 nt, Artificial Sequence
  Description of Artificial Sequence: Synthetic oligonucleotide
  Antisense strand to SEQ ID NO: 594346
acuggaaacaaauuaagac

SEQ ID NO: 594348 - RNA, 19 nt, Artificial Sequence
  Description of Artificial Sequence: Synthetic oligonucleotide
  Sense strand starting at position 1000 of SEQ ID NO: 584852
gacuaaaugggcugaauca

SEQ ID NO: 594349 - RNA, 19 nt, Artificial Sequence
  Description of Artificial Sequence: Synthetic oligonucleotide
  Antisense strand to SEQ ID NO: 594348
ugauucagcccauuuaguc

SEQ ID NO: 594350 - RNA, 19 nt, Artificial Sequence
  Description of Artificial Sequence: Synthetic oligonucleotide
  Sense strand starting at position 1038 of SEQ ID NO: 584852
gcuaguacucaugaagaac

SEQ ID NO: 594351 - RNA, 19 nt, Artificial Sequence
  Description of Artificial Sequence: Synthetic oligonucleotide
  Antisense strand to SEQ ID NO: 594350
guucuucaugaguacuagc

SEQ ID NO: 594352 - RNA, 19 nt, Artificial Sequence
  Description of Artificial Sequence: Synthetic oligonucleotide
  Sense strand starting at position 1110 of SEQ ID NO: 584852
caauccucucgcuagggaa

SEQ ID NO: 594353 - RNA, 19 nt, Artificial Sequence
  Description of Artificial Sequence: Synthetic oligonucleotide
  Antisense strand to SEQ ID NO: 594352
uucccuagcgagaggauug

SEQ ID NO: 594354 - RNA, 19 nt, Artificial Sequence
  Description of Artificial Sequence: Synthetic oligonucleotide
  Sense strand starting at position 1883 of SEQ ID NO: 584852
ccgggaauuuaucuccguu

SEQ ID NO: 594355 - RNA, 19 nt, Artificial Sequence
  Description of Artificial Sequence: Synthetic oligonucleotide
  Antisense strand to SEQ ID NO: 594354
aacggagauaaauucccgg

SEQ ID NO: 594356 - RNA, 19 nt, Artificial Sequence
  Description of Artificial Sequence: Synthetic oligonucleotide
  Sense strand starting at position 2007 of SEQ ID NO: 584852
ucgggugccgcuaaauaug

SEQ ID NO: 594357 - RNA, 19 nt, Artificial Sequence
  Description of Artificial Sequence: Synthetic oligonucleotide
  Antisense strand to SEQ ID NO: 594356
cauauuuagcggcacccga

SEQ ID NO: 594358 - RNA, 19 nt, Artificial Sequence
  Description of Artificial Sequence: Synthetic oligonucleotide
  Sense strand starting at position 2208 of SEQ ID NO: 584852
gccugaguuagcuucgcca

SEQ ID NO: 594359 - RNA, 19 nt, Artificial Sequence
  Description of Artificial Sequence: Synthetic oligonucleotide
  Antisense strand to SEQ ID NO: 594358
uggcgaagcuaacucaggc

SEQ ID NO: 594360 - RNA, 19 nt, Artificial Sequence
  Description of Artificial Sequence: Synthetic oligonucleotide
  Sense strand starting at position 2462 of SEQ ID NO: 584852
ggacgccuaacuggagauu

SEQ ID NO: 594361 - RNA, 19 nt, Artificial Sequence
  Description of Artificial Sequence: Synthetic oligonucleotide
  Antisense strand to SEQ ID NO: 594360
aaucuccaguuaggcgucc

SEQ ID NO: 594362 - RNA, 19 nt, Artificial Sequence
  Description of Artificial Sequence: Synthetic oligonucleotide
  Sense strand starting at position 2463 of SEQ ID NO: 584852
gacgccuaacuggagauua

SEQ ID NO: 594363 - RNA, 19 nt, Artificial Sequence
  Description of Artificial Sequence: Synthetic oligonucleotide
  Antisense strand to SEQ ID NO: 594362
uaaucuccaguuaggcguc

SEQ ID NO: 594364 - RNA, 19 nt, Artificial Sequence
  Description of Artificial Sequence: Synthetic oligonucleotide
  Sense strand starting at position 2465 of SEQ ID NO: 584852
cgccuaacuggagauuaga

SEQ ID NO: 594365 - RNA, 19 nt, Artificial Sequence
  Description of Artificial Sequence: Synthetic oligonucleotide
  Antisense strand to SEQ ID NO: 594364
ucuaaucuccaguuaggcg

SEQ ID NO: 594366 - RNA, 19 nt, Artificial Sequence
  Description of Artificial Sequence: Synthetic oligonucleotide
  Sense strand starting at position 2501 of SEQ ID NO: 584852
ugcuauuaaauucggcaga

SEQ ID NO: 594367 - RNA, 19 nt, Artificial Sequence
  Description of Artificial Sequence: Synthetic oligonucleotide
  Antisense strand to SEQ ID NO: 594366
ucugccgaauuuaauagca

SEQ ID NO: 594368 - RNA, 19 nt, Artificial Sequence
  Description of Artificial Sequence: Synthetic oligonucleotide
  Sense strand starting at position 2644 of SEQ ID NO: 584852
cggcgugaugacagcuuua

SEQ ID NO: 594369 - RNA, 19 nt, Artificial Sequence
  Description of Artificial Sequence: Synthetic oligonucleotide
  Antisense strand to SEQ ID NO: 594368
uaaagcugucaucacgccg

SEQ ID NO: 594370 - RNA, 19 nt, Artificial Sequence
  Description of Artificial Sequence: Synthetic oligonucleotide
  Sense strand starting at position 2725 of SEQ ID NO: 584852
gccugugacgaugauuugu

SEQ ID NO: 594371 - RNA, 19 nt, Artificial Sequence
  Description of Artificial Sequence: Synthetic oligonucleotide
  Antisense strand to SEQ ID NO: 594370
acaaaucaucgucacaggc

SEQ ID NO: 594372 - RNA, 19 nt, Artificial Sequence
  Description of Artificial Sequence: Synthetic oligonucleotide
  Sense strand starting at position 2769 of SEQ ID NO: 584852
uagcuugguuguccagaau

SEQ ID NO: 594373 - RNA, 19 nt, Artificial Sequence
  Description of Artificial Sequence: Synthetic oligonucleotide
  Antisense strand to SEQ ID NO: 594372
auucuggacaaccaagcua

SEQ ID NO: 594374 - RNA, 19 nt, Artificial Sequence
  Description of Artificial Sequence: Synthetic oligonucleotide
  Sense strand starting at position 2772 of SEQ ID NO: 584852
cuugguuguccagaauuau

SEQ ID NO: 594375 - RNA, 19 nt, Artificial Sequence
  Description of Artificial Sequence: Synthetic oligonucleotide
  Antisense strand to SEQ ID NO: 594374
auaauucuggacaaccaag

SEQ ID NO: 594376 - RNA, 19 nt, Artificial Sequence
  Description of Artificial Sequence: Synthetic oligonucleotide
  Sense strand starting at position 2910 of SEQ ID NO: 584852
ugcuuugauguuuagagau

SEQ ID NO: 594377 - RNA, 19 nt, Artificial Sequence
  Description of Artificial Sequence: Synthetic oligonucleotide
  Antisense strand to SEQ ID NO: 594376
aucucuaaacaucaaagca

SEQ ID NO: 594378 - RNA, 19 nt, Artificial Sequence
  Description of Artificial Sequence: Synthetic oligonucleotide
  Sense strand starting at position 2928 of SEQ ID NO: 584852
uguuaacuaccuugaugga

SEQ ID NO: 594379 - RNA, 19 nt, Artificial Sequence
  Description of Artificial Sequence: Synthetic oligonucleotide
  Antisense strand to SEQ ID NO: 594378
uccaucaagguaguuaaca

SEQ ID NO: 594380 - RNA, 19 nt, Artificial Sequence
  Description of Artificial Sequence: Synthetic oligonucleotide
  Sense strand starting at position 2949 of SEQ ID NO: 584852
ucagacuuguaauuagcaa

SEQ ID NO: 594381 - RNA, 19 nt, Artificial Sequence
  Description of Artificial Sequence: Synthetic oligonucleotide
  Antisense strand to SEQ ID NO: 594380
uugcuaauuacaagucuga

SEQ ID NO: 594382 - RNA, 19 nt, Artificial Sequence
  Description of Artificial Sequence: Synthetic oligonucleotide
  Sense strand starting at position 3162 of SEQ ID NO: 584852
acagaaauccuuggccuuu

SEQ ID NO: 594383 - RNA, 19 nt, Artificial Sequence
  Description of Artificial Sequence: Synthetic oligonucleotide
  Antisense strand to SEQ ID NO: 594382
aaaggccaaggauuucugu

SEQ ID NO: 594384 - RNA, 19 nt, Artificial Sequence
  Description of Artificial Sequence: Synthetic oligonucleotide
  Sense strand starting at position 3205 of SEQ ID NO: 584852
auucgcagguucucagaaa

SEQ ID NO: 594385 - RNA, 19 nt, Artificial Sequence
  Description of Artificial Sequence: Synthetic oligonucleotide
  Antisense strand to SEQ ID NO: 594384
uuucugagaaccugcgaau

SEQ ID NO: 594386 - RNA, 19 nt, Artificial Sequence
  Description of Artificial Sequence: Synthetic oligonucleotide
  Sense strand starting at position 3354 of SEQ ID NO: 584852
caaauugcaggcuaggaua

SEQ ID NO: 594387 - RNA, 19 nt, Artificial Sequence
  Description of Artificial Sequence: Synthetic oligonucleotide
  Antisense strand to SEQ ID NO: 594386
uauccuagccugcaauuug

SEQ ID NO: 594388 - RNA, 19 nt, Artificial Sequence
  Description of Artificial Sequence: Synthetic oligonucleotide
  Sense strand starting at position 3367 of SEQ ID NO: 584852
aggauauuaucuucgaccu

SEQ ID NO: 594389 - RNA, 19 nt, Artificial Sequence
  Description of Artificial Sequence: Synthetic oligonucleotide
  Antisense strand to SEQ ID NO: 594388
aggucgaagauaauauccu

SEQ ID NO: 594390 - RNA, 19 nt, Artificial Sequence
  Description of Artificial Sequence: Synthetic oligonucleotide
  Sense strand starting at position 3368 of SEQ ID NO: 584852
ggauauuaucuucgaccuc

SEQ ID NO: 594391 - RNA, 19 nt, Artificial Sequence
  Description of Artificial Sequence: Synthetic oligonucleotide
  Antisense strand to SEQ ID NO: 594390
gaggucgaagauaauaucc

SEQ ID NO: 594392 - RNA, 19 nt, Artificial Sequence
  Description of Artificial Sequence: Synthetic oligonucleotide
  Sense strand starting at position 3399 of SEQ ID NO: 584852
uauugcacauguguugaaa

SEQ ID NO: 594393 - RNA, 19 nt, Artificial Sequence
  Description of Artificial Sequence: Synthetic oligonucleotide
  Antisense strand to SEQ ID NO: 594392
uuucaacacaugugcaaua

SEQ ID NO: 594394 - RNA, 19 nt, Artificial Sequence
  Description of Artificial Sequence: Synthetic oligonucleotide
  Sense strand starting at position 3486 of SEQ ID NO: 584852
ggagauccuuuggaacaaa

SEQ ID NO: 594395 - RNA, 19 nt, Artificial Sequence
  Description of Artificial Sequence: Synthetic oligonucleotide
  Antisense strand to SEQ ID NO: 594394
uuuguuccaaaggaucucc

SEQ ID NO: 594396 - RNA, 19 nt, Artificial Sequence
  Description of Artificial Sequence: Synthetic oligonucleotide
  Sense strand starting at position 3506 of SEQ ID NO: 584852
ccuuuaguaaguggaaguu

SEQ ID NO: 594397 - RNA, 19 nt, Artificial Sequence
  Description of Artificial Sequence: Synthetic oligonucleotide
  Antisense strand to SEQ ID NO: 594396
aacuuccacuuacuaaagg

SEQ ID NO: 594398 - RNA, 19 nt, Artificial Sequence
  Description of Artificial Sequence: Synthetic oligonucleotide
  Sense strand starting at position 3545 of SEQ ID NO: 584852
agauccauuugauacguga

SEQ ID NO: 594399 - RNA, 19 nt, Artificial Sequence
  Description of Artificial Sequence: Synthetic oligonucleotide
  Antisense strand to SEQ ID NO: 594398
ucacguaucaaauggaucu

SEQ ID NO: 594400 - RNA, 19 nt, Artificial Sequence
  Description of Artificial Sequence: Synthetic oligonucleotide
  Sense strand starting at position 3549 of SEQ ID NO: 584852
ccauuugauacgugaugcu

SEQ ID NO: 594401 - RNA, 19 nt, Artificial Sequence
  Description of Artificial Sequence: Synthetic oligonucleotide
  Antisense strand to SEQ ID NO: 594400
agcaucacguaucaaaugg

SEQ ID NO: 594402 - RNA, 19 nt, Artificial Sequence
  Description of Artificial Sequence: Synthetic oligonucleotide
  Sense strand starting at position 3731 of SEQ ID NO: 584852
acaaaugagcauugcagaa

SEQ ID NO: 594403 - RNA, 19 nt, Artificial Sequence
  Description of Artificial Sequence: Synthetic oligonucleotide
  Antisense strand to SEQ ID NO: 594402
uucugcaaugcucauuugu

SEQ ID NO: 594404 - RNA, 19 nt, Artificial Sequence
  Description of Artificial Sequence: Synthetic oligonucleotide
  Sense strand starting at position 3754 of SEQ ID NO: 584852
agaacauuaucucaagaag

SEQ ID NO: 594405 - RNA, 19 nt, Artificial Sequence
  Description of Artificial Sequence: Synthetic oligonucleotide
  Antisense strand to SEQ ID NO: 594404
cuucuugagauaauguucu

SEQ ID NO: 594406 - RNA, 19 nt, Artificial Sequence
  Description of Artificial Sequence: Synthetic oligonucleotide
  Sense strand starting at position 3818 of SEQ ID NO: 584852
agagaaugcugagauaaau

SEQ ID NO: 594407 - RNA, 19 nt, Artificial Sequence
  Description of Artificial Sequence: Synthetic oligonucleotide
  Antisense strand to SEQ ID NO: 594406
auuuaucucagcauucucu

SEQ ID NO: 594408 - RNA, 19 nt, Artificial Sequence
  Description of Artificial Sequence: Synthetic oligonucleotide
  Sense strand starting at position 371 of SEQ ID NO: 584853
agaucagaccauugcaauc

SEQ ID NO: 594409 - RNA, 19 nt, Artificial Sequence
  Description of Artificial Sequence: Synthetic oligonucleotide
  Antisense strand to SEQ ID NO: 594408
gauugcaauggucugaucu

SEQ ID NO: 594410 - RNA, 19 nt, Artificial Sequence
  Description of Artificial Sequence: Synthetic oligonucleotide
  Sense strand starting at position 658 of SEQ ID NO: 584853
ggaaguugcagcgagaaga

SEQ ID NO: 594411 - RNA, 19 nt, Artificial Sequence
  Description of Artificial Sequence: Synthetic oligonucleotide
  Antisense strand to SEQ ID NO: 594410
ucuucucgcugcaacuucc

SEQ ID NO: 594412 - RNA, 19 nt, Artificial Sequence
  Description of Artificial Sequence: Synthetic oligonucleotide
  Sense strand starting at position 1049 of SEQ ID NO: 584853
ggagguugaugugacagau

SEQ ID NO: 594413 - RNA, 19 nt, Artificial Sequence
  Description of Artificial Sequence: Synthetic oligonucleotide
  Antisense strand to SEQ ID NO: 594412
aucugucacaucaaccucc

SEQ ID NO: 594414 - RNA, 19 nt, Artificial Sequence
  Description of Artificial Sequence: Synthetic oligonucleotide
  Sense strand starting at position 1141 of SEQ ID NO: 584853
ccaagaggcucucuccauu

SEQ ID NO: 594415 - RNA, 19 nt, Artificial Sequence
  Description of Artificial Sequence: Synthetic oligonucleotide
  Antisense strand to SEQ ID NO: 594414
aauggagagagccucuugg

SEQ ID NO: 594416 - RNA, 19 nt, Artificial Sequence
  Description of Artificial Sequence: Synthetic oligonucleotide
  Sense strand starting at position 1182 of SEQ ID NO: 584853
cgccuacuaaguuaugaga

SEQ ID NO: 594417 - RNA, 19 nt, Artificial Sequence
  Description of Artificial Sequence: Synthetic oligonucleotide
  Antisense strand to SEQ ID NO: 594416
ucucauaacuuaguaggcg

SEQ ID NO: 594418 - RNA, 19 nt, Artificial Sequence
  Description of Artificial Sequence: Synthetic oligonucleotide
  Sense strand starting at position 1184 of SEQ ID NO: 584853
ccuacuaaguuaugagaca

SEQ ID NO: 594419 - RNA, 19 nt, Artificial Sequence
  Description of Artificial Sequence: Synthetic oligonucleotide
  Antisense strand to SEQ ID NO: 594418
ugucucauaacuuaguagg

SEQ ID NO: 594420 - RNA, 19 nt, Artificial Sequence
  Description of Artificial Sequence: Synthetic oligonucleotide
  Sense strand starting at position 1223 of SEQ ID NO: 584853
gugaaacugugagggagau

SEQ ID NO: 594421 - RNA, 19 nt, Artificial Sequence
  Description of Artificial Sequence: Synthetic oligonucleotide
  Antisense strand to SEQ ID NO: 594420
aucucccucacaguuucac

SEQ ID NO: 594422 - RNA, 19 nt, Artificial Sequence
  Description of Artificial Sequence: Synthetic oligonucleotide
  Sense strand starting at position 1299 of SEQ ID NO: 584853
guauaaagccaauaucuag

SEQ ID NO: 594423 - RNA, 19 nt, Artificial Sequence
  Description of Artificial Sequence: Synthetic oligonucleotide
  Antisense strand to SEQ ID NO: 594422
cuagauauuggcuuuauac

SEQ ID NO: 594424 - RNA, 19 nt, Artificial Sequence
  Description of Artificial Sequence: Synthetic oligonucleotide
  Sense strand starting at position 1305 of SEQ ID NO: 584853
agccaauaucuagggauga

SEQ ID NO: 594425 - RNA, 19 nt, Artificial Sequence
  Description of Artificial Sequence: Synthetic oligonucleotide
  Antisense strand to SEQ ID NO: 594424
ucaucccuagauauuggcu

SEQ ID NO: 594426 - RNA, 19 nt, Artificial Sequence
  Description of Artificial Sequence: Synthetic oligonucleotide
  Sense strand starting at position 1306 of SEQ ID NO: 584853
gccaauaucuagggaugaa

SEQ ID NO: 594427 - RNA, 19 nt, Artificial Sequence
  Description of Artificial Sequence: Synthetic oligonucleotide
  Antisense strand to SEQ ID NO: 594426
uucaucccuagauauuggc

SEQ ID NO: 594428 - RNA, 19 nt, Artificial Sequence
  Description of Artificial Sequence: Synthetic oligonucleotide
  Sense strand starting at position 1464 of SEQ ID NO: 584853
cguagcuuucuggcacuau

SEQ ID NO: 594429 - RNA, 19 nt, Artificial Sequence
  Description of Artificial Sequence: Synthetic oligonucleotide
  Antisense strand to SEQ ID NO: 594428
auagugccagaaagcuacg

SEQ ID NO: 594430 - RNA, 19 nt, Artificial Sequence
  Description of Artificial Sequence: Synthetic oligonucleotide
  Sense strand starting at position 1530 of SEQ ID NO: 584853
aaguuacuuuaaggagaug

SEQ ID NO: 594431 - RNA, 19 nt, Artificial Sequence
  Description of Artificial Sequence: Synthetic oligonucleotide
  Antisense strand to SEQ ID NO: 594430
caucuccuuaaaguaacuu

SEQ ID NO: 594432 - RNA, 19 nt, Artificial Sequence
  Description of Artificial Sequence: Synthetic oligonucleotide
  Sense strand starting at position 1594 of SEQ ID NO: 584853
acucuugucgaguuagcgu

SEQ ID NO: 594433 - RNA, 19 nt, Artificial Sequence
  Description of Artificial Sequence: Synthetic oligonucleotide
  Antisense strand to SEQ ID NO: 594432
acgcuaacucgacaagagu

SEQ ID NO: 594434 - RNA, 19 nt, Artificial Sequence
  Description of Artificial Sequence: Synthetic oligonucleotide
  Sense strand starting at position 1600 of SEQ ID NO: 584853
gucgaguuagcguuuacgu

SEQ ID NO: 594435 - RNA, 19 nt, Artificial Sequence
  Description of Artificial Sequence: Synthetic oligonucleotide
  Antisense strand to SEQ ID NO: 594434
acguaaacgcuaacucgac

SEQ ID NO: 594436 - RNA, 19 nt, Artificial Sequence
  Description of Artificial Sequence: Synthetic oligonucleotide
  Sense strand starting at position 1607 of SEQ ID NO: 584853
uagcguuuacgugcagaau

SEQ ID NO: 594437 - RNA, 19 nt, Artificial Sequence
  Description of Artificial Sequence: Synthetic oligonucleotide
  Antisense strand to SEQ ID NO: 594436
auucugcacguaaacgcua

SEQ ID NO: 594438 - RNA, 19 nt, Artificial Sequence
  Description of Artificial Sequence: Synthetic oligonucleotide
  Sense strand starting at position 1608 of SEQ ID NO: 584853
agcguuuacgugcagaauu

SEQ ID NO: 594439 - RNA, 19 nt, Artificial Sequence
  Description of Artificial Sequence: Synthetic oligonucleotide
  Antisense strand to SEQ ID NO: 594438
aauucugcacguaaacgcu

SEQ ID NO: 594440 - RNA, 19 nt, Artificial Sequence
  Description of Artificial Sequence: Synthetic oligonucleotide
  Sense strand starting at position 1610 of SEQ ID NO: 584853
cguuuacgugcagaauucu

SEQ ID NO: 594441 - RNA, 19 nt, Artificial Sequence
  Description of Artificial Sequence: Synthetic oligonucleotide
  Antisense strand to SEQ ID NO: 594440
agaauucugcacguaaacg

SEQ ID NO: 594442 - RNA, 19 nt, Artificial Sequence
  Description of Artificial Sequence: Synthetic oligonucleotide
  Sense strand starting at position 1616 of SEQ ID NO: 584853
cgugcagaauucuuccaga

SEQ ID NO: 594443 - RNA, 19 nt, Artificial Sequence
  Description of Artificial Sequence: Synthetic oligonucleotide
  Antisense strand to SEQ ID NO: 594442
ucuggaagaauucugcacg

SEQ ID NO: 594444 - RNA, 19 nt, Artificial Sequence
  Description of Artificial Sequence: Synthetic oligonucleotide
  Sense strand starting at position 1619 of SEQ ID NO: 584853
gcagaauucuuccagaaag

SEQ ID NO: 594445 - RNA, 19 nt, Artificial Sequence
  Description of Artificial Sequence: Synthetic oligonucleotide
  Antisense strand to SEQ ID NO: 594444
cuuucuggaagaauucugc

SEQ ID NO: 594446 - RNA, 19 nt, Artificial Sequence
  Description of Artificial Sequence: Synthetic oligonucleotide
  Sense strand starting at position 1773 of SEQ ID NO: 584853
caaagcaugcgugggaaau

SEQ ID NO: 594447 - RNA, 19 nt, Artificial Sequence
  Description of Artificial Sequence: Synthetic oligonucleotide
  Antisense strand to SEQ ID NO: 594446
auuucccacgcaugcuuug

SEQ ID NO: 594448 - RNA, 19 nt, Artificial Sequence
  Description of Artificial Sequence: Synthetic oligonucleotide
  Sense strand starting at position 1774 of SEQ ID NO: 584853
aaagcaugcgugggaaauc

SEQ ID NO: 594449 - RNA, 19 nt, Artificial Sequence
  Description of Artificial Sequence: Synthetic oligonucleotide
  Antisense strand to SEQ ID NO: 594448
gauuucccacgcaugcuuu

SEQ ID NO: 594450 - RNA, 19 nt, Artificial Sequence
  Description of Artificial Sequence: Synthetic oligonucleotide
  Sense strand starting at position 1786 of SEQ ID NO: 584853
ggaaaucacguuuaucaua

SEQ ID NO: 594451 - RNA, 19 nt, Artificial Sequence
  Description of Artificial Sequence: Synthetic oligonucleotide
  Antisense strand to SEQ ID NO: 594450
uaugauaaacgugauuucc

SEQ ID NO: 594452 - RNA, 19 nt, Artificial Sequence
  Description of Artificial Sequence: Synthetic oligonucleotide
  Sense strand starting at position 1791 of SEQ ID NO: 584853
ucacguuuaucauagagaa

SEQ ID NO: 594453 - RNA, 19 nt, Artificial Sequence
  Description of Artificial Sequence: Synthetic oligonucleotide
  Antisense strand to SEQ ID NO: 594452
uucucuaugauaaacguga

SEQ ID NO: 594454 - RNA, 19 nt, Artificial Sequence
  Description of Artificial Sequence: Synthetic oligonucleotide
  Sense strand starting at position 2663 of SEQ ID NO: 584853
acgcgaguucuguacuuug

SEQ ID NO: 594455 - RNA, 19 nt, Artificial Sequence
  Description of Artificial Sequence: Synthetic oligonucleotide
  Antisense strand to SEQ ID NO: 594454
caaaguacagaacucgcgu

SEQ ID NO: 594456 - RNA, 19 nt, Artificial Sequence
  Description of Artificial Sequence: Synthetic oligonucleotide
  Sense strand starting at position 2803 of SEQ ID NO: 584853
gggcgagcgccguguauuu

SEQ ID NO: 594457 - RNA, 19 nt, Artificial Sequence
  Description of Artificial Sequence: Synthetic oligonucleotide
  Antisense strand to SEQ ID NO: 594456
aaauacacggcgcucgccc

SEQ ID NO: 594458 - RNA, 19 nt, Artificial Sequence
  Description of Artificial Sequence: Synthetic oligonucleotide
  Sense strand starting at position 2870 of SEQ ID NO: 584853
cgggacuccgugugucauu

SEQ ID NO: 594459 - RNA, 19 nt, Artificial Sequence
  Description of Artificial Sequence: Synthetic oligonucleotide
  Antisense strand to SEQ ID NO: 594458
aaugacacacggagucccg

SEQ ID NO: 594460 - RNA, 19 nt, Artificial Sequence
  Description of Artificial Sequence: Synthetic oligonucleotide
  Sense strand starting at position 2871 of SEQ ID NO: 584853
gggacuccgugugucauuu

SEQ ID NO: 594461 - RNA, 19 nt, Artificial Sequence
  Description of Artificial Sequence: Synthetic oligonucleotide
  Antisense strand to SEQ ID NO: 594460
aaaugacacacggaguccc

SEQ ID NO: 594462 - RNA, 19 nt, Artificial Sequence
  Description of Artificial Sequence: Synthetic oligonucleotide
  Sense strand starting at position 2880 of SEQ ID NO: 584853
ugugucauuuccgcacaag

SEQ ID NO: 594463 - RNA, 19 nt, Artificial Sequence
  Description of Artificial Sequence: Synthetic oligonucleotide
  Antisense strand to SEQ ID NO: 594462
cuugugcggaaaugacaca

SEQ ID NO: 594464 - RNA, 19 nt, Artificial Sequence
  Description of Artificial Sequence: Synthetic oligonucleotide
  Sense strand starting at position 2881 of SEQ ID NO: 584853
gugucauuuccgcacaagg

SEQ ID NO: 594465 - RNA, 19 nt, Artificial Sequence
  Description of Artificial Sequence: Synthetic oligonucleotide
  Antisense strand to SEQ ID NO: 594464
ccuugugcggaaaugacac

SEQ ID NO: 594466 - RNA, 19 nt, Artificial Sequence
  Description of Artificial Sequence: Synthetic oligonucleotide
  Sense strand starting at position 3196 of SEQ ID NO: 584853
ccgcgaguucguccucgga

SEQ ID NO: 594467 - RNA, 19 nt, Artificial Sequence
  Description of Artificial Sequence: Synthetic oligonucleotide
  Antisense strand to SEQ ID NO: 594466
uccgaggacgaacucgcgg

SEQ ID NO: 594468 - RNA, 19 nt, Artificial Sequence
  Description of Artificial Sequence: Synthetic oligonucleotide
  Sense strand starting at position 3197 of SEQ ID NO: 584853
cgcgaguucguccucggaa

SEQ ID NO: 594469 - RNA, 19 nt, Artificial Sequence
  Description of Artificial Sequence: Synthetic oligonucleotide
  Antisense strand to SEQ ID NO: 594468
uuccgaggacgaacucgcg

SEQ ID NO: 594470 - RNA, 19 nt, Artificial Sequence
  Description of Artificial Sequence: Synthetic oligonucleotide
  Sense strand starting at position 3198 of SEQ ID NO: 584853
gcgaguucguccucggaaa

SEQ ID NO: 594471 - RNA, 19 nt, Artificial Sequence
  Description of Artificial Sequence: Synthetic oligonucleotide
  Antisense strand to SEQ ID NO: 594470
uuuccgaggacgaacucgc

SEQ ID NO: 594472 - RNA, 19 nt, Artificial Sequence
  Description of Artificial Sequence: Synthetic oligonucleotide
  Sense strand starting at position 3199 of SEQ ID NO: 584853
cgaguucguccucggaaac

SEQ ID NO: 594473 - RNA, 19 nt, Artificial Sequence
  Description of Artificial Sequence: Synthetic oligonucleotide
  Antisense strand to SEQ ID NO: 594472
guuuccgaggacgaacucg

SEQ ID NO: 594474 - RNA, 19 nt, Artificial Sequence
  Description of Artificial Sequence: Synthetic oligonucleotide
  Sense strand starting at position 3210 of SEQ ID NO: 584853
ucggaaacgugguuucuca

SEQ ID NO: 594475 - RNA, 19 nt, Artificial Sequence
  Description of Artificial Sequence: Synthetic oligonucleotide
  Antisense strand to SEQ ID NO: 594474
ugagaaaccacguuuccga

SEQ ID NO: 594476 - RNA, 19 nt, Artificial Sequence
  Description of Artificial Sequence: Synthetic oligonucleotide
  Sense strand starting at position 3731 of SEQ ID NO: 584853
uaacucuuggacuguagau

SEQ ID NO: 594477 - RNA, 19 nt, Artificial Sequence
  Description of Artificial Sequence: Synthetic oligonucleotide
  Antisense strand to SEQ ID NO: 594476
aucuacaguccaagaguua

SEQ ID NO: 594478 - RNA, 19 nt, Artificial Sequence
  Description of Artificial Sequence: Synthetic oligonucleotide
  Sense strand starting at position 3755 of SEQ ID NO: 584853
guugauaaauacgaaaucu

SEQ ID NO: 594479 - RNA, 19 nt, Artificial Sequence
  Description of Artificial Sequence: Synthetic oligonucleotide
  Antisense strand to SEQ ID NO: 594478
agauuucguauuuaucaac

SEQ ID NO: 594480 - RNA, 19 nt, Artificial Sequence
  Description of Artificial Sequence: Synthetic oligonucleotide
  Sense strand starting at position 3858 of SEQ ID NO: 584853
caguuuagccacguuugua

SEQ ID NO: 594481 - RNA, 19 nt, Artificial Sequence
  Description of Artificial Sequence: Synthetic oligonucleotide
  Antisense strand to SEQ ID NO: 594480
uacaaacguggcuaaacug

SEQ ID NO: 594482 - RNA, 19 nt, Artificial Sequence
  Description of Artificial Sequence: Synthetic oligonucleotide
  Sense strand starting at position 3859 of SEQ ID NO: 584853
aguuuagccacguuuguau

SEQ ID NO: 594483 - RNA, 19 nt, Artificial Sequence
  Description of Artificial Sequence: Synthetic oligonucleotide
  Antisense strand to SEQ ID NO: 594482
auacaaacguggcuaaacu

SEQ ID NO: 594484 - RNA, 19 nt, Artificial Sequence
  Description of Artificial Sequence: Synthetic oligonucleotide
  Sense strand starting at position 3914 of SEQ ID NO: 584853
uccuuuaauuugccgauca

SEQ ID NO: 594485 - RNA, 19 nt, Artificial Sequence
  Description of Artificial Sequence: Synthetic oligonucleotide
  Antisense strand to SEQ ID NO: 594484
ugaucggcaaauuaaagga

SEQ ID NO: 594486 - RNA, 19 nt, Artificial Sequence
  Description of Artificial Sequence: Synthetic oligonucleotide
  Sense strand starting at position 3915 of SEQ ID NO: 584853
ccuuuaauuugccgaucaa

SEQ ID NO: 594487 - RNA, 19 nt, Artificial Sequence
  Description of Artificial Sequence: Synthetic oligonucleotide
  Antisense strand to SEQ ID NO: 594486
uugaucggcaaauuaaagg

SEQ ID NO: 594488 - RNA, 19 nt, Artificial Sequence
  Description of Artificial Sequence: Synthetic oligonucleotide
  Sense strand starting at position 83 of SEQ ID NO: 584854
gagucaaugcgguggagaa

SEQ ID NO: 594489 - RNA, 19 nt, Artificial Sequence
  Description of Artificial Sequence: Synthetic oligonucleotide
  Antisense strand to SEQ ID NO: 594488
uucuccaccgcauugacuc

SEQ ID NO: 594490 - RNA, 19 nt, Artificial Sequence
  Description of Artificial Sequence: Synthetic oligonucleotide
  Sense strand starting at position 84 of SEQ ID NO: 584854
agucaaugcgguggagaau

SEQ ID NO: 594491 - RNA, 19 nt, Artificial Sequence
  Description of Artificial Sequence: Synthetic oligonucleotide
  Antisense strand to SEQ ID NO: 594490
auucuccaccgcauugacu

SEQ ID NO: 594492 - RNA, 19 nt, Artificial Sequence
  Description of Artificial Sequence: Synthetic oligonucleotide
  Sense strand starting at position 85 of SEQ ID NO: 584854
gucaaugcgguggagaauu

SEQ ID NO: 594493 - RNA, 19 nt, Artificial Sequence
  Description of Artificial Sequence: Synthetic oligonucleotide
  Antisense strand to SEQ ID NO: 594492
aauucuccaccgcauugac

SEQ ID NO: 594494 - RNA, 19 nt, Artificial Sequence
  Description of Artificial Sequence: Synthetic oligonucleotide
  Sense strand starting at position 93 of SEQ ID NO: 584854
gguggagaauucuuccuuu

SEQ ID NO: 594495 - RNA, 19 nt, Artificial Sequence
  Description of Artificial Sequence: Synthetic oligonucleotide
  Antisense strand to SEQ ID NO: 594494
aaaggaagaauucuccacc

SEQ ID NO: 594496 - RNA, 19 nt, Artificial Sequence
  Description of Artificial Sequence: Synthetic oligonucleotide
  Sense strand starting at position 96 of SEQ ID NO: 584854
ggagaauucuuccuuuccu

SEQ ID NO: 594497 - RNA, 19 nt, Artificial Sequence
  Description of Artificial Sequence: Synthetic oligonucleotide
  Antisense strand to SEQ ID NO: 594496
aggaaaggaagaauucucc

SEQ ID NO: 594498 - RNA, 19 nt, Artificial Sequence
  Description of Artificial Sequence: Synthetic oligonucleotide
  Sense strand starting at position 159 of SEQ ID NO: 584854
ucugcauaauuguugaaua

SEQ ID NO: 594499 - RNA, 19 nt, Artificial Sequence
  Description of Artificial Sequence: Synthetic oligonucleotide
  Antisense strand to SEQ ID NO: 594498
uauucaacaauuaugcaga

SEQ ID NO: 594500 - RNA, 19 nt, Artificial Sequence
  Description of Artificial Sequence: Synthetic oligonucleotide
  Sense strand starting at position 161 of SEQ ID NO: 584854
ugcauaauuguugaauagu

SEQ ID NO: 594501 - RNA, 19 nt, Artificial Sequence
  Description of Artificial Sequence: Synthetic oligonucleotide
  Antisense strand to SEQ ID NO: 594500
acuauucaacaauuaugca

SEQ ID NO: 594502 - RNA, 19 nt, Artificial Sequence
  Description of Artificial Sequence: Synthetic oligonucleotide
  Sense strand starting at position 170 of SEQ ID NO: 584854
guugaauaguuucucacug

SEQ ID NO: 594503 - RNA, 19 nt, Artificial Sequence
  Description of Artificial Sequence: Synthetic oligonucleotide
  Antisense strand to SEQ ID NO: 594502
cagugagaaacuauucaac

SEQ ID NO: 594504 - RNA, 19 nt, Artificial Sequence
  Description of Artificial Sequence: Synthetic oligonucleotide
  Sense strand starting at position 249 of SEQ ID NO: 584854
acccacucugagugcuaga

SEQ ID NO: 594505 - RNA, 19 nt, Artificial Sequence
  Description of Artificial Sequence: Synthetic oligonucleotide
  Antisense strand to SEQ ID NO: 594504
ucuagcacucagagugggu

SEQ ID NO: 594506 - RNA, 19 nt, Artificial Sequence
  Description of Artificial Sequence: Synthetic oligonucleotide
  Sense strand starting at position 484 of SEQ ID NO: 584854
gcacuaagagacugcauua

SEQ ID NO: 594507 - RNA, 19 nt, Artificial Sequence
  Description of Artificial Sequence: Synthetic oligonucleotide
  Antisense strand to SEQ ID NO: 594506
uaaugcagucucuuagugc

SEQ ID NO: 594508 - RNA, 19 nt, Artificial Sequence
  Description of Artificial Sequence: Synthetic oligonucleotide
  Sense strand starting at position 524 of SEQ ID NO: 584854
auacuuacacacgguaaua

SEQ ID NO: 594509 - RNA, 19 nt, Artificial Sequence
  Description of Artificial Sequence: Synthetic oligonucleotide
  Antisense strand to SEQ ID NO: 594508
uauuaccguguguaaguau

SEQ ID NO: 594510 - RNA, 19 nt, Artificial Sequence
  Description of Artificial Sequence: Synthetic oligonucleotide
  Sense strand starting at position 540 of SEQ ID NO: 584854
auauguuacuggcuuuaag

SEQ ID NO: 594511 - RNA, 19 nt, Artificial Sequence
  Description of Artificial Sequence: Synthetic oligonucleotide
  Antisense strand to SEQ ID NO: 594510
cuuaaagccaguaacauau

SEQ ID NO: 594512 - RNA, 19 nt, Artificial Sequence
  Description of Artificial Sequence: Synthetic oligonucleotide
  Sense strand starting at position 812 of SEQ ID NO: 584854
uucuuaugcgaguaaauga

SEQ ID NO: 594513 - RNA, 19 nt, Artificial Sequence
  Description of Artificial Sequence: Synthetic oligonucleotide
  Antisense strand to SEQ ID NO: 594512
ucauuuacucgcauaagaa

SEQ ID NO: 594514 - RNA, 19 nt, Artificial Sequence
  Description of Artificial Sequence: Synthetic oligonucleotide
  Sense strand starting at position 1070 of SEQ ID NO: 584854
gcugguuaugaagaaacgu

SEQ ID NO: 594515 - RNA, 19 nt, Artificial Sequence
  Description of Artificial Sequence: Synthetic oligonucleotide
  Antisense strand to SEQ ID NO: 594514
acguuucuucauaaccagc

SEQ ID NO: 594516 - RNA, 19 nt, Artificial Sequence
  Description of Artificial Sequence: Synthetic oligonucleotide
  Sense strand starting at position 1122 of SEQ ID NO: 584854
gcaagugugagagaucacu

SEQ ID NO: 594517 - RNA, 19 nt, Artificial Sequence
  Description of Artificial Sequence: Synthetic oligonucleotide
  Antisense strand to SEQ ID NO: 594516
agugaucucucacacuugc

SEQ ID NO: 594518 - RNA, 19 nt, Artificial Sequence
  Description of Artificial Sequence: Synthetic oligonucleotide
  Sense strand starting at position 1208 of SEQ ID NO: 584854
cugccaggucccuaaaucu

SEQ ID NO: 594519 - RNA, 19 nt, Artificial Sequence
  Description of Artificial Sequence: Synthetic oligonucleotide
  Antisense strand to SEQ ID NO: 594518
agauuuagggaccuggcag

SEQ ID NO: 594520 - RNA, 19 nt, Artificial Sequence
  Description of Artificial Sequence: Synthetic oligonucleotide
  Sense strand starting at position 1321 of SEQ ID NO: 584854
cgagauaagcaccaaguuu

SEQ ID NO: 594521 - RNA, 19 nt, Artificial Sequence
  Description of Artificial Sequence: Synthetic oligonucleotide
  Antisense strand to SEQ ID NO: 594520
aaacuuggugcuuaucucg

SEQ ID NO: 594522 - RNA, 19 nt, Artificial Sequence
  Description of Artificial Sequence: Synthetic oligonucleotide
  Sense strand starting at position 1380 of SEQ ID NO: 584854
cccggagcgcuccuaguuu

SEQ ID NO: 594523 - RNA, 19 nt, Artificial Sequence
  Description of Artificial Sequence: Synthetic oligonucleotide
  Antisense strand to SEQ ID NO: 594522
aaacuaggagcgcuccggg

SEQ ID NO: 594524 - RNA, 19 nt, Artificial Sequence
  Description of Artificial Sequence: Synthetic oligonucleotide
  Sense strand starting at position 2519 of SEQ ID NO: 584854
aagggaggcauccgaugaa

SEQ ID NO: 594525 - RNA, 19 nt, Artificial Sequence
  Description of Artificial Sequence: Synthetic oligonucleotide
  Antisense strand to SEQ ID NO: 594524
uucaucggaugccucccuu

SEQ ID NO: 594526 - RNA, 19 nt, Artificial Sequence
  Description of Artificial Sequence: Synthetic oligonucleotide
  Sense strand starting at position 2522 of SEQ ID NO: 584854
ggaggcauccgaugaaauc

SEQ ID NO: 594527 - RNA, 19 nt, Artificial Sequence
  Description of Artificial Sequence: Synthetic oligonucleotide
  Antisense strand to SEQ ID NO: 594526
gauuucaucggaugccucc

SEQ ID NO: 594528 - RNA, 19 nt, Artificial Sequence
  Description of Artificial Sequence: Synthetic oligonucleotide
  Sense strand starting at position 2557 of SEQ ID NO: 584854
ucaagaagccgagguaaga

SEQ ID NO: 594529 - RNA, 19 nt, Artificial Sequence
  Description of Artificial Sequence: Synthetic oligonucleotide
  Antisense strand to SEQ ID NO: 594528
ucuuaccucggcuucuuga

SEQ ID NO: 594530 - RNA, 19 nt, Artificial Sequence
  Description of Artificial Sequence: Synthetic oligonucleotide
  Sense strand starting at position 2595 of SEQ ID NO: 584854
gcgggcuaccaggaacaau

SEQ ID NO: 594531 - RNA, 19 nt, Artificial Sequence
  Description of Artificial Sequence: Synthetic oligonucleotide
  Antisense strand to SEQ ID NO: 594530
auuguuccugguagcccgc

SEQ ID NO: 594532 - RNA, 19 nt, Artificial Sequence
  Description of Artificial Sequence: Synthetic oligonucleotide
  Sense strand starting at position 2692 of SEQ ID NO: 584854
ggcugagugcguuucuuua

SEQ ID NO: 594533 - RNA, 19 nt, Artificial Sequence
  Description of Artificial Sequence: Synthetic oligonucleotide
  Antisense strand to SEQ ID NO: 594532
uaaagaaacgcacucagcc

SEQ ID NO: 594534 - RNA, 19 nt, Artificial Sequence
  Description of Artificial Sequence: Synthetic oligonucleotide
  Sense strand starting at position 2749 of SEQ ID NO: 584854
gucucccagguuugaauaa

SEQ ID NO: 594535 - RNA, 19 nt, Artificial Sequence
  Description of Artificial Sequence: Synthetic oligonucleotide
  Antisense strand to SEQ ID NO: 594534
uuauucaaaccugggagac

SEQ ID NO: 594536 - RNA, 19 nt, Artificial Sequence
  Description of Artificial Sequence: Synthetic oligonucleotide
  Sense strand starting at position 2837 of SEQ ID NO: 584854
aggguaauuugagcguagu

SEQ ID NO: 594537 - RNA, 19 nt, Artificial Sequence
  Description of Artificial Sequence: Synthetic oligonucleotide
  Antisense strand to SEQ ID NO: 594536
acuacgcucaaauuacccu

SEQ ID NO: 594538 - RNA, 19 nt, Artificial Sequence
  Description of Artificial Sequence: Synthetic oligonucleotide
  Sense strand starting at position 2838 of SEQ ID NO: 584854
ggguaauuugagcguaguc

SEQ ID NO: 594539 - RNA, 19 nt, Artificial Sequence
  Description of Artificial Sequence: Synthetic oligonucleotide
  Antisense strand to SEQ ID NO: 594538
gacuacgcucaaauuaccc

SEQ ID NO: 594540 - RNA, 19 nt, Artificial Sequence
  Description of Artificial Sequence: Synthetic oligonucleotide
  Sense strand starting at position 2911 of SEQ ID NO: 584854
aaaguaaggcauggaaacu

SEQ ID NO: 594541 - RNA, 19 nt, Artificial Sequence
  Description of Artificial Sequence: Synthetic oligonucleotide
  Antisense strand to SEQ ID NO: 594540
aguuuccaugccuuacuuu

SEQ ID NO: 594542 - RNA, 19 nt, Artificial Sequence
  Description of Artificial Sequence: Synthetic oligonucleotide
  Sense strand starting at position 2963 of SEQ ID NO: 584854
caaacuucucgcggagaaa

SEQ ID NO: 594543 - RNA, 19 nt, Artificial Sequence
  Description of Artificial Sequence: Synthetic oligonucleotide
  Antisense strand to SEQ ID NO: 594542
uuucuccgcgagaaguuug

SEQ ID NO: 594544 - RNA, 19 nt, Artificial Sequence
  Description of Artificial Sequence: Synthetic oligonucleotide
  Sense strand starting at position 2964 of SEQ ID NO: 584854
aaacuucucgcggagaaau

SEQ ID NO: 594545 - RNA, 19 nt, Artificial Sequence
  Description of Artificial Sequence: Synthetic oligonucleotide
  Antisense strand to SEQ ID NO: 594544
auuucuccgcgagaaguuu

SEQ ID NO: 594546 - RNA, 19 nt, Artificial Sequence
  Description of Artificial Sequence: Synthetic oligonucleotide
  Sense strand starting at position 2966 of SEQ ID NO: 584854
acuucucgcggagaaauca

SEQ ID NO: 594547 - RNA, 19 nt, Artificial Sequence
  Description of Artificial Sequence: Synthetic oligonucleotide
  Antisense strand to SEQ ID NO: 594546
ugauuucuccgcgagaagu

SEQ ID NO: 594548 - RNA, 19 nt, Artificial Sequence
  Description of Artificial Sequence: Synthetic oligonucleotide
  Sense strand starting at position 3034 of SEQ ID NO: 584854
caccgaauuccaggagucu

SEQ ID NO: 594549 - RNA, 19 nt, Artificial Sequence
  Description of Artificial Sequence: Synthetic oligonucleotide
  Antisense strand to SEQ ID NO: 594548
agacuccuggaauucggug

SEQ ID NO: 594550 - RNA, 19 nt, Artificial Sequence
  Description of Artificial Sequence: Synthetic oligonucleotide
  Sense strand starting at position 3051 of SEQ ID NO: 584854
cugcgaugugcuuucccaa

SEQ ID NO: 594551 - RNA, 19 nt, Artificial Sequence
  Description of Artificial Sequence: Synthetic oligonucleotide
  Antisense strand to SEQ ID NO: 594550
uugggaaagcacaucgcag

SEQ ID NO: 594552 - RNA, 19 nt, Artificial Sequence
  Description of Artificial Sequence: Synthetic oligonucleotide
  Sense strand starting at position 3369 of SEQ ID NO: 584854
uuagcaaauuucuugugua

SEQ ID NO: 594553 - RNA, 19 nt, Artificial Sequence
  Description of Artificial Sequence: Synthetic oligonucleotide
  Antisense strand to SEQ ID NO: 594552
uacacaagaaauuugcuaa

SEQ ID NO: 594554 - RNA, 19 nt, Artificial Sequence
  Description of Artificial Sequence: Synthetic oligonucleotide
  Sense strand starting at position 3464 of SEQ ID NO: 584854
gaugucacuugaguuuaca

SEQ ID NO: 594555 - RNA, 19 nt, Artificial Sequence
  Description of Artificial Sequence: Synthetic oligonucleotide
  Antisense strand to SEQ ID NO: 594554
uguaaacucaagugacauc

SEQ ID NO: 594556 - RNA, 19 nt, Artificial Sequence
  Description of Artificial Sequence: Synthetic oligonucleotide
  Sense strand starting at position 3467 of SEQ ID NO: 584854
gucacuugaguuuacaguu

SEQ ID NO: 594557 - RNA, 19 nt, Artificial Sequence
  Description of Artificial Sequence: Synthetic oligonucleotide
  Antisense strand to SEQ ID NO: 594556
aacuguaaacucaagugac

SEQ ID NO: 594558 - RNA, 19 nt, Artificial Sequence
  Description of Artificial Sequence: Synthetic oligonucleotide
  Sense strand starting at position 3556 of SEQ ID NO: 584854
gagguuagugcagaacaau

SEQ ID NO: 594559 - RNA, 19 nt, Artificial Sequence
  Description of Artificial Sequence: Synthetic oligonucleotide
  Antisense strand to SEQ ID NO: 594558
auuguucugcacuaaccuc

SEQ ID NO: 594560 - RNA, 19 nt, Artificial Sequence
  Description of Artificial Sequence: Synthetic oligonucleotide
  Sense strand starting at position 3565 of SEQ ID NO: 584854
gcagaacaauuugauccau

SEQ ID NO: 594561 - RNA, 19 nt, Artificial Sequence
  Description of Artificial Sequence: Synthetic oligonucleotide
  Antisense strand to SEQ ID NO: 594560
auggaucaaauuguucugc

SEQ ID NO: 594562 - RNA, 19 nt, Artificial Sequence
  Description of Artificial Sequence: Synthetic oligonucleotide
  Sense strand starting at position 3669 of SEQ ID NO: 584854
uugcaaagcgaugauggua

SEQ ID NO: 594563 - RNA, 19 nt, Artificial Sequence
  Description of Artificial Sequence: Synthetic oligonucleotide
  Antisense strand to SEQ ID NO: 594562
uaccaucaucgcuuugcaa

SEQ ID NO: 594564 - RNA, 19 nt, Artificial Sequence
  Description of Artificial Sequence: Synthetic oligonucleotide
  Sense strand starting at position 3802 of SEQ ID NO: 584854
cgcuccuugaccuaggauu

SEQ ID NO: 594565 - RNA, 19 nt, Artificial Sequence
  Description of Artificial Sequence: Synthetic oligonucleotide
  Antisense strand to SEQ ID NO: 594564
aauccuaggucaaggagcg

SEQ ID NO: 594566 - RNA, 19 nt, Artificial Sequence
  Description of Artificial Sequence: Synthetic oligonucleotide
  Sense strand starting at position 3925 of SEQ ID NO: 584854
uuacucauguuggcaaaga

SEQ ID NO: 594567 - RNA, 19 nt, Artificial Sequence
  Description of Artificial Sequence: Synthetic oligonucleotide
  Antisense strand to SEQ ID NO: 594566
ucuuugccaacaugaguaa

SEQ ID NO: 594568 - RNA, 19 nt, Artificial Sequence
  Description of Artificial Sequence: Synthetic oligonucleotide
  Sense strand starting at position 153 of SEQ ID NO: 584855
uugaauaacuggucuguga

SEQ ID NO: 594569 - RNA, 19 nt, Artificial Sequence
  Description of Artificial Sequence: Synthetic oligonucleotide
  Antisense strand to SEQ ID NO: 594568
ucacagaccaguuauucaa

SEQ ID NO: 594570 - RNA, 19 nt, Artificial Sequence
  Description of Artificial Sequence: Synthetic oligonucleotide
  Sense strand starting at position 155 of SEQ ID NO: 584855
gaauaacuggucugugauc

SEQ ID NO: 594571 - RNA, 19 nt, Artificial Sequence
  Description of Artificial Sequence: Synthetic oligonucleotide
  Antisense strand to SEQ ID NO: 594570
gaucacagaccaguuauuc

SEQ ID NO: 594572 - RNA, 19 nt, Artificial Sequence
  Description of Artificial Sequence: Synthetic oligonucleotide
  Sense strand starting at position 157 of SEQ ID NO: 584855
auaacuggucugugaucca

SEQ ID NO: 594573 - RNA, 19 nt, Artificial Sequence
  Description of Artificial Sequence: Synthetic oligonucleotide
  Antisense strand to SEQ ID NO: 594572
uggaucacagaccaguuau

SEQ ID NO: 594574 - RNA, 19 nt, Artificial Sequence
  Description of Artificial Sequence: Synthetic oligonucleotide
  Sense strand starting at position 225 of SEQ ID NO: 584855
aggguuaauccaugcuaaa

SEQ ID NO: 594575 - RNA, 19 nt, Artificial Sequence
  Description of Artificial Sequence: Synthetic oligonucleotide
  Antisense strand to SEQ ID NO: 594574
uuuagcauggauuaacccu

SEQ ID NO: 594576 - RNA, 19 nt, Artificial Sequence
  Description of Artificial Sequence: Synthetic oligonucleotide
  Sense strand starting at position 306 of SEQ ID NO: 584855
caguuuagacuauggacua

SEQ ID NO: 594577 - RNA, 19 nt, Artificial Sequence
  Description of Artificial Sequence: Synthetic oligonucleotide
  Antisense strand to SEQ ID NO: 594576
uaguccauagucuaaacug

SEQ ID NO: 594578 - RNA, 19 nt, Artificial Sequence
  Description of Artificial Sequence: Synthetic oligonucleotide
  Sense strand starting at position 347 of SEQ ID NO: 584855
aguggauguguacacugau

SEQ ID NO: 594579 - RNA, 19 nt, Artificial Sequence
  Description of Artificial Sequence: Synthetic oligonucleotide
  Antisense strand to SEQ ID NO: 594578
aucaguguacacauccacu

SEQ ID NO: 594580 - RNA, 19 nt, Artificial Sequence
  Description of Artificial Sequence: Synthetic oligonucleotide
  Sense strand starting at position 350 of SEQ ID NO: 584855
ggauguguacacugauaca

SEQ ID NO: 594581 - RNA, 19 nt, Artificial Sequence
  Description of Artificial Sequence: Synthetic oligonucleotide
  Antisense strand to SEQ ID NO: 594580
uguaucaguguacacaucc

SEQ ID NO: 594582 - RNA, 19 nt, Artificial Sequence
  Description of Artificial Sequence: Synthetic oligonucleotide
  Sense strand starting at position 410 of SEQ ID NO: 584855
agacauguauaccuagcau

SEQ ID NO: 594583 - RNA, 19 nt, Artificial Sequence
  Description of Artificial Sequence: Synthetic oligonucleotide
  Antisense strand to SEQ ID NO: 594582
augcuagguauacaugucu

SEQ ID NO: 594584 - RNA, 19 nt, Artificial Sequence
  Description of Artificial Sequence: Synthetic oligonucleotide
  Sense strand starting at position 437 of SEQ ID NO: 584855
cuagguauguacccuggaa

SEQ ID NO: 594585 - RNA, 19 nt, Artificial Sequence
  Description of Artificial Sequence: Synthetic oligonucleotide
  Antisense strand to SEQ ID NO: 594584
uuccaggguacauaccuag

SEQ ID NO: 594586 - RNA, 19 nt, Artificial Sequence
  Description of Artificial Sequence: Synthetic oligonucleotide
  Sense strand starting at position 498 of SEQ ID NO: 584855
acagcauagguguaauauc

SEQ ID NO: 594587 - RNA, 19 nt, Artificial Sequence
  Description of Artificial Sequence: Synthetic oligonucleotide
  Antisense strand to SEQ ID NO: 594586
gauauuacaccuaugcugu

SEQ ID NO: 594588 - RNA, 19 nt, Artificial Sequence
  Description of Artificial Sequence: Synthetic oligonucleotide
  Sense strand starting at position 788 of SEQ ID NO: 584855
gauaguggcuaccuugaga

SEQ ID NO: 594589 - RNA, 19 nt, Artificial Sequence
  Description of Artificial Sequence: Synthetic oligonucleotide
  Antisense strand to SEQ ID NO: 594588
ucucaagguagccacuauc

SEQ ID NO: 594590 - RNA, 19 nt, Artificial Sequence
  Description of Artificial Sequence: Synthetic oligonucleotide
  Sense strand starting at position 823 of SEQ ID NO: 584855
gugcaauuagagcaagaca

SEQ ID NO: 594591 - RNA, 19 nt, Artificial Sequence
  Description of Artificial Sequence: Synthetic oligonucleotide
  Antisense strand to SEQ ID NO: 594590
ugucuugcucuaauugcac

SEQ ID NO: 594592 - RNA, 19 nt, Artificial Sequence
  Description of Artificial Sequence: Synthetic oligonucleotide
  Sense strand starting at position 1307 of SEQ ID NO: 584855
gugagaaucuagguuguaa

SEQ ID NO: 594593 - RNA, 19 nt, Artificial Sequence
  Description of Artificial Sequence: Synthetic oligonucleotide
  Antisense strand to SEQ ID NO: 594592
uuacaaccuagauucucac

SEQ ID NO: 594594 - RNA, 19 nt, Artificial Sequence
  Description of Artificial Sequence: Synthetic oligonucleotide
  Sense strand starting at position 1391 of SEQ ID NO: 584855
gcuauagagcgccuucgua

SEQ ID NO: 594595 - RNA, 19 nt, Artificial Sequence
  Description of Artificial Sequence: Synthetic oligonucleotide
  Antisense strand to SEQ ID NO: 594594
uacgaaggcgcucuauagc

SEQ ID NO: 594596 - RNA, 19 nt, Artificial Sequence
  Description of Artificial Sequence: Synthetic oligonucleotide
  Sense strand starting at position 1843 of SEQ ID NO: 584855
cuccguacccuugauaaug

SEQ ID NO: 594597 - RNA, 19 nt, Artificial Sequence
  Description of Artificial Sequence: Synthetic oligonucleotide
  Antisense strand to SEQ ID NO: 594596
cauuaucaaggguacggag

SEQ ID NO: 594598 - RNA, 19 nt, Artificial Sequence
  Description of Artificial Sequence: Synthetic oligonucleotide
  Sense strand starting at position 2116 of SEQ ID NO: 584855
ccguguagucaggcuguga

SEQ ID NO: 594599 - RNA, 19 nt, Artificial Sequence
  Description of Artificial Sequence: Synthetic oligonucleotide
  Antisense strand to SEQ ID NO: 594598
ucacagccugacuacacgg

SEQ ID NO: 594600 - RNA, 19 nt, Artificial Sequence
  Description of Artificial Sequence: Synthetic oligonucleotide
  Sense strand starting at position 2117 of SEQ ID NO: 584855
cguguagucaggcugugaa

SEQ ID NO: 594601 - RNA, 19 nt, Artificial Sequence
  Description of Artificial Sequence: Synthetic oligonucleotide
  Antisense strand to SEQ ID NO: 594600
uucacagccugacuacacg

SEQ ID NO: 594602 - RNA, 19 nt, Artificial Sequence
  Description of Artificial Sequence: Synthetic oligonucleotide
  Sense strand starting at position 2186 of SEQ ID NO: 584855
uaggaaggugcuugaacuu

SEQ ID NO: 594603 - RNA, 19 nt, Artificial Sequence
  Description of Artificial Sequence: Synthetic oligonucleotide
  Antisense strand to SEQ ID NO: 594602
aaguucaagcaccuuccua

SEQ ID NO: 594604 - RNA, 19 nt, Artificial Sequence
  Description of Artificial Sequence: Synthetic oligonucleotide
  Sense strand starting at position 2269 of SEQ ID NO: 584855
cccauaucugcugagaaua

SEQ ID NO: 594605 - RNA, 19 nt, Artificial Sequence
  Description of Artificial Sequence: Synthetic oligonucleotide
  Antisense strand to SEQ ID NO: 594604
uauucucagcagauauggg

SEQ ID NO: 594606 - RNA, 19 nt, Artificial Sequence
  Description of Artificial Sequence: Synthetic oligonucleotide
  Sense strand starting at position 2572 of SEQ ID NO: 584855
augaguguggcugacuauu

SEQ ID NO: 594607 - RNA, 19 nt, Artificial Sequence
  Description of Artificial Sequence: Synthetic oligonucleotide
  Antisense strand to SEQ ID NO: 594606
aauagucagccacacucau

SEQ ID NO: 594608 - RNA, 19 nt, Artificial Sequence
  Description of Artificial Sequence: Synthetic oligonucleotide
  Sense strand starting at position 2606 of SEQ ID NO: 584855
agacaccuguuuccuagaa

SEQ ID NO: 594609 - RNA, 19 nt, Artificial Sequence
  Description of Artificial Sequence: Synthetic oligonucleotide
  Antisense strand to SEQ ID NO: 594608
uucuaggaaacaggugucu

SEQ ID NO: 594610 - RNA, 19 nt, Artificial Sequence
  Description of Artificial Sequence: Synthetic oligonucleotide
  Sense strand starting at position 2610 of SEQ ID NO: 584855
accuguuuccuagaaugcu

SEQ ID NO: 594611 - RNA, 19 nt, Artificial Sequence
  Description of Artificial Sequence: Synthetic oligonucleotide
  Antisense strand to SEQ ID NO: 594610
agcauucuaggaaacaggu

SEQ ID NO: 594612 - RNA, 19 nt, Artificial Sequence
  Description of Artificial Sequence: Synthetic oligonucleotide
  Sense strand starting at position 2662 of SEQ ID NO: 584855
acucacguuguauaauaaa

SEQ ID NO: 594613 - RNA, 19 nt, Artificial Sequence
  Description of Artificial Sequence: Synthetic oligonucleotide
  Antisense strand to SEQ ID NO: 594612
uuuauuauacaacgugagu

SEQ ID NO: 594614 - RNA, 19 nt, Artificial Sequence
  Description of Artificial Sequence: Synthetic oligonucleotide
  Sense strand starting at position 2951 of SEQ ID NO: 584855
ccauguggccagugauuua

SEQ ID NO: 594615 - RNA, 19 nt, Artificial Sequence
  Description of Artificial Sequence: Synthetic oligonucleotide
  Antisense strand to SEQ ID NO: 594614
uaaaucacuggccacaugg

SEQ ID NO: 594616 - RNA, 19 nt, Artificial Sequence
  Description of Artificial Sequence: Synthetic oligonucleotide
  Sense strand starting at position 3001 of SEQ ID NO: 584855
gaguacucuggauguggaa

SEQ ID NO: 594617 - RNA, 19 nt, Artificial Sequence
  Description of Artificial Sequence: Synthetic oligonucleotide
  Antisense strand to SEQ ID NO: 594616
uuccacauccagaguacuc

SEQ ID NO: 594618 - RNA, 19 nt, Artificial Sequence
  Description of Artificial Sequence: Synthetic oligonucleotide
  Sense strand starting at position 3031 of SEQ ID NO: 584855
cuuacuggucgauaaucau

SEQ ID NO: 594619 - RNA, 19 nt, Artificial Sequence
  Description of Artificial Sequence: Synthetic oligonucleotide
  Antisense strand to SEQ ID NO: 594618
augauuaucgaccaguaag

SEQ ID NO: 594620 - RNA, 19 nt, Artificial Sequence
  Description of Artificial Sequence: Synthetic oligonucleotide
  Sense strand starting at position 3070 of SEQ ID NO: 584855
ggaagcguuccugaggaca

SEQ ID NO: 594621 - RNA, 19 nt, Artificial Sequence
  Description of Artificial Sequence: Synthetic oligonucleotide
  Antisense strand to SEQ ID NO: 594620
uguccucaggaacgcuucc

SEQ ID NO: 594622 - RNA, 19 nt, Artificial Sequence
  Description of Artificial Sequence: Synthetic oligonucleotide
  Sense strand starting at position 3211 of SEQ ID NO: 584855
augagucauucugugaaac

SEQ ID NO: 594623 - RNA, 19 nt, Artificial Sequence
  Description of Artificial Sequence: Synthetic oligonucleotide
  Antisense strand to SEQ ID NO: 594622
guuucacagaaugacucau

SEQ ID NO: 594624 - RNA, 19 nt, Artificial Sequence
  Description of Artificial Sequence: Synthetic oligonucleotide
  Sense strand starting at position 3219 of SEQ ID NO: 584855
uucugugaaaccugaggga

SEQ ID NO: 594625 - RNA, 19 nt, Artificial Sequence
  Description of Artificial Sequence: Synthetic oligonucleotide
  Antisense strand to SEQ ID NO: 594624
ucccucagguuucacagaa

SEQ ID NO: 594626 - RNA, 19 nt, Artificial Sequence
  Description of Artificial Sequence: Synthetic oligonucleotide
  Sense strand starting at position 3223 of SEQ ID NO: 584855
gugaaaccugagggaguaa

SEQ ID NO: 594627 - RNA, 19 nt, Artificial Sequence
  Description of Artificial Sequence: Synthetic oligonucleotide
  Antisense strand to SEQ ID NO: 594626
uuacucccucagguuucac

SEQ ID NO: 594628 - RNA, 19 nt, Artificial Sequence
  Description of Artificial Sequence: Synthetic oligonucleotide
  Sense strand starting at position 3236 of SEQ ID NO: 584855
gaguaaagcgaauagcaau

SEQ ID NO: 594629 - RNA, 19 nt, Artificial Sequence
  Description of Artificial Sequence: Synthetic oligonucleotide
  Antisense strand to SEQ ID NO: 594628
auugcuauucgcuuuacuc

SEQ ID NO: 594630 - RNA, 19 nt, Artificial Sequence
  Description of Artificial Sequence: Synthetic oligonucleotide
  Sense strand starting at position 3242 of SEQ ID NO: 584855
agcgaauagcaaugaaaca

SEQ ID NO: 594631 - RNA, 19 nt, Artificial Sequence
  Description of Artificial Sequence: Synthetic oligonucleotide
  Antisense strand to SEQ ID NO: 594630
uguuucauugcuauucgcu

SEQ ID NO: 594632 - RNA, 19 nt, Artificial Sequence
  Description of Artificial Sequence: Synthetic oligonucleotide
  Sense strand starting at position 3254 of SEQ ID NO: 584855
ugaaacaucauguguagag

SEQ ID NO: 594633 - RNA, 19 nt, Artificial Sequence
  Description of Artificial Sequence: Synthetic oligonucleotide
  Antisense strand to SEQ ID NO: 594632
cucuacacaugauguuuca

SEQ ID NO: 594634 - RNA, 19 nt, Artificial Sequence
  Description of Artificial Sequence: Synthetic oligonucleotide
  Sense strand starting at position 3255 of SEQ ID NO: 584855
gaaacaucauguguagaga

SEQ ID NO: 594635 - RNA, 19 nt, Artificial Sequence
  Description of Artificial Sequence: Synthetic oligonucleotide
  Antisense strand to SEQ ID NO: 594634
ucucuacacaugauguuuc

SEQ ID NO: 594636 - RNA, 19 nt, Artificial Sequence
  Description of Artificial Sequence: Synthetic oligonucleotide
  Sense strand starting at position 3338 of SEQ ID NO: 584855
gagacagcuggucagaagu

SEQ ID NO: 594637 - RNA, 19 nt, Artificial Sequence
  Description of Artificial Sequence: Synthetic oligonucleotide
  Antisense strand to SEQ ID NO: 594636
acuucugaccagcugucuc

SEQ ID NO: 594638 - RNA, 19 nt, Artificial Sequence
  Description of Artificial Sequence: Synthetic oligonucleotide
  Sense strand starting at position 3509 of SEQ ID NO: 584855
cuguaaguggucuacaaau

SEQ ID NO: 594639 - RNA, 19 nt, Artificial Sequence
  Description of Artificial Sequence: Synthetic oligonucleotide
  Antisense strand to SEQ ID NO: 594638
auuuguagaccacuuacag

SEQ ID NO: 594640 - RNA, 19 nt, Artificial Sequence
  Description of Artificial Sequence: Synthetic oligonucleotide
  Sense strand starting at position 3617 of SEQ ID NO: 584855
uuaaaugacugccugacuu

SEQ ID NO: 594641 - RNA, 19 nt, Artificial Sequence
  Description of Artificial Sequence: Synthetic oligonucleotide
  Antisense strand to SEQ ID NO: 594640
aagucaggcagucauuuaa

SEQ ID NO: 594642 - RNA, 19 nt, Artificial Sequence
  Description of Artificial Sequence: Synthetic oligonucleotide
  Sense strand starting at position 3634 of SEQ ID NO: 584855
uuguauguggcagaaacaa

SEQ ID NO: 594643 - RNA, 19 nt, Artificial Sequence
  Description of Artificial Sequence: Synthetic oligonucleotide
  Antisense strand to SEQ ID NO: 594642
uuguuucugccacauacaa

SEQ ID NO: 594644 - RNA, 19 nt, Artificial Sequence
  Description of Artificial Sequence: Synthetic oligonucleotide
  Sense strand starting at position 3675 of SEQ ID NO: 584855
guguuuaagcauagguggu

SEQ ID NO: 594645 - RNA, 19 nt, Artificial Sequence
  Description of Artificial Sequence: Synthetic oligonucleotide
  Antisense strand to SEQ ID NO: 594644
accaccuaugcuuaaacac

SEQ ID NO: 594646 - RNA, 19 nt, Artificial Sequence
  Description of Artificial Sequence: Synthetic oligonucleotide
  Sense strand starting at position 3955 of SEQ ID NO: 584855
guugcuuguagccugugaa

SEQ ID NO: 594647 - RNA, 19 nt, Artificial Sequence
  Description of Artificial Sequence: Synthetic oligonucleotide
  Antisense strand to SEQ ID NO: 594646
uucacaggcuacaagcaac

SEQ ID NO: 594648 - RNA, 19 nt, Artificial Sequence
  Description of Artificial Sequence: Synthetic oligonucleotide
  Sense strand starting at position 60 of SEQ ID NO: 584856
auuguugugguuuacagaa

SEQ ID NO: 594649 - RNA, 19 nt, Artificial Sequence
  Description of Artificial Sequence: Synthetic oligonucleotide
  Antisense strand to SEQ ID NO: 594648
uucuguaaaccacaacaau

SEQ ID NO: 594650 - RNA, 19 nt, Artificial Sequence
  Description of Artificial Sequence: Synthetic oligonucleotide
  Sense strand starting at position 266 of SEQ ID NO: 584856
uuccuugauuccuugauag

SEQ ID NO: 594651 - RNA, 19 nt, Artificial Sequence
  Description of Artificial Sequence: Synthetic oligonucleotide
  Antisense strand to SEQ ID NO: 594650
cuaucaaggaaucaaggaa

SEQ ID NO: 594652 - RNA, 19 nt, Artificial Sequence
  Description of Artificial Sequence: Synthetic oligonucleotide
  Sense strand starting at position 268 of SEQ ID NO: 584856
ccuugauuccuugauagua

SEQ ID NO: 594653 - RNA, 19 nt, Artificial Sequence
  Description of Artificial Sequence: Synthetic oligonucleotide
  Antisense strand to SEQ ID NO: 594652
uacuaucaaggaaucaagg

SEQ ID NO: 594654 - RNA, 19 nt, Artificial Sequence
  Description of Artificial Sequence: Synthetic oligonucleotide
  Sense strand starting at position 371 of SEQ ID NO: 584856
guaguaugugaauauauac

SEQ ID NO: 594655 - RNA, 19 nt, Artificial Sequence
  Description of Artificial Sequence: Synthetic oligonucleotide
  Antisense strand to SEQ ID NO: 594654
guauauauucacauacuac

SEQ ID NO: 594656 - RNA, 19 nt, Artificial Sequence
  Description of Artificial Sequence: Synthetic oligonucleotide
  Sense strand starting at position 378 of SEQ ID NO: 584856
gugaauauauacuuacaug

SEQ ID NO: 594657 - RNA, 19 nt, Artificial Sequence
  Description of Artificial Sequence: Synthetic oligonucleotide
  Antisense strand to SEQ ID NO: 594656
cauguaaguauauauucac

SEQ ID NO: 594658 - RNA, 19 nt, Artificial Sequence
  Description of Artificial Sequence: Synthetic oligonucleotide
  Sense strand starting at position 639 of SEQ ID NO: 584856
ugccuaaggcaucaaugaa

SEQ ID NO: 594659 - RNA, 19 nt, Artificial Sequence
  Description of Artificial Sequence: Synthetic oligonucleotide
  Antisense strand to SEQ ID NO: 594658
uucauugaugccuuaggca

SEQ ID NO: 594660 - RNA, 19 nt, Artificial Sequence
  Description of Artificial Sequence: Synthetic oligonucleotide
  Sense strand starting at position 817 of SEQ ID NO: 584856
ugaccaugucagcaucauu

SEQ ID NO: 594661 - RNA, 19 nt, Artificial Sequence
  Description of Artificial Sequence: Synthetic oligonucleotide
  Antisense strand to SEQ ID NO: 594660
aaugaugcugacaugguca

SEQ ID NO: 594662 - RNA, 19 nt, Artificial Sequence
  Description of Artificial Sequence: Synthetic oligonucleotide
  Sense strand starting at position 888 of SEQ ID NO: 584856
ggagucguccgagauaacu

SEQ ID NO: 594663 - RNA, 19 nt, Artificial Sequence
  Description of Artificial Sequence: Synthetic oligonucleotide
  Antisense strand to SEQ ID NO: 594662
aguuaucucggacgacucc

SEQ ID NO: 594664 - RNA, 19 nt, Artificial Sequence
  Description of Artificial Sequence: Synthetic oligonucleotide
  Sense strand starting at position 896 of SEQ ID NO: 584856
ccgagauaacuguaugcga

SEQ ID NO: 594665 - RNA, 19 nt, Artificial Sequence
  Description of Artificial Sequence: Synthetic oligonucleotide
  Antisense strand to SEQ ID NO: 594664
ucgcauacaguuaucucgg

SEQ ID NO: 594666 - RNA, 19 nt, Artificial Sequence
  Description of Artificial Sequence: Synthetic oligonucleotide
  Sense strand starting at position 904 of SEQ ID NO: 584856
acuguaugcgacgaggaua

SEQ ID NO: 594667 - RNA, 19 nt, Artificial Sequence
  Description of Artificial Sequence: Synthetic oligonucleotide
  Antisense strand to SEQ ID NO: 594666
uauccucgucgcauacagu

SEQ ID NO: 594668 - RNA, 19 nt, Artificial Sequence
  Description of Artificial Sequence: Synthetic oligonucleotide
  Sense strand starting at position 1158 of SEQ ID NO: 584856
cguagucuucuauaaauaa

SEQ ID NO: 594669 - RNA, 19 nt, Artificial Sequence
  Description of Artificial Sequence: Synthetic oligonucleotide
  Antisense strand to SEQ ID NO: 594668
uuauuuauagaagacuacg

SEQ ID NO: 594670 - RNA, 19 nt, Artificial Sequence
  Description of Artificial Sequence: Synthetic oligonucleotide
  Sense strand starting at position 1369 of SEQ ID NO: 584856
acaguuucccaguagcuga

SEQ ID NO: 594671 - RNA, 19 nt, Artificial Sequence
  Description of Artificial Sequence: Synthetic oligonucleotide
  Antisense strand to SEQ ID NO: 594670
ucagcuacugggaaacugu

SEQ ID NO: 594672 - RNA, 19 nt, Artificial Sequence
  Description of Artificial Sequence: Synthetic oligonucleotide
  Sense strand starting at position 1474 of SEQ ID NO: 584856
ggaauaugucaagaguagu

SEQ ID NO: 594673 - RNA, 19 nt, Artificial Sequence
  Description of Artificial Sequence: Synthetic oligonucleotide
  Antisense strand to SEQ ID NO: 594672
acuacucuugacauauucc

SEQ ID NO: 594674 - RNA, 19 nt, Artificial Sequence
  Description of Artificial Sequence: Synthetic oligonucleotide
  Sense strand starting at position 1521 of SEQ ID NO: 584856
uccaauuauccacaguugu

SEQ ID NO: 594675 - RNA, 19 nt, Artificial Sequence
  Description of Artificial Sequence: Synthetic oligonucleotide
  Antisense strand to SEQ ID NO: 594674
acaacuguggauaauugga

SEQ ID NO: 594676 - RNA, 19 nt, Artificial Sequence
  Description of Artificial Sequence: Synthetic oligonucleotide
  Sense strand starting at position 1565 of SEQ ID NO: 584856
gcagaagacggcuaauauu

SEQ ID NO: 594677 - RNA, 19 nt, Artificial Sequence
  Description of Artificial Sequence: Synthetic oligonucleotide
  Antisense strand to SEQ ID NO: 594676
aauauuagccgucuucugc

SEQ ID NO: 594678 - RNA, 19 nt, Artificial Sequence
  Description of Artificial Sequence: Synthetic oligonucleotide
  Sense strand starting at position 1757 of SEQ ID NO: 584856
aucacagaucuaugcugau

SEQ ID NO: 594679 - RNA, 19 nt, Artificial Sequence
  Description of Artificial Sequence: Synthetic oligonucleotide
  Antisense strand to SEQ ID NO: 594678
aucagcauagaucugugau

SEQ ID NO: 594680 - RNA, 19 nt, Artificial Sequence
  Description of Artificial Sequence: Synthetic oligonucleotide
  Sense strand starting at position 1779 of SEQ ID NO: 584856
caccuugguguuggaauau

SEQ ID NO: 594681 - RNA, 19 nt, Artificial Sequence
  Description of Artificial Sequence: Synthetic oligonucleotide
  Antisense strand to SEQ ID NO: 594680
auauuccaacaccaaggug

SEQ ID NO: 594682 - RNA, 19 nt, Artificial Sequence
  Description of Artificial Sequence: Synthetic oligonucleotide
  Sense strand starting at position 1906 of SEQ ID NO: 584856
uugaaauccuuccuguaag

SEQ ID NO: 594683 - RNA, 19 nt, Artificial Sequence
  Description of Artificial Sequence: Synthetic oligonucleotide
  Antisense strand to SEQ ID NO: 594682
cuuacaggaaggauuucaa

SEQ ID NO: 594684 - RNA, 19 nt, Artificial Sequence
  Description of Artificial Sequence: Synthetic oligonucleotide
  Sense strand starting at position 2039 of SEQ ID NO: 584856
agaagaggcuucucauugu

SEQ ID NO: 594685 - RNA, 19 nt, Artificial Sequence
  Description of Artificial Sequence: Synthetic oligonucleotide
  Antisense strand to SEQ ID NO: 594684
acaaugagaagccucuucu

SEQ ID NO: 594686 - RNA, 19 nt, Artificial Sequence
  Description of Artificial Sequence: Synthetic oligonucleotide
  Sense strand starting at position 2042 of SEQ ID NO: 584856
agaggcuucucauuguaau

SEQ ID NO: 594687 - RNA, 19 nt, Artificial Sequence
  Description of Artificial Sequence: Synthetic oligonucleotide
  Antisense strand to SEQ ID NO: 594686
auuacaaugagaagccucu

SEQ ID NO: 594688 - RNA, 19 nt, Artificial Sequence
  Description of Artificial Sequence: Synthetic oligonucleotide
  Sense strand starting at position 2059 of SEQ ID NO: 584856
auuugaaacugguaaagca

SEQ ID NO: 594689 - RNA, 19 nt, Artificial Sequence
  Description of Artificial Sequence: Synthetic oligonucleotide
  Antisense strand to SEQ ID NO: 594688
ugcuuuaccaguuucaaau

SEQ ID NO: 594690 - RNA, 19 nt, Artificial Sequence
  Description of Artificial Sequence: Synthetic oligonucleotide
  Sense strand starting at position 2237 of SEQ ID NO: 584856
auaguacuucuuuagaucu

SEQ ID NO: 594691 - RNA, 19 nt, Artificial Sequence
  Description of Artificial Sequence: Synthetic oligonucleotide
  Antisense strand to SEQ ID NO: 594690
agaucuaaagaaguacuau

SEQ ID NO: 594692 - RNA, 19 nt, Artificial Sequence
  Description of Artificial Sequence: Synthetic oligonucleotide
  Sense strand starting at position 2262 of SEQ ID NO: 584856
agugacauguacuuaauac

SEQ ID NO: 594693 - RNA, 19 nt, Artificial Sequence
  Description of Artificial Sequence: Synthetic oligonucleotide
  Antisense strand to SEQ ID NO: 594692
guauuaaguacaugucacu

SEQ ID NO: 594694 - RNA, 19 nt, Artificial Sequence
  Description of Artificial Sequence: Synthetic oligonucleotide
  Sense strand starting at position 2308 of SEQ ID NO: 584856
cuaaguuagcuugaugaau

SEQ ID NO: 594695 - RNA, 19 nt, Artificial Sequence
  Description of Artificial Sequence: Synthetic oligonucleotide
  Antisense strand to SEQ ID NO: 594694
auucaucaagcuaacuuag

SEQ ID NO: 594696 - RNA, 19 nt, Artificial Sequence
  Description of Artificial Sequence: Synthetic oligonucleotide
  Sense strand starting at position 2328 of SEQ ID NO: 584856
ucgguucuguauuugagau

SEQ ID NO: 594697 - RNA, 19 nt, Artificial Sequence
  Description of Artificial Sequence: Synthetic oligonucleotide
  Antisense strand to SEQ ID NO: 594696
aucucaaauacagaaccga

SEQ ID NO: 594698 - RNA, 19 nt, Artificial Sequence
  Description of Artificial Sequence: Synthetic oligonucleotide
  Sense strand starting at position 2329 of SEQ ID NO: 584856
cgguucuguauuugagauu

SEQ ID NO: 594699 - RNA, 19 nt, Artificial Sequence
  Description of Artificial Sequence: Synthetic oligonucleotide
  Antisense strand to SEQ ID NO: 594698
aaucucaaauacagaaccg

SEQ ID NO: 594700 - RNA, 19 nt, Artificial Sequence
  Description of Artificial Sequence: Synthetic oligonucleotide
  Sense strand starting at position 2738 of SEQ ID NO: 584856
ucaaaucgucaugacuaca

SEQ ID NO: 594701 - RNA, 19 nt, Artificial Sequence
  Description of Artificial Sequence: Synthetic oligonucleotide
  Antisense strand to SEQ ID NO: 594700
uguagucaugacgauuuga

SEQ ID NO: 594702 - RNA, 19 nt, Artificial Sequence
  Description of Artificial Sequence: Synthetic oligonucleotide
  Sense strand starting at position 2752 of SEQ ID NO: 584856
cuacaugcagauugaaauu

SEQ ID NO: 594703 - RNA, 19 nt, Artificial Sequence
  Description of Artificial Sequence: Synthetic oligonucleotide
  Antisense strand to SEQ ID NO: 594702
aauuucaaucugcauguag

SEQ ID NO: 594704 - RNA, 19 nt, Artificial Sequence
  Description of Artificial Sequence: Synthetic oligonucleotide
  Sense strand starting at position 2890 of SEQ ID NO: 584856
uuuggaagucuacaauguu

SEQ ID NO: 594705 - RNA, 19 nt, Artificial Sequence
  Description of Artificial Sequence: Synthetic oligonucleotide
  Antisense strand to SEQ ID NO: 594704
aacauuguagacuuccaaa

SEQ ID NO: 594706 - RNA, 19 nt, Artificial Sequence
  Description of Artificial Sequence: Synthetic oligonucleotide
  Sense strand starting at position 2969 of SEQ ID NO: 584856
cauugucugggauaguaug

SEQ ID NO: 594707 - RNA, 19 nt, Artificial Sequence
  Description of Artificial Sequence: Synthetic oligonucleotide
  Antisense strand to SEQ ID NO: 594706
cauacuaucccagacaaug

SEQ ID NO: 594708 - RNA, 19 nt, Artificial Sequence
  Description of Artificial Sequence: Synthetic oligonucleotide
  Sense strand starting at position 2975 of SEQ ID NO: 584856
cugggauaguaugcugaua

SEQ ID NO: 594709 - RNA, 19 nt, Artificial Sequence
  Description of Artificial Sequence: Synthetic oligonucleotide
  Antisense strand to SEQ ID NO: 594708
uaucagcauacuaucccag

SEQ ID NO: 594710 - RNA, 19 nt, Artificial Sequence
  Description of Artificial Sequence: Synthetic oligonucleotide
  Sense strand starting at position 2986 of SEQ ID NO: 584856
ugcugauaccaauguaaau

SEQ ID NO: 594711 - RNA, 19 nt, Artificial Sequence
  Description of Artificial Sequence: Synthetic oligonucleotide
  Antisense strand to SEQ ID NO: 594710
auuuacauugguaucagca

SEQ ID NO: 594712 - RNA, 19 nt, Artificial Sequence
  Description of Artificial Sequence: Synthetic oligonucleotide
  Sense strand starting at position 3140 of SEQ ID NO: 584856
ucaguuauuggugaaugca

SEQ ID NO: 594713 - RNA, 19 nt, Artificial Sequence
  Description of Artificial Sequence: Synthetic oligonucleotide
  Antisense strand to SEQ ID NO: 594712
ugcauucaccaauaacuga

SEQ ID NO: 594714 - RNA, 19 nt, Artificial Sequence
  Description of Artificial Sequence: Synthetic oligonucleotide
  Sense strand starting at position 3143 of SEQ ID NO: 584856
guuauuggugaaugcagaa

SEQ ID NO: 594715 - RNA, 19 nt, Artificial Sequence
  Description of Artificial Sequence: Synthetic oligonucleotide
  Antisense strand to SEQ ID NO: 594714
uucugcauucaccaauaac

SEQ ID NO: 594716 - RNA, 19 nt, Artificial Sequence
  Description of Artificial Sequence: Synthetic oligonucleotide
  Sense strand starting at position 3163 of SEQ ID NO: 584856
acugaaaggguuugcagaa

SEQ ID NO: 594717 - RNA, 19 nt, Artificial Sequence
  Description of Artificial Sequence: Synthetic oligonucleotide
  Antisense strand to SEQ ID NO: 594716
uucugcaaacccuuucagu

SEQ ID NO: 594718 - RNA, 19 nt, Artificial Sequence
  Description of Artificial Sequence: Synthetic oligonucleotide
  Sense strand starting at position 3164 of SEQ ID NO: 584856
cugaaaggguuugcagaau

SEQ ID NO: 594719 - RNA, 19 nt, Artificial Sequence
  Description of Artificial Sequence: Synthetic oligonucleotide
  Antisense strand to SEQ ID NO: 594718
auucugcaaacccuuucag

SEQ ID NO: 594720 - RNA, 19 nt, Artificial Sequence
  Description of Artificial Sequence: Synthetic oligonucleotide
  Sense strand starting at position 3365 of SEQ ID NO: 584856
gcagguugaaaguaaguua

SEQ ID NO: 594721 - RNA, 19 nt, Artificial Sequence
  Description of Artificial Sequence: Synthetic oligonucleotide
  Antisense strand to SEQ ID NO: 594720
uaacuuacuuucaaccugc

SEQ ID NO: 594722 - RNA, 19 nt, Artificial Sequence
  Description of Artificial Sequence: Synthetic oligonucleotide
  Sense strand starting at position 3368 of SEQ ID NO: 584856
gguugaaaguaaguuaaga

SEQ ID NO: 594723 - RNA, 19 nt, Artificial Sequence
  Description of Artificial Sequence: Synthetic oligonucleotide
  Antisense strand to SEQ ID NO: 594722
ucuuaacuuacuuucaacc

SEQ ID NO: 594724 - RNA, 19 nt, Artificial Sequence
  Description of Artificial Sequence: Synthetic oligonucleotide
  Sense strand starting at position 3838 of SEQ ID NO: 584856
cuaguauucuuagucagaa

SEQ ID NO: 594725 - RNA, 19 nt, Artificial Sequence
  Description of Artificial Sequence: Synthetic oligonucleotide
  Antisense strand to SEQ ID NO: 594724
uucugacuaagaauacuag

SEQ ID NO: 594726 - RNA, 19 nt, Artificial Sequence
  Description of Artificial Sequence: Synthetic oligonucleotide
  Sense strand starting at position 3936 of SEQ ID NO: 584856
caacuugugcagugagaga

SEQ ID NO: 594727 - RNA, 19 nt, Artificial Sequence
  Description of Artificial Sequence: Synthetic oligonucleotide
  Antisense strand to SEQ ID NO: 594726
ucucucacugcacaaguug

SEQ ID NO: 594728 - RNA, 19 nt, Artificial Sequence
  Description of Artificial Sequence: Synthetic oligonucleotide
  Sense strand starting at position 103 of SEQ ID NO: 584857
caugaucuguccgcugaca

SEQ ID NO: 594729 - RNA, 19 nt, Artificial Sequence
  Description of Artificial Sequence: Synthetic oligonucleotide
  Antisense strand to SEQ ID NO: 594728
ugucagcggacagaucaug

SEQ ID NO: 594730 - RNA, 19 nt, Artificial Sequence
  Description of Artificial Sequence: Synthetic oligonucleotide
  Sense strand starting at position 134 of SEQ ID NO: 584857
auccuaugucugcgcuaaa

SEQ ID NO: 594731 - RNA, 19 nt, Artificial Sequence
  Description of Artificial Sequence: Synthetic oligonucleotide
  Antisense strand to SEQ ID NO: 594730
uuuagcgcagacauaggau

SEQ ID NO: 594732 - RNA, 19 nt, Artificial Sequence
  Description of Artificial Sequence: Synthetic oligonucleotide
  Sense strand starting at position 137 of SEQ ID NO: 584857
cuaugucugcgcuaaacua

SEQ ID NO: 594733 - RNA, 19 nt, Artificial Sequence
  Description of Artificial Sequence: Synthetic oligonucleotide
  Antisense strand to SEQ ID NO: 594732
uaguuuagcgcagacauag

SEQ ID NO: 594734 - RNA, 19 nt, Artificial Sequence
  Description of Artificial Sequence: Synthetic oligonucleotide
  Sense strand starting at position 270 of SEQ ID NO: 584857
gagaaagggcgaugugacu

SEQ ID NO: 594735 - RNA, 19 nt, Artificial Sequence
  Description of Artificial Sequence: Synthetic oligonucleotide
  Antisense strand to SEQ ID NO: 594734
agucacaucgcccuuucuc

SEQ ID NO: 594736 - RNA, 19 nt, Artificial Sequence
  Description of Artificial Sequence: Synthetic oligonucleotide
  Sense strand starting at position 293 of SEQ ID NO: 584857
ccggguuugccacagaaca

SEQ ID NO: 594737 - RNA, 19 nt, Artificial Sequence
  Description of Artificial Sequence: Synthetic oligonucleotide
  Antisense strand to SEQ ID NO: 594736
uguucuguggcaaacccgg

SEQ ID NO: 594738 - RNA, 19 nt, Artificial Sequence
  Description of Artificial Sequence: Synthetic oligonucleotide
  Sense strand starting at position 295 of SEQ ID NO: 584857
ggguuugccacagaacauu

SEQ ID NO: 594739 - RNA, 19 nt, Artificial Sequence
  Description of Artificial Sequence: Synthetic oligonucleotide
  Antisense strand to SEQ ID NO: 594738
aauguucuguggcaaaccc

SEQ ID NO: 594740 - RNA, 19 nt, Artificial Sequence
  Description of Artificial Sequence: Synthetic oligonucleotide
  Sense strand starting at position 327 of SEQ ID NO: 584857
cauuuagccgcccgugaau

SEQ ID NO: 594741 - RNA, 19 nt, Artificial Sequence
  Description of Artificial Sequence: Synthetic oligonucleotide
  Antisense strand to SEQ ID NO: 594740
auucacgggcggcuaaaug

SEQ ID NO: 594742 - RNA, 19 nt, Artificial Sequence
  Description of Artificial Sequence: Synthetic oligonucleotide
  Sense strand starting at position 329 of SEQ ID NO: 584857
uuuagccgcccgugaauuu

SEQ ID NO: 594743 - RNA, 19 nt, Artificial Sequence
  Description of Artificial Sequence: Synthetic oligonucleotide
  Antisense strand to SEQ ID NO: 594742
aaauucacgggcggcuaaa

SEQ ID NO: 594744 - RNA, 19 nt, Artificial Sequence
  Description of Artificial Sequence: Synthetic oligonucleotide
  Sense strand starting at position 433 of SEQ ID NO: 584857
uugggcugcauugaucaaa

SEQ ID NO: 594745 - RNA, 19 nt, Artificial Sequence
  Description of Artificial Sequence: Synthetic oligonucleotide
  Antisense strand to SEQ ID NO: 594744
uuugaucaaugcagcccaa

SEQ ID NO: 594746 - RNA, 19 nt, Artificial Sequence
  Description of Artificial Sequence: Synthetic oligonucleotide
  Sense strand starting at position 436 of SEQ ID NO: 584857
ggcugcauugaucaaaggu

SEQ ID NO: 594747 - RNA, 19 nt, Artificial Sequence
  Description of Artificial Sequence: Synthetic oligonucleotide
  Antisense strand to SEQ ID NO: 594746
accuuugaucaaugcagcc

SEQ ID NO: 594748 - RNA, 19 nt, Artificial Sequence
  Description of Artificial Sequence: Synthetic oligonucleotide
  Sense strand starting at position 617 of SEQ ID NO: 584857
ugccguggauaccucuaaa

SEQ ID NO: 594749 - RNA, 19 nt, Artificial Sequence
  Description of Artificial Sequence: Synthetic oligonucleotide
  Antisense strand to SEQ ID NO: 594748
uuuagagguauccacggca

SEQ ID NO: 594750 - RNA, 19 nt, Artificial Sequence
  Description of Artificial Sequence: Synthetic oligonucleotide
  Sense strand starting at position 620 of SEQ ID NO: 584857
cguggauaccucuaaacau

SEQ ID NO: 594751 - RNA, 19 nt, Artificial Sequence
  Description of Artificial Sequence: Synthetic oligonucleotide
  Antisense strand to SEQ ID NO: 594750
auguuuagagguauccacg

SEQ ID NO: 594752 - RNA, 19 nt, Artificial Sequence
  Description of Artificial Sequence: Synthetic oligonucleotide
  Sense strand starting at position 810 of SEQ ID NO: 584857
uugaguuaaccuggccaga

SEQ ID NO: 594753 - RNA, 19 nt, Artificial Sequence
  Description of Artificial Sequence: Synthetic oligonucleotide
  Antisense strand to SEQ ID NO: 594752
ucuggccagguuaacucaa

SEQ ID NO: 594754 - RNA, 19 nt, Artificial Sequence
  Description of Artificial Sequence: Synthetic oligonucleotide
  Sense strand starting at position 1127 of SEQ ID NO: 584857
uguucucgucauuacguua

SEQ ID NO: 594755 - RNA, 19 nt, Artificial Sequence
  Description of Artificial Sequence: Synthetic oligonucleotide
  Antisense strand to SEQ ID NO: 594754
uaacguaaugacgagaaca

SEQ ID NO: 594756 - RNA, 19 nt, Artificial Sequence
  Description of Artificial Sequence: Synthetic oligonucleotide
  Sense strand starting at position 2388 of SEQ ID NO: 584857
agucuauuccgcgagguuu

SEQ ID NO: 594757 - RNA, 19 nt, Artificial Sequence
  Description of Artificial Sequence: Synthetic oligonucleotide
  Antisense strand to SEQ ID NO: 594756
aaaccucgcggaauagacu

SEQ ID NO: 594758 - RNA, 19 nt, Artificial Sequence
  Description of Artificial Sequence: Synthetic oligonucleotide
  Sense strand starting at position 2390 of SEQ ID NO: 584857
ucuauuccgcgagguuuaa

SEQ ID NO: 594759 - RNA, 19 nt, Artificial Sequence
  Description of Artificial Sequence: Synthetic oligonucleotide
  Antisense strand to SEQ ID NO: 594758
uuaaaccucgcggaauaga

SEQ ID NO: 594760 - RNA, 19 nt, Artificial Sequence
  Description of Artificial Sequence: Synthetic oligonucleotide
  Sense strand starting at position 2858 of SEQ ID NO: 584857
ccgggaauucuuggaggca

SEQ ID NO: 594761 - RNA, 19 nt, Artificial Sequence
  Description of Artificial Sequence: Synthetic oligonucleotide
  Antisense strand to SEQ ID NO: 594760
ugccuccaagaauucccgg

SEQ ID NO: 594762 - RNA, 19 nt, Artificial Sequence
  Description of Artificial Sequence: Synthetic oligonucleotide
  Sense strand starting at position 2903 of SEQ ID NO: 584857
cgaagaggucaucgcuagu

SEQ ID NO: 594763 - RNA, 19 nt, Artificial Sequence
  Description of Artificial Sequence: Synthetic oligonucleotide
  Antisense strand to SEQ ID NO: 594762
acuagcgaugaccucuucg

SEQ ID NO: 594764 - RNA, 19 nt, Artificial Sequence
  Description of Artificial Sequence: Synthetic oligonucleotide
  Sense strand starting at position 2906 of SEQ ID NO: 584857
agaggucaucgcuaguaag

SEQ ID NO: 594765 - RNA, 19 nt, Artificial Sequence
  Description of Artificial Sequence: Synthetic oligonucleotide
  Antisense strand to SEQ ID NO: 594764
cuuacuagcgaugaccucu

SEQ ID NO: 594766 - RNA, 19 nt, Artificial Sequence
  Description of Artificial Sequence: Synthetic oligonucleotide
  Sense strand starting at position 2982 of SEQ ID NO: 584857
cuaaguugaugcuuuaacu

SEQ ID NO: 594767 - RNA, 19 nt, Artificial Sequence
  Description of Artificial Sequence: Synthetic oligonucleotide
  Antisense strand to SEQ ID NO: 594766
aguuaaagcaucaacuuag

SEQ ID NO: 594768 - RNA, 19 nt, Artificial Sequence
  Description of Artificial Sequence: Synthetic oligonucleotide
  Sense strand starting at position 3018 of SEQ ID NO: 584857
gcgauuaaaucacuauacu

SEQ ID NO: 594769 - RNA, 19 nt, Artificial Sequence
  Description of Artificial Sequence: Synthetic oligonucleotide
  Antisense strand to SEQ ID NO: 594768
aguauagugauuuaaucgc

SEQ ID NO: 594770 - RNA, 19 nt, Artificial Sequence
  Description of Artificial Sequence: Synthetic oligonucleotide
  Sense strand starting at position 3099 of SEQ ID NO: 584857
ugauguaauguaggcguuu

SEQ ID NO: 594771 - RNA, 19 nt, Artificial Sequence
  Description of Artificial Sequence: Synthetic oligonucleotide
  Antisense strand to SEQ ID NO: 594770
aaacgccuacauuacauca

SEQ ID NO: 594772 - RNA, 19 nt, Artificial Sequence
  Description of Artificial Sequence: Synthetic oligonucleotide
  Sense strand starting at position 3100 of SEQ ID NO: 584857
gauguaauguaggcguuua

SEQ ID NO: 594773 - RNA, 19 nt, Artificial Sequence
  Description of Artificial Sequence: Synthetic oligonucleotide
  Antisense strand to SEQ ID NO: 594772
uaaacgccuacauuacauc

SEQ ID NO: 594774 - RNA, 19 nt, Artificial Sequence
  Description of Artificial Sequence: Synthetic oligonucleotide
  Sense strand starting at position 3313 of SEQ ID NO: 584857
gguguaaucagacgauaua

SEQ ID NO: 594775 - RNA, 19 nt, Artificial Sequence
  Description of Artificial Sequence: Synthetic oligonucleotide
  Antisense strand to SEQ ID NO: 594774
uauaucgucugauuacacc

SEQ ID NO: 594776 - RNA, 19 nt, Artificial Sequence
  Description of Artificial Sequence: Synthetic oligonucleotide
  Sense strand starting at position 3314 of SEQ ID NO: 584857
guguaaucagacgauauau

SEQ ID NO: 594777 - RNA, 19 nt, Artificial Sequence
  Description of Artificial Sequence: Synthetic oligonucleotide
  Antisense strand to SEQ ID NO: 594776
auauaucgucugauuacac

SEQ ID NO: 594778 - RNA, 19 nt, Artificial Sequence
  Description of Artificial Sequence: Synthetic oligonucleotide
  Sense strand starting at position 3346 of SEQ ID NO: 584857
cccugucuucuuggaaaug

SEQ ID NO: 594779 - RNA, 19 nt, Artificial Sequence
  Description of Artificial Sequence: Synthetic oligonucleotide
  Antisense strand to SEQ ID NO: 594778
cauuuccaagaagacaggg

SEQ ID NO: 594780 - RNA, 19 nt, Artificial Sequence
  Description of Artificial Sequence: Synthetic oligonucleotide
  Sense strand starting at position 3357 of SEQ ID NO: 584857
uggaaaugucuugauucuc

SEQ ID NO: 594781 - RNA, 19 nt, Artificial Sequence
  Description of Artificial Sequence: Synthetic oligonucleotide
  Antisense strand to SEQ ID NO: 594780
gagaaucaagacauuucca

SEQ ID NO: 594782 - RNA, 19 nt, Artificial Sequence
  Description of Artificial Sequence: Synthetic oligonucleotide
  Sense strand starting at position 3363 of SEQ ID NO: 584857
ugucuugauucuccagcuu

SEQ ID NO: 594783 - RNA, 19 nt, Artificial Sequence
  Description of Artificial Sequence: Synthetic oligonucleotide
  Antisense strand to SEQ ID NO: 594782
aagcuggagaaucaagaca

SEQ ID NO: 594784 - RNA, 19 nt, Artificial Sequence
  Description of Artificial Sequence: Synthetic oligonucleotide
  Sense strand starting at position 3421 of SEQ ID NO: 584857
acuuauauggugcaagaua

SEQ ID NO: 594785 - RNA, 19 nt, Artificial Sequence
  Description of Artificial Sequence: Synthetic oligonucleotide
  Antisense strand to SEQ ID NO: 594784
uaucuugcaccauauaagu

SEQ ID NO: 594786 - RNA, 19 nt, Artificial Sequence
  Description of Artificial Sequence: Synthetic oligonucleotide
  Sense strand starting at position 3634 of SEQ ID NO: 584857
ucaucuauggaucguagaa

SEQ ID NO: 594787 - RNA, 19 nt, Artificial Sequence
  Description of Artificial Sequence: Synthetic oligonucleotide
  Antisense strand to SEQ ID NO: 594786
uucuacgauccauagauga

SEQ ID NO: 594788 - RNA, 19 nt, Artificial Sequence
  Description of Artificial Sequence: Synthetic oligonucleotide
  Sense strand starting at position 3754 of SEQ ID NO: 584857
guccuaggcauuugagagu

SEQ ID NO: 594789 - RNA, 19 nt, Artificial Sequence
  Description of Artificial Sequence: Synthetic oligonucleotide
  Antisense strand to SEQ ID NO: 594788
acucucaaaugccuaggac

SEQ ID NO: 594790 - RNA, 19 nt, Artificial Sequence
  Description of Artificial Sequence: Synthetic oligonucleotide
  Sense strand starting at position 3757 of SEQ ID NO: 584857
cuaggcauuugagagugaa

SEQ ID NO: 594791 - RNA, 19 nt, Artificial Sequence
  Description of Artificial Sequence: Synthetic oligonucleotide
  Antisense strand to SEQ ID NO: 594790
uucacucucaaaugccuag

SEQ ID NO: 594792 - RNA, 19 nt, Artificial Sequence
  Description of Artificial Sequence: Synthetic oligonucleotide
  Sense strand starting at position 3784 of SEQ ID NO: 584857
gauuauagacugugggauu

SEQ ID NO: 594793 - RNA, 19 nt, Artificial Sequence
  Description of Artificial Sequence: Synthetic oligonucleotide
  Antisense strand to SEQ ID NO: 594792
aaucccacagucuauaauc

SEQ ID NO: 594794 - RNA, 19 nt, Artificial Sequence
  Description of Artificial Sequence: Synthetic oligonucleotide
  Sense strand starting at position 3802 of SEQ ID NO: 584857
ucaugaauuuaugagauca

SEQ ID NO: 594795 - RNA, 19 nt, Artificial Sequence
  Description of Artificial Sequence: Synthetic oligonucleotide
  Antisense strand to SEQ ID NO: 594794
ugaucucauaaauucauga

SEQ ID NO: 594796 - RNA, 19 nt, Artificial Sequence
  Description of Artificial Sequence: Synthetic oligonucleotide
  Sense strand starting at position 3822 of SEQ ID NO: 584857
aggcuuucuguugguccaa

SEQ ID NO: 594797 - RNA, 19 nt, Artificial Sequence
  Description of Artificial Sequence: Synthetic oligonucleotide
  Antisense strand to SEQ ID NO: 594796
uuggaccaacagaaagccu

SEQ ID NO: 594798 - RNA, 19 nt, Artificial Sequence
  Description of Artificial Sequence: Synthetic oligonucleotide
  Sense strand starting at position 3823 of SEQ ID NO: 584857
ggcuuucuguugguccaaa

SEQ ID NO: 594799 - RNA, 19 nt, Artificial Sequence
  Description of Artificial Sequence: Synthetic oligonucleotide
  Antisense strand to SEQ ID NO: 594798
uuuggaccaacagaaagcc

SEQ ID NO: 594800 - RNA, 19 nt, Artificial Sequence
  Description of Artificial Sequence: Synthetic oligonucleotide
  Sense strand starting at position 3824 of SEQ ID NO: 584857
gcuuucuguugguccaaau

SEQ ID NO: 594801 - RNA, 19 nt, Artificial Sequence
  Description of Artificial Sequence: Synthetic oligonucleotide
  Antisense strand to SEQ ID NO: 594800
auuuggaccaacagaaagc

SEQ ID NO: 594802 - RNA, 19 nt, Artificial Sequence
  Description of Artificial Sequence: Synthetic oligonucleotide
  Sense strand starting at position 3871 of SEQ ID NO: 584857
gaaucuauuucucaugggu

SEQ ID NO: 594803 - RNA, 19 nt, Artificial Sequence
  Description of Artificial Sequence: Synthetic oligonucleotide
  Antisense strand to SEQ ID NO: 594802
acccaugagaaauagauuc

SEQ ID NO: 594804 - RNA, 19 nt, Artificial Sequence
  Description of Artificial Sequence: Synthetic oligonucleotide
  Sense strand starting at position 3873 of SEQ ID NO: 584857
aucuauuucucauggguaa

SEQ ID NO: 594805 - RNA, 19 nt, Artificial Sequence
  Description of Artificial Sequence: Synthetic oligonucleotide
  Antisense strand to SEQ ID NO: 594804
uuacccaugagaaauagau

SEQ ID NO: 594806 - RNA, 19 nt, Artificial Sequence
  Description of Artificial Sequence: Synthetic oligonucleotide
  Sense strand starting at position 3961 of SEQ ID NO: 584857
aguggucauuuagaagagu

SEQ ID NO: 594807 - RNA, 19 nt, Artificial Sequence
  Description of Artificial Sequence: Synthetic oligonucleotide
  Antisense strand to SEQ ID NO: 594806
acucuucuaaaugaccacu

SEQ ID NO: 594808 - RNA, 19 nt, Artificial Sequence
  Description of Artificial Sequence: Synthetic oligonucleotide
  Sense strand starting at position 372 of SEQ ID NO: 584858
ugccuuucugcagacagga

SEQ ID NO: 594809 - RNA, 19 nt, Artificial Sequence
  Description of Artificial Sequence: Synthetic oligonucleotide
  Antisense strand to SEQ ID NO: 594808
uccugucugcagaaaggca

SEQ ID NO: 594810 - RNA, 19 nt, Artificial Sequence
  Description of Artificial Sequence: Synthetic oligonucleotide
  Sense strand starting at position 429 of SEQ ID NO: 584858
agcuguagccauuaacaug

SEQ ID NO: 594811 - RNA, 19 nt, Artificial Sequence
  Description of Artificial Sequence: Synthetic oligonucleotide
  Antisense strand to SEQ ID NO: 594810
cauguuaauggcuacagcu

SEQ ID NO: 594812 - RNA, 19 nt, Artificial Sequence
  Description of Artificial Sequence: Synthetic oligonucleotide
  Sense strand starting at position 587 of SEQ ID NO: 584858
aguuucuauguuggaucaa

SEQ ID NO: 594813 - RNA, 19 nt, Artificial Sequence
  Description of Artificial Sequence: Synthetic oligonucleotide
  Antisense strand to SEQ ID NO: 594812
uugauccaacauagaaacu

SEQ ID NO: 594814 - RNA, 19 nt, Artificial Sequence
  Description of Artificial Sequence: Synthetic oligonucleotide
  Sense strand starting at position 699 of SEQ ID NO: 584858
uguauacguguguuugcau

SEQ ID NO: 594815 - RNA, 19 nt, Artificial Sequence
  Description of Artificial Sequence: Synthetic oligonucleotide
  Antisense strand to SEQ ID NO: 594814
augcaaacacacguauaca

SEQ ID NO: 594816 - RNA, 19 nt, Artificial Sequence
  Description of Artificial Sequence: Synthetic oligonucleotide
  Sense strand starting at position 711 of SEQ ID NO: 584858
uuugcauguguguagggau

SEQ ID NO: 594817 - RNA, 19 nt, Artificial Sequence
  Description of Artificial Sequence: Synthetic oligonucleotide
  Antisense strand to SEQ ID NO: 594816
aucccuacacacaugcaaa

SEQ ID NO: 594818 - RNA, 19 nt, Artificial Sequence
  Description of Artificial Sequence: Synthetic oligonucleotide
  Sense strand starting at position 772 of SEQ ID NO: 584858
ccacauuucugcccaguau

SEQ ID NO: 594819 - RNA, 19 nt, Artificial Sequence
  Description of Artificial Sequence: Synthetic oligonucleotide
  Antisense strand to SEQ ID NO: 594818
auacugggcagaaaugugg

SEQ ID NO: 594820 - RNA, 19 nt, Artificial Sequence
  Description of Artificial Sequence: Synthetic oligonucleotide
  Sense strand starting at position 784 of SEQ ID NO: 584858
ccaguaucucuugggacca

SEQ ID NO: 594821 - RNA, 19 nt, Artificial Sequence
  Description of Artificial Sequence: Synthetic oligonucleotide
  Antisense strand to SEQ ID NO: 594820
uggucccaagagauacugg

SEQ ID NO: 594822 - RNA, 19 nt, Artificial Sequence
  Description of Artificial Sequence: Synthetic oligonucleotide
  Sense strand starting at position 820 of SEQ ID NO: 584858
gacagaaggucagaaauua

SEQ ID NO: 594823 - RNA, 19 nt, Artificial Sequence
  Description of Artificial Sequence: Synthetic oligonucleotide
  Antisense strand to SEQ ID NO: 594822
uaauuucugaccuucuguc

SEQ ID NO: 594824 - RNA, 19 nt, Artificial Sequence
  Description of Artificial Sequence: Synthetic oligonucleotide
  Sense strand starting at position 828 of SEQ ID NO: 584858
gucagaaauuaauccaguu

SEQ ID NO: 594825 - RNA, 19 nt, Artificial Sequence
  Description of Artificial Sequence: Synthetic oligonucleotide
  Antisense strand to SEQ ID NO: 594824
aacuggauuaauuucugac

SEQ ID NO: 594826 - RNA, 19 nt, Artificial Sequence
  Description of Artificial Sequence: Synthetic oligonucleotide
  Sense strand starting at position 1085 of SEQ ID NO: 584858
gcugauuucugacauaaga

SEQ ID NO: 594827 - RNA, 19 nt, Artificial Sequence
  Description of Artificial Sequence: Synthetic oligonucleotide
  Antisense strand to SEQ ID NO: 594826
ucuuaugucagaaaucagc

SEQ ID NO: 594828 - RNA, 19 nt, Artificial Sequence
  Description of Artificial Sequence: Synthetic oligonucleotide
  Sense strand starting at position 1110 of SEQ ID NO: 584858
agagauuauuguccuuaug
